United States Patent Application Publication US 2007/0054278 A1 - sequence listing, part 131

SEQ ID NO: 341610 - DNA, 201 bp, Homo sapiens
ttcccatttaccttcttgacagatctggcaaactgaagcagcacaactacaatggaggaaaagagactctgggccatttgtgtgtttgccatcccccctctcccccccccccttttttttttttgagactgtgtctcattctgtcacccaggctggagtgcacattcaagtgatcctctggcctcagcctccagagtagct

SEQ ID NO: 341611 - DNA, 201 bp, Homo sapiens; identical to SEQ ID NO: 72017

SEQ ID NO: 341612 - DNA, 201 bp, Homo sapiens
tggtggctcatgcctgtaatcccagcactttgggaggccgaggtgggagaatcacaaggtctggagtttgagaccagcctggccaacatggtgaaatcccrtctcaactaaagatacaaaaaatagcagggcacggtggctcacacctgtaatctcagcattttgggaggctgaggcaggcggatcacaaggtcaggagtt

SEQ ID NO: 341613 - DNA, 201 bp, Homo sapiens
tcttcctttcttttaggcagtttaatttttatagaaattgaaactatcatagaaaaaagctaaaattatcctggttacattggagaaaaagtatatatagmatcagtagaaatttgtattgcagtatacttgacttatttgagaaaggaaacaaaagacttcacatttctttctccgtatttttcttttatttcagttatc

SEQ ID NO: 341614 - DNA, 201 bp, Homo sapiens
gggttacagaaaacattaaaatttgactttatctctttctcttttttaatgtggctactagaaaatataaaattacatacatggcttgcatttgtggttcrtattatatttctttctttttttttttttgagacggagtcagtctgtcacccaggctggagtgcagtggcgcgatctcggctcactgcaactcactgcaag

SEQ ID NO: 341615 - DNA, 201 bp, Homo sapiens
ctagatattgtgccaaaatgctttacatttattatctcatttaatcttcacagcagtcctctgaggctagatactattattatcccattttcttacgtcaktgtatttactttgcacaggaacatatattacaccttgtaatctgggaaaacaaaactttttataataatctggtaatctaggctttggagcaataaaatt

SEQ ID NO: 341616 - DNA, 201 bp, Homo sapiens
aaaaatggcttaagctgttctggcaggacctatgagtagggagatgtcccatgcttacaatcttgtcataggtgaacctgatgcagcacatgaagctcagyacctcacgagacttcaagatcaaaggaaacatcctagacatggttcttcgagaggatggcgaagatgaaaatgaagaggtcagtgctggcttctgtctgg

SEQ ID NO: 341617 - DNA, 201 bp, Homo sapiens
tataacagtttgactaggaatcctcactttattgctttggtataactacataaagctttgtctataacatatagcatagattaaatattaggaacactagrtatcatttgtgtgttattatccccattttaaagacagggaaactgaggctgagccaggttaaataacttgcccaaggttaaataaccaagaaagggtgga

SEQ ID NO: 341618 - DNA, 201 bp, Homo sapiens; identical to SEQ ID NO: 72028

SEQ ID NO: 341619 - DNA, 201 bp, Homo sapiens
taaatattaggaacactaggtatcatttgtgtgttattatccccattttaaagacagggaaactgaggctgagccaggttaaataacttgcccaaggttawataaccaagaaagggtggaagaaggatttggcctcaggcagtatgaactacattactgtgatgcctggagtaaggattaggaattcttggtctataattg

SEQ ID NO: 341620 - DNA, 201 bp, Homo sapiens
tgtggtagcatatgtgaaaacaacattcatctttctgtacatttccatcagagctcttagatgcctaggtgcactatcaatgagcagtaatattttgagargaatctttttttttctgagcagtaggtctcaacagtgggcttaaaatattcagcaaaccatgctataaacagatgtgttatcatgcaggctttgcttttc

SEQ ID NO: 341621 - DNA, 201 bp, Homo sapiens
gatccttttacacttaaataataatttttggttactaaatctattgattttcttcctctgagatgtcttctattacttttttttttttttttaagagacaragtcttcctctgttatccaggctggagtgcactagtgcagtctaactcactgcagcctccagctcctaggctcaaataatcctcttgcctcagccccatc

SEQ ID NO: 341622 - DNA, 201 bp, Homo sapiens
agcacccattgcataataggtatgaaatattcagttaacagggaaggaaaacaaatcaagtttgtttatttctggaatcttcacccacctctgacgttttycccttgtagttctgtgatatgagcaacaatggaccagaagattttatctctagcagcagaaaaaacagcagacaaactgcaagaatttcttcaaaccctg

SEQ ID NO: 341623 - DNA, 201 bp, Homo sapiens
agcatgttctgctaaaagtaaatgtcaggcatgatgacacattcaaaggacatgtgagaaagaaaaattacgctgcttcttcatctactccccattcactrtaggagacaaggatttatttaataataatttatagatgtaaagaaattggggtgagggaatgagagaaatagactacttgagggcatttgtgaccaagtt

SEQ ID NO: 341624 - DNA, 201 bp, Homo sapiens
gtaaatgtcaggcatgatgacacattcaaaggacatgtgagaaagaaaaattacgctgcttcttcatctactccccattcactgtaggagacaaggatttrtttaataataatttatagatgtaaagaaattggggtgagggaatgagagaaatagactacttgagggcatttgtgaccaagtttaaacctgaaatagttt

SEQ ID NO: 341625 - DNA, 201 bp, Homo sapiens
gtcctaaataccatcagattcctgcagtacttgaatctcctttactgtttgcttaaaccagttttttaacctcaccactattgacatgttgcgctagatarttctttgttgtgggacctgttctgtgcattttgggatgttgagtagcatccctggcctccacctaccagatgccagtagcagccccctagttttaacagc

SEQ ID NO: 341626 - DNA, 201 bp, Homo sapiens
ggcatgtatgtggcacctgattgagaatgaatgcctcttttaaataccttctaaggtttaatctaaactataactatcctagaattaaatctgggcccatratgcatagaaattataccatttctaaccagtctggacacttaaagagatgtttattccttttttcattcctttaacatgtaggtgttaaatgccttatag

SEQ ID NO: 341627 - DNA, 201 bp, Homo sapiens; identical to SEQ ID NO: 72021

SEQ ID NO: 341628 - DNA, 201 bp, Homo sapiens; identical to SEQ ID NO: 72023

SEQ ID NO: 341629 - DNA, 201 bp, Homo sapiens; identical to SEQ ID NO: 72025

SEQ ID NO: 341630 - DNA, 201 bp, Homo sapiens
agtcttccaaagtgctgggattaaaagcatgagctaccgtgcccggcccatctttattattattttatctgtagaaagtccaaatccttccaatgaatatwcactaacattttctttgaggtttttttttttatgcatttgtttttgacgtttagctacttaattcatcctgaatttgtatgataatatatatgaggagct

SEQ ID NO: 341631 - DNA, 201 bp, Homo sapiens
ctcagctcactgcaaccttcatacctcagcctcccgagtagctgtgattacaggcatgtgccaccacacctggctaatttttgtattttttagtagagacrgggttttgctgtgttggccaggctggtctcgagctcttggcctcaagtgatccgcctgtctcagcctcccacagtgctgggattacaggtgtgagttact

SEQ ID NO: 341632 - DNA, 201 bp, Homo sapiens
gcatgtgccaccacacctggctaatttttgtattttttagtagagacggggttttgctgtgttggccaggctggtctcgagctcttggcctcaagtgatcygcctgtctcagcctcccacagtgctgggattacaggtgtgagttacttcacctggcttccccaggattttactctgagcagttcttaactaagactagga

SEQ ID NO: 341633 - DNA, 201 bp, Homo sapiens
tggagttctttagtagcttgttaatttttatcttgtgtcttttaggataaatcagcagatttttctcagagcaccagtattggcataaaaaataatatctstgcttttcttgtgatgggagtttgtgaggttttaatagaatacaatttctccataagtagtttcaggtaaggttttgctataactccatttgtaatttga

SEQ ID NO: 341634 - DNA, 201 bp, Homo sapiens
agaactttgggaggccaagctgggtgtatcacttgaggtcaggagttcaagaccagcctggccaacatggtgaaaccccatctctactaataatgtaaaamttagccaggtgttagtgcctgggaactgtagtcctagctactcgggaggctgaggcaggggaatcacttgagcctgggaggcggaggttgcagtgagcca

SEQ ID NO: 341635 - DNA, 201 bp, Homo sapiens
gtatcacttgaggtcaggagttcaagaccagcctggccaacatggtgaaaccccatctctactaataatgtaaaacttagccaggtgttagtgcctgggamctgtagtcctagctactcgggaggctgaggcaggggaatcacttgagcctgggaggcggaggttgcagtgagccaaggtcacaccaggggaaacaaaacc

SEQ ID NO: 341636 - DNA, 201 bp, Homo sapiens
gggaggcggaggttgcagtgagccaaggtcacaccaggggaaacaaaacccagatagattgctgtgacctgggagtattatattaatgaagttctattcayttataatgttacgtctaaaatatgacatttaaagaagcattgtgattattatcatatgtaaaagtaaaccacaatattctgatgtttgtccttagcggtc

SEQ ID NO: 341637 - DNA, 201 bp, Homo sapiens
gcggtctcttttttgttttttacagtaagaataggtttgaggacattctgagcttatttatgtgttacaaaaaactctctgacattcttaatgaaaaagckggtaaagccaaaactaaaatggccaacaagacaagtgatagtcttttgtccatgaaatttgtgtccagtcttctcactgctcttttcaggtaaggttctg

SEQ ID NO: 341638 - DNA, 201 bp, Homo sapiens
tgttttggctttttttttggctttttttgagagagtctcgctctattgcccagggtggaatgccgtggtgcaatctcggctcactacaaccccttcctccsaggttcaagcagtccttccactgcagctttctgagtagctgggactacaggtgcacaccaccatgcccaactactttttaatttttaattttagtttatt

SEQ ID NO: 341639 - DNA, 201 bp, Homo sapiens
aatagataatagaatattaacgattttatgccagtaaacttttaagtttaatggacagatttcttgaaagctcactcaacaaaaaataggcaacctggccrggcgtggtagctcacatctgtaatcccagcacttttgggaggccgaagcaggtggatcacctgaggtcagcagttcaagaccagtctggccaacatggtg

SEQ ID NO: 341640 - DNA, 201 bp, Homo sapiens
acacattcaaaggacatgtgagaaagaaaaattacgctgcttcttcatctactccccattcactgtaggagacaaggatttatttaataataatttatagrtgtaaagaaattggggtgagggaatgagagaaatagactacttgagggcatttgtgaccaagtttaaacctgaaatagtttaagaatagaatgcttttac

SEQ ID NO: 341641 - DNA, 201 bp, Homo sapiens
ttttcttttttaactaagctttgtgttcttgtagcgttcatagctgggaccatgttactcagggcctcgtagaacttggtttcattttgatggattcataygggccaaagaaggttcttgatggaaaaactattgaaaccagcccaagtctttctagaatgccaaaccagcatgcatgtaagctcggagctaatatcctgt

SEQ ID NO: 341642 - DNA, 201 bp, Homo sapiens
ctctctctagggatagtatccaaagccaccaagaaagcctttctgttctcaggtccagcaatgagtttatgcgctatgcagtgaatgtagctctgcagaargtacagcagctaaaggaaacagggcatgtgagtggccctgatggccaaaacccagaaaagatctttcagaacctctgtgacataactcggtaagccactc

SEQ ID NO: 341643 - DNA, 201 bp, Homo sapiens
tattttcagattttatcctcttagaattttggtagctttgaattctttctgtcctagtcttaggagtctctgactagatgcctcttcttcctgataggaasgtgtctgctaacattgcttgctgtgtgtgccttcctttctcagaggtccttgttgaatttacttagcagtcaagaggaagattttaatagcaaagaagcc

SEQ ID NO: 341644 - DNA, 201 bp, Homo sapiens
tcttgtcataggtgaacctgatgcagcacatgaagctcagcacctcacgagacttcaagatcaaaggaaacatcctagacatggttcttcgagaggatggygaagatgaaaatgaagaggtcagtgctggcttctgtctggagcccagccactcttcctagctggttagcagcctatctgggagcagtcacagattagtgg

SEQ ID NO: 341645 - DNA, 201 bp, Homo sapiens
ttttaaatagcccatagtcaaaaagtcgtcagggaaattagaaaacatcttgaatagaatggaaacaaacagacaacatgtcaaaagatatgatccagccraagtgctattgaggaaattaaagcagttagtgatttaaaaatctcagatctcccatataaacttccacattaagaaaatagaaaaagaagagcaaattat

SEQ ID NO: 341646 - DNA, 201 bp, Homo sapiens
ctgggtttttgctgctcctgaagaactttaaagttttaggcagcctgtcatcctctcagtgcagtcagtctctcagtgtcagtcaggtaaggattatttaygttaacttgcagtgtgtgcgtatcattcatgtgcatcgatgaaatgcacgctgttttcttttattcctgttatggttgtaagaatgatcctagaactaaa

SEQ ID NO: 341647 - DNA, 201 bp, Homo sapiens
ggtttcaccatgttggccaggctggtctcgaactcctgacctcaggtgatccaccaccctggcctcccaaagtgctgggtttacaggcgtgagccactgcmcctggcccttattttttttttttaattttctgtagagataggatttcaccatattgcccaggctggtcttgaactcctgggctcaagcgatacgcccatc

SEQ ID NO: 341648 - DNA, 201 bp, Homo sapiens
ataggcaacctggccgggcgtggtagctcacatctgtaatcccagcacttttgggaggccgaagcaggtggatcacctgaggtcagcagttcaagaccagyctggccaacatggtgaaaccccagctctactaaaaaaaatacaaaaattagctgggcgtggtggtatgcacttgtagtcccagctactcaggaagctgag

SEQ ID NO: 341649 - DNA, 201 bp, Homo sapiens
ggaggccgaagcaggtggatcacctgaggtcagcagttcaagaccagtctggccaacatggtgaaaccccagctctactaaaaaaaatacaaaaattagcygggcgtggtggtatgcacttgtagtcccagctactcaggaagctgaggcaggaagaccacttgaatctgggaggtgtgagtttgcagtgagatcacccca

SEQ ID NO: 341650 - DNA, 201 bp, Homo sapiens
cactgtttgagttgatgtaaacagaaaggagtcttcaaggcatagagtctgtgtttttgttttctgagtctgtggtataatttggcttggtctgacagacwacgtaaacactggacaataaagtttgttagtttctaaccaatagttgtcaaaatatcaggatgttctatcacaggagttttttatttaacaagtaattct

SEQ ID NO: 341651 - DNA, 201 bp, Homo sapiens
aggaagattttaatagcaaagaagccctcctgctagtcacggttcttaccagtttgtccaagttactggagccctcctctcctcaggtactagtaccgctmacttaatcccatttagcattcctcagaaggcaaggattattgcatcataaaagtgtatatctaaatgtcctcttgaaattgagcttattttacataatgt

SEQ ID NO: 341652 - DNA, 201 bp, Homo sapiens
atcatgagttaagtattgaaaaaagtcagttgaatttctgtactataaattgctttgaacagctgataccttattttgagtacataaattcactttgtttkgctctacgcttcattgtttatacatatgccttctctgtatgcaactagctggatttttctgacccagaagcatattcctgtgaaatagtactgtttgtta

SEQ ID NO: 341653 - DNA, 201 bp, Homo sapiens
ggatgatctcgatctcctgacctcgtgattcacccgcctcggcctcccaaagtgctgggattacaggtgtgagccaccgcgcctggccaaaaatttttaawtttaattttgaatgggtaataaagtcctatgatttgaaaaccagagattatcaagagatttatggtaaatggtgtcccccacccatgtcctccatctgtt

SEQ ID NO: 341654 - DNA, 201 bp, Homo sapiens
agatgaagttcaaaattagacaaaatttatctgtgatgttagaagtcaggatagcagtttccttggcggggcaagttaggagggagtccctagaatactcrtaatgtacttgatctggatgctagttacacagtaatcttaactaatgatgggaaatgtctgccttctttgggcatgtggataaagaggcatcattgcaga

SEQ ID NO: 341655 - DNA, 201 bp, Homo sapiens
atcttggccaggaaggtctggatgtcttgacctagtgatccgcccgccttggcctcccaaagtgctgagattacaggcgtgagctactgcgcctggcctaractgagcttttgaggagatgtggattgagctaagatctgaaggatttgtaggaattagtaataaaagattggggggcagtggatggaagcaggaatattt

SEQ ID NO: 341656 - DNA, 201 bp, Homo sapiens
ccagcttgatgcccgaaaatctgcagttgctgggtttttgctgctcctgaagaactttaaagttttaggcagcctgtcatcctctcagtgcagtcagtctstcagtgtcagtcaggtaaggattatttatgttaacttgcagtgtgtgcgtatcattcatgtgcatcgatgaaatgcacgctgttttcttttattcctgtt

SEQ ID NO: 341657 - DNA, 201 bp, Homo sapiens
tatattaccacttgagatctaaggacatgttttggcagctgatttgcttagatatggaaaggtctagaactcttctgttctgacaacacctaggtctatcyctggcatgtttctttaatatctgaatgatctctaatttagtttgtgcagatgttatcctggacatcaaagatttgcaaggaaaacagccggggtaagttt

SEQ ID NO: 341658 - DNA, 201 bp, Homo sapiens
atttcaaatcttgtttcaacatgaaagtgttctatacattcttagtttgagtctaagtcatagattatttatttaaatttgtactggagaattctttaagytgaaaactactttgaattcaaattggttattttgctgttaattgggagaccttaccaattttgtattgttttcagggaagcagaaagagtgttttggaag

SEQ ID NO: 341659 - DNA, 201 bp, Homo sapiens
aattttaatgagcatttaaatgcagtatctttgataggatgccaataaaggaaatccatttatgttgtctgggattgtcagttgtcaaaaaggctgtagcygttagtaaggaaagcaacaattaaccaataagtaaaacttccattttgctcaacattttctctttttgttaatacctctcaaatgagtgctgtcctgctg

SEQ ID NO: 341660 - DNA, 201 bp, Homo sapiens
accactaagaataacgattataaaagggcagccatagcagtgactatagcttgggctgcctagagagtctgccagtcggaacttactggcaagctctgttrggtgctgctgttctgaacaatttctagaaagcttaattccatataccaatagcagtaagggaatcttcctttttctttctctctctctgtctctctctag

SEQ ID NO: 341661 - DNA, 201 bp, Homo sapiens
cgcgctccgctgtctcccgccgcctgcctcagctttcgcggttccctcctaggggtgtgcctcagtcggagccccttctgttaaattcttcccccttggcsgagggtgagctcttacttctgagaaatttcccttaaccttgctttgcatttgttgtccggtcgcggtctccatcaccagctgcttcgtgttatagttttt

SEQ ID NO: 341662 - DNA, 201 bp, Homo sapiens
ttggagcaggtttatcacgttagagcattaattctttccccttctagggcactgcatcagagcatgggggacagaacaaagaaccagccaagaagaaaagraaaaaataaatgaaatgcctgagttaatgtgaactttggggcttctgcttcatttttacccaacaagcaacaatgccccttgtcctgtagtccacaccga

SEQ ID NO: 341663 - DNA, 201 bp, Homo sapiens
cacaaaaatcttttagatagcttcagttttttctctttttacaattgtgttacctctaatttatcagaaattggtttgagagactgactttccaaacattkttccaaacttagttttttttttttctttgggacagagtctcgctctgtcacccaggctggagtgcagtggcacaatctcggttcactgcagcctccatcc

SEQ ID NO: 341664 - DNA, 201 bp, Homo sapiens
cacaagaaagggtacttactgtagaattccgtttagatgaagttcaaaattagacaaaatttatctgtgatgttagaagtcaggatagcagtttccttggyggggcaagttaggagggagtccctagaatactcgtaatgtacttgatctggatgctagttacacagtaatcttaactaatgatgggaaatgtctgccttc

SEQ ID NO: 341665 - DNA, 201 bp, Homo sapiens
gctccgctgtctcccgccgcctgcctcagctttcgcggttccctcctaggggtgtgcctcagtcggagccccttctgttaaattcttcccccttggccgasggtgagctcttacttctgagaaatttcccttaaccttgctttgcatttgttgtccggtcgcggtctccatcaccagctgcttcgtgttatagtttttgta

SEQ ID NO: 341666 - DNA, 201 bp, Homo sapiens
acctgtgagctatccaggtagtactgtgtttgtttcttttaccatcttaacggtttctaagtgtatagttcagtaaagtcaagtatattcacaccgttacrcaacacatctccagaactttttcatcttgcaaaactgagactcggtacccattaagtaataactaattgcccctccccccaggccccataatcaccatcc

SEQ ID NO: 341667 - DNA, 201 bp, Homo sapiens
gaacagctgataccttattttgagtacataaattcactttgttttgctctacgcttcattgtttatacatatgccttctctgtatgcaactagctggattyttctgacccagaagcatattcctgtgaaatagtactgtttgttaacttctctatttctgagctagccagcttgatgcccgaaaatctgcagttgctgggt

SEQ ID NO: 341668 - DNA, 201 bp, Homo sapiens
aattggtgacagtatgtaagagagtttactggtgccatgagaggatgtactaggggaacgtttaacaacctatactgagcttttcttttcttttcttttcttttttttttgagacagagtctccctctgttgccaggctggagtgcagtggcgcgatctcggctcactgcaacctccgcctcctgagttcaagtgattctc

SEQ ID NO: 341669 - DNA, 201 bp, Homo sapiens
gacttatttttatgcccttcatcatatattaccacttgagatctaaggacatgttttggcagctgatttgcttagatatggaaaggtctagaactcttctrttctgacaacacctaggtctatctctggcatgtttctttaatatctgaatgatctctaatttagtttgtgcagatgttatcctggacatcaaagatttgc

SEQ ID NO: 341670 - DNA, 201 bp, Homo sapiens
ttcagattacagtgagctatgattgtgccactgcacttcaacgggtgaaagtgagactctgtctcttaaaaataaataaataaataaataaataaataaahaagtatatgttagaagaaaacatggatgaatttctctttaagctcagtgcagtgaaaagctttctaactgtcatacaaagtatagatgcaagaaaagata

SEQ ID NO: 341671 - DNA, 201 bp, Homo sapiens
tgggaaagaaaagagggcgctttagccctagaccactatggtagaagcagaggaagttcaggtgtaaggaccctaaaacttttggacctcagtaaggacayagacattgagaattaaattatatattattctcataattcttagaattttggacttatttttatgcccttcatcatatattaccacttgagatctaaggac

SEQ ID NO: 341672 - DNA, 201 bp, Homo sapiens
ataagcagagtcaaaagacaaatggcaaactgggaaaaaatatttgtaacgtatcacagaaaaaggattaatatccctaattcataaataacttgtgggggtgggggggaagataaactgtattttaaaaaggcaaaaaacatgagaataatcactaaaagatatataaaaatggccttaaacataagaaaatatgctcaa

SEQ ID NO: 341673 - DNA, 201 bp, Homo sapiens
taagcagagtcaaaagacaaatggcaaactgggaaaaaatatttgtaacgtatcacagaaaaaggattaatatccctaattcataaataacttgtgggggtgggggggaagataaactgtattttaaaaaggcaaaaaacatgagaataatcactaaaagatatataaaaatggccttaaacataagaaaatatgctcaac

SEQ ID NO: 341674 - DNA, 201 bp, Homo sapiens
aagcagagtcaaaagacaaatggcaaactgggaaaaaatatttgtaacgtatcacagaaaaaggattaatatccctaattcataaataacttgtgggggtgggggggaagataaactgtattttaaaaaggcaaaaaacatgagaataatcactaaaagatatataaaaatggccttaaacataagaaaatatgctcaact

SEQ ID NO: 341675 - DNA, 201 bp, Homo sapiens
cccgccaccacgcccggctaattttttgtatttttagtagagacggggtttcaccgtgttagccaggatggtcttgatctcctgaccttgtgatctgcccrcctcggcctcccaaagtgctgggattacaggcatgagccaccacgcttggccagatttcttttccttcatcaccaccccctacttcccttccaaactaag

SEQ ID NO: 341676 - DNA, 201 bp, Homo sapiens
cctcctcggtctctcaaagtgctgggattacagacatgagccactgtgcctggccaaggatttttgttttttctttctttctttttttttgagatggggtytcactctgttgcccagactggagtgcagtggtacgatctcggctcagtgcaacctccacctcctgggttcaagagattctcctccctcagcctcctgagt

SEQ ID NO: 341677 - DNA, 201 bp, Homo sapiens
tgaaacatcatatcacattcactctggacacagggcaccttataaactgaaattagcctagaatatagcctgagtcaagagtggattctctggggccccargtttcctgttctccaagacccactttctagtccacctcagatcctatgtgtaatgaggaacaaatgtgttgtgctcaccctggggaatcccgtatctcct

SEQ ID NO: 341678 - DNA, 201 bp, Homo sapiens; identical to SEQ ID NO: 72018

SEQ ID NO: 341679 - DNA, 201 bp, Homo sapiens; identical to SEQ ID NO: 72020

SEQ ID NO: 341680 - DNA, 201 bp, Homo sapiens
taaaaaaagtacaccatgatcaagtgggatttaatagcaggaatacaaggttggttcagtatttgaaagtatattactataaagattatacgattatcttyatggatcagagaaagcctttgacaaaattcaacactcattcctaataaaaacttgagaaaaatcagaatgggtggctgtttcctttacatcataaaatgt

SEQ ID NO: 341681 - DNA, 201 bp, Homo sapiens
tggttcagtatttgaaagtatattactataaagattatacgattatcttcatggatcagagaaagcctttgacaaaattcaacactcattcctaataaaarcttgagaaaaatcagaatgggtggctgtttcctttacatcataaaatgtatatatctaaattctagagtcagcatcttagtgggaaaccatagagacatt

SEQ ID NO: 341682 - DNA, 201 bp, Homo sapiens
ttataaattctggtaggataaaattttacaaggcaaaaattaaaagtgtctttggactcttaattaggtatgttaacttggtttatttttcttcccccaaktaaattagatctctgctgcaagggtacaaaaacacatcttcctattcatgaaagaactttcaagattggttgagtcaacctgtatggaaacttgctaaat

SEQ ID NO: 341683 - DNA, 201 bp, Homo sapiens
ttatatccattctaatgggtatgaaacagtacctcattgaggtttaactttgcattttcttaatgactgatgataattgagcatcttttcatgtgctcatkaactgttctaataccttctttggtgaaatgtctattcaaatcttttgcccgttttttgagtgtgttgtttgtcttcttaattaaaattctttgtatattc

SEQ ID NO: 341684 - DNA, 201 bp, Homo sapiens
acatgcattgatatacttaaaagctgaagggtcacccaggaatattttatttattctgttctttttagatccatgagatgatcagacaagaaattttggarcaggtcctcaacagggttgttaccagagcatcttctcccatcagtcatttcttaggtattcaactttgaaagaatgaataaagtttttagaaatattttc

SEQ ID NO: 341685 - DNA, 201 bp, Homo sapiens
gaaaatgaggaaccactaagaataacgattataaaagggcagccatagcagtgactatagcttgggctgcctagagagtctgccagtcggaacttactggsaagctctgttaggtgctgctgttctgaacaatttctagaaagcttaattccatataccaatagcagtaagggaatcttcctttttctttctctctctctg

SEQ ID NO: 341686 - DNA, 201 bp, Homo sapiens
tcggctcagtgcaacctccacctcctgggttcaagagattctcctccctcagcctcctgagtagctgagattgcaggcatgcgccaccacgcccagctaaytttttgtatttttagtagcgatggggtttcaccatgttggccaggctggtcttgaactgacctcaggtgatccacctgcctcggcctcccaaagtgctgg

SEQ ID NO: 341687 - DNA, 201 bp, Homo sapiens
cagctaactttttgtatttttagtagcgatggggtttcaccatgttggccaggctggtcttgaactgacctcaggtgatccacctgcctcggcctcccaamgtgctgggatcacaggcgtgagccaccgtgcctggccggattttttgttttttaagcaaacatttgtaggatgttcattctgtgccaggggctattctaa

SEQ ID NO: 341688 - DNA, 201 bp, Homo sapiens
agctcactacagcctccaattcctgggctcaagtgaccctccagcctctgcttcccaagtagctgggactataggcacgtgacaccaagcctggctactgttttttttttttttttttttgagatggagtctctgtcacccaggctggagtacagtggtgtgatctcggctcactgcaacctctgcttcccaagttcaagt

SEQ ID NO: 341689 - DNA, 201 bp, Homo sapiens
ttcccttaaaggttcttcattagagaaaaatcaaaagggacagttataataatctattatctctttaattctctgctcccaagtttcatttcttaaaataygtttaatggaattttaaccactgtaaagccctgaattgaatttctgaaaacaaggcagttagacactgtctatagcctttagaatctttgatccacaggg

SEQ ID NO: 341690 - DNA, 201 bp, Homo sapiens
gctcactacagcctccaattcctgggctcaagtgaccctccagcctctgcttcccaagtagctgggactataggcacgtgacaccaagcctggctactgttttttttttttttttttttgagatggagtctctgtcacccaggctggagtacagtggtgtgatctcggctcactgcaacctctgcttcccaagttcaagtg

SEQ ID NO: 341691 - DNA, 201 bp, Homo sapiens
ctgtacaaaggctgcttaaggcagtgcaggtaagtcttcagattcccaagtaacttgccaaaactgaggtttaactgtctagtggaagtctgatgcatttytgtataaatatatatgtctaagaaattctattccactttagtctgaaacataaaatttgcattaaaagggcaagagcattgagcaagactgttttccagg

SEQ ID NO: 341692 - DNA, 201 bp, Homo sapiens
gaggcaggagaatcacttgagctcaggaggcggaggttgcagtgagctgagattgcacctttgcattccatcctgggcaatgggagtgaatccttgtctcaaaaaaaaaaatttttttttttttttttgagaagaggccagtgatgatgccctggaagctaagagaagaaaatttttcaagaaagaagtagttaattgtgt

SEQ ID NO: 341693 - DNA, 201 bp, Homo sapiens
ttttttttttttgagaagaggccagtgatgatgccctggaagctaagagaagaaaatttttcaagaaagaagtagttaattgtgtcagatctgagatgttmattaagatgggactttattgtttttgacaacttggaggtcatttgtgacccttgaaaaaataatctaatgttattgtgggggtgagggtagaaagaggat

SEQ ID NO: 341694 - DNA, 201 bp, Homo sapiens
gccaccatgcccggctaattttatatttttagtagagacggggtttctccatgttggtgaggctggtcttgaattcctgacctcaggtgatccacccgccktggcctcccaaagtgctgggattacaggcgtgagccactgcacttggccacaacttaccttttaatttgcttttcttcctattcctagaggatgccttgt

SEQ ID NO: 341695 - DNA, 201 bp, Homo sapiens
gagataaaaaaggagaaattatgactatacacatttattttacgaaatcttgtaaaaagaagcagagtctgggcacagtgaatcgtgcctgtgatcccaaygttttgggaggctgaggcatgagaatcacttgagcccaggagttcaaaaccagctgggcaatatagtgaaactccatctctaccaaaaaatagaaaaatt

SEQ ID NO: 341696 - DNA, 201 bp, Homo sapiens
tatttgcctttaagctagattttttcctatgtgatgaaagaagtagaagatcatatgtcttatcacagcacgattaattcactctgcatattgaatgttcrtttttccataaagactttctagttagtagtaatcaatttctaaatctcctttactcttaattagaaaacgaagttgggtttgaatgtgccaattttattt

SEQ ID NO: 341697 - DNA, 201 bp, Homo sapiens
gggtctcttttgaatgaaagtgtttgaacttaagccactgttatgccagttaatgacaggaaataaatactgtaaaatgaccctgggtgtggaggatctctttttttttttttactttaaaagtggaaaatacatgatgttaccacactcccttttttttaatgtcctcactttagcagtataccacatccttaagcaagc

SEQ ID NO: 341698 - DNA, 201 bp, Homo sapiens
gaggagaggaataaggaagcttgtgtcttggcttctctgtgaattttgtttttcctcttcagtcagaatgatgagtcacactccataggctcactgcagcmgtcacttgtagtttcataggacagtctactaaatctaggaatctttttttattagtatctccaggtgtgtcagagctccggaggaattccaaaaaatatg

SEQ ID NO: 341699 - DNA, 201 bp, Homo sapiens
tttatgaactaggatgttgcatctagtagtatatcgtggagttgtgtgatgctaagtcattcatcatgaagtatttgtaaagcagtaaaataaaactcagaagtgttttaaactatattaaaagtagtgtacagatatatttgttcctccaactttttagtttgaaaattctaactcagaaaagttaaaacactacatagc

SEQ ID NO: 341700 - DNA, 201 bp, Homo sapiens
acatttggatttctgatccattcaaggacctatttttattttttattactattaaaaaatgttttttatgtctctcgagtcataaggacttttttgggggrtgcagtggcgcaatctgagctcactgcaaccttcgcctcccagattcaagtgattctcctgcctcaacctcccgagtagctgggattacaggtgtgtgcc

SEQ ID NO: 341701 - DNA, 201 bp, Homo sapiens
catgtggaggaagctaagttttttcgaccaagaacataggctcatttagctccttattggaaacagctttggtaagatagacgtgaattggcctgtcttcmtttcaggttcatgtggatgttcacagccattacaattctgtcgccaatgaaactttttgccttgagatcatggatagtttgaggagatgcttaagccagc

SEQ ID NO: 341702 - DNA, 201 bp, Homo sapiens
gccatgttgatttttttttttttaagcaaggctttggcctcaaatatgccaagttctttgctgcttcttggacattgcacgtgatcatacttccatctggratatccttctctaacgcctttgaataattagctccttcttgtccgccaggtctctacttaaatgtcacctacttctgagaagcttccccttactacccta

SEQ ID NO: 341703 - DNA, 201 bp, Homo sapiens
cctcctgctctgttatgaactctgagtcaaattactatgtctgttttgttcatctttataacatgcctaaggaaaataacatgctcaaaaagtatttgttsgatgaatgtatgttcccaacttagtgctaagttataaacataaatgtttatagaatgagtaagaatagattttagtcttgacaatccaggatcatattaa

SEQ ID NO: 341704 - DNA, 201 bp, Homo sapiens
tgttccaggatcggcactaaaaaaaaattttcagactgcaaatgaattatacaaatgaaaatatcaaatggagatccccttatccaaatgaaagcactcamcttattaaaagttcacaagtatttgtatagagcacattaaaaaagtcagcttgctaaatgttttgattttaaagaacgattgcagaagtctgaagaaaat

SEQ ID NO: 341705 - DNA, 201 bp, Homo sapiens
aaataataggtagatgaagaaaagatgacattttagtccctttattttggctaaattaagcactttttcaaagcccttaaccattgctgttctaagcaccrtagtaatcagtcgtttgataattctgtttttttgtatttaactacaaacctgttcgtttttcctatttacctgtcaatgttgtaagacttgtttctgaac

SEQ ID NO: 341706 - DNA, 201 bp, Homo sapiens
ggttccccctgctctgaggaagctggaacacttaggagacgtaagatatacacttgttgtatccagttggtggaatcgggggatttgcagaaagaaatagygtctgagatcataggattactgatgctggaggtaagatggcaaacaaaaacttttatttgggggtaggtttttgagggtttgtaatttgttgagggaagg

SEQ ID NO: 341707 - DNA, 201 bp, Homo sapiens
ggtggaatcgggggatttgcagaaagaaatagcgtctgagatcataggattactgatgctggaggtaagatggcaaacaaaaacttttatttgggggtagrtttttgagggtttgtaatttgttgagggaaggaaaacttaagtgcccaacctagcatagtccttatttatgagtaagacctgttgttaaaaaacaaagaa

SEQ ID NO: 341708 - DNA, 201 bp, Homo sapiens
ttttttcttttttcttttttttttgagggagtagaatatacaagtgatgtatcctttaaccagtaattgtatttctgggaatctacattaaagaatgactscaacatacaagaaaatcctcacatatgaacatgttcaacacagaaatttgtgaccagtatgagcatacagtaatagagacatgtaaactatgtaagttaa

SEQ ID NO: 341709 - DNA, 201 bp, Homo sapiens
aagttgtaaagaaataaactttgtcattttcttctaccaggtgggatcagcaatatgtaatccaactcacctccatgttcaagtaagcatcatcttttccyttttctttgtatatcctgctttgtgaacttacttgctagaaattaaactatagcaaacgtaaacatcactctctcctgattgtaagaatattagtagtta

SEQ ID NO: 341710 - DNA, 201 bp, Homo sapiens
agccactgcacttggccacaacttaccttttaatttgcttttcttcctattcctagaggatgccttgttttgcaagagcttgatgaacttgctcttcagcytgcatgtttcgtataagagtcctgtcattctgctgcgtgacttgtcccaggatatccacgggcatctgggagatatagaccaggtactataatgagcctt

SEQ ID NO: 341711 - DNA, 201 bp, Homo sapiens
tgagttttactcatatccaaacggttcttcatgctgcctgacatgcattgatatacttaaaagctgaagggtcacccaggaatattttatttattctgttytttttagatccatgagatgatcagacaagaaattttggagcaggtcctcaacagggttgttaccagagcatcttctcccatcagtcatttcttaggtatt

SEQ ID NO: 341712 - DNA, 201 bp, Homo sapiens
ctattgtccttgttaactgtaataaacattaaaacgtatataaaacagaagtaagcttccttatagaagccatatggtaacagtattgggtagaaatgacstaaggctaataagcaaacttgttctgtttttacccactgattctttttcagccccttctcaaagtcagcatgtcaatgagagactgcttgatacttgtcc

SEQ ID NO: 341713 - DNA, 201 bp, Homo sapiens
caagttaatgaaataattaaaactctcttagaacattattgactacaatagatttacagaggcatttgcaaccagtttcattttagtgtttcagagtataytattgtccttgttaactgtaataaacattaaaacgtatataaaacagaagtaagcttccttatagaagccatatggtaacagtattgggtagaaatgacc

SEQ ID NO: 341714 - DNA, 201 bp, Homo sapiens; identical to SEQ ID NO: 72035

SEQ ID NO: 341715 - DNA, 201 bp, Homo sapiens
ggccaagggacttactgttaaataggctgttatacttttaagatgtatgtaatgggaccaggtgtggtggttcacacctgtaatcccagcactttgagagrccaaggtgggaggatcacttgaggccaggagtttgagactctcctgggcaacatagtgagacttcatctctccaaaaaaattaaaaattaaaaattaaaa

SEQ ID NO: 341716 - DNA, 201 bp, Homo sapiens
ttttggaagtttgtggcggaggtgaggccgaggtgactgcagagcggctcgcgaggtgctcgggctgtgggactgggcccctgggagggagcggttctgtrggggaaaggaggctcctgtcctgacttggcgttctggtattttctctggcgtggaaagtaggcgcgctccgctgtctcccgccgcctgcctcagctttcg

SEQ ID NO: 341717 - DNA, 201 bp, Homo sapiens
ttccttctcccttgttgtgcaggtgaagctgtctggttctcatctgacccccctgtgttattctttcatttcttacgtacaggtaagagattcagaggcartacccaataggtcttcaagaaaggatttcttacatgcccaggggactattgatcacctgaactgagcatatataaacttttttccctgcttaccacaagc

SEQ ID NO: 341718 - DNA, 201 bp, Homo sapiens
cctgggaaatcaaggctgcagtgagctatgattgcatcactgcactctagcctgggcaacagagagacccaatctttttttttttaaaaaaaaaaaaaaaagaaaaaagaaaatgtaagtaaatgacttccttttggttgctctcttctaggtaggacagcaaggagattccaataataacttaagtcccttcagcattgc

SEQ ID NO: 341719 - DNA, 201 bp, Homo sapiens; identical to SEQ ID NO: 72137

SEQ ID NO: 341720 - DNA, 201 bp, Homo sapiens
ctccagcgggagatgaagaagtcgttgatggatctggccaatgatgcctgccagctgctctcaggagagaggtagccaggccttgggtgggcaggatctakgcaggggactggcaggtgggcggcctagccttcggcttagccttagccctgccctagtggactggctctgtaggtacaaagaagacccctggctctggga

SEQ ID NO: 341721 - DNA, 201 bp, Homo sapiens
ggctgtaggctggggtcaccagaaagccccagggctttggagggtgggtggggacattgtgagagagagaaccttccccccaacaactgcccttaccatcrtgacactgctgtcttcctgctgggacgtagatggtaccggaagctctgcccccggctagacgaccctgcatggaccccgggccccagcctcctcagcctg

SEQ ID NO: 341722 - DNA, 201 bp, Homo sapiens
aaagcctttaggggactggcatgatgtcagtgtttttaaaagttgaagtgatatgtgaacattccttgccaaggcactagcgtggcacaggaagcactccygtggaatgatggtgataacactgcccccaggtatcggctgtcggatgagggcgagtggctggtgagggagttgaacctcccagtggacaggactgagggt

SEQ ID NO: 341723 - DNA, 201 bp, Homo sapiens
tcaggttggggaccttagcttttctaggctgaaagaatggagcccttctgttcagtggtgtccatctgggccctggactctggatttgacagaggccctgraggggagggccatggagttgtgcttgtgtgtcatgtgcacggtcctggtttactgtgcaccttctctaactagatccttagccaagggcttcacatacag

SEQ ID NO: 341724 - DNA, 201 bp, Homo sapiens
gcccaagcggccccagcaccttcctggacaccctgggtgagccctgcccacccccagcagtgtatctagagtctacccttgctccattctcaggacagccytggtctggggttctggcacagaggcatcatgcacatgtatacttattgacctgctgccattcagtcacactgtcttccagtcctattctcatttgctcac

SEQ ID NO: 341725 - DNA, 201 bp, Homo sapiens
ccactaatctgtgactgctcccagataggctgctaaccagctaggaagagtggctgggctccagacagaagccagcactgacctcttcattttcatcttcrccatcctctcgaagaaccatgtctaggatgtttcctttgatcttgaagtctcgtgaggtgctgagcttcatgtgctgcatcaggttcacctatgacaaga

SEQ ID NO: 341726 - DNA, 201 bp, Homo sapiens
cttacacctcatgcttgtggccatgaagtggctgtttgaagagtttgccatagatgggcgcttctgcatcagcatccatgacgaggttcgctacctggtgygggaggaggaccgctaccgcgctgccctggccttgcagatcaccaacctcttgaccaggtatgcggggcccatggcctctagcctggccatgtgctccta

SEQ ID NO: 341727 - DNA, 201 bp, Homo sapiens
cagtagctggtttgtgcctgtagacgtgaggggttgataatgttcataaaacctcagagctagatgcagactcagtgaacgctgggcctagcaaacacctygatagcccaggctgtaatagaatacctgcacgtaggtctaatagcccagtagttccatttttatgtgcagaagtttaaagaagcttttgtagctcttgcc

SEQ ID NO: 341728 - DNA, 201 bp, Homo sapiens
agagctctgctgttgactacttacacctcatgcttgtggccatgaagtggctgtttgaagagtttgccatagatgggcgcttctgcatcagcatccatgaygaggttcgctacctggtgcgggaggaggaccgctaccgcgctgccctggccttgcagatcaccaacctcttgaccaggtatgcggggcccatggcctcta

SEQ ID NO: 341729 - DNA, 201 bp, Homo sapiens
cacctcatgcttgtggccatgaagtggctgtttgaagagtttgccatagatgggcgcttctgcatcagcatccatgacgaggttcgctacctggtgcgggrggaggaccgctaccgcgctgccctggccttgcagatcaccaacctcttgaccaggtatgcggggcccatggcctctagcctggccatgtgctcctatgtg

SEQ ID NO: 341730 - DNA, 201 bp, Homo sapiens
taaaaccccttccaacccaactgggatggaaaggagatacgggattccccagggtgagcacaacacatttgttcctcattacacataggatctgaggtggrctagaaagtgggtcttggagaacaggaaacttggggccccagagaatccactcttgactcaggctatattctaggctaatttcagtttataaggtgccct

SEQ ID NO: 341731 - DNA, 201 bp, Homo sapiens
tcctttccctccctgtccttccctgctctgccctcattctcattccattcttgccagtggtactcggggcattgcttagttgacctgatggcagaagtcaytgttaaggcctgggctcatgctgggaccttcctcctgggagtctgactggtgggtgggggtgggtgccacatggtgccctaatagcggtccactttgaac

SEQ ID NO: 341732 - DNA, 201 bp, Homo sapiens
tgctctaaggggtgtggggtcattgctccaggagtgatgcatctgttcacaggaggggcatgactgtgagaggagattgggtctctttcaggtgcatgttygcctacaagctgggtctgaatgacttgccccagtcagtcgcctttttcagtgcagtcgatattgaccggtgcctcaggaaggaagtgaccatggattgta

SEQ ID NO: 341733 - DNA, 201 bp, Homo sapiens
ttaattaataaagtgtaccaaactgggaaaaaaaaaaaaaagtatgttgagtccataattgcatttcagtatctcagtgggaggttaggctgctggatggmaaacagtgctggaccttcacctttcttgacttagctaagtgaacagatggggtgttggtccaggggaagccctgctctaaggggtgtggggtcattgctc

SEQ ID NO: 341734 - DNA, 201 bp, Homo sapiens
tgccgtgggcctggggtcgggggagcagcagaccgggaagcaccgtgaggaccgaggtttccggcggggtcggcggcggggaggccgggtcgctgagcgayggcgcggcccctccctctccagtcagggagcgaggcccggagcagggcggcggctagtcccagggcgcaccgcggcgcctctgccgggcgcaggcgggcg

SEQ ID NO: 341735 - DNA, 201 bp, Homo sapiens; identical to SEQ ID NO: 72144

SEQ ID NO: 341736 - DNA, 201 bp, Homo sapiens
tcacttgtgtccccagctgccaatgcaccatctggcatgtggcggtaggtgtgcagtggttgttgtggagtggaagtttaatgtctccatggtgaacctgyctgcctctcacctccctcaggtattcctggtgcagccagcggctggtggaagagcgttactcttggaccagccagctgtcgccggctgacctcatccccc

SEQ ID NO: 341737 - DNA, 201 bp, Homo sapiens
ctccgcccaccagctagctcgggaccaatccacctgctccttgagaaggggaggttggcctttggttcgcgcgttccgcagggagagcccacccagaagtyccccttctccccccgcgggcggaccgctccattggcggccctcctattggtcgcgctgggagtctcccgcttgcctctcgggtagccgcgggacctagct

SEQ ID NO: 341738 - DNA, 201 bp, Homo sapiens
ttaatcactagtttataatatggcttcatgcacagctgcagagctgcatcttgacaccagtgtggctttttactgtaaccaaagttcctgttaccaccatrgcctcaaagatttggcattctttagcctttttgtctgcgttgttttaagggctttgacatgctgaattaaaatgtgggggggtggggatttctttcagtc

SEQ ID NO: 341739 - DNA, 201 bp, Homo sapiens
tctctgtattccacccagggaaggggcagcctttgggtgggaggctggcactggtggctcaccccagactggcctgcagtgtctgagtaccatgcagggargggctggtggattggggcctacccagtcccctgcttcactaccttggtccttggactgctccaggtagaagaactggattacttagaagtggaggctgag

SEQ ID NO: 341740 - DNA, 201 bp, Homo sapiens
ctgtattccacccagggaaggggcagcctttgggtgggaggctggcactggtggctcaccccagactggcctgcagtgtctgagtaccatgcagggagggkctggtggattggggcctacccagtcccctgcttcactaccttggtccttggactgctccaggtagaagaactggattacttagaagtggaggctgaggcc

SEQ ID NO: 341741 - DNA, 201 bp, Homo sapiens
gaggtggcatcctaaccaatttgcactatctttcaggtgaagcgctggatatttaccagataattgaactcaccaaaggctccttggaaaaacgaagccakcctggaccatagcactgcctggaggctctgtatttgctcccgtggagcttcatcggggtggtgcaggctcccaaactcaggctttcagctgtgctttttg

SEQ ID NO: 341742 - DNA, 201 bp, Homo sapiens
acagactgcccgtggtggccccaaggacacccagcccagctatcaccatggcaatggaccttacaacgacgtggacatccctggctgctggtttttcaagytgcctcacaaggtgtgtcctgggtcatggcctgtcctgtggtgtttcctcattctgctcaaggcccacagcaggccttcagagtgacacacctgagactt

SEQ ID NO: 341743 - DNA, 201 bp, Homo sapiens; identical to SEQ ID NO: 72158

SEQ ID NO: 341744 - DNA, 201 bp, Homo sapiens
aagtcgggtggcaaggggcatggtggtggaattaaatgacatggggcacgtcgtatgtttggtacgacatctggtacgtgataggtttttccgatttgttrttatgcagggagccaggtttgcttgtgtctgtgtgtcttagggggcatgtgtgtgcacgtgtgtgtgtgcgtgcgcgcgtgcgcgcgtgcgtgatacaat

SEQ ID NO: 341745 - DNA, 201 bp, Homo sapiens
atactgtcatctctcagcttttgtttttctaatgaaagtcgggtggcaaggggcatggtggtggaattaaatgacatggggcacgtcgtatgtttggtacracatctggtacgtgataggtttttccgatttgttattatgcagggagccaggtttgcttgtgtctgtgtgtcttagggggcatgtgtgtgcacgtgtgtg

SEQ ID NO: 341746 - DNA, 201 bp, Homo sapiens
ggatctggccaatgatgcctgccagctgctctcaggagagaggtagccaggccttgggtgggcaggatctaggcaggggactggcaggtgggcggcctagycttcggcttagccttagccctgccctagtggactggctctgtaggtacaaagaagacccctggctctgggacctggagtgggacctgcaagaatttaagc

SEQ ID NO: 341747 - DNA, 201 bp, Homo sapiens
agatgggtgtctcctacctgcctgtcaaccagaactgggagcgttacctggcagaggcacagggcacttatgaggagctccagcgggagatgaagaagtcrttgatggatctggccaatgatgcctgccagctgctctcaggagagaggtagccaggccttgggtgggcaggatctaggcaggggactggcaggtgggcgg

SEQ ID NO: 341748 - DNA, 201 bp, Homo sapiens
ctgtggtcatttatggcagctcctggtgtttgcctccaaggtgtccccacccagtgactctggccggcatgctggagatgggtgtctcctacctgcctgtyaaccagaactgggagcgttacctggcagaggcacagggcacttatgaggagctccagcgggagatgaagaagtcgttgatggatctggccaatgatgcct

SEQ ID NO: 341749 - DNA, 201 bp, Homo sapiens
cagctgtgcttggagacgcccactttgccggcatgcatggtgagcaggagccggggttggggcagcccagcccctcagcatattgacagttctgatgaacrttgggcagaatgttcctgagctgcttttctcactcctgcttgtcttccaggctgcacagcctttgggtggatgacactgcagggcaggaagagcaggggc

SEQ ID NO: 341750 - DNA, 201 bp, Homo sapiens
gcttgtggccatgaagtggctgtttgaagagtttgccatagatgggcgcttctgcatcagcatccatgacgaggttcgctacctggtgcgggaggaggacygctaccgcgctgccctggccttgcagatcaccaacctcttgaccaggtatgcggggcccatggcctctagcctggccatgtgctcctatgtggggctttg

SEQ ID NO: 341751 - DNA, 201 bp, Homo sapiens
gcaggatctgcgcaaggtccagagagaaactgcaaggaagtaagaaccttctttgtgttaaggatggagggaggggtctgggcttgccccagaagagcttrgatgctttgttttttagctttgagatgctgaaagacaaagtctgccctctgtttctggtcccttaggtcacagtggaagaagtgggaggtggttgctgaa

SEQ ID NO: 341752 - DNA, 201 bp, Homo sapiens
ttcttgacttagctaagtgaacagatggggtgttggtccaggggaagccctgctctaaggggtgtggggtcattgctccaggagtgatgcatctgttcacmggaggggcatgactgtgagaggagattgggtctctttcaggtgcatgtttgcctacaagctgggtctgaatgacttgccccagtcagtcgcctttttcag

SEQ ID NO: 341753 - DNA, 201 bp, Homo sapiens
ctccatgatcctaggcaaggcacttagcctctctgagccgtttcttcctctgaataaaagcctttaggggactggcatgatgtcagtgtttttaaaagttraagtgatatgtgaacattccttgccaaggcactagcgtggcacaggaagcactcccgtggaatgatggtgataacactgcccccaggtatcggctgtcgg

SEQ ID NO: 341754 - DNA, 201 bp, Homo sapiens
tgtagggataggagaactgaggtgaggtggtaggtcctaaggccaaagcaccctgctaagacccatttccttcccctgcaccccaccaggcaccccgactrtgatgaggaaggcctctatggggccatcctgccccaagtggtgactgccggcaccatcactcgccgggctgtggagcccacatggctcaccgccagcaat

SEQ ID NO: 341755 - DNA, 201 bp, Homo sapiens
acaagctgggtctgaatgacttgccccagtcagtcgcctttttcagtgcagtcgatattgaccggtgcctcaggaaggaagtgaccatggattgtaaaacmccttccaacccaactgggatggaaaggagatacgggattccccagggtgagcacaacacatttgttcctcattacacataggatctgaggtggactagaa

SEQ ID NO: 341756 - DNA, 201 bp, Homo sapiens
tcgttgatggatctggccaatgatgcctgccagctgctctcaggagagaggtagccaggccttgggtgggcaggatctaggcaggggactggcaggtgggyggcctagccttcggcttagccttagccctgccctagtggactggctctgtaggtacaaagaagacccctggctctgggacctggagtgggacctgcaaga

SEQ ID NO: 341757 - DNA, 201 bp, Homo sapiens
cctcggcctggtaagtaggggcagggttggggacataagcaggcatgggggcccagcttaatagtttgtttcagtgaacattttctgaggtcctgttacgkgctgggtgctcacgtagggagcgctgatgtgttgaattaggactagacccctgtttatgtgggactcactttctggtgggaagatcacaggcagtaagca

SEQ ID NO: 341758 - DNA, 201 bp, Homo sapiens
tattgagagttccttctcctgctcctgattgtcttcccccaccctcacagacctcggcccctgcagtgaggaggaggagtttcaacaagatgtcatggccygcgcctgcttgcagaagctgaaggggaccacagagctcctgcccaagcggccccagcaccttcctggacaccctgggtgagccctgcccacccccagcag

SEQ ID NO: 341759 - DNA, 201 bp, Homo sapiens; identical to SEQ ID NO: 72168

SEQ ID NO: 341760 - DNA, 201 bp, Homo sapiens
gactgtagtcccagctactctggaggctgaggccagaggatcacttgaatgtgcactccagcctgggtgacagaatgagacacagtctcaaaaaaaaaaargggggggggggagaggggggatggcaaacacacaaatggcccagagtctcttttcctccattgtagttgtgctgcttcagtttgccagatctgtcaagaa

SEQ ID NO: 341761 - DNA, 201 bp, Homo sapiens
ctgcctcagagctgattctgaggactaaacaaagggaattgtggaaggcactagcaagctgcctggcccagagtgggcatctggtaatcagcggctgctgytgctactgttctctgcccagagccatcgagtccctgtacaggaagcactgtctcgaacaggggaagcagcagctgatgccccaggaggccggcctggcgg

SEQ ID NO: 341762 - DNA, 201 bp, Homo sapiens
agatggggtgttggtccaggggaagccctgctctaaggggtgtggggtcattgctccaggagtgatgcatctgttcacaggaggggcatgactgtgagagkagattgggtctctttcaggtgcatgtttgcctacaagctgggtctgaatgacttgccccagtcagtcgcctttttcagtgcagtcgatattgaccggtgc

SEQ ID NO: 341763 - DNA, 201 bp, Homo sapiens
cttccagtcctattctcatttgctcactctggaccggctcactggactcattcagcacagtgttgtgagcacctgctgtgcaatggcccgtggcagccacygggtgtacacactggagcatagctcctcctttccagtagttctttttcctaggaggagccaggcacgtagaccagccagtgcagctagtgtccataggta

SEQ ID NO: 341764 - DNA, 201 bp, Homo sapiens
atgtttcagcttatttatttatttctaatttttaaaaagttgtagaagtcctaaaaagactagcctcaattcgtaaaaaaagagttattgggtttgaaaaygtgaaataccaagactgatcattgagggaagcagtgaggttaggggaattgttccgaagggtggtactcacgcttttctatttggaaaatcaaatgacag

SEQ ID NO: 341765 - DNA, 201 bp, Homo sapiens
gttaaggatggagggaggggtctgggcttgccccagaagagcttggatgctttgttttttagctttgagatgctgaaagacaaagtctgccctctgtttcyggtcccttaggtcacagtggaagaagtgggaggtggttgctgaacgggcatggaaggggggcacagagtcagaaatgttcaataagcttgagagcattgc

SEQ ID NO: 341766 - DNA, 201 bp, Homo sapiens
gcaaggaagtaagaaccttctttgtgttaaggatggagggaggggtctgggcttgccccagaagagcttggatgctttgttttttagctttgagatgctgraagacaaagtctgccctctgtttctggtcccttaggtcacagtggaagaagtgggaggtggttgctgaacgggcatggaaggggggcacagagtcagaaa

SEQ ID NO: 341767 - DNA, 201 bp, Homo sapiens
ccatccactttaacacccaggacccgaggcctgctttactgtcctttagtactcccatctgttctatctcctgcccattacttgaactctcacctagcccytctccttccacacctgtgtaacctggttccaggatgatttgtcctattgtgacatttggttgctttatagtcagccttaaacagtttttcctcatgggag

SEQ ID NO: 341768 - DNA, 201 bp, Homo sapiens
cagatgtacgctgccaccaagggcctccgctggtgagggtccctctcccatccactttaacacccaggacccgaggcctgctttactgtcctttagtactmccatctgttctatctcctgcccattacttgaactctcacctagcccctctccttccacacctgtgtaacctggttccaggatgatttgtcctattgtgac

SEQ ID NO: 341769 - DNA, 201 bp, Homo sapiens
gggtcaggcaggactctagtcaaatctggcttcatgatttctgtccactccttcagtaaatatgttctgggcacctgctcctggccagacagtgacaggcrtaatagctacagctctcatggaatttagataggaccatgtaggtgaggggtctggcatagcgctaggcatagagtagattctttacctgtcacaccaatt

SEQ ID NO: 341770 - DNA, 201 bp, Homo sapiens
gctggtggattggggcctacccagtcccctgcttcactaccttggtccttggactgctccaggtagaagaactggattacttagaagtggaggctgaggcmaagatggagaacttgcgagctgcagtgccaggtcaacccctagctctggtgagcagtgcgccggcttgggttctctaggtgggtgctgggtggaaagggc

SEQ ID NO: 341771 - DNA, 201 bp, Homo sapiens
tggaggaacgcccataaacgtatcaggtgggccaccatgggaggagtcctgggatgcctttcccctctcttcccacccagggacccctgactaaccctggmttcccacagagggccagcctgactatggtctagaggcctggctacttttggtcctggtgccatggaccttgggcaggtctcccctctagcttcagtttcc

SEQ ID NO: 341772 - DNA, 201 bp, Homo sapiens
ctctcagttacagttcttgaggtggcatcctaaccaatttgcactatctttcaggtgaagcgctggatatttaccagataattgaactcaccaaaggctcyttggaaaaacgaagccagcctggaccatagcactgcctggaggctctgtatttgctcccgtggagcttcatcggggtggtgcaggctcccaaactcaggc

SEQ ID NO: 341773 - DNA, 201 bp, Homo sapiens
gctactctggaggctgaggccagaggatcacttgaatgtgcactccagcctgggtgacagaatgagacacagtctcaaaaaaaaaaaagggggggggggagaggggggatggcaaacacacaaatggcccagagtctcttttcctccattgtagttgtgctgcttcagtttgccagatctgtcaagaaggtaaatgggaat

SEQ ID NO: 341774 - DNA, 201 bp, Homo sapiens
agctactctggaggctgaggccagaggatcacttgaatgtgcactccagcctgggtgacagaatgagacacagtctcaaaaaaaaaaaagggggggggggagaggggggatggcaaacacacaaatggcccagagtctcttttcctccattgtagttgtgctgcttcagtttgccagatctgtcaagaaggtaaatgggaa

SEQ ID NO: 341775 - DNA, 201 bp, Homo sapiens
cggctgtaggctggggtcaccagaaagccccagggctttggagggtgggtggggacattgtgagagagagaaccttccccccaacaactgcccttaccatygtgacactgctgtcttcctgctgggacgtagatggtaccggaagctctgcccccggctagacgaccctgcatggaccccgggccccagcctcctcagcct

SEQ ID NO: 341776 - DNA, 201 bp, Homo sapiens
tggggccccagagaatccactcttgactcaggctatattctaggctaatttcagtttataaggtgccctgtgtccagagtgaatgtgatatgatgtttcaraaatgaaggcagcagagcttcaaatattctacctgtacctgtcccctacttcaaccacagaagaaatgtttaaagagaatttattctatagagtgcattc

SEQ ID NO: 341777 - DNA, 201 bp, Homo sapiens
aaagctaaaagtcctcatttatgcttcaaactctggcccaattggaagtgatttcgtatattaattaataaagtgtaccaaactgggaaaaaaaaaaaaaagtatgttgagtccataattgcatttcagtatctcagtgggaggttaggctgctggatggaaaacagtgctggaccttcacctttcttgacttagctaagt

SEQ ID NO: 341778 - DNA, 201 bp, Homo sapiens
tttctatttaaaatatatctaagacacacttatataaaaagaaaacagaccctcctaacatgtaacattaccgttcgtggcaattgttctcaacctttcaytctccttttgaccttagcattaagctcctttgctcacttctgagctctcagttacagttcttgaggtggcatcctaaccaatttgcactatctttcaggt

SEQ ID NO: 341779 - DNA, 201 bp, Homo sapiens
agtaagcaaatacccaagtaaatgtcaggcagtaaaggccacgcagagaatcacagtagagcgctgtacatgagaccttcgggaggccacttaagatcacsgtgatttggtgcctttaccccctctcctaatagcgtcatgagaagttagtctgaaaagtcatttgaacagtgtttctatttggggagctattaattattt

SEQ ID NO: 341780 - DNA, 201 bp, Homo sapiens
aggagatacgggattccccagggtgagcacaacacatttgttcctcattacacataggatctgaggtggactagaaagtgggtcttggagaacaggaaacytggggccccagagaatccactcttgactcaggctatattctaggctaatttcagtttataaggtgccctgtgtccagagtgaatgtgatatgatgtttca

SEQ ID NO: 341781 - DNA, 201 bp, Homo sapiens
ggactcccaagagctgtggattgcagctgtgcttggagacgcccactttgccggcatgcatggtgagcaggagccggggttggggcagcccagcccctcadcatattgacagttctgatgaacattgggcagaatgttcctgagctgcttttctcactcctgcttgtcttccaggctgcacagcctttgggtggatgacac

SEQ ID NO: 341782 - DNA, 201 bp, Homo sapiens
tacgtgataggtttttccgatttgttattatgcagggagccaggtttgcttgtgtctgtgtgtcttagggggcatgtgtgtgcacgtgtgtgtgtgcgtgygcgcgtgcgcgcgtgcgtgatacaatcagggatttgcctcagactgctgaggttctgggctcagtgttgggaggagtgcaggtactcacgttggttcccc

SEQ ID NO: 341783 - DNA, 201 bp, Homo sapiens
ttggtgcctttaccccctctcctaatagcgtcatgagaagttagtctgaaaagtcatttgaacagtgtttctatttggggagctattaattattttgggcrgtagaaagctcccttttgtgggactgtcccaggcagtataggacatttagcatccccagcctttcccataaacgccagaccaacacccccccccgccccc

SEQ ID NO: 341784 - DNA, 201 bp, Homo sapiens
caacctttcactctccttttgaccttagcattaagctcctttgctcacttctgagctctcagttacagttcttgaggtggcatcctaaccaatttgcactrtctttcaggtgaagcgctggatatttaccagataattgaactcaccaaaggctccttggaaaaacgaagccagcctggaccatagcactgcctggaggct

SEQ ID NO: 341785 - DNA, 201 bp, Homo sapiens
aagaagggaaaacaggaaaaaaattaacacacacacacacacacacacaccctctctctctctctctttctctctctctcactcactcactcactcactcwctcactcactcactctctgggttcagggtttttcttccatggctacccttaccctctggatctcagagctctgggagggagtatgttgagatgttcacag

SEQ ID NO: 341786 - DNA, 201 bp, Homo sapiens
cccaccagctagctcgggaccaatccacctgctccttgagaaggggaggttggcctttggttcgcgcgttccgcagggagagcccacccagaagtcccccytctccccccgcgggcggaccgctccattggcggccctcctattggtcgcgctgggagtctcccgcttgcctctcgggtagccgcgggacctagctgggtg

SEQ ID NO: 341787 - DNA, 201 bp, Homo sapiens
ctggtgccagcagccccacccagagagactggcaggagcagttagtggtggggcacaatgtttcctttgaccgagctcatatcagggagcagtacctgatycaggtaaggttcctggggccaactgcaggttctggcatgggatgggccaggagccctaatctcagtggttaggggaggtactcctttcctggcacgtgtc

SEQ ID NO: 341788 - DNA, 201 bp, Homo sapiens
aagagcaaaactagatgattctgcattgattgagttccagttacaatgagaatcacactacttagaatatgtaacttgatggtcaaagtaaaggggaataycggccatcatttgaaaagataaagtaggctttggtggctgaaagaaaattaggaaaccagtgacaagaaagatttgttttttgatctgtcggtcatttta

SEQ ID NO: 341789 - DNA, 201 bp, Homo sapiens
tttgagttaggagcaccctttggtctcacttgtgtccccagctgccaatgcaccatctggcatgtggcggtaggtgtgcagtggttgttgtggagtggaartttaatgtctccatggtgaacctgcctgcctctcacctccctcaggtattcctggtgcagccagcggctggtggaagagcgttactcttggaccagccag

SEQ ID NO: 341790 - DNA, 201 bp, Homo sapiens
atagtcagccttaaacagtttttcctcatgggagtaaagctatacttttggtatactgttaccaagtggtagcatcttgacaattctgattatgctgcatmatcaataatacaggggttgcaaactcagatgcctacagggaatgagagcaaatggagtgggtggaagacaggagttgacaggagggcgctgtggcaaact

SEQ ID NO: 341791 - DNA, 201 bp, Homo sapiens
tccctcaggtattcctggtgcagccagcggctggtggaagagcgttactcttggaccagccagctgtcgccggctgacctcatccccctggaggtccctaytggtgccagcagccccacccagagagactggcaggagcagttagtggtggggcacaatgtttcctttgaccgagctcatatcagggagcagtacctgatc

SEQ ID NO: 341792 - DNA, 201 bp, Homo sapiens
tgcagcctccctccttcccttcccttttctcctcctcctcctcagggttcccgcatgcgtttcctggacaccatgagcatgcacatggccatctcagggckaagcagcttccagcgcagtctgtggatagcagccaagcagggcaaacacaaggtccagccccccacaaagcaaggccagaagtcccagaggaaagccaga

SEQ ID NO: 341793 - DNA, 201 bp, Homo sapiens
gcatctatggtgctgggcagccctttgctgagcgcttactaatgcagtttaaccaccggctcacacagcaggaggcagctgagaaggcccagcagatgtaygctgccaccaagggcctccgctggtgagggtccctctcccatccactttaacacccaggacccgaggcctgctttactgtcctttagtactcccatctgt

SEQ ID NO: 341794 - DNA, 201 bp, Homo sapiens
ccagacagaagccagcactgacctcttcattttcatcttcgccatcctctcgaagaaccatgtctaggatgtttcctttgatcttgaagtctcgtgaggtrctgagcttcatgtgctgcatcaggttcacctatgacaagattgtaagcatgggacatctccctactcataggtcctgccagaacagcttaagccattttt

SEQ ID NO: 341795 - DNA, 201 bp, Homo sapiens
aatttcagtttataaggtgccctgtgtccagagtgaatgtgatatgatgtttcaaaaatgaaggcagcagagcttcaaatattctacctgtacctgtcccstacttcaaccacagaagaaatgtttaaagagaatttattctatagagtgcattcttgcactctataggtgacagaaaaacaaactgtgctttaaatacca

SEQ ID NO: 341796 - DNA, 201 bp, Homo sapiens
tcccttcccttttctcctcctcctcctcagggttcccgcatgcgtttcctggacaccatgagcatgcacatggccatctcagggctaagcagcttccagckcagtctgtggatagcagccaagcagggcaaacacaaggtccagccccccacaaagcaaggccagaagtcccagaggaaagccagaagaggcccagcggtg

SEQ ID NO: 341797 - DNA, 201 bp, Homo sapiens
aagctgcctggcccagagtgggcatctggtaatcagcggctgctgctgctactgttctctgcccagagccatcgagtccctgtacaggaagcactgtctcraacaggggaagcagcagctgatgccccaggaggccggcctggcggaggagttcctgctcactgacaatagtgccatatggcaaacggtgagggcaggctc

SEQ ID NO: 341798 - DNA, 201 bp, Homo sapiens
gccatcagcacactggcgagcagagtgggtgttgggatggtgaagtctgcctgtgtgtaggaagaggcattggtggaaggagcgcctcatggatgcccccyggagaggagcggaagctcgctcggaggcctggccggttcccagatggtttatgctcttgattggtgtatcatagggccccagttcttggctgagccaggg

SEQ ID NO: 341799 - DNA, 201 bp, Homo sapiens
tgcgcgcgtgcgcgcgtgcgtgatacaatcagggatttgcctcagactgctgaggttctgggctcagtgttgggaggagtgcaggtactcacgttggttcyccacccaggggtctgccacctgcctccagcccctgcttcctttgctctgtccaggatggtaatagctgtaatgtgggaagcccctttgccaaggacttcc

SEQ ID NO: 341800 - DNA, 201 bp, Homo sapiens
aatgtaaaaagaatggtgctgtaggaccatgagagcccttcgtagctccaacagaacttcttggtgtaactgctggagccgtgggctatggctgaggaccrtggagagctggtggcctgtaagccctgttgggggctgggagctgggtcttctagtctggaatggcaaatgtattcatcttgaaggccatttccaaggtgg

SEQ ID NO: 341801 - DNA, 201 bp, Homo sapiens
ccctgctaagacccatttccttcccctgcaccccaccaggcaccccgactatgatgaggaaggcctctatggggccatcctgccccaagtggtgactgccrgcaccatcactcgccgggctgtggagcccacatggctcaccgccagcaatgcccgggtatgtgacctctgtacctctggcccctgctcttcctctcccag

SEQ ID NO: 341802 - DNA, 201 bp, Homo sapiens
cctctcgacgctaggcccgcgccggtcgcggtaatggcagccaccatttgccgagcgcttgccaagagcagggccgcacgacataggcgccctgtgtcccycagacagcagcccggtgtgacaggcagaatccgtaatcccattttacagaataggatatcagggcctaaggagctttgcccaaggtcacacagctcgaga

SEQ ID NO: 341803 - DNA, 201 bp, Homo sapiens
tatggtctgctgagtggttgtagggataggagaactgaggtgaggtggtaggtcctaaggccaaagcaccctgctaagacccatttccttcccctgcaccycaccaggcaccccgactatgatgaggaaggcctctatggggccatcctgccccaagtggtgactgccggcaccatcactcgccgggctgtggagcccaca

SEQ ID NO: 341804 - DNA, 201 bp, Homo sapiens
cttccaggctgcacagcctttgggtggatgacactgcagggcaggaagagcaggggcactgatctacacagtaagacagccactactgtgggcatcagccrtgagcatgccaaaatcttcaactacggccgcatctatggtgctgggcagccctttgctgagcgcttactaatgcagtttaaccaccggctcacacagcag

SEQ ID NO: 341805 - DNA, 201 bp, Homo sapiens
ggcctgggctcatgctgggaccttcctcctgggagtctgactggtgggtgggggtgggtgccacatggtgccctaatagcggtccactttgaacctgggcwtgcccctgccccttagctgagtaacattaggtacctgaccagcccacaatttacaatgggaggagaagcggtagtcagctatgagcctcccacagggcag

SEQ ID NO: 341806 - DNA, 201 bp, Homo sapiens
ctagctctggtgagcagtgcgccggcttgggttctctaggtgggtgctgggtggaaagggcttcctcttgcccacctagttcttcccagccagagttcccyaggtcttaagggggttggagatgccaccctgcccctgggaggccccacacgtgttggagcaaggagaaagcctgggtgagacctcatggccatcttgtca

SEQ ID NO: 341807 - DNA, 201 bp, Homo sapiens; identical to SEQ ID NO: 72152

SEQ ID NO: 341808 - DNA, 201 bp, Homo sapiens
gcctgggctcatgctgggaccttcctcctgggagtctgactggtgggtgggggtgggtgccacatggtgccctaatagcggtccactttgaacctgggcawgcccctgccccttagctgagtaacattaggtacctgaccagcccacaatttacaatgggaggagaagcggtagtcagctatgagcctcccacagggcagc

SEQ ID NO: 341809 - DNA, 201 bp, Homo sapiens
gctggcactggtggctcaccccagactggcctgcagtgtctgagtaccatgcagggaggggctggtggattggggcctacccagtcccctgcttcactacyttggtccttggactgctccaggtagaagaactggattacttagaagtggaggctgaggccaagatggagaacttgcgagctgcagtgccaggtcaacccc

SEQ ID NO: 341810 - DNA, 201 bp, Homo sapiens
tatatcatctgtctcctttaggatttggggtggaaggcaggcatggtcaaacccatttcactgacaggagagcagagacaggacgtgtctctctccacgtyttccagccagtaaaagaagccaagctggagcccaaagccaggtgttctgactcccagcgtgggggtccctgcaccaaccatgagccgcctgctctggagg

SEQ ID NO: 341811 - DNA, 201 bp, Homo sapiens
ggtggcagagatgagaaaaagggcagccagggtgagcagcagggtgccagctttgcacctgcaagaccctgagagcaagtgtcctgagtgccttgctagtstcaccctgggctcaactctggtgaacagcctgcaagagagcacccagaaggactggtgtttctctagaggggtggggagggcagatctgctccctcctct

SEQ ID NO: 341812 - DNA, 201 bp, Homo sapiens
ctggcacagaggcatcatgcacatgtatacttattgacctgctgccattcagtcacactgtcttccagtcctattctcatttgctcactctggaccggctyactggactcattcagcacagtgttgtgagcacctgctgtgcaatggcccgtggcagccaccgggtgtacacactggagcatagctcctcctttccagtag

SEQ ID NO: 341813 - DNA, 201 bp, Homo sapiens
cagagtgggcatctggtaatcagcggctgctgctgctactgttctctgcccagagccatcgagtccctgtacaggaagcactgtctcgaacaggggaagcwgcagctgatgccccaggaggccggcctggcggaggagttcctgctcactgacaatagtgccatatggcaaacggtgagggcaggctctgaacctgagctt

SEQ ID NO: 341814 - DNA, 201 bp, Homo sapiens
cactagcaagctgcctggcccagagtgggcatctggtaatcagcggctgctgctgctactgttctctgcccagagccatcgagtccctgtacaggaagcaytgtctcgaacaggggaagcagcagctgatgccccaggaggccggcctggcggaggagttcctgctcactgacaatagtgccatatggcaaacggtgaggg

SEQ ID NO: 341815 - DNA, 201 bp, Homo sapiens
ctctgatcgtactgcatactgtgtgctcagggccttagcagactctctgcagggttccaaaaacattgagggaagagaggtacaacttcctgaggtacagyacactgtccacatttaattagctggctcattgtggaaacttcactttctcgtcaacaactaaaagttaagtatgtgataaatgatatagtggttgatgac

SEQ ID NO: 341816 - DNA, 201 bp, Homo sapiens
tgaaccccagcctgctgccagggtgctgtcattttcagtttgtcaatcaatccctgtctaaaacccgggaaagtgctatctggttctgcctcagagctgaytctgaggactaaacaaagggaattgtggaaggcactagcaagctgcctggcccagagtgggcatctggtaatcagcggctgctgctgctactgttctctg

SEQ ID NO: 341817 - DNA, 201 bp, Homo sapiens
tttcctggacaccatgagcatgcacatggccatctcagggctaagcagcttccagcgcagtctgtggatagcagccaagcagggcaaacacaaggtccagycccccacaaagcaaggccagaagtcccagaggaaagccagaagaggcccagcggtgagagcacactgccggtgggcaggagcatagtgcttgggaccccc

SEQ ID NO: 341818 - DNA, 201 bp, Homo sapiens
ggcatgggggcccagcttaatagtttgtttcagtgaacattttctgaggtcctgttacgtgctgggtgctcacgtagggagcgctgatgtgttgaattagsactagacccctgtttatgtgggactcactttctggtgggaagatcacaggcagtaagcaaatacccaagtaaatgtcaggcagtaaaggccacgcagaga

SEQ ID NO: 341819 - DNA, 201 bp, Homo sapiens
gaggagattgggtctctttcaggtgcatgtttgcctacaagctgggtctgaatgacttgccccagtcagtcgcctttttcagtgcagtcgatattgaccgstgcctcaggaaggaagtgaccatggattgtaaaaccccttccaacccaactgggatggaaaggagatacgggattccccagggtgagcacaacacatttg

SEQ ID NO: 341820 - DNA, 201 bp, Homo sapiens
tcagaagaagggaaaacaggaaaaaaattaacacacacacacacacacacacaccctctctctctctctctttctctctctctcactcactcactcactcwctctctcactcactcactctctgggttcagggtttttcttccatggctacccttaccctctggatctcagagctctgggagggagtatgttgagatgttc

SEQ ID NO: 341821 - DNA, 201 bp, Homo sapiens
gagttcgattttgtcaggtttaaaactaggaacctctttttgctttctctttgaaagaagttagttttatgtgtgttgaatctgttgaggcagatactccctttttcccttccataaaggttgcaaggagctccttcgcagctgtgttgtccacacgtggcctcgtcactcactttgatgctgagtgggccttgattgttt

SEQ ID NO: 341822 - DNA, 201 bp, Homo sapiens
cccacccccagcagtgtatctagagtctacccttgctccattctcaggacagccctggtctggggttctggcacagaggcatcatgcacatgtatacttaytgacctgctgccattcagtcacactgtcttccagtcctattctcatttgctcactctggaccggctcactggactcattcagcacagtgttgtgagcacc

SEQ ID NO: 341823 - DNA, 201 bp, Homo sapiens
gcacatactgtcatctctcagcttttgtttttctaatgaaagtcgggtggcaaggggcatggtggtggaattaaatgacatggggcacgtcgtatgtttgrtacgacatctggtacgtgataggtttttccgatttgttattatgcagggagccaggtttgcttgtgtctgtgtgtcttagggggcatgtgtgtgcacgtg

SEQ ID NO: 341824 - DNA, 201 bp, Homo sapiens
agtgaatgtgatatgatgtttcaaaaatgaaggcagcagagcttcaaatattctacctgtacctgtcccctacttcaaccacagaagaaatgtttaaagakaatttattctatagagtgcattcttgcactctataggtgacagaaaaacaaactgtgctttaaataccaaacaagtaaatcagaaagcttattttctatt

SEQ ID NO: 341825 - DNA, 201 bp, Homo sapiens; identical to SEQ ID NO: 72163

SEQ ID NO: 341826 - DNA, 201 bp, Homo sapiens
gatgcatctgttcacaggaggggcatgactgtgagaggagattgggtctctttcaggtgcatgtttgcctacaagctgggtctgaatgacttgccccagtyagtcgcctttttcagtgcagtcgatattgaccggtgcctcaggaaggaagtgaccatggattgtaaaaccccttccaacccaactgggatggaaaggaga

SEQ ID NO: 341827 - DNA, 201 bp, Homo sapiens
gtgaatgtgatatgatgtttcaaaaatgaaggcagcagagcttcaaatattctacctgtacctgtcccctacttcaaccacagaagaaatgtttaaagagratttattctatagagtgcattcttgcactctataggtgacagaaaaacaaactgtgctttaaataccaaacaagtaaatcagaaagcttattttctattt

SEQ ID NO: 341828 - DNA, 201 bp, Homo sapiens
acttatataaaaagaaaacagaccctcctaacatgtaacattaccgttcgtggcaattgttctcaacctttcactctccttttgaccttagcattaagctmctttgctcacttctgagctctcagttacagttcttgaggtggcatcctaaccaatttgcactatctttcaggtgaagcgctggatatttaccagataatt

SEQ ID NO: 341829 - DNA, 201 bp, Homo sapiens
agtagagctgggatttaatgccgtctgacttttgagctgtgccatgtcagtggctgggttgaggcttgctaaaccagctcagggattgggccagtcttgcytcctgtggtcatttatggcagctcctggtgtttgcctccaaggtgtccccacccagtgactctggccggcatgctggagatgggtgtctcctacctgcct

SEQ ID NO: 341830 - DNA, 201 bp, Homo sapiens; identical to SEQ ID NO: 72170

SEQ ID NO: 341831 - DNA, 201 bp, Homo sapiens
cgaggagcgggccctggtgttcgacgtggaggtctgcttggcagagggaacttgccccacattggcggtggccatatccccctcggcctggtaagtagggkcagggttggggacataagcaggcatgggggcccagcttaatagtttgtttcagtgaacattttctgaggtcctgttacgtgctgggtgctcacgtaggga

SEQ ID NO: 341832 - DNA, 201 bp, Homo sapiens
gttctcaacctttcactctccttttgaccttagcattaagctcctttgctcacttctgagctctcagttacagttcttgaggtggcatcctaaccaatttscactatctttcaggtgaagcgctggatatttaccagataattgaactcaccaaaggctccttggaaaaacgaagccagcctggaccatagcactgcctgg

SEQ ID NO: 341833 - DNA, 201 bp, Homo sapiens
gtgctcatgctttccgtaagttttacctccaagagttctaccagcccctcacaatgaatattggagagacatccctttgtgcttccagcagagggaggggraaaaaaatcatcactttgaaatatgccagagcattctgctcatcttaacaatgcctgccctcaggagaaactattttaccagagtctaacttactttggg

SEQ ID NO: 341834 - DNA, 201 bp, Homo sapiens
tcctcctggtgctgtcctcgcaacagtgagtgagttttcacaagatctggctgtgtaaaagtttgtggcatctttcccccttgttctctctcgctcccackctcaactactccctgttcaccatccaccatgattgtaagcttcttgaggcctccccaaaagctgagcagatgccagcaccatgtttgctgtgaagcctgc

SEQ ID NO: 341835 - DNA, 201 bp, Homo sapiens
caaacaaacaaaaattagccgggcgtggtggtgggcgcctgtaatcccagctactcgggaggctttggcaggagaatcgcttgaacctgggaggcagaggytgcagtgagccgagatgccgccactgcattccagcctgggcgacaagagcgaggagactccgtcttaaaaaaaaaaaaaaaaaaaaagtgacaccctgtc

SEQ ID NO: 341836 - DNA, 201 bp, Homo sapiens
cccgtctctactaaaaaaattcaaaaaaattggctgggcttggtggcgggcgtctgtagtcccagctactagggaggctgaggcaggagaatggcgtgctscggatggcggagcttgcagtgagccgagatcccgccgctgcactccagcctgggcgacatagtgagactctgtctcaaaacaaacaaacaaacaaaaatt

SEQ ID NO: 341837 - DNA, 201 bp, Homo sapiens
gagacaggctgcagtgagccgagatcacgccattgcattcaagtctgggtgacaaagtgagaccctgtcttggctgggcgcagtggctcacacatgtaatsccagcactttaggaggctgaggcgggcggatcacctgaggtcaggagttcgagaccagcctggccaacgtggtgaaaccccgtctctactaaaaaataca

SEQ ID NO: 341838 - DNA, 201 bp, Homo sapiens
ggttgcatgaaagtgcaatttgttgggaactttaatcatcttccactggggagccttgctgggctggtttattttcatcctgctcctccctgggtgtgaaracggggttgagggacattttagtacctgtctgctctctcctgctttgctggccttgataaccacattttctaacacaaaacttgggacatgagagcctga

SEQ ID NO: 341839 - DNA, 201 bp, Homo sapiens
tgctggcttgagttttaattaggttgcatgaaagtgcaatttgttgggaactttaatcatcttccactggggagccttgctgggctggtttattttcatcytgctcctccctgggtgtgaagacggggttgagggacattttagtacctgtctgctctctcctgctttgctggccttgataaccacattttctaacacaaa

SEQ ID NO: 341840 - DNA, 201 bp, Homo sapiens
gcatgtcattgtcgggggcggaacttaacccccagacacccccaggaggccaccggtcacccaggggtgccttctggctgggaggagcaaaacaccctttktcttctcaactgacaaaactcagtctctcattaacatatgaaaacagcagttcaatttctcacacaaatgcacacagaaaaactgaattaacattaaatt

SEQ ID NO: 341841 - DNA, 201 bp, Homo sapiens
tctgctgggcataggaggctggaagttccaacatagtcctctaccctaaggggttttcaccattctccctcattctgactaaatatcaaaagcaaggtcgmcttccatcagcatcgggtgcaatgactggaagtagggcgcttgcctaagcctctgcatctgtcctcagcactcctgccctccatgatcaagaggaggcaa

SEQ ID NO: 341842 - DNA, 201 bp, Homo sapiens
gacataaagggtgacatttgtgctcagagttgatttcttggtgatagtctcatgtctaatttgaggttccagaagccctttaaagggtggatgagctgcayaaatggatgtgagggagttacacagtggtgggttcagcagaaagtaaaggagcagcagaatcacagagagaagccccgaactctggctgcccgggcccaa

SEQ ID NO: 341843 - DNA, 201 bp, Homo sapiens
ctcctgtcttggcctcctaaagggctgaaattacaggcatgagccacagcacctggctatgctgctcaatcttgagtgcagatattgtcaattgttgtgcttttttttttttttttgagacagggtgtcattctgtctcctaggctggagtgcagtggcatcatcatagctcactataacctcaaactcctgggctcaggc

SEQ ID NO: 341844 - DNA, 201 bp, Homo sapiens
ttggtgggttttgagatcccctcctttgattctcagatgtggctgttagtagtttaatttctgtatgtggtttctgagtagcttccaacaacctatttttrttaacagttctttaaaaaaaaaaatgctcgagagaaaggaatcttaggaacggattccgtctgtgaaatgcaagggagaattttggccaaagtagaagga

SEQ ID NO: 341845 - DNA, 201 bp, Homo sapiens
gaggcagaagaattacttgaacccaggaggtggaggttgcagtgagcaaagatcgcggcactgctctccagcctgggcaacagagcaagactccgtctccaaaaaaaaaaaaaaaaaccacattaaaaaccaaaattgtgtgtgtccaagttcctaggtagccatagtaagtgctataattgataaggagggctttaggcc

SEQ ID NO: 341846 - DNA, 201 bp, Homo sapiens
gatcccctcctttgattctcagatgtggctgttagtagtttaatttctgtatgtggtttctgagtagcttccaacaacctatttttgttaacagttctttaaaaaaaaaaatgctcgagagaaaggaatcttaggaacggattccgtctgtgaaatgcaagggagaattttggccaaagtagaaggaatggaatggatgac

SEQ ID NO: 341847 - DNA, 201 bp, Homo sapiens
taatcccagctactcggaaggctgaggcaggagaatcgcttgaacccaggaggcggaggttgcagtgatccaagatcatgccagtgcactctagcctgggygacaaagttagactctgtctcaaaaataaaaaaatttaaaaaattaaaaatgaacaacacaacaaaaaaaaatggacaaaagatctgaagagacctgagt

SEQ ID NO: 341848 - DNA, 201 bp, Homo sapiens
ccaatccaaatcccagcaagtcattttatggatattgacaaactgattataaagtttatgtggaaaggcaaaagaccaagaataaccaactcaatattgtrggagaaacaagttagaggactgacgctacctgactccaagacttagtataaagctacattaatcaggacagtgatattggtgaaacaacaagtagatcaa

SEQ ID NO: 341849 - DNA, 201 bp, Homo sapiens
aaaaaagtatgaaacaggatgaaattattaaaaacaaccacttcatgggtgtagaaattgaccaaagacatgcaacaaatcaagaagcatttctttgtccrggcatggtggctcatgcctgtaatcccagcactttgggaggctgaggcgggtggatcacctgaggtcaggagtttgagaccagcctggccaacttggtga

SEQ ID NO: 341850 - DNA, 201 bp, Homo sapiens
cccagctattcggggggctgaggcaggagaatcgcttgaacctgggaggtggaggttgcagtgaactgagatcatcccattgcaccagctagggtgacaaraacaaaattctgtctcaaaaaaaaaaaaaaaagaatgctatgaataactctgtgcccatttcttgataacctagatgaaatagaccaattccatgaaaag

SEQ ID NO: 341851 - DNA, 201 bp, Homo sapiens
aactggtgctctgtggccggaatggtggggccctagaagagctcatcagagaactcaccgcttctcatgccaccaaggtgagccaggggcgtgctttccayggggaaggagtgcaggccgtcttctgtaggcactgaggagatagtggcccactcctggactgctgagctgtaggacatccatgcgtcacactgtcccagg

SEQ ID NO: 341852 - DNA, 201 bp, Homo sapiens
acattgtagaaataaactatccagaatgcaaaggcacttgagaatgtgttctccagagccacatgcctgggatcaaatcccagctctactttctgtcccckgtgtgaccttgggcaagtatccccacttctctgtgccctgccctcaagtgtaaatggagacagcctcagtcttagcccggaggactgctgtgagcgctgt

SEQ ID NO: 341853 - DNA, 201 bp, Homo sapiens
agctgcatttcaactcacactgctgtcgagatgaggcatgtttttacgggatcagttgtgtggctaaggcagttccctctttaccattattccaggtgccyagagactgccacgtaaacagtggtgcacacccaacaccgtcatgcccccagcactcaactgagtgataagttatttctaaatctcttggaattaaatcaa

SEQ ID NO: 341854 - DNA, 201 bp, Homo sapiens
ggggttttttaaacatatttttctttgtttctttgttatttaagataagttgtcatctctttaaaatgacttattacatctgtgagatatttttttgtaarcctcatgggaaccacaatgcaaaacacttgtaataggtttactaaaaatataaagcaacaaaacattctaccagagaaaatcacttaaccacaaaggaag

SEQ ID NO: 341855 - DNA, 201 bp, Homo sapiens
ataggtatagcaacctgttaagaggtagataatataaaattatgtaaattaagacaactaaaagtcaaaatgtggggggacgaggataaagtgtagagggrgttttttaaacatatttttctttgtttctttgttatttaagataagttgtcatctctttaaaatgacttattacatctgtgagatatttttttgtaagcc

SEQ ID NO: 341856 - DNA, 201 bp, Homo sapiens
tttgctaaactgaaaaattcattagtggctttcagcagcagaatggatcaagcagaggaaagaatcagtgagctgaaagatgatttgaaaatacacggccrggcacagtggctcatgcctgtgttcccagcactttgggaggctgaggatggatcactttaagtcaggagttcgagaccagcctggccaatgtggtgaaac

SEQ ID NO: 341857 - DNA, 201 bp, Homo sapiens
tctcaattaatgaaaaggggaattttaaaaggtcacttcattttccattgctggataaggagagataaagaaatttaaactacagatggttcccaacttaygatggttctactcaaccatttttcaactttatgatggtgcaaaagtcatatgcatgtagaaactatactcaagtacctatacacccattctatttttcac

SEQ ID NO: 341858 - DNA, 201 bp, Homo sapiens
catggtgactcacgcctgtaatcccagcactctgagaggccaaggtgggtggatcacctaaggtcaggagttcaagaccagcctggccaacatggtgaaaygctgtctctactaaaaatacaaaaattagccaggcatagtggtgcgtgcctgtaatcccagctacgtgggaagctgaggcagaggaaccgcttgaaccca

SEQ ID NO: 341859 - DNA, 201 bp, Homo sapiens
aacccacgagatttacaaattatgatagtaaaatagtggttctcatatacctgtgtgtgccccttctgaggatccaatctggcagcttgcacaaaagagtkgtagttattgctgactgctgactcttcggggtagcaattggggtgctgaaatcccagttactgaaaacgagaagattacagcgagggagcctaacatgtt

SEQ ID NO: 341860 - DNA, 201 bp, Homo sapiens
tgcgcagcctcaatgctgggattggacggagcctcgccggctgcgtacacgtcacttccgaggcgggaggatgaagttgattgactatggtctctccggcwaccaggtaggggctggggaagaaggaacctccgagatgaggcgatagggtctggccttgagctgaggcgacgccccggcttgggtgaggggaagcggtgt

SEQ ID NO: 341861 - DNA, 201 bp, Homo sapiens
tgttccctgaggggcagcatgaggcctgtggcttttctgtccgctcatgtcagtactgagaggaagaaagttctacaatgctgaacagtcggccgagggtkcagggcctgggtcaatgcttgctagggcttagagctggagtccacagagggagatctgggattcatatcagatgagaggaagagcctaggaaagtcccct

SEQ ID NO: 341862 - DNA, 201 bp, Homo sapiens
aagtacagccactgttgatgccaccaaggacgttctgatgttgccttgcttctgtgaggaggcagagctatgttgtcctcagtggctctgcctgccgtgtyagccacccggaaggtttggagttatgcaacgagtcttcagttttccgtgtttctcctatcttgtctcttgttttgtgtacttaagcctcttgagcttgtc

SEQ ID NO: 341863 - DNA, 201 bp, Homo sapiens
cctgggaaagctttagggagtatggattcatttgtgcaccactgtggatgttaggtgaggtctccaggggtgaacaccatatctgtcattggatatccagwcctttgcagggacagctgtctgcaggccctttgccatcgtcagtcctctgaccttactcagttactatatatagggtggtcagcagccacttctcttgag

SEQ ID NO: 341864 - DNA, 201 bp, Homo sapiens
atagtggcccactcctggactgctgagctgtaggacatccatgcgtcacactgtcccagggaaggcagcaggtctccatagcgaaccgggcccactgcatrgggagagagaactgtccagtggtttacatcctgatgcccctactggctagcactgtgagttgagaaagttctcttttctccctttccttttacctggcta

SEQ ID NO: 341865 - DNA, 201 bp, Homo sapiens
atgcaaaggcacttgagaatgtgttctccagagccacatgcctgggatcaaatcccagctctactttctgtcccctgtgtgaccttgggcaagtatccccmcttctctgtgccctgccctcaagtgtaaatggagacagcctcagtcttagcccggaggactgctgtgagcgctgtgcttggagctgccccagacactaag

SEQ ID NO: 341866 - DNA, 201 bp, Homo sapiens
gattcatatcagatgagaggaagagcctaggaaagtcccctgaactctgctactttgtcactggtgtgtttggttttggttcttccaggaagagtctgccraaggtgaaggccatggacttcatcacctccacagccatcctgcccctgctgttcggctgcctgggcgtcttcggcctcttccggctgctgcagtgggtgc

SEQ ID NO: 341867 - DNA, 201 bp, Homo sapiens
gacccctgtgaggctgtaggtggtggctcacacctataatccgagcgctttgggaggctgaggtgggaggatcatgtgaggccaggagtttgagactagcstgggcaacatagggagaccccatttctacaaaaaataaaaaattatctaggcgtgctggtgtgtacctgttgtcccagttactcagaaggctgagtcagg

SEQ ID NO: 341868 - DNA, 201 bp, Homo sapiens
tgagtcaggaggatcacttgagcccaggagtttgcggctacagtaaactgtgataatactacggcactccagcctgggcagcagagtaagaccctgactcaaaaaaaaaaaaaaaaaaaagaaaaagaaaaaaataagcattaaaccagactggaatgtattatggataatatgctaatgcagtttctttcagaaaagaaa

SEQ ID NO: 341869 - DNA, 201 bp, Homo sapiens
aggttgcaatgagtcgagattgtgtcactgtactccagcctgggctacagagtgagactccatctcaaaaaataaataaataaataaataaataaacttaygtatgtatgtacgtacgtttgtaaagggggggttccaggcccttcagaaaaacagtcctgggttttactgtatttactgggtttaaacaagctaagctag

SEQ ID NO: 341870 - DNA, 201 bp, Homo sapiens
cagcactttaggaggccaaggcaggaggattgcttgagcccaggagtttgagaccaccctgggcaacatagggagaccccatctcttaaaaaaaaaaaaatatatatatatatagatagatagatagatagagatatgcaggtgtaccactcatgcctgtggtcctagctactcaggagactgaggtgggaggatcgcttg

SEQ ID NO: 341871 - DNA, 201 bp, Homo sapiens
gcatgtgccaccacgccaggctagttttatatttttagtagagacggggtttctccatgttggtcaggctggtctcgaactcccaacctcaggtgatccgmctgcctcggcctcccaaagtgctgggattacagatgtgagccaccgcacccggcctctggctaattttttgtatttttagtagagacggcatttcaccat

SEQ ID NO: 341872 - DNA, 201 bp, Homo sapiens
tctcccaacctcgtgatctgcttgcctcggcctcccatagttctgggattacagccaccgcacccagcctctggctaattttttgtatttttagtagagayggcatttcaccatgttagccagggtggtctcgatctcccgacctcgtgatctgcttgcctcagcctcccatagttctgggattacatatttctgggatta

SEQ ID NO: 341873 - DNA, 201 bp, Homo sapiens
cgtgatctgcttgcctcagcctcccatagttctgggattacatatttctgggattacaggcctcccatagttctgggattacaggtgcccggcctcttttwaaaaaaaaaaatatatatatatatatatatatatacacacacacacacacacacacacacacacacatatatttattgcgacttatactgaccattcgtg

SEQ ID NO: 341874 - DNA, 201 bp, Homo sapiens
ggattacatatttctgggattacaggcctcccatagttctgggattacaggtgcccggcctcttttaaaaaaaaaaaatatatatatatatatatatatayacacacacacacacacacacacacacacacacatatatttattgcgacttatactgaccattcgtgacatgcttggactttctcatttgtcttgaacatc

SEQ ID NO: 341875 - DNA, 201 bp, Homo sapiens
taaaggaaccaactcaggtgaaagtcaaatagcaaagtttacattataaggtgcggagagaaaaagtttgggttatagaaattttaaaggccttttaaatmcacacacacacacacacacacacacacacacacacacacacacacacacacacacacaccctgacaccctatagcttttacttcagaactttttgccact

SEQ ID NO: 341876 - DNA, 201 bp, Homo sapiens
cacctgaaaggagcatagttcctctctccctatcaattgtcaagtatttacagagggtcagtttttttcctctcattttaacccacgagatttacaaattrtgatagtaaaatagtggttctcatatacctgtgtgtgccccttctgaggatccaatctggcagcttgcacaaaagagttgtagttattgctgactgctga

SEQ ID NO: 341877 - DNA, 201 bp, Homo sapiens
gtcctcttataagaagacttgacagcaccatttgctgtacatgttttcatagttcattctaaattcacctggtaattgggttggtcatctgtgctacctasttacttttttccaaaggaaaacatgaaacagctctatgataaaacaagtagttgaggtgcctaggctaaacttccacagtgatagggatagggctggggc

SEQ ID NO: 341878 - DNA, 201 bp, Homo sapiens
cggagagaaaaagtttgggttatagaaattttaaaggccttttaaatacacacacacacacacacacacacacacacacacacacacacacacacacacamacacaccctgacaccctatagcttttacttcagaactttttgccactagataaatagaaatttactggcttgcaaaaatatcttgttggatctaaacagt

SEQ ID NO: 341879 - DNA, 201 bp, Homo sapiens
tagtagagatggggtttcaccctgttggccaagctggtcttgaactcctgatctcaagtgatctgcagccttggcctcccaaaatgctgggattacaggcrtgagccactgtgtctatccaaaattacttgcttttaaagtatgatttggacatctgtgtaatattgtttcactcaaagctgtcatgtgagaaatagccac

SEQ ID NO: 341880 - DNA, 201 bp, Homo sapiens
ctttaaagggtggatgagctgcataaatggatgtgagggagttacacagtggtgggttcagcagaaagtaaaggagcagcagaatcacagagagaagcccygaactctggctgcccgggcccaaggaaccctcacccttagcgggactttgctacctttgcactcttttaacctgggtctagagctcatggatctggcaag

SEQ ID NO: 341881 - DNA, 201 bp, Homo sapiens
gaacatgaacttcaggatcaaagcgacttggtgcatagatggatgtgtgttgggagtccacagtgttcctggcttcactctggcatccagagttgatgtcmtcttacgaaaggaagcagaattttttttttatatgtgggcttgagatgggatattaagtaggtggctgagggttttacattattgctccaagcttatgaa

SEQ ID NO: 341882 - DNA, 201 bp, Homo sapiens
tccagggccaggagaccaaggctggcctgtgatgttgtgtcaggtgctcaaggaatcccagaagtgtacaagacggtgtgtagttttcgctcttttcttcrtgtcatggattgctggcttgagttttaattaggttgcatgaaagtgcaatttgttgggaactttaatcatcttccactggggagccttgctgggctggtt

SEQ ID NO: 341883 - DNA, 201 bp, Homo sapiens
cctgcgtgtggcaggtgcttgcgtgcactgacttgacccctccccagccagtgaggctgttagaccctccaccttctgtcccatctctatctgcctgtggsccttcaggcactctgctccctctgcctcaagcactccctgggaaacagcccatcagatctgggaagggcctcggtcccctgccccagcttttctacagga

SEQ ID NO: 341884 - DNA, 201 bp, Homo sapiens
attgcagcattcagaacaggacctctgtgggcaggactcaagggctaaaaggaagttgccaagctgaaatgccaacagacttccaactaacccattcgcasatcccgagtccaaggagtattatcggcatcgggattgagtgaattgacctcatggcaagtgtagggtgtttgatggtctgtctctgtcccataggcttga

SEQ ID NO: 341885 - DNA, 201 bp, Homo sapiens
tcctgcgtgtggcaggtgcttgcgtgcactgacttgacccctccccagccagtgaggctgttagaccctccaccttctgtcccatctctatctgcctgtgscccttcaggcactctgctccctctgcctcaagcactccctgggaaacagcccatcagatctgggaagggcctcggtcccctgccccagcttttctacagg

SEQ ID NO: 341886 - DNA, 201 bp, Homo sapiens
tcaccattctccctcattctgactaaatatcaaaagcaaggtcgccttccatcagcatcgggtgcaatgactggaagtagggcgcttgcctaagcctctgyatctgtcctcagcactcctgccctccatgatcaagaggaggcaaggccacattgtcgccatcagcagcatccagggcaagatgagcattccttttcgatc

SEQ ID NO: 341887 - DNA, 201 bp, Homo sapiens
ggttccaagataaacctggggcttctgggactgtcagaaagtgacattctttacttaccacaggtcagaaaccctgtacatggactgtatacacaaaataygaggccagattttccaggggctttactggctctatatgtcacgtttgattccttaaaggaaagcactccattccagtcaaagccttggtaaaataaccag

SEQ ID NO: 341888 - DNA, 201 bp, Homo sapiens
aggtgtagaaagagctagattggttgcagcctagtgtttgccttatttgagcagttggctgcctatgactggctgaaactgggctgctgtgattggctgaractgggctacttgttacaagagtaggttaaagtttgtttgcacatccagttaggttacaggtcactagctatggaggaacatttaggctaaacttaaaat

SEQ ID NO: 341889 - DNA, 201 bp, Homo sapiens
cggctcactacaacctccgcctcccgggttcaagcgattcttctgcctcagcctcctgagtagctgagattataggcgtgtaccagcacacctggctaacttttgtatttttagtagacacagggtttcaccatgttggccaggctggtctcaaactcctgacctcaagtgatccgcccacctcagcctcccaaagcgttg

SEQ ID NO: 341890 - DNA, 201 bp, Homo sapiens
atggtcatttcctgattatatgctaaagaaggggtggattattcatgaattttctaggaaaggggtgggtaattcccggaactgagagttcctccccttcrtagactatatagggtaacttcttgacattgccatggcatttgtaaactgttatggtgctggtaggagtgtcttttagcgagctaatgccttataattagc

SEQ ID NO: 341891 - DNA, 201 bp, Homo sapiens
ggctcactacaacctccgcctcccgggttcaagcgattcttctgcctcagcctcctgagtagctgagattataggcgtgtaccagcacacctggctaacttttgtatttttagtagacacagggtttcaccatgttggccaggctggtctcaaactcctgacctcaagtgatccgcccacctcagcctcccaaagcgttga

SEQ ID NO: 341892 - DNA, 201 bp, Homo sapiens
aggcttggccatttaaactgcttagtggagggagaggtctgtgatggccactgaatttgctactggagaagagtcttgatccagacctcaagagagggttsttggatcttgtgtaagaaataatttgaggccaatccatagagaaaagtgaaagcaagtttattagaaaagtaaagaaacaagagaatggctactccatag

SEQ ID NO: 341893 - DNA, 201 bp, Homo sapiens
gcaggtctgcagggccagcatgggagctgtccaacctgccaccaggtgaagaaagctacttgcaggaacagtagaataggtaagagttcatttctgtattaaaatatatatatatatatatatataaaatatataaaatgtgtaaaatcacatgaatatacgtagaatatatttttaaaaaatcactgggcatggctgctt

SEQ ID NO: 341894 - DNA, 201 bp, Homo sapiens
gtctgcagggccagcatgggagctgtccaacctgccaccaggtgaagaaagctacttgcaggaacagtagaataggtaagagttcatttctgtattaaaakatatatatatatatatatataaaatatataaaatgtgtaaaatcacatgaatatacgtagaatatatttttaaaaaatcactgggcatggctgcttactc

SEQ ID NO: 341895 - DNA, 201 bp, Homo sapiens
gaggctgaggcaggagaatcgcttgaactgggaagcagaggttgcaatgagtcgagattgtgtcactgtactccagcctgggctacagagtgagactccayctcaaaaaataaataaataaataaataaataaacttacgtatgtatgtacgtacgtttgtaaagggggggttccaggcccttcagaaaaacagtcctggg

SEQ ID NO: 341896 - DNA, 201 bp, Homo sapiens
acatttttggggcactgaacatttacataggatatgttgcaggggagggtaagcaagaagcaacgacgccaccctctgcctcctctcctcccatcactccrtttcctttctgactcctcatagagtagtcctccacccccagttctcatggtttaccctgctgcgtccagggggtttctcgtcaggccctcctgcttagcc

SEQ ID NO: 341897 - DNA, 201 bp, Homo sapiens
ttccgcctcagcctcctgagtagctgggattacaggtgcacaccaccacactcagctgatttttgtattttttgtagagacgtggtttcaccatattgacyaggctggactcctgatctcagatgatctgcccgcctcagcctcccaaagtgctgggattacaggcgtgagccaccagtacagcccttgttttattttctt

SEQ ID NO: 341898 - DNA, 201 bp, Homo sapiens
tgttgaggaatttctggtctagtcctagtttattgagtatgtttaccatgaaagggtgttagattttgtgagatctcttttctgcatcaattgagatgatsaagtggggtttttccctcgttctattaatgtgatatattataatgttcaattttcttttttttctttctttttttgagaaggagtttttgctcttgttgc

SEQ ID NO: 341899 - DNA, 201 bp, Homo sapiens
attttgcacaggagggccctggtaacttggtctttgctttttcttggcagttaccgaatgctgtttaaaaaaaagaaaaaaaaattggccaggcgcggcasctcacgcctgtaatcccagcactttgggaggccgaggcaggtggctgaggccgggagttcaataccagcctagccagcatggcaaaaccccatctctacg

SEQ ID NO: 341900 - DNA, 201 bp, Homo sapiens
tgatcctcccacgtcagcctcttgagtagctaggactataggcatgtgccaccacacccagctaaatttttttttttctacttttatgtagagacacggtstcactatgttgcccagattggtcttggacttgtggcctcaagtgatcctcctacctgagcctccttattgtggttttgatttgtatttccctaattaaaa

SEQ ID NO: 341901 - DNA, 201 bp, Homo sapiens
ttttgcacaggagggccctggtaacttggtctttgctttttcttggcagttaccgaatgctgtttaaaaaaaagaaaaaaaaattggccaggcgcggcagstcacgcctgtaatcccagcactttgggaggccgaggcaggtggctgaggccgggagttcaataccagcctagccagcatggcaaaaccccatctctacgt

SEQ ID NO: 341902 - DNA, 201 bp, Homo sapiens
tccagcactttgggaggctgaggtgggaggatcactggatcacttgagcccaggagttcaagaccagcctgggcaacataacaaggctccatctctatttaaaaaaaaaaaaaaaaaaaaaaaaaaaaactaaggcatagagtatctgaatggataaaaagtccttggaaaaggggcaaggtgtctggtatggcagacgag

SEQ ID NO: 341903 - DNA, 201 bp, Homo sapiens
tgtggcttgttaatctcacttaatgtatctttctacatcagcatgtatggatttacctcatcctttcaatacagtaatccattgaatgagtgtgacataaytgatttagccattttcctggacacttgaggattttttttccccctcagtctttgaccattagcagcagtgtgctgtgtagaacattctcaaatatttata

SEQ ID NO: 341904 - DNA, 201 bp, Homo sapiens
ccagcactttgggaggctgaggtgggaggatcactggatcacttgagcccaggagttcaagaccagcctgggcaacataacaaggctccatctctatttaaaaaaaaaaaaaaaaaaaaaaaaaaaaactaaggcatagagtatctgaatggataaaaagtccttggaaaaggggcaaggtgtctggtatggcagacgagg

SEQ ID NO: 341905 - DNA, 201 bp, Homo sapiens
cagcactttgggaggctgaggtgggaggatcactggatcacttgagcccaggagttcaagaccagcctgggcaacataacaaggctccatctctatttaaaaaaaaaaaaaaaaaaaaaaaaaaaaactaaggcatagagtatctgaatggataaaaagtccttggaaaaggggcaaggtgtctggtatggcagacgagga

SEQ ID NO: 341906 - DNA, 201 bp, Homo sapiens
acgtttcccaggtcaggaagctgcttttcaggtgcggtgtgagggggtcactctgaagcccccaccccgggctggccctgtgcctttgctgtggagcaccmggcagacagactcactttggttccaagccctaactgggatcctcagtctaccttgtttccacatcccacccacctctcgcttcccccactgacccacatc

SEQ ID NO: 341907 - DNA, 201 bp, Homo sapiens
ctgaggcagagaattgcttgaacctgggaggcggagttggcagtgagccgagatcacaccactgcactccagcctggatgacagtgtgagactctgtctcaaaaaaaaaaaaaaaaagaagttgccacttgttcctaacaagtaaaaagcttaacaaactgaaaaatcaactcttctttgatacatcagagacatgaaatc

SEQ ID NO: 341908 - DNA, 201 bp, Homo sapiens
tttatggatattgacaaactgattataaagtttatgtggaaaggcaaaagaccaagaataaccaactcaatattgtaggagaaacaagttagaggactgaygctacctgactccaagacttagtataaagctacattaatcaggacagtgatattggtgaaacaacaagtagatcaatggaacagaatagagagcccagaa

SEQ ID NO: 341909 - DNA, 201 bp, Homo sapiens
acaacacaacaaaaaaaaatggacaaaagatctgaagagacctgagtgaagaaaatatacaagtggcaaataagcatatgaaaagatgctctgcatcatatttcataagggaaatgcaaattaaaatgacagtgagataccaccactaaataggatggccaaaatccagaacattgacatcaccaaatgctagcaaggaag

SEQ ID NO: 341910 - DNA, 201 bp, Homo sapiens
ctactcagaaggctgaggcaggagaatcgcttgaacccgggaggcagaggttgcagtgaaccgagatcgcgccactgcactacagcctgggtgacagagcragactgtctcaaaaaaaaaaaaccaaaaaaaaccaaaaaacaaaaaacacaggtataatctaaataatcaagttaaattagaaacggctttggtacattg

SEQ ID NO: 341911 - DNA, 201 bp, Homo sapiens
agtgaccttggtgagctccctcagctgtgaagataggtgatgctcacagctgatccaggtgaacaggaacatcatggggtgttctgagcatgatacttaasacatctgtccacctcggccctcctttctctttgccctgtggatgtttgtagcactgggcgtgagcccggcattgggccctagctcccagcttcatgctgg

SEQ ID NO: 341912 - DNA, 201 bp, Homo sapiens
gagctcaagcagtccacccatcctggcctcccaaaatggtgagattacaggtgtgagtcaactgcgcctgatctaaattcactttaagaagcatattaagrccggacgtggtggctcagcattttgggaggctgaggtgggcagatcacaaggtcaggagttcgagaccagcctggccagtatggtgaaaccccgtctcta

SEQ ID NO: 341913 - DNA, 201 bp, Homo sapiens
atcccattcatgagggcagagcactcatgactcaatcacctacaaaaggtcacaactcttaatactattggattggggatacagtttcaacatgaattttraaagggacaaaaacattcaaaccatagcacaggataaagggaaaaaagactatacagacatttcatagtcaaactacagaaaatcaaagataaagaaaaa

SEQ ID NO: 341914 - DNA, 201 bp, Homo sapiens
gcaaagttagggaaaatattttacttttggtgattgggggtgtgtgtgtatggtatacaaacagtccgtgcaataacagtattgtttgtatttacttttcytaatgtaatacgtttccaaattaacattcttagactgcttttatgttttctttaatgacagtaaaaatacctttctctgccatctccattttcgttgctt

SEQ ID NO: 341915 - DNA, 201 bp, Homo sapiens
tcagtaaggattatattaatttctcattggtcttttccagtggaccttctctgtgtgtgtgtgtatgtgtgtgtgtgtgtgtgtgtgtgtgtgtgtgtgtrtatatatatatttaaagatttgtaggtgctttgttggctgctagtatcttttgtcatatagctatatgattctttaaaacctaaagccactgctggacac

SEQ ID NO: 341916 - DNA, 201 bp, Homo sapiens; identical to SEQ ID NO: 72248

SEQ ID NO: 341917 - DNA, 201 bp, Homo sapiens
taacctgttacctgggtagtaatgagaggcaaaaagatgataattgtggaagtttgaagtactctaaaatataaagccctgtcttttttgtttaattatcrtttacaggctgcccaaattgtatctttgtgaattttgtctaaaatatatgaaaagtagaactattctgcagcagcacatgaagaaatgtggttggttcca

SEQ ID NO: 341918 - DNA, 201 bp, Homo sapiens; identical to SEQ ID NO: 72250

SEQ ID NO: 341919 - DNA, 201 bp, Homo sapiens
ttgactgtttttgtctactctgaatgtctagaattttgaaagatgaaagattcacttttactttcattgcaggattctttctactaatccagatacttgtkgaagtgctgactagtttcttggggaaagatgtcaaggaagagttgaaattcctagactggtgagcagagattgcggagtacagaatagccatcacccact

SEQ ID NO: 341920 - DNA, 201 bp, Homo sapiens
gattaacagaaggaagtgagaggctgccccgtcgctacagtgagggtgacagggctgtcctcaggggcttcagtgagagcagcgaggaggaggaggagccrgaaagccctcggtcaagctcgccaccaattctcacaaagcccacgctgaagcgaaaggtaacgcatttctttccaggtcttctcttcctccaattccagt

SEQ ID NO: 341921 - DNA, 201 bp, Homo sapiens; identical to SEQ ID NO: 72254

SEQ ID NO: 341922 - DNA, 201 bp, Homo sapiens
catagtgataaagggatcagtacagcaagaggatataacaatggtaaatatatacgcacccaatataggagcacccagatacataaagcaaatgttattasatctaaagggagagaacaactccaatatggtaatagttggggacttcaacacttcacgctcagaattgggcaggtcagctgtgcagaaaatcagcaaaaa

SEQ ID NO: 341923 - DNA, 201 bp, Homo sapiens
gtggaatagacttgaagataggggaaaacatgcttaattgtgggaattaaaatggctcaggataaagaatatagggtgtggagaatggcaggaggtgagghtggaaaagtgcaggggctagatcataaaggctcttccagattatgttcatttattttttgtcttttccttctttgccaccaacaaatgtaccatgtaagc

SEQ ID NO: 341924 - DNA, 201 bp, Homo sapiens
acagattagaagtgtttatattagaaaaggaggccaaaatattacataattaattggaaagtgaacatagtgctgccctatattttggggtactcagagtmcagtagctcatcttgggtgctattgttttctctctactctccccacttctcacacatccctccagtggtttaacgtggtctctcttgctttaaaaatatt

SEQ ID NO: 341925 - DNA, 201 bp, Homo sapiens
tggtacatctatcacagttactgaaccagtgtagatacatcagtaactagagttcatactttattcagatttccatagttttccctaacgtcctttttctrttccaggatcccacccagcatatcgcattacatttagtagtcatgtgtctttaggttcctcttggctgtggtagtttctcagaatttccttagtttcgat

SEQ ID NO: 341926 - DNA, 201 bp, Homo sapiens; identical to SEQ ID NO: 72261

SEQ ID NO: 341927 - DNA, 201 bp, Homo sapiens
catttaacatttaaaagaacaatagtattcactttgcttattgagggtggtactgcagaaagattcagaacataggctctggagtcagactgccaggcttyctatcccagcatcttctcttgctcttgcgtgacctggggcagattacttaaatttttttctaccccacatgcctcatttgtaaagtggagttgtagtggt

SEQ ID NO: 341928 - DNA, 201 bp, Homo sapiens; identical to SEQ ID NO: 72262

SEQ ID NO: 341929 - DNA, 201 bp, Homo sapiens
tacgatgtggagccatttcttttttatgtactaacacagaatgatgtcaagggctgccaccttgttggctacttttctaaggtaagtatgtcagcttaaartttgtttgaactcatatagaaatctgaaagaatctttgctggttctcactcggggacacaacaagatgcagcacctcctaggtgtcatctagctgtttgg

SEQ ID NO: 341930 - DNA, 201 bp, Homo sapiens
gtatatactgtttgaagagaatattaaactacctgggttgttgaggagttctgttagtatcgcagacagtgtcttgggagctaatgtgggcatccattggygttttgatagaaagctctggcaactccatgaacacagacaaggctgccaggagcaaaagagcagcagagtgctcctgggcctggccaacctggagcctca

SEQ ID NO: 341931 - DNA, 201 bp, Homo sapiens
atctcttcccctattgagggacatttggtttcagtttttggcaattatgaataagctttctataaacattcatatataggtttttgtgtgaatatagtacrgtagtttcctgtggctgctgtaaaaaattgcgaaactggatagctttaaaacagcagaaatttattccctcactatcctgagggtcggaagtctgaaatt

SEQ ID NO: 341932 - DNA, 201 bp, Homo sapiens
agaagattgtctgtgttgaaggctcatagaggtcaaacgatttgccgtagtatattagaatgtagatgctggtagagtcattaaaagagaaaaatacacayttggagttgagataaactgaaattgttaaacttgtgcaataattaaaagtattaactgagttttgttttgttttgttttgtttttgagacagagtcttac

SEQ ID NO: 341933 - DNA, 201 bp, Homo sapiens
caacaacaacaacaacaagcagagtaccccccccattgttaagttgttaaaataagtctttattttatatcttgaaagctcaagattagggtaaggatcamgttacagagctgttttttccccatgcaaagtggcctggttcatattaggaatgaaactagtgactgtaatgtaattaagcactgtgttgtatagcactgc

SEQ ID NO: 341934 - DNA, 201 bp, Homo sapiens
ctaaggtaagtatgtcagcttaaagtttgtttgaactcatatagaaatctgaaagaatctttgctggttctcactcggggacacaacaagatgcagcacckcctaggtgtcatctagctgtttggaaagaatagaaggaacatttggaaacttaccaggtgctagaaggtgcttagtaacattcaacaacctatattctcc

SEQ ID NO: 341935 - DNA, 201 bp, Homo sapiens
agcctcccaaagtgctgggattacaggtgtgagtcaccgcacccggccgaagtagtgatttttaactgtcgatcagcattgtgaatactcatttctagaamaaatggtctcatttactagtctattgaattaaagaaggtaatgtaggaacttgaaagttggggttcttattttcaagattttttataaagttgagtatct

SEQ ID NO: 341936 - DNA, 201 bp, Homo sapiens
actagtctattgaattaaagaaggtaatgtaggaacttgaaagttggggttcttattttcaagattttttataaagttgagtatctagactgcaaaatgtrtcagtggttttagagggaagaattagcttttcattctgagtttctaaaactaggtatattagacttgggttcttttctggcttttgatagactttctcag

SEQ ID NO: 341937 - DNA, 201 bp, Homo sapiens; identical to SEQ ID NO: 72263

SEQ ID NO: 341938 - DNA, 201 bp, Homo sapiens
ctttttgaggcaacccaagatttctgtagatctgccctaattagtaaatgttattgctttatggataaagttgaagtcctagaatctgaacccaatttctrctttctcataggaaactagttctgtgctctgatacaatgtttactcaacaagtacatagagtgtctgatctgcagtcttctggcctattgtcaatagatg

SEQ ID NO: 341939 - DNA, 201 bp, Homo sapiens
actgcgactatcctgttttatttatttatttatttttttctgttgggtaaatctgtactttttctttaatgagacctgtgctttttacaaaggattgtggttttgtttttttttggtttttttttttttttttttgagacagggctttgtcctgtcgccaggctgtaggtgctgtgatcatggctcactgtagcctctgtt

SEQ ID NO: 341940 - DNA, 201 bp, Homo sapiens
gtttctaaagatcccaaaacataatactgatgcttagtacatgttgttttcccctttcaacctttcccttcctccacaccacagttggaatttctttttcktactgctagaaaacacttactgtttctctcacttaatgtcttctgccgaggagtcactgtgtctgtttacttgtatatatcttactgctcttgtactaga

SEQ ID NO: 341941 - DNA, 201 bp, Homo sapiens
cgactatcctgttttatttatttatttatttttttctgttgggtaaatctgtactttttctttaatgagacctgtgctttttacaaaggattgtggttttktttttttttggtttttttttttttttttttgagacagggctttgtcctgtcgccaggctgtaggtgctgtgatcatggctcactgtagcctctgttttct

SEQ ID NO: 341942 - DNA, 201 bp, Homo sapiens
gacctcccagagtgttgggattacaggcgtgagccattgcgcctggcttatctctttttttaagatccctgaagctttctaggttttatgcagtcatgatygtaacatgtttctgcttcataaggttaagcaaaactgtcctttcttttttctaataggataacatgctcttttgtgattcatgtgaccgaggttttcaca

SEQ ID NO: 341943 - DNA, 201 bp, Homo sapiens
taaagcagatgctggagaactgaaatgcaaaatggaaaattgaagtaacaccaaggtaataacttcctgaatcagctacaaccccatgggctggggaaacaaaaaaaaaaaaaaagaggtttgaattattggaagcttggaggaggggctccacagagctgagattcagacttaggaggaaggcccgctgcctgattgctt

SEQ ID NO: 341944 - DNA, 201 bp, Homo sapiens
tcattcacagagtactatttatagtttgcagaatattcttaataatatagattttaataaagctgtaggttacttactaattatatgttatgtattaaaarggaaccttacaagtatcttttttaatacttaccctttcccctgtttaattgtttagatcaaaaggtcccttcagcaaagttcgaactggccctggaaggg

SEQ ID NO: 341945 - DNA, 201 bp, Homo sapiens
gcaaatgtgtatgtacaaagactttaaaactcttaatgcagttgcataagtaaataccatatatagaaaatttcttaggccacaggaaattttaatgaacytgcctatttcaggaagttaaaatagaactaaaacttgccctgagttaagaagtggcaatcagtcagttaacaaaaataagctttgaaggatagatacagt

SEQ ID NO: 341946 - DNA, 201 bp, Homo sapiens
cagattagggatactcaacttgtataacatttaatactatctgcagttttcaggtattcactgtaggttttggaaaggtgtattcccagtgggtggataarggggactattgaataaacaagtaattaaagccatgtggttagtaatagataccctcttattatatgtaaaatactatattcagcattatatattaatttg

SEQ ID NO: 341947 - DNA, 201 bp, Homo sapiens; identical to SEQ ID NO: 72246

SEQ ID NO: 341948 - DNA, 201 bp, Homo sapiens
tgtttaattctgccaacaacccagtgaaatatagctgctgctgttactttcatttttcaaaggaagaaactaaggcatagtaaatgttgaactgggatgaraatccgagtagtctggcaccaaagtctgactcttaaccattgctttatgttgcttctcttatataaaaacaggaaagaaaaagttgttactgtgacattt

SEQ ID NO: 341949 - DNA, 201 bp, Homo sapiens
ctcccttcctttataaacaaatatattctcatggtccattaggcatactgatactatgacgtttttctccctgtattatgatagtctgttcatttatctgcctgtcctactagaattaaaggcaaaggctgcttttttgtttatttttcagtgtctctcaaggggcctggctcatagtggtttgaaatattaattgaacaa

SEQ ID NO: 341950 - DNA, 201 bp, Homo sapiens
tactaattataatttttaaaacttcatttgattataaaatgccagttgattttgcatatattaagatgtgataaaagtacatcttagaatctatgaaatayggcatttaaatgaaaggatttctatcacttatttaaaaggaatatctcacagagatctgtttaatagtaaatcttgatgatgatgatgatgatgatgatg

SEQ ID NO: 341951 - DNA, 201 bp, Homo sapiens; identical to SEQ ID NO: 72256

SEQ ID NO: 341952 - DNA, 201 bp, Homo sapiens
tggcacagtctcagctcactgcaacctccacctccgggttcaagcgattctcgtgcctcagcatcccaagtagttgggattataggtgcacgccaccatgyctggctaatttttgtatttttagtagagacggggtttcaccatgttggccaggctggtctcaaactcctgacctcaagtgatccacccgccttggactcc

SEQ ID NO: 341953 - DNA, 201 bp, Homo sapiens
acctgagatcatgccactgtactccagcctgggtgacagagtgagaccctgtcttccaaaaaaaaaaaaattgcaattctttgtgacacatggcaagatcrtaaatatatagacagagtctatgtgccacatgctggagatgccagtgaatgactgaattctttccctgaactataggagagatttgtgaataagtaatgt

SEQ ID NO: 341954 - DNA, 201 bp, Homo sapiens
atcttactatagtattttgaaataatattcaaaatattttttggcaaacaacatcctcattttatatgtgctaattctatttggttttaaaactgttttcrtattattaatagaaaagatagtgttcataactgtaaatacttgctttctctattaaacagaaaccatttctccaccgaaggaggagagtccgaaagcgca

SEQ ID NO: 341955 - DNA, 201 bp, Homo sapiens
gcaacaggaaatcaagcacttcagattggcccacaggtaagagtttagaacagacttagaaacaaatagtattctgtacatgtattattcgggataacacyaattatctataatggatttatatttgattattaacaattggttatagaatataagaacacattgaaaaaacatgtagatgatactgaggtgataactgtg

SEQ ID NO: 341956 - DNA, 201 bp, Homo sapiens; identical to SEQ ID NO: 72258

SEQ ID NO: 341957 - DNA, 201 bp, Homo sapiens
accagcgtaagggctatggcaggtttctcatcgatttcagtaaggattatattaatttctcattggtcttttccagtggaccttctctgtgtgtgtgtgtrtgtgtgtgtgtgtgtgtgtgtgtgtgtgtgtgtgtgtatatatatatttaaagatttgtaggtgctttgttggctgctagtatcttttgtcatatagcta

SEQ ID NO: 341958 - DNA, 201 bp, Homo sapiens
atcgagtgtaaaacatgcagctcctgtcgagatcaaggcaaaaatgcggtgagtatctctgccttctaatatgggtgtttcatttagtagtagaatgtacsaccagcattttcatctaagtatgactggttatttttcagacacttggtccagtagcatttagaatagccggtagtctctttaaactacatgtcattagtt

SEQ ID NO: 341959 - DNA, 201 bp, Homo sapiens; identical to SEQ ID NO: 72260

SEQ ID NO: 341960 - DNA, 201 bp, Homo sapiens; identical to SEQ ID NO: 72259

SEQ ID NO: 341961 - DNA, 201 bp, Homo sapiens
aaaattaaatactagttaattgtagtgacattaatgctctctaatctataaactacttatgcctcagtttcccatttagtagggtgttacaagaaataatrcatcatggtgctttgtgggttaaatacatgttcagaatattctcatcatgtaagttttcacccatgtagtaacattgcctggccaaaatattagcaaaat

SEQ ID NO: 341962 - DNA, 201 bp, Homo sapiens
gaaaaagcaaaaccccaggaaactaacacacaagctcatgaaacacagcaattgagggccatttactgtgggatcagttagccccaaacactgtggtgtawctttaaggaagcacactgtttcatgagctgacaacaattaatgtgactttaagataaggttacattgtatttgcatttccatattatacatatatattat

SEQ ID NO: 341963 - DNA, 201 bp, Homo sapiens
aggaggaggagccggaaagccctcggtcaagctcgccaccaattctcacaaagcccacgctgaagcgaaaggtaacgcatttctttccaggtcttctcttyctccaattccagtttatcttacaccttctcgttttagcttacagttctgaaagagtataagttagaaattcctagtgcattgctttataaaccttaagcc

SEQ ID NO: 341964 - DNA, 201 bp, Homo sapiens
gttatgatcattttttaagtgagctctttgcaagctgcccaaatcacaagagcactcaacttagaaaagaaagcttttccacatgtctgtcaactgttccrgagactatagtacagatagatggaaaccacaggccccttgtctactcaaggtggggagaggaaatagattcaggaatggaaatagagggctagcatttac

SEQ ID NO: 341965 - DNA, 201 bp, Homo sapiens
aaatggcacaaagtaaatatagattgaaaggaagaacagacagttcacccttcactaaagtggtcagaaaaaggtcacaaagaaaggaggcatttgagccaaataaatggagaataggaaagagagtgcagaagagcagcagaacttctggagcgggacgtgtgagacagcaggcagtgaaaacagcccgcggccacggta

SEQ ID NO: 341966 - DNA, 201 bp, Homo sapiens
cttaaatatgttaattttggtaatttagtttgagttgcgatactgttctcagtcttccctctagcttccctgtcctaaagtaggcttctcttcagtgattsctctaaacccaactttgttcctttttttaatccagactgctaaagtgatacaatgagctttatatgtgaacctggtactgtgacctgccattcataggtc

SEQ ID NO: 341967 - DNA, 201 bp, Homo sapiens
tctgacttaatttaataaagaaagtggtttgaagccacttgggaaagttcatgttgactagataagaggacattttgaataatgaaaggattcataaatayagtgcagaaagtcatttttgagagcatagatatagcttagatgatgcttgaacctgtgtttcaaaaattttgcaggtagattttattacagtgtctttgg

SEQ ID NO: 341968 - DNA, 201 bp, Homo sapiens
aatggcacaaagtaaatatagattgaaaggaagaacagacagttcacccttcactaaagtggtcagaaaaaggtcacaaagaaaggaggcatttgagccaaataaatggagaataggaaagagagtgcagaagagcagcagaacttctggagcgggacgtgtgagacagcaggcagtgaaaacagcccgcggccacggtag

SEQ ID NO: 341969 - DNA, 201 bp, Homo sapiens
ttactttatatagatcatgggaacaataaggtataagaaagaagcttggataggtctgagagaaatatatggcatattttctgtctctgcacagatttttkcactgattatcagtagtttttgtctttgtgatacagagcaattgaaatcagcttgtagagtttttcttggaaaatgctttgaatatctcttctatttttc

SEQ ID NO: 341970 - DNA, 201 bp, Homo sapiens
tttaacctgttacctgggtagtaatgagaggcaaaaagatgataattgtggaagtttgaagtactctaaaatataaagccctgtcttttttgtttaattaycgtttacaggctgcccaaattgtatctttgtgaattttgtctaaaatatatgaaaagtagaactattctgcagcagcacatgaagaaatgtggttggttc

SEQ ID NO: 341971 - DNA, 201 bp, Homo sapiens
atggcacaaagtaaatatagattgaaaggaagaacagacagttcacccttcactaaagtggtcagaaaaaggtcacaaagaaaggaggcatttgagccaaataaatggagaataggaaagagagtgcagaagagcagcagaacttctggagcgggacgtgtgagacagcaggcagtgaaaacagcccgcggccacggtaga

SEQ ID NO: 341972 - DNA, 201 bp, Homo sapiens
atataaaagaagtgttaacagtagtaatattacagggaatatacagggacatagagggacaattttgctagcggtttcttagttatgattttgaataccattttttttgcagttagaaactttactgtcttgttctggatgataaagacacatgtttgaagacaggtttcctatgctgaagaataacaataatttgttttc

SEQ ID NO: 341973 - DNA, 201 bp, Homo sapiens
tggcacaaagtaaatatagattgaaaggaagaacagacagttcacccttcactaaagtggtcagaaaaaggtcacaaagaaaggaggcatttgagccaaataaatggagaataggaaagagagtgcagaagagcagcagaacttctggagcgggacgtgtgagacagcaggcagtgaaaacagcccgcggccacggtagag

SEQ ID NO: 341974 - DNA, 201 bp, Homo sapiens
acatcatttgatcttcactgcctctaataggtccaatctcttttattacatttgtcttctcttctacatttaaataggtttagtctttcccatcttgaacmcttagaatacattaaaacctattgcaatttctttttagctaccttttgtctgctctctgtccgttcatggcagtttgttggtcctgtgactttagttctt

SEQ ID NO: 341975 - DNA, 201 bp, Homo sapiens
ttaggagagattaaggtaatactgtacttaaattataaactgggtgtgcatattgtattcattcttttcatgtaagaactaaaattttctcagtcgttttytgccttattgactgtttttgtctactctgaatgtctagaattttgaaagatgaaagattcacttttactttcattgcaggattctttctactaatccaga

SEQ ID NO: 341976 - DNA, 201 bp, Homo sapiens
tggatcaagactttaattatgggctttttttcaaaggcagttcccttttctgcagttgttctttggatggatggatggatggggagaaagagagtgagtgwgtgtgtgtgtgtgtgtgtgtgtgtgtgtgtgtatttgcttgcagcatttgaatatgtgcagcacattggctttctagacatcctttgtatagtaacagca

SEQ ID NO: 341977 - DNA, 201 bp, Homo sapiens
cccaaagtgctgggattacaagcgtgagccactgtgcccggctacataagcatttttaagctcagtaagccccaaactaagctcaccttcccttcccaaayctgattgtgtattttctacctttttgaacacctttttgaacctggtggggctgcctgttaaatacttctggaaaaacttaagtcaaagggtacttttgtg

SEQ ID NO: 341978 - DNA, 201 bp, Homo sapiens
actttagttctttatcaaagattggctggaacataactttttgctaactctatttacatagttaatacaaattaaggaaacttttaatattatggtcactyatctcttttatttatttatttattttgagaaggagtctcactctgtcgcccaggctggagtgcagtggcacgatcttggctcactgcaacctctgcctct

SEQ ID NO: 341979 - DNA, 201 bp, Homo sapiens
atttactttgttggtggccaaacattattttctaattctatcatttctttgccatttattaattggcattctattgtaaggagaagctttttcttcttccwatttgtttattcattttgtttaaactcatagattattttatggttataatccattgctattagtatttattttgatgcttaaattgttccaaatttaggc

SEQ ID NO: 341980 - DNA, 201 bp, Homo sapiens
ttcttgaactagtttgcagtcccaccaacagtgtaaaagtgagaacgaggcctttctttttggtcactgctatctactgagtacttggaatatagtaaagrctcagtaaatatttgtttaatgaatggatattgaatgaaattttcttctgggagaaatggggcaggagttgaaataatagaaaggtgcaagaaggatgac

SEQ ID NO: 341981 - DNA, 201 bp, Homo sapiens
taaagtgccattctcatcacataattaaagggtacctgttggcatatatctatcagtatgtatagggaagctgggcatagtggtcactcttgtaatcctakctacttgggaggctgaggcgggaggatcacttgagctggaggctgtagtgcacaatgattgtacctgtaaatagccactgtagtccaacctgcgtgacat

SEQ ID NO: 341982 - DNA, 201 bp, Homo sapiens; identical to SEQ ID NO: 72249

SEQ ID NO: 341983 - DNA, 201 bp, Homo sapiens; identical to SEQ ID NO: 72251

SEQ ID NO: 341984 - DNA, 201 bp, Homo sapiens
ttcctgccttacttttttccatgccactcagtttttctttaattctgtaacataaatccaaagccttattctttggaaagcagtggtacttggcactaaawtcactttagcattacctgaggaagcttaaaaaataaataccaaactaattaaatttgactagtagtgaggcccaggtttcagttttttttattttttatt

SEQ ID NO: 341985 - DNA, 201 bp, Homo sapiens
actctacatttcaacctccttccacctttcttgaccctctcaatgccttgtcttagtttcttaggcagaaaagtttttgtcttacttagttacagagacastaatgtgctgtgttaaaataaaaggtcttattagttacatttaggaacctgctttggttccatatttttgtctatcttttcccctttcttaataattctc

SEQ ID NO: 341986 - DNA, 201 bp, Homo sapiens; identical to SEQ ID NO: 72252

SEQ ID NO: 341987 - DNA, 201 bp, Homo sapiens; identical to SEQ ID NO: 72257

SEQ ID NO: 341988 - DNA, 201 bp, Homo sapiens
gaaaagcagagtgaagagattttgaccgtctcatggttttgcagaaacaagaattagagttcagtatccactgggatgaagggtcccagggaacacacacractctcagttggaacccctggaggcttatgctactggagcagcagcaaaaaagaggtgaattaaatcttgccaaaacccaaccccaagttaactcagtct

SEQ ID NO: 341989 - DNA, 201 bp, Homo sapiens
cagccggtgagctgtatgtttcttttgtaccttttgaaatgattgtatgtgtatacaaatgatcactttatgtatacatttctcctgtccccccccccctytttttttttttgcatttggcagcataccttaacatactcttttgcatcttactttttttttctcaccacttaacaatatatgctcatgcacttcataaca

SEQ ID NO: 341990 - DNA, 201 bp, Homo sapiens
ctctgatgacatgttcctgtgtccatccagagggctgcagcatcacaatgccagctggacccagcagtgcagagcatattaattctccagaaagagtccartggaaaaaaagaaaaatgcctgagaaacagttcaaaataatattaaagaagctcagtgaaatacaagggtacacaatgtaaagaaatcagaaaaataatt

SEQ ID NO: 341991 - DNA, 201 bp, Homo sapiens
cagtgtatttctttttctgtaccgtccgtttgatatgtagtatgtgcgttgaccccagtgattctgggccttcctcatttctagttttcctgtctgaattacttacacgcagtttgacagttgtgactctcttcagcatatgaatagaaacatcttagtttgggttaggagaagctatcagcatgtaattcttaaaatttg

SEQ ID NO: 341992 - DNA, 201 bp, Homo sapiens
ggaacagcatgtacaaaggcctagaagcaaaacattgtatgcacatagtaactgtttaattggatatgaattttaaaaatcacatgtctaacttagctctyggtttcgaagacatcacccttcccagcaaacattgcattttatatgcttctgtatttttaaagcagttttcatacttgatatcacactttgagtagatgg

SEQ ID NO: 341993 - DNA, 201 bp, Homo sapiens
agtgtatttctttttctgtaccgtccgtttgatatgtagtatgtgcgttgaccccagtgattctgggccttcctcatttctagttttcctgtctgaattacttacacgcagtttgacagttgtgactctcttcagcatatgaatagaaacatcttagtttgggttaggagaagctatcagcatgtaattcttaaaatttga

SEQ ID NO: 341994 - DNA, 201 bp, Homo sapiens
ggtgtgagccactgcacttggctgttgttccactttttaatcaacccttaatatcagtggtcttcataattttagccattctcgaaagtctattttcttgrtgactaatgaggttgaacatctttccttatgtttgttggcctttcatgtgttattcatgtattttctgtgggaaagtacctgtggaagtctttgccatct

SEQ ID NO: 341995 - DNA, 201 bp, Homo sapiens
gtgtatttctttttctgtaccgtccgtttgatatgtagtatgtgcgttgaccccagtgattctgggccttcctcatttctagttttcctgtctgaattacttacacgcagtttgacagttgtgactctcttcagcatatgaatagaaacatcttagtttgggttaggagaagctatcagcatgtaattcttaaaatttgaa

SEQ ID NO: 341996 - DNA, 201 bp, Homo sapiens
gcagagtttgcagtgagctgagatgaccaccactgcactccagcctgggcaacagagcaagactccatctcaaaaaaaaaaaaaaaaaaaaaaaaagccarggttttaaataagcattagaccattgagaaagcatatcattaggaaggctgaaggcagccagtgtgccagccacaactgttgtcacttttttagcctcac

SEQ ID NO: 341997 - DNA, 201 bp, Homo sapiens
tgtatttctttttctgtaccgtccgtttgatatgtagtatgtgcgttgaccccagtgattctgggccttcctcatttctagttttcctgtctgaattacttacacgcagtttgacagttgtgactctcttcagcatatgaatagaaacatcttagtttgggttaggagaagctatcagcatgtaattcttaaaatttgaat

SEQ ID NO: 341998 - DNA, 201 bp, Homo sapiens
ggagagttgggggcagctgaatgacatgctttgatttaccttttaacagattcactgtggctgctgtgtttaatggtgtgtaaagtcatttgctacaaccktttttcttttattagttgtaggaacaggtttactttatatagatcatgggaacaataaggtataagaaagaagcttggataggtctgagagaaatatatg

SEQ ID NO: 341999 - DNA, 201 bp, Homo sapiens
ggctgaggagggcggatcacctgaggtcaggagttcgagaccagcctacccaacatggcgaaaccccgtctctactaaaaatacaaaaaattagccaggcatggtggtgggcacctgtaatcccagctactcggaaggctgaggctggagaatcacttgaacctgggaggtggaggttgcagtgagccgagatcatgccac

SEQ ID NO: 342000 - DNA, 201 bp, Homo sapiens
caataactcaaaataaattttatagtatagatacaaatccaactatttacttttaaagcagcctagttgtcatttcttctctagagacactgaaactaggkctcatatatatgagccaggtcagaaacaagtctttttcaccctagcctaaagttttgccagtgtctcatgctgcctgcatctgcagtgtgtttatctcgc

SEQ ID NO: 342001 - DNA, 201 bp, Homo sapiens
gctgaggagggcggatcacctgaggtcaggagttcgagaccagcctacccaacatggcgaaaccccgtctctactaaaaatacaaaaaattagccaggcatggtggtgggcacctgtaatcccagctactcggaaggctgaggctggagaatcacttgaacctgggaggtggaggttgcagtgagccgagatcatgccact

SEQ ID NO: 342002 - DNA, 201 bp, Homo sapiens
ttagaaaatagtactaggaggaggatgatctttgctttgtttttacctttcgaatatccctggagaacacatccacttgtcagaacttagagcctagctgyaaaggagtcttaagaagtatgattttttagcttttcagtttttatgcatagtagaaggtgagaacagatcttgagtgctaggtagtcatatccagcgtgt

SEQ ID NO: 342003 - DNA, 201 bp, Homo sapiens
ctgaggagggcggatcacctgaggtcaggagttcgagaccagcctacccaacatggcgaaaccccgtctctactaaaaatacaaaaaattagccaggcatggtggtgggcacctgtaatcccagctactcggaaggctgaggctggagaatcacttgaacctgggaggtggaggttgcagtgagccgagatcatgccactg

SEQ ID NO: 342004 - DNA, 201 bp, Homo sapiens
taggaagctttaagacaattcaggatttccactataaggcagatttaatacataaatattatttattgagtagcattcttctaagagtcagtttaatgctrtattcttcgttatatattaagttcttcaaattgaaataaagacctgaaattttttctagttcatgtattaatctggggacagttaacatgtgagctcttt

SEQ ID NO: 342005 - DNA, 201 bp, Homo sapiens
aagtaaaagaaaatttttttttttttttttggatagagaaaagtttgtagaataaggatataaagtaagtaggctgggcgtggtggctcacacctgtagtygcagcagtttgggaggccaaggcaggtggatcactggagcccaggagtttgcaaccaacttgggcaacatgacaaaaccccgtctttacaaaaatacaaa

SEQ ID NO: 342006 - DNA, 201 bp, Homo sapiens
gagggtgtggggagagtggaaagctgatggaagcactggattatgggtcctccggatggaaaaggtaagatggccgaggacagaattctagattttgtcartatttaatggtaaaagaattagcaaaggagatggataaagagaagtctgagtgtagagcaaaaaggcttaggaaaagggaaagataggtcacaatatcca

SEQ ID NO: 342007 - DNA, 201 bp, Homo sapiens
gaataaacaagtaattaaagccatgtggttagtaatagataccctcttattatatgtaaaatactatattcagcattatatattaatttgtttcatttaayacaactttattattaattacttggcctcatcttacaaatgaagaaatggaaacattagaaggattgttttacctagagttataaattgttaagtttcaga

SEQ ID NO: 342008 - DNA, 201 bp, Homo sapiens
attcttctgcttcagtctcccgagtagctgggattacagatgcatgtcaccacgcctggctaatttttgtatttttaatagagacagggtttcaccatgtwggccatgctggtctcaaactcctgacctcaggtgatccgcccgcctcggcctcccaaagtgctgggattacaagcgtgagccactgtgcccggctacata

SEQ ID NO: 342009 - DNA, 201 bp, Homo sapiens
gctactgagctactaaagcttgggttagccattactaatccaaagttctataccaaaccaatttttcttttctttctttctttcttttttttttttttttttttttttttgagacagagtcttgctcttgtcacttaggctggagtgcaatggtgcgatctcggctcactgcagcctccgcctcctgggttcaggcgattc

SEQ ID NO: 342010 - DNA, 201 bp, Homo sapiens
acttccgtcacatctcaacccatgtcattcttttctgtctttatgcttcactcgctgttcctgcccggtgcttttgcctcttaacctgaggcttatctgargcttattttttcatctgcagagtgggtatattgttttctactttgaaggatggattgtggggaccaaaggaggtaacgacataaggctcaggtcagagtc

SEQ ID NO: 342011 - DNA, 201 bp, Homo sapiens
tcagtagagatgtgctgttttgctttgactggagtgcagtggtgtgatctcagctcactgcaaccttcgcctcccgggttcaagcgattcttctgcctcarcctcctgagtagctgggattataggtttgcgccaccacgtgtggctacttttttttttttttttttgtatttttagtagagacagggtttcaccatgttg

SEQ ID NO: 342012 - DNA, 201 bp, Homo sapiens
agagctgagattcagacttaggaggaaggcccgctgcctgattgctttcaaagacttgagcgagaggccccacaaagttgggtctcagatctctcaaaaakatgtcttgccctgctgctgttgggctttctgagggcgcatgggaagtctagttctgagagctgaaggaagctgaagactggaaacaaccgtttctcctcg

SEQ ID NO: 342013 - DNA, 201 bp, Homo sapiens
tctcatttagtttagacttaatatctgtataatgagcttacttggagtaatgatactctgatttctatcctcttgagaccctcaccaaattgaagcatgaytctcccagggggcttctttttaggcagctgatttaaaaacaaatcttggctcaggtttgaatgtttgcttcactcttttctttcctatcagagttaatag

SEQ ID NO: 342014 - DNA, 201 bp, Homo sapiens
tggctggaacataactttttgctaactctatttacatagttaatacaaattaaggaaacttttaatattatggtcactcatctcttttatttatttatttwttttgagaaggagtctcactctgtcgcccaggctggagtgcagtggcacgatcttggctcactgcaacctctgcctctctggttcaagcagttctcctgc

SEQ ID NO: 342015 - DNA, 201 bp, Homo sapiens
gtcgacctaggaaaaaaggacgaaaacttctacaaaagaaggcagcacagataaaacggcgctatactaatccaataggacgtccaaaaaacaggttaaakaaacaaaacacggtgtaagttgtacttgtggcaaggtgaggggagaaaaggatagggtcttctctatagtgtaggattcacttgttttctctatgaaaaa

SEQ ID NO: 342016 - DNA, 201 bp, Homo sapiens
caaatatcaactcgtttaagcttttcaacaaatctgatagtgacttgcccaactaaggtgattcagccgagataggatttgaactgtgctagccttttctrgttcccaggctcttaactactattttaataagttgtgctaaattatccaatgaactaaaaatacatctatgcggcctttaatatgtgacttatatttaat

SEQ ID NO: 342017 - DNA, 201 bp, Homo sapiens
aaatctgacagtttttaaaaatgaaatggaggttgggtgtggtgtttcatgcctgtaatctcagcgctttaggaggcccaggcgggaggattgcttgagaytaggagttcaggacaaccagggaaatatagtgagaccccatctctacaaaaaaaacccaacaacaaaatgaaatggagatacattttccttaaatagaat

SEQ ID NO: 342018 - DNA, 201 bp, Homo sapiens
gcattatatattaatttgtttcatttaatacaactttattattaattacttggcctcatcttacaaatgaagaaatggaaacattagaaggattgttttasctagagttataaattgttaagtttcagagtcaatatttgaaccctggtattctgactccatggccttaactgcttaatttatgatatagtattactgtgg

SEQ ID NO: 342019 - DNA, 201 bp, Homo sapiens; identical to SEQ ID NO: 72255

SEQ ID NO: 342020 - DNA, 201 bp, Homo sapiens
ctcgttttagcttacagttctgaaagagtataagttagaaattcctagtgcattgctttataaaccttaagcctctgtatattgtagctcaagatcttccmagtgaacatttgagatgtgtgtgtgtgtttgacttctttgattcatgggaattcacttagaaatcataagcttatttaagggcttcacctcctgggatgc

SEQ ID NO: 342021 - DNA, 201 bp, Homo sapiens
aagactctcttgatacttgttttgtcagattctttttgtatttctcttaaatatctactttcccaaactaaaaaatcatcctttgtgtgcttacatattcrgtagggcatctccattgttgtcagcggaggcagtgtggtaggacttcagcaaatatgcagtgtccccctccctcacttgtaaattattctttatcttata

SEQ ID NO: 342022 - DNA, 201 bp, Homo sapiens
gagtgcttattactatgtgccagtgatagagatacatagataatctgtcctcagatgagtccactgtaaggctgacagcttccttattttcacagcatacwgtcttttaaattttttatatatttattagaaaactaataagtagtctctatcaagtatctaaacaagtgttgagagtatctttttattgaagtagtggct

SEQ ID NO: 342023 - DNA, 201 bp, Homo sapiens
tagactgggtgcagagcaagtcatgttgcccttgagttaacatgttaagacccttaacagcctttattttcttgagctacgtacttatgtttgaatttctratctggaaagtcagggaagtcataaaggctttaaaaattattctctgtttagataatgtagttcagactattgcagggatgaggggtatagagattgttt

SEQ ID NO: 342024 - DNA, 201 bp, Homo sapiens
tgataagtactgaggagaatccatgggatactgtgattaaaagtttttaggccaggcctggtggctcaggcctgtaatcccagcactttgggatgccgagkggggggtggatcacctgaggtcaggagttcaggaccagcctggccaatatggtgaaaccccatctctacagaatacaaaaatcagcccggcatgatggtg

SEQ ID NO: 342025 - DNA, 201 bp, Homo sapiens
caccatgttggccagttgtgttctcgaactcctgacctcaggtgatccgcccacctccgcctcccaaagtgctaggattacaggcgtcagccaccatgccyggcccatgccgtacatttctgacatcattgtttataccatttgtttgtgactccaaatgtaccaggagcagtggcctagaaataaaaatttgttactaac

SEQ ID NO: 342026 - DNA, 201 bp, Homo sapiens
tgaggcaggataatcgcttgaacccaggaggcggaggttgtagcgagcctagattgtgccactgcactccagcctgggcaacagagcaagactccatctcaaaaaaaaaaaaaaaaaaaagtttttacccatgttataagggaaatttttgagctaactttagagtgtggtagttaatggtgagtttatttattaaagtgt

SEQ ID NO: 342027 - DNA, 201 bp, Homo sapiens
ccctctgggaggcagccggtgagctgtatgtttcttttgtaccttttgaaatgattgtatgtgtatacaaatgatcactttatgtatacatttctcctgtccccccccccctttttttttttttgcatttggcagcataccttaacatactcttttgcatcttactttttttttctcaccacttaacaatatatgctcatg

SEQ ID NO: 342028 - DNA, 201 bp, Homo sapiens
ttgatgttttgggagaatagggaagccagcttctacttctgcctggggaggtcagaggaggattcattgaggggccttaaaggatatgtaggagttgtacmtatcccttaaagggatatgtagggagttggttcttatataatcagaaggaacagaagtgaaggtggaatagacttgaagataggggaaaacatgcttaat

SEQ ID NO: 342029 - DNA, 201 bp, Homo sapiens
gcagccggtgagctgtatgtttcttttgtaccttttgaaatgattgtatgtgtatacaaatgatcactttatgtatacatttctcctgtccccccccccctttttttttttttgcatttggcagcataccttaacatactcttttgcatcttactttttttttctcaccacttaacaatatatgctcatgcacttcataac

SEQ ID NO: 342030 - DNA, 201 bp, Homo sapiens
ctttatgactaacacttcatctctgcatcacttctgctttgctgtaaaacttagcaagtacattaggatagtggcaaataaagattaagattgaggacagwtgtttgtaaaataactgggcgattttaagattataggtgtaacttgttaagaagaagataactggtgtggaaataaaatctggcagccaaaaaaaaaaaa

SEQ ID NO: 342031 - DNA, 201 bp, Homo sapiens
gaatgtaagtgccttgagaacgaggcctttctttttttttttttttttaaattataccttaagttttagggtacatgtgcacaacgtgcaggtttgttacrtatatgtatacatgtgccatgttggtgtgctgcacccattaactcgtcatttacattagatatatctcctaatgctatccctcccccctcctcccacccc

SEQ ID NO: 342032 - DNA, 201 bp, Homo sapiens
ttgaagtgtcttgtccagtgccacacagccagttaataccatctggaagaattggtcaggcccttctcaattttgtgcttttttcattatgctgtagtactgctttatagtattagagagcagtgagcctaaaataatttagttagaattctcttccttaatggaaaccatagaataaaccttgtctagagaatattggtg

SEQ ID NO: 342033 - DNA, 201 bp, Homo sapiens
ggccaacaggtgtataaaaaaatgcccagccaaaagtgcagtggctcacacctgtaatcccagcactttgggaggctgaggagggcggatcacctgaggtsaggagttcgagaccagcctacccaacatggcgaaaccccgtctctactaaaaatacaaaaaattagccaggcatggtggtgggcacctgtaatcccagct

SEQ ID NO: 342034 - DNA, 201 bp, Homo sapiens
atcaaactttgcatggaacattatctaagtcaaagataattgaaatatttagcaagatttttttcaaaaggagtcagccacttattggttttaattttttwaaaaaattattgcaggcagtagggtaagtatggatgtagtttgcctagtactgtgttccatcattagctatacaacatacacttccatgaaaaagagcca

SEQ ID NO: 342035 - DNA, 201 bp, Homo sapiens
accgcacctggccacatttgattttggagaaataaagcaagaaaaacaaaagtgatttaataattgaaaaaatgaaaaagaaatgcccatttgcttacatrgctttcatatatagtgtttttttgttttttttttttttttgagatggaatttcgctcttgttgcccaggctggagtgcagtggcacgatcttggcttact

SEQ ID NO: 342036 - DNA, 201 bp, Homo sapiens
tcttagaggtaatcaaattttttttttaaactgttactatgttgctttagaaatatctaggtttttttgctgggtctgatttgaaagcagtgacctgataratttctgttaaccttaccacagtgtaactttttacgtacagtattttacaaacctgatacagtatcaggtttgatactgataggtttgtcagtcttttta

SEQ ID NO: 342037 - DNA, 201 bp, Homo sapiens
agttttcaattagaaaatatcctgtaatttttaataggttcttgagtaattatgactttttttctatctttatattcgtagttctcttggttacatttttwaaaaaaattatatttacttaaatgagcttgaaacttgaggtgactaaaatgtttggagatcttacattttccaaataataaacctctattcttaattttg

SEQ ID NO: 342038 - DNA, 201 bp, Homo sapiens
gacataattaatgagtcttctcacttctagagtggcacactgattcatcatttgtagctttacggattgtttgggactcagattccggtgctgatccttargcattggcgtactgtgtttgagttgcagatggtgttggatggcattgttttgttatatatttttactctcctgggatggttgctttgtgggtaatggcag

SEQ ID NO: 342039 - DNA, 201 bp, Homo sapiens
taccagcgtaagggctatggcaggtttctcatcgatttcagtaaggattatattaatttctcattggtcttttccagtggaccttctctgtgtgtgtgtgdatgtgtgtgtgtgtgtgtgtgtgtgtgtgtgtgtgtgtatatatatatttaaagatttgtaggtgctttgttggctgctagtatcttttgtcatatagct

SEQ ID NO: 342040 - DNA, 201 bp, Homo sapiens
ccagcgtaagggctatggcaggtttctcatcgatttcagtaaggattatattaatttctcattggtcttttccagtggaccttctctgtgtgtgtgtgtakgtgtgtgtgtgtgtgtgtgtgtgtgtgtgtgtgtgtatatatatatttaaagatttgtaggtgctttgttggctgctagtatcttttgtcatatagctat

SEQ ID NO: 342041 - DNA, 201 bp, Homo sapiens
ttgttgttttctttgtggcctaataccagtttttatgaatgtttcatgagttcttaaagagaagatgcattctctttaccgaagtatagatacatacatacatatatacatatatactattacatacatacatatgtatacatgtatatgtgtgtgtgtgtatatataaggtctattttattcattatgcttttagggctt

SEQ ID NO: 342042 - DNA, 201 bp, Homo sapiens
ctcataataagaagaatacagatcagaattaaactgagaaagaaagatttcaaaaagttggcagggcattctgtaagcaagtctgtatttttttttttttttttttttttttgcgtaagagaccaggggaaatgagaatatatatttacctattctagtttttgcatgaagaaatactagaggatggagaagaaactttgg

SEQ ID NO: 342043 - DNA, 201 bp, Homo sapiens
ctattgttgttttctttgtggcctaataccagtttttatgaatgtttcatgagttcttaaagagaagatgcattctctttaccgaagtatagatacatacatacatatatacatatatactattacatacatacatatgtatacatgtatatgtgtgtgtgtgtatatataaggtctattttattcattatgcttttaggg

SEQ ID NO: 342044 - DNA, 201 bp, Homo sapiens
aggctgggtgcaatggctcgcacctataatttcagcactttgggaggtggcagtaggagggtcacttgaggccaggagttttagaccaacccgggcaacayaggaagactccatctctagaagaaaattgaaaaattagctggatgtggtggtgtgtacctgtagtcctatctaattgagaggctgaggcaggagaatcac

SEQ ID NO: 342045 - DNA, 201 bp, Homo sapiens
ctagtcaacatgtaattctaataaaaatagacatatttatgctacatttttaacatatgcctttttgtgggggaaatagaaaaacaaagatttttttttttaacctgttgatttggtagtttggtttgcaaatccaaacttactaaaactacaaaattacaattcaaattttatatcaacacacttccaaatgaggaaagt

SEQ ID NO: 342046 - DNA, 201 bp, Homo sapiens
gttttccaagaaaaagatttatattggatatattctatagtgtcataaaaagtatcccctttaaaaaaaagtctttgtttcttgtttattttatttatttwttttttgagacagtttcactctgtcacacaggctggaatacagtggtgcagtctcagctcaaactctgcctccgaggttcaagtgattcttgtgcctcag

SEQ ID NO: 342047 - DNA, 201 bp, Homo sapiens
ctaaattaggccatatggaaatgtatacttttcagtcacaaaggatttggagtttttagcttcttatccaaagtattagattacattgggttatatagatsagttctaaacatttaaggaaggatcaattatattagtattcatttttccagatctctaaccagaattgctgtaaatcaacatatgagagaagaaataaag

SEQ ID NO: 342048 - DNA, 201 bp, Homo sapiens
ggagtgggagatacaagtacagtttacccttaagcatgtgtgagttagagatactgacccctcatgttgttaaaaaatatatgtataactttggactccaytaaaacttaagtagtaataacctactgttgactggatgccttactgataacagaaacagtcaattaacacatatttttcatgtcacatgtattattctgt

SEQ ID NO: 342049 - DNA, 201 bp, Homo sapiens
gactagtatccagaatctacaaaaaactcaaattagcaagaaaaaaataatcccatcaaacgtgggcaaaggacatgaatagaaatttgtcaaaagaagaygcacaaatggccaacaaacatgaaaaaatgcccaacattactattcagcagggaaatacaagttaaaaccacaatgagataccaccttactcctgcaaga

SEQ ID NO: 342050 - DNA, 201 bp, Homo sapiens
caaccacatttatcctcactaaagccttcttggaacattttagcagactggtttctatctcattggtgaggattttgccatgtggccaccttaggctgcgygggaagctagaaaagctagtgtttacttttctaataacgaagcaaaggagaagtggcctgggtatggtgctaacttagccagccagcagtgcccatcata

SEQ ID NO: 342051 - DNA, 201 bp, Homo sapiens
ttcttaaattcaatttgaataatttctattgacctgccttggagttaaccaattctttttttttttttttttttttttgaggcagaatctcgctctgtcamccagtcttgagtgcagtggtgcaatctcagctcactgcagcctccgcctcctgggttcaagcgattctcttgcctcagcccccaagtagctgggattaca

SEQ ID NO: 342052 - DNA, 201 bp, Homo sapiens
gctaaaagaagttctaaatcctgaaacaaaagttcaacatgcactaaaatagaacttcttaaaagcaaaaaataaaaaataaaaaactcacagagcctgtraaactaacacaacaacaacagtttatctaggtaacaactaatattgatgaatagaacattaccccatatctctattaacattgaatgtaaatggcctaaa

SEQ ID NO: 342053 - DNA, 201 bp, Homo sapiens
gatattagtcctttttcggatgtgtagattgtgaagattttctcccactctgggctgtctgctaactctgctgtcctttttaatttaaggtctttaaatayataataacaatctttccttactcataataagaagaatacagatcagaattaaactgagaaagaaagatttcaaaaagttggcagggcattctgtaagcaa

SEQ ID NO: 342054 - DNA, 201 bp, Homo sapiens
cagtttcttgctgttgtttgctttttggattttttcctttctttctctactacattttcttcttaaattcaatttgaataatttctattgacctgccttgkagttaaccaattctttttttttttttttttttttttgaggcagaatctcgctctgtcacccagtcttgagtgcagtggtgcaatctcagctcactgcagc

SEQ ID NO: 342055 - DNA, 201 bp, Homo sapiens
actcttcttttttgttgtttttctgtgtattcttgttttttttccatacaagccttagaatcaacttagtttcagaaaattttctgtgtttttcttggggggctgtgtgggatggtcagagaaaggattacattaattagttggcttgagagaattgacatcttcatggaaactactgtctcagaatacattgtctttcta

SEQ ID NO: 342056 - DNA, 201 bp, Homo sapiens
agaccaataacattcaagctgagagccaaatcaagaatgcagtcccatttacaatagccatacacacacacacacacacacacacacacacacacacacacaaataaaatacctaggaatacagctaactaaggagatgaaagatctctacaaggataattactaaacactgctgaaagtgatcatatattatgcaaacaa

SEQ ID NO: 342057 - DNA, 201 bp, Homo sapiens
tgtggatctgtcatatatggccttaattattttgaggtatgttccctctatacctagtttgttgggggggagggacttgtcagaaagagatgttgaatttygtcaaatgccttttcagcacatatttaaattatcatatggtttttgtgttcttggttcttttaatatggtgtattacatttatcgatttgtgtatattga

SEQ ID NO: 342058 - DNA, 201 bp, Homo sapiens
tcctcataaattgagttagggaggattccctctttttctattaattggaatagtttcagaaggaatggaaccagcttctctttgtacctctggtagaattsgactgtgaatccgtctggtcctggagttttttttggttggtaggctcttaattattgcctcaatttcagagtctgttcttggtctattgagggattcaac

SEQ ID NO: 342059 - DNA, 201 bp, Homo sapiens
gtcctcataaattgagttagggaggattccctctttttctattaattggaatagtttcagaaggaatggaaccagcttctctttgtacctctggtagaatwcgactgtgaatccgtctggtcctggagttttttttggttggtaggctcttaattattgcctcaatttcagagtctgttcttggtctattgagggattcaa

SEQ ID NO: 342060 - DNA, 201 bp, Homo sapiens
ctggtgtgagacagtatctcattgtggttttgatttgcatttctctaatgaccagtgatgatgagcatcttttcatgtgtctgttggctgcataaatatckttttttgtgaagtgtcttcatatccttcacccactttttgatggggttgtttgattttttcttgtaaatttgtttaagttcattgtagattctggatatt

SEQ ID NO: 342061 - DNA, 201 bp, Homo sapiens
agtaaaaatctggctttgaaaatgatttcagtgttaatatagctttcacaagtgtctgcgttcttttctagtggattaatgacttagaaaatgatgatttrtatattacatggcctacaagttgccagaaacttctgaagccagtatttcctggaagtgtaccttccataaggcgcaattttcataatttggtgagtttta

SEQ ID NO: 342062 - DNA, 201 bp, Homo sapiens
gttactggacctggttttttcttttcttcacaagatgcttcaaagaaataagtcagaaggtcagactatttactaaccttaactgacttaaaattgatgtmaaaattaaaataacctaactcagcaaagtgatctgacctaattacagaatttacatggatttatatttattcataggtatttttggaaatgtgatttagg

SEQ ID NO: 342063 - DNA, 201 bp, Homo sapiens
ccttttagtaaatttattcttctcagagatgagacaggttaagggcaggaatcccctcagcttcttactcttaactgctatacttcctcagccttcctgtrttgtagggaaggaatgaggcatctttcttcttttttagttaaacattcccactctgttttgatctcatgctttcctgtttgttctggatccttgctatat

SEQ ID NO: 342064 - DNA, 201 bp, Homo sapiens
aagatcatattgtttgcaaaccagggtaattttacttcttcctttccaatttggatgtcctttatttatttctcttgccttattactctggctaaggcttstagtattatgttgaataaaaatagtgaaagggggcattcttgtcttgttccagatctttgagggatggctttcaattattccctgtttccatatgatatt

SEQ ID NO: 342065 - DNA, 201 bp, Homo sapiens
taggtaagcatttataagaaaatacatgatgaatatttataaatgatgtttttattaaaaacttattttaatgacagaagttgatttggtaaaaaatttcyattctgatcatttcatagtgatttttaaaatgatacttttagcagcttaagccacgccaccctgcctgtgcagagactgtggtgcagtggggccctttat

SEQ ID NO: 342066 - DNA, 201 bp, Homo sapiens
catttttctgttttaatgatttcatagcacttattactgtatctcctcaagtttatttaacactttcagagcacatacatgcacacacacacacacacacatgcgtatgaatataatggccattagaggaaggactatgctttgttactactgtcttcccaacatggagtgctttaatttgcatttcccaaattattaaga

SEQ ID NO: 342067 - DNA, 201 bp, Homo sapiens
acatttttctgttttaatgatttcatagcacttattactgtatctcctcaagtttatttaacactttcagagcacatacatgcacacacacacacacacacatgcgtatgaatataatggccattagaggaaggactatgctttgttactactgtcttcccaacatggagtgctttaatttgcatttcccaaattattaag

SEQ ID NO: 342068 - DNA, 201 bp, Homo sapiens
tgccaaagctccccgaggggcatgattacccagttaagaaacactaataaagcttatagagtgtatgcatgagcacacacatacacacacacacacacaaacccaatgtagtacaaatagctaaacaaaacataatatttttatttttttaatagtatgacagaattaaaaaaagaattagtcccattatcttcactatat

SEQ ID NO: 342069 - DNA, 201 bp, Homo sapiens
gaacctgggaggcagaggttgcagagagcggagatggcgccactacactccagcctggagacaagagcaaaactccatttcaaaaaaacaaacaaacaaamaaaaagggctgagagctagctgaaaatgtttgtggattagctatcatcttgacatgtcttcagtttagttatcctgccaatattttcccccaaataaagg

SEQ ID NO: 342070 - DNA, 201 bp, Homo sapiens
catttcctctaatttttccttttatattcaacctcaatatttatctcctagcatagttttattggcagcctttctagttttctttctttttttttttttttgagacggagtcttgctctgttgcccagactggagtgcagtgatgcgatctcggctcactgcaagctccacctcctggattcatgccattctcctgcctca

SEQ ID NO: 342071 - DNA, 201 bp, Homo sapiens
tgctgaccttccctccactattgtcctatgaccccgccaaatcccgctctccgagaaacacccaagaatgatcaataaatactaaaaaaatttaaaagaaaggatcttatatcatgaatcgtgaccacatgaactttatcccaggaatgcaagactgattcagtattagaaaatcaatgtaactcactatattaaggacta

SEQ ID NO: 342072 - DNA, 201 bp, Homo sapiens
tccactaggcagtatccaggtggggactctgtgtgggcgttccaaccccacatttcctctatgcactgccctagtagaatatctgtgggggccttgcctgkgtggcaggctcctgcctgggcaccaggcttttccatacatcctctgaaatctagatggaggcctccaagcctccttcatgcttgcctcctgagcatctgc

SEQ ID NO: 342073 - DNA, 201 bp, Homo sapiens
tagatcaggtgtctgaaataaagaataaatataataaaagaaagttatttataaaaaattaaatgctattttgcataagatacttttttttttttttttttgagacagagtctcactctgttgcccaggccggagtgcaatggcactatcttggctcactgcaagctccgcctcctgggttcacgccattctcctgcctca

SEQ ID NO: 342074 - DNA, 201 bp, Homo sapiens
caggtgcccaccaccacgcccggctaattttttgtatttttttttttattagagacggggtttcaccgtgttagccaggatggtctcgatctcgtgacctygtgatccgcccacctcggcctcccaaagttctgggatttacaggtgtgagccaccgtgcccggcctaatgagcagattttactgaatttgttttcaagac

SEQ ID NO: 342075 - DNA, 201 bp, Homo sapiens
accaaaaaaaaaacaaaaaacagtgtaccaataagggattatagcaaggtcaaaggttaatatataattaatatataaaagtataaattaatatataaaarattaatatataaaagttagtcatttttactacctatcaggtactatgcttactacctgggtgacaaaataatttgcacactaaacccccatgacattcaa

SEQ ID NO: 342076 - DNA, 201 bp, Homo sapiens
caagactcacttgaacactggaggcataggctgcagtgagccgagatcacaccactggactgcagtctgggcaacagagtgagactctgactcaaaaaaawaaataaataaataacacttaaaatataattctattggctttatttataatggcagagtctaatgcatgtggtgatattattgctgaccttgttaaatgtg

SEQ ID NO: 342077 - DNA, 201 bp, Homo sapiens
gtgagatataatcatgccactgcactccagcctgagtgaaagagtgagaccctatctctaaaaataaaagcaaataaatttggccaaaaaaaaaaaaaaaacacccaaggccctctgctttcaaaatttatatgtccaaaaattatgacttttcctttttccctccttgcattgcttttgcatcattagtgggaaaaaaaa

SEQ ID NO: 342078 - DNA, 201 bp, Homo sapiens
tgttcatttttatggctgcatagtattctgtagtgtatatataccacattttctttattcagtctatcattgatggggatataagttgatgccatgtcttygctattgtaaatagcgctgcagtggacatatgtgtgcatgtatattcataatatgatttatattcctttgggtatacacccagtaatgggattgctgggt

SEQ ID NO: 342079 - DNA, 201 bp, Homo sapiens
agaaggtatagataagaatgattaaggataactgttcaattatggtatagccacttgctatattaaaaggataccaaaaacaaaatgctttgttagaaacrgagatggtaagtttttgggacgttaactgctccagatacgtagtgttgtgtgtcttatgatgctttgacttttttcatcttagttttagtcctaacttag

SEQ ID NO: 342080 - DNA, 201 bp, Homo sapiens
attttagcttttgcttttaacattttgactggtgtgtctggctgtggatatctttacatttatccttattggagtacattgagcttcttaaatttgtaaaytatgttattaatcaaaattgggaatttttcagtagtttttaaaagtatcttctatgtttctttttccttgtcttcctgggtcttctataatgcatatgtt

SEQ ID NO: 342081 - DNA, 201 bp, Homo sapiens
tgctgggattacaggcatgagccaccatgctcggccgccttcagtttgttttctaataacacagttttatctcctaaccacctctttctcagaattacagkaaaaagatagaaaaacagggaggagaaaagataagcaacatagaggatcagcccatgaaatccaatagcctattaagaggaattccagaaacaacagaga

SEQ ID NO: 342082 - DNA, 201 bp, Homo sapiens
tgtgtgtattttttgtatttttagtagaggtggggtttcactgtgttggtcaggctggtcttaaattcttgacctcaagtgatccacccgccttggcctcscagagtgctgggattacaggcatgagccaccatgctcggccgccttcagtttgttttctaataacacagttttatctcctaaccacctctttctcagaat

SEQ ID NO: 342083 - DNA, 201 bp, Homo sapiens
tcatttgaaatctttagaaaaatcttttctgccaaagtaacacttgtaatcaattttagtttggtacctttgagactgaactgtttctcccatgttttttrtaggaggaaggacagagatgtcaaacaaggctttccattctttctccgcaggtactcgagttggtccaccgtaactttgctggctctgcagtagttaaaa

SEQ ID NO: 342084 - DNA, 201 bp, Homo sapiens
cataatttttatacttaagagttttgcagggggttttttgttcttttgtttttgtttttttgaaagagtctcactcagtcgcccaggctggagtgcggtgrtgcagtctcggctcactgcatcctccacctcctagtaggttcaagtgattctcctgcctcagcctcgcatgtggttgggattacaggcgtgcatcaccac

SEQ ID NO: 342085 - DNA, 201 bp, Homo sapiens
ccctagttgcttctgtttttcctgtacccagaggtatcaccagtgaaggctgtgaaacaacaaagatggcagccagatccttctggaagctctgtcctagkggggtacagacctattgccagcccaaacacacctatagcaggtggctggagacccttgttgtgagatcttatgcagataggaagaatgggatcagggacc

SEQ ID NO: 342086 - DNA, 201 bp, Homo sapiens
tttaacataaattttggagaggacaaagacattcaaaccatagcacattcatagcagtgtcatatgggcaaagaaccaaagaaggtgaaggaggaagccaygtcaaatatctggaagaggattgttctagacagagtacagtgaatgcaaaggacgtgaggtgagttcatgtctgtgaatcctgtgaatcatgtctgctat

SEQ ID NO: 342087 - DNA, 201 bp, Homo sapiens
gcaaacccactcctgaaagcctttttatagtggcattagtccattttgaggcacagccctcatgacctaaacacctcccattaggccccagctcccaacastgttgcattggggattcagttttaacataaattttggagaggacaaagacattcaaaccatagcacattcatagcagtgtcatatgggcaaagaaccaaa

SEQ ID NO: 342088 - DNA, 201 bp, Homo sapiens
caaatgaagtaatgcatttctgttacagcaattattctatgtaactgaaaaatcacatttctcaaatgttatgaagaagatttaagcaacataattttcargtttattgttcttttacccaacttggacattatgtgattttatgctatttaagttactttattccacaaattttcagctttaaatagaaccaagacacag

SEQ ID NO: 342089 - DNA, 201 bp, Homo sapiens
aagccatgcgcaggatataatctcctggtgtgccgtttgctaagaccgttggaaaagcgcagtattagggtaggagtgacccgattttccaggtgccatcygtcacggcttcccttggctaggaaagggaattccccgacctcttgcactttccgggtgaggcgatgccttgccccgcttcggctcacactctgtgggctg

SEQ ID NO: 342090 - DNA, 201 bp, Homo sapiens
tcagttttcatgtagttgagtggttatgagtgaatttcttaatcttgagttctagtttgattgctgttgtctgagagacagtatgttataatttctcttcwtttacatttgctgaggagtcctttacttgcaactatgtggtcaattttggaataagtgcggtgtggtgctgagaagaacgtatattctgttgatttgggg

SEQ ID NO: 342091 - DNA, 201 bp, Homo sapiens
attttagatctttcctgctttctcttgtggacatttagtgctataaatttccctctacacactgctttaaatgtgtcccagagattctggtatgttgtgtmtttgttcttattggtttcaaagaacagctttatttctgccttcattttgttatgtacccagtagtcattcaggagcaggttgttcagttttcatgtagtt

SEQ ID NO: 342092 - DNA, 201 bp, Homo sapiens
aaaattttatactaatattagttttttaaacaaaatgatttaatatatttactgttctcatattagtttcatcagtcttaacttttgctttaggggatggrtaagaatgcttttgagaaaaaatataatactgttggagtgaatatttttcgaactcaccagttgttctgtcaagatgtacttaaattacgtcctggagaa

SEQ ID NO: 342093 - DNA, 201 bp, Homo sapiens
tgatgttcatcagggatattggtctaaaattctctttttttgttgtgtctctgccaggctttggtatcaggatgatgctggccttataaaatgagttaggsaggattccctttttttgtatcaattggaatagtttaagaaagaatggtaccagctcctctttgtacctttggtacaatttggctgtgaatctgtctggtc

SEQ ID NO: 342094 - DNA, 201 bp, Homo sapiens
ttgccaactcttgataaagtcttttttatacccttaataaatatctctagatttcattgctttcaataaatacttactgagcaccttttattataccacaygttgtgctcaacaaagataatataggagtaggggttactgtatctttttttcaccactctttcccctttatactgtgcctagctcatagtgtcagttaat

SEQ ID NO: 342095 - DNA, 201 bp, Homo sapiens
cttttctcccttatagttttgacacatgatgaactctagcactggtgtatatgagaaggaaggcgaaagcatgacaggaaacctgccgcctgctggggaaktctggagcccctgctgagacgatttggaagtctcgttaagatcagtgacatattctttaattttaaaaaattgtaattatttaaaacagttatttaatgt

SEQ ID NO: 342096 - DNA, 201 bp, Homo sapiens
gcattgatgttcatcagggatattggtctaaaattctctttttttgttgtgtctctgccaggctttggtatcaggatgatgctggccttataaaatgagtyagggaggattccctttttttgtatcaattggaatagtttaagaaagaatggtaccagctcctctttgtacctttggtacaatttggctgtgaatctgtct

SEQ ID NO: 342097 - DNA, 201 bp, Homo sapiens
gtagaaagcaggagttatcacacttttttggtaaggagccaaaagtaagtatttaatgttcatttgagagcacatgtggtctttgtcaaaattatttttttaacaattattttaaagtgtaaaaatcatttttagcttagggctattaaaaaaatagaccataaacctgatttggtttactggccatagtttgccaactct

SEQ ID NO: 342098 - DNA, 201 bp, Homo sapiens
atgccagaagctaaataaacttttctcccttatagttttgacacatgatgaactctagcactggtgtatatgagaaggaaggcgaaagcatgacaggaaayctgccgcctgctggggaagtctggagcccctgctgagacgatttggaagtctcgttaagatcagtgacatattctttaattttaaaaaattgtaattatt

SEQ ID NO: 342099 - DNA, 201 bp, Homo sapiens
tgcattgatgttcatcagggatattggtctaaaattctctttttttgttgtgtctctgccaggctttggtatcaggatgatgctggccttataaaatgagytagggaggattccctttttttgtatcaattggaatagtttaagaaagaatggtaccagctcctctttgtacctttggtacaatttggctgtgaatctgtc

SEQ ID NO: 342100 - DNA, 201 bp, Homo sapiens
ctggaatttttaccctgcttgcaagctaaaaacttagcttgccacagtttcaggaatcagatggacaacataagactcttggatcagagctgaaagacttyataactgactagaggaaatctcctgagtgattcatagcttctttatatcagccaggacctattgaactaaactctgagactttttattgtcatctttgaa

SEQ ID NO: 342101 - DNA, 201 bp, Homo sapiens
aattcacagaaaaatgcattaatccctctgaaacataaataattttgatatcagttttatttattgatatattcattacaaatataattgtgaaagaattygtttgattgccagaggtatgctatagatcctaaataatactatattatgaattagatgaacactgttcatcttaggctcagtttattctctcagtgcata

SEQ ID NO: 342102 - DNA, 201 bp, Homo sapiens
ttagcatgaagggctgttgaattttgtcaaaggccttttctgcatctattaagataatcatgtggtttttgtctttggttctgtttatatgatgaattatgtttattgatttgcatatgttgaaacagccttgcatcccagggatgaagcccacttgatcatggtggataagctttttgagatgctgctggatttggtttg

SEQ ID NO: 342103 - DNA, 201 bp, Homo sapiens
attgcttgaatccgggaggtagaggttgcagtgagccaagactgtgccatggcactccatcctgggtgacggagcgagattctgtctaaaaaaaaaaaaaagctaaaagtgagacagttacttttacctggagttcagatgtgttgctcttctcagtgcttattgttagaactgcatcaaaagactctctaattatatttc

SEQ ID NO: 342104 - DNA, 201 bp, Homo sapiens
gggctctgctctgttccattggtctatatctctattttggcaccagtaccatggtgttttggttactgtagccttatagtatagtttgaagtcaggtagcrtgatgcctccagctttgttctttttgcttaggattgtcttggcaatgcgagctctcttttgtatccatatgaactttaaagtagttttttccaattttgt

SEQ ID NO: 342105 - DNA, 201 bp, Homo sapiens
attgggaaggcatgattgtattttataatgtgagaaggacatgagatctgaggcaaatcccttcgcctatgagcctgtaaaataaaaaacaagttagttayttccaagatacaaaggagatgtaagcattggataaacattcctcttccaaaaggaaaaaattggccaaaagaaaggggctacaggcccacacaggtccaa

SEQ ID NO: 342106 - DNA, 201 bp, Homo sapiens
ttgcatttctctgatggccagtgatgatgagaattttttcatgtgtctgttggttgcataaatgtcttcttttgagaagtgtctgttcatatccttcaccyactttttgatggggtcgtttaatttttttcttgtaaatttgtttaagttctttgtagattctggatattagcccttggtcagatgggtagattgcaaaaa

SEQ ID NO: 342107 - DNA, 201 bp, Homo sapiens
attgggagaaattaacttttgcctgctgtttcttctcaagcggttctgggtgtgtatattctttcagaggctcacaaactccctttccccagttgtttcartgtgtctagcagataactttctcttgatttagttgcttcttctataactttcagaagtgctatcttttaataattgtttattccttataggatggatgat

SEQ ID NO: 342108 - DNA, 201 bp, Homo sapiens
gaaaggggctacaggcccacacaggtccaaaacccagcagggcagtcattaaatcataaagctccgaaataatctcctttgactccatgtcccacatccargtacactgatatgaagggtgggctcccaaagccttgagcagttccacccctgtggccttgccgtgttcaacccccgaggctactctcacaggctagagtt

SEQ ID NO: 342109 - DNA, 201 bp, Homo sapiens
gttaatatataagtttatctagataaaaaatacttaagaaacataaaccaaaatattttatgaaattgtttttatattagctaagtataaatttattgctrtataacaaattaccacttggtggtaaacagtgaacatttatcttaacagtttctgaggttcaagaatttaggagcaatttacctgagtgattctatctta

SEQ ID NO: 342110 - DNA, 201 bp, Homo sapiens
tgtgtctttatagcagcatgatttataatcctttgggtatatacccagtaatgggatggctgggtcaaatggtatttctagtcctacatccttgaggaatygccacaatgtcttccacaatggttgaactagtttacagtcccaccaacagtgtaaaagtgtccctatttctccacatcctctccagcacctgttgtttcc

SEQ ID NO: 342111 - DNA, 201 bp, Homo sapiens
gccttggctctgtctttctccttgtttcttacccatccaccccagtctcctccctccccaagaggtaaccattttcctatagattgtatgcatggttcccwtatttgtctttttgcttcatgtgtaaatatccattattggtgtttattgtgttgaaggctgtgactgttttagagaaatgctattatacgtaggtctccc

SEQ ID NO: 342112 - DNA, 201 bp, Homo sapiens
aatcttttcagtactatgtaaactatcttataatgtatacagaaaagtacaattaccagatcagagaagataataattcttctgcattctgattaaataayatgcagatattttgcttaaggtaggggttacaaccagaagagaggagaccaagatagtaacacacttgggaaaaaggatttagccaaactgagaagtctg

SEQ ID NO: 342113 - DNA, 201 bp, Homo sapiens
aactgtagatgttaatgttttctttgccttggctctgtctttctccttgtttcttacccatccaccccagtctcctccctccccaagaggtaaccattttyctatagattgtatgcatggttcccatatttgtctttttgcttcatgtgtaaatatccattattggtgtttattgtgttgaaggctgtgactgttttagag

SEQ ID NO: 342114 - DNA, 201 bp, Homo sapiens
ttgattttctaatggataggaataatgttgtaccccgtataaatactttgattttgcgtactaaccagcagtacctcaatttaatatctacatcaggtaarataatcctatactgttctacaaatgtttattgagttgtgaattctttatttatatttaacgtttaatttgaaatttttcagtaactgctgatgttgaaga

SEQ ID NO: 342115 - DNA, 201 bp, Homo sapiens
cctacaaaatgggagaaaattttcacaacctactcatctgacaaagggctaatatccagaatctacaatgaatgcaaacaaatttacacgaaaaaaacaamccccatcacaaagtgggcgaaggacatgaacagacacttctcaaaagaagacatttatgcagccaaaaaacacatgaaaaaatgctcatcatcactggcc

SEQ ID NO: 342116 - DNA, 201 bp, Homo sapiens
tattcataatagcaaagatgtagaatcagcctaggtgtccatcagtggtggattggttaaagaaaatgtggtgcatatatacaccatggaatactacgcasccattaaaaatgaaatcgtcccctttggagcaacatggactcagctggaggccaagcaaactaacacagaaacaggaaaccaaacactgcatgttctctc

SEQ ID NO: 342117 - DNA, 201 bp, Homo sapiens
cttcagcctgccactgcactgtgggggcccctctctgggctgtccgaggccggagccggctccctctgcttgcggggaggtgtggagggagaggcgcgggygggaaccagggctccgcgccacgttcatgggccagcgcgagttccgggtgggcgtgggctcagcaggccctgcactcaggccggcgggcgctgccggccc

SEQ ID NO: 342118 - DNA, 201 bp, Homo sapiens
tctacttcaaggatcttcaagttagatttaaaattcagccaggcgatgctcgtctatttataaatggccttcgtgttgatatggatgtttatgacgctttyaggtaagtattaaattattgctgtaaatgaactatggtttatataaaaataaacattgtcttgaatttagtgtaagtcaaaatatgaagatcactttaaa

SEQ ID NO: 342119 - DNA, 201 bp, Homo sapiens
ttagtatgttgagcattttttcatgttagccatttatatatcttttgagaattgtctattcatgtccttagcccactttttgatgggactgttttttttttcctgctgatttgagttccttgtagattctggatattaatcctttttcagatgtatagattgtgaagattttctcccgttttgtgggttgtctgtttactc

SEQ ID NO: 342120 - DNA, 201 bp, Homo sapiens
aactttggtgaatctcacgattatgtgtcttggggttgttcttcttgaggagtatttttgtgatgttctctgtatttcctgaatttgaacattggcctgcsttgctaggttggggaagttctcctggatgatatcctgaatagtgttttccaacatggttccattctccccatcactttcaggtacaccagtcatacgtag

SEQ ID NO: 342121 - DNA, 201 bp, Homo sapiens
aatatctacatcaggtaaaataatcctatactgttctacaaatgtttattgagttgtgaattctttatttatatttaacgtttaatttgaaatttttcagkaactgctgatgttgaagatttctctactttctttttcttggattcacaagataagagtgctgtaattgcaaagaacatgtattatttaacccaagacggt

SEQ ID NO: 342122 - DNA, 201 bp, Homo sapiens
agtttgtatttctgtgggatcagtggtgatatcccatttatcattttttattgtgtctatttgattcttctttcttttcttctttattagtcttgctagcrgtctatcaattttgttcttttcaaaaaaccagctcctggattcattgattttttgaagggttttttatgtctctatctccttcagttctgctctgatctt

SEQ ID NO: 342123 - DNA, 201 bp, Homo sapiens
tcctggactttttttagttggtaggctattaattattgcctcaatttcagagcctgttatttgtctattcagagattcagcttcttcctggtttagtcttkggagggtgtatgtgtccaggaatttatccatttcttctagattttctagtttatttgcgtagaggtgtttatagtattctctgatggtagtttgtatttc

SEQ ID NO: 342124 - DNA, 201 bp, Homo sapiens
tgttaaataagcttttatatatcacatgatatagattattttatggacagtattaatgactagtgaataatataaattatgattttttgtggcaatacctrtttaacagatcatccctcaagcaagctatatttttatatttgcaagacttaaaattatatgaagtgaggttattcaatgttatttcaaaagtatatactg

SEQ ID NO: 342125 - DNA, 201 bp, Homo sapiens
tagcatgaagggctgttgaattttgttaaaggccttttctgcatctattgagataatcatgtggtttttgttgttgattctgtttatgtgatggattacayttattgatttgcatatgttgaaccagtcttgcatcccagggatgaagcccacttgatcatggtggataagctttttgatgtgctgctggatttggtttgc

SEQ ID NO: 342126 - DNA, 201 bp, Homo sapiens
tgaaaacataagtctgccctcatccttgcatcgcttacagttgacactaacaattgagagtatattcctccagattttgttttgtttcatatatttaatawaagagacctgtatatcttcctcattatttttaagttccgtgaatatagctgtatcacaatttatgattatcttaatgatgaatgattcatttatgtctaa

SEQ ID NO: 342127 - DNA, 201 bp, Homo sapiens
gctaaaggatattttgggttcagacgatggggttttctaaatatacaatcatgtcatctgcaaacagggacaatttgactttctcattttctaattgaacrccctttatttctttctcttgcctgactgccctggccagaacttccaacactatgttgaataggagtggtgagagagagcatccctgtcttgtgcccgttt

SEQ ID NO: 342128 - DNA, 201 bp, Homo sapiens
tgttttggttactgtagccttgtagtatagtttgaagtcaggtagcgtgatgcctccagctttgttcttttggcttaggattgtcttggcaatgcaggctsttttttggttccatatgaactttaaagtagttttttccaattctgtgaagaaagtcattggtagcttgatggggatggcactgaatctatgaattacctt

SEQ ID NO: 342129 - DNA, 201 bp, Homo sapiens
actattctaaaattaatatggaaccagaaaagagcccaaatagccaaggcaattccaagaaaaagaacaaatctgaaggcatcatattgagaggtgacaaygtgctggtggcccttgctcactctcagcacctccttgccctcggcgtccgctctggccatgctcgaggagcccttcagcctgccactgcactgtgggggc

SEQ ID NO: 342130 - DNA, 201 bp, Homo sapiens
gtttggactctccaaagctggcaggctggaacagctgagtcgaccaatctgcagagatggtggccaccctcccccggaagccctgtcccagggagagatcrgagctctgtccttataaccctgactggagtggctaaagcttccacagggataagtgtattttttgcatctaaataagtatgtccttttcatatataatct

SEQ ID NO: 342131 - DNA, 201 bp, Homo sapiens
attcacagaattggaaaatactattctaaaattaatatggaaccagaaaagagcccaaatagccaaggcaattccaagaaaaagaacaaatctgaaggcakcatattgagaggtgacaatgtgctggtggcccttgctcactctcagcacctccttgccctcggcgtccgctctggccatgctcgaggagcccttcagcct

SEQ ID NO: 342132 - DNA, 201 bp, Homo sapiens
gggaatgtattagaaacactgtcagcttggaccgaaagagacaagacaaaatgaaagaaggctgttggacttccaaaattctataggcaggaaatggactatagagctacttggctgtaaacattgtgctgccctttcaagaaagaaagaataactctgcaagcagaaccatggcaggcagcacagagggtgaagcatcag

SEQ ID NO: 342133 - DNA, 201 bp, Homo sapiens
gagtggaacagctgagtcaaccgaactgcagagatggtagccgcttctcccactgggaactctgtctcaggaagagatcaaagctctgtctttataatccyggctggtgtggctgaagcctctgcagggaggtcctccccagtgaggaggaatggattggggtcctgcttaaagaagcagtctggccatgatcggatagag

SEQ ID NO: 342134 - DNA, 201 bp, Homo sapiens
tattcacagaattggaaaatactattctaaaattaatatggaaccagaaaagagcccaaatagccaaggcaattccaagaaaaagaacaaatctgaaggcrtcatattgagaggtgacaatgtgctggtggcccttgctcactctcagcacctccttgccctcggcgtccgctctggccatgctcgaggagcccttcagcc

SEQ ID NO: 342135 - DNA, 201 bp, Homo sapiens
tctcaaacttctggcctcaagcaatcctcccatctgagccccacacataatatctaatatgattctttctcctacctttctttcaatgtgtgcactaatayttttctagaaggcttgagcatattaaaaaataacatttatattattttattcaagctatttagaataattgggagatttttctttatgattcaaacttaa

SEQ ID NO: 342136 - DNA, 201 bp, Homo sapiens
tttcagtagaaatgataccagctcttcattgtacctctggtagaattcagctgtgaatccatctggtcctaggctttttttggttggtaggctacttattrctgcctcagtttcagaacttgttgttggttctgatgccccatatcattgctgattgtgtttattggattcttctctcttttcttctttatcagtgtagct

SEQ ID NO: 342137 - DNA, 201 bp, Homo sapiens
gattatcccagtaacaaggatcaagtatataccctgccatgttggcctcagctggcttttactcataagggctatctactagcttgtaggtcaaaccacamagcccaaagtaaaatcagctgatagaaatgcataggctatagaagcatcacttaaggaatttcaaaatataattgaaagctttatcaatagactggacca

SEQ ID NO: 342138 - DNA, 201 bp, Homo sapiens
tctttctcctacctttctttcaatgtgtgcactaatatttttctagaaggcttgagcatattaaaaaataacatttatattattttattcaagctatttaraataattgggagatttttctttatgattcaaacttaacatttgccaatatacaataatggagatttggcatggaatgattttgttattcatacattgaga

SEQ ID NO: 342139 - DNA, 201 bp, Homo sapiens
tggatagattggagaaattttttcccatttcatagattatgtgttctctctgatgatagtttcttttgctgtgcagaagctctttagtttaattattaatrtatcccatttgccaatttttgcttttattgcaattgcttttggcatttttgtcatgaaatccttgcccatgtctacatcctgaatagtattgcctagatt

SEQ ID NO: 342140 - DNA, 201 bp, Homo sapiens
acagtatctagcctaatgcaggtggcaggattgaataagtgtttattgaacatataaatacagggataaataagtctctgatgccgataaatgtttggatktttattaagttaatgtcatactctataccaagaatcagcaagtccacccactgcttgtttttgtaaatattttggggacacagccatacttgtttattca

SEQ ID NO: 342141 - DNA, 201 bp, Homo sapiens
gcaaatttatgaaaggattaattgttattagatcctaggatatctgtagttaataccgtcactgtagacactcactggaggaaagtaaaactaaaactacrtaaacaacataggctatcaagaagtaattcatttttgcagtgctttatatgtagtggatctcaagaagttcaggagaattggagcaggtgacaggctcag

SEQ ID NO: 342142 - DNA, 201 bp, Homo sapiens
aatgtgggagctaaaatttaagataagaattgggtggggacacagccaaaccatatcaactgtgaatttaccattgcataagtataccacactcttacttyccttgctatattctcctcacttggactgtctttctctattttatctctctggcaaatttttattaagcctttaagatttttagtatgactccctaaaaga

SEQ ID NO: 342143 - DNA, 201 bp, Homo sapiens
tactgatagagaaaggatcaagtccactcattgagatgatttggagggtaggtatgtttgacaggggataatgaaatagaatctgagcaattttaagagtrtcttactaaaagcttccattaaagttagaaggtatagataagaatgattaaggataactgttcaattatggtatagccacttgctatattaaaaggatac

SEQ ID NO: 342144 - DNA, 201 bp, Homo sapiens
atctgctgaccttccctccactattgtcctatgaccccgccaaatcccgctctccgagaaacacccaagaatgatcaataaatactaaaaaaatttaaaaraaaggatcttatatcatgaatcgtgaccacatgaactttatcccaggaatgcaagactgattcagtattagaaaatcaatgtaactcactatattaagga

SEQ ID NO: 342145 - DNA, 201 bp, Homo sapiens
attaagaataatggtgtctggtttcatcaaaatagagtaaaacataaatttgttatgatatttttgaaaactatagaatattttaaaaccatctttattaraagatgatatatggttaaaattatttttatgtggtatgtgtgtatgtgtagttagtatattttgaacttacaaaataaaaatctatctgcatgctaagga

SEQ ID NO: 342146 - DNA, 201 bp, Homo sapiens
agtattccatggtatatgtctgccacattttctttatccagtctgtcactgatgggcatttgggttggttccaagtctttgctattgtaaatagtgctgcrgtaaacatacatgtgcgtgtgtctttatagtagaatgatttatcatcctttgggtatatacccagtagtgggattgctgggtcaaatggtgtttctggtc

SEQ ID NO: 342147 - DNA, 201 bp, Homo sapiens
aaaaaatttatccagatgtggtggcaagttcctgtaagccaagcccttcgggaggccgcaggaggtggattgcttgagcccaggaattcgataccagcctragcaacatggcaagaccccatctttacaaaaaataccaaaaaatctagccaggtgtggtggcaagttcctgtagtcccagctacccagggggctaggtgg

SEQ ID NO: 342148 - DNA, 201 bp, Homo sapiens
ttggtatagtagaaaggatttttagataaaggggaaaagtacatacactctggcaaaaatgagataacaatgagagatttaccaccatatactaacttgtrcaaatattcctggttacacctaattcccaaacactgtacaaacacctggaagaaacttgatctgggaaaattctcccttggcaggactttgttcacatga

SEQ ID NO: 342149 - DNA, 201 bp, Homo sapiens
ccacagcacccaactcctgggctcaagcaatcctcccacctcagcctcctgggcagcttgggactgcaggtgcatgccatcacacccagcaaatttttgtrtttttttgtagagacgggttttgccatgtcatccaggctggtgtcacactcctgagttcaagtgatccactcgcctcagcttcccaaagtgctgagatta

SEQ ID NO: 342150 - DNA, 201 bp, Homo sapiens
catgattctggttgtgaagtgaaattgccaacacctgagacagagctcattaaatgtttaccaaactgaagaataaaaaaaaaaaaaaaaaagaaagaaaatgtattgtaataattctaaattgcttatttatttttgattaagtaatctttgtgttatctgcatactttttgaaacatggatataaattgcctgtattat

SEQ ID NO: 342151 - DNA, 201 bp, Homo sapiens
ccatgattctggttgtgaagtgaaattgccaacacctgagacagagctcattaaatgtttaccaaactgaagaataaaaaaaaaaaaaaaaaagaaagaaaatgtattgtaataattctaaattgcttatttatttttgattaagtaatctttgtgttatctgcatactttttgaaacatggatataaattgcctgtatta

SEQ ID NO: 342152 - DNA, 201 bp, Homo sapiens
gaatacaaagcactggatgatacccaagttaaaagtaagttctctatctcagtacttgagtagaatgaaaagttggaggcttttacatactttagtttttyaaaaatttaatgagtataatcctacatatgttcatttgaggctagagatggggtggacatattcttcattaaaatttggaattaaattttcagctgaaag

SEQ ID NO: 342153 - DNA, 201 bp, Homo sapiens
accatgattctggttgtgaagtgaaattgccaacacctgagacagagctcattaaatgtttaccaaactgaagaataaaaaaaaaaaaaaaaaagaaagaaaatgtattgtaataattctaaattgcttatttatttttgattaagtaatctttgtgttatctgcatactttttgaaacatggatataaattgcctgtatt

SEQ ID NO: 342154 - DNA, 201 bp, Homo sapiens
gaaaaagctcaaaatgaggaaattctgtatgttcttcgccattatattcaggtatgcgcttgttttttccaaggttgcttttggctgtagaaaaaaacaaytattatgataatcgtcttactagatttaaatattaattttcaccagaatagttatctaactttttttaacttaacaaatgtgaatttcatgtggaaaaat

SEQ ID NO: 342155 - DNA, 201 bp, Homo sapiens
ctaccatgattctggttgtgaagtgaaattgccaacacctgagacagagctcattaaatgtttaccaaactgaagaataaaaaaaaaaaaaaaaaagaaagaaaatgtattgtaataattctaaattgcttatttatttttgattaagtaatctttgtgttatctgcatactttttgaaacatggatataaattgcctgta

SEQ ID NO: 342156 - DNA, 201 bp, Homo sapiens
tgccttatatctggcacaaatttaaaacttggataaaaaacaaaaacatacttcaataatgtgtataatatttgctaagaatttgcaattaagaaatctgrtttactcaacatactgataatatatacagtactagatcaaagtgcaaagcatggtgttggaatactgttaactctttcttttgagacctgactacttttc

SEQ ID NO: 342157 - DNA, 201 bp, Homo sapiens
cattctacaagtgtgtttagaatatttgagactggggaagagtagaggtgcagagaaagtttagtcaaaatacttactagtaaggcctggcatggtggctyatgcctgtagtctcaactatttgggaggccgaggcaggtagattgcttgagcccaggtgtttgagaccagcctgagcaacatggcaagaccctgtcttta

SEQ ID NO: 342158 - DNA, 201 bp, Homo sapiens
ggttactaccatgattctggttgtgaagtgaaattgccaacacctgagacagagctcattaaatgtttaccaaactgaagaataaaaaaaaaaaaaaaaaagaaagaaaatgtattgtaataattctaaattgcttatttatttttgattaagtaatctttgtgttatctgcatactttttgaaacatggatataaattgc

SEQ ID NO: 342159 - DNA, 201 bp, Homo sapiens
agcatagatgtattagaaacataatgaagtcatagaagactaacaccataccatatacttcttaaagctcagaagcaaacaaaactaagtatgggaatacktattcgcataaaactctagaattcaaaaaggaaagggaatgataaatgcaaattcaaaacaatgcttgcatctcctgaagcacaaggaaatgggattggg

SEQ ID NO: 342160 - DNA, 201 bp, Homo sapiens
ttattgtgttccattgatgtatttgtctcttatttttccaataccacactgttttgattactgtaactttatagtaagacttcaagtgtggtagtgtcagycctctgactttattcttcaatattgtgttggatattctggatcttttcctttttccctaaactttagaatcagttggccaatctccacaaaataacttgc

SEQ ID NO: 342161 - DNA, 201 bp, Homo sapiens
acaccccctcaccctaagagaagctcttgtacctgcaccttaggaggctattgttagcagaatcattcagaatagcaacaaactatgataaatatacacawatatacatatcagtagcaaaatagataagtagaatttggcatattagaatgaaatatcatatgcaagagcatagatgtattagaaacataatgaagtcat

SEQ ID NO: 342162 - DNA, 201 bp, Homo sapiens
accaataacattcaagctgagagccaaatcaagaatgcagtcccatttacaatagccatacacacacacacacacacacacacacacacacacacacacaaataaaatacctaggaatacagctaactaaggagatgaaagatctctacaaggataattactaaacactgctgaaagtgatcatatattatgcaaacaaat

SEQ ID NO: 342163 - DNA, 201 bp, Homo sapiens
aaaatgtttgtggattagctatcatcttgacatgtcttcagtttagttatcctgccaatattttcccccaaataaaggcaaacaagacaattttgtctacytaaaatatatcatacatgcttttttcttacttatttttaagagattatttttcctagattttcatttaaagcagtttatgctgtgcagtttaactctcct

SEQ ID NO: 342164 - DNA, 201 bp, Homo sapiens
acacacacacaccccctcaccctaagagaagctcttgtacctgcaccttaggaggctattgttagcagaatcattcagaatagcaacaaactatgataaawatacacatatatacatatcagtagcaaaatagataagtagaatttggcatattagaatgaaatatcatatgcaagagcatagatgtattagaaacataat

SEQ ID NO: 342165 - DNA, 201 bp, Homo sapiens
gaccaataacattcaagctgagagccaaatcaagaatgcagtcccatttacaatagccatacacacacacacacacacacacacacacacacacacacacaaataaaatacctaggaatacagctaactaaggagatgaaagatctctacaaggataattactaaacactgctgaaagtgatcatatattatgcaaacaaa

SEQ ID NO: 342166 - DNA, 201 bp, Homo sapiens
aatttctgattgaggtatttgtattaagcaattattacatacataagttgtgatatatcatttcacctgatcctgtgtgtattaaacttccagtacttagyaggactctgctttttataaaatgtattttgtttgccctagtgacacagcattgtccttatgtttccaggagcatggtctttcattaacaaaatttactta

SEQ ID NO: 342167 - DNA, 201 bp, Homo sapiens
agctcctgaattcattgattttttgaagggttttttgtgtctctgtctccttcagttgtgctctgatcttagttatttcttgtcttttgctagcttttggrtgcgtttgctcttgcttagcttgttcttttcattgtgatgttagggtatcaattttagatctttcctgctttctcttgtgggcatttagtgctataaatt

SEQ ID NO: 342168 - DNA, 201 bp, Homo sapiens
aggtttaatcatagggctgccaaatgaggaaacagaatgaaaactcaagtctgtgtccctgagcagtttgtgactagtgatttttaagggttttggagggrgccagagtatggagagcattgattggtcgaagagtgcaaggtgaagtcgtggtatagggagatgaagaaactatattctcatgctgaattggttactttg

SEQ ID NO: 342169 - DNA, 201 bp, Homo sapiens
atagaccaataacattcaagctgagagccaaatcaagaatgcagtcccatttacaatagccatacacacacacacacacacacacacacacacacacacacacaaataaaatacctaggaatacagctaactaaggagatgaaagatctctacaaggataattactaaacactgctgaaagtgatcatatattatgcaaac

SEQ ID NO: 342170 - DNA, 201 bp, Homo sapiens
agaggtggtcagagagtggcaccatgaaattgaaagtatagaagacttggtctagtatataaccatttgagttagtagcttagataatatggtaggccagrttatttaaggaagggattccaaggaactaagggtgtcagaagggacagttaaggtttttctttctttgattaacggactttatttttttagagcagtctt

SEQ ID NO: 342171 - DNA, 201 bp, Homo sapiens
ctcttcttttttgttgtttttctgtgtattcttgttttttttccatacaagccttagaatcaacttagtttcagaaaattttctgtgtttttcttgggggkctgtgtgggatggtcagagaaaggattacattaattagttggcttgagagaattgacatcttcatggaaactactgtctcagaatacattgtctttctat

SEQ ID NO: 342172 - DNA, 201 bp, Homo sapiens
tagaccaataacattcaagctgagagccaaatcaagaatgcagtcccatttacaatagccatacacacacacacacacacacacacacacacacacacacmcaaataaaatacctaggaatacagctaactaaggagatgaaagatctctacaaggataattactaaacactgctgaaagtgatcatatattatgcaaaca

SEQ ID NO: 342173 - DNA, 201 bp, Homo sapiens
aacccgggaggcggagcttgcagtgagccgagatacagccactgcactccagcctaggtgacagagcaagacttcgtctcaaaacaaaaaacaaaaacaaaaaaatttagaactatctcaaaataatgacttaacatcacaccaagaggaattaggaaaaacaagaatgaactaacctcaaagctagcagaagaaaagaaa

SEQ ID NO: 342174 - DNA, 201 bp, Homo sapiens
gaacccgggaggcggagcttgcagtgagccgagatacagccactgcactccagcctaggtgacagagcaagacttcgtctcaaaacaaaaaacaaaaacaaaaaaatttagaactatctcaaaataatgacttaacatcacaccaagaggaattaggaaaaacaagaatgaactaacctcaaagctagcagaagaaaagaa

SEQ ID NO: 342175 - DNA, 201 bp, Homo sapiens
tgaacccgggaggcggagcttgcagtgagccgagatacagccactgcactccagcctaggtgacagagcaagacttcgtctcaaaacaaaaaacaaaaacaaaaaaatttagaactatctcaaaataatgacttaacatcacaccaagaggaattaggaaaaacaagaatgaactaacctcaaagctagcagaagaaaaga

SEQ ID NO: 342176 - DNA, 201 bp, Homo sapiens
atgaacccgggaggcggagcttgcagtgagccgagatacagccactgcactccagcctaggtgacagagcaagacttcgtctcaaaacaaaaaacaaaaacaaaaaaatttagaactatctcaaaataatgacttaacatcacaccaagaggaattaggaaaaacaagaatgaactaacctcaaagctagcagaagaaaag

SEQ ID NO: 342177 - DNA, 201 bp, Homo sapiens
cccatcaaactaacaacagtggtctattttcagcattcctaaagaaaagaaattccaaccaagaattttgtatcctgtcaaactaagcttcataagtgaaygagaagtaaaatctttcccagacaagcaagcactaaaggaattcattagcactaaacgggccttacaagagctctttaagggaatggaagaatggtacaa

SEQ ID NO: 342178 - DNA, 201 bp, Homo sapiens
atcataaacatatatattttttacttgtcattttttaaaaggtgaacaattagagactcaacccagaagattcggaaagagccaaaaaaaaaaaaaaaaaaggcaacaactcaaagaaattttcagagaaagagaaatagtacaaagaaattccaaaaattaatgtataggagccttcattagaagggactcaccaaatac

SEQ ID NO: 342179 - DNA, 201 bp, Homo sapiens
cttggccgcgaagtggcccgagaccccgctgctgctggaggcaaggtgggtgcgggccgggccctcgtccgggcgggtgtgggcgcgctgccaccctcagycgcgctttcttcgtgctcgcagcgggtgtctggctcccacccgggttctccagacgcccccgctctggccctgagcatcaccacctccttccttcccgac

SEQ ID NO: 342180 - DNA, 201 bp, Homo sapiens
aaaaaaggcagatcacatacgaagggaaccccatcaaactaacaacagtggtctattttcagcattcctaaagaaaagaaattccaaccaagaattttgtrtcctgtcaaactaagcttcataagtgaacgagaagtaaaatctttcccagacaagcaagcactaaaggaattcattagcactaaacgggccttacaagag

SEQ ID NO: 342181 - DNA, 201 bp, Homo sapiens
tttctgttttgtttcattttttacctttttggcctattgcaacttttctggaaactaatctacctatttaccaggtgcacgtaacttgtaaaaaaatgatytgcagctgtatcatagcctggtggacacagactttaggccgcctgagatctattcttgtaattcatcctgtttcaagattcataattaaaaataggaaca

SEQ ID NO: 342182 - DNA, 201 bp, Homo sapiens
cacagctatttctagaggaattttggcagcttttcttacacagaagaacatgtttttgagaagctttcttgggcaactggcaaaggaagaaattgctacarctatttactctggagataaaattaaaacattccttattgaggtcagtagctatttgaaatattaaatatgtatgtattgcatattttaaaagtgtgagtg

SEQ ID NO: 342183 - DNA, 201 bp, Homo sapiens
catgatctggcctctgcctacacccctctctaactccgtatctgacagctgtcccccatatttcacaccctgtaaacactgctgtattagtccattttcaygctgctgataaagacatacctgagactgggcaatttagaaaagaaagtggtttaatggacttacagttccacgtggctggggaaacctcacaatcatggc

SEQ ID NO: 342184 - DNA, 201 bp, Homo sapiens
aaaacaatctgataataattcactatttgaagttaaatttccacatttcctacagacaacacacacacacacacacacacacacacacacacacacacacacaccccctcaccctaagagaagctcttgtacctgcaccttaggaggctattgttagcagaatcattcagaatagcaacaaactatgataaatatacacat

SEQ ID NO: 342185 - DNA, 201 bp, Homo sapiens
gggacggtcgccgcgtccaagtcggtgactgcccacttggccgcgaagtggcccgagaccccgctgctgctggaggcaaggtgggtgcgggccgggccctygtccgggcgggtgtgggcgcgctgccaccctcagccgcgctttcttcgtgctcgcagcgggtgtctggctcccacccgggttctccagacgcccccgctc

SEQ ID NO: 342186 - DNA, 201 bp, Homo sapiens
tcttaagtatgtttatgctgctataaaaatatgccacagactggctaatttataaagaacataaatttatttcttatacttctggatgcttggaaatgtarggctgacgtgctgccatggatgtctggtgagggctgctctctgcttccaggatggctccttgttgctctgtttttacatggtggaaagtagaagggcaac

SEQ ID NO: 342187 - DNA, 201 bp, Homo sapiens
ggcgccagcgaaagccacgaacgtggtgcggctgctactaggctccacagcgctgtggctttcgcagctcggctccgggacggtcgccgcgtccaagtcgktgactgcccacttggccgcgaagtggcccgagaccccgctgctgctggaggcaaggtgggtgcgggccgggccctcgtccgggcgggtgtgggcgcgctg

SEQ ID NO: 342188 - DNA, 201 bp, Homo sapiens
tgaacaacatttaatgcactcatgtcagtagaagctcttggcaacagtgaaaaacctgaaaggcattaagtagtgaagtgacagtgacatgcattttttttctaaagagcattctccattgttgagaatggattgttggtggggaggagtaggtgtggtgatatgtattaggaaacataaggtgagagatgtgagatggac

SEQ ID NO: 342189 - DNA, 201 bp, Homo sapiens
aagtatgtttatgctgctataaaaatatgccacagactggctaatttataaagaacataaatttatttcttatacttctggatgcttggaaatgtaaggcygacgtgctgccatggatgtctggtgagggctgctctctgcttccaggatggctccttgttgctctgtttttacatggtggaaagtagaagggcaacagag

SEQ ID NO: 342190 - DNA, 201 bp, Homo sapiens
aaacaatctgataataattcactatttgaagttaaatttccacatttcctacagacaacacacacacacacacacacacacacacacacacacacacacacaccccctcaccctaagagaagctcttgtacctgcaccttaggaggctattgttagcagaatcattcagaatagcaacaaactatgataaatatacacata

SEQ ID NO: 342191 - DNA, 201 bp, Homo sapiens
ctaatatcagttgcttttctctcttctaacaacaaatatttattaattattttcatcagttttattaaatgcctactacataccacaccctgttttaggtrcttggataaattaataacatatatagccaacaatccttatcctcatgagagtactttctgtaatgactcctacatttacaatgacaagagcaagcaaata

SEQ ID NO: 342192 - DNA, 201 bp, Homo sapiens
aaaattccagacttgcctacagaggagactcaaaagaatccattgattgtgagatttgacacaggaggttagtaaagtaactggatatgagatcagtataytaatatcagttgcttttctctcttctaacaacaaatatttattaattattttcatcagttttattaaatgcctactacataccacaccctgttttaggtg

SEQ ID NO: 342193 - DNA, 201 bp, Homo sapiens
aaatacttttgtcaaatgaaagctaaattaggccatatggaaatgtatacttttcagtcacaaaggatttggagtttttagcttcttatccaaagtattasattacattgggttatatagatcagttctaaacatttaaggaaggatcaattatattagtattcatttttccagatctctaaccagaattgctgtaaatca

SEQ ID NO: 342194 - DNA, 201 bp, Homo sapiens
acaaagtagggtagtaatttgtaaagtgttcaccaaggtaactacaggaagcaacaattgtcaagagtcactttaatagcagaacgtctgatttgtggctyttaggtctagcaataattatccattaaggtctgttgtctgactatgcccctcttattttaagataattaaatcgtcaactgcctagaaaataaaatgtct

SEQ ID NO: 342195 - DNA, 201 bp, Homo sapiens
tatagaaactacacttcagtgatttggcaggggtacagtttgctctataaaatagtgccatggaatatgcatcaatattatgtctcagcttatttgttttactaacttactggtgtaagagtttataagggacatagtcaatttgagttacatcttttattaagattcaagattcagccattttattgtaaaggatcatta

SEQ ID NO: 342196 - DNA, 201 bp, Homo sapiens
tatgcatacacacacaagacaggtagcattctgttcattccttgtttacttttcaaattgtatttgttacaactgacatactatagatgttgccttgagcrgaacttttttttatttttatttttattttttttggagacaggttctcactcccattgtccaggctggggcaccatcacagttcactgtagcctcgacttc

SEQ ID NO: 342197 - DNA, 201 bp, Homo sapiens
gctggagttgctctctggcgagctttcaactatattgcagaagaatttgatatatcagaagcatttatttctatagtacacgtgagtttatgcactaaatrtgatttgtttagaaggtaaaattcttgcattactatattatgatttctttagaatgtataatttttgcattacatttattgtaacatttcaaagtttata

SEQ ID NO: 342198 - DNA, 201 bp, Homo sapiens
atacattctctccatctagatattgtagtctaataacgtttctaaataatggtttattgtgattcaagaggtaattataacagtccttgttcatcttcttkttccagaattggttttgtgttcattcttaatacagatgatgaagttgatggagcaaatgatgctggagttgctctctggcgagctttcaactatattgca

SEQ ID NO: 342199 - DNA, 201 bp, Homo sapiens
ggaggactgcttgagcccaggagtttgagaccagcctgggcaatatagcaagacctacctctatgtaaaatcaaaaaagtaggcaggcacagtagctcacrcctgtagtcctagttacttgggaggctgaggtgggaggatcagttgaccccacgaggtggcaactgcagtgagccatggtcatgccactgcactccaggc

SEQ ID NO: 342200 - DNA, 201 bp, Homo sapiens
tggtctgggatagtccctggctcttccaatggggggtgcaaatttaatacaccaccacaaaaagaaataagttcaaagatttatcacttacagatcctggmcaggaagggctccatctctaggtcacatcaggcaagaatgaagaggagtcaggcagagagaaagagagagcatgcatgcaactagcagtatatataaggg

SEQ ID NO: 342201 - DNA, 201 bp, Homo sapiens
accgcgccggagcgggacacgcatgcgccggtctggacccggcacccagtaacggactcgagctcctcccaccggaagtgggcagccgcgcagcgggaagwgccggccgaagcgtggcggccacagactgtgggtaccgggtccgagggactcgcgcttttctctccgtgccatggcgccagcgaaagccacgaacgtggt

SEQ ID NO: 342202 - DNA, 201 bp, Homo sapiens
ctctgtctattaatacattctctccatctagatattgtagtctaataacgtttctaaataatggtttattgtgattcaagaggtaattataacagtccttrttcatcttctttttccagaattggttttgtgttcattcttaatacagatgatgaagttgatggagcaaatgatgctggagttgctctctggcgagctttc

SEQ ID NO: 342203 - DNA, 201 bp, Homo sapiens
atttgataatgttagcactagagggagagagagtgatattttataggaatccagtagctatgtggattttggtgaataggcattacattcaaacttttgargtgataaaattctccttttctctgtctattaatacattctctccatctagatattgtagtctaataacgtttctaaataatggtttattgtgattcaaga

SEQ ID NO: 342204 - DNA, 201 bp, Homo sapiens
gaggctgaggcaggagaatcacttgaacctgggaggcggaggtttcagtgagcctggattgtgccactgcactccagcctgggtgacagagcgagactcttgtctcaaaaaaaaaaaaaaataaaaagagtatatttaccctttttgtacaaaagaacatggccatttgataatgttagcactagagggagagagagtgat

SEQ ID NO: 342205 - DNA, 201 bp, Homo sapiens
gctacctggaggctgaggcaggagaatcacttgaacctgggaggcggaggtttcagtgagcctggattgtgccactgcactccagcctgggtgacagagcragactcttgtctcaaaaaaaaaaaaaaataaaaagagtatatttaccctttttgtacaaaagaacatggccatttgataatgttagcactagagggagag

SEQ ID NO: 342206 - DNA, 201 bp, Homo sapiens
tgtctaagtaatctttggggttttttattgtctttttttttttttcctgtttcatttcaatatttggtccttttctctttgcatgacttttttttttttttgtgagagccagaaattgatgaaaagctgtagaagcaaagagctaaggtttgttctggtagcctcagtgccagatgctcacttgcttctgttgaagcttgt

SEQ ID NO: 342207 - DNA, 201 bp, Homo sapiens
cagtctcgctctattgcccaggctggagtgcagtggtgcaatctcagcttaccacaacctctgcctcctgggttcaagcgattctcctgcctcagcctcckgagtagttggcactacaggcgtgtatcaccatgcctggctaatttttgtatttttggtagagatggggtttcactatgttggccaagctggtctcgaact

SEQ ID NO: 342208 - DNA, 201 bp, Homo sapiens
tatcttaaagggattctaatcatgttcattaaggaatagttaacaatggtagataatatacatagacttagatagtagtgtcaacaaataatgattgtctrtttctcataagcattaacttttctgcagtataatgcatcttagtctttttgattgtagacttctggtcagatcattaagcaattttcaattttgaaaata

SEQ ID NO: 342209 - DNA, 201 bp, Homo sapiens
tcttaaactatccatagtaagagaataacattttttccttaacctgttgccaatcaatatgttgtcctactcctatgactaatatgtatctttttttttttgagacagtctcgctctattgcccaggctggagtgcagtggtgcaatctcagcttaccacaacctctgcctcctgggttcaagcgattctcctgcctcagc

SEQ ID NO: 342210 - DNA, 201 bp, Homo sapiens
agcaaacaggtaggtgatatgtaaattttaacttgtaagatttgtatttatgtacacacattgtaatgtttattattttttaatggtaatggttaagtgtraatgcttcactgggttagtaaatccgaacattaaatttgaaaatatgttttaatagaaaccattctaagcatctgtttccaaaaatacaaggttttaata

SEQ ID NO: 342211 - DNA, 201 bp, Homo sapiens
ttgttactggacctggttttttcttttcttcacaagatgcttcaaagaaataagtcagaaggtcagactatttactaaccttaactgacttaaaattgatrtcaaaattaaaataacctaactcagcaaagtgatctgacctaattacagaatttacatggatttatatttattcataggtatttttggaaatgtgattta

SEQ ID NO: 342212 - DNA, 201 bp, Homo sapiens
atgtaggtatattccagtgcatggattcattcatgacacaagatgattggatcaccttaggtattttaagctttaaagtgtagagaaatctcagatttgcrtatgttttatgatctgtttacagtctaactgatgtcttacttcattcagcttctttccttctgactctaaatttcatacgtctatgattaaatcacaatt

SEQ ID NO: 342213 - DNA, 201 bp, Homo sapiens
aggaaagtaaaactaaaactacataaacaacataggctatcaagaagtaattcatttttgcagtgctttatatgtagtggatctcaagaagttcaggagarttggagcaggtgacaggctcaggagccagtatcaagctctcagtcaagatccaaacagtctttcaaacctagatcaggtaagtaaaatgttaacagaata

SEQ ID NO: 342214 - DNA, 201 bp, Homo sapiens
agattgtgagacatgatctaaaagaacttcgagatttcgatctggatggagctccttatgggtataccccattttgtgatagccgcagggaaatggatggrtatcgtttctggaaaacaggatactgggcatcacatcttttaagacggaaataccatatcaggtaagaaaagtcagacccttaccatttagtaaataagt

SEQ ID NO: 342215 - DNA, 201 bp, Homo sapiens
atctaggtagaaaacctcatgtaatctaccaaaaagctagaactaataactgcatttcacaaagttgcaagatacaaaatcactatgaaaatccaattctrtatactagcaataacaattgaaaattgaaattatccatttctgtagcattttaaaaatgaaaaacttagtggtcagacttaagacttacagattgaaaac

SEQ ID NO: 342216 - DNA, 201 bp, Homo sapiens
agaatgacaatcattaaaaaggaaacgacagatgctggaggggatgtggagaaataggaaggcttttacactgttggtgtgtgtgtagatgagttcaaccrttgtggaagacagtgtggcaattcctcaaggatctagaaccagaaataccatttgacccagcaatgcccattactgggtgtatacccaaaggattataaa

SEQ ID NO: 342217 - DNA, 201 bp, Homo sapiens
aataggaatgcaagctgagttatctcctgtatgcttcattagaaacagaatcctagtataaggcaataaatatgcatattaagcttttatcatagaagcaytcccaaaggatttgctcagcataaaagggtttgcagagttcagggtctctgaggtgtgacctgtaagctggcattaagattaaaatgataattttttttt

SEQ ID NO: 342218 - DNA, 201 bp, Homo sapiens
cctttgctgtgtagaagatttttagcttgatgttaactccacttgtctatttttaattgtgttgcctgtgcttttgaagtctcacacaaaacatttttgcycagaccaatgtcctggagcatttcttcaatattttcctctagtcgtttcatagttttgggtcttatatttgagtcttcaatcaattttgatttgatattt

SEQ ID NO: 342219 - DNA, 201 bp, Homo sapiens
gattttcagatttgcaagcattgtgtgaaataaccagtattttacaattttagtgagaaagaaaacaatttataagaattatatagctaagatcatgattwgttgtttgtataaacttaacacgtcatctttcatcttattttctattttcttagtgttataaagacgaatcctcaagagaatgatatgttcttcaatgtc

SEQ ID NO: 342220 - DNA, 201 bp, Homo sapiens
gaatcctcaagagaatgatatgttcttcaatgtcattgctattgttgatccattaacaagagaagcacagaaaatggcacagttgttggttgtaagataayataaattagactaaatgtttttgtttttaaattcataattttttcaagtctgttttcaaatataatcagctgtttatgctcttgatccttcaccatttta

SEQ ID NO: 342221 - DNA, 201 bp, Homo sapiens
ttgctttaggggatggataagaatgcttttgagaaaaaatataatactgttggagtgaatatttttcgaactcaccagttgttctgtcaagatgtacttarattacgtcctggagaaatgggtattgtcagcaatgggagagtaagtagaaaaagctattgctctcttttctcagtgacactgcagtgcactggtctgcct

SEQ ID NO: 342222 - DNA, 201 bp, Homo sapiens
ctaattgaacttccttgtacatatatctttgcatagttaccttggttattttcttaaatttctagaactaaaatctctaggtaagtacatgtatattaaartgtatactacaaaattgtcttcagaaagctgaagttttatactctacttctaaaatttttaccaatgctaatttgtattaattctctttaacaccttagt

SEQ ID NO: 342223 - DNA, 201 bp, Homo sapiens
cagtctttatcagacagtctattttaattatttagattgtgagacatgatctaaaagaacttcgagatttcgatctggatggagctccttatgggtatacyccattttgtgatagccgcagggaaatggatggatatcgtttctggaaaacaggatactgggcatcacatcttttaagacggaaataccatatcaggtaag

SEQ ID NO: 342224 - DNA, 201 bp, Homo sapiens
acatccctggctttcccaccacaattttgttggtgaactactttttctctacttttcctttaaatgttgctattctctacatctctgccttgacccacttytcactccataccatctctagcggcagtcttgcagccaatcatggttttaatttatatctttctgttaatagttcccaaatcttatctctgtctcttagct

SEQ ID NO: 342225 - DNA, 201 bp, Homo sapiens
tacagataaaaatacctgaatagctggaccactgggataagagtgagtctgggagttggatagctttcttgcttggcctggcaaggaagctgaggtggctstcactcttccccttgttaagacatcagtgcatctaattgagagctccctcagccaccttcatcaaggctggtacctctgtccaccattggatattacatt

SEQ ID NO: 342226 - DNA, 201 bp, Homo sapiens
aattataatctataactatattaatatatttcctaatatcgaatcattttttctaatattgaagcatccttgtattcctagaataaactccacttggcccyacaggttggctggacacagaagagcagtagcaatcactgtagtctggttctcagagactcctactcctaggagaaggggaagagcaccacatcaagggag

SEQ ID NO: 342227 - DNA, 201 bp, Homo sapiens
atttaagaaattaaaattaaattttaaaaaacacttcaaggttaaaaaatatatatgagctcctgttactgttaatgtatattgggtttaatattcttttwtacagaattatgatgctttctgttttgcgtaacaccaaaacaccagtgaaattctggttgctaaaaaattatctctcaccgacatttaaagtaagtacat

SEQ ID NO: 342228 - DNA, 201 bp, Homo sapiens
ttacctccattttgtagatgtggaaactgaggcatacagcattcatgtaatttgcccaggcttaccctgctagtatataacagagctaagagttaaacccragtaatatggctcctaactactccagaagatttaaacttggtttgtgaaataaaattaagattatgtcttcaaagcctcatggccttttgtaaggccatg

SEQ ID NO: 342229 - DNA, 201 bp, Homo sapiens
aatggagatttggcatggaatgattttgttattcatacattgagaaactaagagctctgcacttacgtaatatttaaccccttccccaaatgtctgattcrtaaaatgacttgtttataaatgacataacaaaatattcttgttggtgagtaagaccactgtcttaaagactaggaatataaattttagtttacctttaac

SEQ ID NO: 342230 - DNA, 201 bp, Homo sapiens
taattcctcacatggctaaagagtatggattccgatatgaactagttcaatataggtggccccgttggcttcgtcaacagactgaaagacagaggattatytggggttacaaaattcttttccttgatgttcttttcccactagcagtggacaaaatcatttttgttgatgctgaccaggtaataaggttaactactattt

SEQ ID NO: 342231 - DNA, 201 bp, Homo sapiens
tagatttaaatattaattttcaccagaatagttatctaactttttttaacttaacaaatgtgaatttcatgtggaaaaatatattgggattctgtctcttstgggggtatgatgtctataattctttgccttatatctggcacaaatttaaaacttggataaaaaacaaaaacatacttcaataatgtgtataatatttgc

SEQ ID NO: 342232 - DNA, 201 bp, Homo sapiens
tcattataaaagaattcaaatactttagaaaaatgcaaagtagaaagggaaaatggcctataattctgctaacagtttagtatatgttcttttttaatgcmtatatgcatatacagacatacttaaaaaaacatttattgtactataaagggtatcttagatccttctcccacaaagttattgtgttcttacatgtaaata

SEQ ID NO: 342233 - DNA, 201 bp, Homo sapiens
tttctgcttttttattctaataggttttgcatttatgtattttcttctgtctgtggttgagctaaacacttggttttttgtgttttttttgttttttttttcaattataacatatttaggtcatcaatgttgcctttctttactatgtgatattctcattgtcccaatttcgtaaaattcttcttaacagtagttttattt

SEQ ID NO: 342234 - DNA, 201 bp, Homo sapiens
ttctgctccattatctatttcttatagtagtgccatactgttttaatatttattgctttattatccagtttctgacaggaggatttcttcttcattgtggytcttttttcctccagaatgccttagctccttgtatttgttgatgcttttaagtcaacattggaatccttttcctccccaagctccccttccccaaaagcc

SEQ ID NO: 342235 - DNA, 201 bp, Homo sapiens
cctggtacatagtaaatacataataaatattagctattaatattatttaatatcaaacatgggaatttctttccaataggtacttggcaagattatcaacmtgaagataaagttgttcatgaactgtaggggcaggctttcagaagcccctttagaaaggtgagtctgagtgaacaaaatttcattttgaaaaatttgtaa

SEQ ID NO: 342236 - DNA, 201 bp, Homo sapiens
gagaaagagtaggagtatattgaaatctggaataaagtgaaaaatgagaaaaaacaattatattttttccccagccctgaaagatctctatattagcctaytcccttccatttagactctgtggatttgacattcttctaacatcttagacaaaggcaaaaatagcaatcctaactactcaccccatcatcccaggaactt

SEQ ID NO: 342237 - DNA, 201 bp, Homo sapiens
tttaaaaaatggcaaatcagaagtaaattattaatttattagtgattttttagagtaatactaccagtatattttttttgcctgattatttatactttaaraaataataaagtagtttttttaattttgaaagagctctattaaacagtaatatatatttatgcatattaatacttaactcacttgttaacaaaccatttc

SEQ ID NO: 342238 - DNA, 201 bp, Homo sapiens
ggcttaccattttacttagaatgtcaaacattcaaattagaatgcagccttcagtagttaaatttgaataagctagtcccattagaaggctgtatgttttkctactgatatcgaaaattttacaaactatttgtcctttggtagtcaacttcacttttgaaacaggcaaaagtaattagatattgagtctggtgaaaatgt

SEQ ID NO: 342239 - DNA, 201 bp, Homo sapiens
atttgacatctgattgcttccccttcaacaaaattcaactttattgtaaatatgatagaactttttagtccatagtgagaatagtttgaaaaaataattayggagcacagttgccatatttgtttaagcaattttgaaaatgggagaaaaaaactgcattatacataatacaaaatggaaacattcaggtgatgcagatgg

SEQ ID NO: 342240 - DNA, 201 bp, Homo sapiens
tgggagatttttctttatgattcaaacttaacatttgccaatatacaataatggagatttggcatggaatgattttgttattcatacattgagaaactaaragctctgcacttacgtaatatttaaccccttccccaaatgtctgattcgtaaaatgacttgtttataaatgacataacaaaatattcttgttggtgagta

SEQ ID NO: 342241 - DNA, 201 bp, Homo sapiens
agctgaaagtttttaagaaatttgacaatgtttctaccatacaggttagatcctttttgttttgttttgttttgttttgttttgtgacagggtctctcttrcccagacggaagtgcaatagcacaatcacggctcacaggtcactggagcctcaatctgccagtttcaagcaatcgtcctacttcagcctcctgactagct

SEQ ID NO: 342242 - DNA, 201 bp, Homo sapiens
agaataaatgggttccctcttctttaaggaaaaatgagcttatatttcttcattaggatttgcatttatttctgctcaagcctaagagggctgctagtttmattgcactttaaatacaaaaatctaagttttttggactataaatatagtatgaaatccagctccaaacccatatgaaaataagctagaggccatgaattc

SEQ ID NO: 342243 - DNA, 201 bp, Homo sapiens
tcttgaaggtagaaattttttcattttttctcttaccattatgtccctggttttagtggtactcaataaatataaatattccctaaatgaataagtaactwtttatctgaaaacaacaaaaaacatcatttttaatgatgaaactctggaagcattacaattacaacatgatcaatataattatccttaagatttaatatt

SEQ ID NO: 342244 - DNA, 201 bp, Homo sapiens
aagagctattctcgtgttgcgtaatgaagcatataggtactgaactagcaaataaaggatcctcagtcagtaccggtgcttcctcatcatatgtaagtaayatttaagatatttttatgtttaagatgccagaagctaaataaacttttctcccttatagttttgacacatgatgaactctagcactggtgtatatgagaa

SEQ ID NO: 342245 - DNA, 201 bp, Homo sapiens
tgcctgtaatcccagcagtttgggaggccaaggtgggcggatcatgaggtcaggagattgagaccatcctggccagcatggtgaaaccccgtctctactamatgtacaaaaattagctgggtgtggtggcacgtgtctgtagtcccagctacttgggaggctgaggcaggaaaatcgcttgaacctgagaggtggaggttg

SEQ ID NO: 342246 - DNA, 201 bp, Homo sapiens
catcatgttcttctgtgaattccaaacttttaaccatgggtatgtattatttacatgatcataagaaaatagttttttggttttttaaattgatacacaayattttacatatttatgagattcatgtgatattttcttatgtatgtaaggtgtgtaatgatgaaatcagtgtatttggggtatccgtcactagcagtattt

SEQ ID NO: 342247 - DNA, 201 bp, Homo sapiens
ccaacacctgctattcttttatctttttaatgatagccattctaactggggtaaaatgatattccgtgtcacttttatttacatttatctaataattagtratgttgaacattatatacttgtttgccatctgtataatttctttatttttttcattattattatacttttaagttttagggtacatgtgcacaatgtgca

SEQ ID NO: 342248 - DNA, 201 bp, Homo sapiens
tgttatttttttctctaaaacaaaactactttctcttgaacatattgtttgattttgtgtgtgtgtttttaggaagtaattcctcacatggctaaagagtwtggattccgatatgaactagttcaatataggtggccccgttggcttcgtcaacagactgaaagacagaggattatttggggttacaaaattcttttcctt

SEQ ID NO: 342249 - DNA, 201 bp, Homo sapiens
agattgatccagaagtctagtatgtggaagttccacaggtagtgaaaatttaagtaaggcaaaggtcctctaatctaggagggataagataaatacataartgttactactgtgtacaagataggaaactagagctataagacagatgaaaataaaatactatacaaaccaatggagaaaaattatatatccacttacaag

SEQ ID NO: 342250 - DNA, 201 bp, Homo sapiens
atgcctacatcagaaagtctgaaagagcacaaatagacaacctcaaggaactagagaaacaggaacaaactaaacccaaagccattgaaagaaaagaaatmacaaagatcagagcagaactaaatgaaattgaaacaaacaaaaaagaacaatgaaacaagaagctggttctttgaaaagataaacaaaattgatagatca

SEQ ID NO: 342251 - DNA, 201 bp, Homo sapiens
tgagacagtttcactctgtcacacaggctggaatacagtggtgcagtctcagctcaaactctgcctccgaggttcaagtgattcttgtgcctcagccttcygactaggtgagattataagtgtgtgccaccatgcctggctaatttttgtatttttagtagagatgaggttttgccatgtaggtcaagctggtcttaaact

SEQ ID NO: 342252 - DNA, 201 bp, Homo sapiens
attcttgtgcctcagccttccgactaggtgagattataagtgtgtgccaccatgcctggctaatttttgtatttttagtagagatgaggttttgccatgtrggtcaagctggtcttaaactcctggcctcaagtgatctgcccaccttggcctcccaaagtgctgggattacaggcatgggccaccacatccggcctattt

SEQ ID NO: 342253 - DNA, 201 bp, Homo sapiens
tcattggctagattttacttttactttgtctttaatctcaatagcagatgtcttttctaaaaatgttatgtcagaaaaaggaatgaccttgtaagtaatcwtaatacttgtatctgatatttaagaatttgtgctttttagcttttgtagaaaagaatgctgagagagagtcacacagaaaattagtgcagtaattgtcaa

SEQ ID NO: 342254 - DNA, 201 bp, Homo sapiens
atccggcctatttcgttccttattttgtacattcatgctttctcttatttttctcctgtttttctacattgtgttagctcagttttagttgattctacccstttgacctaagagttgtataatgaagactgatgttttcctatgtgaaagagcctttatgttttctgattttgttatttctattgttattgtattgagatc

SEQ ID NO: 342255 - DNA, 201 bp, Homo sapiens
gagagtaacaaacaaatgatgcctttgaaagtctgggaactacaaggtatagtattttgagatactttaacacagcattttggtaactgatctgttttgtkaaataagcttttatatatcacatgatatagattattttatggacagtattaatgactagtgaataatataaattatgattttttgtggcaatacctattt

SEQ ID NO: 342256 - DNA, 201 bp, Homo sapiens
agccattgccttgactgaagcataaacatttacctgtaataatttggttaagattgtttataatgtttatttctcatgcttcttatgcattatcttttgcmtaaagattttccttctaggaaagtttattttgatcggctcgtatgtggattctgtgggatcctaaatcacttttctgtaacatactccccatcactccca

SEQ ID NO: 342257 - DNA, 201 bp, Homo sapiens
tttaattatttagattgtgagacatgatctaaaagaacttcgagatttcgatctggatggagctccttatgggtataccccattttgtgatagccgcaggraaatggatggatatcgtttctggaaaacaggatactgggcatcacatcttttaagacggaaataccatatcaggtaagaaaagtcagacccttaccattt

SEQ ID NO: 342258 - DNA, 201 bp, Homo sapiens
agagcagaactaaatgaaattgaaacaaacaaaaaagaacaatgaaacaagaagctggttctttgaaaagataaacaaaattgatagatcattagtgagaytaaccaaaaagagagaaaatccaaataagctcaattcgaaatgaaaccggagacatcacaaacaatactgcagaaatacaaaagatcattcgagaccact

SEQ ID NO: 342259 - DNA, 201 bp, Homo sapiens
aagaatttttatgaattatgaaagaaaccaattagaaatattctacagcctacccataccctaggtatttcagtagtttgtttttgtttttgttttgagaygtagtctcgctctgttgctcactctggagttcagtggcccgatcttggctcactgcagcctccgtctcctaaggtcaagtgatctctctgcctcagcccc

SEQ ID NO: 342260 - DNA, 201 bp, Homo sapiens
tatttcttaaagatttgcagtccattggatatgctgacatgtaagacattcactgtcaatattttatttccttaatcccacaatctcaataaaaatttcgrtctaaatatgagtggaaatggggagttaattaaagcaaataattgtgaaagattcgtaatgtatttttctcgtatacactatggatagaaatgaagtgca

SEQ ID NO: 342261 - DNA, 201 bp, Homo sapiens
tggacagggaattaaatggctaaagttgtcaatgcccttaagtagtgttttgtgactataagcagctgaaagtttttaagaaatttgacaatgtttctacyatacaggttagatcctttttgttttgttttgttttgttttgttttgtgacagggtctctcttgcccagacggaagtgcaatagcacaatcacggctcaca

SEQ ID NO: 342262 - DNA, 201 bp, Homo sapiens
caaacttgtttgtattacttataaacaataaaaccatatacttagtcataatttaattctacatatgattaatgtcactagctatccaaaatgcaaaaaaratacatgttactgtgtaataaaaagtctaacgaggtcaatataaaatataacaaaaactgatattgtttatcctaatttatgttttaattgtaattgata

SEQ ID NO: 342263 - DNA, 201 bp, Homo sapiens
gccagggatgaaacgggtgaagggtgccaggattggcataattcttctagtgtagctttttatatagtttttgacttgggactcaagcaaagattattcaraaactatgactatgctcaagttgtataactgaatttgagtttggttttatttaggagacaactgctttaactccaaagtacagcaaatttcctttggaag

SEQ ID NO: 342264 - DNA, 201 bp, Homo sapiens
tgtgcaaactgctttgccaggaattcagcatttctatatctgccactaccgtttcatcattatgttttgcaaagggaaagccctgtatatgaattgtgagkcaaatcccttctgtaccaccaactatccgtatgatcttgtataagtttctttgctatttgtagtctttatttcctcattacaaaagggaataatcctacc

SEQ ID NO: 342265 - DNA, 201 bp, Homo sapiens
ttagaaaatcaatatatcaatagaaaaatcattcagcagaatgagattcaaggccattgttatgatagatttactgtaaagaatctacctctttgaactgmtagaatctattctccctggacccttctggtgtacagtttcctatttaatgtctcatctagacctcatgcttagacctccttttattataccacagccctt

SEQ ID NO: 342266 - DNA, 201 bp, Homo sapiens
ttcatgctttgtttcagctttttaaattttgtgcaaactgctttgccaggaattcagcatttctatatctgccactaccgtttcatcattatgttttgcaragggaaagccctgtatatgaattgtgaggcaaatcccttctgtaccaccaactatccgtatgatcttgtataagtttctttgctatttgtagtctttatt

SEQ ID NO: 342267 - DNA, 201 bp, Homo sapiens
ttgctaggcaggaagggtacctctaagttcttatctttggctaccagctggacccatttgggtatgttctaatgcctatgcagcaacctatgctaccttgstgtgtcattcccattacaaatagacagttcctaccctcccaaaactcattccagtagaaaagatagtcaagaaaatgagtgactattatatgttctaagt

SEQ ID NO: 342268 - DNA, 201 bp, Homo sapiens
tgaatgtttactgtgtgcctttcatgggatacttcgtttacctggtggatggtctaattcatagttgtctgaccccagacccagtttccctcacacaggaracttgtttatgctgacagatgtccgtgtggctcttgtctgacccatgtccagtttatgtttgcctgatcatcgcggtgacactgggaacccaacattgtg

SEQ ID NO: 342269 - DNA, 201 bp, Homo sapiens
attttaatattagtttgtaaatattatagagtgtttatagcttaactattttgaaatacatttctatattgattgcttatatttactatttaggcatacartgtttccatatgtatgtttaagaaatgtcaattacttttttattccaagtttcacagtaagcttgcataaagaaaacaaaaaggaaaaagatgtcctaaa

SEQ ID NO: 342270 - DNA, 201 bp, Homo sapiens
tggtactagaatttcagcttgaatttcatttgtttcctaccatttctcttcatattattagtggtggtaaaagttaataaaatagctgaaaaatagaccayggtcagatttgaaggaggatgcatacaaatcataatacaataacagatcataaactcctagaacctgcataagtcaggtatatcttaaagggattctaat

SEQ ID NO: 342271 - DNA, 201 bp, Homo sapiens
gtgggtgatgttcccttccctgtgtccaaggccctgtgtccaattgatctcattgttcaattcccacctatgagtgagaacatgtggtatttggttttccrtccttatagtttcctgaaaatgatggtttccagcttcatccatgtcccggcaaaggacatgaactcatccttttttatggctgcatagtattccatggtg

SEQ ID NO: 342272 - DNA, 201 bp, Homo sapiens
tctcctggatgaatatcctcaagtatgtttttcaacttggttctgttctccctgtttctttcaggtaccccatcagtcacagctccttttacataatcctrtagttctcggaggttttgtttgttccttttcattcttttttgtttaatgtgtctacctgccttatttcagcaagatagttttcaagttctgaaatttttt

SEQ ID NO: 342273 - DNA, 201 bp, Homo sapiens
tgtagcaattgtgaatgggatggctctctgcctacttgttgttggtgtataggaatgctagagatttttgcacattgattttgtatcctgagactttgctraagttgcttatcagcttaagaagcttttgggctgagatgatggggttttctagatataagatcatgttatctgcaaacaaatgtaatttgacttctctct

SEQ ID NO: 342274 - DNA, 201 bp, Homo sapiens
tctccgatttcctttgagcagtggtttgtaattctccttgaagagattctatacttcccttgttagctatattcctaggtattttattcattttgtagcarttgtgaatgggatggctctctgcctacttgttgttggtgtataggaatgctagagatttttgcacattgattttgtatcctgagactttgctaaagttgc

SEQ ID NO: 342275 - DNA, 201 bp, Homo sapiens
ctgtcttttgccagaatccatgaaacaatgaaaagctaacttattagcttgtaagtagggtaaaacaattctacagcctgacagaaacattcccccccccmcccgctatgtagggcaaagttaataattttttttttccttttgtgaacttcaggcatatactcttgggtttgtgatatcttatcaatattggtcaatggt

SEQ ID NO: 342276 - DNA, 201 bp, Homo sapiens
gcctggccaaagatggcttcttatttgtatttatttgataagtagttatagggaaaatttttctttcaatatgactttatttatttttagctttgattccaggggtacatgtggagatttgttacatgggcatattgtgtgatgctgaggctggagcttctaatgattctgttctccaagtagcaaacatagtacctgata

SEQ ID NO: 342277 - DNA, 201 bp, Homo sapiens
gaggacatgcagttttacaaagttaggaacagcttctgtactgaaaacctacaagcagatattttgtgaacaaaatttgatttggtttgaacttttaagtmcttttcaatttataatttttcttctttatttgtaatgatttagtaggtcatggggacatgtcatctttctgcataatctaacttttgtcatcttttatca

SEQ ID NO: 342278 - DNA, 201 bp, Homo sapiens
gttctgtggtagaggtgggtaggaggaagtcagcattgacattagagatgatatagtacctcaagaaaattgaagaattaataggaagttattagtcataycacagacggaacattccaggaagagggtagacatgcacatctcccatctaaaactcttagggccatatgtgttttagaatttagaagtttttcgtttgga

SEQ ID NO: 342279 - DNA, 201 bp, Homo sapiens
gtgtagtgagcacttcttgtttgtttttatgtgcctctttgcagcacggatgttttcaacctctcctttcttgacactctcttgactctctattggcttcyatgtcagaccttgctggttcttctttgacatccctggctttcccaccacaattttgttggtgaactactttttctctacttttcctttaaatgttgctat

SEQ ID NO: 342280 - DNA, 201 bp, Homo sapiens
atatgccctttgtcttcagctaccatggtgagtagggaaggaccatcagataggggcatttctagggcatgtctgggctcagactgtccttgggtgggtcktgttgcaactgctgtgggggatgggggtgggattcctaggtcaatggagttatattcccaggaggattatggctgcctctgctttgtcatgcaggttgtc

SEQ ID NO: 342281 - DNA, 201 bp, Homo sapiens
ccttggaccccaaaaccatgctcaccccagtaaaacccaaagccaggtaggcctcacagccccaacttaatgctggtaccagaagactgagctgccagatsctgtagccccaagctccaaatctgcctggtagattcagtttccaagcctgtccaaccaccaggcctaccccaccaccaggcctaccccagaagccccagg

SEQ ID NO: 342282 - DNA, 201 bp, Homo sapiens
cagtctagccgcagtctgatttacaaaccccatcacttgtacaaattgtccccaacttatcatggttcaatttaggattttttgactttactatgggtttrccagggtattaaatgcattttttacttatagtatttgcaacttaatacttaataaacccaacttaatgggtttattgggaggtaaccctaagtcaagggg

SEQ ID NO: 342283 - DNA, 201 bp, Homo sapiens
agaaagacacattgaagagtgtaggataatttacattacatgcattactccttcctcaacctgatacagcacagctggagagatacccccttgggggaagkagagggaagtgagcagcagactttgccttggaccccaaaaccatgctcaccccagtaaaacccaaagccaggtaggcctcacagccccaacttaatgctg

SEQ ID NO: 342284 - DNA, 201 bp, Homo sapiens
tcagtgtttattctgttgaggtgcgttctgttttttcttctttccactttggaagtggaaaacgaatttttattttttaaaattaactttaaaaatatatygatcaatttataattagttgattatagacattaatttttttaattacaagaaagccaatagatagtaagttagctttcttgccaagtctgaagtgggagc

SEQ ID NO: 342285 - DNA, 201 bp, Homo sapiens
atattaaaccatccctgttatgaaacccacttcataatggtggattatctttttgatacattgttggattcggttagctagtatattgttaaggatttttrcatctgtgttcatcagggatattggtatgtagtttccttttttggttatgtttttttcctggttttggtattcggatgatactggcttcatagaatgatt

SEQ ID NO: 342286 - DNA, 201 bp, Homo sapiens
aaccatccctgttatgaaacccacttcataatggtggattatctttttgatacattgttggattcggttagctagtatattgttaaggatttttacatctrtgttcatcagggatattggtatgtagtttccttttttggttatgtttttttcctggttttggtattcggatgatactggcttcatagaatgatttcagga

SEQ ID NO: 342287 - DNA, 201 bp, Homo sapiens
gtgtaccagtatcaatccactggcatgagtctggtgagacagaacacacaataagtttagggaagcaactttattactcacagacaggcagcaagggacartagacacctaaggattcatggcaagctcatcccccaaagcttaggatagctgtccaggatggatggagtctcacgtgcacgtcattcatgttgcaccgca

SEQ ID NO: 342288 - DNA, 201 bp, Homo sapiens
aagtgttaaaagtgctgcttggtttctcctcgctgcctatattaaaatgagagaagaaagagataaatttaaaaaggaacaggtaaggaaaaaggaaccarcacttgatgattttggaggttctcagcctatccagattgtaaagagtgttacaactaggaaactcagtgttgggaatgtgtgctctggagagaaagacag

SEQ ID NO: 342289 - DNA, 201 bp, Homo sapiens
cagcactttgggaggccgaggtgggcagatcacgaggtcaggagatcgagaccatcctggctaacacagtgaaaccccatctctactaaaagtacaaaaamaaattagctgggcctggtggctggtgcctgtagtcccagctactctgggggctgaggcaggagaatggcatgaacccgggaggcggagcttgcagtgagc

SEQ ID NO: 342290 - DNA, 201 bp, Homo sapiens
aaaaggctgtttaatcactatcatatgtgatttctatgcccatattctctatgagagtgcctcgttaattgtaaaagtagctaaactgctttttaaaaaaatactactgaagattccctgagctcactcaagtgtcttacagttatcacctttagtaattttctctagaaataccattttttgtctgtcaaagagcattct

SEQ ID NO: 342291 - DNA, 201 bp, Homo sapiens
gagattttggacttagaattgatgctgtaattggttgagtttttggaggttgttggcaaagggaaatatattttatgtaggggaggtggattttgggggcytttgggggctagagggtggcttgaatgatgcacccaacaaaaaaagggcagcttttagaatcttttgcattaactctgctcaaaccttgacttcagactt

SEQ ID NO: 342292 - DNA, 201 bp, Homo sapiens
gaggaagttcgtaagggcccatgggtcgagaagaaaaaggtcaatacttacatttcttcccactgctcacctctttctccctgtactcctggtgggtgatrgtagtctcctgataactgtgttgtagtctgacacatgttccttgatctgggctcctaaggaaaaggcactcaaacttgactgatttaatggtttattgtt

SEQ ID NO: 342293 - DNA, 201 bp, Homo sapiens
ttgttattaaatgatgggtttcccacattcagtgttctttagatgtgatccatacccactgcctgtgtagaattcttgtgggtccatcatacttctccctrtggaatgtgggcccatggggaacccatgtaaacatactaatgttcatgttgcttgctgtgccacaagtaatcaagctctttgactcagaaatctctgtct

SEQ ID NO: 342294 - DNA, 201 bp, Homo sapiens
cgaggctggactgtactgcctccatcttggctcactgcaacctccctgcctgattctcctgcctcagcctgcctagtgcctgggattgcaggcgcgcgccrccacgcctgactggttttcgtattttttggtggagacggggtttcgctgtgttggccgggctggtctccagctcctgacctcgagtgatctgccagcccc

SEQ ID NO: 342295 - DNA, 201 bp, Homo sapiens
acacctaaggattcatggcaagctcatcccccaaagcttaggatagctgtccaggatggatggagtctcacgtgcacgtcattcatgttgcaccgcagctraggaactctgaaagcctgctctgccctgggttttatacctaggagcaacttgatgagctgtgctaaagcattgcaagacatcctgttctaggagctatgg

SEQ ID NO: 342296 - DNA, 201 bp, Homo sapiens
tatataaaacctttcttgaagcattaattgtaacatgaaatatggaactctttccaaaaaactcatacactgtttgtcttgtttatctagcatgagtgacwttattatgaaagttgatgcccttatgtcctctgtgcctaagcgtgcatctcgatatgatgtcacatttcttagggagaatcacaggtaagaatgtattcg

SEQ ID NO: 342297 - DNA, 201 bp, Homo sapiens
agcaaaacagtgatgtacactattaggcgataagagctttaattgggtcatgcataacatgaaaacacataaaagaggcacctagtcagtgttccagagasagcaagacaggattttcagtgctgaatgctggagctgagtttgaatgatgagatttagccagggagtagggaacacaaatgagtagaagagaccggaatg

SEQ ID NO: 342298 - DNA, 201 bp, Homo sapiens
gaaccagggaggtgaaggttgcagtgagtcaagatcgcaccactgcactccagcctgggcgacagagcaagactctggctagaggtggttataggctgaaraggctagcattttacagtatgcataccttaatttgtacatctgaactgcagttattctacttgtgttgatctgactgaaaatatttttgaaattccactt

SEQ ID NO: 342299 - DNA, 201 bp, Homo sapiens
aagtatatgtgcttcttgaaatttttgattcatacttgtaaactaccctcataaaattgtactaacatggacactcaccccagaatgtgaaatgtgttcayttcccagaactttaattaataaccactcatactatttttaaaatctttttcagtttaataaatgaaatgttgtttctttttttaaaaaagtgtatttaat

SEQ ID NO: 342300 - DNA, 201 bp, Homo sapiens
atttggtatctgttgtcaggcactactcacatttcttttgacttttctctgcttccctgggtgaccagtcctttgactgatgtagtcatattttagatgtyattacattaatttttattattttcttgctgaccttgtaactataagtattttaagaatattatttaaaataacatttattttctattttgcttttactgt

SEQ ID NO: 342301 - DNA, 201 bp, Homo sapiens
gtttcacaggtggacaggggagaattttaccccaggatggatcatacccagagtctcacccatacatgatttagatgataaaatttgtaaatgaagttgaygatatttacatgagattttggacttagaattgatgctgtaattggttgagtttttggaggttgttggcaaagggaaatatattttatgtaggggaggtgg

SEQ ID NO: 342302 - DNA, 201 bp, Homo sapiens
gcctttttcttctgttatcattctcgttccttctgctttattttttcttcagaaaattttctaatacaaaaagcctaaaaataataaactttttgtatatrctacccagaattgacagctaacattttatcttttcaagtttattttttaattgaagtaataaaactttaaaaataaagttgaagattattttgttttcca

SEQ ID NO: 342303 - DNA, 201 bp, Homo sapiens
tcttttgactttttgtcatatgtttcatttaagtatagaaaaagctttgcgagagcatttcttttcatatatctctctcgaaattatactgtaatttgtgraaacaagaggtattaaatagtcattcataaaagtataaagcttatatttggaaataagtgataactttacatttaaaactttttaaaaatgcagatgtaa

SEQ ID NO: 342304 - DNA, 201 bp, Homo sapiens
tgtaaggcaagtgaacaattgcaaatgccagcttgttacctttaaaaaaactttgtccaaaagagtgaactgggcatggtggcatgtgcctgtagtcccarctacttaagtggctgcagtgggaggatcgcttgagacctcccaggctaaagtaagccatgtttgcaccactgcactccagcctgtgtgacaaagggagat

SEQ ID NO: 342305 - DNA, 201 bp, Homo sapiens
ttaattcgcagcagagggcagagagggagcaggtatctcatatggcaagaacaggagtgagagagagtgttggagggtaggtgccatacatttaagcagcytggtcttgctagaagtcacatcacaaagacaacaccaagacatgagggatctgcccccatgacccaacacgtcctatcaggccctacctccggcattggg

SEQ ID NO: 342306 - DNA, 201 bp, Homo sapiens
ataaaggtctaatattatgctagattccttaataatatttttccttccagatcttagttttcaagcagcttctcaaataatgtccgctccagtttatgatkccattaaattaatgaaagacatttcacagaacttccccataaaagccaggtatgttaaagtttataggtttcattgcagctataactctttctattaaat

SEQ ID NO: 342307 - DNA, 201 bp, Homo sapiens
ctggaagcttggagataccaggaaccacacagccctaaagagagtgagtgtcacagctctggctcagggagcctgtaggtctgggctccccaaagggctgyagctcttctctccttttcattgcctgcaatgtggtgagtggggcacgtgtttcagccctgttcatgttacagctctttcagtcctgccatttggtgagtt

SEQ ID NO: 342308 - DNA, 201 bp, Homo sapiens
aagatacctcatataattagtcatgtttggatattgcattctcatcaagaagaaatcaaaattgttacctgggcatggtggtgtgcatctgtagtagcagytacttggaaggcccaaggccagaggattgactgcttgagcccaggagtcagagactagcctgggcagtatagcaagaccctgtttctaaaaaagaaaaat

SEQ ID NO: 342309 - DNA, 201 bp, Homo sapiens
gaggtggaggatcacttgaacccaggagtttgagctgtgtttgtaccactgcactccagcctgagcgacagagagaggccttgtctcccctgtcccccccmaaaaaaattaagatagttttctttttacctagatttctttgaagtaataattttgcatctagtaatagtacatttttttcttttttaaaagtagacttaa

SEQ ID NO: 342310 - DNA, 201 bp, Homo sapiens
aaagagatcagacatgcttttaataacattttaaactgaaatatttccaaaagcaaataatttttcctttcaaaattttttcctgaaaaagctttttagtyataagaaatgctggaggtactttagatgatgggaatacaaagatgaataaatgggatctacatccacaggactttgtgaaacaatgaaggagacagcaaa

SEQ ID NO: 342311 - DNA, 201 bp, Homo sapiens
gaaatgaaagacatgcttagggaactataaaatgccatggaaaggttcaacaatagactacaacatgtagacaaaagaattttagagctcaaagataggcktttgattaatccaataagacaaagataaaaaggaatcaaaagaaatgaagaaagtctttaagaaatatgggattatgtaaaacatccaaacctaagaata

SEQ ID NO: 342312 - DNA, 201 bp, Homo sapiens
gtagggaacacaaatgagtagaagagaccggaatggaatgtgtggaggaacctcgatcacttagtaatgtttactttcaaatcattaggaaattactgtckgttgtcctcatatttgtcctagtaattttattaatagttttggtgattgaggtaaaagtaggctagattaatatgtaaggttttcatggttaatgtcaag

SEQ ID NO: 342313 - DNA, 201 bp, Homo sapiens
ttttcatatctctgttatttggttatctaatttctgagtttcttgtcaaattgtcacaatcagcaaataacccagtctccaaccacccccaaaatgtcccyttccagtagagctacgtgtcgttaagtcttttaagacctttgactatgaagggaataagatgagtcagtagctgtctgtggaggctgccacttatttttt

SEQ ID NO: 342314 - DNA, 201 bp, Homo sapiens
tatttgcattattttttgattcttggaggaaaactcaccatatctcccaagttctgagaaatcatctatagtttgttaaagaattaagagtgggctgggcrcggtggctcacgcctgtaatcccagcactttgggaggccgaggcaggtggatcatgaggtcaggagatcgagaccatcctggctaacaaggtgaaacccc

SEQ ID NO: 342315 - DNA, 201 bp, Homo sapiens
ccagagaatgtctagaggccagcctctatggatgcctataccaaatggactccagagctgccctgttattaccttaccatctctggctggccctggaatgrcattacagttttctgacacaatgcagtcaatggttacacccagggaagagtagagaaaggaaaagggcacagacagaaagttctgcccacccctgcttat

SEQ ID NO: 342316 - DNA, 201 bp, Homo sapiens
aaagaatacaatagtctttgttgttttatcttttatataataataagtttttactaccactaaaattatgtaagtttactctggataactaattagaactrtttgccttatttcttaatgagtttaatatatttttcctgctattaatgaagataccaaaaaatctcatttctaatgctttaagactatcaaactttaaaa

SEQ ID NO: 342317 - DNA, 201 bp, Homo sapiens
aggaattccagaaacaacagagaagatggaggagggaaagtgttgtaaagctgagagagaaaaatgttcatgtcaaaagagtccacaaattacgaagtagratgaatgaaaatggcccatataagattataatagctactaagaaggaaaagtgggtcactgcaatagaatgacaacactaacatcagaatttcattttca

SEQ ID NO: 342318 - DNA, 201 bp, Homo sapiens
gtgaataagtcttatgagatctgatggctctataagggagagtttccctgagcaagctctctttttgcttgctgccatccatataagatgtgacttgttcytccatgcctcccaccgtgattgtgaggcctccccagtcatatggaactgtaagtcctttgaaccctttttcctgtttaaattacccggtctcgggtatgc

SEQ ID NO: 342319 - DNA, 201 bp, Homo sapiens
ttgctctttgcagtaaatctttctgctgctcagtctttgggtccgtgctgcctttgagagctgtaacactcaccataaaagtctgcaccttcactcctgargccagcgagaccaccaacccaccagaaggagaaaaccccgaacacatctgaacatcagaaggaacaaactctggacactccatctttaagaactgtaaca

SEQ ID NO: 342320 - DNA, 201 bp, Homo sapiens
tttgtaagtaaaagtttactgtttccagtggaaggaagttgcctctttccaaacagtaccaataaaagttccaaggctgactcatgggtccaactatagckgtgtgtcccaaactgaactgatttctgtgactctgataacccagcatgagtcatatacctacttctagaactggtgggaagccctgtcccacctaaacct

SEQ ID NO: 342321 - DNA, 201 bp, Homo sapiens
ttcccgacccggggcggcttctcggttcccgtgcagcactcacttgcagttcctttccccctcagtcttactttacctacgatttttaaagcttccctgcyctgctttaatacgttgggatgtattagcatttacgcgtggcacttaacgcaagagcttctactggggtaggcagttctgttcagacagtgcttaaagtac

SEQ ID NO: 342322 - DNA, 201 bp, Homo sapiens
atataaccccacaactttggagtaagttggtctgaaatgttggtgtttccaaatagattttaatggcaagattattttcacctggtctcatgttgattacktggacattactggaagatccaaaatgaagttgattatagaactgagatcttgatttttccatttttctctagcattatccataaccaaacttcagatatg

SEQ ID NO: 342323 - DNA, 201 bp, Homo sapiens
ggttcatcatgttgctagaaattgaattcttactcctcatttaagaaaggccaccttaaattacatactcaaatatacactagtttttcaggacttaaggstaactctctggggcagaggaaagagaagaatttgtaattacttatctctgataggcaaacctcttctctctgacagtgtttgagcaagcagacttgctga

SEQ ID NO: 342324 - DNA, 201 bp, Homo sapiens
tctcatgttgattacgtggacattactggaagatccaaaatgaagttgattatagaactgagatcttgatttttccatttttctctagcattatccataaycaaacttcagatatgattatatgacattaagttagccttacagtggaagatgtgccaatgtgcagtgtataaaatgctaacatttattttcttttgactt

SEQ ID NO: 342325 - DNA, 201 bp, Homo sapiens
agcccaaagtgtcttagaatatcagaactgggagaaacagtcaagatatttgtttggatgagggttagacctataattactttgttattctaaactgtctyttattgaagagtagattgatgatttgcagagaagttatttggaactggactgaacaaccagataccagataaggactgaagtcaacatggggtatttccc

SEQ ID NO: 342326 - DNA, 201 bp, Homo sapiens
tggctgaatctccggactgaggaaaagcagatgtttattataactcagattgtataaactctttagacaaactgctggaactgctgcagcatggctcaggktcctaactgtgcaaaacactcttttatcaatcagaacattccaagagcttaattatcaggacccagtcaagagacagtcatgtaaacagacccttcttgg

SEQ ID NO: 342327 - DNA, 201 bp, Homo sapiens
atgcctgggccaggctgctgggacgtttagctaagttaacagctggtgggctcttcgggctgcctctgctaccatttcaccaggcataagccttgtaaaascaaaagctgaagtggtcactctactcagtgggcagaactcaaggccgtcatcctctccctgaacaaaatctgaccccttggttaaatataatacattcat

SEQ ID NO: 342328 - DNA, 201 bp, Homo sapiens
attagcttgtaagtagggtaaaacaattctacagcctgacagaaacattcccccccccccccgctatgtagggcaaagttaataattttttttttcctttygtgaacttcaggcatatactcttgggtttgtgatatcttatcaatattggtcaatggtttttttttcttatttaagcatataatttatgtttttacatag

SEQ ID NO: 342329 - DNA, 201 bp, Homo sapiens
gtgaatgaaaatttgagtatgtagtgtacatgctattcagttatgaattggtaggacgtatttaacagcttatcaacatgtgaagatattggtacgtgatwgcctcttaaggaaattttgcctccggatattaagctggaaagtcactagagtaacttcacaaagaatttgcaatacatggctttttagatttttggtaca

SEQ ID NO: 342330 - DNA, 201 bp, Homo sapiens
gcaagtagcagatacatctattcagccatcttgaagccccttcttaaaaaaaaaaaaaaaaaagatcttaaggggaaaaatcctctctgaaatttttgctrattgttttatataaaaatgtaagggattctctctgaagcatctcagttattatagttagttttgccttacttgaaaaaccttcctgctcataaactacct

SEQ ID NO: 342331 - DNA, 201 bp, Homo sapiens
gcattttactattatatattattaatcccatattacattgtttctatttgcattttaaacaattatctaccgctttgttatataattcacatactttacarttcactaattcaaagtgtatagttcaatggcttttagtatattcatagagttgtgcatccatcacagcaatcaaaattagaacatattcactacctcata

SEQ ID NO: 342332 - DNA, 201 bp, Homo sapiens
ggacaaatacccaaactatgtcattcttttcctagcccccaaaatctcatgtccttctcacattgcaaattacagtcatttcttccccatgtcttaactcrttccaacatcaagtccaatgtcctaagtgccatctgagactcatctgcttccacttatgagcctgtaaaatcaaaacaagttatttacttccaaggtaca

SEQ ID NO: 342333 - DNA, 201 bp, Homo sapiens
ggctcccaaagccttgagcagttccacccctgtggccttgccgtgttcaacccccgaggctactctcacaggctagagttgagtgcctacagcttttccayactgaaggtgcaagctgccagtggatctactgttttgggctctggaggacagtggccctcttctcatagctctgctaggcagtaccccagtggggactct

SEQ ID NO: 342334 - DNA, 201 bp, Homo sapiens
gcttcttcctgcaggtctctgtttcataaatccctcctcttgccatcccaggtgacgccactatagctggtattttgtgagatcttccccctctgtacccrcagcctgagccttgattagctttctctctctgcctccccagtaatcagtcctgccctgttcaagctacatcacactcacaggcacttcctctcagtaaca

SEQ ID NO: 342335 - DNA, 201 bp, Homo sapiens
gataatatatacagtactagatcaaagtgcaaagcatggtgttggaatactgttaactctttcttttgagacctgactacttttcattcaggtatctggtrtgtgctgtattgttcccgttcctctagcctgccgttgctatgacactatcacatttttctgttttaatgatttcatagcacttattactgtatctcctca

SEQ ID NO: 342336 - DNA, 201 bp, Homo sapiens
tagaggaaggactatgctttgttactactgtcttcccaacatggagtgctttaatttgcatttcccaaattattaagatttatatactaatatttaatctrattaaaaccttaaaaatatatttgtaaattgcctgtccgtagcctttgcctatttttgaattgagattctttttttctcattggtttataggtgttttta

SEQ ID NO: 342337 - DNA, 201 bp, Homo sapiens
agtttttatgaatgtttcatgagttcttaaagagaagatgcattctctttaccgaagtatagatacatacatacatatatacatatatactattacatacmtacatatgtatacatgtatatgtgtgtgtgtgtatatataaggtctattttattcattatgcttttagggcttccataagcttatttattttggtggtga

SEQ ID NO: 342338 - DNA, 201 bp, Homo sapiens
ccagtttttatgaatgtttcatgagttcttaaagagaagatgcattctctttaccgaagtatagatacatacatacatatatacatatatactattacatacatacatatgtatacatgtatatgtgtgtgtgtgtatatataaggtctattttattcattatgcttttagggcttccataagcttatttattttggtggt

SEQ ID NO: 342339 - DNA, 201 bp, Homo sapiens
tgtaaatatctatcaagtccacttgatccagagctgagttcaggtcgtgaatatttttgttaattttctgtctcgatgatctgtctaatactgttaatggsgtgttaaggtctctcactattattgtgtgggagtctaagtctctttgtaggtctcttaagaatttgctttatgaatctgggtgcttctgtattgggtgcc

SEQ ID NO: 342340 - DNA, 201 bp, Homo sapiens
accagtttttatgaatgtttcatgagttcttaaagagaagatgcattctctttaccgaagtatagatacatacatacatatatacatatatactattacatacatacatatgtatacatgtatatgtgtgtgtgtgtatatataaggtctattttattcattatgcttttagggcttccataagcttatttattttggtgg

SEQ ID NO: 342341 - DNA, 201 bp, Homo sapiens
aataccagtttttatgaatgtttcatgagttcttaaagagaagatgcattctctttaccgaagtatagatacatacatacatatatacatatatactattacatacatacatatgtatacatgtatatgtgtgtgtgtgtatatataaggtctattttattcattatgcttttagggcttccataagcttatttattttgg

SEQ ID NO: 342342 - DNA, 201 bp, Homo sapiens
aagccatgtttgcaccactgcactccagcctgtgtgacaaagggagatgctgtcttaaacaaacaaacaaaaatgttgttcaaaggtaatatcttaccttytaccaggtgcagaactggtttagatggtctcaaggatgtttgctcttcagtgattaataatgagttaccagtaaatggcctctgagattccagaagagtt

SEQ ID NO: 342343 - DNA, 201 bp, Homo sapiens
tttgaaaaatttgtaaatgctgagaagaaaaaaacaatcattgttactggacctggttttttcttttcttcacaagatgcttcaaagaaataagtcagaargtcagactatttactaaccttaactgacttaaaattgatgtcaaaattaaaataacctaactcagcaaagtgatctgacctaattacagaatttacatgg

SEQ ID NO: 342344 - DNA, 201 bp, Homo sapiens
tttcacttctactgggattgggtttggtttgttctgtttctttagttccttgaggttagaccttagattgtctgtgcaccttcagactttctgatgtaggsatttagggctatgaactttcctcttagcagagcctttgctgtatcccagaggttttgataggttgtgtcactgttgttgttcggttcaaaaacattttaa

SEQ ID NO: 342345 - DNA, 201 bp, Homo sapiens
ctttgataaagtgacagaacagcctcctcggggtctgcagttcacactaggcacaaaaaataaacctgctgtggttgatacaatagtgatggcacatcatrtaagtattatttaattgatggtgtttaatttgatgttttggtgaattctctgttttcctaagagtaaaatgaaataatctttattctgctgttgctgaac

SEQ ID NO: 342346 - DNA, 201 bp, Homo sapiens
tgagattttattagtggagacaaataattttggaaagactttgtcattctagctgttcagtttatgaaacgagtaggacaaaccatagctgatttacctayttgttcttttagcattggttataccttcaaatttatatgtcttgagatacactattcagattattctttagaaagcaatcatatctgaaaggagtggagc

SEQ ID NO: 342347 - DNA, 201 bp, Homo sapiens
aatttgccatgggcaaaaccttttggaattgtatctatttgggaatctctgtgcctcctgtatttggatatctaaatctcattagacttgggaagtctttwtctgttatttcattaaataggttttctaatactttttttttaatcttctgggacagcaaaattcaaatatttggtcactttatggtgtctcatatgtcac

SEQ ID NO: 342348 - DNA, 201 bp, Homo sapiens
gaaaggaattgtttttgagagaaggcttaatgtaaaaggctacacaagtataaaattgttgcacataatgtattccttaatttagagaatattaaactagytcctctatttaatcagaaatatagaaaattctatgtatatttttatttatcacgatatagtaaaaatctggctttgaaaatgatttcagtgttaatatag

SEQ ID NO: 342349 - DNA, 201 bp, Homo sapiens
aggaaggcgaaagcatgacaggaaacctgccgcctgctggggaagtctggagcccctgctgagacgatttggaagtctcgttaagatcagtgacatattcyttaattttaaaaaattgtaattatttaaaacagttatttaatgtattgaatgagtttaagttatataataaatgaccattgagtatttaaaacctgattg

SEQ ID NO: 342350 - DNA, 201 bp, Homo sapiens
tggagacattacctatattagaacatcatctctcaaaactacatctgtaaatcatactttttaagtcttatcttgtcttattccttattctgaaaatgacmacatttctattaagatttatatctgatttgacttcaaattttaatcgtaaagaatgaaactagacccccatctctcaccatatacgaaaatcaaatcaat

SEQ ID NO: 342351 - DNA, 201 bp, Homo sapiens
ctggagacattacctatattagaacatcatctctcaaaactacatctgtaaatcatactttttaagtcttatcttgtcttattccttattctgaaaatgamaacatttctattaagatttatatctgatttgacttcaaattttaatcgtaaagaatgaaactagacccccatctctcaccatatacgaaaatcaaatcaa

SEQ ID NO: 342352 - DNA, 201 bp, Homo sapiens
ggcaaggaagctgaggtggctctcactcttccccttgttaagacatcagtgcatctaattgagagctccctcagccaccttcatcaaggctggtacctctstccaccattggatattacatttaccacctgctttagctacaacaggttcctacccagggataccactcctatcctgaagcctgaaccatcaactcagtaa

SEQ ID NO: 342353 - DNA, 201 bp, Homo sapiens
ttattctaagcgttttatagttttatgtttacacataggtttatgatccatttaaggtttgtgcaacttgtgagatagatgttgagatttatttttctacwtatggatatctagttgttttaacatttgtttaaaagactgtccttctccattgaatttcctttatccacttgtaaaatataattgactgtatttgtatgg

SEQ ID NO: 342354 - DNA, 201 bp, Homo sapiens
gaaaaacaatctgataataattcactatttgaagttaaatttccacatttcctacagacaacacacacacacacacacacacacacacacacacacacacacacaccccctcaccctaagagaagctcttgtacctgcaccttaggaggctattgttagcagaatcattcagaatagcaacaaactatgataaatatacac

SEQ ID NO: 342355 - DNA, 201 bp, Homo sapiens
ctactttcttgtaagacatcgggcatagacaactgttacacattacaagttgagtgtcccttatccaaaatgcttgggaccagaagggtttcagatttcarttttttggattttagaatatttgcatatatgtgttgatgaagtgtcaaattctgtaaaatatttgaagagattcatttggagccaaatatgagtgaccag

SEQ ID NO: 342356 - DNA, 201 bp, Homo sapiens
tcagtgatatggtttggctgtgtccccacccaaatttcatcttgaattcccacgtgttgtgggagggacccagtgggaggtaattgaatcatgggggcagrtctttccatgctgttctcatgatagtgaataagtcttatgagatctgatggctctataagggagagtttccctgagcaagctctctttttgcttgctgcc

SEQ ID NO: 342357 - DNA, 201 bp, Homo sapiens
taataccagtttttatgaatgtttcatgagttcttaaagagaagatgcattctctttaccgaagtatagatacatacatacatatatacatatatactattacatacatacatatgtatacatgtatatgtgtgtgtgtgtatatataaggtctattttattcattatgcttttagggcttccataagcttatttattttg

SEQ ID NO: 342358 - DNA, 201 bp, Homo sapiens
tttgttttccattatcagtctcattctctaccccaacaccaattggagtgttcttttaaataataaagtgctgtcactcctagagatctttcttcgttagrtctggcacattggttgggaatatatagcatatgattctgaggccctctgatatctgtccactgaagaaagagaaagatgagacattctagttctgagaga

SEQ ID NO: 342359 - DNA, 201 bp, Homo sapiens
ttcttaatccagtctatcattgttggacatttgggttggttccaagtctttgctattgtgaatagtgccgcaataaacatacatgtgcatgtgtctttatrgcagcatgatttatagtcctttgggtatatacccagtaatgggatggctgggtcaaatggtatttctagttctagatccctgaggaatcgtcacactgac

SEQ ID NO: 342360 - DNA, 201 bp, Homo sapiens
ctaataccagtttttatgaatgtttcatgagttcttaaagagaagatgcattctctttaccgaagtatagatacatacatacatatatacatatatactattacatacatacatatgtatacatgtatatgtgtgtgtgtgtatatataaggtctattttattcattatgcttttagggcttccataagcttatttatttt

SEQ ID NO: 342361 - DNA, 201 bp, Homo sapiens
ttaaataataaagtgctgtcactcctagagatctttcttcgttagatctggcacattggttgggaatatatagcatatgattctgaggccctctgatatcygtccactgaagaaagagaaagatgagacattctagttctgagagaggaggtcataactaggtggctgtttaataaggatacaatgcttataaaattattt

SEQ ID NO: 342362 - DNA, 201 bp, Homo sapiens
gtccatgtgttctcattgttcaattcccacctatgagtgagaacatggcggtgtttggttttttgtccttgtgatagtttactgagaatgatgatttccartttcatccatgtccctacaaaggacatgaactcatcattttttaaggctgcatagtattccatggtgtatatgtgccacattttcttaatccagtctatc

SEQ ID NO: 342363 - DNA, 201 bp, Homo sapiens
gcctaataccagtttttatgaatgtttcatgagttcttaaagagaagatgcattctctttaccgaagtatagatacatacatacatatatacatatatactattacatacatacatatgtatacatgtatatgtgtgtgtgtgtatatataaggtctattttattcattatgcttttagggcttccataagcttatttatt

SEQ ID NO: 342364 - DNA, 201 bp, Homo sapiens
tattctttgaattagaaatttgttagaggaatctgtcatctcttccttctttctttcctccatgcacatttattagatgctgtgtctgtgtctgaattgcyttgtaacaaatcttctcaaaatttagtggcttaaggaaatattgacttactgtttctctttattctgtgggttgacagtcggggcactttttctgctggt

SEQ ID NO: 342365 - DNA, 201 bp, Homo sapiens
tcgcttgaacctgagaggtggaggttgcagtgagccaggatcgccctactgcactccagcctgggcgatagagcgagactccatctcaaaaaaaaaaaaaacaaaaaagttgggggtgcgcgtgggggctgggcgtggtggctcacgcctgtaatcccagcactttgaggagcacgtggtgggcaaatcacaaggtcagga

SEQ ID NO: 342366 - DNA, 201 bp, Homo sapiens
tggcctaataccagtttttatgaatgtttcatgagttcttaaagagaagatgcattctctttaccgaagtatagatacatacatacatatatacatatatactattacatacatacatatgtatacatgtatatgtgtgtgtgtgtatatataaggtctattttattcattatgcttttagggcttccataagcttattta

SEQ ID NO: 342367 - DNA, 201 bp, Homo sapiens
atttcctggtgagaagtagcaaggtcacattgcaaaggagtctggacatgggaaggagttactcatttgtggcctttataataatcttccacaaatgcctrtaatttgggcactgtgcttagtactggtgatagaagataagtagcttatttcagtatcttaattttgttttatatatttgataattttatgatgcaggtt

SEQ ID NO: 342368 - DNA, 201 bp, Homo sapiens
gtggcctaataccagtttttatgaatgtttcatgagttcttaaagagaagatgcattctctttaccgaagtatagatacatacatacatatatacatatatactattacatacatacatatgtatacatgtatatgtgtgtgtgtgtatatataaggtctattttattcattatgcttttagggcttccataagcttattt

SEQ ID NO: 342369 - DNA, 201 bp, Homo sapiens
tggaaaatcttaaatattcttgagtgtgttggcatatagatatttgcataatctacataaagattatctgtaaagtgagatgtaaagagaaagtgtgggtrtgtgtacagtttgtaaatgattacatatttaagtcattaatttcataaatatttggatgcctctgtgccaggcattggttcatgtagcagtgaataagag

SEQ ID NO: 342370 - DNA, 201 bp, Homo sapiens
ggggtatttccccagaagacagaaattgacaagaggaatttaaaatgcttgtatttgaatgctggatgctatctggtttcttgtcaaaaaaaaaaaaaaaattcttcaaaatttttttgctcagaattttgaacaggacagaattaggaagtccttgctttatcaatggtcactcacccaaaattacagttgtgggccaaa

SEQ ID NO: 342371 - DNA, 201 bp, Homo sapiens
tgtggcctaataccagtttttatgaatgtttcatgagttcttaaagagaagatgcattctctttaccgaagtatagatacatacatacatatatacatatatactattacatacatacatatgtatacatgtatatgtgtgtgtgtgtatatataaggtctattttattcattatgcttttagggcttccataagcttatt

SEQ ID NO: 342372 - DNA, 201 bp, Homo sapiens
ctttgtagaaagaataaaataaaggtactaaaattctgatcataaacatttcagaccactctgttttagtgaactgtagccccttattgcaagaacagatrttaatttgtggcatttggtatattttaatcattgagaaacaaagaaaacttttatcaggtatttcacggcactaactttttttgtctcctttgccactac

SEQ ID NO: 342373 - DNA, 201 bp, Homo sapiens
ttagatcccattagtcaattttggcttttgttggaattgctttttggtattttagtcatgaagtctttgcccatgcctgtgtcctgaatgatattgcctargttttcttctaggatttttatggttttaggttttacatgtaagtctttaatctatcttgagttagtttttgtataaggtgtaaggaaggggtccagtttc

SEQ ID NO: 342374 - DNA, 201 bp, Homo sapiens
ttgtggcctaataccagtttttatgaatgtttcatgagttcttaaagagaagatgcattctctttaccgaagtatagatacatacatacatatatacatatatactattacatacatacatatgtatacatgtatatgtgtgtgtgtgtatatataaggtctattttattcattatgcttttagggcttccataagcttat

SEQ ID NO: 342375 - DNA, 201 bp, Homo sapiens
tttctttgtggcctaataccagtttttatgaatgtttcatgagttcttaaagagaagatgcattctctttaccgaagtatagatacatacatacatatatacatatatactattacatacatacatatgtatacatgtatatgtgtgtgtgtgtatatataaggtctattttattcattatgcttttagggcttccataag

SEQ ID NO: 342376 - DNA, 201 bp, Homo sapiens
ttttctttgtggcctaataccagtttttatgaatgtttcatgagttcttaaagagaagatgcattctctttaccgaagtatagatacatacatacatatatacatatatactattacatacatacatatgtatacatgtatatgtgtgtgtgtgtatatataaggtctattttattcattatgcttttagggcttccataa

SEQ ID NO: 342377 - DNA, 201 bp, Homo sapiens
ttgttttctttgtggcctaataccagtttttatgaatgtttcatgagttcttaaagagaagatgcattctctttaccgaagtatagatacatacatacatatatacatatatactattacatacatacatatgtatacatgtatatgtgtgtgtgtgtatatataaggtctattttattcattatgcttttagggcttcca

SEQ ID NO: 342378 - DNA, 201 bp, Homo sapiens
cactggttaaatcctttagtggctccctataacctctctcaaaaattcagaacatagcaaacaaagcttttcacaatctgatttcttactgcctttttackgtccttcagccctctctaatttgtgtcctcttgcctgaaacactaaactacttactatttagaataattttctgttccctggatgcttttatgcatgggc

SEQ ID NO: 342379 - DNA, 201 bp, Homo sapiens
catatgcagaacatgcgggtttgttacgtaggtacacttgtgccatggtggtttgctgcccctatcaacccattatctaggttttgagccctgcatacttwaggtatttgtcctaatgctctctctccccttgccccctaccccctggcaggccacatgtgtccatgtgttctcattgttcatctcccacttatgagtgag

SEQ ID NO: 342380 - DNA, 201 bp, Homo sapiens
gagagaagaataagacagttgagagtatattcagaagaataactatataggggtgaatacatcaaggaatgagggacagtgaaatagtggtaaaatcagtwgattggaggttccaaggggtcaaaggatattgatatctgagtactcagtggagtgagccaaaaatcaagaggtggtcagagagtggcaccatgaaattga

SEQ ID NO: 342381 - DNA, 201 bp, Homo sapiens
aaggtaaaacgaatggaatttcatttcattgtgagttctaatttttttttttttttttagacacagtcttactctgtcacccaggctggagtgcagtggcrcgatctcagtccactgcaacctccacctcccaggctcaagccactctcctgcctcccaagtagctgggactgcaggcgcacaccaccacacctggctaat

SEQ ID NO: 342382 - DNA, 201 bp, Homo sapiens
tttaattttactttaagttctgggatacatatgcagaacatgcgggtttgttacgtaggtacacttgtgccatggtggtttgctgcccctatcaacccatyatctaggttttgagccctgcatacttaaggtatttgtcctaatgctctctctccccttgccccctaccccctggcaggccacatgtgtccatgtgttctc

SEQ ID NO: 342383 - DNA, 201 bp, Homo sapiens
taaacgtagacattcttattagtcaggaaattccaagggtagaggatatttcctgggagatagggtgaagggccagggtaggggatatttcctgggagatmgggtgaagggccatacttttctttgagcaagaatcatcctttatagcataggcctgatatgaaacagctaattagaaacacagctgagatttgaacccag

SEQ ID NO: 342384 - DNA, 201 bp, Homo sapiens
tgtttttccagtctttctgtgaatatttttatagcatcaaataaatgcatacacaacatattgttttgcacagtagaaccatagtgtgtagctgttttttycacatcttgtggatagtccatcatttattgaaacagtcccatagaacaggactttaaattctttccctactttttcatttaattttttttttgtgtacca

SEQ ID NO: 342385 - DNA, 201 bp, Homo sapiens
cataataagaagaatacagatcagaattaaactgagaaagaaagatttcaaaaagttggcagggcattctgtaagcaagtctgtatttttttttttttttttttttttttgcgtaagagaccaggggaaatgagaatatatatttacctattctagtttttgcatgaagaaatactagaggatggagaagaaactttggga

SEQ ID NO: 342386 - DNA, 201 bp, Homo sapiens
ttttgatatcagttttatttattgatatattcattacaaatataattgtgaaagaatttgtttgattgccagaggtatgctatagatcctaaataatactrtattatgaattagatgaacactgttcatcttaggctcagtttattctctcagtgcataatatatgaaatttatgtctcaaaccatcaaacacttacaaaa

SEQ ID NO: 342387 - DNA, 201 bp, Homo sapiens
actttttttcatgtttattggccttggaatttcttcttgagtaaattgcttattcctaacttgtgctcatttgttcttgctgtgtttatctttttttactrattataacagctctttataaaaaattctgaaacctttgccacatattgaattacttactgtcgaagtttattttcatattaatcttaaagatggaagttt

SEQ ID NO: 342388 - DNA, 201 bp, Homo sapiens
tcataataagaagaatacagatcagaattaaactgagaaagaaagatttcaaaaagttggcagggcattctgtaagcaagtctgtatttttttttttttttttttttttttgcgtaagagaccaggggaaatgagaatatatatttacctattctagtttttgcatgaagaaatactagaggatggagaagaaactttggg

SEQ ID NO: 342389 - DNA, 201 bp, Homo sapiens
tgttgttttctttgtggcctaataccagtttttatgaatgtttcatgagttcttaaagagaagatgcattctctttaccgaagtatagatacatacatacatatatacatatatactattacatacatacatatgtatacatgtatatgtgtgtgtgtgtatatataaggtctattttattcattatgcttttagggcttc

SEQ ID NO: 342390 - DNA, 201 bp, Homo sapiens
ataactcaaatgttcatcaactaatgaacatataaacaaaatgtggtctagccatccaatggaatattattcagctatatttccagaacaggcaaatctayagagacagaaagtagatgagttgttgcagggattgcagggagaagggaatggggagtgactgcttttgggtagtgatatatcaaagtatttcattttctt

SEQ ID NO: 342391 - DNA, 201 bp, Homo sapiens
agctttggggttatttacagtttgggggctactgcaggcaaagttctggtgactaaatgtaacccgtctttttttttttttacacagatatatgacttcckgtgtgagacacatttctaaaatgaagttattaggccaaagaatgcagacatttaaaatttttgatgtaaattttaaattgctaaatttacttttaataat

SEQ ID NO: 342392 - DNA, 201 bp, Homo sapiens
ggcatgtaggaggtgctcactcattatttggtaagaaatgcataaataaatggatcttgattctagatattttgttgttgaaattgcaatgggtctttgttcaaatttaaaacttgaatgatttttttttcatttatttaaagaataaggagttattcactggttgggttgatccatttaggaaataaacatacaggatgc

SEQ ID NO: 342393 - DNA, 201 bp, Homo sapiens
tgagccaccgcacccggcctaccctttaatttttcaaatgggacaaagtcttgtcctcataaccatgggaagaacctgtgggcagaggcatcactgtgacrcttgcatcatcaaaggtgcccagtgacgtcagcaccaacggaagactccagcgctaggagagcagtagatggcagctggtttgtgacacgacacagacca

SEQ ID NO: 342394 - DNA, 201 bp, Homo sapiens
cagcactcaggggcagcctcatcctttgtaaagtgtatgtggtttcaactttgtgttgtgttcctatgtagctttggggttatttacagtttgggggctaytgcaggcaaagttctggtgactaaatgtaacccgtctttttttttttttacacagatatatgacttcctgtgtgagacacatttctaaaatgaagttatt

SEQ ID NO: 342395 - DNA, 201 bp, Homo sapiens
gacgtttccagaattggagttttattttcgaggctcttataaacaaaccagggtctgttgatcaagaaccaggcgatgattgtggtcatgaagaagcagaygctctctacctggcttagctttcctggtttatgcagtgcgagaaagtctcttcggaaccagcttgaatatgccactgatgacgctgcttgactttggtgg

SEQ ID NO: 342396 - DNA, 201 bp, Homo sapiens
attggaggagcaaaaagaaggaagaaaggaaggaagacaggttggctggatgttggaaggatagaaggaaggaagaagggagaagagacaaatctcccatwtgcagaagaattccaaatcatgtctgtagattctccactaccaacgacacagaacctgacgccccagtcctgaagtttgggttgcgcgcagcgctttctt

SEQ ID NO: 342397 - DNA, 201 bp, Homo sapiens
tgaagtcatttctttcacttaaaaatatcccagggttactatcctaggcaacgcagggagaccctgtctctacaaataatttaaaagttagccgggtgtgrtggcacacccctgtggtcccagctacctgggaggctgaggtgggaggattgcttgagctcaggaggttgaggctgcagtgaattgtgatgatgccactgc

SEQ ID NO: 342398 - DNA, 201 bp, Homo sapiens
actctcgttaacaatacagcatcagtgttgcttcatgaattggaacaaaagtaccctactaaagctagatgttaataataggaaaaactgggttggtgcargggattccgcatactagctttagaacgtttttgtaaagctgaatcttctctaaaaataaagttgattgaaacaaaaaaggggaaataaagtaaaaataaa

SEQ ID NO: 342399 - DNA, 201 bp, Homo sapiens
gcctggccaacatggtgaaataccatctctactgaaaatacaaaaaaaaaaaaaaaaaaattacctgggcgtggtggcaggtgcctgtagtcccagctacytgggaggctgaggcaggagaattgcttggacccaggaggtggaggttgcagtgagccgagatcacgccactgcactccagcctgggcatcagagggagac

SEQ ID NO: 342400 - DNA, 201 bp, Homo sapiens
attgcatagggcgttgcaaggatgaatccagtgggataatgcactcaaacacggagctgggcgcgcactaggtgctctctaagcattaggcattactgctyggcacctgctgccggcgcctcagtaaagcactccctgtttaacttggttcttgttccacagaaaacgccctgatgttataacgaaaacagactggctcgc

SEQ ID NO: 342401 - DNA, 201 bp, Homo sapiens
gtagatgttctttgtcaagttgaggggattcccctctattactttttttctgggagcttttatcatgaatggacattgaactttgtagggtgctttttccragttgagcatgtgattgatcttctctagctttcaatatggtggtttacattcattgattttcagatgttgaatagcctatcttaaatcctgctgttgttt

SEQ ID NO: 342402 - DNA, 201 bp, Homo sapiens
ggcaacttactcaaccgtgtgtgcctctgcttccccacgtggagatcaggggtggtggcactcattgcatagggcgttgcaaggatgaatccagtgggatratgcactcaaacacggagctgggcgcgcactaggtgctctctaagcattaggcattactgcttggcacctgctgccggcgcctcagtaaagcactccctg

SEQ ID NO: 342403 - DNA, 201 bp, Homo sapiens
aaaaaagaaaaaaaagaaatcagctatcaagctgttagaagacatggaggaaccctaaatgcatattgctgagtgcaaaaagcccatctgaaaaggctgcrtgctgtataattctcatgtgacattctggaaaaggcaaaactatattggcaggaaaaagatcagtggttgccatggggtggaggtgagggaggggatgaa

SEQ ID NO: 342404 - DNA, 201 bp, Homo sapiens
tttgggaggccgaggtgggcagatcacctgaagtcaggagtttgagaccagcctggccccgtgtctactaaaatacaaaaataaaaaatattaaaaaaacrttagccaggcgtggcagtgggcacctgtaatctgggctactcaggaggctgaagcaggagaattgcttaaacccgggaggtggaggttgcagtgagttga

SEQ ID NO: 342405 - DNA, 201 bp, Homo sapiens
tgatatatcaaagtatttcattttctttggagaaactgtaaatagcatgtgttttaaatattactttctgcatgttcattgttcatagtaatgagattaayttttaatgtgctgatcttgtatcctgaaactttgctgagttcacttgttagttctaggagatattggttttttttttagattccttaggattttctatgt

SEQ ID NO: 342406 - DNA, 201 bp, Homo sapiens
ttaaaacttgaatgatttttttttcatttatttaaagaataaggagttattcactggttgggttgatccatttaggaaataaacatacaggatgctcagtwacatttgaatttcagggaaacagtgaatcttttttagcagaagtatgtcctatgcaatagttacactaaaaatttattcattgcttatcttaaactgaag

SEQ ID NO: 342407 - DNA, 201 bp, Homo sapiens
tatttgtaatagccagaaagtgtaaataactcaaatgttcatcaactaatgaacatataaacaaaatgtggtctagccatccaatggaatattattcagcyatatttccagaacaggcaaatctatagagacagaaagtagatgagttgttgcagggattgcagggagaagggaatggggagtgactgcttttgggtagtg

SEQ ID NO: 342408 - DNA, 201 bp, Homo sapiens
agactagctcatacccttccccacccagctgagatatctcttctctgggaggcttcccctgactctgatttgggttgatgcatgttgacgaaacaccaaayggggcctgcctatcacaggctcaataaacattgaacaggctccttgcaatcacttgattttctctttgtatccaggaatcaccaagtagaagaacttcgg

SEQ ID NO: 342409 - DNA, 201 bp, Homo sapiens
ggacagggacccatacgctaatccatggcacggattctaccatctaccccggaaccacagccaggggcctggcatgtaggaggtgctcactcattatttgrtaagaaatgcataaataaatggatcttgattctagatattttgttgttgaaattgcaatgggtctttgttcaaatttaaaacttgaatgatttttttttc

SEQ ID NO: 342410 - DNA, 201 bp, Homo sapiens
taaaatgaaagatctcaagtcaataacgtcctaatttttgaatttttttgtagagatgaggtcttgctgtgctgaccaggctggtcttaaactttatacastaaggaaaatttatacattaagaaaatcagaaaagaagaacaaaataaaactaaagcaagcacaggaaaaaaagaagagcaaatcaattaaatagaaaat

SEQ ID NO: 342411 - DNA, 201 bp, Homo sapiens
tttcagatgctctgtttgaggataatgatggagtaatcttcagcagaaaggggacagggacccatacgctaatccatggcacggattctaccatctacccyggaaccacagccaggggcctggcatgtaggaggtgctcactcattatttggtaagaaatgcataaataaatggatcttgattctagatattttgttgttg

SEQ ID NO: 342412 - DNA, 201 bp, Homo sapiens
attgtagggagaaagcattcagtctttcactatgaagtgtgtgcgctgtaggatatttgtagatgttctttgtcaagttgaggggattcccctctattacyttttttctgggagcttttatcatgaatggacattgaactttgtagggtgctttttccgagttgagcatgtgattgatcttctctagctttcaatatggtg

SEQ ID NO: 342413 - DNA, 201 bp, Homo sapiens
cagggagccttcctccctcacctcatctcagggccacccaccctggcggcccgtgctcacacagcacggtcatgctcctcaaaccttgctctagcccccamtcccacccccatagcacttgcctctaacaaatcaggtaatgacaatgcttgctgcaatgtaacctgcactagggctggatgatgtgtctgtcttgttcta

SEQ ID NO: 342414 - DNA, 201 bp, Homo sapiens
gaccaggctggtcttaaactttatacactaaggaaaatttatacattaagaaaatcagaaaagaagaacaaaataaaactaaagcaagcacaggaaaaaamgaagagcaaatcaattaaatagaaaatagaagaataatagagaaaatgaacaaaaccaaaattggttttttgaaaagataaacaaatttgccaaaagtgt

SEQ ID NO: 342415 - DNA, 201 bp, Homo sapiens
attgttcatagtaatgagattaatttttaatgtgctgatcttgtatcctgaaactttgctgagttcacttgttagttctaggagatattggttttttttttagattccttaggattttctatgtagacaattatgtaatctgcaaatagggacggtgttgtttttttccttcccaatctgctggcttttatttcattttct

SEQ ID NO: 342416 - DNA, 201 bp, Homo sapiens
gagccacagtgcccagctgggtatgagtggagtttgaaagtaaaggcaatagaaactgtacatgagcactgtacatgtatttgggtcaataaaggttttttcccacaggaatatgagttaacaattctgctgctgctatacatgtatatttgaatcaattaaataaatggatgaggcatgggggagcaagtttcttgctgt

SEQ ID NO: 342417 - DNA, 201 bp, Homo sapiens
ccaggagggatggaagggattttttttacaaattctatattgaagggagtatgtcacttaaatgggacatgggagctaactgggagagctcccgatggccmaagctgaagccttttgagcaagaaaagaaagtaacattgaattataacccaaagtatgaaacgaacttccacaagttcatactgatgtaaatgaatgatt

SEQ ID NO: 342418 - DNA, 201 bp, Homo sapiens
agcaccattctccaggaaagcaacagatcttggtttctggcaccattctccaggaaagcgaccaaggcttcttggagaagtggatggttctagattcggamaggagatttacaagatgagcccagagcatctcatagtgccaggagggatggaagggattttttttacaaattctatattgaagggagtatgtcacttaaa

SEQ ID NO: 342419 - DNA, 201 bp, Homo sapiens
aaactgctgagttttgtccaaagatatcaatactactctctaaataaatcagaagttactttctctttgtgggacaaaggaaaatatacatattttaattmtttcattgttaaacattcaacaattatttacagagtgccttctaggtgccaggctgtattctaggtgctggggatgcagtgataatgaaagtgcctgtcc

SEQ ID NO: 342420 - DNA, 201 bp, Homo sapiens
ttgcaaggatgaatccagtgggataatgcactcaaacacggagctgggcgcgcactaggtgctctctaagcattaggcattactgcttggcacctgctgcsggcgcctcagtaaagcactccctgtttaacttggttcttgttccacagaaaacgccctgatgttataacgaaaacagactggctcgctcccgtcctatgg

SEQ ID NO: 342421 - DNA, 201 bp, Homo sapiens
ggggagcaagtttcttgctgttggagggaacttcatagttaagcaagagagggggccacagtgatccacgtgggaatggattgaagctggagacctcagcrtgaactcacgtttaccttactatgaacagagacatttacgtgtcaacgtgtttaaagatatgtggaaatacgcacaggttagtgtctatttccttgctct

SEQ ID NO: 342422 - DNA, 201 bp, Homo sapiens
gctgtagtcagagcttggaaaaggcagctcctgggctcaaaggcagtggctgggggaggaacgcacaaacccaggagccaggtgggctggatgtggcatcyccacgtgttaactgcagtgtcaggcaacttactcaaccgtgtgtgcctctgcttccccacgtggagatcaggggtggtggcactcattgcatagggcgtt

SEQ ID NO: 342423 - DNA, 201 bp, Homo sapiens
agacagtgtagcagttccttagaaagctagatagagccttatcatgccacagagcaactgtgctcctaggcatgtagccaactgattaaaacacttatgtycacacaaaccctgcacaagatgtttatagaaactctattcataaatgcctcaaaccactaacatactagatgcccttcagcaggtggatgataaacaagc

SEQ ID NO: 342424 - DNA, 201 bp, Homo sapiens
ctaaaataacttaggaatgagtggagttttttttgttttgttttgttttgagacagagtctcactctgtcaccctgactggagtgcagtagagcgatctcmactcaccacaacttctgcctccttggttcaagcgattctcctgcctcagcctccctagtagctgggactacaggcacatgccaccaggcatggctaattt

SEQ ID NO: 342425 - DNA, 201 bp, Homo sapiens
tatacagatgggaaataagcgaacgccaagatgctcagtctcatttgtcatcaggaaattgcaatgaaaacaaggagataccactacacacccattagaayggctaacacccaaaaatctaaaatctgaaaaccagcttctggtgaggaagtggaaggacaggaactctcattcattgctggtgggaatgcaaaatgttac

SEQ ID NO: 342426 - DNA, 201 bp, Homo sapiens
aaaaactcaaattctagctttctccataccactcctcatggtcttcttcataagcaatgcagtgtttccagaggctatttgaacagcagtagtatcatgasagataatagtttttaaaaatgaaagctttgcacaacatgtatctggtaagggacttgtacccaaaatatgcaaagagctcttaaaattcaacaataagga

SEQ ID NO: 342427 - DNA, 201 bp, Homo sapiens
ctttatcagcagcgtgaaaacagactaatacacctgctaatattttcccgtctagaaaaactcaaattctagctttctccataccactcctcatggtcttmttcataagcaatgcagtgtttccagaggctatttgaacagcagtagtatcatgacagataatagtttttaaaaatgaaagctttgcacaacatgtatctg

SEQ ID NO: 342428 - DNA, 201 bp, Homo sapiens
tgtggaacatctttggccatctctttgcatcactctaacccaaggtaaaggacttttaaagagggatctaggaaagtttggatgattgtggtaaaatcagrgtttgggtcatcctctaaccttgacctcagaaagatattgacagacaggcagctcatcaacatacagctagtagcatgcccagggatgatgtcatggagg

SEQ ID NO: 342429 - DNA, 201 bp, Homo sapiens
tggtgtgatcttagttcactgcaacctctgcctcctgggtcaagtgattctcctgcctcagcctcccgtgtagctgggattacaggtgcctgccagcacayctggctaatttttgtatttttagtagagacagggtttcatcatgttggccaggctggtcttgaactcctgaccacaggtgatccacctgcctcggcctcc

SEQ ID NO: 342430 - DNA, 201 bp, Homo sapiens
agagacagggtcttgctatgttgcccagactggtctcaagctatcatttggcccccagctttccacagcgatgggattacaggcatgagctgccatgcccrgcccttcaaggagttttgatttacatatgtatttacatatgtgatatgaacccttcatcacatttgctgcaaatgttaatttcagattgttctttccatt

SEQ ID NO: 342431 - DNA, 201 bp, Homo sapiens
ttttttttgtagagacagggtcttgctatgttgcccagactggtctcaagctatcatttggcccccagctttccacagcgatgggattacaggcatgagcygccatgcccggcccttcaaggagttttgatttacatatgtatttacatatgtgatatgaacccttcatcacatttgctgcaaatgttaatttcagattgt

SEQ ID NO: 342432 - DNA, 201 bp, Homo sapiens
taacagttcactcctaaataatcaaaaaagaatcacaagggaaattaaaaaattttaaggtgattgaaaataaaaacactacatgccaaacttatgggatkcagcaaaaacagtgcttactgagaaatttatagctataaatgcctacattaaaatgaaagatctcaagtcaataacgtcctaatttttgaatttttttgt

SEQ ID NO: 342433 - DNA, 201 bp, Homo sapiens
cattctccaggataagccatatgttgcacaataaaatctcagcaaattcaaatgattgaaatcatacaaagtatgttatttgatcatttttttctaaattmtaaaattaaaaatcaataacagaaagtaatttgggtaatttatagatgtgtggaaatttaacagttcactcctaaataatcaaaaaagaatcacaaggga

SEQ ID NO: 342434 - DNA, 201 bp, Homo sapiens; identical to SEQ ID NO: 72300

SEQ ID NO: 342435 - DNA, 201 bp, Homo sapiens; identical to SEQ ID NO: 72301

SEQ ID NO: 342436 - DNA, 201 bp, Homo sapiens; identical to SEQ ID NO: 72303

SEQ ID NO: 342437 - DNA, 201 bp, Homo sapiens; identical to SEQ ID NO: 72298

SEQ ID NO: 342438 - DNA, 201 bp, Homo sapiens
tttgggttgatgcatgttgacgaaacaccaaacggggcctgcctatcacaggctcaataaacattgaacaggctccttgcaatcacttgattttctctttktatccaggaatcaccaagtagaagaacttcggctctcagactggtttcatcctaggtaagaacaaaaatgcctgtttacatgcacacacaaacaatatac

SEQ ID NO: 342439 - DNA, 201 bp, Homo sapiens
atctctttcctagactagctcatacccttccccacccagctgagatatctcttctctgggaggcttcccctgactctgatttgggttgatgcatgttgacraaacaccaaacggggcctgcctatcacaggctcaataaacattgaacaggctccttgcaatcacttgattttctctttgtatccaggaatcaccaagtag

SEQ ID NO: 342440 - DNA, 201 bp, Homo sapiens
ctcttgccgctgccatggaagacatgccttttgcctcctgccatgattctgaggcctccccagccatgtggaactgtaagtccaattaaacctctttttcwtcccagtcttgggtatgtctttatcagcagcgtgaaaacagactaatacacctgctaatattttcccgtctagaaaaactcaaattctagctttctccat

SEQ ID NO: 342441 - DNA, 201 bp, Homo sapiens
ttgggttgatgcatgttgacgaaacaccaaacggggcctgcctatcacaggctcaataaacattgaacaggctccttgcaatcacttgattttctctttgkatccaggaatcaccaagtagaagaacttcggctctcagactggtttcatcctaggtaagaacaaaaatgcctgtttacatgcacacacaaacaatatact

SEQ ID NO: 342442 - DNA, 201 bp, Homo sapiens
atccccacgtgttaactgcagtgtcaggcaacttactcaaccgtgtgtgcctctgcttccccacgtggagatcaggggtggtggcactcattgcatagggygttgcaaggatgaatccagtgggataatgcactcaaacacggagctgggcgcgcactaggtgctctctaagcattaggcattactgcttggcacctgctg

SEQ ID NO: 342443 - DNA, 201 bp, Homo sapiens
cgaggtgggtgggatcacctgaggtcaggagttcgagaccagcctggccaacatggtgaaataccatctctactgaaaatacaaaaaaaaaaaaaaaaaaattacctgggcgtggtggcaggtgcctgtagtcccagctacttgggaggctgaggcaggagaattgcttggacccaggaggtggaggttgcagtgagccga

SEQ ID NO: 342444 - DNA, 201 bp, Homo sapiens
ctgcactccagcctgggcatcagagggagactccatctcaaaaaaaaaaaaaaaaaaaaaagaaagaaaagaaaaaagagaaaagtaagtttcttccccastgtgtgtttcctaggtttgcagaggagtacctgaggccgttcctacactccgcaaataagcacttcatgacaggctaccgagtgatcttctacatcatgg

SEQ ID NO: 342445 - DNA, 201 bp, Homo sapiens
ccgaggtgggtgggatcacctgaggtcaggagttcgagaccagcctggccaacatggtgaaataccatctctactgaaaatacaaaaaaaaaaaaaaaaaaattacctgggcgtggtggcaggtgcctgtagtcccagctacttgggaggctgaggcaggagaattgcttggacccaggaggtggaggttgcagtgagccg

SEQ ID NO: 342446 - DNA, 201 bp, Homo sapiens
ggagttattcatgacatcaaaaatggactcaatagcacttatgaaaagcaccttaacaaatatttttacctcaataaacccacctagctgttatcaccagmatacagctgggatcttgcattttctcctcctccacagatccaatacgtcaaggtcgcacatgattcccagaggaaattatgaattacgccatgaggttta

SEQ ID NO: 342447 - DNA, 201 bp, Homo sapiens
gtgagtgcattcagccgcctcttctcctgatcatgtttagaaaagtaagtgtcggccgggcacagtggcttatgcctgtaatcccagcactttaggacgcygaggtgggtgggatcacctgaggtcaggagttcgagaccagcctggccaacatggtgaaataccatctctactgaaaatacaaaaaaaaaaaaaaaaaaa

SEQ ID NO: 342448 - DNA, 201 bp, Homo sapiens
gaatatcactgtgggcctggccgtctttgctactggcaggtaggtgccactcacctttgcccttttttattttgggaaaatgtggatcagcattcacgagsctttaacctccaaagagccaaccataattaagcataattagtgataacaatagccacgatttctggggagaaacaaacttacctgtccaaacccaaataa

SEQ ID NO: 342449 - DNA, 201 bp, Homo sapiens
acctgctgccggcgcctcagtaaagcactccctgtttaacttggttcttgttccacagaaaacgccctgatgttataacgaaaacagactggctcgctccygtcctatgggaagggactttcgacaggcgggtcctggaaaaacattacagaaggcggaatatcactgtgggcctggccgtctttgctactggcaggtagg

SEQ ID NO: 342450 - DNA, 201 bp, Homo sapiens
gagcaaaagaactgaatagaatctcacaagagaagatatacagatgggaaataagcgaacgccaagatgctcagtctcatttgtcatcaggaaattgcaaygaaaacaaggagataccactacacacccattagaacggctaacacccaaaaatctaaaatctgaaaaccagcttctggtgaggaagtggaaggacaggaa

SEQ ID NO: 342451 - DNA, 201 bp, Homo sapiens
attgattaaggcccacctgtgtgactttgttttaccttaagtacttttttttttgagatggagttttgctcttgttgcccaggctggggtgcaatggtgcratctccgttcactgcaacctccgcctgccgggttcatgtgattcttctgcctcagcctcctgactagctgggattacaggtacacgccaccacgcctggc

SEQ ID NO: 342452 - DNA, 201 bp, Homo sapiens
tagtaggctgtgccttgtaggagaaagagaaatgaagaccctttctcactaacatgaacccttccttcccacactcccagataaaggttaaacacatgttraaagaaccttggcttaaaggggagacagattattagactgtcctgccatttatatttcctgaataggacctgcctcttcaggggccagaggtaatgaagg

SEQ ID NO: 342453 - DNA, 201 bp, Homo sapiens
agaaagagaaatgaagaccctttctcactaacatgaacccttccttcccacactcccagataaaggttaaacacatgttaaaagaaccttggcttaaaggsgagacagattattagactgtcctgccatttatatttcctgaataggacctgcctcttcaggggccagaggtaatgaagggtgctcttttctctgtctatt

SEQ ID NO: 342454 - DNA, 201 bp, Homo sapiens
gccaccgcgcctggcccagagtcggattttaaggctgtttggttaaaaaagaggaagaaaaccagatgattggacatggatcataagacaaaggaaagctkctcctttgagccatgtttcaggtttggataactgagtggtatcattctcttataatagtggatagaaaagaaataagtaagaagcaaggaaaaaagtata

SEQ ID NO: 342455 - DNA, 201 bp, Homo sapiens
tggggtttctccgtgttggtcaggctggtctcgaactcccgacctccggtgatccacccacctcagccccccaaagtgctgggattacaggcgtgagccaycgcgcctggcccagagtcggattttaaggctgtttggttaaaaaagaggaagaaaaccagatgattggacatggatcataagacaaaggaaagcttctcc

SEQ ID NO: 342456 - DNA, 201 bp, Homo sapiens
agggttggggagatgttggtcaaaggatacaaaatttcagttagacccaccatgcccggcatgaataaacattttagtaattaatgtttactaaaattaayaccttcttacattcaattagtggacactaaataattccagcacttcttattctttcctgcctgccctgtaccctctatgggtgagagctcttcctcctcc

SEQ ID NO: 342457 - DNA, 201 bp, Homo sapiens
attggaggactttatgttaagtgaaataagccaggcacagaaaggcaaataccacattatttcacttcagtgtggaatctaacaaagttgaactcatagawttagagagtagaatgatagttatcaggggccgggaggctgaagggttggggagatgttggtcaaaggatacaaaatttcagttagacccaccatgcccgg

SEQ ID NO: 342458 - DNA, 201 bp, Homo sapiens
aaaaaaagtatttaaaaaaaaaaaaaacgcacctgaaaatggggcggagcagcggcgccctccggtggttttcaggagttctgagactgccttgaaatgcstggctgtttccatctgaaagaggtgcatggacttctatctattgggttctttgtgtttgatgctttttcttagaattcactccatgtgagatgagaaacg

SEQ ID NO: 342459 - DNA, 201 bp, Homo sapiens
actgtgttctaggagcttcaggatggttcgtactaagacatggaccctgaagaagcactttgttggctatcctactaatagtgactttgagttgaagacakctgagctcccacccttaaaaaatggaggtaagtcatactaaaaatatttcagagttggaagggactgtatcagttagcttttgctgcataacaaactacc

SEQ ID NO: 342460 - DNA, 201 bp, Homo sapiens
tcaggttgtgaaaaatcaaaatcattaccaagaaggaaactccagatttacttggcaatcttattgttagggacttttttttccccctataattttctaaytggtgctaagctggaatcatgggaaattgtctgcctgccaactgagcaaagctgcaggaggccttttcttaaccacagtccgattaggaatagccaaata

SEQ ID NO: 342461 - DNA, 201 bp, Homo sapiens
aacagaattgggctgtcaacgtgaatggaacagacaaaagtgtaggactttgacatggactgagattcaaatctcaaccctgctactgactagctatgtgrtcttgtctacgttgttttacctctcagactttcagtttcctgaggctccaaggaagatgatggtaatatttgcttctgaaactgcccctataaactttat

SEQ ID NO: 342462 - DNA, 201 bp, Homo sapiens
gtacatatgcaggcttgttatatgggtaaattgcatgtggctgaggtttggtgtacgaatgatcctgtcacccaggcagtgagcatggtacctcatgggtrgtttctcaacccttgtccctgtctcacccctcctgtctagtggtgctcagtgtctattgttcctctcaggccttgagtttctaattgcctatggaatgct

SEQ ID NO: 342463 - DNA, 201 bp, Homo sapiens
tgtgttaaatgctatctggaagtagttcatcttctaaaatatccaactgacttaaaacattgtcactttccttctgtttctcccagccagtatcagtgatragattcatgcacgctcgtcttttgcaggcaaaggtctaagtagcttagtgagggatcacctcagtccctttgtcccaaccatctcctatctgctctgcac

SEQ ID NO: 342464 - DNA, 201 bp, Homo sapiens
cccagcattttgggaggctgaagcaggaggatcacttgaggtcaggaatttgagaccagcctggccaacatgtcaaaacccaatctctactaaaaataaaraaattagccaggtgtggtgatgggcatctgtaatcctagctattcaggaggctgaggcatgagaattgcttgaacccaggaggcagaggttgcagtgagc

SEQ ID NO: 342465 - DNA, 201 bp, Homo sapiens
acatgtcaaaacccaatctctactaaaaataaaaaaattagccaggtgtggtgatgggcatctgtaatcctagctattcaggaggctgaggcatgagaatygcttgaacccaggaggcagaggttgcagtgagctgagatcacacctctgcagtccagcctgggcaacagagtgagacttggtctcaaaaaaaaaaatgta

SEQ ID NO: 342466 - DNA, 201 bp, Homo sapiens
cctgtggaagccggggtgagggagggagagcatcaggataaatagctaatgccttcgggggctaatacctaggtgatgggttgacaggtgaagcaaaccaycatggcacacgtttacctatgtaacaaacctgcacattccacacaattatcccggaactgaaaataaaataaaattaaattaaaaaaaaaagttagccgg

SEQ ID NO: 342467 - DNA, 201 bp, Homo sapiens
ggcagaggttgcagtgagctgagatcacacctctgcagtccagcctgggcaacagagtgagacttggtctcaaaaaaaaaaatgtatgaatgttcactccyacaaatagtattaacctgtttcccttatactgttcatcatcagtctcggcaacctgagataaatataatgatactttatgcttagtttagtttgcatttc

SEQ ID NO: 342468 - DNA, 201 bp, Homo sapiens
tttaagcaacaacggtttattagttcacaattctttgggttggcaatttgggctgagttaagctgggtggttcttcttaggtctcatctggggtaaatggwtaatttaggatgggccttgctcacatgtctgctgattagcaggctttctgttggggtgcatgccttagttctcatctatgtggcctttctagcaggctag

SEQ ID NO: 342469 - DNA, 201 bp, Homo sapiens
cccctatgccgatggctaagaattaagatggagaggggtggtggactatcagttgtggaatatcaacctcagtgcacttttgtcaacactaaccacacagyatcctgactcccttgaaagggaagacatgtcacatgccttaatgccttaatgtgctttatctttcagagttgtggaaagtaaaaatgtagccctaccaaa

SEQ ID NO: 342470 - DNA, 201 bp, Homo sapiens
cagtccagcctgggcaacagagtgagacttggtctcaaaaaaaaaaatgtatgaatgttcactcccacaaatagtattaacctgtttcccttatactgttyatcatcagtctcggcaacctgagataaatataatgatactttatgcttagtttagtttgcatttcttttattattagtgatgttgaccttctttttgtaa

SEQ ID NO: 342471 - DNA, 201 bp, Homo sapiens
ctttctatttttcataagtgttggctggctgagaaataaagagaaagagtacaaagagaggaattttacagctgggctgctgggggcgacaccacatatcrgtaggaccgtgatacccacctgagccacaaaaccagcaagtttttattaaggattttaaaaggggagggggtgtacgaacagggagtaggtcacaaagat

SEQ ID NO: 342472 - DNA, 201 bp, Homo sapiens
gagaagcccagaaacaaagaaccaaggaagtcaaatggatcggttgtgaaaccagctggtggaactatgaaccaaataaatgcagaagggacctgctgggkggtcagaagcaagctgaagctgagttgtaggatggtccggggactgatttcacctatgggatctgttggcccattatggtattccttttatatgtggctc

SEQ ID NO: 342473 - DNA, 201 bp, Homo sapiens
aaggttgcagtgagctgaaatcacaccactgcactccagcctgggcgacaagagcaagactccatcttaaaaaaaaaaagtatgcatatatatatatatakagagagagagagagagagagagtggaaaagtaaaatcagacaatgattaaggaatatccactggattttgtgctcaggaggttgttgtgaccttagtgga

SEQ ID NO: 342474 - DNA, 201 bp, Homo sapiens
agagtcagcttttttttttttttttgagatggagtttcgctcttgttgtccaggctggagtgcaatggtgcgatctcagctcaccgcaacctctgcctccygggttcaagctattctcctgcctcagcttcccgagtagctaggattacaggcatgtgccaccacgcctggctaattttgtatttttagtagagatggggt

SEQ ID NO: 342475 - DNA, 201 bp, Homo sapiens
ttgcgcttaaacctattcttttatattcaacctttctgtccattttatgtgtgtttctgtaaaatgcagctatttgcatttttcacccatctgaaagtctagtgttgtaatagttaaatttaagtcattcttattaattgtcataactggaatgtttggtcatatttatattatcttactttgttttccatttattggtta

SEQ ID NO: 342476 - DNA, 201 bp, Homo sapiens
cagcgggttagcacatgaatgggaagtgaagaagtttggctgaaaaaggaagacgaaggggcaaggagctaggggagggatgggattataagatggcagasttgagcatgcttatattttgagtgaaagggacagtagagaggaaaatctcaacgattctggaaagtggaaggctaagggaaagagagcgacacctgaaga

SEQ ID NO: 342477 - DNA, 201 bp, Homo sapiens
tgaaggttgcagtgagctgaaatcacaccactgcactccagcctgggcgacaagagcaagactccatcttaaaaaaaaaaagtatgcatatatatatatakagagagagagagagagagagagagtggaaaagtaaaatcagacaatgattaaggaatatccactggattttgtgctcaggaggttgttgtgaccttagtg

SEQ ID NO: 342478 - DNA, 201 bp, Homo sapiens
agtgaaggttgcagtgagctgaaatcacaccactgcactccagcctgggcgacaagagcaagactccatcttaaaaaaaaaaagtatgcatatatatatakatagagagagagagagagagagagagtggaaaagtaaaatcagacaatgattaaggaatatccactggattttgtgctcaggaggttgttgtgaccttag

SEQ ID NO: 342479 - DNA, 201 bp, Homo sapiens
aaaaaaaaagaatgccaaaaacgaaggcatcaggccttgagttccgtttttttcttcaacatttatgttagttttaggggtacatatgcaggcttgttatrtgggtaaattgcatgtggctgaggtttggtgtacgaatgatcctgtcacccaggcagtgagcatggtacctcatgggtggtttctcaacccttgtccctg

SEQ ID NO: 342480 - DNA, 201 bp, Homo sapiens
gcatttatcaggttcacttttcagtgaatgaattacattagttttccaatgtcgaaccattctgacatttgcagaataagctttacgtatgtatggtatawtatgggctacctttggaattgacttgataacatttaaaatagaatttttgcatctatagtcacaagtgagtttggtttaaagtttactttttgttctgga

SEQ ID NO: 342481 - DNA, 201 bp, Homo sapiens
caggtgtaagccaccgtgcccggccgaaaatgcctgtttctaatgtctttttctaactgcagtcttctgcactgttgggctaattcagtcagttttgttgytgctaaaacaggtattgtaaaataatgcttgtgacttaatgattctcctgaatctctagtatttagattatttaacattttgtctttgctatctgtttag

SEQ ID NO: 342482 - DNA, 201 bp, Homo sapiens
aattgcttgaacccaggaagtgaaggttgcagtgagctgaaatcacaccactgcactccagcctgggcgacaagagcaagactccatcttaaaaaaaaaaagtatgcatatatatatatatagagagagagagagagagagagagtggaaaagtaaaatcagacaatgattaaggaatatccactggattttgtgctcagg

SEQ ID NO: 342483 - DNA, 201 bp, Homo sapiens
gaaccaaataaatgcagaagggacctgctgggtggtcagaagcaagctgaagctgagttgtaggatggtccggggactgatttcacctatgggatctgttrgcccattatggtattccttttatatgtggctcagcacctaagagagtgttcctagggaacctaggcatacgagaccaggaaagtagtgttggtccatgct

SEQ ID NO: 342484 - DNA, 201 bp, Homo sapiens
tgggaggctgaggtgggtggatcacctgaggtcaggagttcaagactagcctgggcaacatggtgaaacctcgtctctactaaaaatacaaaaattagccrggcgtggtggtgggcgcctgtaatcctagctattcagggggccaagggacgagaattgcttgaacctgggaggcggaggttgcagtgagctgagatctcg

SEQ ID NO: 342485 - DNA, 201 bp, Homo sapiens
tgagggatttagggtcatttgattatgaggtgagatggtcacatggggatgaagtaattctttaacatacatctgtatgcagaagtacagtatacagagawaagaatttacaatatagtgtgtgcatcagtaatttctaacagagccttaaaacagaaacacagtctttccataacctatgattagcaagatattaatcag

SEQ ID NO: 342486 - DNA, 201 bp, Homo sapiens
caacagtattgagccaggtgcagtcgctcattcctataatcccagcacttcaggaggtcgaggtgggtggatctaggagtttgagaccaccctggacaacrtggtaaaccccgtctctacaaaaaaatacaaaaaagtctgggcacagtggctcacgcctgtaatctcagtactttgggaggctgaggtgggtggatcacc

SEQ ID NO: 342487 - DNA, 201 bp, Homo sapiens
gaacccaggaggcggagcttccagtgagccaagatcacgccactgcactccagcctgggtgacagagcgagactccctctcaaaaaaaaaaaaaaaaaaaraatgccaaaaacgaaggcatcaggccttgagttccgtttttttcttcaacatttatgttagttttaggggtacatatgcaggcttgttatatgggtaaat

SEQ ID NO: 342488 - DNA, 201 bp, Homo sapiens
ggaggctgaggcagacggatcacgaggtcaagagatcaagaccatcctgcccaatatggcaaaaccccgtctctactaaaaatacaaaaattagctgggcrtagtggcacgcgcctgtattcccagctatttgggaggctgaggcaggagaactgcttgaacccgggagtcagaggttgcagtatgccgagatggcaccat

SEQ ID NO: 342489 - DNA, 201 bp, Homo sapiens
tgaacccaggaggcggagcttccagtgagccaagatcacgccactgcactccagcctgggtgacagagcgagactccctctcaaaaaaaaaaaaaaaaaaagaatgccaaaaacgaaggcatcaggccttgagttccgtttttttcttcaacatttatgttagttttaggggtacatatgcaggcttgttatatgggtaaa

SEQ ID NO: 342490 - DNA, 201 bp, Homo sapiens
agacggatcacgaggtcaagagatcaagaccatcctgcccaatatggcaaaaccccgtctctactaaaaatacaaaaattagctgggcatagtggcacgcrcctgtattcccagctatttgggaggctgaggcaggagaactgcttgaacccgggagtcagaggttgcagtatgccgagatggcaccattgcacccagcca

SEQ ID NO: 342491 - DNA, 201 bp, Homo sapiens
aacctgggagatggaggttgcagtgttcagagatcaagccactgcactccagcctgggcaacagaacaagactaggtctcaaaaaaaaaaaaaaaaaaaaagaggccggtcgcagtggctcacgcttgtaatcccagcactttaggatgccgagacgatggatcactaggtcaggagattgagaccatcctggctaacacg

SEQ ID NO: 342492 - DNA, 201 bp, Homo sapiens
aaaagccagcagagatcagtaccctgggaaccaatgagggaagacttttgggtgaccctgtgttaatagagtggaaaagggtaggctgggcgcagtggctyacacctgtaatcctagcactttgggaggccaaggcaggtggatcacctgaggtcaggagttcgagatcagcctggctaacatggtgaaaccctgtcccta

SEQ ID NO: 342493 - DNA, 201 bp, Homo sapiens
atctcggctcactgcaacctttgcctcccaggttcaagcaattctccctgcctcagccacctgagtagctgggattacaggcgcccaccaacacgcccggstaatttttttttttttttgtatttttagtagagatggagtttcactgtgttggccaggctggtctcgaactcctgacttcaggtgatccacctgcctcgg

SEQ ID NO: 342494 - DNA, 201 bp, Homo sapiens
ggagaattgcttgaacccaggaagtgaaggttgcagtgagctgaaatcacaccactgcactccagcctgggcgacaagagcaagactccatcttaaaaaaraaaagtatgcatatatatatatatagagagagagagagagagagagagtggaaaagtaaaatcagacaatgattaaggaatatccactggattttgtgct

SEQ ID NO: 342495 - DNA, 201 bp, Homo sapiens
ttgaacccgggagacggaggttgcagtgagctgagatcgcgccattgcacttcagcctgggcgacagagcgagactccgtcacaaaaaaagtcttaatttwaaaaaaagaaaagaaggaacaaccccgggctgcagatcagaccgcccccctggctccctcgcaatgcgggagtgctccctccaggtcaccgtgtcccctc

SEQ ID NO: 342496 - DNA, 201 bp, Homo sapiens
tctgatccaagccactaaggaatgcatgttagatatttggattcttagaaaaaaatgctgcctgtgcctctcactgccttctattcaatgccagcctctcrtgggccccaaatatagtcagaggctgtgtaagctaagtaatgtcaacatgtagtttttttttttaatgcagaaataactttacatgaatttgtctgaaat

SEQ ID NO: 342497 - DNA, 201 bp, Homo sapiens
tccttccctttccttttttacaactttgaaggtcttctgaggaatgaaatggaaatatatatacagtgccaaatggtcacctctaaacaaaaacaactcckatgtaccccaaattcatatttcactcagaatttgaactcctcaaaattgccactgccaaggacatcattgtgaaagtagaggatgcttaataccttctta

SEQ ID NO: 342498 - DNA, 201 bp, Homo sapiens
tgccaaggacatcattgtgaaagtagaggatgcttaataccttcttacattcaattagtgggcactaaacaattccagcacttcttggtctttcctgcccsccctgtaccctctacggatgagagctcttcctctctattctcctctgttacctgtcattccctctggactgtgagccaggtgtaggggagaagaggtgaa

SEQ ID NO: 342499 - DNA, 201 bp, Homo sapiens
agtggggccatggcttgggaactaactcctgggaggtacctaagacaaggaaacattggctctgatttaagcagatgtctgctcaagggatccaatctgayggtgggtgtatagagtaggcaacaactcagacacagtatggatttgttattacatagtgggaaggtgatctggctcaactgatcctttgcccaaggctgg

SEQ ID NO: 342500 - DNA, 201 bp, Homo sapiens
agttttatttacattctgctagtgtttacctttttaccaattatttaaaatctgttttatttatatcctgctactattcatatacatattttatattccaraataaacatatacatgtatatgaacttcaaacagtatattttttccccatattctaccctacatcctagatttttattcaataatctaataaataataaa

SEQ ID NO: 342501 - DNA, 201 bp, Homo sapiens
taaaattgctctactttttcaatttctatttagggttgcagatgagacattcaaagccaatctgattctctttcctttgtaggtaattagacttttctttkaggtgcttataagcatttcttgttattctttgagtttagaaatatcaccaggaaatgtctatatctgtctttgtttaatcctgcctgcaacttagttagc

SEQ ID NO: 342502 - DNA, 201 bp, Homo sapiens
tggtcctccaattgaattacatgacttgcagcagcatcagtttctagattagcaattaagtttttcatagctgaggctcctcatattctaggattgcttcmtttccccataacctgcacttgttgactaatgcagtatccttttgaatttcactgagaaacttgaaacagtatgaacacatcttttaaaatatcttctctt

SEQ ID NO: 342503 - DNA, 201 bp, Homo sapiens
aggaatttatactcaatccttaaagaagtaacatgattggttctgctttttagaaacatcacttaggccttggtaggagaatagttcctagggacgctatrctagaaacaagaagtccacttaggaggctcttacaataattcaaatgaaaattttgatgcatcgacaaagattggaagtcagagtcagcttttttttttt

SEQ ID NO: 342504 - DNA, 201 bp, Homo sapiens
ggtttctccgtgttggtcaggctggtctcgaactcccgacctccggtgatccacccacctcagccccccaaagtgctgggattacaggcgtgagccaccgygcctggcccagagtcggattttaaggctgtttggttaaaaaagaggaagaaaaccagatgattggacatggatcataagacaaaggaaagcttctccttt

SEQ ID NO: 342505 - DNA, 201 bp, Homo sapiens
caggagaaaaaaaatgggctaacattaatagatagaattaatagattaattaataatctgcataaaggaggtcataagagtgaaagagatcatcctatgayagtctatagtcttagaaggaaaaaggaccaaggagggctctcttgcaatagttttttctggaatcatgaaggaatggaaaaagcctgtggccgtcactat

SEQ ID NO: 342506 - DNA, 201 bp, Homo sapiens
tctggtgctttggactaaatcaaaggataaagggggcctggtgcagtggctcatgcctgtaatccgagcactttagaaggctgaggcaggaggatcacttragcccaggagttcaagatcagcctgggcactttaggaggccaaggcagaaggatcacttgagcctaggagttcgagatcagcctgggcaatatagtgaga

SEQ ID NO: 342507 - DNA, 201 bp, Homo sapiens
gtctcagaataataataataataataataataataataataataataaaagtttaaatttcagcttccctactttgtaattgactgacttcaagcaaatamtcttgtctataaatccatgaagagtgctaagccatcactggaatacattagcgaaaaacttgtatcaggtaactcaggtctctatataagaccccttaaa

SEQ ID NO: 342508 - DNA, 201 bp, Homo sapiens
tgaaagttttaaattttgatgaagcccaattaatctatttttcttttgttccttgagcttttggtgtcatgtctaagaaggcttttcctttctcagagtcrtgaatatttattcctgtgttttcttctaagagttttatagttttagctgttacattcaggtctacgatgcattttaagttaatttttgtgtgtagtataa

SEQ ID NO: 342509 - DNA, 201 bp, Homo sapiens
gctaagggaaagagagcgacacctgaagaagagaaggctagtgtccaggtcaccttgagccacaggacagaggcctcttgcttaaaaggaagagatgtggrtgagaacaggcgctcctcaccccatgagccactccttcctcaagtggctgggccagttgagagttctctgatgacccctatgccgatggctaagaattaa

SEQ ID NO: 342510 - DNA, 201 bp, Homo sapiens; identical to SEQ ID NO: 72304

SEQ ID NO: 342511 - DNA, 201 bp, Homo sapiens
ctatgagtagaattgctgggtcatatgataatttcatgtttaacattttgaggagctgtcaaactgttttgcaaagtggctacagtactttacattcccayaagcagtgtatgagggttccaacttctctacatactcaccaacacgtgctattgtctgtcttttttattataaccatcctagtaggtttgaagtgatatt

SEQ ID NO: 342512 - DNA, 201 bp, Homo sapiens
ggcctcttgcttaaaaggaagagatgtgggtgagaacaggcgctcctcaccccatgagccactccttcctcaagtggctgggccagttgagagttctctgrtgacccctatgccgatggctaagaattaagatggagaggggtggtggactatcagttgtggaatatcaacctcagtgcacttttgtcaacactaaccaca

SEQ ID NO: 342513 - DNA, 201 bp, Homo sapiens
gggttcaagcagttctcctgcctcagcctcccaagtagctgggattatgggtgcccaccaccatgcccttctaattttttgtatctttagtagagacaggrttttaccatgttggccaggctggtctggaacgcctgacctcaggtgatccacccacctcaaccttccaaagtgttgggattacaggtgtaagccaccgtg

SEQ ID NO: 342514 - DNA, 201 bp, Homo sapiens
atgagccactccttcctcaagtggctgggccagttgagagttctctgatgacccctatgccgatggctaagaattaagatggagaggggtggtggactatyagttgtggaatatcaacctcagtgcacttttgtcaacactaaccacacagcatcctgactcccttgaaagggaagacatgtcacatgccttaatgcctta

SEQ ID NO: 342515 - DNA, 201 bp, Homo sapiens
ctgctaaaacaggtattgtaaaataatgcttgtgacttaatgattctcctgaatctctagtatttagattatttaacattttgtctttgctatctgtttargtaggtggagagttttcaaacactgttatcggccagatgaagaaatttggaaggattgccatatgtggagccatctctacatataacagaaccggcccac

SEQ ID NO: 342516 - DNA, 201 bp, Homo sapiens
ccctccattccttgattgtccttgttttatttctctggtgccctgccatgcgctccattccccactccctactctcttatgctgaaaccacatccctcccrctccacactctgaggtccaaaagcagtatcaaccagagaaccatattcattaaatcccagtcctgtgagatgccttgtacaggcctctcattttatgggt

SEQ ID NO: 342517 - DNA, 201 bp, Homo sapiens
actcctattggcaacagactcaaaacaaagaccagtcttctaagctcctcatacagagtctgtttctgctacagtgattctgtgctattaagagagatcayaaattacctatggtccccccccaaaaaaggagaaagtacgagaaagtaggaaaaaaaggaatcttccagactctaatcaggatccaggcaaccataaatc

SEQ ID NO: 342518 - DNA, 201 bp, Homo sapiens
cagttggcatgccagggtgagtttcatggatatattccatttgtttgaatgtctgacactctgattttccaaaatggtttgttcagaacttggtcaacagraagatatttgatgcatgataggctcaggggctgatcagagaagagggcaggaccaagatggcagatcaacctaagtgtccatcaatgggtgaatggataa

SEQ ID NO: 342519 - DNA, 201 bp, Homo sapiens
ttacaggcacaaatcgtcacgcctgactaattttttttatttttagtagagacagggtttcactgtgttaggatggtcttgatttcctgacctcgtgatcygctcccttcagtcttccaaagtgctgggattacaggcatgagccaccatgcccatcccactttcatttaagatgaggaaatgagagttccaatccctaac

SEQ ID NO: 342520 - DNA, 201 bp, Homo sapiens
tcaagcaattctcctgcctcagcctcccaagtagctgggactataggcacccgccaccatgcccagctaatttttttttttttttaatttttagaagagaygggggtttcactatgttggccaggctggtctcgaactcctgaccttgtgatctgcccgccttggcctcccaaaatgctgggattacaggtgtgagccacc

SEQ ID NO: 342521 - DNA, 201 bp, Homo sapiens
aatttacttattcatttatatttattgcacatctcccttcttgaggatgtaacctccatgaagacagcatattcatacattttgctttctggtgtatctcyagcccccagaatagtatatgaagcaatgtaggcactgaataaatattgctgaataaatgaatgttagaggggtgcatacatgtgccacagctcttccagg

SEQ ID NO: 342522 - DNA, 201 bp, Homo sapiens
tttttagtagagacagcattttgccatgttggccaggctggtctcgaactcctcacctcaagtgatccacccgtcttggcctcccaaagtgctgggattasaggcatgagctaccgtgcctggcctgaaagtgtcttttaaaaccttgaagtgaccctctgacaaactgaggaactttaactttgcctccatagattgata

SEQ ID NO: 342523 - DNA, 201 bp, Homo sapiens
gtttggtgccgggtgggcttcggaaacagaagtgtgtctgcaatgtgtccccgatccttttgttcctttgattattattgactctcagtgttttttcctcrtatgttgattgccactgtcatcttttatcttcctctcaatcagttttttcttagtgggattctcattttagcagccctcatgtgttgaaaagatccttag

SEQ ID NO: 342524 - DNA, 201 bp, Homo sapiens
cgcgcgcccccgccacacgcacgccgggcgtgccagtttataaagggagagagcaagcagcgagtcttgaagctctgtttggtgctttggatccatttccrtcggtccttacagccgctcgtcagactccagcagccaagatggtgaagcagatcgagagcaaggtacgcgctaccggggaaggccagggtgccggcgccg

SEQ ID NO: 342525 - DNA, 201 bp, Homo sapiens
agaactgttttggaaaagccttgagtatgtttgaaataccttccctcttgaaagtaatctcaagtttttaataagggttaatcatgttaaaaaaacaaaamtgtctattcaaccagacattggcatttcttgaccttttttcctgtcttacctggatcttgcaataaaggatgcctggtttaactttcttgaaaatcacat

SEQ ID NO: 342526 - DNA, 201 bp, Homo sapiens
tgctagtaacattctgaacattctgcctgttgatgtgcccgtcaaaggaagtaaatattaataaaacttcattgagaatataaccggtttggcttttgtamtgccattatattcattatattaattttcatatgctgaaaaatgtcctcatgcggaaatgtggggtacatgacagggaaaagtttctggttttggattact

SEQ ID NO: 342527 - DNA, 201 bp, Homo sapiens
tgtatgatacttaaaatagttgaaaatttgattggattaaagagcatattggatcgctggagtatctgatgctagtaacattctgaacattctgcctgttratgtgcccgtcaaaggaagtaaatattaataaaacttcattgagaatataaccggtttggcttttgtactgccattatattcattatattaattttcata

SEQ ID NO: 342528 - DNA, 201 bp, Homo sapiens
gttccgtagaatatagactaactagtcattaaaataaggcaaatattggctgggtgtggtggctcacacctgtaatcccagcactttagggggccaaggcrgggagatcacctgaggtcaggagttcgagaccagcctgaccaacatggtgaaaccctgtctctactaaaaatacaaaaattagccgggcttggtggtggg

SEQ ID NO: 342529 - DNA, 201 bp, Homo sapiens
gtgtgtgtgtgtgtatatatatacacacacacacacaaaattagccaggtgtggtggcgtgtgcctgtagtcccagctactggggaggctgaggagggagratggcttgagtctgggaagtggagattgcagtgagctgagactatgcccctgcattccatccagcctgggtgacacagccagaccctgtctcaaaaataa

SEQ ID NO: 342530 - DNA, 201 bp, Homo sapiens
tccccaggtgacccgggagggaccttgtgtctctgggggtgactgtccgtctccccgcctcccaccgtcacgcgcagtgctgatccccacttccagctggwgtgcgagctgggcttggggttacaggagccgaagccctggagctccgccccacgcttgcgccagccccgccccgatcccggctcgcaggctccaggggcg

SEQ ID NO: 342531 - DNA, 201 bp, Homo sapiens
acaggcatgagctaccgtgcctggcctgaaagtgtcttttaaaaccttgaagtgaccctctgacaaactgaggaactttaactttgcctccatagattgayagaaaagtatgagtagtagcccttttgaaaatgatagaccaaccttatttctctgacagccaacagggttatgatacttattttataaatggtaacctcc

SEQ ID NO: 342532 - DNA, 201 bp, Homo sapiens
agctgggcttggggttacaggagccgaagccctggagctccgccccacgcttgcgccagccccgccccgatcccggctcgcaggctccaggggcggggcgwggccggggcgcagcgacgggcgcggaggtccggccgggcgcgcgcgcccccgccacacgcacgccgggcgtgccagtttataaagggagagagcaagcag

SEQ ID NO: 342533 - DNA, 201 bp, Homo sapiens
actgcaacctccacctcccgggttcaagcgattcttctgcctcagcctcctgagtagctgggactacaggcagccgctaccacaccaggctaaatttcaamtttttagtagagacagcattttgccatgttggccaggctggtctcgaactcctcacctcaagtgatccacccgtcttggcctcccaaagtgctgggatta

SEQ ID NO: 342534 - DNA, 201 bp, Homo sapiens
aggagccgaagccctggagctccgccccacgcttgcgccagccccgccccgatcccggctcgcaggctccaggggcggggcgtggccggggcgcagcgackggcgcggaggtccggccgggcgcgcgcgcccccgccacacgcacgccgggcgtgccagtttataaagggagagagcaagcagcgagtcttgaagctctgt

SEQ ID NO: 342535 - DNA, 201 bp, Homo sapiens
gaatgtgatatggttgttaagttactattctagatgtgtcccagagttgtttttttttttttaaaaagagtgtaattgcatttttgtgaaaaatccttatyccttgttttaatcaaacttagtcttattaaggtcaatttagctaggggaaaattgcacctggaatagagaaattctaactgccactgatcctatcagata

SEQ ID NO: 342536 - DNA, 201 bp, Homo sapiens
attatccaccacgcccggccttgatttttatttgaaagcaataataggtgccagatgccatgataagccctttgcatgcactatgtcatttaatcctcacrataactatacgagtattttttattagcaccctcattgaacaggtaatggcactgcagcacagaaggtaaagtcagtctcttgaggcagaccaatgcacca

SEQ ID NO: 342537 - DNA, 201 bp, Homo sapiens
aaacttgtagtagttgacttctcagccacgtggtgtgggccttgcaaaatgatcaagcctttctttcatgtgagtattaaacaatgtctgctttgtaagasatttgtgttttttgagttggtggtcacagtggtaggaaagaaagacagttaaaggattttggtttcggtggggggatttctttggctggatctttggtct

SEQ ID NO: 342538 - DNA, 201 bp, Homo sapiens
attccagttttttaagaagggacaaaaggtacgtacatctgacctttaaaactctaactgggcaataggaaacccagtataagtgaataaatcactggagkgatgttccctttaaagattgaggcatatcaccaagttctgcttttaagaatttttaaatatgccaaaattcattggcttaagtacataatgtgacagcta

SEQ ID NO: 342539 - DNA, 201 bp, Homo sapiens
ttagtacatgaggtcatattagtgttttcttgttgggtttttttttgtttatttggttttttatcttatggttttttatttatttgatttctttctttacragacctcttgtggcggtggggggcggggaatgttcatttttttttaaacctatttgaccagcattgtttccttgaagaaaacctagatttcagatacaga

SEQ ID NO: 342540 - DNA, 201 bp, Homo sapiens
caaattttagaagttaattttgtcttaaatagttctttttttccccacattgaaacatgggccttatttgaaatcccagcctcagaatttgatatgccaarctgttttatactaagaaaaatttgatttagagaaaatttatgtctcttagatctatgtctccaaagatctaaatttttggatctttaattagtctctact

SEQ ID NO: 342541 - DNA, 201 bp, Homo sapiens
gagcatcagagtcacctgaagcccgactttaactgtaatggtttaagatggggttgatggggaaacttgtagtacccctcaggtaattctgatactgcagcaaggtttgagaattcacaaagtctttttatttttcctcccgagatagtctcattctgtcgcccaggctggaatacagtggcatgatctcagctcactgca

SEQ ID NO: 342542 - DNA, 201 bp, Homo sapiens
ttctcagccacgtggtgtgggccttgcaaaatgatcaagcctttctttcatgtgagtattaaacaatgtctgctttgtaagagatttgtgttttttgagtyggtggtcacagtggtaggaaagaaagacagttaaaggattttggtttcggtggggggatttctttggctggatctttggtctaaaagtagtagtataaca

SEQ ID NO: 342543 - DNA, 201 bp, Homo sapiens
aattcaatattctcttaacaggtgggtgaattttctggagccaataaggaaaagcttgaagccaccattaatgaattagtctaatcatgttttctgaaaayataaccagccattggctatttaaaacttgtaatttttttaatttacaaaaatataaaatatgaagacataaacccagttgccatctgcgtgacaataaaa

SEQ ID NO: 342544 - DNA, 201 bp, Homo sapiens
tgtgcaaagcactcgaggacttccgtatgacagagctcctccttcatgtctgcttggtgcaccctgatcaccctgaatgtatcttttttttttttttttttgagacagagtctcactctgtcacccaggctggagtgcagtggtaccatctctgctcactgcaacctccacctcccgggttcaagcgattcttctgcctca

SEQ ID NO: 342545 - DNA, 201 bp, Homo sapiens
aagcactcgaggacttccgtatgacagagctcctccttcatgtctgcttggtgcaccctgatcaccctgaatgtatcttttttttttttttttttgagacrgagtctcactctgtcacccaggctggagtgcagtggtaccatctctgctcactgcaacctccacctcccgggttcaagcgattcttctgcctcagcctcc

SEQ ID NO: 342546 - DNA, 201 bp, Homo sapiens; identical to SEQ ID NO: 72321

SEQ ID NO: 342547 - DNA, 201 bp, Homo sapiens
ctgtataacatgttactgtactgactactgtaggcgtttgtaacacaacagtaagtatgtatctgaacaaacttagacagaaaagagataaaataaaaaamcagtattgtaatcttaagggaccatgttgcgtatatgggccattgttgactgaaatgttaggtgtggtacatgactgtatttgtgaatcaactgagggtt

SEQ ID NO: 342548 - DNA, 201 bp, Homo sapiens
tcagaatgaaacctgaaacaattctggtcccaagctaaacttgtaccacacacctaggtatatggcgtcaggagaattttgacgtgattaaaaaggttttagactgggttttcatgacatgaaatgacttccaaggtactgacaaatatcttggcaagtttaaggcagatttatcaaaactagtaatcataactatagaca

SEQ ID NO: 342549 - DNA, 201 bp, Homo sapiens
gcagagggggtttctagatgactactggaattcatgtccctgccgtccctccctttcccctgattggagcagctgctaggacggtgggcaggtgagcctakgaaggaatgagtaagacttgattctgtaagagaaggaacttgagaagcttgtgaaagactgttctctctgagctagaggacagaatggagccaggtgaga

SEQ ID NO: 342550 - DNA, 201 bp, Homo sapiens
aaaaaaaatttttgtagttttttttagtggaaagggggtttagccatgttggccaggctggtcttgaacttcttgcctcaagtgatatatcctcctcggcytcccaaagtgctgggattacaggcatgagccactgcaccggccttattacatttttgaaaacatttctactgatggcaaattggaatctttttcactgaa

SEQ ID NO: 342551 - DNA, 201 bp, Homo sapiens
agggcatgctactgtgacagatgcacctgatgtaggattagcaatgttgaggtccaggccagcaaagtgcagatggaaaggtcttgtcccatagatcaaaggaaagcccatgtttagaatgtaaatgaaatgagctctttcctttgagtgtaaaatatggtcttatttactggagtagatttagtttgtttcttcttgatg

SEQ ID NO: 342552 - DNA, 201 bp, Homo sapiens
cctagggtagtgctctgcccgtaatagtcactcagatctttgtaaatgcatgatatttttggattcctttggaaagtcttcatattcttcattacattttwaaaaaaatttttgtagttttttttagtggaaagggggtttagccatgttggccaggctggtcttgaacttcttgcctcaagtgatatatcctcctcggcc

SEQ ID NO: 342553 - DNA, 201 bp, Homo sapiens
gttgctgtttttaacaccagtattgtacatttggtaattaaaaaactgacttgaaagaagaatgaactagttcattcacagctcctggttcagggtaaagaaaaaaaaaagaatggacaagttcagagtcctagaagtcctagaagtcattgaatgtaaacgaaagctaaatttgtagctaaaataaagctataaattaag

SEQ ID NO: 342554 - DNA, 201 bp, Homo sapiens
gactgaagcaggagaatggcatgaacccgggaggcggagcttgcagtgagcgattgtgccacttcactccagcctgggcaacagagccagactccgtctcaaaaaaaaaaaaaaagtggattggcccggcatgatggctcacacttgtaatcctagtactttgggaggctgaggcgggtagatcgcttgagtccaggagtt

SEQ ID NO: 342555 - DNA, 201 bp, Homo sapiens
tcctagggtagtgctctgcccgtaatagtcactcagatctttgtaaatgcatgatatttttggattcctttggaaagtcttcatattcttcattacatttwaaaaaaaatttttgtagttttttttagtggaaagggggtttagccatgttggccaggctggtcttgaacttcttgcctcaagtgatatatcctcctcggc

SEQ ID NO: 342556 - DNA, 201 bp, Homo sapiens
ggagagagggcttaaaaattcaagttcagttgacattgctagttttgttaatcatgttcagagcactgtggttatgttagaggaatgcatgtgaagtgttyatgagtgaaatgatgtcagggatttgctttaaaacacaccagcaaaaaataaaacgggacaggaaagataaacatattaactgacaaaactaacaatcgt

SEQ ID NO: 342557 - DNA, 201 bp, Homo sapiens
gagtattattggaggccaggagattgagactgagatgcacaagatggcaagacgctgtctctacaaaaaaaagtttttaaaatcaggcaggcatagtggtktgtgtgctactgagactgtggtggtggtctcatctactcaggagactgaggcaagaggatcccttgagcccaggagtttgaggctacaatgagctgtgat

SEQ ID NO: 342558 - DNA, 201 bp, Homo sapiens
ggaccacttgagctggggaggcagaggctacaatgagatgtgatcatgccactgcactccagcctggcaacagagagaccctgtcttaaaattaaaaaaamaaacaaacaaaaaaaaagaagttggctggtcgcagtggttcacacctgtaaacctataatcctggcacttcgggagtctgaggtaggaggagtgcttgag

SEQ ID NO: 342559 - DNA, 201 bp, Homo sapiens
cacatgcttcaaagggcaaaaagcagaactactaataagggtctaacaaagattacagggcaaagggcaaaaacagaaccactgataaggatctatgttcrgtggtgcacgtattgtcttgataaacatcttaaacaacagaaaacagggttcgagagcagagaaccagttggaccacaaatttaccagggtggagttttt

SEQ ID NO: 342560 - DNA, 201 bp, Homo sapiens
tttagtagagatggggtttcaccatgttggccaggctggtctcaaactcctgacctcaagggatccacccacctcaacttctcaaagtgctggggttacargcatgagccactgtccccagccttgaatttattatttaattttttaaaattgtggtaaaatacacataacataaaatttaccatcctatttttaagtgta

SEQ ID NO: 342561 - DNA, 201 bp, Homo sapiens
gtgcttgagtccaaggggttcaagaccagcctgggcaacaaagctagaccctgtctctaaaaaaaaaaaaaaaagtacagaaattagctgggcatggtggbgcacacctgtagttccagctactcggaaaactgaggtgggaggattgcttgagcccaggagcccaggagctcaaggctttagtgaactgtgatcgagtca

SEQ ID NO: 342562 - DNA, 201 bp, Homo sapiens
cactgataaggatctatgttcagtggtgcacgtattgtcttgataaacatcttaaacaacagaaaacagggttcgagagcagagaaccagttggaccacaratttaccagggtggagtttttccccaccctagtaagcctgagggcactgcaggagaccagagcgtatctcactccttatctcaactgcataagacagacg

SEQ ID NO: 342563 - DNA, 201 bp, Homo sapiens
tcagtgttagcaaggctgtacttataatcccaatgcagagtgctgtggggtgctggactgaagcacggagctttggctcaagtggagcctcttcccttaartccaaaatcttacccctagccggcagcctttcccaaagaaatgtgaatgcctgtgtcagaagaggagagaaaatgcaaaatgatgtttgtccaactgata

SEQ ID NO: 342564 - DNA, 201 bp, Homo sapiens
atctcaaaaaaagaaacatattaagagataataatgtaatttaccctcatagtattaagaaaaatgaaagtttattactgtcacttttattttaatcaatwaggagggagatatataaaatgatttcatctctgttcacttctataaaacctgttctttacaaaatagtacagtgaaaagttatattttatattattgaaa

SEQ ID NO: 342565 - DNA, 201 bp, Homo sapiens
gaaataactcaataacttttatgttttcacattgaaaatcagtcagatttgcttcagcctcaacgtgtgtgtttatgtaaaattaaatgagcgctggtaatttttttttttcctaaacaggaagtgggttaaaaaacaaacaaaaaaagagaatgcatagtgggaaccactttttcatttcactctttaaaaatgtaacag

SEQ ID NO: 342566 - DNA, 201 bp, Homo sapiens
atgcctgtagtcccagctacttgggaggctgagtcaggagaatcgcttgaacctgggaggcggaggttgcagtgagccaagatcgtgccactgcactccawcctggggacagagtgagactccgtctcaaacaaaacaaaacaaacagaaccacaaactggatggcttaaaacaaatggatgctctcactgttctgtaagc

SEQ ID NO: 342567 - DNA, 201 bp, Homo sapiens
gtagtcccagctacttgggaggctgagtcaggagaatcgcttgaacctgggaggcggaggttgcagtgagccaagatcgtgccactgcactccaacctggkgacagagtgagactccgtctcaaacaaaacaaaacaaacagaaccacaaactggatggcttaaaacaaatggatgctctcactgttctgtaagctagaat

SEQ ID NO: 342568 - DNA, 201 bp, Homo sapiens
tgaaatcaagatgtcagcagggctgtgctgttgtagttctgggtagaatccttccttgcttcttcccagcttctgggggtggccagcaatccttgtgttcrgggcttgcagctgcatccctccaggctctctgcctttgtcatcacacattctccatgtggctgtctttacatagtcttccttcttcttagaaggacacct

SEQ ID NO: 342569 - DNA, 201 bp, Homo sapiens
agggagtgcataacatttaaggtagttttcgttctgtggggtgggggagggaaggaggatagagttggagaggaatatacaggctggtttctggggtattsgtaatattctatttcttgccttgatactactgttcattttaattttgttcattaaacaatacacattgttttacatgctttttatatgtgtgctatattt

SEQ ID NO: 342570 - DNA, 201 bp, Homo sapiens
caccgaagactaagcctccttgtagtttcacatggagctctggcaattggctatatctccactgtgctagtgacaatcatgcaggtgctattttgaaatarctaccagtcttgcattggtagtggttagtcatattatctaaaggaagtatagccatgcattgcttaatgatggggatatgttctgagaaaggcattatta

SEQ ID NO: 342571 - DNA, 201 bp, Homo sapiens
acagttcacccacttaaagtgtaaaattcatctgttgcttttaaaacattttcgtcatctcaaaaagaaacctcccacccattagcggtcaacctcatatycctctatatccccacctctacccctaaacaaccactaatccactttctgtctctacctatcacctgtcaatgtaatatccctcaatatccccaccagcag

SEQ ID NO: 342572 - DNA, 201 bp, Homo sapiens
tgccaccatgcccagcaaatttttgtatttttagtagagagggggtttcaccatgttggccaggcaggtcccaaactcctgacctcagggatccacctgcytcggcctcccaaagtgctgggattacaggtgtgagccactgccccaggccagaagtccctgaattctaaaggacttatatgagcatgggaacattaggga

SEQ ID NO: 342573 - DNA, 201 bp, Homo sapiens
gccttgacctcctgggctcaagccatcttcctgcctcaacctcctaaatagctagaaccacaggtgcataccaccatgcccagctagtttttcagtttttktgtgtgtgtgtgtgtggagatggggtcttgccatgttattcaggctggtctcgaactcctgggctcaggaaatccttgcacctcggcctcccaaattgtt

SEQ ID NO: 342574 - DNA, 201 bp, Homo sapiens
cttttataaattacccagtctcaggtatttctttctttttttttttttttttgagacggagtcttgctctgttgcccaggctggactggagtgcagtggcrcgatctcagctcactgcaacctccgcctcccaggttcaagcgattctcctgcctcagcctcttgagtagctgggattacaggcgtgcgccaccacacctg

SEQ ID NO: 342575 - DNA, 201 bp, Homo sapiens
gaggtaggaggatcgtttgagagcccaggagatcaaggctgcagagagccatgatctcaccactgcctttggcctgggtgacagtgtgagaccctatctcaaaaaaaaaaaaaaaaaaaaaaattattcctagtaaatgatttttagttatgaagtagaaaagtgtcttctaactcagtgctttcaagaaattccctaaat

SEQ ID NO: 342576 - DNA, 201 bp, Homo sapiens
ttcctcgctaggaaaagaatttagcaatatctcgcctacttggacatccgtttataggctctctgcaagaagaaaaatatggctctttttgcccgatgccrcaggcagtcagaccttatggttgtcttcccttgttccctaaaaatcactgttattctgttctttttcaaggtgcactgatttcatattgttcaaacacac

SEQ ID NO: 342577 - DNA, 201 bp, Homo sapiens
accatgcttggctaatttttgtatttttagtagagatggggtttcaccatgttgaccaggcttgtcccaaactcctgacctcaagtgatccacccacctcrgcctcccacagtgccgggattacaggcgtgagccaccgcacctagctattttctaatattttctacaaaacagtgttgtgtgaatttaaaaaggaccccc

SEQ ID NO: 342578 - DNA, 201 bp, Homo sapiens
tttttgtatttttagtagagatggggtttcaccatgttgaccaggcttgtcccaaactcctgacctcaagtgatccacccacctcggcctcccacagtgcygggattacaggcgtgagccaccgcacctagctattttctaatattttctacaaaacagtgttgtgtgaatttaaaaaggacccccagaaatccaaccaat

SEQ ID NO: 342579 - DNA, 201 bp, Homo sapiens
ataatttaattggcagcttttttgtttccttagtggtccctaaagtaatggtgcactgtataatcagtggtattgttggttcagtgaatacccacaagaatgtgtgcatgtgtttggtggtggctgacaggtgttaaagaggcgaaacaagctctcttcccagagaaggagtcatcacaggcaatgctgatgttttaagcc

SEQ ID NO: 342580 - DNA, 201 bp, Homo sapiens
taatttaattggcagcttttttgtttccttagtggtccctaaagtaatggtgcactgtataatcagtggtattgttggttcagtgaatacccacaagaatgtgtgcatgtgtttggtggtggctgacaggtgttaaagaggcgaaacaagctctcttcccagagaaggagtcatcacaggcaatgctgatgttttaagcct

SEQ ID NO: 342581 - DNA, 201 bp, Homo sapiens
gccgtttatagacctccccccaggaatgcattcctttcccagggtattaatattaatattcctcgctaggaaaagaatttagcaatatctcgcctacttgsacatccgtttataggctctctgcaagaagaaaaatatggctctttttgcccgatgccgcaggcagtcagaccttatggttgtcttcccttgttccctaaa

SEQ ID NO: 342582 - DNA, 201 bp, Homo sapiens
ttaaaagctgtcttcccaatgaaggaagaaaacccataccaacacaacttaaaaaaaaagatgaatgaaaaatagaggtgagttgagggcttttgaagtgwtatatatatatatatatataagcacagaaagtcagatcagttactagccacttctaaatctcgaaataagaaatgaaaattattttttaaagttggtctt

SEQ ID NO: 342583 - DNA, 201 bp, Homo sapiens
gttatttcactaagcatataactataagcaaaacttgttggttataggtagaaactagatagaatttgcagaaatagtagttactctaggtttattttttktgtgtgtgtatgagtcactaaaacaaaattgatccactttgatgatctgcctgggattgaaacagtaggtctttctcttttcccagttctcaagaccaga

SEQ ID NO: 342584 - DNA, 201 bp, Homo sapiens
actttctgtccctgtttcatatagtttttttttttaaggctttatttatttatttttttgagacagagtctctatcaccctggctggaatgcagtggcatsatcttggctcactgcaacctccacctcccaggttaaagcaattctccttcctcagcctccctagtagctgggattacatgggtgtgccaccatgcccggc

SEQ ID NO: 342585 - DNA, 201 bp, Homo sapiens
tctactaaaaatacaaaaaattagccaggcgtggtggtgtgcacctgttactggactattccggaggctgaggcaggagaatcgcttgaacccaggaggcrgaggctgcagtaagccaagatcacaccactgcactccagcttgggcggcagagtgagactctgtctcaaaaagaaaaaaactattatggcaagcatatag

SEQ ID NO: 342586 - DNA, 201 bp, Homo sapiens
ccagcccgacgaacatggagaaaccccgtctctactaaaaatactaaattagcaaggtgtggtggcacacgcctgtaatccagctactcgggaggctgagrcaggagagttgcttgaacccaagaggcagaggttgcggtgaaccaagatcacgccattgcactccaagagtgcaacgagagcaacaagtgcgaaattccc

SEQ ID NO: 342587 - DNA, 201 bp, Homo sapiens
gttgggcttaaggctagtatatcaaggatttgtttttttccatcaagcagatcatgttgccaggccattaagcagaatttcaaaggatgaaaattagttgmtttttctgtcttaattctagaaagcaaacaaaagtaccctatgaacaaaacaaacaaacagttccctacagatttctgagcaagttcagttactctgtag

SEQ ID NO: 342588 - DNA, 201 bp, Homo sapiens
atatatactcaaaagaattgaaaacaggcactcgaacaaataaatgtacatgcatattcacagcagcgctattcacaataggcaaaagacagaaacaaccyaaatgtccattaagggatgcatggataaacaaagtgtggttatatacatataatgaaatagcagtcagccataaaaaggaatgaagtactaatacatgct

SEQ ID NO: 342589 - DNA, 201 bp, Homo sapiens
ccaatcaccatctttctttttcttctaagtagtccaggaatcagtttggttaaattcctttcttctgcaatttgaccaagactcctttcttccctggtccycactgtgggaccaaaaccatgttttattgcttctttgtttcctttatgtttctgtagcagacaattcttttaagattttctgaagagtgttgttttttgc

SEQ ID NO: 342590 - DNA, 201 bp, Homo sapiens; identical to SEQ ID NO: 72327

SEQ ID NO: 342591 - DNA, 201 bp, Homo sapiens
ctgctgattaattctgtgtggggtccttcactgccaagcattaaggtcatttgcttcaataatatcttataggtgctgttccagaattcaaagaagagaarctgcagctgcaaccaaaaccacgttctggagctgtggaagaaacatttagaattgttaaggactctctcagtgatgatgttgttaaagccactcaagcaa

SEQ ID NO: 342592 - DNA, 201 bp, Homo sapiens
aaaacaggtttgagagcagagaaccggttgaccacaaatttaccagggcagagtttttcctcaccctagaaagcctgagggcactgcaggagaccagagcrtatctcactccctcactccttatctcaactgcataagacagacattcccagagtggccgttgatagacctgcccccaggaatgcatcccttttccagggt

SEQ ID NO: 342593 - DNA, 201 bp, Homo sapiens
cagcctggccaacatagtgaaactccatctctactaaaaatacaaaaattagctgggcatggtggtgcacacctgtaatcccagctactcggaggatgagrcacaagaatcacttgaacctgggaggtggagtttgcagtgagccaagattgcaccactgtgctccagcctgggcaacagagtgaaactgtatctcaaaaa

SEQ ID NO: 342594 - DNA, 201 bp, Homo sapiens
ggcttccttgctgggcaataagatatataaaaatgagggaaagccagcaaaaatgagaaaaaaggaaagcctgtctttcttataggttcttaccctctgcytgtatatcagagtagcttaaaggaagaaaaagagacgataacatttcactacacatttttccatgtactagtgggtaatgcccatgaaaaccttaacttc

SEQ ID NO: 342595 - DNA, 201 bp, Homo sapiens
tgaactttggaagcagaggttgcagtgaacccagattggaccactgcactccatcctgggtaacagagcaagaccctgtctcaacaacagcaacaaaataygtaaatggcaatcacatcgcagaaaagtatgtctaatgataaacagtatgcagagggactgggtgtggtgcctcactcctgtaatcctagcactttggga

SEQ ID NO: 342596 - DNA, 201 bp, Homo sapiens
aaatggcaatcacatcgcagaaaagtatgtctaatgataaacagtatgcagagggactgggtgtggtgcctcactcctgtaatcctagcactttgggaggytgagattggatgggaggattacttgaggctaggagtttgaaaccagcctgggcaacatagtgaggcctcttaaaaaaaaaacacacacacaaaaaaaacc

SEQ ID NO: 342597 - DNA, 201 bp, Homo sapiens
aggaattgtattagacaagatggctgtgtataatttgagttgagaaacagattcaccttcagcctagagcacagattggccttggagttaatttaattaaygaattgttcttacctgtttctgggggcaactacttagctgcctctatgtgattctagaatgataaataaaggaacagagaggccgggcacggtggctcac

SEQ ID NO: 342598 - DNA, 201 bp, Homo sapiens
aaggtagatgtcagaattattttcttccattactgagaagccagtaatataatgttgggaacagtgagataattcaaagggactcctgggtgggcttcatyatattagctggcctaaggtattatgtttccaataacaccccagtcactagaggcactgaactcagtagcagcagttcgcttattgggagtagggttgtgc

SEQ ID NO: 342599 - DNA, 201 bp, Homo sapiens
agtctaggaattgggattcccaagatactgatataaaatgctgtaacagaaatttctatgcttctgaggtttatagaactcaaggagattctttttacaaygcgtgttcttaaagcaatatatccctaagggcactaatggttgcttttccctctctcattttctcattttagggaaactaaaaccaacaatggcattcat

SEQ ID NO: 342600 - DNA, 201 bp, Homo sapiens
agtttggttaaattcctttcttctgcaatttgaccaagactcctttcttccctggtccccactgtgggaccaaaaccatgttttattgcttctttgtttcytttatgtttctgtagcagacaattcttttaagattttctgaagagtgttgttttttgcagtggggaaaaagatgagagtgaaaaaggcacttcttcaata

SEQ ID NO: 342601 - DNA, 201 bp, Homo sapiens
ggtggtgtgcgcctgtcgtcccaactactcagggggctgaggcaggaggatcacctgagccttaggagttcaaggctgcagtgagccgtgatcataccacygcactccagcctgggcaacagagttaaaccctatctcaaaaaaaaaaaaagaaagaaaagagatgtttggcctttctgagagtgccaagtcctaaccgtc

SEQ ID NO: 342602 - DNA, 201 bp, Homo sapiens
tccttcactgccaagcattaaggtcatttgcttcaataatatcttataggtgctgttccagaattcaaagaagagaaactgcagctgcaaccaaaaccacrttctggagctgtggaagaaacatttagaattgttaaggactctctcagtgatgatgttgttaaagccactcaagcaatctatctgtttgaactctccggt

SEQ ID NO: 342603 - DNA, 201 bp, Homo sapiens
cctggccagcatggtgaaaccctgtctctactaaaaatacaaaattagttgggtgcagtggtatgtgcctgtaatcccagctattcgggaggctgaggcayaagaatcgcttgaacctgggaggtggaggttgcaatgggctgagatcatgccactgcactccagcctaggtgacagagcaagactgcctcaaaaaaaaaa

SEQ ID NO: 342604 - DNA, 201 bp, Homo sapiens
ggtgcagtggtatgtgcctgtaatcccagctattcgggaggctgaggcacaagaatcgcttgaacctgggaggtggaggttgcaatgggctgagatcatgycactgcactccagcctaggtgacagagcaagactgcctcaaaaaaaaaaaaaaaaaaagtatagaacagctcaaagaaaaattttaaagtcacctgtaat

SEQ ID NO: 342605 - DNA, 201 bp, Homo sapiens
aagtggcattgctcaaataagcattgcaaaggttataaagtattaggttattgtcactgaagcatggggaatacctttttcaaattgaactggtgaagacraactgttggccacatttatgttttcaaattgtagaataaatatgtatgtgtgtatgtatttacatattcagccttatattgtttaattcagtgtctattc

SEQ ID NO: 342606 - DNA, 201 bp, Homo sapiens
tagtagagacagaatttcaccatgttggccaggctggtctcgaactcctgacctcaggcaatcctcctgcctcggcctgccaaagtgctgggattacaggygtgagccaccaggcccggccgcaattactcattttaaagtgtacagttcagtgacaattaatatattcacagtgctgtgcaaccacccctccctggtttc

SEQ ID NO: 342607 - DNA, 201 bp, Homo sapiens
  misc_feature (1)...(201): n = A,T,C or G
acatgggagtagaattctaggtcataatataattttatgtttaacttctcaaagaattgccaaaaggtttttcatagtggctgcatcatttacattcccancggcaatgtacaaggatttctatttttccatatccttgcacttaccaacacttcttttttgttattattttgttttttcattattgccaccctagtggat

SEQ ID NO: 342608 - DNA, 201 bp, Homo sapiens
ttctatagcttagtttctgttccatattgtctcaaatggttaatttgctatggtgctcacttcctttttcattttatcctattgtcttttcatcacagccrgttatatataactttctgtccctgtttcatatagtttttttttttaaggctttatttatttatttttttgagacagagtctctatcaccctggctggaat

SEQ ID NO: 342609 - DNA, 201 bp, Homo sapiens
acttgtaccacacacctaggtatatggcgtcaggagaattttgacgtgattaaaaaggttttagactgggttttcatgacatgaaatgacttccaaggtaytgacaaatatcttggcaagtttaaggcagatttatcaaaactagtaatcataactatagacagtgctgtagcagtggtcagtgttaattttagacttatt

SEQ ID NO: 342610 - DNA, 201 bp, Homo sapiens
acttctgaaaaagagagagagagaggcaggagaccgaggcaggaggctcatttgagcccagaagtttgagaccagcctgggcaaaacagcaagaccccatstcaaaaaaaaaaagagagaaaagaaaaagagaacaattgagattgttaacatctcactgtactacagttttgaaggctttgtggcctttaaatcttctag

SEQ ID NO: 342611 - DNA, 201 bp, Homo sapiens
aaatttgttttgagttttgaattttctgagtctttggagaaatacgtatttgctcacacagaacatgatttaaaaccatctgataaggctgggcgtggtgrctcacacctgtaatcccagcactttgggaggccgaggcaggcagatcacttgaggtcaggagtttaagaccagcctggccaacatggtgaaaccccgtct

SEQ ID NO: 342612 - DNA, 201 bp, Homo sapiens
attggcagcttttttgtttccttagtggtccctaaagtaatggtgcactgtataatcagtggtattgttggttcagtgaatacccacaagaatgtgtgcaygtgtttggtggtggctgacaggtgttaaagaggcgaaacaagctctcttcccagagaaggagtcatcacaggcaatgctgatgttttaagcctcatacgc

SEQ ID NO: 342613 - DNA, 201 bp, Homo sapiens
ttcttacaatagatgatatatcataatttaattggcagcttttttgtttccttagtggtccctaaagtaatggtgcactgtataatcagtggtattgttgrttcagtgaatacccacaagaatgtgtgcatgtgtttggtggtggctgacaggtgttaaagaggcgaaacaagctctcttcccagagaaggagtcatcaca

SEQ ID NO: 342614 - DNA, 201 bp, Homo sapiens
attcactgactaggtgaaagagtttatactactttcattgattctgagatgcccatgctttatatttgtacatctcagataccagtctgtttcttacaatrgatgatatatcataatttaattggcagcttttttgtttccttagtggtccctaaagtaatggtgcactgtataatcagtggtattgttggttcagtgaat

SEQ ID NO: 342615 - DNA, 201 bp, Homo sapiens
cagaattttgaagccattgctttatcatcttaagattatcgttgagaatttgatgttgttcgtcttaatcttttctatctacccctgtcctttctgaaagyttttgaaatcagagacatatttctctgtggtagtctgatatttcacagtgataaaaggtaaatgtcattttcccagccccttgaaaagttcttatattat

SEQ ID NO: 342616 - DNA, 201 bp, Homo sapiens
ttgttttgatcaagtttaatctattattttttcctgttatcattcatgcttttcccactaaatattttcttttttaccgttgtgaaatgaaattattgtcrttagtttatttccaaattgcctgtttctggtatatatagctataactaatttttgtgtattgattttgtatcatttgaattaatcagtgaagccattttg

SEQ ID NO: 342617 - DNA, 201 bp, Homo sapiens
agccttcttttttttttttttttttgagatggagtcttgctctgtcgcccaggctggagtgcagtggcatgatctcagctcactgtaacctctgtctcccrggttcaagcgattctcatgcctcagtctcccaagtagctgggacttcaggcgcctttcactatgcctggctaatttttgtatttttagtagagacagggt

SEQ ID NO: 342618 - DNA, 201 bp, Homo sapiens
ctcctcatcttagacgacagcgtagagtgactctctttatgtcagctggaaccagaagtaatctcccaacattattgcctttcaagaaaaaggagatttaytgtgcttaacggagtgggtacagtgtaacatacattatcctcaatcagagcagtgtcccggtctcccacttggcttctcagctgcatgttcttctcaaca

SEQ ID NO: 342619 - DNA, 201 bp, Homo sapiens
tgcttgtacttcttatgtccttttattcttactgtttatcccatctgctttcctttaaatgggcacaatttagactttatatcctaagaattctctttgaygagaccatagccatttctatccctaatttatgtagtggatacattataaatacaaaaatttaggccaggcgtggtggttcatttctgtaatcccagcact

SEQ ID NO: 342620 - DNA, 201 bp, Homo sapiens
tcatgactggtctgggcaagtatggtagaagcaggaaagtccacttttgggtggatttgatttgggcttggggtggggagtctgggaatggcagctactgrtttggtaatggctacagagaggaaggcagtagaagtaccacagagcagctgcagacttctgtcacctggactatattacaaatagatttgggaactcagc

SEQ ID NO: 342621 - DNA, 201 bp, Homo sapiens
taaatgacacaaaccacgtttatatttgtatcatccctgctcatctctgcagttcaaactaaagtaaatagcggattatagttttacaaagcactcttatrtgcattatctatttagcctgcataacaattctgtacggaaagtaatgcttagtgattaagaacacaaaatttgggagaagacaacccagcttcatattgc

SEQ ID NO: 342622 - DNA, 201 bp, Homo sapiens
aatagcggattatagttttacaaagcactcttatatgcattatctatttagcctgcataacaattctgtacggaaagtaatgcttagtgattaagaacacraaatttgggagaagacaacccagcttcatattgcagctctgctgctcactgctatgcagctttgagcatgtcacccagtttgtctgtctcagcctcaatt

SEQ ID NO: 342623 - DNA, 201 bp, Homo sapiens
ggtggaggttgcaatgggctgagatcatgccactgcactccagcctaggtgacagagcaagactgcctcaaaaaaaaaaaaaaaaaaagtatagaacagcwcaaagaaaaattttaaagtcacctgtaatccaattataagtacatttatattttggcttatttcctttcaaccacttttttttggcacatataatttaaa

SEQ ID NO: 342624 - DNA, 201 bp, Homo sapiens
atagcagcagactctattcttggtcttgctacttttagttggtatgtcttgggacattctttctttgttttttttaaagacggggtctcccatgttgcccrgactggcctgtagccttgaactcccaggctgatgttcctcccttcttagcctctggagtatttaggattacaggcatgcaccgctgtgcccagggacata

SEQ ID NO: 342625 - DNA, 201 bp, Homo sapiens
tgttaagtagattcatatcgttgtgcagtcaatctccagaacttttttcatctgcaagctgaaactctatccatgaaacaactcctcttccccacctccgmtcgtacattggcaaccaccattctactttctggtttatgtaaggtctgggtatcttgagttgagtgacgtgttgtcagattttgtaatttgcctgaaaca

SEQ ID NO: 342626 - DNA, 201 bp, Homo sapiens
tcacatattgtagaaatccttttatattaaatatctagaataggtgcatccatagacacagagagctgttggtggttgccagagtctggaggcagggggarctgctaatgctgaatccctgagggtttcattttgggatgatgaaaatggttgaaactagatagataccacgtgttgcgtggtggtacacaacattgtacc

SEQ ID NO: 342627 - DNA, 201 bp, Homo sapiens
tgtggggaatgccaacattcagtccatgacactaagcaaagtcttcctgtactcttcccacagcttcttgatgcagttttctacgttgtcaaatgtatcascttgtgtcagtccactttttccccggagccctttgtcttcatgttataatctagacctgaagctcattaagcctgctacacagctgttgtcctagaaatt

SEQ ID NO: 342628 - DNA, 201 bp, Homo sapiens; identical to SEQ ID NO: 72331

SEQ ID NO: 342629 - DNA, 201 bp, Homo sapiens
gtaacagcatgcctggcacagggtacacttaatgaatggtaggtgctattttttattttattttattcatttttaatttttctgtttttttgacaaacaawtagggtctcactctgtcacccaggctagaatgcaatggcacagtcatagctcactgcagcctcaaattcctaggctcaagcaatcttcctgcctcagcct

SEQ ID NO: 342630 - DNA, 201 bp, Homo sapiens
ttgatccccagaggacatttggtaatatctcaagacatttttgatagtcacaattgaatggagatgctaatggcatctcgtgagtagagtacagggatgcyggtgcacatcctacaattcacaagcattccgtacaacaaagaattatgtagtccaaaaggtcagtagtgcagaggttgagaaaccctggtttaaagccat

SEQ ID NO: 342631 - DNA, 201 bp, Homo sapiens
aatgaccagatactatgatattaggatataacaaagatgaattcattcctgccctccagaagtttgcttaaacttctgaaaaagagagagagagaggcagragaccgaggcaggaggctcatttgagcccagaagtttgagaccagcctgggcaaaacagcaagaccccatctcaaaaaaaaaaagagagaaaagaaaaag

SEQ ID NO: 342632 - DNA, 201 bp, Homo sapiens
gcagatctttttataattagttttcttctgatatttttatggtcttatatttttgtatttttcaaatatatttgtattgtctatattttttatagtcagatttttttatccccctgagatttctttcaggaagtgagttaggaagcccacttgatttttcttcagatggctgctcatttgtcctagcagcattgacctaag

SEQ ID NO: 342633 - DNA, 201 bp, Homo sapiens
tgtgtcatatatcaaatacatctaacaccatttccacagtttgtgttatgtgactattttatgaaagaaatcaacttcaaaggaggtttgggttttacttygttttgtttctgtaattcataaacaatagtgcccttgaattggtccagagtttacattttagactttgtgttctgacattttgccagtggcttacttgaa

SEQ ID NO: 342634 - DNA, 201 bp, Homo sapiens
gcctgtaatcccagcattttgagaggccaaggtgggagaatcgcttgagcccaggagttcaagaccaccctgggcagcacagtaagactctgtctctaccaaaaaaaaaaaaaaaattaaccaagcgtggtgatgcacacccgtgatcctagctattcaggaggcttagtgggaggattagttgagctgggaaggtcaagt

SEQ ID NO: 342635 - DNA, 201 bp, Homo sapiens
ctcatggtttactaataagaatggctgtgcttcttctgggcccttaccttatttttatcttatagatgctatgactctcatcgatttttttttttagaagkctgatagaaaatgtagggatgaatttccttgatacctttagcaaatctgtggcaccttactgcaatgcattttagagccaaaccttatttccagctttct

SEQ ID NO: 342636 - DNA, 201 bp, Homo sapiens
ttgtcttcccttgttccctaaaaattgctgttattctattctttttcaaggtgtgctgatttcatattgttcaaacacacgttttacaatcaatttgtacrgttaacacaattatcacagtggtcctgaggtgacgtacatcctcagcttacaaagataacagggttaagagattaaagtaaagacaggcataagaaatta

SEQ ID NO: 342637 - DNA, 201 bp, Homo sapiens
catggttccaactgttccctccattggggggtcccagacttcccgtaacatctctccctttctttttatataaatgagccacggcgatgaaggcttgttcrttctcttggttttgacgcaggattcgttgactggtctggcacgctaaaaagtcgattaaacagagaaacatgattccaaaatttactacagtggagcccc

SEQ ID NO: 342638 - DNA, 201 bp, Homo sapiens
tcatgtcttggactgagaccgagtcctggaacaaaccccatgttttccattatatgttgactgggagcactataagagttatgtggaatattaatttcagycccccattgtgccagcaaatctctaccccaaagattaatggggattggtgtgatatgaggctgaattgtacccttttgaccatcagggctagtgcaaggc

SEQ ID NO: 342639 - DNA, 201 bp, Homo sapiens
gtctcctgaagtttttttttctcttgtgcaaactcatcatgtttacgtctcaataatccaggtgataaattatgcagtttatctcttggcaaatgtctttmagggataaactaaagtttttgctgcaatctccttggcacctcatatgtagatgatatatcttgactaatatacaaatcacctgaagtagttacccacaag

SEQ ID NO: 342640 - DNA, 201 bp, Homo sapiens
ctcaccagctggaatggaaacaggaaccttggcagacaccataagtttattctcattagaggaatcaaaatgagaccagtatgaaccgtgattcctttagkagtagtggatgtcatacctaacaccaggcccaccgaaccttgaggtaaagggccagaaccttgaggtaaaggccccgtgaggacaattaaagggaaagaa

SEQ ID NO: 342641 - DNA, 201 bp, Homo sapiens
atggcatgatcatggctcacttcggccttgacctcctggactcaagtaatcctctgacctcagcctcccaatgatttttatttctagattaagatcagtgygtacagacacatgtaaagtaaaattttattacaaatactcccagtgttatataactctggcatatttgagagaaaatcctgcttagaagggcatatgtat

SEQ ID NO: 342642 - DNA, 201 bp, Homo sapiens
aggtaaatgtcattttcccagccccttgaaaagttcttatattatttctttgatagttctctcagttttctctcttctgactttctggagaaaaagatcakctgatttaatcactcatttctcctattacacatatatttgtataattcttttcaccttctaggagatcgactcaccttctttttcctacctttctattgc

SEQ ID NO: 342643 - DNA, 201 bp, Homo sapiens
agtttgttcgagtatgaccaagttgaccacagttatagcaggctccaagaaaagaatcagtcgagccggtttgattgccgtccttcatagcccgtgcccasagaatagctttgtgggtccctgatccaatgccttcacaagctttaatatatgcaggcaacacctcgtgatcagctaaattttgtcattggatggcatgca

SEQ ID NO: 342644 - DNA, 201 bp, Homo sapiens; identical to SEQ ID NO: 72329

SEQ ID NO: 342645 - DNA, 201 bp, Homo sapiens
agaaacctacagacaaaaatgccttcagcttcctgccatcagatatcaaatcaatcatgataggcatcatccttgcctccttccctcttagtagaatggarctcagctctccatcagtgcatctcaagctctaatgtctataccaagtacctgggatcttcctaaaatgcaaaataatgattcagcaggtctggagtggag

SEQ ID NO: 342646 - DNA, 201 bp, Homo sapiens
gacttgtaaatgttggcagcagtggaatcttagttttgggaaggctgttcttactgttgcctccattgccacttctccctcctctcacaagtggaaggtasatgtcagaattattttcttccattactgagaagccagtaatataatgttgggaacagtgagataattcaaagggactcctgggtgggcttcattatatta

SEQ ID NO: 342647 - DNA, 201 bp, Homo sapiens
ggccaaggccagtggatcgcttgagccaaggagttcaagaccatactgggcaacatggcaaaaccccatctctacaaaaaataaaaatgagtgttcaggcrcggtggctcacgcccataatcccagcacattgggaggctgaggtgggtggatatcctaggtcaggagtttgagaccagcctgaccaatatggtgaaactc

SEQ ID NO: 342648 - DNA, 201 bp, Homo sapiens
gtctttctttttttgagatggaatcttgctctgttgcccaggcttgagtgcagtggtgcgatctcgtttcactgcaacctctgcctcccaggtttaagtgrttctcctgccttagcctcacaagtagctgggattacaggcgcacaccaccatgccggctaatttttgtaattttagtagagatggagtttcaccatgttg

SEQ ID NO: 342649 - DNA, 201 bp, Homo sapiens
aattaagcaattttttccttttacttctctttcttttctttttttcttttttttttttttttttttgagacggagtctcgctctgtcacccaggctggagwacagtggagtaatctcagctcattgcaacctctgcctcccaggttcaagcaattctcctacctctgcctcccaagtagctgggactacaggcgctcgcca

SEQ ID NO: 342650 - DNA, 201 bp, Homo sapiens
tggctgctcatttgtcctagcagcattgacctaagagttaatcttttctcttctgctcgaaattctacctctgttgtatattaaattcttgcacatatagygctctgtttctggactttctgctctgctactttagtctctattcatgtaccagtaccagactgtttacttaattaattaattgagacagggcctcgctct

SEQ ID NO: 342651 - DNA, 201 bp, Homo sapiens
ttgggagctacaagctttggaactggatttgaaagatgaggatgaggaatcacattgagtgtgtcttgaaaagtagcatgtgtaaaacagagagacagctyctgatcttagttggtacaagcccagagtctgatccagcgcgagcctctcttctttgttcgggtgggcagaggtattctttgagatctttcatgagggaaa

SEQ ID NO: 342652 - DNA, 201 bp, Homo sapiens
tctctattcatgtaccagtaccagactgtttacttaattaattaattgagacagggcctcgctctgtcacccaggctggggtgcattggcaccatcatagktcactgcagccttgatctcctggggttaagcagtcctcccagctcatcttcccaattaggtgggactatagacatgcgccataatgcctggctattttta

SEQ ID NO: 342653 - DNA, 201 bp, Homo sapiens
agggcctcgctctgtcacccaggctggggtgcattggcaccatcatagttcactgcagccttgatctcctggggttaagcagtcctcccagctcatcttcycaattaggtgggactatagacatgcgccataatgcctggctatttttaaaaaatttttttgtagaggagtctcactttgttgcccaggctggtctcaaac

SEQ ID NO: 342654 - DNA, 201 bp, Homo sapiens
gctgggcttgatgatgtgtgcctgtagtcccagctactcaggaggctgaggtgggagatttgcttgagtccaggaggtcaaggctgcagtgagctgtgatygcaccactgtacttcagcctgggtgacagggcaagaccctgtctcagaaaaaaacaaacaaaaaaaaacccaggcacagtggctcatgcctgtaacccca

SEQ ID NO: 342655 - DNA, 201 bp, Homo sapiens
gcgggcagatcacgaggtcaggagttcaagaccagcctgaccaacatggtgaaatcccgtctctactaaaaatagaaaaattagctgggcgttgtggtgcrtgcctgtaatcccagctactcgggaggctgacgcaggagaatcacttgaacgtgggaggcagaggttgtagtgagccgagatcgcgccactgcactccag

SEQ ID NO: 342656 - DNA, 201 bp, Homo sapiens
ccgagtagctgggactacaggcacacactgccacacatggctaattttttaattttgtagagacagggtctcactatgttgccctggctggtttcgacttytgggctcaagtgatccccgtcttggtctcccaaattgctgggattataggcatgagccactgcacctggcctcaaatcactcttaagtggtttggagaaa

SEQ ID NO: 342657 - DNA, 201 bp, Homo sapiens
caatacactgggctaatttttttattttttgtagagacagggtctcactatgttgcccaggctagtcttgaactcctgggctcaatcgatcctcccatcayggcctcccaaagtactgggattataggtctgagctaccacacctggcctcaagaccaaactttaaagggtaaaccataaaacttttgaaatacaaattaa

SEQ ID NO: 342658 - DNA, 201 bp, Homo sapiens
agattccagcacgaccggataagccgacacctctaatccacttgtttcttttttctggcgtaataagtgttgcatggaagtttcaagaacaggcacatgasatggactcggcatagaaatgacaggaaaagtatgtgtagataagggaaactgaggttgaggaggtcggactggtatgagagtatgagaaaggggcattgg

SEQ ID NO: 342659 - DNA, 201 bp, Homo sapiens
tggctcaatcctgtgcaaccagagtggcaggggcatccacgtgtgaagaagggtacagagaagcaggttgaatggatggcaaagtgaccaaatgagggacygaaatgacaggagagtgaggggctgtggtggatgagggagggcctgcagaattacaggtaaattgtagtttggttccggagccatcagatggctccggaa

SEQ ID NO: 342660 - DNA, 201 bp, Homo sapiens
cctacccctaatatttcaatgtaggttctttctattttctgtgtcagctagctgagaaataaagagagacagtacaaagagaggaattttacagctgggcygccgggggtgacatcacatatcggtaggaccgtgatgcccacctgagtctcagaccagcaaggttttattaaaggtttcaaaaggggagggggtgtaaga

SEQ ID NO: 342661 - DNA, 201 bp, Homo sapiens
cagggttcgagagcagagaaccagttggaccacaaatttaccagggtggagtttttccccaccctagtaagcctgagggcactgcaggagaccagagcgtrtctcactccttatctcaactgcataagacagacgttcccagagtggccgtttatagacctccccccaggaatgcattcctttcccagggtattaatatta

SEQ ID NO: 342662 - DNA, 201 bp, Homo sapiens
gtgaggctgagatgggaagatcatttaagcccaggagttcaaggctgcagtgagccatgattgcgccactgtactccagcctgggtaacagagctgtcttaaaaaaaaaaaaaagcacgtaggagttcaaggccagcctgagtaagatggtgagaccccatctccatttaaaaaaagcaaaaaacaggctagccgggcgcg

SEQ ID NO: 342663 - DNA, 201 bp, Homo sapiens
ttgcttgaacccgggaggcagaggttgagtgagctgagattgcaccaccgtactccagcctgggcgacagagcgagactgtgtctcaaaagaaaaaaaaamacacacacacacacaaaacacacacacacaaagaatgaaatgggcacagggacccatcagtacatttgaatcagaatatttcagatcaacctgcagcaat

SEQ ID NO: 342664 - DNA, 201 bp, Homo sapiens
ttcacgtaccccactatgcagtcatttaaaatacgcaattcattggcttttaatatattcacagagttgtgccaccatcaccacagtcaattttaaaacctttaatcatcctagaaggaaacccctcaaccctccgttgtcagcctccaatccctcccactcccagctctaggtaacctctgatctttctgtctctatagg

SEQ ID NO: 342665 - DNA, 201 bp, Homo sapiens
ctgttagtttattacagcatctttacatttttatatagtttagaatatttccacaataaaaagtttttaaaaattactttcaactgggtgaggtggctcawgcctgtaatcccagcactttgggaggccaaggcgggtggatcacttgaggtcaggagtgcgagaccagcctgaccaacatggcaaaaccgtgtctctaca

SEQ ID NO: 342666 - DNA, 201 bp, Homo sapiens
gtttgacatagtttttgtatttttaccattttcctttaatgttatttcactaagcatataactataagcaaaacttgttggttataggtagaaactagatmgaatttgcagaaatagtagttactctaggtttattttttgtgtgtgtgtatgagtcactaaaacaaaattgatccactttgatgatctgcctgggattga

SEQ ID NO: 342667 - DNA, 201 bp, Homo sapiens
accagaaagtttttattaagagtttcaaaagagggggaggtgtaagaacagggagtaggtacaaagatcacatgcttcaaagggtgaaaagcaggactacyaataagggtctaacaaagatcacatgcttctgagggaacaggacaaagggaaaaagcagaaccactgataagggtctatgttcagtggtgcaggtattgt

SEQ ID NO: 342668 - DNA, 201 bp, Homo sapiens
cagtgatgatgttgttaaagccactcaagcaatctatctgtttgaactctccggtaaggactgcatctggtaatctgaagtttttatgaaacaaaatgggrtgtttcctttggaagaaaatcagcgtccaacagtgatcccctggatagttggctgcattcaagacccttactcttgaatgtagacattcaagaacagcaa

SEQ ID NO: 342669 - DNA, 201 bp, Homo sapiens
agtgagccgagatcatgccactgccctgccctccaccctgcgagagagagtgagagtctgtctcaaaaagaaaaaagaggaaatgcactttatattttgayagatatttccagatgaccccccagaagggttgcacacccaaaaggataaatgagatcctctaatcccacttgttggctaaccgcaaaatagttaatgatg

SEQ ID NO: 342670 - DNA, 201 bp, Homo sapiens
agggttcaaaggggatttatcatggggttcagaatcacagatgtgaggggtggtagtggggacaacagacagaaaagtttccccttcccatactcgcagtscggacatggcaatagccaatttccaaagttctgggtgttctgggctcagaatggggaatatcatacaaagcctcagggctggggtgggcgggtaatgccc

SEQ ID NO: 342671 - DNA, 201 bp, Homo sapiens
aaataaaataagtagcctccagacatcctcttccgccagaggagcaattgttttttaaatagccctttggtgcccagtctattactaaaccatgtgagtcrttttttaatactgctgcatgtgagttaacacaatcttcctaaattaaagttttagatgggccctcaaaatttttaggacatagttttcctatgggtttat

SEQ ID NO: 342672 - DNA, 201 bp, Homo sapiens
atgatcatggctcacttcggccttgacctcctggactcaagtaatcctctgacctcagcctcccaatgatttttatttctagattaagatcagtgcgtacrgacacatgtaaagtaaaattttattacaaatactcccagtgttatataactctggcatatttgagagaaaatcctgcttagaagggcatatgtatcatga

SEQ ID NO: 342673 - DNA, 201 bp, Homo sapiens
agtgccttcttctcctggtcgagtggggcaatggtcatctgtagctccaggcatatatacactatcgttagtatagatttctgcaggagcatccatccagrtgagaggtcgaataagtggaggaaaaggcacataagcccaataagaataattttatgtagcaggtaaatcagtttgaggggaaactggtgagacagaaag

SEQ ID NO: 342674 - DNA, 201 bp, Homo sapiens
gtagtttggttccggagccatcagatggctccggaagcaaaggctgcaaaggtttgaagagggaagagttagtatagatatggtcctgggctgtccaagtygggtccgtgggagctacaagtaccggctcctcatgaaaagaaataagatcattgggggtgacgttaagccaaagtcaccagagttagatattgagtcctc

SEQ ID NO: 342675 - DNA, 201 bp, Homo sapiens
aggggaggagttggtgaagggagaggcttgagcagataacgaaggccgaacgggagaggaaacctgaggaagaggtagagggtcaccagacacagaaaacwgtggtaactgcagggggttacaggattggtattttaggacagcacttaccaaggcccaatcaccccaaacagtgacgggagcataatttcctgttgggac

SEQ ID NO: 342676 - DNA, 201 bp, Homo sapiens
tgcgtacagacacatgtaaagtaaaattttattacaaatactcccagtgttatataactctggcatatttgagagaaaatcctgcttagaagggcatatgkatcatgacaggtagtatgatacagtaatttatcaaccataggcaccttgccatttttatctttgacattaaccaggtcggtctgacggtagtcagctttt

SEQ ID NO: 342677 - DNA, 201 bp, Homo sapiens
acagtacaaagagaggaattttacagctgggctgccgggggtgacatcacatatcggtaggaccgtgatgcccacctgagtctcagaccagcaaggttttrttaaaggtttcaaaaggggagggggtgtaagaacagggagtaggtacaaagatcacatgcttcaaagggcaaaaagcagaactactaataagggtctaac

SEQ ID NO: 342678 - DNA, 201 bp, Homo sapiens
ttactcagtggataaaattgcaggctctggagtcagactgcctggatttaatcttgaattgcatttgtttttattaaattgaaatgctttctggaacaagscaagttaaaaataaaaaggggaaaattaacttttgtatgttctgtatctggtcaccatcatgagttttttgttgttgtttttaaagacatctaatagttt

SEQ ID NO: 342679 - DNA, 201 bp, Homo sapiens
tgcatgtctgacaggtaatgacagtattgcagtccatggatcatacttggaagcaaagttctagatcccattttccctggccttctcaggaattttgtgcygttaattgaaccttgtcctcaatctgttcatcttgcagcctccttcccaatggtattttaatgttctcaattcttttctaactttaaaacagaacccagt

SEQ ID NO: 342680 - DNA, 201 bp, Homo sapiens
attgctgcccttgctttagcagcctctgcttggtcaacttctggtgagtttcacatctcagcactgtgttcagcttttatgttggctatataaaaaatcarattgctaaacatagaaggaaatgtggaggaaatatttattactcagtggataaaattgcaggctctggagtcagactgcctggatttaatcttgaattgc

SEQ ID NO: 342681 - DNA, 201 bp, Homo sapiens; identical to SEQ ID NO: 72339

SEQ ID NO: 342682 - DNA, 201 bp, Homo sapiens
gtgggtgtcaggccacagttcactgggggttggaggacagttcttctgcaagaagctgaaaaggacaatattagctcaggccctgcttcagagtggaccaygctgagaagcttctcactgtcaggtccaagaaatgctccttacccagactgggcagctggcccctggacatggggtcacagagttctggctgctcccaga

SEQ ID NO: 342683 - DNA, 201 bp, Homo sapiens; identical to SEQ ID NO: 72342

SEQ ID NO: 342684 - DNA, 201 bp, Homo sapiens; identical to SEQ ID NO: 72343

SEQ ID NO: 342685 - DNA, 201 bp, Homo sapiens; identical to SEQ ID NO: 72344

SEQ ID NO: 342686 - DNA, 201 bp, Homo sapiens
gattcccacgtgcatttttccaatgagcatgctgaggctcaggagggcagaataacttctcagactcctggatcagggcttggcattcagaagacattggmtccaggtgccgaagggaggggcagacacacgtatctccccagattctggttatgccaagctttctctgccaccagtggcaggtgtctctgggaaaggttc

SEQ ID NO: 342687 - DNA, 201 bp, Homo sapiens; identical to SEQ ID NO: 72345

SEQ ID NO: 342688 - DNA, 201 bp, Homo sapiens
gtggctcacacctgttatcccagcactgtgtgaggcagagatgggaggatcacatgaggctaggagttagagaccagcttgggcaacaagacttgtctctmccaaaaaaaaaaaaaaaaaaaaaaaaaggactctcaggcatggtggcacacaactgtgttcccaagtacttgggaagttgagatggggggatctcaagcc

SEQ ID NO: 342689 - DNA, 201 bp, Homo sapiens; identical to SEQ ID NO: 145856

SEQ ID NO: 342690 - DNA, 201 bp, Homo sapiens
ggagtcagccagagcctggtctacagggaaagtttggaaaaggggagggctggcttctgagggcagtggaagaaaaagcggagaagcaggactggggaccraggtctcgggggccaaggacgagctccacctgggatgctgaggttggacatcctgatgaagacacatgtcctcttcctcttggcagttaaattcactgag

SEQ ID NO: 342691 - DNA, 201 bp, Homo sapiens
tggcagcctctcattgtgtgctcccctggaggaaagggaaaacaagctccatctggcctcttttgtaaggacactaatccccttcacctcctgaagtcccyacctcttgacaccatcacattggggattaggtttcaccatacaaatttttgaggcaatacaaacatttaaaccatagcacttagagctcccagatttcag

SEQ ID NO: 342692 - DNA, 201 bp, Homo sapiens; identical to SEQ ID NO: 72348

SEQ ID NO: 342693 - DNA, 201 bp, Homo sapiens
ctggggctccacaccccattgtccagattccagccagctttggacctaggtatcttatcaccatgggtgaggcaagaagtcttcagggggaggggccaccrtgtcatgggctgtccaccccacaggttcccgggcccctgtgtacttctacgagttccagcatcagcccagctggctcaagaacatcaggccaccgcacat

SEQ ID NO: 342694 - DNA, 201 bp, Homo sapiens
ggtttccggcagtgcgaggaatgatacccaaggtcctcagtaacctcgaggcctccctggaagtccaagctgcatcccagcttccccagagcctgtggccygtaacttggtgggaagggatttttgagagggatcatgtgtgagcaggatattgtgggaagggtctgagggtggctgggagcacctctgaacccagggtct

SEQ ID NO: 342695 - DNA, 201 bp, Homo sapiens
ctctcctagtctggggtgacctcatgagcacacccgcatccttcatcacatgatggccccttccccagctccgggacccactcagacagggtgggggtgcrtggggcagtggacacgctctatctctccagtctacctggagggtgggcgccagtgctgtgccaccgtcagggcctccctctcagagagagggacacaaca

SEQ ID NO: 342696 - DNA, 201 bp, Homo sapiens
tggagtcagccagagcctggtctacagggaaagtttggaaaaggggagggctggcttctgagggcagtggaagaaaaagcggagaagcaggactggggacygaggtctcgggggccaaggacgagctccacctgggatgctgaggttggacatcctgatgaagacacatgtcctcttcctcttggcagttaaattcactga

SEQ ID NO: 342697 - DNA, 201 bp, Homo sapiens
ggccatgaaggagcccaggatggagtcagccagagcctggtctacagggaaagtttggaaaaggggagggctggcttctgagggcagtggaagaaaaagcrgagaagcaggactggggaccgaggtctcgggggccaaggacgagctccacctgggatgctgaggttggacatcctgatgaagacacatgtcctcttcctc

SEQ ID NO: 342698 - DNA, 201 bp, Homo sapiens
gacagaggaaattcaacccccagatacccttcctatgtagtgacccccatgagcaaaggcctgggtgtgtgtgtttaggggtggggtcacctcagagcctygcctttgctcccccttcctgtgccatccccaagcccgagaccacctcctccctgcccctggcatccagtctaacctgcctcttcctgatccacctggggt

SEQ ID NO: 342699 - DNA, 201 bp, Homo sapiens
ttccctgaccttacatttcccctcagcctttcaagatgatccccggagtggtggatggggtcttcctgcccaggcacccccaggagctgctggcctctgcygactttcagcctgtccctagcattgttggtgtcaacaacaatgaattcggctggctcatccccaaggtgagccccaacccaagcccacaagtgcctgggg

SEQ ID NO: 342700 - DNA, 201 bp, Homo sapiens; identical to SEQ ID NO: 72341

SEQ ID NO: 342701 - DNA, 201 bp, Homo sapiens
tttagtatttataaatgatacttgtattaatacaagtttttttttaaatcaggattcaaataacgttcatactttgcaaataagtagatatttcttttttmtcttttttttttttttttgagatggagtctcactctgttgcccaggctcactgcaacctctgcctcttgggttcaagggatcctcatgcctcagctccca

SEQ ID NO: 342702 - DNA, 201 bp, Homo sapiens
ttagtatttataaatgatacttgtattaatacaagtttttttttaaatcaggattcaaataacgttcatactttgcaaataagtagatatttcttttttckcttttttttttttttttgagatggagtctcactctgttgcccaggctcactgcaacctctgcctcttgggttcaagggatcctcatgcctcagctcccaa

SEQ ID NO: 342703 - DNA, 201 bp, Homo sapiens; identical to SEQ ID NO: 72346

SEQ ID NO: 342704 - DNA, 201 bp, Homo sapiens
tcactgggggttggaggacagttcttctgcaagaagctgaaaaggacaatattagctcaggccctgcttcagagtggaccatgctgagaagcttctcactrtcaggtccaagaaatgctccttacccagactgggcagctggcccctggacatggggtcacagagttctggctgctcccagaggtcaaaggctgtggctct

SEQ ID NO: 342705 - DNA, 201 bp, Homo sapiens
agtatttataaatgatacttgtattaatacaagtttttttttaaatcaggattcaaataacgttcatactttgcaaataagtagatatttcttttttctcwtttttttttttttttgagatggagtctcactctgttgcccaggctcactgcaacctctgcctcttgggttcaagggatcctcatgcctcagctcccaagt

SEQ ID NO: 342706 - DNA, 201 bp, Homo sapiens
aacagcagcgtgtccgccggcagcgaaccgagaccagcgagccgaccatgcggctgcacagacttcgtgcgcggctgagcgcggtggcctgtgggcttctrctgcttcttgtccggggccagggtgaggctccctcggaggggcgacagggaccgggctcagatctgccaaatgctgcggaggcagaacctgacagtgcgg

SEQ ID NO: 342707 - DNA, 201 bp, Homo sapiens
tatttataaatgatacttgtattaatacaagtttttttttaaatcaggattcaaataacgttcatactttgcaaataagtagatatttcttttttctcttytttttttttttttgagatggagtctcactctgttgcccaggctcactgcaacctctgcctcttgggttcaagggatcctcatgcctcagctcccaagtag

SEQ ID NO: 342708 - DNA, 201 bp, Homo sapiens
aatatgttctcaatttaatcaaatatatggtcgtgttctttagtatttataaatgatacttgtattaatacaagtttttttttaaatcaggattcaaatamcgttcatactttgcaaataagtagatatttcttttttctcttttttttttttttttgagatggagtctcactctgttgcccaggctcactgcaacctctg

SEQ ID NO: 342709 - DNA, 201 bp, Homo sapiens
tattaatacaagtttttttttaaatcaggattcaaataacgttcatactttgcaaataagtagatatttcttttttctcttttttttttttttttgagatkgagtctcactctgttgcccaggctcactgcaacctctgcctcttgggttcaagggatcctcatgcctcagctcccaagtagctagaattacaggcacatg

SEQ ID NO: 342710 - DNA, 201 bp, Homo sapiens
ggggccccaggagcgccgggacatgccaggccgggtagacagcctcgggtcggagtgagtgagggattggggtgtggggattcagtccatttccctcttaygattgtggctgtagcctgtgctgccggccggtaataacagtaatagcttctggcagcagctggctctcaatgtgtggcgtccttggccaagggggcgcgc

SEQ ID NO: 342711 - DNA, 201 bp, Homo sapiens; identical to SEQ ID NO: 72349

SEQ ID NO: 342712 - DNA, 201 bp, Homo sapiens
cccctcatctaccagcgctctggggagcggcctgtgacggcaggcgaggaggacgagcaggttcccgacagcatcgacgcacgcgagatcttcgatatccsccgctgctgggcgcgggcgggttccgggggcttgcggtggggggagcagtgatatcgagcagctggtggagccgcatcccagcagggcgttcctggcaga

SEQ ID NO: 342713 - DNA, 201 bp, Homo sapiens
tcctcggaaggggctgtgccattcctgcagcccttccgcgatccagggaatcctctcttcaaacctgtccttgtccacaggcccgatgagcgcgctggggsatcgataggagggggcaataaactagaattggagaccccaggagggcttctctgaggatgtgcacgttcaggatcccccagatggagaaatgggaaggaa

SEQ ID NO: 342714 - DNA, 201 bp, Homo sapiens
accaggttagcgaccccgagagtacagtggctgtggctttcacaccaaccattccgcactgcagcatggccacccttattggtctgtccatcaaggtcaarcttctgcgctcccttcctcagcgtttcaaggtcagttggagctgagccccgggagtgagaccaggcattgagggtctactgctgaggatggggactggga

SEQ ID NO: 342715 - DNA, 201 bp, Homo sapiens
cgcggtggctcacgcctgtaatcccagcactttgggaggctgaggcgggtggatcatctgaggttaggagttggagaccagcctggccaacatggtgaaayctcatctctactaaaaatacaaaaattagtggggcgtggtggtgtgtgcctgtggtcccagctacacgggtggctgaggaaggagaatcaaattgaacct

SEQ ID NO: 342716 - DNA, 201 bp, Homo sapiens
ggcttcccccttgcacaggagtctatgggcaagactggagatgggtaactgtgtgagtgaaattgccagagactcctcagtatgggttatagcctagaccraagctggcctgagaagactctcctttgcttaccatgtcctcttctcccaaatcccctctcaccaaatatacaggaccagagtgtgtcaggcttcagcagc

SEQ ID NO: 342717 - DNA, 201 bp, Homo sapiens
aaaagaattggaatacctgtggatgggtttggggtgtaacggaagggccagagtccaaaggcatgattaggaggaaggatcagctggagatggtgcctgarggtctgggggctgcagggaaaagtgtgggtcggtgggtgggtgttcaggccctggttatctccctcccagatggacgtgcacattactccggggacccat

SEQ ID NO: 342718 - DNA, 201 bp, Homo sapiens; identical to SEQ ID NO: 72372

SEQ ID NO: 342719 - DNA, 201 bp, Homo sapiens
actggcaaggatagctgtgttcgaatgggagaatctctagcaccagccagttatcaagtaccttttctttgattctgaaacttctgctcttgattatctartacagctaggtttggaagagcggtagtaattgaacctttgttttgtctgtgctcaacttgcctacaggcccttaaacagggacttttcagtggtaggtcg

SEQ ID NO: 342720 - DNA, 201 bp, Homo sapiens
ccataccccagaaaagactggatcccttgctttaaggccgtggcctctgtctgcctctctaattctgaattctttggcctcaggtcttcctccccaaacamcaccaacccatttggttccacattctgctttggtcttcagcgaatgatctttgaggtaagctgtggaagccctagaaataaactgcctggggggttgctg

SEQ ID NO: 342721 - DNA, 201 bp, Homo sapiens
gtggagcttctgcccatggcctcagttcctctggggtgggctcattgttctgggggctgcagtgttcttggtctgagtctcctagaggcccttgaggcctyttcctatgactgtgggattgccggcctctggaggggagagtttcttatctacagatgatcatccagggggccccagcccatccttgttgcctgccaccca

SEQ ID NO: 342722 - DNA, 201 bp, Homo sapiens; identical to SEQ ID NO: 72373

SEQ ID NO: 342723 - DNA, 201 bp, Homo sapiens
ggactgggagcttcagcgtggagtttgttcccataaagagagctgagaaccttcgtggagctcattgcctaaccagcatttattcgtaaattgggttcctkcatcagtctctgaggcattgattcctttttttttttttttttttttttttttgcttcttttttctttctttgagacatggtctccctctgtcacccaggc

SEQ ID NO: 342724 - DNA, 201 bp, Homo sapiens
acctgtcttttccatttttatcttggctgctgccacatctcttcccctctggggaaatcaggagcttctgtagcccagagatggaaaatcatgggctttakccttcccagctgcttgtccctgtagtgcagcaagctccaagagatgaaatctgcttattgatgctcctagtgacatgaaggactccaggatggccagcac

SEQ ID NO: 342725 - DNA, 201 bp, Homo sapiens
caggctggtgtgcagtggcgccatctcagctcactgtaacctccacctcctgggttcaagcgatagaatactcctttcagtaagtctccttaactggcttycctttccctttttgagggtgtgaagaggacctgattcctggggcaggctcaggcagttttgctgatagaggagtagacaagcaaatgtgtggtaccactg

SEQ ID NO: 342726 - DNA, 201 bp, Homo sapiens
tgagcccaggagtttgagaccagcctgggcaacatagttttttagttttgctaagattctatctctacaaaaagtttttaaaaaaattttaaatgagaacmaaagataacatgcagtgcttccataaaatttctattggtaatagttttttttttttttttttttactatttattctataaatgtatttttaatcattttt

SEQ ID NO: 342727 - DNA, 201 bp, Homo sapiens
tgttctaagtaaagctaatggtaaagtaaattgaaaactgttttctaacccctgtagtccaattaccctgactctgtccctctccatagtgcctacctttycttagagaccaagacagtccctagtcaacgacagctggccccctctcctcctagattggtcagcaccagcagctgagactccccactcttgcttgttccg

SEQ ID NO: 342728 - DNA, 201 bp, Homo sapiens
catgcacgacctacagcaaggtgagcacctatcttcctacctggcatagcctgagaatgaggtggacatgagcctgcaggcagtatggggctgtgtcctcyaggccagccattggtcacagacatgttcatgtccctactaacccctgctcccctctatccctcttgcagtgggacaacatccaggagctcctgggccacc

SEQ ID NO: 342729 - DNA, 201 bp, Homo sapiens
aagccccagaggatcaactctgtatatcagcctcatgagaactgaccttctcctgacctcattaatgctcttatttaaaagttctctaattaagctttgtrttttgatataattagagactcacctgcctgtgtcttaaaaataactctcccagctactatctcacatgatctgtgggcccatcttgtgaagcctagtatt

SEQ ID NO: 342730 - DNA, 201 bp, Homo sapiens
gctcgctgggctccaggcactagatacccgctccaactggcccgatttgcctgtcagttgctcgtctcgggtctcagcagggtctcttctgggacggtggracagtagtagtaaagacaataatagcttgctctccccaaatgcctaatgcccggccctgctctttttggacgtaattctctctagtacccctcgccggca

SEQ ID NO: 342731 - DNA, 201 bp, Homo sapiens
tgggctcttcccacctgttctcagtctctcacgcccctgcgcccgcagctcctcacctctttcgtcctctcggctcgctgggctccaggcactagataccygctccaactggcccgatttgcctgtcagttgctcgtctcgggtctcagcagggtctcttctgggacggtggaacagtagtagtaaagacaataatagctt

SEQ ID NO: 342732 - DNA, 201 bp, Homo sapiens
agccatgagagactactggccagtatcccataccccagaaaagactggatcccttgctttaaggccgtggcctctgtctgcctctctaattctgaattctytggcctcaggtcttcctccccaaacaacaccaacccatttggttccacattctgctttggtcttcagcgaatgatctttgaggtaagctgtggaagccct

SEQ ID NO: 342733 - DNA, 201 bp, Homo sapiens
atgagagactactggccagtatcccataccccagaaaagactggatcccttgctttaaggccgtggcctctgtctgcctctctaattctgaattctttggyctcaggtcttcctccccaaacaacaccaacccatttggttccacattctgctttggtcttcagcgaatgatctttgaggtaagctgtggaagccctagaa

SEQ ID NO: 342734 - DNA, 201 bp, Homo sapiens
ctactggactaaatcagctgctccattggattataaattatccttgactctggaagacttatgtctgtggagacagtgtgttggagaaaccaggtggtacwgattgctggtaaggccctgctgatgcttagtggctacatatgtcctgtgtgttgtaagagctagtttttgttgttggtgttttgttttaagacagagtca

SEQ ID NO: 342735 - DNA, 201 bp, Homo sapiens
gatattaagaaacagcagctgcaggctagaagtaaaaaacaccatatgttcatgcagcagtttttttctggtttccaagcaccattagctggaggagagasggactgtctgcacttagatattccttgtgtgttgcatttgtattgtaaggctttcagtaggtgcttagtgaataaatcagttactcagaatgtattttat

SEQ ID NO: 342736 - DNA, 201 bp, Homo sapiens
gtgttagccaggatggtcttgatctcctgacgtcgtgatccgcccacctcggcctcccaaagtgctgggattacaggcgtgagccaccgcacccagcctcttttttttttttttttgagacagagtcttactctgtcgcccaggctggagtgcagtggcgtgatcttggctcactgcaacttctgcctcttgcgattatag

SEQ ID NO: 342737 - DNA, 201 bp, Homo sapiens
aacaacttactaatatgtagggctatcttaattggcatttgagtgcaatttgctaacacctgtttgagtccagtctggttttctttgtttttgtttttggtttttttttttttttttgagatgaggtctagctctgtcacccaggctggagtgcagtggcttgatcttggctcactgccacctcctgggttcaagcgattc

SEQ ID NO: 342738 - DNA, 201 bp, Homo sapiens
cctagattggtcagcaccagcagctgagactccccactcttgcttgttccgcagcttaatgttacacatggaacacaatttgtagactttcagttaatccrgaactatattagagggatggattttaatttatggttattttttccctacagatgaaaattcattctccttcccctcataaacaagttccatcgaagtgta

SEQ ID NO: 342739 - DNA, 201 bp, Homo sapiens
caatttggttcagtgttgtggtctctaaataaagttagggatagggtctctggccaaaagcgaacctactatctattatgtctcagtttctttggcagtgccagatgttcctgcatacaatgccccacagcctcttccacaatcaggctcagattggcaggacaaacagatattgagccagctctgcttgtgtctccacaa

SEQ ID NO: 342740 - DNA, 201 bp, Homo sapiens; identical to SEQ ID NO: 72374

SEQ ID NO: 342741 - DNA, 201 bp, Homo sapiens
cctcagtagctgggactacaggcgcccaccaccacgcctggctaattttttgtatttttcagtagagacacggtttcaccgtgttagccaggatggtctcratctcctgaccttgtgatccgcccgcctcggcctcccaaagtgctgggattataggcgtgagccaccgtgcccggccttttttttttttttttttttgag

SEQ ID NO: 342742 - DNA, 201 bp, Homo sapiens
ccgtgttagccaggatggtctcaatctcctgaccttgtgatccgcccgcctcggcctcccaaagtgctgggattataggcgtgagccaccgtgcccggccttttttttttttttttttttgagacggagtctcgctctgtcacccaggctggagtgcagtggcgcaatctcagctcactgctacctccaactcctgggttc

SEQ ID NO: 342743 - DNA, 201 bp, Homo sapiens
atgttgcccaggctggtcttgaacgcctgagctcaagcagttcaccccgcttggcctcccaaagtgctgggatcataggcaagagccaccacacccggccmagaagtacctcttaacataaatccttgcatcttaccatagttgtgtgatgatctgattaaggtcttctccagcacacataagctccagtgatggagctta

SEQ ID NO: 342744 - DNA, 201 bp, Homo sapiens
agaccaccattttagagctataatgtattttttagaattacagcggggatgacatgcacagtccaaagttgttgcgcccccattatggcaaggcagcatgcctgcatctaaaaatctagaatactccttcctttctttctttctttcttttttttttttgagacggagtctctctctgtcacccaggctggtgtgcagtgg

SEQ ID NO: 342745 - DNA, 201 bp, Homo sapiens
aaatgatttgttaagtcagggcctcaaagggttatcgtcttcactgagagtttcctgtggcaagcacaagtttctcaacccactcatttctcatatccttycttatggaatatggctgcagtgatgcttttaatgcagggagtcagttcagccatctggtctccacaataatttgtagaaagatacactttggggaatcac

SEQ ID NO: 342746 - DNA, 201 bp, Homo sapiens
agaccatccctacccctaggatcttgcaggcctgtgtgggaaacagacagacactcacagccatgagagactactggccagtatcccataccccagaaaasactggatcccttgctttaaggccgtggcctctgtctgcctctctaattctgaattctttggcctcaggtcttcctccccaaacaacaccaacccatttgg

SEQ ID NO: 342747 - DNA, 201 bp, Homo sapiens
actgagtcaactgttctgtgtgttcatctttgatagagagaatgtccccaggggtagctcccctctcccaagcctacctctaggtatgggggccttctcaycctcagttattcaataaggaaggagggcttggctggctggcctgggctctttttccctttgagctttgagctgctgcctgctgaagtccacagccccgtt

SEQ ID NO: 342748 - DNA, 201 bp, Homo sapiens
ggagaacagcaagctgcccttgttttccctgtggatgcagtatctccagcagacacttaacagttccagaaggactggacacgtggccatggtaaaggctrtgtgtaaccattgagaaacaggcagatctcaggcagaggggggcctttagcatgaaccaggggaggttgaggagtcgggaaacccagccattaggtgcag

SEQ ID NO: 342749 - DNA, 201 bp, Homo sapiens
tcagtcattactccctgccaggctggtttatgttagccatttcagatgccagtcaaccatgttattttcttctcccccacccccaacagtgtacaactccrctgagcagctcttccatctcaacttcagaggactgtctttctcttttcagttagactcatggactgaggctccaaagtatgaggttagcccttcctgtcc

SEQ ID NO: 342750 - DNA, 201 bp, Homo sapiens
cttacatctctctgtttgaacccattttacaaatagggaaataagttcagaaagcttgatgtcttatccaaggtaataggctctccagaacccagggccargatcttttctgttcgacttccgtgcctaaatctggcctcccccagtgaacactgtcaggcactcagagccagggctttgggcaggtgtgtttggttctgt

SEQ ID NO: 342751 - DNA, 201 bp, Homo sapiens
gtaatccaaggtcatagttcattgttccattatcttgcttgagacctaatggtttagacattcatatagacctactagcaaatacaacattcttcctttartttttgccaagcatgatggtactatctgggcctgctgctttgtggggatcaatgggttggaaggaagcaacctgccctaatcccaaaagactcttaggag

SEQ ID NO: 342752 - DNA, 201 bp, Homo sapiens
ttactggggccttcatacctcagggtctggtggcttctcttctctacccttttcttaagagtcactggtgtcataaagccccagaggatcaactctgtatrtcagcctcatgagaactgaccttctcctgacctcattaatgctcttatttaaaagttctctaattaagctttgtattttgatataattagagactcacct

SEQ ID NO: 342753 - DNA, 201 bp, Homo sapiens
ttgggttgtggatcgtgcttaacgggactgggagcttcagcgtggagtttgttcccataaagagagctgagaaccttcgtggagctcattgcctaaccagmatttattcgtaaattgggttcctgcatcagtctctgaggcattgattcctttttttttttttttttttttttttttgcttcttttttctttctttgagac

SEQ ID NO: 342754 - DNA, 201 bp, Homo sapiens
tgctctgttgcccaggccgagtgcagtggcgtgatcttggctcactgcaacctccgcctcctgggttcaagcatttctcctgcctcagcctcccgggtagytgggactacaagggcagccacctcgcctggctaatttttttttttttttttttttagtagagtcagagttttaccatgttagctaggctggtttcaaatg

SEQ ID NO: 342755 - DNA, 201 bp, Homo sapiens
ttttaatcaacactaatttaatattgagtataaactgtttgctattttcccatagaacttgttctaagtaaagctaatggtaaagtaaattgaaaactgtyttctaacccctgtagtccaattaccctgactctgtccctctccatagtgcctacctttccttagagaccaagacagtccctagtcaacgacagctggccc

SEQ ID NO: 342756 - DNA, 201 bp, Homo sapiens; identical to SEQ ID NO: 72389

SEQ ID NO: 342757 - DNA, 201 bp, Homo sapiens
aaaaaaaaaagaaaatagtgcatcacacaaaggaattttttttcagaataaaattttgtcccctgattatgtgggaagttgcaggcctgcagcacctgggsagatagcaaaatgttaataaggtgatttttaatgaggtgcttgggaaaggaagggcatactcttgccatgcacaaatttctacttcacactttaagaagg

SEQ ID NO: 342758 - DNA, 201 bp, Homo sapiens
ttttacagagcactgattggtccattttacagagtgctgattggttcgtttttacagggtgctgattggtgcgtttacaaacctttagctagacacagagkgctgattggtccatttttgcagagtgctgattggcgtgtttacaaaccttttgctagacgcacagcattgattggtccatttttacagagtgctgattgg

SEQ ID NO: 342759 - DNA, 201 bp, Homo sapiens
ttctaatatgctaaatagtgtatttattttgtctttctttactgcacatccccaccctagaatgtaaattcaacgagcgcacagattttgtttttgttctrcattgtatcctccagcactaacaacagtatctgacacttcaaagaggtgcttcacatttatttgctgagttaaaatgaattaatcaatttacaaaaattt

SEQ ID NO: 342760 - DNA, 201 bp, Homo sapiens
tagccccttctagaaggtacaatatgcagctatttaatgacacataataacctaacagaagccagtaaaattgttatacccttagatagtgtggagcagartagggataaaaagataataaccaattacttacaatggaacttggccaatgagttgtggggaggatgatttttgtgaaaagcataataagacttactgaac

SEQ ID NO: 342761 - DNA, 201 bp, Homo sapiens
tctagatgatcataggagtcttcggccactttaccatattcattcttctctcactctctgccaaatgaacaatctttaataaaagcaaatcagatcatggmagttttcttccttaaaacctttctataatttactattcttagaattaattccaaactttatagcaagacctacttgttcctgcatcccaggccctgcctc

SEQ ID NO: 342762 - DNA, 201 bp, Homo sapiens
taaataaataaggaaaagcattttgacatccccatgactctcactttaatcaattattaaatcttatctatttgctattttaataattttgaattcactcwcctgcctgtctgaaatgccaaattcttaagccaccatctccttttgtctagatgatcataggagtcttcggccactttaccatattcattcttctctcac

SEQ ID NO: 342763 - DNA, 201 bp, Homo sapiens
cttttgtccctacccccttccgtactttggaaggaattcactatgcacattcctcacttaaggaatggggagacatgctccgacttcatggggtcaggggkactatcaatttaagttatttggaattcttctgtacaggagattcatttcttctccctcatttatttacttagtcatttatgtcagtatggactcgtagat

SEQ ID NO: 342764 - DNA, 201 bp, Homo sapiens
tggcacgatcttggctcactgcaacctctgtctcccaggttcacgcgattctcctgcctcagcctcctgagtagctgggattacaggtgtgcgccacaacrcctggctaatttttgtatttttagtagaggcttggtttcaccatgttggtcaggctagtcttgaactcctgacctcgtgatccacctgcctcagcctccc

SEQ ID NO: 342765 - DNA, 201 bp, Homo sapiens
cgcctcactgcaacctctgcctccctcccaggttcaagcaattctctgtctcaaacgcctgccaccacgcccagctaatttttgtatttttagtagagatrgggttttaccatcttggccaggctggtctggaactcctgacctcatgatccacccacctcagcctcccaaagtgctgggattacaggcataagccaccat

SEQ ID NO: 342766 - DNA, 201 bp, Homo sapiens
gatctcggctcagggctcacctcttcagggaaatcttccttgacttccatcttattacggactaattgtttgtgtcccctcaaaatccatctattggaacyctgattctcgctgtgatggtattaggaggtgggatctttgaaagggaattacggttagatgaggtcacgaggcgagggtccccatgatgggattagtgtc

SEQ ID NO: 342767 - DNA, 201 bp, Homo sapiens
tggaggtcagggaatagttcaggtcaaagacagaagtgtggagatgatctgtcagtgataactaaactcatgggaatgggactgactagtgaatgagtggrgaacaaagaggctaaagatgtggagccccaggggtcatcaacatgtgaatggtgggtaaaagaagagaaagggaaatgaagtcaacccatcagggaagca

SEQ ID NO: 342768 - DNA, 201 bp, Homo sapiens
aatgggactgactagtgaatgagtggggaacaaagaggctaaagatgtggagccccaggggtcatcaacatgtgaatggtgggtaaaagaagagaaagggraatgaagtcaacccatcagggaagcaggcaagatgcagcagcaagtggcctctcaaaacagtgcatccctttaaaaataggaaaagtgtatttaatgtaa

SEQ ID NO: 342769 - DNA, 201 bp, Homo sapiens
ccatcagggaagcaggcaagatgcagcagcaagtggcctctcaaaacagtgcatccctttaaaaataggaaaagtgtatttaatgtaaatgtcaaggatcragtgtgtggttcaagaggaaccaactgggaacaggaattcctgagttccatcctggccatgccactgggtacttttgtggtcttggttcattaattggag

SEQ ID NO: 342770 - DNA, 201 bp, Homo sapiens
tgcaaacaaaccagcaacagcaaaacaaaaccctatgaatgctattatgatggagaaagttgaattaaattgtttctaatgtccctcctagcccagcactstttgtctgcgtctgtttccctttttgtctatgatcctgtgatgagccacttggtaaatattcatgtcctaaatattgactaggaagaaggatttgttttc

SEQ ID NO: 342771 - DNA, 201 bp, Homo sapiens
aatcacattttaggcattttttttcttacgtgcaatattctgaaacatgaaatttacaaaaaaaaatgagttaatatgggtccctaactaaatttagaacscagcaaagtagaaagataaaaaggtctgatttaaagaatgtcacacatggaaagtgaagaagatgggaagatctcacctttggggtggcagtgattattt

SEQ ID NO: 342772 - DNA, 201 bp, Homo sapiens
agcaggggacagctcagggagtaaggaagagaggagtcattctaggtttctggtttaggcaaccagaaggatggaaagccatctgtaggcagtgctgaggwagaacagatatttggagggaaaaagttaagctgttttgaagtattaaaaattgcagactgatgtaacctggtggaaatgtagatttcacattcattaaac

SEQ ID NO: 342773 - DNA, 201 bp, Homo sapiens
ggctgaagaagatagcatgcatttgaggtcttcttaggaagtagcatcagcaggggacagctcagggagtaaggaagagaggagtcattctaggtttctgktttaggcaaccagaaggatggaaagccatctgtaggcagtgctgaggaagaacagatatttggagggaaaaagttaagctgttttgaagtattaaaaatt

SEQ ID NO: 342774 - DNA, 201 bp, Homo sapiens
ttattttgcaatgcaaaattatttcatctccatttgcaaaggcaggctaatgagactgagtggattaaaggggggacctgggaaaggaataagaattaggttttaccttctaattacttatttatttttatttgtgaaaaaaacctaagactgcattttctaggtattattggaactgtctgcctttgtatgagtcttcca

SEQ ID NO: 342775 - DNA, 201 bp, Homo sapiens
ggtccagctgcagctccagaaccagctctggacagtggttgacacatttcttgaagacctgaggataatctgaggtaattcaaatggaaaaaaaaaaaaagaaacaataacaattcagcatcagacattattgctttccaaaatttcttatgaaacactttatggaatatatggtcatccacttgaataaatggaataaaa

SEQ ID NO: 342776 - DNA, 201 bp, Homo sapiens
ccattatactataagcttgtaaactccttgaaggtaggaacaactttttttttttttttttttttgtggttcctattatagctttattctttttttttttwttttattattatactttaagttttagggtacatgtgcacattgtgcaggttagttacatatgtatacatgtgacatgctggtgcgctgcacccactaact

SEQ ID NO: 342777 - DNA, 201 bp, Homo sapiens
atactataagcttgtaaactccttgaaggtaggaacaactttttttttttttttttttttgtggttcctattatagctttattctttttttttttattttattattatactttaagttttagggtacatgtgcacattgtgcaggttagttacatatgtatacatgtgacatgctggtgcgctgcacccactaactcgtca

SEQ ID NO: 342778 - DNA, 201 bp, Homo sapiens
tggttttttgttcttgcgatagtttactgagaatgatggtttccaatttcatccatgtccctacaaaggacatgaactcatcattttttatggctgcatartattccatggtgtatatgtgccacattttcttaatccagtctatcattgttggacatttgggttggttccaagtctttgctattgtgaataatgccgcaa

SEQ ID NO: 342779 - DNA, 201 bp, Homo sapiens
cgagccttggctttcagctccatcagctcctttaagcacttctctgtattggttattctagttatacattcttctaaatttttttcaaagttttcaacttmtttgcctttggtttgaatgtcctcccgtagctcagagtaatttgatcgtctgaagccttcttctctcagctcctcaaaatcattctccatccagctttgt

SEQ ID NO: 342780 - DNA, 201 bp, Homo sapiens
ttcacactttggggaaatgtgggaatgaggaatgctgagagtgcacctttcattcctccaaattgatataggaagtggtgctggcagctgtctaactgtgraacatctgagcaggtgtgttaaaacttcatcttcacattgtcaaatgccaggtggcagcacttgcttgtttgtttgtttatcatttatgtcaaaataaac

SEQ ID NO: 342781 - DNA, 201 bp, Homo sapiens
acattcaagttcaggaggtcatagaatggtaatcagagttgagagaggaagttataagaataattttattctcttgcttaattcttaagcatattaatcctttttttttttttttaaccctggaggatgttttagtagcctccagtgtgaaaactaaatactggttctgatttacttgaaccaaaactaaacgaaacaaaa

SEQ ID NO: 342782 - DNA, 201 bp, Homo sapiens
ggggacttcttaggagatgatatgaggaagcacagatagggaaggagggaaagacagtgacaggcagaaaatagggacagttcagatggtctgaagcattaaaaaagtgtaggcgttttcctttcaaatgaagtcagagagaaagaataggaatgagagaatgaatgaggccaatctgaggctaaaaaaagaggaatcttc

SEQ ID NO: 342783 - DNA, 201 bp, Homo sapiens
ccattaaagatgaccactttatgctaagttccaaataactctcactacttaacagcagattttggactctactcaagaccttccagtttttcagagaatgagaagaacattctgtagaagcacaaaactttcaagattctctaggaattaatacaaatccaaatgcggttctgtggccaaatgtcagtttcatctagaaaa

SEQ ID NO: 342784 - DNA, 201 bp, Homo sapiens
gggtcacacagtgcttatcaggaaatccaaattctgatgcctcctgcaaagttgaaagatctggtaacactgggatcacatcccatagagcaacaatatcytaaagctggggtgcagctcccccttaaaagggagcatatattttttggttagccaagtctcactactacctgttaccttatattctcccaattttactca

SEQ ID NO: 342785 - DNA, 201 bp, Homo sapiens
gtagtcaaagacaattcctgatagaaccattatctacctgtgtggtccttcaagaattagaggaagaagaattctgtgcctctgagagattttgaaaaaaraaagagtgcttctggggggactagaggacagaatatatatccagaaggagattataagagaactaggtaaacaggaccacagaaggacttccaagagcct

SEQ ID NO: 342786 - DNA, 201 bp, Homo sapiens
ggggccagaacttaaagaattccatatcatcacttttggacattgaataccatttcaatgtttcccttattttgtgtgtctcaggttttgaaaaacgaatktctcttggccttgcttttggccctttacttgcaggtgcccaaattcagcagtgctgactgccctgttcctgagacttagattgcaactcttacattttta

SEQ ID NO: 342787 - DNA, 201 bp, Homo sapiens
ctccctaccatcatctactttggattacttaatttggtttaatcccctatttccttcctttattggttaaaaattatatttctttttttaaattactttaraattttaaatatacatatttgacaacacaaactgaagttcatcaatagctccatgattctcttaaacaatcaatgaccattctttggctacttcgagctc

SEQ ID NO: 342788 - DNA, 201 bp, Homo sapiens
gctgaaaagtaagtatcctgaacttctgtctgggtaactgaaggatagtctccacatcccaggggtgagctgtagcatattctttcttacggcatcttttwggctgactgtgggagaaatgtgtgttgatctactttattatccatataaaaacaaagttgggttaaactactactcatattagcaaaaatgtactttcag

SEQ ID NO: 342789 - DNA, 201 bp, Homo sapiens
tttttttattgctctcaccctgtaaaatgctttgaggaaattacagcaagattacaatgagaaatggttggcaatgatatttcagctgtcatttatcttayagtaatcacttttaacctgcttagccttttattattccatgtctaaaaatctcctttataatgaaattacaacattaaatggaaagtaacaacacaaaca

SEQ ID NO: 342790 - DNA, 201 bp, Homo sapiens
aaaatggtgccccaattaaaaaaaaaacaaaaaaacttgtaagagagcagtgggaaccatctgtggcctgaagtctcctggctataaatgagatcgtttgttttttttttttttagttttggtttctttctacccccaagcaggttaagccatatacatcaagcagagatttagcacaaattctcctattgcaagagttta

SEQ ID NO: 342791 - DNA, 201 bp, Homo sapiens
aaatatttctataaatgtggaccaaaggacagaatgccagtagaatatataattcctatttttaaatcatagactaattgttaccctctctctctaaactmacacacacacacacacacacacattttcttcatagttaccataatacacttgaaaaaatgaccatcttttttttccttttttagttaacgtgtaataact

SEQ ID NO: 342792 - DNA, 201 bp, Homo sapiens
tgtgtatagcaaaaattaaggacacattaaacacagatacacatctataaatttctctgatttaagtctctttggagaataagcctatatatacatatagsctatatatatattccattgtgtattccattttatagatgagtagtattccattgtgtgcatatatatatatacacacacacacacacaaaattccatcat

SEQ ID NO: 342793 - DNA, 201 bp, Homo sapiens
atatatatatgctatatatgtgtgtgtgtatatatatatatacacacacatatatatatacacacatttctctgatttaaggctatttggagaataagccwatatatatatatatgctatatatatatacacacacacacaggctatatagcctatatatatatatatatatatatatgcttattctccaaatagacttaa

SEQ ID NO: 342794 - DNA, 201 bp, Homo sapiens
cattaaagatgaccactttatgctaagttccaaataactctcactacttaacagcagattttggactctactcaagaccttccagtttttcagagaatgagaagaacattctgtagaagcacaaaactttcaagattctctaggaattaatacaaatccaaatgcggttctgtggccaaatgtcagtttcatctagaaaat

SEQ ID NO: 342795 - DNA, 201 bp, Homo sapiens
gcctatatatacgtgtgtgtgtatatatatacatatacatacatatatatagcctatatacgtgtgtgtatatatatacatatacacacatatatatacayatacacacatatatataccctatatatatgccctatatatataccctatatatatacctatatatatacacctctctatatatacctatatagagagagg

SEQ ID NO: 342796 - DNA, 201 bp, Homo sapiens
attaaagatgaccactttatgctaagttccaaataactctcactacttaacagcagattttggactctactcaagaccttccagtttttcagagaatgagaagaacattctgtagaagcacaaaactttcaagattctctaggaattaatacaaatccaaatgcggttctgtggccaaatgtcagtttcatctagaaaatc

SEQ ID NO: 342797 - DNA, 201 bp, Homo sapiens
gaggtatatatacaccctatatatacatcctatatacataccctatatatatatagggtatgtatataggatgtatatatacctctctatatatagaggtrtatatatatatatgggtatatatatagggtatatatatatgatggaattgtgtgtgtgtgtatatatatatatgcacacaatggaatactactcatctat

SEQ ID NO: 342798 - DNA, 201 bp, Homo sapiens
ctgtctgagaggcaggcaaccaggaaaaaacatgcggttaagagtacaggctctgagagaataattatgttttgggaactatagtatgtctgttattagaytctagtctcatgagttgttttttaagtttttttctgaatttagactaactctgcttattcatgtgaaaccaccagtgatctctggctgctgctcagaaga

SEQ ID NO: 342799 - DNA, 201 bp, Homo sapiens
attagattctagtctcatgagttgttttttaagtttttttctgaatttagactaactctgcttattcatgtgaaaccaccagtgatctctggctgctgctyagaagaaacaaaaggaatgggtaatgtaaaagtctgaatcaatattctaattttgtccacatattggaatcaggtagcggtcccatatcagcttggttcc

SEQ ID NO: 342800 - DNA, 201 bp, Homo sapiens
ctctcatcatcacccagtatctgagcatcacccagtatctgagcaacaaattcttttagaacaaagtgttaggagtttccattttttatctctatgatttaaaaaaaattcagtctctcatttcagatatagtattgactaagatagtaggttatttgcacatataagtctctataatttggagataatcttttttctagg

SEQ ID NO: 342801 - DNA, 201 bp, Homo sapiens
ataaggttgtatttggttatttgaaactatattgttttacctctgggtcaaagggctacttgaccataatctcccatatacctctcaaaattgaatatgaatatatatatatatatatatatatatatatatatatatatatagatagatagatagatagatttgtataagcactgaaatctagggaaaatgacatttaaa

SEQ ID NO: 342802 - DNA, 201 bp, Homo sapiens
tttttctgaatttagactaactctgcttattcatgtgaaaccaccagtgatctctggctgctgctcagaagaaacaaaaggaatgggtaatgtaaaagtcygaatcaatattctaattttgtccacatattggaatcaggtagcggtcccatatcagcttggttccatcagttgcccagttcatggaaagccttcttattt

SEQ ID NO: 342803 - DNA, 201 bp, Homo sapiens
taaggttgtatttggttatttgaaactatattgttttacctctgggtcaaagggctacttgaccataatctcccatatacctctcaaaattgaatatgaatatatatatatatatatatatatatatatatatatatatatagatagatagatagatagatttgtataagcactgaaatctagggaaaatgacatttaaat

SEQ ID NO: 342804 - DNA, 201 bp, Homo sapiens
atcgtgacttattttttattttttttctatgactatctttctccttccaactgtgaaatttcttgaaggcagaccctatgtctttgactttgatgccatgtttttttttgttttgcttgtttgttttttaagacaaagacatggcaggtaaaattcaaatttggatgacatccatgaaacatgagaagttcgtttctagaa

SEQ ID NO: 342805 - DNA, 201 bp, Homo sapiens
aactatattgttttacctctgggtcaaagggctacttgaccataatctcccatatacctctcaaaattgaatatgaatatatatatatatatatatatatrtatatatatatatatatagatagatagatagatagatttgtataagcactgaaatctagggaaaatgacatttaaatggcaaaagtctcaatatctccag

SEQ ID NO: 342806 - DNA, 201 bp, Homo sapiens
agctttttatctcacaagaactctgagatgaatctcattttccagaagtggaaactgtataaagcttaattttttttcttaatagactaggaaaaaataargttaatcaaaatctctgcaagctttaaggttgatatttaatttaaaacaaaacaaaaacagtttcaaagtagtatattcccaacgttatctgtagagtca

SEQ ID NO: 342807 - DNA, 201 bp, Homo sapiens
ccaggtcatgggggcaacgaagtccggcggagtctaaggattgagaaaaagacagtttgagaagtaaagtgggaccagggggccattgtgattgcagaggytgtgaaggccctgagctctgggagcccatgctatttattggtaatccaacaaagaaacaggtggtgagaatgtggaggttgaaaaggcacattgcattaa

SEQ ID NO: 342808 - DNA, 201 bp, Homo sapiens
ctgtatttgtgttggtaaaagaagctgtggtgtattgggattatcttggttttccataactacatttgtcttagactatttggatagtaatgtctagtgaygttgtagtggtttttaaacacagatagtttggaaactgagggggcactgtgccttctcagtgtcccctcattggacaacactatttcactgttgttcaat

SEQ ID NO: 342809 - DNA, 201 bp, Homo sapiens
tggtttttaaacacagatagtttggaaactgagggggcactgtgccttctcagtgtcccctcattggacaacactatttcactgttgttcaatgttttcascttaaagaacatcctccttccacactagaaggaggatgactattgtatgcctacgatacttgagtttatccctgtaggaaagtgaagaaaactagagcaa

SEQ ID NO: 342810 - DNA, 201 bp, Homo sapiens
ctatattgttttacctctgggtcaaagggctacttgaccataatctcccatatacctctcaaaattgaatatgaatatatatatatatatatatatatatrtatatatatatatatagatagatagatagatagatttgtataagcactgaaatctagggaaaatgacatttaaatggcaaaagtctcaatatctccagat

SEQ ID NO: 342811 - DNA, 201 bp, Homo sapiens
atattgttttacctctgggtcaaagggctacttgaccataatctcccatatacctctcaaaattgaatatgaatatatatatatatatatatatatatatrtatatatatatatagatagatagatagatagatttgtataagcactgaaatctagggaaaatgacatttaaatggcaaaagtctcaatatctccagatat

SEQ ID NO: 342812 - DNA, 201 bp, Homo sapiens
ttgttttacctctgggtcaaagggctacttgaccataatctcccatatacctctcaaaattgaatatgaatatatatatatatatatatatatatatatakatatatatatagatagatagatagatagatttgtataagcactgaaatctagggaaaatgacatttaaatggcaaaagtctcaatatctccagatatgac

SEQ ID NO: 342813 - DNA, 201 bp, Homo sapiens
ggtgtgagaacaggactttgccttggaccccaaccctgggcccaccacagcgaaatccagcatcaggcaggctggcaggcacccacagccccagactccaragtagtatccacaaactgagtcccagtcctgggtgggaccctgcagtcccagacttcaagcctgtgaggcagagttggtctcccagttgtactaccgctg

SEQ ID NO: 342814 - DNA, 201 bp, Homo sapiens
tttacctctgggtcaaagggctacttgaccataatctcccatatacctctcaaaattgaatatgaatatatatatatatatatatatatatatatatatakatatatagatagatagatagatagatttgtataagcactgaaatctagggaaaatgacatttaaatggcaaaagtctcaatatctccagatatgacacag

SEQ ID NO: 342815 - DNA, 201 bp, Homo sapiens
tttattattaagtcttaataataaaagaatgcattagtgaattccagtacttaagtggattttttcatcccttcatttttcctcagtctctggaacttgtytctgtcttgaataattttaagcaaggattatggttgtgttctctcaggtctaaatttagccaccagattcaatcatgctacaaagctgtgcaactgaatt

SEQ ID NO: 342816 - DNA, 201 bp, Homo sapiens
cctctgggtcaaagggctacttgaccataatctcccatatacctctcaaaattgaatatgaatatatatatatatatatatatatatatatatatatatakatagatagatagatagatagatttgtataagcactgaaatctagggaaaatgacatttaaatggcaaaagtctcaatatctccagatatgacacagattg

SEQ ID NO: 342817 - DNA, 201 bp, Homo sapiens
tttaaagagacaagcctaagtcatagaaaataatttgaggagagcatcagataatacagtccaagtgtcaagtgatatattgtggtctgtaagaacaggattttttttttttttgagaccattccttgttctgtcacccaggctggagtgcagtggtgtgacctgggctcactgcaacctctgcctcctgggctcaagtga

SEQ ID NO: 342818 - DNA, 201 bp, Homo sapiens
aaagtgtataaataagaaacttataaaagagaaaaggcaaatagtcaatatcacatcaagggaagttcaatttcactagtggttagagaaataaaagctcwagatatcattttgcagctatcagatcagtaaacaattttaaaattttgttttcattgagcactggcacttgtgtgtgcccctgtgtgtgggaaaacacac

SEQ ID NO: 342819 - DNA, 201 bp, Homo sapiens
gtacggagcagcagatgaatgataaaccttgggagaatcagaggatatctgtgggcaaatagtgggacgtggggctgggtatggcttatggggcaacagargacctgcagagagtcgagcttatggctcaactcacacccttccccattttgcagatgaggtgattgaggcatgaaaactatttctctgtgtcattattaa

SEQ ID NO: 342820 - DNA, 201 bp, Homo sapiens
tgggtcaaagggctacttgaccataatctcccatatacctctcaaaattgaatatgaatatatatatatatatatatatatatatatatatatatatatakatagatagatagatagatttgtataagcactgaaatctagggaaaatgacatttaaatggcaaaagtctcaatatctccagatatgacacagattgactc

SEQ ID NO: 342821 - DNA, 201 bp, Homo sapiens
aaaccgatagcccccaaatttgttccttttacagcctctcccatgtggaccaagacttcatttttgtgcactgttgtttctctactgcctggcatatagtrggtgctcagcaaaagtttagtgaatgaatcattttttattttcacagtagtttaaactgttgtaaagcagggtatttcacttttgctttattatgagaga

SEQ ID NO: 342822 - DNA, 201 bp, Homo sapiens
gcttgctgctatccccatggtaatttttctaattttgtagcttaatcgctgccctttttctatccacaccatattccctaaagcgaaaaaagcaaaggttrattcataggccactcaaacaaaggccttatctaaatccccatttgggaacattcaaccccaaacaagccatttggttattagagtgatggcttagaatca

SEQ ID NO: 342823 - DNA, 201 bp, Homo sapiens
ttagtcagtagaacataatgattaagagtagaaaatctagaccagcagtccccaacatttttggcaccagagaccaattttgtggaagacagtttttccayggaccaggggatagggatggttttaggatgattcaagcacattacatttattgtatattttatttctattattattaaaatataacatataatgaaataa

SEQ ID NO: 342824 - DNA, 201 bp, Homo sapiens
caaacaaaggccttatctaaatccccatttgggaacattcaaccccaaacaagccatttggttattagagtgatggcttagaatcaggtattgattcccargcaacgtgttttctattgtatcacatcacttgcactttttactgtgatttcaaactcctctcttaagggtctccttatttctgtccctgccaggctaaat

SEQ ID NO: 342825 - DNA, 201 bp, Homo sapiens
cttaaactctccaatccaatagttgctaatatccactttgtaaaaatataaggactgaatgaatgtgtgtaaagaactgaggcttagaaaagtattagacwtataagagccacttatgtgtttatgaaaatccaatacattattttttaacaattatgtaatattccatcataggcagtacctcattttacttattttcct

SEQ ID NO: 342826 - DNA, 201 bp, Homo sapiens
ttcactgagcctgttccttaagtcttaagagcattcagagaagtggtgttctttggcagactgaggggcagttctggagagaaggaagtgcactgggcttrgaaatatgtaaaggcaagagaagcaactgttcagggagaggcactatgctggttttcactgccaggtgaaaaagaaagtcagggaggagaagagcacagg

SEQ ID NO: 342827 - DNA, 201 bp, Homo sapiens
taaactctccaatccaatagttgctaatatccactttgtaaaaatataaggactgaatgaatgtgtgtaaagaactgaggcttagaaaagtattagacatataagagccacttatgtgtttatgaaaatccaatacattattttttaacaattatgtaatattccatcataggcagtacctcattttacttattttcctgt

SEQ ID NO: 342828 - DNA, 201 bp, Homo sapiens
ggatgataaagctaaaaagtggcagaactaggatttgaacctgtgtatttccatttcaaatttcatgttttttccccagggtttggtaggattaaagttgrctcttcatgaaatgtgaccacttctgtgtgcctatcctaccaatgggacatagttgtcttttcatattaagggaagaggtctccagcaactgtttttacc

SEQ ID NO: 342829 - DNA, 201 bp, Homo sapiens
ctacaaagaacttaaacaaatttacaagaaaaaaatcaaacgaccccatcaaaaagtgggcgaaggatatgaacagacacttctctgaagaagacatttaygcagccaacagacacatgaaaaaatgctcatcatcactggccatcagagaaatgcaaatcaaaaccacaatgagataccatctcacaccagttagaatgg

SEQ ID NO: 342830 - DNA, 201 bp, Homo sapiens
aaggacagaaaaccaaacaccgcatgttctcactcataggtgggaattgaacaaagagaacacctggatacagggtggggaacatcacacaccggggcctkttgggggtggggagcggggagggatagcattaggagaaatccctaatgtaaatgacgaattaatgggtgcagcacaccaacatggcacatgtatacatat

SEQ ID NO: 342831 - DNA, 201 bp, Homo sapiens
atgggtttcaccatgttggccaggctagtctcgaactcctgacctcaggtgatccatctgcctcagcctcccaaagtgctgggattacaaatgcaagccaycatgactggcaatgtatatgatttgtcagttaaaaaattaaaaaataagaatcagaataagaaaagaaatgtcaggccagatgtggtggctcatgcctac

SEQ ID NO: 342832 - DNA, 201 bp, Homo sapiens
tagcaagacctacttgttcctgcatcccaggccctgcctcttctccagcatcactgcacgtccacattgcctgggccctttatgtttcaaccatatggccrtggttttttttcacttcaggaacttcctatataggattccctttgacaggaatatatttctcaccctcacttaattcctatacatccaaagatcagtttt

SEQ ID NO: 342833 - DNA, 201 bp, Homo sapiens
gtgcttcaatgctgtggctaaagcaatggataggaaaatggatgaggatgccaaaaattgcctctctgtgctagagtttagctactttgcctcccccatcrctctctaccttttcgtataagatgcagttttagatcctgatacagctcagcttttgcttttttcctacagatcaggaaatgtgggtttctagtcctggct

SEQ ID NO: 342834 - DNA, 201 bp, Homo sapiens
tggacagtccaaagttgtgattggagatccacatctctgggagcagaaaacgctagatactagaagaatgtaatccataaacagtcagaaacaagtcatgygtaagggctagtgaatgaagagatggtttgtggcctaattggaataaaaggaaaggtagcaatggatgtagctaaaaggtaaacacctttagataagatg

SEQ ID NO: 342835 - DNA, 201 bp, Homo sapiens
agaagaagttgatgtggtgactaagtgttcaaacttggggccagacacttgggtataaattccagctctaatacttatcagctgtgtgaacctgggcactytgcttaaactctctgtaaatgtttctcatctataaaatgcagtttataattggatctatttcatagagttgttatgagttttaaataaatgaatgctatt

SEQ ID NO: 342836 - DNA, 201 bp, Homo sapiens
tagaatgatagaatggtggaatggcctttggaagtcacaattacaatgccaacttggtgacaatactttgcagggctggggcagagttcgccagaaggccrtgtatgctccgaatcagtgtccaatatacagtactgtttctcccatagccaggattcatgagtccaggaatcaaggaatggaagtggaagtggcaccact

SEQ ID NO: 342837 - DNA, 201 bp, Homo sapiens
ctcttaaatagctcacaggctctagcaattggccctatagtacctaacggataaaacagccctgctttcttctggagttcagagtgttttagtatcacccrtagactctgggcttgggaagccctttgtttcccccagtacaacaaggccctgaggtaattttcagatttccctctgttaggtattaggcaggaatatggt

SEQ ID NO: 342838 - DNA, 201 bp, Homo sapiens
ataccgaatatcagaagggagaagaaggagaaaaaggaatttcctaagtggcatgggagtaagctgaggcccggccttttctttagaatctagtttaaggmctgtaaacgcctgattctacagcacagatcagcaaatgaatcctgctttatggaacaggaacgtacactagttctctctagaatttttgttttctttttt

SEQ ID NO: 342839 - DNA, 201 bp, Homo sapiens
agtacagcatcaaatatatcacaaaaccccatacaacttaatcccaccatagcccatccataatgattaggcaaacttcttttgttgggctaaaatcctatttttttttagattaagtggattaatctatttttaaatccttaagtaagttatctttattttggacttacaacatcatacattagggttttaatgtggata

SEQ ID NO: 342840 - DNA, 201 bp, Homo sapiens
cattcttttgagtttctggttagcctttccagaggaagcaatcggatatgcatttatctcagtcagcagggggatgactttgagttctgtctgtcctttgyccacaaggcaattccttgtgagggaggcatggagctttttaatcgttttttagaaatggaatgagagacaggttttccctaagaagttcccagcttgact

SEQ ID NO: 342841 - DNA, 201 bp, Homo sapiens
ttgaatgtcctggaaacttaaggagcctctgagtgccatacctcaatggtaccacttgggcatgcaggctgatgagcctgacttgtttatgtagcacagcrgttaagagcacaggctctagagttaggctgttaacctgaattaattctgaattgattcagaattctaaattaaatgaattcttaattctggctctgccac

SEQ ID NO: 342842 - DNA, 201 bp, Homo sapiens
gaaccagaaataccatttgagccagcaatcccattactgggtatatacccaaaggattataaatcattctactataaagatacatgcccatgtatgtttaytgcagcactgttcacaatagcaaagacttggaaccaacccaaatgcccatcaatgatagactggataaagaaattgtggcacatatataccatgaaatac

SEQ ID NO: 342843 - DNA, 201 bp, Homo sapiens
gttggccaggctagtctcgaactcctgacctcaggtgatccatctgcctcagcctcccaaagtgctgggattacaaatgcaagccaccatgactggcaatrtatatgatttgtcagttaaaaaattaaaaaataagaatcagaataagaaaagaaatgtcaggccagatgtggtggctcatgcctaccatcccagcgcttt

SEQ ID NO: 342844 - DNA, 201 bp, Homo sapiens
tttgttttgttcctgtaaatgtgtttaagttctctgtagattctggatattagccctttgtcagatgagtagattgcagaaattttctcccattctgtagrttgcctgttcactctgatgatagtttattttgctgtgcagaagctcttgagtttaattagatcccatttgtcaattttggcttttgttgccgttgctttt

SEQ ID NO: 342845 - DNA, 201 bp, Homo sapiens
cagaaaaccaaacaatgcatattctcactcataagtgggagttgaaaaatgagaacacctggacacagggagtggaacatcgcacaccagggcctgtcagkgggtaggggccagggggagggatagcattaggagaaatacctaatgtacatgacaggttgatgggtgcagcaaaccaccacggcacatgtatacctatgt

SEQ ID NO: 342846 - DNA, 201 bp, Homo sapiens
ccttgttatactcccacagccataattgcttctttcacactgacatcttcaacccttccaccagtacttgcacccagcatggcctcaccatctgctcatgtgacaccaacattatggcctccctccatgcattcctaaatggagctgaggaaggcaacagagatagcaagtgtgccagctggcaccagtgacataaacata

SEQ ID NO: 342847 - DNA, 201 bp, Homo sapiens
tataaattactttgggcagaatggccattttcacgatattgattcttcctacccacgagcagggaatgttcttccatttgtttgtgtcctcttttatttcsttgagcagtggtttgtagttctccttgaagaggtccttcacatcccttgtaagttggattcctcagtagtttattctctttgaagcaattgtgaatggga

SEQ ID NO: 342848 - DNA, 201 bp, Homo sapiens
aacgtgttttctattgtatcacatcacttgcactttttactgtgatttcaaactcctctcttaagggtctccttatttctgtccctgccaggctaaatggyccagttttgttttgtttggttttcctacggtgtatttttctctctcacttttaccaactacctcaagatcaatgacacattatcctcttccacttaaatg

SEQ ID NO: 342849 - DNA, 201 bp, Homo sapiens
tttgtagttctccttgaagaggtccttcacatcccttgtaagttggattcctcagtagtttattctctttgaagcaattgtgaatgggagttcactcatgrtttggctctctgtctgttactggtgtgtaagaatgcttgtgatttttgcacattgattttgtatcctgagactgctgaagttgcttatcagcttaaggag

SEQ ID NO: 342850 - DNA, 201 bp, Homo sapiens
tgtgaggcagagttggtctcccagttgtactaccgctggcttgacttcagtgtctataggatctggacaggccagagcagcaggcaggcctcagcagcccmaggttttgggcataccccacccctgtagtgaccctgcgattcagaaccaagcttaatggcctgtccaaaatctctgaatggactgttgaagagcttttcc

SEQ ID NO: 342851 - DNA, 201 bp, Homo sapiens
gcaagctccgactcccgggttcacaccattcttctgcctcagcctcctgagtagctgggactacaggtgcctgccaccatgcctggctattttttttgtatttttttttttttttagtagagacggggtttcactgtgttagccaggatggtcttgatctcctgacctcgtgatccgcccacctcggcctcccaaagtgct

SEQ ID NO: 342852 - DNA, 201 bp, Homo sapiens
ttagaaggatccttagagactactatgagcagctatatgtcaataaattgcaaaacctagagaaaatagataaactctagacatatacaacttaccaagaytgagccatgaggaaatccaaaacttgaatagatcaataacaagtaataagatcaaagtcatagtaaaaagcttctcagcaaagaaaagcccaggacctga

SEQ ID NO: 342853 - DNA, 201 bp, Homo sapiens
caagctccgactcccgggttcacaccattcttctgcctcagcctcctgagtagctgggactacaggtgcctgccaccatgcctggctattttttttgtatttttttttttttttagtagagacggggtttcactgtgttagccaggatggtcttgatctcctgacctcgtgatccgcccacctcggcctcccaaagtgctg

SEQ ID NO: 342854 - DNA, 201 bp, Homo sapiens
ctgaggtacctggttcatctcactagggagtgccagacagtgggcgcaggacagtgggtgcagcgcaccaagcgcgagccaaagtagggcgaggcattgcytcactcgggaagtgcaaggggtcagggagttccctttcctagtcaaagaaaggggtgaaagacggcacctggaaaatcgggtcactcccaccctaatact

SEQ ID NO: 342855 - DNA, 201 bp, Homo sapiens
tgcctcagcctcctgagtagctgggactacaggtgcctgccaccatgcctggctattttttttgtatttttttttttttttagtagagacggggtttcacygtgttagccaggatggtcttgatctcctgacctcgtgatccgcccacctcggcctcccaaagtgctgggactacaggcgtgagccaccgtgcctggccca

SEQ ID NO: 342856 - DNA, 201 bp, Homo sapiens
ttggcattctaggcaaggggacaatgaacccattgttctttttttttttttttttttttttttgccttcttaaatagggcaaatatctcttccatttaccyctatcatcaaaggaggcttagtatggggtcctcagagactcaccttccttccactcctcctttgttgtttggaagagttatcgctagcccccttctcgcc

SEQ ID NO: 342857 - DNA, 201 bp, Homo sapiens
tgcctggcccatcaatacctaatttattgagagtttttagcatgaagggctgttgaattttgtcaaaggccttttctgcatctattgagatgatcatgtgsttttggtctttggttctgtttatacgctggattacattgactgatttgtgtatgttgaaccagctttgcatccctgggatgaagcccacttgatcttggt

SEQ ID NO: 342858 - DNA, 201 bp, Homo sapiens
attgagagtttttagcatgaagggctgttgaattttgtcaaaggccttttctgcatctattgagatgatcatgtggttttggtctttggttctgtttataygctggattacattgactgatttgtgtatgttgaaccagctttgcatccctgggatgaagcccacttgatcttggtggataagctttttgatgtgctgctg

SEQ ID NO: 342859 - DNA, 201 bp, Homo sapiens
tgtatgttgaaccagctttgcatccctgggatgaagcccacttgatcttggtggataagctttttgatgtgctgctggatttggtttgccagtattttatwgaggatttttgcattgatgttcatcagggatattggtctaaaattctctttttttgttgtgtctctgccaggctttggtatcaggatgatcctggcctca

SEQ ID NO: 342860 - DNA, 201 bp, Homo sapiens
atccatatgaaagctttttattctcgcatgttgtattaaagaaaataatttcaccattcatggttgctattcatgaaaactttaagaaagcatgtgtccaratttgtgatgtttaggaattcttaactggtttaaccaagtagggtgagaatacacaaactcatataactaccctgacaaatgcagaaaatcaaaggtagc

SEQ ID NO: 342861 - DNA, 201 bp, Homo sapiens
gctgtatgaatacaaatgaaggggaaaaaaatctactccatgtgagaagacagggaaagccaggaagacgacttgccaactgaaaggagcctggacagatsatatgaagcacttaatttttcccaggacaattgctaggagctttacaaatatatcattacttgaacaaccaccctattgaatagatactataattcctat

SEQ ID NO: 342862 - DNA, 201 bp, Homo sapiens
aaccctgtctccaaaaaaaaaaaaaaaaaaaaagaaagaaagaaagaaaaaaaagaaatagctgcagaagcaaactaatagaatttggtatgctacatacrgtaaaatagttatatacaaagaatagaaaaaatatgagacataataattaattctgtcttatagggtttgggaatcagagaaagggaatacctgagggag

SEQ ID NO: 342863 - DNA, 201 bp, Homo sapiens
ctgggaggcagaagttgcagtgagccaagtttgcaccattgcactccagcctgggtgatgggagtcaaaccctgtctccaaaaaaaaaaaaaaaaaaaaaraaagaaagaaagaaaaaaaagaaatagctgcagaagcaaactaatagaatttggtatgctacatacagtaaaatagttatatacaaagaatagaaaaaat

SEQ ID NO: 342864 - DNA, 201 bp, Homo sapiens
tcaatacctaatttatttatttattgagacagagtcttgctctgtttcccatgctggagcgcagtggcacaatgttggctcactgcaagctccgactcccrggttcacaccattcttctgcctcagcctcctgagtagctgggactacaggtgcctgccaccatgcctggctattttttttgtatttttttttttttttag

SEQ ID NO: 342865 - DNA, 201 bp, Homo sapiens
ttcagtatgatattggctgtgggtttgtcataaatagctcttattattttgagatatgtcccatcaatacctaatttatttatttattgagacagagtctygctctgtttcccatgctggagcgcagtggcacaatgttggctcactgcaagctccgactcccgggttcacaccattcttctgcctcagcctcctgagtag

SEQ ID NO: 342866 - DNA, 201 bp, Homo sapiens
tgcacaataaacaaggtgatggtatattgtaaaaaaaaaatacctcatttaataactactgcctttttagtgcttactatgagccaggaactatgcttagkgttttatatatttatactaatttgctgacagttttctcaatagctcagaaggtgtccttagtattcccagttcacagagaaagacactgagatttagaga

SEQ ID NO: 342867 - DNA, 201 bp, Homo sapiens
cttattagtcattagagaagtgcaagttaagaatacaatacacctactagtactatatttactagctgaaagactacaccaagaatggatcctgtgagtakttaagaattctaaaaccctgctgctaagcatggaaaagaaaaaccactttaaacacaatttggtgttatcttacaaagttgagtgtgtacattaacctat

SEQ ID NO: 342868 - DNA, 201 bp, Homo sapiens
tgacttcctcttttcctaattgaatacctttatttctttctcctgcctgattgccctggccagaacttccaacactatgttgaataggagtggtgagagakggcatccctgtcttgtgccagttttcaaagggaatgcttccagtttttgcccattcagtatgatattggctgtgggtttgtcataaatagctcttattat

SEQ ID NO: 342869 - DNA, 201 bp, Homo sapiens
ttatttgaagattatgcataatctcagaagatgtgcatgggttcaagttgacaaggggtagacttgtgatggttaatactgagtgtcaacttgattggatkgaaggatgcaaagtattaatcctgagtgtgtctgtgaaggcattgccaaaggatattaacatttgagtcagtgggctggggaaggcaaacccaccttaat

SEQ ID NO: 342870 - DNA, 201 bp, Homo sapiens
ggtcctgtctgttagaaggaaaactaacaaacagaaaggacatccacaccaaaaacccatctgtacatcaccatcatcaaagaccaaaggtagataaaacsacaaagatggggaaaaaacagaacagaaaaactggaaattctaaaaagcagagcacctctcctcctccaaaggaacacagctcctcaccagcaacagaac

SEQ ID NO: 342871 - DNA, 201 bp, Homo sapiens
ttttatttcctttatcatgtgacataagatttattgacttcatatcagcatttaagtattgttaactttatgtatttgggttggggattggtacatttccrgttgtatgaagggtagttgtattacattagacataattatgaccttattactgtctttatttgaagattatgcataatctcagaagatgtgcatgggttc

SEQ ID NO: 342872 - DNA, 201 bp, Homo sapiens; identical to SEQ ID NO: 72391

SEQ ID NO: 342873 - DNA, 201 bp, Homo sapiens
aggtcttcttgaccttttgtatcttgtggaacacacagaaaattttaatattttaagaaacagtggagtaaatgaatgaataaagctgatcacagctgtcytgaggaatgtatgagtcaatttactagcacagctgaaacctatttatgtgatgcagttgttgggaggttctaattcagcctatcaactaactcatcagtc

SEQ ID NO: 342874 - DNA, 201 bp, Homo sapiens
agcacctctcctcctccaaaggaacacagctcctcaccagcaacagaacaaagctggatggagaatgactttgacgagttgagagaagaaggcttcagacratcaaactactctgagctacaggaggaaattcaaatcaaaggcaaagaagttgaaaactttgaaaaaaatgtagacgaatatataactagaataaccaat

SEQ ID NO: 342875 - DNA, 201 bp, Homo sapiens
cgtagccagggagcaacctttgcttgggtctcaagaaattgtgatgaggttacttttggttcctctgctcagtgcagggactgaatctattcccctttgawtgtcatccttggtgagccagaatattacagatctgaccaagactcctaccctagaactccctagattaccctaattatcaagaggaaagttattgagtca

SEQ ID NO: 342876 - DNA, 201 bp, Homo sapiens
aaactgcatcaactaacgagcaaaataaccagctaacatcataatgacaggatcaaattcacacataacaatattaactttaaatgtaaatggactaaatkctccaattaaaagacacagactggcaaattggatagagtcaagacccatcagtgtgctgtattcaggaaacccatctcatgtgcagagacacacataggc

SEQ ID NO: 342877 - DNA, 201 bp, Homo sapiens
tgctgcttcctactagggatcaggattgggcttgtggctgggattcaaggatgcaggggaggaaggatgctgaagctggtaccatgactggcctagaaggygtagccagggagcaacctttgcttgggtctcaagaaattgtgatgaggttacttttggttcctctgctcagtgcagggactgaatctattcccctttgat

SEQ ID NO: 342878 - DNA, 201 bp, Homo sapiens
cctcataaaatgagttagggaggattccctctttttctattgattggaatagtttcagaaggaatggtaccagctcctccttgtacctctggtagaattcrgctgtgaatccatctggtcctggactttttttggttggtaggctattaattattgtctcaatttcagacctgttattggtcttttcagggattcagcttc

SEQ ID NO: 342879 - DNA, 201 bp, Homo sapiens
agatctaccaagcaaatggaaaacaaaaaaaggcaggggttgcaatcctagtctctgataaaacagactgtaaaccaacaaagatcaaaagagacaaaaarggccattacataatggtaaagggatcaattcaacaagaagagctaactatcctaaatatatatgcacccaatacaggaccacccagattcataaagcaag

SEQ ID NO: 342880 - DNA, 201 bp, Homo sapiens
ggggttgcaatcctagtctctgataaaacagactgtaaaccaacaaagatcaaaagagacaaaaaaggccattacataatggtaaagggatcaattcaacaagaagagctaactatcctaaatatatatgcacccaatacaggaccacccagattcataaagcaagtcctgagtgacctacaaggagacttagactcccac

SEQ ID NO: 342881 - DNA, 201 bp, Homo sapiens
attggaatagtttcagaaggaatggtaccagctcctccttgtacctctggtagaattcggctgtgaatccatctggtcctggactttttttggttggtagrctattaattattgtctcaatttcagacctgttattggtcttttcagggattcagcttcttcctggtttagtcttgggagggtgtatgtgtcgaggaattt

SEQ ID NO: 342882 - DNA, 201 bp, Homo sapiens
gggttgcaatcctagtctctgataaaacagactgtaaaccaacaaagatcaaaagagacaaaaaaggccattacataatggtaaagggatcaattcaacaagaagagctaactatcctaaatatatatgcacccaatacaggaccacccagattcataaagcaagtcctgagtgacctacaaggagacttagactcccaca

SEQ ID NO: 342883 - DNA, 201 bp, Homo sapiens
catcaatgatagactggattaagaaaatgtggcacatatacaccatggaatactatgcagccataaaaaggatgagttcatgtcctttgtaggaacatggwtgaagctggaaaccatcattctcagcaaactatcgcaaggacaaaaaaccaaacaccgcatgttctcactcataggtgggaattgaacaaagagaacact

SEQ ID NO: 342884 - DNA, 201 bp, Homo sapiens
ttcagggaacaaaatggaacccctgtttctggaccacttaagcagccaaggcactagattagagactaagatgtttgctgcttcctactagggatcaggaytgggcttgtggctgggattcaaggatgcaggggaggaaggatgctgaagctggtaccatgactggcctagaaggcgtagccagggagcaacctttgcttg

SEQ ID NO: 342885 - DNA, 201 bp, Homo sapiens
ggttgcaatcctagtctctgataaaacagactgtaaaccaacaaagatcaaaagagacaaaaaaggccattacataatggtaaagggatcaattcaacaagaagagctaactatcctaaatatatatgcacccaatacaggaccacccagattcataaagcaagtcctgagtgacctacaaggagacttagactcccacac

SEQ ID NO: 342886 - DNA, 201 bp, Homo sapiens
gaaaaaaaagaaatagctgcagaagcaaactaatagaatttggtatgctacatacagtaaaatagttatatacaaagaatagaaaaaatatgagacataataattaattctgtcttatagggtttgggaatcagagaaagggaatacctgagggaggttttaatgaatgaatggtatgtcaatgggaagaggagaggggaa

SEQ ID NO: 342887 - DNA, 201 bp, Homo sapiens
aaaaaaaagaaatagctgcagaagcaaactaatagaatttggtatgctacatacagtaaaatagttatatacaaagaatagaaaaaatatgagacataataattaattctgtcttatagggtttgggaatcagagaaagggaatacctgagggaggttttaatgaatgaatggtatgtcaatgggaagaggagaggggaag

SEQ ID NO: 342888 - DNA, 201 bp, Homo sapiens
atacaaactatcatcagagaatactacaaacacctctatgcaaataaactagaaaatctagaagaaatggataaattcctcgacacatacaccctcccaaractaaaccaggaagaagttgaatctctgaatagaccaataacaggctctgaaattgtggcaataatcaatagcttaccaaccaaaaagagtccaggacca

SEQ ID NO: 342889 - DNA, 201 bp, Homo sapiens
aaaaaaagaaatagctgcagaagcaaactaatagaatttggtatgctacatacagtaaaatagttatatacaaagaatagaaaaaatatgagacataataattaattctgtcttatagggtttgggaatcagagaaagggaatacctgagggaggttttaatgaatgaatggtatgtcaatgggaagaggagaggggaagg

SEQ ID NO: 342890 - DNA, 201 bp, Homo sapiens
cctggcacagacacaacaaaaaaagagaattttagaccaatatccttgatgaacattgatgcaaaaatcctcaataaaatactggcaaaccgaatccagcwgcacatcaaaaagcttatccaccatgatcaagtgggcttcatccctgggatgcaaggctggttcagtatacacaaatcaataaatgtaatctagcatata

SEQ ID NO: 342891 - DNA, 201 bp, Homo sapiens
aaaaaagaaatagctgcagaagcaaactaatagaatttggtatgctacatacagtaaaatagttatatacaaagaatagaaaaaatatgagacataataattaattctgtcttatagggtttgggaatcagagaaagggaatacctgagggaggttttaatgaatgaatggtatgtcaatgggaagaggagaggggaaggc

SEQ ID NO: 342892 - DNA, 201 bp, Homo sapiens
tcccattcacaattgcttcaaagagaataaaatacctaggaatccaacttacaagggacgtgaaggacctcttcaaggagaactacaaaccgctgctcaakgaaataaaagaggatacaaacaaatggaagaacattccatgctcatgggtaggaagaatcaatatcgtgaaaatggccatactgcccaaggtaatttata

SEQ ID NO: 342893 - DNA, 201 bp, Homo sapiens
ggacaatgaaaaagagttttctggtgaccattaggaaagcaattttagtatagcagtgtgctcagaaaccatttcagagagttcagtggggaatgggaggaaaaaaaaaacgtgcaatgcgtaactatcagtcacttatgaagtctagcaggggaaagagttatggggctgtaggtacagtgagaaggtacagtgagtctc

SEQ ID NO: 342894 - DNA, 201 bp, Homo sapiens
cagcaaggcagcctacaaagaaataatcagaaatgtaagaggcaaatcaagagagtggtgtcacagaagtcaaggtaaatgaaacttataggggccgggcrtggtgactcatgcctgtaatctctgcactttgggaggctaaggtgggtggatcacttgaggctgggagttgagaccagcttggccaacatggtaaaacac

SEQ ID NO: 342895 - DNA, 201 bp, Homo sapiens
ggtttgggaaatgagaacaggagaggagagagagaggagaaaggatgcctttctccaagagcatgcaaagatatatttgaggacagatacagcagatgctyttcttccccacaactacatgactgaaatgagtcctctaaaactcagagaattcagatccttgaatgtcctggaaacttaaggagcctctgagtgccatac

SEQ ID NO: 342896 - DNA, 201 bp, Homo sapiens
ggtggatcacttgaggctgggagttgagaccagcttggccaacatggtaaaacaccatctctattaaaaaaaaattaaaaattagctgggcctggttgtayatgcctgtagtcccagctactggggaggctgaggcacaagaatcacttgaacctgggaggtggaggttgcagtgagccaagattgcaccattgcactcca

SEQ ID NO: 342897 - DNA, 201 bp, Homo sapiens
cttgtattaactggaaaaaacattatctgtctgtatttttttttttctgctgtaaaagcaagggaatatctctaggtttgagacagtcttttgggtctagtttttttttttttttgcatggattgacatgtaatatgtgacacagacagttcctggccaggctagtttgaaacaatgtattttagcaattaaaaatgaatt

SEQ ID NO: 342898 - DNA, 201 bp, Homo sapiens
ccgtggccatagtttatgttctagctttgacacttgttagccaggtagtcacctgaggcaagttacttaacctctctgagcctcagtatccacaattgttaaaaaaaaaaaaaagataatattatttttaaaggactggaagaaaagcataatgagttatttcatgttatatcatatggtactgggtatccagcaaacaat

SEQ ID NO: 342899 - DNA, 201 bp, Homo sapiens
atatgtatgtgtgtatatatacatatgtatatatgtatatgcatacacatatatacatatgtatgtgtatatacatatacacatacatatatacatacatmcatcaatatatcagtcacagtttctttatccactcgttgactgatgggtatttcggctgtttctacatttttgcaattgcgaatttcgctgctataaaca

SEQ ID NO: 342900 - DNA, 201 bp, Homo sapiens
agaaaatcttcacaatccatacatccgtcaaaggactaatatccagaatctacaaggaacgcaaacaaattagcaagaaaaacaaacaaacaaacaaacartaccatcaaaaaataggctaaggaaatgaatagacagttcttcctttgcatttgtatttgtctgctctcttgcgtattttgggcagcccttgctgctgac

SEQ ID NO: 342901 - DNA, 201 bp, Homo sapiens
agtgcattttttatcaaaagggagcagatggaaccagctagtgtctaagaacaaagggtttgggaaatgagaacaggagaggagagagagaggagaaaggrtgcctttctccaagagcatgcaaagatatatttgaggacagatacagcagatgctcttcttccccacaactacatgactgaaatgagtcctctaaaactc

SEQ ID NO: 342902 - DNA, 201 bp, Homo sapiens
ttcctccagttcatatatcgaagccctaacacttcatctctcagaatgtgactctgttttaagccagggcctctaaagaactaaagagcttctgcacagcraaataaactaccattagagtgaacaggcaacctacagaatgggagaaaatttttacaatctacccatctgacaaagggctaatatccagaatctacaaag

SEQ ID NO: 342903 - DNA, 201 bp, Homo sapiens
agtactttgccaaaaaccacactgcaaatggcaaatcttactactccctgttagatgaaattgaactgaagtaaaactcaagttcttaacaataatggtgmatttttcctaacatatgataagcaggaggattctatgttgtatatggatgagtatttaaaaacatttattgaacaaggcttagaaaagaatccaaccctt

SEQ ID NO: 342904 - DNA, 201 bp, Homo sapiens
gtatggttggcagctcctattcttctggtgggacgctagttttgaggtgtctagaatgtcacatctggagcgtaaaagacttcactatttctgggataacrtttagcatacttacaaattagttgtttaggtctagaaagtgcctcgtgtgaaagtttctccatcttgacgtgttggttgtacctgaaaggcgggttgggc

SEQ ID NO: 342905 - DNA, 201 bp, Homo sapiens
gtagagatagtgttttgccacattgcccaagctggtcttgaactcctgagctcaagtgatttgcccacctcagcctcccagagtgccgggattacaggcakgagccaccacacatggctagaacaggaaaaattgaaagatgaacttcaattgttcagtgtatggcaaataactaaaagattttggaaggtggtagagatg

SEQ ID NO: 342906 - DNA, 201 bp, Homo sapiens
cctgtgaggagtccaggactgggacaaagggagatagaagagggacaaataatggtcacttaggagaggtgtgactagaggttaatgaaggcaggaagagrttgactggaggggacgtacactacagccttcactgaatttctatgccccttctgcttgtatggttggcagctcctattcttctggtgggacgctagtttt

SEQ ID NO: 342907 - DNA, 201 bp, Homo sapiens
ttgatcttatactttaatattattttctttttaataagcatagttttcagctgctgggaagaatatagatctaattatttcccctgagtttatgtacattrtgaaagaaaatttgctgtaattaaatcattaaagcactataacttgtagtaacatgagaacgcaggaaagtgaacaggttgaatttggcctccaatatca

SEQ ID NO: 342908 - DNA, 201 bp, Homo sapiens
aataaaaaaaaagggaaaaagctgggtgcagtgtctcacgcctgtaatcccagcactttgggaggccgaggcgggtggatcacgaggtcaagagatcgagrccatcctggccaacatggtgaaaccccgtctctactaaaaatacaaaaaaatagccaggtgtggtggcgggcgcctgtagtcccacctactcaggaggct

SEQ ID NO: 342909 - DNA, 201 bp, Homo sapiens
aggccagctccatgtgctgaccgagaagttcaatctacccaggtagtctaaagataagtgacagtgcccaggcacccaactttctttctgagccatgagtstagatcataaaagaaaaatgtcaagagcaaggcaggacatgggcctataagcagatggagataatttctagaattcagcaacaggaaccgtagttgaagc

SEQ ID NO: 342910 - DNA, 201 bp, Homo sapiens
tgatagtatgaaagaaagaaagcctttccctagattttctcctgccgtctctgtagtctctgtcttctgaggagaagcttgagttttccatgaggtaaaagtgtgtgtgtgtgtgcgtgcatgtgtgcatgcgcaagtgtgtgtatgtgtgtgagaaaaagagagagattaaacatactccatatgaaggttatcaacagt

SEQ ID NO: 342911 - DNA, 201 bp, Homo sapiens
aaacctgttgatataaagtgaggtcttactgtcacctcttgtgatgtgtgtatataatgccttcttgggcacattggctgtctgaatcattcctcatcatwgctactcacacagaaagttaaaaaagaattcaatcccagcatgaaccttgtcataaattctattacaacttattatttcaatttgtttccatgtgacctt

SEQ ID NO: 342912 - DNA, 201 bp, Homo sapiens
gatagtatgaaagaaagaaagcctttccctagattttctcctgccgtctctgtagtctctgtcttctgaggagaagcttgagttttccatgaggtaaaagtgtgtgtgtgtgtgcgtgcatgtgtgcatgcgcaagtgtgtgtatgtgtgtgagaaaaagagagagattaaacatactccatatgaaggttatcaacagtg

SEQ ID NO: 342913 - DNA, 201 bp, Homo sapiens
gggctgtctaatatactggaaccaccacctccaaaaatactttcctgtacagctttttcagaattctagtctctcagggcatttcctttcttctcctgcartttgttactctggaattgatccttggcttctttcctccctgcttaattaatgatcctcatctcttgagtcattagaaaccactgtggccctggagatgag

SEQ ID NO: 342914 - DNA, 201 bp, Homo sapiens
agaaagaaagcctttccctagattttctcctgccgtctctgtagtctctgtcttctgaggagaagcttgagttttccatgaggtaaaagtgtgtgtgtgtstgcgtgcatgtgtgcatgcgcaagtgtgtgtatgtgtgtgagaaaaagagagagattaaacatactccatatgaaggttatcaacagtggacccctctca

SEQ ID NO: 342915 - DNA, 201 bp, Homo sapiens
gagcaaagtcttacacagtggcaggtaagagagcttgtgtagggaaattcccctttgtaaaaccataagatctcctgagacttattcactatcataagaayagcatgggaaagacctgcccctatgattcaattacgtcccaccagatccctcctacaacacatgggaattatggaagctacaattcaggatgagatttgg

SEQ ID NO: 342916 - DNA, 201 bp, Homo sapiens
gctctacccaaggtctcagactttccgggcctaaaaggaacatggtccttcctttgctcaccccaccaacctctgctaattgttactctgttgcatgcatstaggcttcctaatgaaggtctgctgtgtggacagcactgagcagtctggttctgtacttttcccagttctgaagggatcctggaatgaggcctgttattg

SEQ ID NO: 342917 - DNA, 201 bp, Homo sapiens
tagagggagaatgaggtatttgtgatgcaccagatttaagccataggaacaaagctgaaagactagtcttatgaacaaggacaatgtactgtgggagcccygaggaaacctggaattacccctgggtctaaaaagtcacttaagaaaaatgtgggggcccaggtatcctcacagtgttcctgagtctgggtagtttgcaaa

SEQ ID NO: 342918 - DNA, 201 bp, Homo sapiens
ggagaccaaatggtgtttcatctgactctaagggcaaaagtagctgtttttagcttctgaggcttgtaaaaatacacacaaggagcgtagggtgaagtaasagagagatggcttgagttcctttggaaaagccctgtatgatctgacatggtctgtgagttaccagtgcaggttccaccgcgctttgttggtgtggcctgc

SEQ ID NO: 342919 - DNA, 201 bp, Homo sapiens
ggaggatgtgctcagaatagcacctgtgagggggtaggaagctgactggacagaggagggagtgaaactgcagtgcatcaccacagaggccttagacaatsccacgaggagctccaaagtggggaaagaccttcagagtcatcccaaattgaggcaagggagctgcatctaggaacccccttatatgacctgggtaggggg

SEQ ID NO: 342920 - DNA, 201 bp, Homo sapiens
tgtccaatatacagtactgtttctcccatagccaggattcatgagtccaggaatcaaggaatggaagtggaagtggcaccactcaccatcacccctagtgrtccactagcaaaatttttgcttcctgttcctgcgacattatgttctgctggcctagaggtcttagttccagagggaggaacactgtcaccaggagataca

SEQ ID NO: 342921 - DNA, 201 bp, Homo sapiens
cctctcccagcctctaacttggttttccaacttgtaaaaaatctaagatacagacaatgctcacattcagaacattgattgggaagcttctttctaattcaaaatgacaggcatatctcagagataatgcagctttggttccagaccattgcaacagtgaatatcacagtaaagctaggcacacaattttttggtttccca

SEQ ID NO: 342922 - DNA, 201 bp, Homo sapiens
agcccaggagtttgagaccagactgggcaacatggcaaaaccctgtctctactaaaaaaatacaaaaattagcccggcatggtagcgcatgcctgtagtcycagctactccagaggctgaggtgggaggagtgtttgagcctgggagattaagactacagcgtgctgtgatcgcgccactgcactctaggctgggtgacag

SEQ ID NO: 342923 - DNA, 201 bp, Homo sapiens
tctctctcactgtgttaattttttattgctgctctaacaaattgtcgcagaattagtgatttaaatgtacaactttagtatcttacatttctggaggtcartagttcacaatgaccctcactgagccaaagtcaagatgttggcagggcggcatgtcttctggaggctctgggggagaatctgttttcttgcttttcctag

SEQ ID NO: 342924 - DNA, 201 bp, Homo sapiens
aatccaggcaggactacaaatggcccagacccttcaggaatgaaggtttgggtcacaccatcaggaaaaaaagcacaacctgctgagttgcttgctgaagrcaaagggaatatagaatgggtagtagaagaagttaatcaccaataccagctatgaccacttgaccagctgcaggaatgaggactgtaattgtcctaagta

SEQ ID NO: 342925 - DNA, 201 bp, Homo sapiens
gctttaaaaaagtgttgacgcagacacaaagtgagcatgtgctgttgaaaaaatggtgccaatagacttgctggacagtgttgtcaaaaagcttcaatttaaaaaaaaaaaaaatatctgcaacatgcaataaagtgaagagaaataaaacaaaaatgtgccagtattttgaatggatccaggcattcttcctatagtgaa

SEQ ID NO: 342926 - DNA, 201 bp, Homo sapiens
aatgatttctttctcctgtttcaacacacattcttgcctgggtagaccagcaagtacaaacagaaaacataggacatatatatatgcttttacattcactytttaatcctctcaacaactatgtaatacagtcactactttcatattcaaatcattagaaaaagaaaaactgaacctcaaaaagtttccattagttaccca

SEQ ID NO: 342927 - DNA, 201 bp, Homo sapiens
ctgcagatggcctattgtgggaccatgtgactgtgtgagttaatacttaataaactctcctttatatatatatatatatatatatatatatatatatatayacacacacacacacacacatacacacacacacagacacacacatatatacacatacacacacatatatatacacatacacacacacatacattccattaa

SEQ ID NO: 342928 - DNA, 201 bp, Homo sapiens
tgaggtgggaggagtgtttgagcctgggagattaagactacagcgtgctgtgatcgcgccactgcactctaggctgggtgacagagtgagaccctatctcaaaaaaaaacaaaaacaaacaaacaaaaaaaacactgaagacagtgatgttagattacctgcccgaggttgtataggtagcaagtaggaaagctggatgag

SEQ ID NO: 342929 - DNA, 201 bp, Homo sapiens
aattaataaaataagaataaatagagactagaaaaacaatagagaagaacaaaatgaagagttgcttttttgaaaagatagactaaattgataaacctttrgacaagaaaaaagagaagattcaaagattcaaaatcagagatgagaaaggaaacattacaactgacactacagaaatacaaaggatcatattagactatt

SEQ ID NO: 342930 - DNA, 201 bp, Homo sapiens; identical to SEQ ID NO: 72394

SEQ ID NO: 342931 - DNA, 201 bp, Homo sapiens
gcagatggcctattgtgggaccatgtgactgtgtgagttaatacttaataaactctcctttatatatatatatatatatatatatatatatatatatatayacacacacacacacacatacacacacacacagacacacacatatatacacatacacacacatatatatacacatacacacacacatacattccattaatt

SEQ ID NO: 342932 - DNA, 201 bp, Homo sapiens
agatggcctattgtgggaccatgtgactgtgtgagttaatacttaataaactctcctttatatatatatatatatatatatatatatatatatatatacayacacacacacacacatacacacacacacagacacacacatatatacacatacacacacatatatatacacatacacacacacatacattccattaattct

SEQ ID NO: 342933 - DNA, 201 bp, Homo sapiens
acacacacacagacacacacatatatacacatacacacacatatatatacacatacacacacacatacattccattaattctgattgattatgtccctctrgaaaaccctgattaatacaattaagaaattaaaagaaatgtccatactacccaaagaggtctatagattcaatgaaatccctaccaaaattccaatgtaa

SEQ ID NO: 342934 - DNA, 201 bp, Homo sapiens
attatgtaagccacattttctctagccaaaaaagttaaactaaaaacaaaccccccaaaaattctatacattttgaaataataaactcacttctatgtaayttgtgactctaatgataaaacatgtagaaaggttttaaacactagagctgtttcatatttaaaacattacattaaaaatgtgcgggatgctaaattactt

SEQ ID NO: 342935 - DNA, 201 bp, Homo sapiens
acagacacacacatatatacacatacacacacatatatatacacatacacacacacatacattccattaattctgattgattatgtccctctggaaaaccmtgattaatacaattaagaaattaaaagaaatgtccatactacccaaagaggtctatagattcaatgaaatccctaccaaaattccaatgtaatttttcac

SEQ ID NO: 342936 - DNA, 201 bp, Homo sapiens
aaaattctatacattttgaaataataaactcacttctatgtaatttgtgactctaatgataaaacatgtagaaaggttttaaacactagagctgtttcatrtttaaaacattacattaaaaatgtgcgggatgctaaattactttgaggctcttaaatgtttatattagaaaatacttaagcataagacagaattatatag

SEQ ID NO: 342937 - DNA, 201 bp, Homo sapiens
gagaataagtttaggtgaagatgctaggcacagtagcttgtgcctgtaatcccagcacttcggaaggccaaggtgggagggtcagttgagcccaggagttygagaccagcctgggcaacatagtgagacactgtctctacaaaaaatttaaaagttaaccaggcatggtggcatgtgcccagtgtcctacctactcgggaa

SEQ ID NO: 342938 - DNA, 201 bp, Homo sapiens
gaacctcatgtagttttggatttgtataatgaaaatacgaggagtagagaatgagactagagtgttcatgagacatcaggtcacagaagtccttgtggccyataacactgaacctgaacatggtggtgctttttttccccctcccagtaagtgatagagcatcaatgcatagatttaagcaaggaagtcatgtgattggtt

SEQ ID NO: 342939 - DNA, 201 bp, Homo sapiens
aaacaattgttcatagtagttgtatttgtaacagcccagaactagaaactacccaaaaacctatccacttacaggtgaatggataagcaattctggtatawccacacactcagcaatagcaataaaaaaaaagggaaaaagctgggtgcagtgtctcacgcctgtaatcccagcactttgggaggccgaggcgggtggatc

SEQ ID NO: 342940 - DNA, 201 bp, Homo sapiens
atattaatccttcttatatctcacagatcatagatatagatatacatctgtactaaaggtgttctcattactttattgtctccccaggtagattttgaacyatatagggtagagttccttgtcctctaattctttagtgctcccatgccctcttgttcattatagagcacactgtaggggcccaagagatccttgtttaaa

SEQ ID NO: 342941 - DNA, 201 bp, Homo sapiens
tctgccaattctctcccatttatccaactccatagtcccttgctctgggaaccatgggcaaaactgctttactgcactaaagagtgataagaaattctaagtactaactttcactccccctctttgtaataaatgccttaagaaaaataagcagaatgtctgctttcaatttgtcccattgttaccctcgttcttccaagt

SEQ ID NO: 342942 - DNA, 201 bp, Homo sapiens
atggaatactatttagccttaaaaagggggaaataacatggatgaacctggagcacatcatgctaagtaaaataagctaggaacagaaagacaaataccgkatgatttcacttacatgtggaatctaaaaaagttgaaatcatagaaatagtgagtagaatgatggttaccagtggctggaagagggggatggatggagaa

SEQ ID NO: 342943 - DNA, 201 bp, Homo sapiens
caaagtgagatgtttaatttattgctggaagctgtagtctccgaagattttcagctctctaatgtgtgaatgaagagcttggccggtggagcagcaacaagggagatgaattagttcttctgtagcttaccctgacacaaacataaatagaagtctaaaaatctgggagaggaaagatggtttattctttttcttgttgta

SEQ ID NO: 342944 - DNA, 201 bp, Homo sapiens
aagtcaggagcagcattgcccctggtaatccttgaatttcttatagaccaaaaggaaaagttaagatgccactggagagagaacaaagtttgtagattacragagcacctacagggaaaagctgaaagggagaggattaacagtgggaggaaagcagaatggatcaagaagtatatgtaatggacatggcaggcagttctg

SEQ ID NO: 342945 - DNA, 201 bp, Homo sapiens
taaacatcatttgactagtgtttgcaatatcagaatgaggacaataccaatattcaagtatctatttttcatggtattgaaatatcagtgctaagttctawaatgagctatggtttccagcaccctttatccttgtctttagatgctcttccaattgagtgagggttcctctgttcttcagaattgaggctctacaagtag

SEQ ID NO: 342946 - DNA, 201 bp, Homo sapiens
gaagagaatgtaggactaagaaaatgggtctggcactggaggacaaggaatcaggagagaaggaaatactgctctcacagaaatcagggggttagactccragggaaggactgggagttgagcatggaaatatcctaccccctgtctttctgtaattcccctactatccccttttcctatattccttaatggttcatcctt

SEQ ID NO: 342947 - DNA, 201 bp, Homo sapiens
aattcccctactatccccttttcctatattccttaatggttcatccttctctccccatcctgccctttcagagataataaagacccaatctgactctgggrgtggggcgggaaatacaaatctcataagtataagatatacagcctcactagtaatctataaaatggtaatgataactgtaacataccatggaaacatttt

SEQ ID NO: 342948 - DNA, 201 bp, Homo sapiens
agcaaatatgaaaaagctagccttgtatcagttcacgggtattcttcaggtttcttatcacatagttttattcaacttgctctattatgtcatttattcarcaactcatcttgggttaagagttatttataggattctgtgtggtgaacgtctgtgacctgcaaacatgtgattgactttggcatgattcctagctcaagt

SEQ ID NO: 342949 - DNA, 201 bp, Homo sapiens
cattcagagccatcttctacagggtggctatccactagtacccataggcaatgatgccttaaaatacaggaaaagggtagcatgccatatggcataaaatrggttaataaacatactctccaagaacattacaaaatgataagaaatagataataaaaaaagagcaaagtgtataaataagaaacttataaaagagaaaag

SEQ ID NO: 342950 - DNA, 201 bp, Homo sapiens
ctgtaaaatgtacatattgaacacttaaggtttcttccagattcaagcataatgatcctatgaaataaggcaatgggacttataaaatttatgtggatctrgtagaaattgggaggaaaaaaatggacatctgtgcaaacacatatatctatgtgtgatgtgtatatatatgtctatatacacattagatacattatatat

SEQ ID NO: 342951 - DNA, 201 bp, Homo sapiens
tggtgaacactctcatcattttctttgaaaaccttggcaagaaaagatcaagaatattttttgctttcactagagctctttatttgctttgttactatatrtttcctcttccttcatctgcaagatcagtttattttgattatactagattctatttacaaggatttattgaccacctatcctgtatttagcattggaagt

SEQ ID NO: 342952 - DNA, 201 bp, Homo sapiens
acacatatatctatgtgtgatgtgtatatatatgtctatatacacattagatacattatatatctatatacacattatatagatatgttatatatctatcwatatatatagacagatatataacttcagaagttatttttactctaaaattaaaagacaaattttatggcattcagaatgtgatttgcaaattttttttct

SEQ ID NO: 342953 - DNA, 201 bp, Homo sapiens
tatctatgtgtgatgtgtatatatatgtctatatacacattagatacattatatatctatatacacattatatagatatgttatatatctatctatatatrtagacagatatataacttcagaagttatttttactctaaaattaaaagacaaattttatggcattcagaatgtgatttgcaaattttttttctctttttt

SEQ ID NO: 342954 - DNA, 201 bp, Homo sapiens
agaaagagtgcttctggggggactagaggacagaatatatatccagaaggagattataagagaactaggtaaacaggaccacagaaggacttccaagagcytaaggaaaggtctcaaatgaaaagctagaggtcctattctacctacaaacgtatttcatttgggtcacacagtgcttatcaggaaatccaaattctgatg

SEQ ID NO: 342955 - DNA, 201 bp, Homo sapiens
gttaaaattaggattaggaaaatcaaaatggcatatgaatagtgggaagtgtggactttggaatccaattgacgtgtatactaattcctgtgccccatgcrccatccatatgctttggagggtaaattacctaaacttgctaaactgtcactcctcaacagtaaagcaaggataattatgcctgcaggagggatcttgtga

SEQ ID NO: 342956 - DNA, 201 bp, Homo sapiens
tattctatgaccatgatggatcaagacaaaaacaagactactctgaattcacatctgaaaacagagaaaacattgtccaaatcaaaaaatatgaaacattwacctgtcttatctaatgagtgactgagatatctaagaccacacagtcccatggtgtgcatcatcccttgctgcaacaagcaaaccaaacttggttcaact

SEQ ID NO: 342957 - DNA, 201 bp, Homo sapiens
cagtgatttatgaattgtccagtgctcagaaccaggagaggttcagaaagctttacctagcaacgtaggcaggcagcaacattgtgctacctgatactagstctttttttatttttttttggagacagagttttgctgtgtctcccaggctggagtgcagtggcaccatctcggctcactgcaacctccgcctcccgggtt

SEQ ID NO: 342958 - DNA, 201 bp, Homo sapiens
gagtgagaacatgtgatatttgtctttctgtgcctggctgatttcacttcacataatgtcctccagttccatgcatgttgttgaaaatcacaggattttattttttttattgctaaataatataccattgtgtatatatgccacatttcctttatccattcatctgctgatggacacctaggttgcttccaaatcttggct

SEQ ID NO: 342959 - DNA, 201 bp, Homo sapiens
gctgtgggagactgaggtgggaagattgtttgaagccagaagtttgagactaacctgggcaacaaagtgagacccatctctacaaaaaaaaaaaaaaaaargaaaaaaagaaaaatttttagctgggcaccatgggatgagcctgtagtgccagctatttgggaggctgaagtgggacaattgcatgtgcccaggagtttg

SEQ ID NO: 342960 - DNA, 201 bp, Homo sapiens
ctgtgggagactgaggtgggaagattgtttgaagccagaagtttgagactaacctgggcaacaaagtgagacccatctctacaaaaaaaaaaaaaaaaaaraaaaaaagaaaaatttttagctgggcaccatgggatgagcctgtagtgccagctatttgggaggctgaagtgggacaattgcatgtgcccaggagtttga

SEQ ID NO: 342961 - DNA, 201 bp, Homo sapiens
gaagtgggacaattgcatgtgcccaggagtttgagcttgcagtgagctatgatggtaccactgaactccagcctgggtgacagactgagaccctgtttccaaaaaaaaaaaaccttaattggggaaatcgtgctatattttgagataacttgagttcccctgggaagtgatgaaatggcaaatgtagtgtaaaatcaaaca

SEQ ID NO: 342962 - DNA, 201 bp, Homo sapiens
gttgtatcaatttaaagaaaatgatgtatgaatattgatatggttaggctttgtgtccccacccaaatctcatcttgaattgtaatccccataagccccaygtgtcaagggagagaccaggtggaggtaattgaattatgggggcagtttcccccatgctgttctcatggtagtgagtgactctcaaaagatctgatggtt

SEQ ID NO: 342963 - DNA, 201 bp, Homo sapiens
gggctaaagtgggtgctattttatcaacaccaccaaaacacaaaggctagtttcaaaataaaaaagaattaaaacatcagacttttagacattattaaagtttttttttttttgaactagtcattctctgctctgaatttgcaggtttttaaaatttatttattttttttccagtgaattctgctgtactctctgccttgt

SEQ ID NO: 342964 - DNA, 201 bp, Homo sapiens
cactgtatcccttcctacaacccctacaccatgcccagtcctttcactgtcatgactattgcgggaagggaaaaaagaaacagaaaatggtgccccaattaaaaaaaaaacaaaaaaacttgtaagagagcagtgggaaccatctgtggcctgaagtctcctggctataaatgagatcgtttgttttttttttttttagtt

SEQ ID NO: 342965 - DNA, 201 bp, Homo sapiens
agacaagggtaactctcaccacttctattcaacatagtacataaagtcctagccagagcaatttggcaagagaaagaaagaaaaggcattcaaattggaarcaaaaacattaaattttccttgtttgcatatgacatcctgtatacagaaaaccctgaagactctactgaaaactgttagaataaactggttcagtaaagt

SEQ ID NO: 342966 - DNA, 201 bp, Homo sapiens
caataaatgcaaaaaaatgatttgacaaaattcaatatccttttacgatttaaaaaaccctcaacaaattaggtataaagaaatgtaacccaatacaataraggccatatgtggtaaactcacagctaaattcatgttcaacggagaaaagttgaaagttttttctctaagatgtggaataagacaagggtaactctcacc

SEQ ID NO: 342967 - DNA, 201 bp, Homo sapiens
caacaaattggatagcctagaagaaacaggtaagtttctggaaacacacaccctacccaagattaaatcatgaagaaatagaaattccaaacaaactaggkgattgaatcaataatatacagtcccccagcaaagaaaagcccaggagctgacagctttgctgctgaattctaccaaaaatttaaagtaaaactgatatcg

SEQ ID NO: 342968 - DNA, 201 bp, Homo sapiens
gaccacaatggaataaaactaataatcaataagaggaatgttggaaactatacacacacatggaaattaaacaatacgttcctgaatgatcagtggatcartgaataagaaagaagttaagaaatattatgagtcaaatgaaaatagaaacacaacataccaaagtggatggaatcaagcaaaagcagtactaagagggaa

SEQ ID NO: 342969 - DNA, 201 bp, Homo sapiens
tccaaaatctatgcttatcttatttaatccttctgattctcaaaggtgtagagtttcagatcaccccataaccttcttgccacccacgatgccatgaagcyttagatgagagcttcagcagcttgtccatgttaactggatgggaagtcagcagtcagctccacatcgtgctgttatttcctcattatacggtacatttat

SEQ ID NO: 342970 - DNA, 201 bp, Homo sapiens
atcaagtgttctagaaatgcttacagacacagggtgaagaaaaagtgatcatatttactggagcaaatctgtcacaatgaagggtaatgtgtttgcatggytctctgtcgaggggttctggggtgccctttttattgaggtttctgatgagtagcatggacctcccccaccaacatttagattcaatgaaatacataatca

SEQ ID NO: 342971 - DNA, 201 bp, Homo sapiens
gtagatttaagtgttctcaccacaaacaaatgataagtatttaaggtagttcatgtgttaattagcttgatttagccagttcataatgtatacaaattttmaacatcatattatacacaataaatctatacaatttttttttgagacggagttttgctcttgtcactgagactggagtgcaatggcatgatcttggctcac

SEQ ID NO: 342972 - DNA, 201 bp, Homo sapiens
atcattcattatttttgatatacccatgatatacagctataagggctatatcacttgacatagtgcttagaaccatttagatgtcaagctttaaaatactraataacactcttcttaccttctgtattagtccattttcacactgccgataaagacatacctgagactgggcaatttacaaaggaaagaggtttaatggag

SEQ ID NO: 342973 - DNA, 201 bp, Homo sapiens
tgaaagcaccaaactcagtgccaaaagaagggtctcaatgccctcgacctctgtagagctgggagtgggagcagctaaaaccattttgacccgaatcactrggaaaattcaactggatgaatagtctagatagaatctgaacaggctgatggaggtcttggcagttagacaatagttgaaactaggcacattcctgttctt

SEQ ID NO: 342974 - DNA, 201 bp, Homo sapiens
ctaccatcccagcgctttgggaggtcaagacagaaggatggcttgagaccagcctgggcaacatggcaagaccctatttctaccaaaaaaaaaaaaaaaaygaaaatagccaaatatgctggcaagtgcctgtggtcccagctgctcaggaggctgaggcaggaggaccccttgagcccaggaggttgaagctgtactgag

SEQ ID NO: 342975 - DNA, 201 bp, Homo sapiens
aaaacgaaaatagccaaatatgctggcaagtgcctgtggtcccagctgctcaggaggctgaggcaggaggaccccttgagcccaggaggttgaagctgtaytgagccatgatggcaccactgcattctagcttgggtgatagagcaacagcctgtctcaaaagaaaaaaaatattccttaaacataacctctgagaatcct

SEQ ID NO: 342976 - DNA, 201 bp, Homo sapiens
cagtttactgagttaacctaagcttggtctcataacccaatataaatgcaagattttttgttatttgttttcaagaggtagagtggtgtgaaaggggtagwagcaaccagctcaagcccattggagatttgtagggctcacctgccccaacctctatttcctagaggactttatgtcacactatgaataagggaaatcagg

SEQ ID NO: 342977 - DNA, 201 bp, Homo sapiens
taacttccttgttcactctaacctcttatatgcattcaacatgtcatcgaaatattaaaaaaagaaaaatcttaaatcactttagtgtgacaagttgtctrtagccggatggttgactggatataaaacattataccccttcagctattaaagctgtccttgaaaaagaatatctctcagtttccttcaagatcacttgtg

SEQ ID NO: 342978 - DNA, 201 bp, Homo sapiens
ccggatggttgactggatataaaacattataccccttcagctattaaagctgtccttgaaaaagaatatctctcagtttccttcaagatcacttgtgcttyaatgaatagcattaaaccgctttgattttgataatgtcatttcatcagcacagttttttgcccttgacctataagagatacaagtgggaggttcctaaaa

SEQ ID NO: 342979 - DNA, 201 bp, Homo sapiens
atatagtagttatcatgttgcctcagttactctaagatgttctggctctaggaaaccaaagatgacgagaagaatatggacacacattaagttgaggaaakaattgggttatggggtatctatctctctacaaacttgcaaataagcacaactgttcactgatgttaagccagagaatatttggaactcattaggttttac

SEQ ID NO: 342980 - DNA, 201 bp, Homo sapiens
tattatagctttattctttttttttttattttattattatactttaagttttagggtacatgtgcacattgtgcaggttagttacatatgtatacatgtgmcatgctggtgcgctgcacccactaactcgtcatctagcattaggtatatctcccaatgctatccctcccccatcccccgaccccaccacagtccccagag

SEQ ID NO: 342981 - DNA, 201 bp, Homo sapiens
tcagacactgctctaagtacttgttacacagtctcatttaatcttcatgataatctgaagcattaggtactatagtattattaacccagtttttcaaatgraggcacgaaaatttagaccacacacctagtaggcagcacagctggtttccaacctaggcaatctgtcctgtactcttaacctttcattatgctgtctctc

SEQ ID NO: 342982 - DNA, 201 bp, Homo sapiens
acccgggctacctcttttagtgttacaaaacccagtaaaacatcctttaatctctcagtgttttctcaactcttattcccttagtttattcttgctgttaygaatttcataaatccttttaattattttattttaacgcatttatcttggttaagtatcactgttagtatatggcctttaaaatggaacttactgaaaccc

SEQ ID NO: 342983 - DNA, 201 bp, Homo sapiens
aacccgtacatcctgcacatatacccctgaacttaaaagttaaaaaaaaaaagatatagctctgtatttaactaactggagacttactagaaaaatagtcyctaattcactgctgcccattagtttttagaaactaaactgagaaaaactataccaaggaaggagtcttgaaagatacacagtctatctactcttctagga

SEQ ID NO: 342984 - DNA, 201 bp, Homo sapiens
agaaagaaggtaatttttaaaaatacatgttttcttttcaaataataattgtgcaaatggggctcattgattgcctggattttagtttagccctcattagrctacatacaggctaatattcctttaatattggtagacctgagttttgcagaataagcaaaccttttgataggttttatacttaaacatagcaaaaaaatt

SEQ ID NO: 342985 - DNA, 201 bp, Homo sapiens
tgagaaaactgaagcagacagatataggttaaatgacttgtccaaggtctcacaaatgcttaggggtagaactaggacttaaactctgatgggctggctcygaagttgccattcttaatgactatggtatactctttttcaacatatggagtaatgggtattgtaaaattctatttttgtataaaaacaaaataaaaaata

SEQ ID NO: 342986 - DNA, 201 bp, Homo sapiens
aaaaatcagaaaacaagaaaagtgttaagatgaagatagaaatcgcccacgctttcctttaatgcttgtcattgtttagatatacacgtgaagtacaaagytggaataatatcggaccaaatgtaacctgcttttccatgtaaaaatgtagtatgaacatttgttcatatcattagttttcttctaaaatggtattttaat

SEQ ID NO: 342987 - DNA, 201 bp, Homo sapiens
tggccattgggagtgctttcagttggatcctgggctcctttgacatatccccatcatagtgattttctttgggcacttccttactttctggcactaaaagrtgttccaaactcatcttgtatattttattcccctgacctagaatcagccattttttcaaggattcctggtcctttaattggaaaatcatattagaaacca

SEQ ID NO: 342988 - DNA, 201 bp, Homo sapiens
atatattttgaaaaatactattagtattctcatgattatattcactgtagaaaaatcagaaaacaagaaaagtgttaagatgaagatagaaatcgcccacrctttcctttaatgcttgtcattgtttagatatacacgtgaagtacaaagttggaataatatcggaccaaatgtaacctgcttttccatgtaaaaatgtag

SEQ ID NO: 342989 - DNA, 201 bp, Homo sapiens
cacaagaagagttgctgattgactagctttgatagctcatggccgaaccagaatgagaaacttctttggggacagatatattgtctctggtttgtctgtgsttggttcattgtttgtgtttagtcaccccagattgctcagggccatcctagttttagccctgaaagtcctgtgccccaggaagcccctcagccctgaaca

SEQ ID NO: 342990 - DNA, 201 bp, Homo sapiens
ttgagaaagttgtccaaagataaaagaacttgagatgaccttacagcagtggtggagccaagtccagtgttccattgctaacccatttctctggccatacrcatttgctgctgctcctcttagtttccgctcctgctcctccctgtgcttccttaaaaaacaacaacagcagcaactcttgtattattatcctttaaccca

SEQ ID NO: 342991 - DNA, 201 bp, Homo sapiens
ctggcactaaaagatgttccaaactcatcttgtatattttattcccctgacctagaatcagccattttttcaaggattcctggtcctttaattggaaaatyatattagaaaccaagaactagctactggatgtgcttgttgctcctggggtgggttcattgaatttccccagcctaccatttataaacacttacctaccat

SEQ ID NO: 342992 - DNA, 201 bp, Homo sapiens
ttcttggggttggtcattgctgaatacctagataagctcagtaagattaggcttgtcttttcgtatgggctttgatgatggcaatctactatattctctgrttaaaatccttgtcacacttgacttttgttttgcttaatttttacaatgtgttcagctagaaaaataaaagtagatcgatctatttcacttactctaagt

SEQ ID NO: 342993 - DNA, 201 bp, Homo sapiens
cgttgctgctttttaatttccagaaattctgtgtgtttttaaaattatttttatagtgtcattttctgtgcttatggttttagtttgtctttaattatatyaaatgcaattatgtattttcagattgtcctattatctgaaaatattggcactctgatcctcctgttggttgtgtctgctttctttagctcatggtggact

SEQ ID NO: 342994 - DNA, 201 bp, Homo sapiens
ttggaactatgtgcctatcaagtgtatgcctataaagaaaaggtatgcaccaaaatcagtgtctgtttctgggtgttgggattaaaaacacattttctgcrttgaacttgtattactttttatcagaagaaataaaataactatgtttaaagactgcattaaattattgatgtgtgtagtatgaaatacagaattctttat

SEQ ID NO: 342995 - DNA, 201 bp, Homo sapiens
ttctatgtggttttcaccagtgccaagccttagggagtatgactataaataattatactcacatttcacttgtcagtcttgtttaggaaaataaataatayttgagtactctgaatttcttttattttagattaataaattgttcattatgtaaaatagttttccttatcttcagtcttagtactatattttctacatata

SEQ ID NO: 342996 - DNA, 201 bp, Homo sapiens
aaaaaacagaaaagtatttttcatggttctggaggctggaaagtccaagaacaaggtgccagcaaagtatttttcacggttctggggactgggaattccamggtcaagcttgtctggtaagggctgcatcctctggaggggacaaacaccatgtcctcacatgacaggacaaaaggccaagacagctgaatgctgtatgaa

SEQ ID NO: 342997 - DNA, 201 bp, Homo sapiens
gagttcttgccactgaggtgattttgagaaatgaattcctgtgcctcaatttcctcatttgcaaactgaggtcagtattatctacatcataactcactggsttgttaaaagtcatggtcatatttctgaatgttaacatttataagacaggctatatttcacttactgctgtatcccaaagattagtgtagtacctggcac

SEQ ID NO: 342998 - DNA, 201 bp, Homo sapiens
acaatatacagtggcattttgtcatagcaaaagtacttctggcttagtgaggtatgaattgcatataccttgaagaaattaatgtagcccctgctatttcyttagagtactgcagagatcatctggtataagacaggagtatgagaagataataacaccagaaacttaggaatccttaatccaggggctcaggggttccct

SEQ ID NO: 342999 - DNA, 201 bp, Homo sapiens
gtttcaaatctttattccaggcttattttcttcttttaaatcttttaatatttgtattccattttttctgttctctttttcaggaacaccaattataggtrtgtaggattccctttgacttctacatctatcatctttataaaaatgttaatatcttcgtttttcttaacttgttttatgtcatttctttaagcctcttca

SEQ ID NO: 343000 - DNA, 201 bp, Homo sapiens
aatgtaattcacataaggttaaatactgaaagaaataaaggttataattgaattaaataatttctttcatcagtattgtatcccttaatgcaaacttctaygactccttatattcatagaaagaaccaggaacatgggtcagtttacagagaagtgtttggctacagttctgatctctgaagagaatgtgcaattcagtca

SEQ ID NO: 343001 - DNA, 201 bp, Homo sapiens
agccatgttgctttgatgtgttctagaatcatacagaatagcagagcagcatcctaagcaatgagctaattgccaggttctctgacattctggatgaatgyttgagcatgtaccaatgaagcctcctgtgtggcagtattacttgtcaccctcccctaccattggtttacaaagggatggcaactatgtagcacttgcgct

SEQ ID NO: 343002 - DNA, 201 bp, Homo sapiens
attattgttctctgtcatgtgctataacaggaaaataaggctctaagtgaacacagaggagaaaatttctaatgcttcctagaaaaaataaagaggtttcrcagtgcctgtgaacacttattatgcctcaaagaaattcattaggcaaagaaatgaaagaaagaataattgtagcagaaggaaaagcatattaataggcac

SEQ ID NO: 343003 - DNA, 201 bp, Homo sapiens
gctaattcatgatcttacccttaggtcgaacatggcctcagaatctttcccagtacaaaacttaaagcactactataaatccattcaagttggtgtgacaraagcaatcggtttgccactctttgtctaacttgccattggacttcctgatttgatgatcttccaaaaataatgatgagccagtagaaatgtgtgaaatta

SEQ ID NO: 343004 - DNA, 201 bp, Homo sapiens
ttttgacatagactccaaatagggtaaagggacaaagaatattaatctgctaggttattctaaatacatggaaaatccaaataaggaaagacaaataaggktgtatttggttatttgaaactatattgttttacctctgggtcaaagggctacttgaccataatctcccatatacctctcaaaattgaatatgaatatata

SEQ ID NO: 343005 - DNA, 201 bp, Homo sapiens
accattgtaccaaatctgatttttctgcctgccatcttctgctccagtctcgtatagattaccaccagggtcaatctcttcaatgacagatttgaccatgmcactgccttgctcaaaatgcttcggactatataaagaaatttaacttcctctacctggcatccaaaggtctccttttttgagtttcacctgttacttctc

SEQ ID NO: 343006 - DNA, 201 bp, Homo sapiens
gcagcagaagaggggtttgaactgtccagctccaaggccagagtttttcttcaggaaaactttcactgtatcccttcctacaacccctacaccatgcccaktcctttcactgtcatgactattgcgggaagggaaaaaagaaacagaaaatggtgccccaattaaaaaaaaaacaaaaaaacttgtaagagagcagtggga

SEQ ID NO: 343007 - DNA, 201 bp, Homo sapiens
tcctcaaaactagaaaagaggaacaaaatgattaggtctttctattaatggagacatatgtcctgttgggtggcagatcttctgtgaggtagcggaacctsaaaggtgatgaccacatgggggcaccaaaagaggctgaaccttggaccctgcaactccaagccccagcaaaggtgcctgtgccctaattgtgacacagaa

SEQ ID NO: 343008 - DNA, 201 bp, Homo sapiens
aattaaatatattttgaaaaatactattagtattctcatgattatattcactgtagaaaaatcagaaaacaagaaaagtgttaagatgaagatagaaatcrcccacgctttcctttaatgcttgtcattgtttagatatacacgtgaagtacaaagttggaataatatcggaccaaatgtaacctgcttttccatgtaaaa

SEQ ID NO: 343009 - DNA, 201 bp, Homo sapiens
agcacattacatttattgtatattttatttctattattattaaaatataacatataatgaaataattatacaactcaccatacgtagaatcagtgggagcycttagcttgttttcctgcaactagacagtccatctaggggtgataggaaacagtgacagattatcaggcattagattctcataaggaacatgaaacctag

SEQ ID NO: 343010 - DNA, 201 bp, Homo sapiens
agcttacctagatattttgggggtaatttttttctctcttctggtgagagtgagggggtgttggggtaagcagaaaagcattcctcctcccccaccaaggrggggatttttatttttatttttttaggaaaaaagtggtttgcccctgtgaagttcaccttaggtgatgagatgttattgcatatggtgaatccagtgctg

SEQ ID NO: 343011 - DNA, 201 bp, Homo sapiens
ccaagctctgagcttaagtggttgaccaaataggttaggcattccttctaaatataaaaaggtgaagaaagactttctgaggccaaaactcaaaaagtggycttaagattgtcaggggagtataataacatcttcctaccaaaatacatctgggaacaacttaatctaagattagagggtaaaaaacaaaacaaatctttg

SEQ ID NO: 343012 - DNA, 201 bp, Homo sapiens
tattttaagtatttaattcatagcattcatttagactaaatatttcaatatttttttctctcaaaatactgatagcctggctatcctaggtaagcattgtvtaggataaggagctagcacggtaaagtaggaagccctctgactttagagtgccgtggccatagtttatgttctagctttgacacttgttagccaggtagt

SEQ ID NO: 343013 - DNA, 201 bp, Homo sapiens
ggctggagtgcagaggcacgatcttggctcattgcaacctctgcctcccaggttcgggtgattcttgtgcttcagcctctagagtagctgggattacgggkgcacaccaccatggacagctaatttttttaatgtatttttagtagagacagggttttgccatgttggctagactggtctcgaactcctggcctcaagtga

SEQ ID NO: 343014 - DNA, 201 bp, Homo sapiens
cttgcattcaacaacccagtcactatctgcagtgctactttccttggtgtcttttatgtgctggccaaacttgcctaaccctaatttcataccatagataygatatgggatgttctgttccatactttgctcattccattccttatgactagaaatccttctccttcctcctgggcctcttcataactaacctgtcctcac

SEQ ID NO: 343015 - DNA, 201 bp, Homo sapiens
ctggcattgtttttagagttttaaaacatgttaggctgattcttatctttggaaacctttgctcctgctgttccttttagctgaaatgcttctctctctcrtgtctgataggggaacaccaacactattttaatcaacttagacaagctatctcctctaacaaacctttacttatgtttattccaactagggctgcattat

SEQ ID NO: 343016 - DNA, 201 bp, Homo sapiens
ccccttatatgacctgggtagggggcctaaccttgggcaaggcggctcccttagaaagggcaatttccaaaagggacacaggtgtgaaaaccagcaccttwgtcccgaagaatggggaagcagatatgggttctgtaccactatccactacagttgcagaaagacctttcacttttatatgtgagggggaaacagaatttg

SEQ ID NO: 343017 - DNA, 201 bp, Homo sapiens
caataacaaggggcccctctctacccatgtataataggaggccaagtggagaacctagacttcaccttcacatggcagttacaaagtgacattccgcctcyacccacttgagcagcgtcaggggagttacagtacagcacaagatcaaaagaaaattttgagccttataatatcctaaggttttaataatcacttttcata

SEQ ID NO: 343018 - DNA, 201 bp, Homo sapiens
aaagagcagaggtttgtcctcactggagtagacacttactccagatatgggtttgcctatccttcacgcaatgcttctggcaagactatcatctgtgaacktatggaatgccttatccaccatcatggtattccacacagcattgcctctgaacaaggcactcattttgtggctaaagaagtgcagcagtgggctcatgct

SEQ ID NO: 343019 - DNA, 201 bp, Homo sapiens
tcatctgggaattcgtgagtaatgcaaattctccaggcccaccccagacctcctgaatcagacactctggggtggggcccagccatccgtgttctaaccarccttccaggtcactctgatgcatgcttaagcttggatctgctgatctagagccttgtttgccatgataaggaatttgagttttagtctctattggaagct

SEQ ID NO: 343020 - DNA, 201 bp, Homo sapiens
caggaaagttcatttatatcataaatactaagtaaattctaagatatttgggttaagtaagggcaaaattaaaatggttgtccattttaaaatgatggttrtccaatcaattcaatgtgttttctacatatagattcctttcttattgtagaaaataacatcctaaaatataatggtgaaataacacatgtagtatgggta

SEQ ID NO: 343021 - DNA, 201 bp, Homo sapiens
tgtcagatagtaagcatcttgcaaggcttattctacttcgtattcctgactgatagcatagaatctggtacccagtaggtgctcaatagatgtttgttgartgaaataaaaacatgcataggtgatgcataaagaaatgattatgcaatgttttggataagtagtatgataagataatttattgtccactttgagactctt

SEQ ID NO: 343022 - DNA, 201 bp, Homo sapiens
tcggcctcccaaagtgctgggattacaggtgtgagccaccgcgcccgactggtcctcagtatttttgaagggtataaaggggtcctgaaatcaaatagttkgggaacctctgatctactgtaattaaacaccatcatttcaatagaaaactgaaacttagatttccccaagggcgtagttgatgcatttaaataagcattt

SEQ ID NO: 343023 - DNA, 201 bp, Homo sapiens
tgcaatagaatttatatgtaactgatgcattcataagaccttttctatttagcagtcaattcctttaataaaaatattttggagattgtatggtgaaatayttgggggatagtattttcctgttatacctatatttgcatgcctaaataacattaaattatcaatgcaatttggtatgatttgtcaatattctgttagtgc

SEQ ID NO: 343024 - DNA, 201 bp, Homo sapiens
taactcaaagtggattacgtacttaaacatgagacccgaaactgtaaaactacaagaagaaaacaagagaaatgcttcacaatattggactggacaaagaygattttagatatgaccccaaaagcacaagcacaagcaaaatataaacaaacgggattacaccaaacaaaaaagctctgcacagcaaatgaaacagtagag

SEQ ID NO: 343025 - DNA, 201 bp, Homo sapiens
ctgccttcttgaacatgattaatatttaattttcttttcagatatacaacactgtatttggctgatgctaacaggaaagttcatttatatcataaatactragtaaattctaagatatttgggttaagtaagggcaaaattaaaatggttgtccattttaaaatgatggttgtccaatcaattcaatgtgttttctacata

SEQ ID NO: 343026 - DNA, 201 bp, Homo sapiens
taaaaaatgtactggatttttaaaactctggactggaaatttcattaaagcttaaaatctttacttcattgtattaagaagaatcaaaactaactaatctyctaatacaattatattttcagttcaaggcagggaagatgtgttctaataaaatatttaatgacaatctgctattgcccagctactccattcttgtaagct

SEQ ID NO: 343027 - DNA, 201 bp, Homo sapiens
aggaaacaacactcaacgaagttattccatcatcccgtgttttatatttgttgaggtatgtgtattttttaacctttatggacaaattgaaataaaagtamcagtttttattctgataacttagattattttataaaattaattttatgattggtaagtcaattttgatagcacaaatattggtaaagattaataaactat

SEQ ID NO: 343028 - DNA, 201 bp, Homo sapiens
aaattttgtatgtgggagagaagaaagataacactccagtgtcagtagagtcatggctgtagagacatagccagtgtattgatggaagcccgaggggaagwggacagagcagacaagtcccggtaggggcttaaaaaagcagtatttgggagcagggttttcattcatcactgaagagctttggaaagacctggatttatg

SEQ ID NO: 343029 - DNA, 201 bp, Homo sapiens
ctggaggacaaggaatcaggagagaaggaaatactgctctcacagaaatcagggggttagactccgagggaaggactgggagttgagcatggaaatatccyaccccctgtctttctgtaattcccctactatccccttttcctatattccttaatggttcatccttctctccccatcctgccctttcagagataataaaga

SEQ ID NO: 343030 - DNA, 201 bp, Homo sapiens
gttggccggacgcggcggctcacgcctgtaatcccagcactttgggaggccgaggcgggcggatcacgaggtcaggagattgagaccatcctggctaacayggtgaaaccacgtctctactaaaaatataaaaacaaaattagctgggcgtggtggcgggtgcctgtagtcccagctacttgggaggctgaggcgggagaa

SEQ ID NO: 343031 - DNA, 201 bp, Homo sapiens
gagcttgcagtgagccgagatcgggccactgcactccagcctgggcaacagagcaagactctgtctcaaaaaaaaaaaaaaattgttaaagatttagcctygtgaggaaatattcaaattagatagttatgtgaatgcgggagggaatggcttcaaagcagtatgtaatctgagtttccccaggcttcgccagtacatgaa

SEQ ID NO: 343032 - DNA, 201 bp, Homo sapiens
caaaaaacaaaaaaaccaaaaaacagtctattttgccactgaagctttttcacatgcaaaaaaccaaacaacaacaaaaacagaaaaccaaccaaactccygcattgttgatagacatacctttttttttcacaagaaaacttttaaaaaagcaatttgcatatttctgcagaaacatgaagctctgtggttcttttggtt

SEQ ID NO: 343033 - DNA, 201 bp, Homo sapiens
aaaacagaaaaccaaccaaactcccgcattgttgatagacatacctttttttttcacaagaaaacttttaaaaaagcaatttgcatatttctgcagaaacrtgaagctctgtggttcttttggttatgttgcagaattgtgcagaagtctctgcccagcaataaatgaaggcaaacttggaaaggttagctgcagggtctg

SEQ ID NO: 343034 - DNA, 201 bp, Homo sapiens
agagagaattcgagtttttgtgttattaagtttgggacattctagcttcaatcttaccattgcttttgatttttgttttctgggtcttgtaaaagctttgrgggtttgacctaccattttgttagcattgacccatcacggagctctacatgctgggtttttatgttcttggttgtccagatgggtttgttctgtgctgtg

SEQ ID NO: 343035 - DNA, 201 bp, Homo sapiens
gaagatcaaatgacaacctgcacctagcacagaacctggcacatctgagcactcaataaacattccttgatcctaccagtattctcataatcaccatagtwttgtctgactccctcttttcaaattaagtggtactctgggatattggggttaaccctgtccaagggctgctttgttggacactgtcagtagagacagaat

SEQ ID NO: 343036 - DNA, 201 bp, Homo sapiens
agtgcagctgctatagctttgatttatgactaacatcctaggacagagatggggaggaagctgataaacagaggctatgacctgctgtgggcaataatgtytcaggatctcaggtgccacttcacagatgggacataggtgttgcctggttgggttctgagtatctgggtttagtggggctgagctgagacagccaaagag

SEQ ID NO: 343037 - DNA, 201 bp, Homo sapiens
gggttgcacattggttgagataaagatgaatttcagttggaccagcagatattggagaatgatgagagcagcagttaaggaaggtaggggaaatattatgragcctactttagatcatgctaaggggtttctatttgagcctgtagacaatgttgatcagatttctgttttacaaagacaacccttaaatgcttcacctta

SEQ ID NO: 343038 - DNA, 201 bp, Homo sapiens
tctttcatttaatttcctccagtttctgttcctcacattcagaatctgaagttagttgtgtatgctcatcctcctcttcctcatctgaatctgccttatcrtctgtttgaaatggctcaagagctgcttttattagtgcccacattgaccaaactgagactggaatttttgtatcatctttatacgcttttttaaaatctc

SEQ ID NO: 343039 - DNA, 201 bp, Homo sapiens
ttaggactttgtaaatacaacaattatctgtgaatgtttgaatccatactcatactcaggacaggaagatattcaggaccaagtcttgtgacatacacaakacacatgtgatttccaggttcatactctcaacctgatggttaactttctggaagttctcctttgagtacagattatgctgtaggactatatctgaaaatg

SEQ ID NO: 343040 - DNA, 201 bp, Homo sapiens
cattctctatgttattttttaaaatagattctgcatttccatctgcatatactctctttctaggttgtaagctacctgctgtcaatgactgcttgactcayatttgcatgactcaaagcctaagataaggccttgaacccagaaggtacttaacacattattggatgggtgggtgaatggataaagtggaacctttttctc

SEQ ID NO: 343041 - DNA, 201 bp, Homo sapiens
cccatcagggaagcaggcaagatgcagcagcaagtggcctctcaaaacagtgcatccctttaaaaataggaaaagtgtatttaatgtaaatgtcaaggatmaagtgtgtggttcaagaggaaccaactgggaacaggaattcctgagttccatcctggccatgccactgggtacttttgtggtcttggttcattaattgga

SEQ ID NO: 343042 - DNA, 201 bp, Homo sapiens
agaacttgttcaggggaactcctctttataaaaccatcagatctcatgagaaagaacccccaatgattcaattacctcccactgggtccctcccatgacaygtgagattgtgggagctataattcaagatgagatctgagtggggacacagctaaaccatatcacatactagtaagaagtatgatgaaagtgtgtaataga

SEQ ID NO: 343043 - DNA, 201 bp, Homo sapiens
tatgaggctgtatgatactgggccacccccattcaccgtggaaaacaaacccatcactaatggactgtattttggcatatgaagtagtcaaagacaattcytgatagaaccattatctacctgtgtggtccttcaagaattagaggaagaagaattctgtgcctctgagagattttgaaaaaagaaagagtgcttctgggg

SEQ ID NO: 343044 - DNA, 201 bp, Homo sapiens
tacctaaattggaagaacgaagcaaagctgtcttcaaaccctttattccttagttcagtttttttcaaagcccgaatggggattggcagtcttcatgctcygaacaattgggtattcttttttcttagagcccagatgcatttttttgaaagtcgttccaggggcctgagatgaagtgggggtgtgagaagtaagttggct

SEQ ID NO: 343045 - DNA, 201 bp, Homo sapiens
gaaatcaatcagagaggataaaagtgagaaaaggaggcttagattacttttcataacctccagtcaagcatggatatccacagagtgacagtttttcataygaatcaggagattatgagctctgagatcctttcccctatcatgtgtattaggataattgtttctctaattcaaatctctaagcagcttaatacctgttct

SEQ ID NO: 343046 - DNA, 201 bp, Homo sapiens
aaagtcgttccaggggcctgagatgaagtgggggtgtgagaagtaagttggctagggcagatagaacctaagtgtcttctccttaagtcagctccccttaygaggctgtatgatactgggccacccccattcaccgtggaaaacaaacccatcactaatggactgtattttggcatatgaagtagtcaaagacaattcctg

SEQ ID NO: 343047 - DNA, 201 bp, Homo sapiens
ccatcattgtactctctatctccattagctcatttttcatttttttttacctctcacgtatgagtgagaacatgtgatatttgtctttctgtgcctggctkatttcacttcacataatgtcctccagttccatgcatgttgttgaaaatcacaggattttattttttttattgctaaataatataccattgtgtatatatg

SEQ ID NO: 343048 - DNA, 201 bp, Homo sapiens
ggatccttagctgttctagtagtaaagagaccatgtagaaaatcagcatcaacatataacaacaacagcatctatagcaatggtgaagcaagttcttcacyaggagagcaatgcatgacttctttaggtagtgacaccaagtcctcagagaaatatagcagcagctggggcagccctgcagcaacttgggaattgaagtag

SEQ ID NO: 343049 - DNA, 201 bp, Homo sapiens
agcctgtagtgccagctatttgggaggctgaagtgggacaattgcatgtgcccaggagtttgagcttgcagtgagctatgatggtaccactgaactccagyctgggtgacagactgagaccctgtttccaaaaaaaaaaaaccttaattggggaaatcgtgctatattttgagataacttgagttcccctgggaagtgatg

SEQ ID NO: 343050 - DNA, 201 bp, Homo sapiens
tgtaaaactattcatggcaagtatatattatttgctttttattggaatgattattagtctgacttgactgtgttgtagatcactgtattgcttttgcacayagcctgcttatctagaaagctgatatctagtagctgatatttttatgtaagtacctaagggacttctcaatatatggttcttatactatgcaacctattt

SEQ ID NO: 343051 - DNA, 201 bp, Homo sapiens
ctgtattgcttttgcacacagcctgcttatctagaaagctgatatctagtagctgatatttttatgtaagtacctaagggacttctcaatatatggttctwatactatgcaacctatttctatttcagcctggacagtttttgacggtgcagtcttgctatatggtgtgagaaatggctgtaggaaacaacactcaacgaa

SEQ ID NO: 343052 - DNA, 201 bp, Homo sapiens
gttttatttggatggccctttcatcagggataagaggaactcctacgaggaatttcctctgtgattagtctttgctttgtcccagcttgctgtgtggccasaatagatgctccccgtatcttcgcctgcttcagctagttcttctacattccctatttaacttgaggacattcacccagataagaattcaggaatagtccc

SEQ ID NO: 343053 - DNA, 201 bp, Homo sapiens
cgtatcttcgcctgcttcagctagttcttctacattccctatttaacttgaggacattcacccagataagaattcaggaatagtcccagaatccttccagktctctcctaaaactcactctcttgaatctgtctccttttttcattttccactgttgtttctttaattccttcatttggctgctgctgctttttttttccc

SEQ ID NO: 343054 - DNA, 201 bp, Homo sapiens
agtgtcagtgaggctgagttctgagatctggcaacaaaaaagggctagatgtgagcaggtcctgttcagagtagaatgcagaaaaccctggggacagacarcgatatttaaaaagttgttttaggaaatctttctgtgtgaagtaaaatacaacttccttcctgatctccttgagaatctctagttaagattttcagtttt

SEQ ID NO: 343055 - DNA, 201 bp, Homo sapiens
acattctctacaaatttgggtgaaggtctttgcttttgttgatgattacacactaacaatgatttaaagtgctctgccagaaaataggggggatgccaggrtcatatccaaaagatatgatccactattcaattttgaacattcattttagttcatggtggggaacaattaaaagcttccattttgatgactttgaatttg

SEQ ID NO: 343056 - DNA, 201 bp, Homo sapiens
ctcacactgtggcttccctaaaatagcaggcaccgcagatggatttaacgagagccatgcctcacctctctgtgcagggctgactggctcattccaattcyacatagctcacccaaagcaagagctggtccactgccatacaaggatttacccataaactcctgtttcccagaatttcttaacccaattgcaaaaacttcc

SEQ ID NO: 343057 - DNA, 201 bp, Homo sapiens
ccttcagtttggtgtcatttggccaactttccatcttttttcactgtcgtcatgtatgattttagtggacaatgagagatgatccatcagaggctgtcagyaaagtgcctttttgactggagaattacacatttataatttagtatgcaacatttggccttcagttttgaggctctacccaaggtctcagactttccgggc

SEQ ID NO: 343058 - DNA, 201 bp, Homo sapiens
cttatttggaagtgaagtcataattcattaacttttgccagaaagtttttagaaaatggatcccgttattcctcagtaggtcaaagacagggactttaaaygaggctggggctagttttcagaagaatgtggtactggaggcactggggtaatccgtaaagtggactcacttctttagcttgtccccagaacttactctgg

SEQ ID NO: 343059 - DNA, 201 bp, Homo sapiens
cttactgctaataatagtagagcagagattcaaactttgtcattctagctatagactttgccctattaaccattataccattctgcctctctctggtcatrcattttgagtgacttaatacaaaaaatgagtagatgggttaaagacccatcagaacttgaaacttgtgctgtttctggcctatagtagccaggacagcta

SEQ ID NO: 343060 - DNA, 201 bp, Homo sapiens
tttagacattattaaagtttttttttttttgaactagtcattctctgctctgaatttgcaggtttttaaaatttatttattttttttccagtgaattctgytgtactctctgccttgtagtgtttaattctggatctattgaataaaaaggaaggaatctagctgtctggccagaattttctttggcaggaggttgttatt

SEQ ID NO: 343061 - DNA, 201 bp, Homo sapiens
ttaacttttgccagaaagtttttagaaaatggatcccgttattcctcagtaggtcaaagacagggactttaaatgaggctggggctagttttcagaagaakgtggtactggaggcactggggtaatccgtaaagtggactcacttctttagcttgtccccagaacttactctggcttcttggggttccacttccctcattg

SEQ ID NO: 343062 - DNA, 201 bp, Homo sapiens
ctagctgtctggccagaattttctttggcaggaggttgttattcctcatgcattgatatttgtcctctgtcatattaggaattactttccctattaataaygacttgatgaggttaagtgaattgtccaagcttacacagccatttagcagcagaagaggggtttgaactgtccagctccaaggccagagtttttcttcag

SEQ ID NO: 343063 - DNA, 201 bp, Homo sapiens
cttcatcccaatcaagaccttaactctaagtgtctctttgccttgttcctgatcttaggttggaaattttcaatctgtcatcattatgtatgaggttaacyatgaatgttttgtagatgccttttatcaggttgaggaagttcccttctattcctagtttattgagtgtttttatcatgaaagagtgttagattttatgaa

SEQ ID NO: 343064 - DNA, 201 bp, Homo sapiens
taacgtgtaataactgtacatatctatgggttatagtgatattttgatacatgtatacaacgtgtaatgatcaaatcaggataattagcaaatctaatacyttgaacatttttttctttgcatgtgaacattcaaaatcctctcctctatctttttgaaaatatgtattattgttaaccctcaaaagcaaatgtaacaaaa

SEQ ID NO: 343065 - DNA, 201 bp, Homo sapiens
tctgttaagttacatctacgctctctcatcatcacccagtatctgagcatcacccagtatctgagcaacaaattcttttagaacaaagtgttaggagtttscattttttatctctatgatttaaaaaaaattcagtctctcatttcagatatagtattgactaagatagtaggttatttgcacatataagtctctataatt

SEQ ID NO: 343066 - DNA, 201 bp, Homo sapiens
gttcttcatatctttacacgtattggcaagtggctaaaaggcagcagaagatgccttacgtttttacaaaacaggctgtctccacaaggactttcccccayttaaatagctcttcatcatctcatctgttgtggaagactaaatagccccttctagaaggtacaatatgcagctatttaatgacacataataacctaacag

SEQ ID NO: 343067 - DNA, 201 bp, Homo sapiens
caaggaatactagttagtgtggttgctttgacacaagcccctgcttgtgtatgctggtgtatgtacctgcttgcttgcatgtgtactcatagcacaaggcrgctgcctggtcactccctggcctctgtcctattccagatgtatattacaagcacaatcaagacgaagagcagtcgactggccaagccggtgctgtgcctc

SEQ ID NO: 343068 - DNA, 201 bp, Homo sapiens
attgggagcaatataagtgatcaaccacagaagatgggttaatggaattatagtttgttattaaaaataatgtcataaaggaatattaatcatatattagrtgatgacccttggaaaagtatggacagtgtaactaaatatctaaaatgatatataccaaaacatgactagcggtggggtaatgggtgatttttatattct

SEQ ID NO: 343069 - DNA, 201 bp, Homo sapiens
atattgaatagctctatctataagttagtcccgaactaacttatagaactataagttagtgtcttgaagacactaagaagtagaatatttttatggttagktctctgagcttggaaatcagatggcctgagtctgatctggcctgtatgggcaactgtgggttaccataaatgtaatgtgtccagtgatagatgggtgctc

SEQ ID NO: 343070 - DNA, 201 bp, Homo sapiens
gctttaggaaaggtggggatgcttctgttcaataatttcccagcaaagtatcccagacatgtaaacagttagtcattttcaacagtactaaaagaaaacakctcttgttattgttttaaattatcatcttcaaaagcaatataatatgtatgtaaagtgaataatataaattacaaaacaagtttttagctaacaaattag

SEQ ID NO: 343071 - DNA, 201 bp, Homo sapiens
tacctcctgatctgttactctacaacagaaccttgcatcataccagggatacaaaaaataattgatatagtccttgccctcaaataactcatagataaggrgcaggcatggtggctcacacctgtaatcccagcacttttggaggccaaggtgggaggattgcttgaagccaagagttgaagaccaacctgggcaatgtaa

SEQ ID NO: 343072 - DNA, 201 bp, Homo sapiens
tcagacccaacaccaggtcgtgggggtgatgaagtctggcggagtcaaaggattgagaaaaagacagtttgagaagtaaagtgggaccagggggccattgygattgtggaggctgtgaaggccctgagctctgggagcccacactatttattggtaatccaacaaagaaataggtggtgagaatgtggaggtcaaagggca

SEQ ID NO: 343073 - DNA, 201 bp, Homo sapiens
ttcaatgcaacagtacctcctgatctgttactctacaacagaaccttgcatcataccagggatacaaaaaataattgatatagtccttgccctcaaataastcatagataaggagcaggcatggtggctcacacctgtaatcccagcacttttggaggccaaggtgggaggattgcttgaagccaagagttgaagaccaac

SEQ ID NO: 343074 - DNA, 201 bp, Homo sapiens
accaccatccaggaaccagtcctctagattgtctgttgtggtatccaaaactcccacttgagacaccacattggagagaggcatggttcagaaagaccacygttaaagtagaaatttgtcacgctggaggagcatcaaattcccatttataatcaatgacacattagtccgtttgggtctgtcataagctaatagagatct

SEQ ID NO: 343075 - DNA, 201 bp, Homo sapiens
ggaggcacattttaaaaggctactaaatgtccctttggacctgtttttgtgacaaaaattcaatgcaacagtacctcctgatctgttactctacaacagamccttgcatcataccagggatacaaaaaataattgatatagtccttgccctcaaataactcatagataaggagcaggcatggtggctcacacctgtaatcc

SEQ ID NO: 343076 - DNA, 201 bp, Homo sapiens
tttccccctcatcctgcagggaatgtgtgtggttcataactttaaaggaacgcaaggatctccttccaaacccaagcctgaggatccccgtggagtacccytaatggctttcccaaggatagaaagccctctggaaaccttaagtgcacaggtatggtaaagcagttttagcaaaccaaacccacaggctgaacactttgg

SEQ ID NO: 343077 - DNA, 201 bp, Homo sapiens
tgggtattactattcttattttacaggtgagaaaacagacccaatggggtggagagcgattattactggtcatctggtgattaaacagacgtttccacagyacttcccatagtccctttcccctctctcaaaggaaaaaggtcactctggtgatgatattcaaggggaaaggcctgccaccctcacagatgccaggcattg

SEQ ID NO: 343078 - DNA, 201 bp, Homo sapiens
gcgtgctggtgggtgcctgtagtcccagctactcgggaggctgaggcaggagaatggcatgaacccgggaggcagagcttgcagtgagccgagatcgtacsactgcactccagcctgggtgacagagtgagactctgtctcaaaaaaaaagaaaaaagaaaaaagctgagtgtaagagtgagatggagatgagccaggtag

SEQ ID NO: 343079 - DNA, 201 bp, Homo sapiens
tgttgctgaccatcagttctaaagccgccatccccagttagagaggaagagccattctgactgttccaagcaattttgtagggtctttgtgggatgatatyggggtttgctgaagccccatacacaaatcctgcttcaacgttaaacttgttttctctccataacatgcagccctgtttctcatcactcagtaactactca

SEQ ID NO: 343080 - DNA, 201 bp, Homo sapiens
aaaaactgcatgttctgaatctaatcgttaatgcgttctttgtgtcactaataacttctgttgacatgtccactagattacaaaagactgaagaatgtacmtctgttcattgttcttgctgcactgatttcctacctaaataatttattaaatatcttaatggagttgttcaaggaatactagttagtgtggttgctttga

SEQ ID NO: 343081 - DNA, 201 bp, Homo sapiens
agaaaaccaaacaatgcatattctcactcataagtgggagttgaaaaatgagaacacctggacacagggagtggaacatcgcacaccagggcctgtcaggrggtaggggccagggggagggatagcattaggagaaatacctaatgtacatgacaggttgatgggtgcagcaaaccaccacggcacatgtatacctatgta

SEQ ID NO: 343082 - DNA, 201 bp, Homo sapiens
caatgcatattctcactcataagtgggagttgaaaaatgagaacacctggacacagggagtggaacatcgcacaccagggcctgtcagggggtaggggccwgggggagggatagcattaggagaaatacctaatgtacatgacaggttgatgggtgcagcaaaccaccacggcacatgtatacctatgtaacaaacccgga

SEQ ID NO: 343083 - DNA, 201 bp, Homo sapiens
gggagtggaacatcgcacaccagggcctgtcagggggtaggggccagggggagggatagcattaggagaaatacctaatgtacatgacaggttgatgggtkcagcaaaccaccacggcacatgtatacctatgtaacaaacccggacattctgcacatgtatcccagaacttaaagtataatttaaaaaaagaaaaatttt

SEQ ID NO: 343084 - DNA, 201 bp, Homo sapiens
cttttctttaaccagcaaagggccttggtagaaacacagtgcttttaaccacaggaagctgaatttcagatattgctggattctgccttctgaagcctcgwggaatgatcagcacttaatgcattttttactgctatattggattgtcattcttggaaagcaacagctgaggaaagtccctggtacatgagctccttacac

SEQ ID NO: 343085 - DNA, 201 bp, Homo sapiens
ctgaatgtaagtgctggcactgatataatggctgagattagagtagaatagaatccctcaggccgatatttcctgctgttctcattgaacttccgtagacrccagagatgagagaaattgcttaacctgaagtttgctgtgattcattcttgatggctctggctctgttcacattacatcacattaaattaagttgcaact

SEQ ID NO: 343086 - DNA, 201 bp, Homo sapiens
ctcaaatgtaaatacccttaatacttaaaaagatgagcttcccaaaatcaaaatgagagaggacaagaatagacaactaacaaccagcaatcaatagactrtgtgcatataagtatttctaaattcatcactaaccaaagaaaaatcattttttaaaggatacagcatttttctcatataaaattggcaaatgttttcaaa

SEQ ID NO: 343087 - DNA, 201 bp, Homo sapiens
tcctactcggaaattttaaaaaccctgcagatgatcacacccgccctttttagtgggcctctgttactattggaacatgcctcttgggaatcttacttccrctaaactggcttctcaaccacctatcttcctggagaagagttttggttaatacatttttcttgtatttctgattatgttttagttccccaaatagatgga

SEQ ID NO: 343088 - DNA, 201 bp, Homo sapiens
agcaagcagcctcttctccagcatcccaagaaactcaactctaattccaaagttgcatctcctactcggaaattttaaaaaccctgcagatgatcacaccygccctttttagtgggcctctgttactattggaacatgcctcttgggaatcttacttccgctaaactggcttctcaaccacctatcttcctggagaagagt

SEQ ID NO: 343089 - DNA, 201 bp, Homo sapiens
gggcaaaagctaagtgttccttgagggaagaatagagaatgaagagcactggtagaagcaagcagcctcttctccagcatcccaagaaactcaactctaaytccaaagttgcatctcctactcggaaattttaaaaaccctgcagatgatcacacccgccctttttagtgggcctctgttactattggaacatgcctcttg

SEQ ID NO: 343090 - DNA, 201 bp, Homo sapiens
ggggcaaaagctaagtgttccttgagggaagaatagagaatgaagagcactggtagaagcaagcagcctcttctccagcatcccaagaaactcaactctarttccaaagttgcatctcctactcggaaattttaaaaaccctgcagatgatcacacccgccctttttagtgggcctctgttactattggaacatgcctctt

SEQ ID NO: 343091 - DNA, 201 bp, Homo sapiens
cagacttcaccatctgtgttcctttcgtcccaaccttgtgaattacaattattctccaagtattatacatgcttttgctacaaaaatgatttcaaaacacyctttcctttcagaaactggattgccaaattccttctgggtggcagggagagaattgcccctagaagtacagctggctctacccctttcaacactgggctt

SEQ ID NO: 343092 - DNA, 201 bp, Homo sapiens
cagaagcctcaatttacaaaacagattatagctcagttaaatgtctttgctttatcaaaaacaaaaccaaaccaaaaaacctctatgcaggtatttttttwaaacaaataaagccctctgaagtatccaacatattttcaaattttcagaatgttgatttttcctaattatctagaacctaaacaatgtattcttgtgcct

SEQ ID NO: 343093 - DNA, 201 bp, Homo sapiens
gtacctaaaacagaacatgtaaaaatatttaccttccctcacaaaaaatgcctacgcttcccatttcagttaatggggccaccattatctaatcactggarcctgaaaaccaggtctcctcctggaggcttcttcccgctcacttcctttcttaatgtcgtcaagccctccattactttacctcctaaaggtctctcatat

SEQ ID NO: 343094 - DNA, 201 bp, Homo sapiens
attccactgcaaataatccattctaatgaaacaatcagaaatgtagattaatttttgtggactaaaattattttttaagttagatatctctaatttttttwaaaaaatgaggccattataagttgcaacctcagaaaatggtattaagaatttttcatggagaatattcatgatatgtgaaaagttaaaacactatgaatc

SEQ ID NO: 343095 - DNA, 201 bp, Homo sapiens
ggcacatacaagatagcggagaagacagacatggctggagtggctgggatttccctctatgttgccttttttcataggaagctggcttgggcttatttgcrtggtggcagaagatttcccagcagtaatagaggacaagccccaatgtgcaaaaacttttgtatcctctgcttaggtcatattttctaatgtcccattggc

SEQ ID NO: 343096 - DNA, 201 bp, Homo sapiens
ttttgtacttcagtttcctaatcagtaaaatatagataagaataatacttatctcttatgcttatggtaaggattaataacataatccacataaaatatgycatagtgtattgaacataataagcacataataaatatgtgttacttgcaactattataaaaatatatctgaacatagctttaagaccgtatgtatggtct

SEQ ID NO: 343097 - DNA, 201 bp, Homo sapiens
ggaatgggactgactagtgaatgagtggggaacaaagaggctaaagatgtggagccccaggggtcatcaacatgtgaatggtgggtaaaagaagagaaagsgaaatgaagtcaacccatcagggaagcaggcaagatgcagcagcaagtggcctctcaaaacagtgcatccctttaaaaataggaaaagtgtatttaatgt

SEQ ID NO: 343098 - DNA, 201 bp, Homo sapiens
aatcagacctggaatgtagatcctccaccacttttctctcatctcattttcagccatttgttggaactgtttcttcagctctcttgttgcctcatggaatkaatctccaacattctctccagctgtattccctactcccattatgtgaggttaagccctttctgtcttttgttaagcccctccattagcattgtaaatagc

SEQ ID NO: 343099 - DNA, 201 bp, Homo sapiens
agaatgaacttctcataaagccccaccggctgacatatagcctgcaaagcactgcctgtttgactgccttgtggtttctctgtgaggaaaaataattgtcraaattattcatatttaaatcttaagcttttctgaaaatagatgtgaacaaattaggtgtcctgggaattaacctaagctaagtaattaatgatcttttta

SEQ ID NO: 343100 - DNA, 201 bp, Homo sapiens
taagaacttcaattttatggggaaggctaggggtgtttgtttgaaagttgagaaagtttgagacatgatcagatttgcattagagaatgatgactgtgacyacagtgtggaggatgacttggaggtgttgagactggaggcagggaacttattgtggaaatgtaggtgttaaatgatgagggtggtggcagtaggggtgga

SEQ ID NO: 343101 - DNA, 201 bp, Homo sapiens
agagagcttgacattagctgagtcttgaacaaggacaaggaggaaagaagggctttccaggcagaaatatctctgaaaggcctggaagtagttctgtgtgkctgtagcgacagatatgggttcttagctttttgcagtggcacaacatcaagcaagagacataagcagcaatcaagtgtgaatggaactatccaagcataa

SEQ ID NO: 343102 - DNA, 201 bp, Homo sapiens
tgagggtgaacagcatctgggtgacaccagttaacaagtaatgctatagagtgagttttttagagatatgctcagaatgccatggaagcacaaagggaggkcatccaactcaaggagagtaagaagatcaagaaggtttctcagagagcttgacattagctgagtcttgaacaaggacaaggaggaaagaagggctttcca

SEQ ID NO: 343103 - DNA, 201 bp, Homo sapiens
cctcctggattttctcaccattcagaaaacatgtataagtacttgttacatgctggaggctggggaaaaaaagataagaaagtaaaaaatggtcccaatcrtcaaggtaacaggtatttaactatgatgcaatctgattaactgctgtaattgtaggttaaaccatgtgccaatagtacaggcatgaaagtgattttttcc

SEQ ID NO: 343104 - DNA, 201 bp, Homo sapiens
ctgcagtctgaccccattcttttttccccctcatcctgcagggaatgtgtgtggttcataactttaaaggaacgcaaggatctccttccaaacccaagccygaggatccccgtggagtacccctaatggctttcccaaggatagaaagccctctggaaaccttaagtgcacaggtatggtaaagcagttttagcaaaccaa

SEQ ID NO: 343105 - DNA, 201 bp, Homo sapiens
aggttacacgtgggctcagcatcatggacttccactcaccaaggctgacctggctactgccactgctgagtgcccaatttgccagcagcagagaccaacaytgagccctagatatggcatcattccttggggtggcaggttgattatattggacctcttccatcatggaaagagcagaggtttgtcctcactggagtagac

SEQ ID NO: 343106 - DNA, 201 bp, Homo sapiens
cgcagttgggttactttaagcaattctgccccaagtgtaggaggtgggtacataacactgaattcactccagctacctggtacgtgagaaaagaagcattkaatgctgaaatctggaagtattctgcaacttcatgataattatccttgttacaaagggccagattatgatttataggaccatctcaccttgttgctctct

SEQ ID NO: 343107 - DNA, 201 bp, Homo sapiens
agcaggtaccactcctggaaagatactccggggagtacttagaatcattttgataggtcatcatggactctcaccgctgttttctcttaggagaaaaatgsaattgacagagtatgttaccattcctaatgattttaaatcttcttataggggtgtttgcatttggactttttgctactgacatttttgtaaacgccggac

SEQ ID NO: 343108 - DNA, 201 bp, Homo sapiens
ggtggtctggaaagtgcattttgagaaccactgtcctaagtatgtgtaacacctgcatgtagcacccaagtgaactgattaacatctaagtcagatctaartgaacatgttaacatttaagggacaaatgtatcacccaaacaagtattgtgccatctacaggagcacatgtaacatttgaatgatgtgcttagaatataa

SEQ ID NO: 343109 - DNA, 201 bp, Homo sapiens
ggacatcatctgaacaggcagggagaacagctgaatgagggtgtgtgacatctaagtcagtggatctcaaacttgagcatggccagaatcatctgcacaayttgcacagattgctgggacctcaccccagagtttctgattcagcagattaagggtgaggttagaatttgcatttctaatgagcttccaggtgatgctgcg

SEQ ID NO: 343110 - DNA, 201 bp, Homo sapiens
ctagatttaatatttcagaaaaattcattcattaatttattcactcaattgagtgcccacttaatatgtagccctgacatttttaactgaatattttggtyatgggagctataacagagcttagaaacttcagaatgtcagccttctgcctattcagaagtcatgtaattagttccttgtctgttttgatgcatctagcaa

SEQ ID NO: 343111 - DNA, 201 bp, Homo sapiens
gtagaacacattgtgtttctatctttgtcttgctaaagtctacttctctttcaggtgtcattttaaatgtcactttctttaggaagcctctgctgatcccygtcctccaaattgttatatgtccctacttccctatttcagaacctattaattttgtgatttattgttgttgttgtttatttaactatctctctgctcttc

SEQ ID NO: 343112 - DNA, 201 bp, Homo sapiens
tgtgtagaagtagaatactgacttgtgtgcattgtattaatacaatgtttagtagtacccctggcctctatccaacaaatgccaatagcactcactcctcyagtagtgacaatcaaaaatgtctccaaacattacaaaagttccctggggcagggtcaccctcagctgacaactacttttgtaaaggtttttttaagtata

SEQ ID NO: 343113 - DNA, 201 bp, Homo sapiens
ttttattctcgcatgttgtattaaagaaaataatttcaccattcatggttgctattcatgaaaactttaagaaagcatgtgtccaaatttgtgatgtttasgaattcttaactggtttaaccaagtagggtgagaatacacaaactcatataactaccctgacaaatgcagaaaatcaaaggtagctactattattatgca

SEQ ID NO: 343114 - DNA, 201 bp, Homo sapiens
agctgacaactacttttgtaaaggtttttttaagtatatttcaaagacttttaagaagttatacaatatcttgcataacaaaaatattcatataacaaaastaggcactaactgatgactcaacagttagtaaagtgtagtttcaaagctttctataataatttttaaaaagtagtgtgtgttttggaagcaacttactta

SEQ ID NO: 343115 - DNA, 201 bp, Homo sapiens
aagatatctttatggtctgatgcttatccatatgtatgttaataataaataagcttagacaattatgattaagaatatagcctctggagccttactattckgtttgtaacccaagctcctctactcactagctgtatgaccttggtcaagttaattgacttctctggatctcaatttcctcacctgtaaaatgtagggata

SEQ ID NO: 343116 - DNA, 201 bp, Homo sapiens
aactcgaagcaggtcttggtggctgaagcagagattaccaacagattattagatcaaccttttcatacagacgagaaatgcttctttctaggactaaggaytgagcactggctacttcctctgtctgcctggttcatatcttccactcgaagtgataccttctcaataacggcctaccctggtttcctcgtttaaatcatg

SEQ ID NO: 343117 - DNA, 201 bp, Homo sapiens
ttcaatagttgaattgaggtaccttggcaaaaatggaattagatagagattttctactggggatcctgatgtggaaaagaaaaagcaaaagtaaactgtaygtgtttctttaatcttgtgttccatttccaatggaagttggtggttgaatcagaatgtggttggggaaacagtgttaagaattccttaggtattcctctt

SEQ ID NO: 343118 - DNA, 201 bp, Homo sapiens
tattagatcaaccttttcatacagacgagaaatgcttctttctaggactaaggattgagcactggctacttcctctgtctgcctggttcatatcttccacycgaagtgataccttctcaataacggcctaccctggtttcctcgtttaaatcatgatctttcctctaaacttgcactctcagacttcaatatttgctccat

SEQ ID NO: 343119 - DNA, 201 bp, Homo sapiens
gaaattattgaataatctatgcaagtgtaaagttcctactgaaacaagaaatatgagaataatggtaccatactagtctaaaataggagatttttccaacrtccgatgtgatctgtgattatttctccctatttactcttaaatggggcaagacctatgcatgctctattcatcagcagaagtgtgacttgctcttggcca

SEQ ID NO: 343120 - DNA, 201 bp, Homo sapiens
aatgtagatttcacattcattaaacaatgacctattacccttctggcactatagtaagccccaacgagtaagtggtagtcattcaatgaagtacccactaygtgccagacatagtgtcagctccagtggggaatgagacaggtgtgtggattcatcctccttgcacttgcagaacttggagaaacagaaaaaatcatgtga

SEQ ID NO: 343121 - DNA, 201 bp, Homo sapiens
agctcctcagctccaaggaactagcatctgctgtcctcactgtgtggctcattggtactctatagagcgtgcacaaagctgctatagccagcagcagccaygctctccagaacacgtggatctagtcctcttggaatgcgaaatgcccatgcctgtgcccctgccacctcctgttgagttcttgtccaggagtctctctgt

SEQ ID NO: 343122 - DNA, 201 bp, Homo sapiens
ctaacttgtccaaagacatcctatctgagatcagatggggtccaggtaaaaccctgagaaaaaagtgagagactttaacaccttcatcatcctctttcttyatcctttgtttagcccagtgtgcatcagttatgttcttttaggtcacaaagagctcaggtttccttagacaatccatgttactgggacctgatcatggcc

SEQ ID NO: 343123 - DNA, 201 bp, Homo sapiens
ctctggagttgctcagtcctgggttcaaagcctaaaggcaccaattactagttctttgactctcggaaagtcactcaatccctctaaacctcaattttctrtaaaataagtctaatggatgtggtgtgtgtgtgtcggggggaggcgggggaggagtgtgttggtcagtggggatgtgaatatttaaagagacaagccatg

SEQ ID NO: 343124 - DNA, 201 bp, Homo sapiens
cccaggaagagaagggaactgatttggtgtataacaaatcacgctgtgccacaagtaatgaagttgagagagaaagattaactgagggaatagagaggaaragatgcattcagtagatgctgggcaagtggaattggcagtaaaattgctattgattgggcatgggatgtagggtaggcaaataatacatttttcaaataa

SEQ ID NO: 343125 - DNA, 201 bp, Homo sapiens
tcctaaactactagggatcaaagatcctaacttgtccaaagacatcctatctgagatcagatggggtccaggtaaaaccctgagaaaaaagtgagagactktaacaccttcatcatcctctttctttatcctttgtttagcccagtgtgcatcagttatgttcttttaggtcacaaagagctcaggtttccttagacaatc

SEQ ID NO: 343126 - DNA, 201 bp, Homo sapiens
ataattatataaaatatatattaaatatagatacatatatacactaatatatatttatatacatatataagtatatatatatgttacatacatacatatcrtttaattttgattggtgaccttgggcatattacttaaacctggtgccttactttcttcatctatgtatgtatatatacttatatatgtatacatatatag

SEQ ID NO: 343127 - DNA, 201 bp, Homo sapiens
tgccaacatctgtttatgccagatgataaggtcttaaattatagcaaaagcagtggaaagaggcagaataagaagacattttagaagtaaaattcaatagsactcgtggacttgtgtcctggtgggtcatgagtatcaggtagaacgaataaatgagatgggggaggaaggcaggatgcacagggagggatgatgcatttg

SEQ ID NO: 343128 - DNA, 201 bp, Homo sapiens
gtgctataaaaattaaggtttatgttaagagctggagaacagataaaattcttaaataatccagtgtttaagagaagtatatcttttatatttttgtttgkgttgaaaactgaatttttcaagtattgtaaataagcatttccttgtatggattttcagtttggtgacttgttaagagtcatatgcctgagatcacagata

SEQ ID NO: 343129 - DNA, 201 bp, Homo sapiens
atttagtatgcaacatttggccttcagttttgaggctctacccaaggtctcagactttccgggcctaaaaggaacatggtccttcctttgctcaccccacsaacctctgctaattgttactctgttgcatgcatctaggcttcctaatgaaggtctgctgtgtggacagcactgagcagtctggttctgtacttttcccag

SEQ ID NO: 343130 - DNA, 201 bp, Homo sapiens
gtataaaagcttaatagttaaaactaattaaaagccagccagtgacaaaaatatttgacataattacaaggaaaatggatgaatcctcagtcacaggagawtgtaatacttttctcttattaataagcaaacaaaaatagtaaggatacacatgatcaataaggttgatctgatgtgcattatatataaccctcctcaaaa

SEQ ID NO: 343131 - DNA, 201 bp, Homo sapiens
taagcataatattactatattcattctctgattagcacaatgaacattccaccagctttgtactaaattataagccctggtctaactttctaattacaaaygacatgtggaatacattttctaattacagatgacgtaggtcacaaacagttctcagatgagagtaacagaaagagaccaatcaaggtagagtcatttggt

SEQ ID NO: 343132 - DNA, 201 bp, Homo sapiens
cgaactcatccagtggggagacagaagccttgttttctggggagtctaaatcctggatctcagagtcaggggcctgatagtatgaaagaaagaaagccttyccctagattttctcctgccgtctctgtagtctctgtcttctgaggagaagcttgagttttccatgaggtaaaagtgtgtgtgtgtgtgcgtgcatgtgtg

SEQ ID NO: 343133 - DNA, 201 bp, Homo sapiens
atgagacatcaggtcacagaagtccttgtggcctataacactgaacctgaacatggtggtgctttttttccccctcccagtaagtgatagagcatcaatgsatagatttaagcaaggaagtcatgtgattggtttgtgttcagaaatatcactctggaggccgagtggaagatagattggaaatgtagcaggaaatctact

SEQ ID NO: 343134 - DNA, 201 bp, Homo sapiens
  misc_feature (1)...(201): n = A,T,C or G
gagtggttggatgaggatttcctttagctgggggatagggtaagaaggcccttcagagaaggtgaagagcaaagtgagaacaagtttagtcagagggaacnatcagtgcaaagaccctgaaactggaacaagcatgaggtgttgagggtcagaaagaaggccagtgacacagaaggggcacgcgggagagtgtcagatgaa

SEQ ID NO: 343135 - DNA, 201 bp, Homo sapiens
aatgatgacatatcatagatattcaatcatcttctttttggaaaattgactacaaaattgaagaattcgtattctgttgtggcaagtgaaatacatttcaygagggacatgttataaagtccttgcctcttctcagtgctgtgtgcatgtgtgtgtgctcccaagcataagctaagatatctttatggtctgatgcttatc

SEQ ID NO: 343136 - DNA, 201 bp, Homo sapiens
aagtaaggaagttacattttccaaaaaaaatgtgaagttcagttcagttctgctcacaaatatacttgagtaaatatttttgtaaatataaattattaaayagtaactttttaatactgaaaagtaatgaatagacagcattagaatttgatgagggtttttggtttgtttaccatatagaaggaaaaccaaattaacttt

SEQ ID NO: 343137 - DNA, 201 bp, Homo sapiens
gaatctctagttaagattttcagttttttgggaatcaaatttgtgtgtgcttctagatttttttccatgttgagattggccttaaggttgggacctataarttaaagtaaatctggccaggcatggtggcatactcctataatcacagctactcagagggctaaggcaggagaatcacttgaacctgggaggtagaggttg

SEQ ID NO: 343138 - DNA, 201 bp, Homo sapiens
cattacattgtgtagtaacagcaacacagatttatgttctcaagagagttaaacacccacctttctttttcagtggcaatgactaagtaaggaagttacaytttccaaaaaaaatgtgaagttcagttcagttctgctcacaaatatacttgagtaaatatttttgtaaatataaattattaaatagtaactttttaatac

SEQ ID NO: 343139 - DNA, 201 bp, Homo sapiens
taatcacagctactcagagggctaaggcaggagaatcacttgaacctgggaggtagaggttgcagtgagctgagatggtaccactacactccagcctgggygacagagtgactccatctcaaaataaataaataaataaataaatctcttggccatttctgctagtacttgctccagtctatttcctttttgctctcctct

SEQ ID NO: 343140 - DNA, 201 bp, Homo sapiens
cacaggaaatggcagcccggttaggtgtggaaaagtgcttagatcctccacattttgaacaatgaagatggtctaatgtgtgtcattgtctgatcgtttakttaggtgagcgttatgaaatggtacaggtttttctcaactacaaatacccaacataggaatactagaagtggacaactggtcttcgctctggagatagag

SEQ ID NO: 343141 - DNA, 201 bp, Homo sapiens
tgactttgacggagagtattaaattcctttgattcacaaatccaacaatacatttttccccccaaccttctcattataagaaagctgcctgtcctcccagrctttaagcataaaacatcatagctaaacttctctatccacttctaaaccattgtatagtttctcaagttatatttatataatgtgcaaagggaggaaagg

SEQ ID NO: 343142 - DNA, 201 bp, Homo sapiens
tgattaggcaaacttcttttgttgggctaaaatcctatttttttttagattaagtggattaatctatttttaaatccttaagtaagttatctttattttgkacttacaacatcatacattagggttttaatgtggatattattatagcatgaacaggccaacaaaattaattataaaagttttctttactcttctgtctag

SEQ ID NO: 343143 - DNA, 201 bp, Homo sapiens
cactaaaaacatccctccccacagttaatgataaaagcatagactcttagagctacatggggccttagatcacttatgcaaatccctcgtttcagataacrtaacaggttcatagaggttaagtaacttgtctaagatcatacaactgattattaacggagtcacaaccaaacctgcaggtcttgattctgtcctaatcaa

SEQ ID NO: 343144 - DNA, 201 bp, Homo sapiens
agataacgtaacaggttcatagaggttaagtaacttgtctaagatcatacaactgattattaacggagtcacaaccaaacctgcaggtcttgattctgtcytaatcaatgacaaatttcatactcaaaaatttcaaaaacataactataaaacttatttcagaatgtttatagcaagaatgatttcataatgggcagtgtg

SEQ ID NO: 343145 - DNA, 201 bp, Homo sapiens
gtttaattagaaatctataggataaaaacctacccccatcttacatatgcaattgataatataatcctgatgatgcctggctccagtttcaatagaagtaraagctcttatttgatttaaaataatcagtgaattaatctaggtatttagaaattaaagtggggaaacaagcccccagtcacagaattcatatccttagga

SEQ ID NO: 343146 - DNA, 201 bp, Homo sapiens
gctttggttagaaacagttttggctcattcacaaagcagtgacaaaagtgaccaacttccaaaggcaaagcaaatgattctgtgactggctttatttgctyagggaagaatttgtgaattttgtgccaacagcatatgtacacattgctgtagctatctcttcctcctttttagagccattgaggcttcttagcttgatgg

SEQ ID NO: 343147 - DNA, 201 bp, Homo sapiens
atccacctgcctcagcctcccaagtgctgggattacaggcatgagccaccacgcccagcctagactctccattctttataggaaagcctatttttttctcwttctggaagtttctggcatcttttaattctccctaaaattctgaaattttactgtgaaatttcatacaatgtcttaataggaatctattttacccattac

SEQ ID NO: 343148 - DNA, 201 bp, Homo sapiens
atcagagtcttttgcagatatgagaggggagggggttggaggtgagaggagagggagttggagctaaaggcaaacttttagtcaccccttccacagttctycttggaacaatcgtaaatatctgccatgtgttgttcacttaggtaacatttaaagcaccaggccagatgctgtgagagacataaagcattatgtaagtca

SEQ ID NO: 343149 - DNA, 201 bp, Homo sapiens
tccacctgcctcagcctcccaagtgctgggattacaggcatgagccaccacgcccagcctagactctccattctttataggaaagcctatttttttctcaytctggaagtttctggcatcttttaattctccctaaaattctgaaattttactgtgaaatttcatacaatgtcttaataggaatctattttacccattaca

SEQ ID NO: 343150 - DNA, 201 bp, Homo sapiens
gtgggagttctgcagtgtagaacagattgtttcttgccttttcctgctgctgatttagaattctgctttctcagtctaccaagtcagttgtcacccatccwtccattctctagcccccaacattttagattattgtctcctctcccattttcctttgtgagttcaagcatttaaaaaatatcttgcttgggatttaatgtg

SEQ ID NO: 343151 - DNA, 201 bp, Homo sapiens
ggtgagagccttcttgctgtgtcatcgcatgaggaagggcaagcaagcatatatatgcaagagattaaggagagtgaactcatccttttaccaggaacccrcacccgtgacaacagcattaatccattcacaagggcagagcccccatgacctaatcacctcttaaaggccctacctctcaacattgttgcattggggact

SEQ ID NO: 343152 - DNA, 201 bp, Homo sapiens
aatataaaatagcttggcatgtctggagaacctcatgtagttttggatttgtataatgaaaatacgaggagtagagaatgagactagagtgttcatgagasatcaggtcacagaagtccttgtggcctataacactgaacctgaacatggtggtgctttttttccccctcccagtaagtgatagagcatcaatgcatagat

SEQ ID NO: 343153 - DNA, 201 bp, Homo sapiens
caccttggctgatactgcctaattaatctttacagctcatctgtaaggaggatgcagtttaaatgtgtcccaatctgtagatctaataactatggagcatrgaagataaattgtgtttggcctgagtggctgggtttagaggagttctctacagtcactataatgaggcctattctaagctttgcacacaaggggactttg

SEQ ID NO: 343154 - DNA, 201 bp, Homo sapiens
tctaccttgggctacaaacccaaattctttcagggacaatcatgctgtgtgacatcgatgaatatgacagtgtgacagggcctgagtctggccagagaatkcatgtcccacctaaaggtgttccaattaagataaacagcaatggcaacaaaaatccttgccacataagcagaactcctctctgggatgggttaggcctgg

SEQ ID NO: 343155 - DNA, 201 bp, Homo sapiens
agaattcatgtcccacctaaaggtgttccaattaagataaacagcaatggcaacaaaaatccttgccacataagcagaactcctctctgggatgggttagrcctggtcattatttttgtgattcatgggctagttatttctttattccttgaccaatagaatgtttgttatttttcatattaaaataaaacacagtttctg

SEQ ID NO: 343156 - DNA, 201 bp, Homo sapiens
agatgtttaatttattgctggaagctgtagtctccgaagattttcagctctctaatgtgtgaatgaagagcttggccggtggagcagcaacaagggagatraattagttcttctgtagcttaccctgacacaaacataaatagaagtctaaaaatctgggagaggaaagatggtttattctttttcttgttgtattgttgt

SEQ ID NO: 343157 - DNA, 201 bp, Homo sapiens
tattattctttgatcaaaatgagagctttcacatgggaaatcaatttttgggggatttgggtcttcaaactttcatccaaaaataaagactatatattccrtgacatagtatgagtaacaaatgagagaatttgaaatgcagccttaaagggtgttaaaataattttgtttaacatggactgaagatcagcacagagctca

SEQ ID NO: 343158 - DNA, 201 bp, Homo sapiens
gattgcaattagtaaagatgggaaaattacaacctcaaagcactatttagatggaatgaaaaggaaaatggagggtagagttaggaagatatctggaaagrgatgagagagggtttcatcacagtgaggaaagattgtttcctaggaagaagaagaggtcaatggaggagagagtgagatggaaggtgataggaccagaat

SEQ ID NO: 343159 - DNA, 201 bp, Homo sapiens
ttcctgcctgtctacaactccatattaatgccagcatgttctttgtaaaacacagttgtgtcatattgttgctctaactagaaatttctaatgccctctayttatagcattggtttccagacttaagtctatcaaatcatctagagagattaccagacagactagaggctgcctcttcatccttcatgtctttgtcaactt

SEQ ID NO: 343160 - DNA, 201 bp, Homo sapiens
catacctttcttagctaattagctactccatctaaaggcttttatctcttaaatatatctcaaccattccagtttccttttcctttcttgtcttgacttgyaattcggatctcatcaactctcacttgaattgtgcagataatctcctaactggcctcccagcttttggctttctccttgccaaggcattcgaaacgcctc

SEQ ID NO: 343161 - DNA, 201 bp, Homo sapiens
ataacatatggcttgatatctggtgctaaatctcccccatattatagagatggaataacaagccctcaagcctccctaggggagctattgtgaggaataartaagaatattccactgtgccatagtctctggcaattggcaatgtaagaagctgaagaaaatagaaaacttctgcaaaaatggacattctctacaaatttg

SEQ ID NO: 343162 - DNA, 201 bp, Homo sapiens
gatcccatctctcaatactaccactttggccattaagtttcaacacctgaactttggaggagacatattgaaaccattagcacctaataattgcaactctrtactgttaaaatataagttcctcttagctgatatttcctcagactcttctttggcatctcctaagatgaaacactttgaagctaaaatatagtatgcttt

SEQ ID NO: 343163 - DNA, 201 bp, Homo sapiens
agtgtttataatttacatttttctggaaaaaatttctagatatgcccattaattattgtggattttttaaaaaacttaaatccattttctcattttctgtscatactgcagatgactgctccaaatctcctttagagattgtttttctcctgacatcatgccaccaagagatatgctttccatcttcaatatacccctcct

SEQ ID NO: 343164 - DNA, 201 bp, Homo sapiens
aaaccctttattccttagttcagtttttttcaaagcccgaatggggattggcagtcttcatgctctgaacaattgggtattcttttttcttagagcccagrtgcatttttttgaaagtcgttccaggggcctgagatgaagtgggggtgtgagaagtaagttggctagggcagatagaacctaagtgtcttctccttaagt

SEQ ID NO: 343165 - DNA, 201 bp, Homo sapiens
agtcactcaatccctctaaacctcaattttctataaaataagtctaatggatgtggtgtgtgtgtgtcggggggaggcgggggaggagtgtgttggtcagkggggatgtgaatatttaaagagacaagccatgtaaagtgcttagtaaaatgcaaacaaaccagcaacagcaaaacaaaaccctatgaatgctattatgat

SEQ ID NO: 343166 - DNA, 201 bp, Homo sapiens
ccagcagtatgtatgacagtcccatcataaggcaactcagctctcccctcaggttggtgtgtcctaggggaattcctgttagatgatgtgccaatacacamcagcatgctttttgctaaaaggcagattctgcagtctaccatttttccatcatatgtctcagagaatatgggcaattgtatgtgatgtggcttgttctac

SEQ ID NO: 343167 - DNA, 201 bp, Homo sapiens
ttgaatatatttagagaataaacccatgaacccaatacagataaccctaaaccacaaagcagatgagctcctctgtttaaactttttcctttaaagccagkctagaagccctttaaagagtacttgcaaatacaagtgcagtactattctcccaaaaaagaattctgccatcacctcttccatgctgtttataagttacta

SEQ ID NO: 343168 - DNA, 201 bp, Homo sapiens
atgatagtagatcctttattaattcacccacagacaacaggacctataatgatacattctaagtaaagcaccaggactttaagtgttttggttgtctatcycaactagtgacagtgaaagaggctacagactacttctctcccaacctaccatctaagagtatgaagaaacgcatttaagaaatggagtggggcctggtgc

SEQ ID NO: 343169 - DNA, 201 bp, Homo sapiens
actttatggaatatatggtcatccacttgaataaatggaataaaaggatgaatgaaacgataaacaaatgtaaagatcctttagatatcaatggaccatayggttcaaacccttgaacaaaactattagctccttgagggcaaatcttttttttctgcattcttcatcattctatagaagctgattctcaagaactgtggt

SEQ ID NO: 343170 - DNA, 201 bp, Homo sapiens
tctgtgggttttctctgggtactctaccttccttgcacatcccaaagctacgcacattaggtgaagtggtgtgcttatgtggtcccagcctgagagagtgrgtgtggtgtgagtgtccctcccatgggatggcgtcctgtccagggctggttcctccagttgctgggatgaataatatcaaccctcaacccttagtatata

SEQ ID NO: 343171 - DNA, 201 bp, Homo sapiens
tggtccagctgcagctccagaaccagctctggacagtggttgacacatttcttgaagacctgaggataatctgaggtaattcaaatggaaaaaaaaaaaargaaacaataacaattcagcatcagacattattgctttccaaaatttcttatgaaacactttatggaatatatggtcatccacttgaataaatggaataaa

SEQ ID NO: 343172 - DNA, 201 bp, Homo sapiens
ttccctattaataatgacttgatgaggttaagtgaattgtccaagcttacacagccatttagcagcagaagaggggtttgaactgtccagctccaaggccrgagtttttcttcaggaaaactttcactgtatcccttcctacaacccctacaccatgcccagtcctttcactgtcatgactattgcgggaagggaaaaaag

SEQ ID NO: 343173 - DNA, 201 bp, Homo sapiens
agtagaccagtggccttggagtgtctgttctcactgtggtgctagtgtcactgggacaactgggcaactgggcatcatgacataaaaaggctacatgttaytgctcctaaattgttctgtttggggagcttttttcaggttaagtagataattgtatcctcttcctcctcttttttttttttcttaaaaagagaaaaaaaa

SEQ ID NO: 343174 - DNA, 201 bp, Homo sapiens
ggatttacatttacatggtctcctctaggttcatggtcctgattctgcatattcagcttagtttgtgtgacttctctgtcattcaagttcttatccttttycacgtgtcatcaacatggagccaaggtgttgttttctcccccctactgtttgtaacatacacatacccactcacaaggcagttgtttgtagaaagtataa

SEQ ID NO: 343175 - DNA, 201 bp, Homo sapiens
accagcttcctctgaaaaagacgtgtgcttctaggctcatcttagtgtgacttattagcctctcattagtgtaatttcctgaattagtctttgctaaagcrgctatgaagttattccatgcttggctggctttataaaaaataattttaaagatgtcagcagagctttatacctgacaaaatgggaaccagaactatttga

SEQ ID NO: 343176 - DNA, 201 bp, Homo sapiens
tcatgcatagcatgtgtattcagctctgccctttcccttctttgaggcagccctgggaaagaccagagctcttgagcctctcaggctcgagttctatgccytttgctctactgatccttgcaattattgactatcagaaacttgctgtaggattttatatttatcccaaatgtcagaatcattttgaatttttaatcttgc

SEQ ID NO: 343177 - DNA, 201 bp, Homo sapiens
atccttttttaaaagctaaacttccttgatcacatattatgtgccagacataaaactttcacataaaagcttcagggtaggcattactatcccctttataygatgaagaaaccatgtttctgaaatattaaatggttttctcaaggtcacagagtaagtggtggaaccgagattcaaattaccaccagtctgactccaaac

SEQ ID NO: 343178 - DNA, 201 bp, Homo sapiens
ttctcctaagtttggaggactgacttcagctgagtgaatggaggcatggcattgaatggactctccattaacctttcatgtaataattttgtgtgtgcttrttgctaaattcataaactttcaattttgagagtcaaacatgtttaattagaaatctataggataaaaacctacccccatcttacatatgcaattgataat

SEQ ID NO: 343179 - DNA, 201 bp, Homo sapiens
tttgtttcttggagagaatattgtttgcctaaaaatatgtgattttcaatgcattttactttttactctatttttacttcaatgcattttactttttactkaaagtagtattttagctaactcatttaaaattcccatttctcttgtattcactgttcagataaaaagatataagagaacactatgctttggaaatatgat

SEQ ID NO: 343180 - DNA, 201 bp, Homo sapiens
tatttctaaattcatcactaaccaaagaaaaatcattttttaaaggatacagcatttttctcatataaaattggcaaatgttttcaaagaacttagtctaygtttacaaaatgtagagactttcatgtaattctagtcaaagcataaaccaatattttctttctgaagagcagtttgttaaagatgtattaagagcttaat

SEQ ID NO: 343181 - DNA, 201 bp, Homo sapiens
acagaattctcttggctcgtcctctcaccactgtcactttctcatgcatagcatgtgtattcagctctgccctttcccttctttgaggcagccctgggaargaccagagctcttgagcctctcaggctcgagttctatgccttttgctctactgatccttgcaattattgactatcagaaacttgctgtaggattttatat

SEQ ID NO: 343182 - DNA, 201 bp, Homo sapiens
atccttgaaaagctaagaacttcatctttatatttctctcatccctctgaggggcttggcacatgattggtgtgtagcaggagtttgctgacttctattgytttaccagagagacctcaagttagcaccaaaatcagtttagtttaacgaaagatatagcggaactataaaattttagaccatagagatccttgatggatt

SEQ ID NO: 343183 - DNA, 201 bp, Homo sapiens
tgactgttagaacaagggaaaggctaaaagccacacgttaggcagaaagttaaaccagtcttcccaaagccagttcagtactcatttttgtacaatgcctraagctgcacaagtagttaatggtcaatctagtactgcatccaggtcttaaaattccgaaggccatacatttctattacaccatgacagccagctcaaatg

SEQ ID NO: 343184 - DNA, 201 bp, Homo sapiens
ttgttttgatttgcatttctccattagtgagctcatgtatatgaaagttagtcatttggatttctctagcatttggctggtaaatgtttaactcctggctwtaggggatgatgaaagagaagggagtttgatttgttgtgcagtttgtcaatttccatggtataaatactgcagcatgaccaatttcaagctaccctttag

SEQ ID NO: 343185 - DNA, 201 bp, Homo sapiens
tttccataaatgcacagtgttactcccacaatgtgaaacacctgtcaagctagatgaactaggtgttcacctgattactttctctagtataattggcttcrtttagatgcagccagagggaagcaggtgcaggtctgaacacttgtgatctgacagccacaaggagtttgaccgaagtcccaatctgttcatttatgcagg

SEQ ID NO: 343186 - DNA, 201 bp, Homo sapiens
gcagatactgcacagctgggagttgggccagatcaactgaagcagtaaggctcaggggtacatgctagcaccaattgcttctcctaagtttggaggactgrcttcagctgagtgaatggaggcatggcattgaatggactctccattaacctttcatgtaataattttgtgtgtgcttgttgctaaattcataaactttca

SEQ ID NO: 343187 - DNA, 201 bp, Homo sapiens
aaattgattttggggtgacaccagaacatcttggaaagcattagtagagatcccagcatctagtgatttcatagtaaatgccaagtattatttttattagsgaagaagatgggaagagaaggacaccatacagccaaagactaaatttcagcatttagcaaaatatagggattaaggagagaaataagccccaggaaagag

SEQ ID NO: 343188 - DNA, 201 bp, Homo sapiens
ttccttattctcatagaattccctcagattcaactaaaagagataataacagcaacaataatagtaatttactccattaaagatgaccactttatgctaarttccaaataactctcactacttaacagcagattttggactctactcaagaccttccagtttttcagagaatgagaagaacattctgtagaagcacaaaac

SEQ ID NO: 343189 - DNA, 201 bp, Homo sapiens
aggacttgtttaaatgcctccacgtggaatcctatttaatcttgacaacacctatgactcctattcccactttacagctgaagcagctgaaacagagaggycccagtagcttgtccatagctaccaagttacaaagtatcagagtcaggtctcaaagcccattttcataattgtacaagcaatttcctttcatcaaatgta

SEQ ID NO: 343190 - DNA, 201 bp, Homo sapiens
gatttcttgctttccttattctcatagaattccctcagattcaactaaaagagataataacagcaacaataatagtaatttactccattaaagatgaccastttatgctaagttccaaataactctcactacttaacagcagattttggactctactcaagaccttccagtttttcagagaatgagaagaacattctgtag

SEQ ID NO: 343191 - DNA, 201 bp, Homo sapiens
tgctggagatgactctccaggtaacttcagcatgacactctggggccagactgcatttgattttgctgccttctcacattctgtcccatctccacagtacwgaaagtacattcatttatgacacctcaatccatttccactccaaaaccctagtgaaacgaagtgccccactcacttctggaagatggctttcttctttcc

SEQ ID NO: 343192 - DNA, 201 bp, Homo sapiens
taaatactgtggttggtatggatttataaagcacataatattaaatttgatcagagaaacttttaattgacaagtgaggagttgatatctcaaaagggaargatatgtattttaaagtttcattctggaaaagggcagaaagaaacttaggaaggatagaaatgaagacattaaaattaatgtctgaccttttaaaaagta

SEQ ID NO: 343193 - DNA, 201 bp, Homo sapiens
ggaatggggagacatgctccgacttcatggggtcagggggactatcaatttaagttatttggaattcttctgtacaggagattcatttcttctccctcatktatttacttagtcatttatgtcagtatggactcgtagatgtttattatatactttgggttataatccaatactactatattttgctcaaattgttccagc

SEQ ID NO: 343194 - DNA, 201 bp, Homo sapiens
tggctaaatatggagtgtagaaaagaaaggaggactcatggatgactctccattttctgtcttgagtaactgtatagatagttgtctaattttcagagaargaagtactgtgagaggagccttcaggaggtggagggagggaacattatggttcagattggaaaatcttgactataaggtgcctaagaaatttctaggagg

SEQ ID NO: 343195 - DNA, 201 bp, Homo sapiens
atggttgtatgtcttgtgttctttccaaagcagacactgagatggaataggtacatgaaaggtttattggggaatatacatgtgaagagagaggcagcagwactgggcaagtggagacattgctcatgatgcagacagatgaggtctctgtgagcctaagggagttgttctagggcaaagattgctcattcaaggagtcct

SEQ ID NO: 343196 - DNA, 201 bp, Homo sapiens
caggatcctggtgctttctgtgtaagtctcattccctccttttatttgcagtgctatttgctaagtgtataggtagccaataatgaaggcattgccatacwttacttgaacacggtaaaacaagcaatgaccttaagccattaataactgggaccaatagccacacaagtgttcatgggcttgttttgctaccatgtcttc

SEQ ID NO: 343197 - DNA, 201 bp, Homo sapiens
ttgatgtgttctagaatcatacagaatagcagagcagcatcctaagcaatgagctaattgccaggttctctgacattctggatgaatgcttgagcatgtaycaatgaagcctcctgtgtggcagtattacttgtcaccctcccctaccattggtttacaaagggatggcaactatgtagcacttgcgctgccacttctctc

SEQ ID NO: 343198 - DNA, 201 bp, Homo sapiens
gttttctcatgattaacagggcttatgggttttggggaggaaaatagtgctgttctacccatatcgtatcaagagtacatactatcaatgtgacttataastattgatgttaaccttgatcacctggctgagatagtgtgtgtcagatttctccactgtagcaaattacttttgtccctacccccttccgtactttggaag

SEQ ID NO: 343199 - DNA, 201 bp, Homo sapiens
atacatgttcactcttacatatacacattttacatgattggtctgctgtagtttatacttgggacagcattgccatttctatttaaatgaattttttcctktaatagtcttaaacatgtggtatttgagagaacagaataaaatggaaacacctttacatctttaagcaaaggtccagatggcatgtttttaaaggtcaaa

SEQ ID NO: 343200 - DNA, 201 bp, Homo sapiens
atgttttctcatgattaacagggcttatgggttttggggaggaaaatagtgctgttctacccatatcgtatcaagagtacatactatcaatgtgacttatmactattgatgttaaccttgatcacctggctgagatagtgtgtgtcagatttctccactgtagcaaattacttttgtccctacccccttccgtactttgga

SEQ ID NO: 343201 - DNA, 201 bp, Homo sapiens
gatctggggatggctgcctcttgtctctctgtcatcctgttctcctctgactgtctctatcaactaggtggttatgcggtggatcataggaagagccactyggcttgtttccacttcagatccagctccctgctgatctgtcaggatatgacctgcttctttatgatatgtttgtgaactcagatctcattgcctctaaca

SEQ ID NO: 343202 - DNA, 201 bp, Homo sapiens
tttgtgtcttttgagatttatttgtagaatccttcctttttatctgatggttctttttctgttaaatgatcttaatccaatttttcttcttttcttctttrttggaggaattcagttttgtttaattttgcttgctttagttttgtagttttatgcataggtctcaagttggtgcctttttgtttattagttattcttgat

SEQ ID NO: 343203 - DNA, 201 bp, Homo sapiens
tgtatgtattcagaacttcttatttgaaaaatgcctcctctgcagggtattgtagatgtcatattatgagaaccctgacattgaatcgagcactcacttcytttcaaacctttggaaataggctgtattgattcttaacatttctctggcacatttgtggaaaacagcttttctcagaataattggtcttggtttcccagc

SEQ ID NO: 343204 - DNA, 201 bp, Homo sapiens
cctacatgtgtgcagttaggctgtcatcaacctgcctctctgctccgagtggacggaatggagtttcaattgcctagggtgccttgccttagtataactgygaggtgggtaaatgagttgagtcttccatactctctcctctggaatgtacctcccttggaccctcatacagtaaatgcccttgtgaccaatcttctttac

SEQ ID NO: 343205 - DNA, 201 bp, Homo sapiens
actgaagtcaaatttggatgcccattcacttgagggtggatattaggagagggtcctacatgtgtgcagttaggctgtcatcaacctgcctctctgctccragtggacggaatggagtttcaattgcctagggtgccttgccttagtataactgcgaggtgggtaaatgagttgagtcttccatactctctcctctggaat

SEQ ID NO: 343206 - DNA, 201 bp, Homo sapiens
ccttcatggaaaaatttgtcatgtgttctaaaatagaatcccagtggatgtggaaactctgtcatctagctatttggcagcagggcaggaactgcaacccrggtttgactcataactctgtgtctttgcattatactctggcaaatacttctattactgtgctataatcaaagactttttaccccccatccatcctattaa

SEQ ID NO: 343207 - DNA, 201 bp, Homo sapiens
gagcttaggacaatttgttaatggtctggtttagatgaacttattcagtacctttgagaggtggtggagaggtctcctttttattttgttatctcttgtakctaattatgtttctcagcatagtgtgagccctgcagttgctggagatgactctccaggtaacttcagcatgacactctggggccagactgcatttgattt

SEQ ID NO: 343208 - DNA, 201 bp, Homo sapiens
tgtaaaaatgcaggaacagtgtatatggcaagggccctgattgaaaatattgaaacaccattcatcattgtggtatgaactgctaataagcatttcatgamctggctaatcttctggtcaataaacgttatattcacattgtaaaagcaaagccaaaaggataagaataaaagctctatctgcctgtcatctctctattta

SEQ ID NO: 343209 - DNA, 201 bp, Homo sapiens
gctataaaaattaaacttcagccctctttgtctgcatgattttattttcatgcaaatacttgggaattggtgataatgtctacctttctcaagcataaagwtaacactattatcactattagttaaatatgttttttcaagtctcatttgccttagttatactggtaggtcacctggatgtagacacatatatatgcttgc

SEQ ID NO: 343210 - DNA, 201 bp, Homo sapiens
acttatcagtcacttcatatggaattcacccaggataatttctcctctgacttttccctaatcttctgccccttttctccagagctgctttccctttgcayttttttccataggtttttggggaacaggtggtatttggttacatgaataagttctttagtgatgactttggtttgcccatcaccggagcagttacacaga

SEQ ID NO: 343211 - DNA, 201 bp, Homo sapiens
ttttccattcctgagtaactttacttactataatagtctccagtcccatctaggttgctgcaaatgctgttatttcattcctttttatggctgagtagtaktccatcatatatatatgtgtgtgtgtgtatatatgtatgtatatatgtgtatatacacacgtgtatatatacacacatatacatgtgtatgtgtatgtat

SEQ ID NO: 343212 - DNA, 201 bp, Homo sapiens
ttaaggtgtaatatttctgttaggccttcctgtcttcagctgtgctttggacaaacccttcttttagacaggatttgttcttcacaaagacttattgcttwttatccagtaccctgtgatccctgaggttattgaaaattgatttgttccagggcctttccaaggtgctggccactgaaatccttgaccatcaaatggagg

SEQ ID NO: 343213 - DNA, 201 bp, Homo sapiens
aaaaatattgatatgtgaggtaatgcatatgttaattatcttaatttagccatttctccatatatacatataacaaaacaccatgctgttcaccatacatraatatgtataacttttacttgtcaattaaaatagaggctgagtattaaaaatatatacaataatttagataattaacacattattttttaatgcattaaa

SEQ ID NO: 343214 - DNA, 201 bp, Homo sapiens
gatatatgaactgtagacatctataaacattcagtaaatatgtccggttgggtggtgcctatatgtgtctaaatttaaaagagtcatcaatcctgaatatstggatttgagcattattagcatattgtgatggttaaaaccatgtagataaatgaaattacccaggataagcatatatggtgaaaagaaaagtctgagaag

SEQ ID NO: 343215 - DNA, 201 bp, Homo sapiens
caagtatttattgggtgcctaaatgggcaaacattggggttatagtgatgaacacaacagatgtagtcttatcatacttttgggattttacttttaaaagyacaaattgccagttgagattgaaagatgtgtcttttcttcccttagggaatataagagaggacaaagaattgagcttaaaagaaaatcattgatgtaaga

SEQ ID NO: 343216 - DNA, 201 bp, Homo sapiens
acataaaaaaccatattgcataatagcctttttagcaaccgttacttaaaacctgacagtgaaatgagcatatataccatatggcatgtgtgtattatgcytttatcatattacttgaatgtacacttagctgcatcccattttaatgaaagggatttcttgctttctttatactcagagaattccctcagattcaactac

SEQ ID NO: 343217 - DNA, 201 bp, Homo sapiens
atttttatattcttctttttatttttaaatctatgtttcctaagtactctctaaagaacaagtgttattgctattaaaaagaaaataagcaattcaagtcrttttcagaaaataacaaataaaagctaggaagatattcctgctaagggtaaatcaatcttctcttgatattattagaatatctgattctatattattgta

SEQ ID NO: 343218 - DNA, 201 bp, Homo sapiens
gtcataaaggaatattaatcatatattagatgatgacccttggaaaagtatggacagtgtaactaaatatctaaaatgatatataccaaaacatgactagyggtggggtaatgggtgatttttatattcttctttttatttttaaatctatgtttcctaagtactctctaaagaacaagtgttattgctattaaaaagaaa

SEQ ID NO: 343219 - DNA, 201 bp, Homo sapiens
tgtggaggaagcccccagaatacttaaataattaacttcccagtgtggattataccctgattgggcctgcatgtctttgaggtgatagattctgctctgcyctttacaaaagcagcattactctgtagtctcacatatacagattgaagatctcattttgccattctaatatcttgaaattataagatatgaaatatatct

SEQ ID NO: 343220 - DNA, 201 bp, Homo sapiens
aatagcattgtaattcagttccttttatccttattcttcctttgtttctttatttctggtaaatcccacttcatgccataaattaactccaaacaattaarctacatcttttgtctgctttggaagtttcagaattcttttcatttccaagagctattttttataaaatgtgtttttatgttaatatgcaatgggtttatt

SEQ ID NO: 343221 - DNA, 201 bp, Homo sapiens
ttgataagcaccaaattgtgagttaaatgtggcaaacatgggaaaactactttagcagccactgtgtcaccaacccacaatcccattttcttgcttccacwtttttcagctcactagtgacctcccatggggcttcagtctatctccattctagaaacaatctgatattaggcaggaagtttcaaggacccccatcctctt

SEQ ID NO: 343222 - DNA, 201 bp, Homo sapiens
gggtgcccagtccagccttgcctacctcttgagcctcatcctacctctctgtgccccatgcacactggcctttcagcatttccaggggcccttactccctygtgctgcaggaacattgcaccctgcgtcctgtctctgaagtgaattcccatgtccatgcttatcctccagatctcggctcagggctcacctcttcaggga

SEQ ID NO: 343223 - DNA, 201 bp, Homo sapiens
atttctcaacataaatttggtgaataagggtatcaccatagtttaaatccttattaaataaaatgggtgcccagtccagccttgcctacctcttgagcctyatcctacctctctgtgccccatgcacactggcctttcagcatttccaggggcccttactcccttgtgctgcaggaacattgcaccctgcgtcctgtctct

SEQ ID NO: 343224 - DNA, 201 bp, Homo sapiens
aaacacaaatggaaatcgtagaaagccaggtgaaggaatttcaactgtgagattctgtaagaggttagcttggaacagaatagaaatacagcaactgtctrttcagtgtatctatgaatcatttttgaatgggggtaatagttggaacgtggtgtttggagaagatacacatgatttcagtatggacaatgggatagagag

SEQ ID NO: 343225 - DNA, 201 bp, Homo sapiens
gtgcttacttcattactgttcttgctttgcagctattttatgcacatgttactctcttccatttactctgcaccttcttcaaggcaggtagacatttattytttaatttagagatacagagcaagtgtaagtaattccaacacgcattggtgataacctctatttacattttaacgtgtatccttgcaggctttctttttg

SEQ ID NO: 343226 - DNA, 201 bp, Homo sapiens
taatcaacttagacaagctatctcctctaacaaacctttacttatgtttattccaactagggctgcattattatttcatgggccctaagcagttttgtggrcacctttcttcatgaaaaaattaaaatttgtattttacaattgaattggcataaaactgaatatattaatattatatattgaaaacatttttgtctacct

SEQ ID NO: 343227 - DNA, 201 bp, Homo sapiens
agacatctttattatggagcacaagtcacattttaaacaactgaagcttattattttgggattttcttctggatttgccatcacttttaatggcaaaaagygcaattacatttgcaccaacctagtaagattcactcatttgattcctgaggctcccagagtcgtttagagttaattgtccctagtctgtattccctagac

SEQ ID NO: 343228 - DNA, 201 bp, Homo sapiens
ggcaaacttggaaaggttagctgcagggtctgcaggcagagaagaaggcctggaacctggaaggggacttcttaggagatgatatgaggaagcacagatarggaaggagggaaagacagtgacaggcagaaaatagggacagttcagatggtctgaagcattaaaaaagtgtaggcgttttcctttcaaatgaagtcagag

SEQ ID NO: 343229 - DNA, 201 bp, Homo sapiens
ctctatgttatcatatggtgtaagtgcttgtgttgtctttgggcttgtgtttggaaatatggtttactctgggtcattcatttatcattgtgtccaccagwtttgtgtaatcctcatgatgatgataccttaatttgctacagagtcttaggtcatgctcaaagttcagttttgggagcagcgggaatgggcttggcttga

SEQ ID NO: 343230 - DNA, 201 bp, Homo sapiens
gtctcctcctggcatgcagtaattccttccctccacatgcagaacccccacatgactccatagttaccccaagcagtgcagaactgagcttgacagtttcygtatggtgcttcacactttggggaaatgtgggaatgaggaatgctgagagtgcacctttcattcctccaaattgatataggaagtggtgctggcagctgt

SEQ ID NO: 343231 - DNA, 201 bp, Homo sapiens
tttaaaagaaattctaattttgtgaactttgttcttctggaccaagctgaaggtggaagaaatgatgggggctgccccatgcagtcattcagggtctcacrgtgaaggtgatatggcatcctcacatgtagtttcacagatcctttatgtgtcaatcagtgtccagctggcgcttaagcagagagtggagaggttgtgagt

SEQ ID NO: 343232 - DNA, 201 bp, Homo sapiens
tctcggaaagtcactcaatccctctaaacctcaattttctataaaataagtctaatggatgtggtgtgtgtgtgtcggggggaggcgggggaggagtgtgytggtcagtggggatgtgaatatttaaagagacaagccatgtaaagtgcttagtaaaatgcaaacaaaccagcaacagcaaaacaaaaccctatgaatgct

SEQ ID NO: 343233 - DNA, 201 bp, Homo sapiens
ctctgttgcgaggtcataaatttttttcctgctggtagtcaactattttataggttcaaactgtaactgaacaatataatatttctgtctcagtacaagtmaccaaaaaaaaaagactcaaaggcaggacctatatttagtgagcaaataacattacttcatataatatcaccatcattatcttggtctgctttaggatag

SEQ ID NO: 343234 - DNA, 201 bp, Homo sapiens
cccttccgtactttggaaggaattcactatgcacattcctcacttaaggaatggggagacatgctccgacttcatggggtcagggggactatcaatttaakttatttggaattcttctgtacaggagattcatttcttctccctcatttatttacttagtcatttatgtcagtatggactcgtagatgtttattatatact

SEQ ID NO: 343235 - DNA, 201 bp, Homo sapiens
ttgaacctgggaggtggaggttgcagtgagccaagattgcaccattgcactccagcctgggtgacagatggaaactctgtctcaaaagataaaataagtgwataaaaaataaaataaataaaaaaacaagcttaaggaagatggtttctacagtgttacaaactacagtgaaatggagtaaactaggggcagaaaagtgtt

SEQ ID NO: 343236 - DNA, 201 bp, Homo sapiens
tagggaatatgagaataacatcgcaaaaaaaccagaaaaggaagaatggcacataaaggaactcgaagcaggtcttggtggctgaagcagagattaccaasagattattagatcaaccttttcatacagacgagaaatgcttctttctaggactaaggattgagcactggctacttcctctgtctgcctggttcatatctt

SEQ ID NO: 343237 - DNA, 201 bp, Homo sapiens
actttctaattaagcaaatctctttgtgcccttctactttttgtggccatttttttctagtggaaaaatagaggtaaacaataagaacaattttaaaaagraattagggcaatgcccttctagtctggggatggtgttttcctacttagcagttctcctcgtggtggaccgtaagataattcaggatactcccttcccatt

SEQ ID NO: 343238 - DNA, 201 bp, Homo sapiens
ccaaatactttatttttcactattctttgggtccaaggtagagtgagttctatctagttgcagtaggcagagatgattgacctgagacttagattaagacyatattgttgagttctttcaagacctgctgaggattgacccaagacctaagagtcaatcaggagcttaaaaaaactgatctagggccaatgtagaatcaaa

SEQ ID NO: 343239 - DNA, 201 bp, Homo sapiens
acatataagttcaaaggattcataaaggtaaatagggcagctgagtcctggtcacttacttgaggtccaggcagggattcaggattagagggagaatgagktatttgtgatgcaccagatttaagccataggaacaaagctgaaagactagtcttatgaacaaggacaatgtactgtgggagccctgaggaaacctggaat

SEQ ID NO: 343240 - DNA, 201 bp, Homo sapiens
aaatattttaggaaaattttacataaatgacactatgctgaacctttcttttgcaacttgccttttcattcaacattatgtttctgagatttatccagatkggcagtccattcgttttaattgttgcaatttatcctattgtgcaaatatacctactgagggacagtttgtttatgcgtttgtttgcttaatatgcttttt

SEQ ID NO: 343241 - DNA, 201 bp, Homo sapiens
gacactatgctgaacctttcttttgcaacttgccttttcattcaacattatgtttctgagatttatccagattggcagtccattcgttttaattgttgcartttatcctattgtgcaaatatacctactgagggacagtttgtttatgcgtttgtttgcttaatatgctttttcactgtcataaatgtttttgcagaaaat

SEQ ID NO: 343242 - DNA, 201 bp, Homo sapiens
caaaattttatcatacagatgaagcctccaggtagcaggctccagagagaatagactgtaaatgtttcttatcacacttaaagtctgtgtagatggtaaaygctggtcaacttttcctgaattccaaaagggaggagggtataatgaggcatgtctgaccctccaactttgtcatgagttggggggttaaatcctccacct

SEQ ID NO: 343243 - DNA, 201 bp, Homo sapiens
tttaatttccagaaattctgtgtgtttttaaaattatttttatagtgtcattttctgtgcttatggttttagtttgtctttaattatattaaatgcaattrtgtattttcagattgtcctattatctgaaaatattggcactctgatcctcctgttggttgtgtctgctttctttagctcatggtggactgtttccttata

SEQ ID NO: 343244 - DNA, 201 bp, Homo sapiens
agaggtcctgtgcttggaattacctattggctggtttgatggcctcatttgaacttcactcacaagttgttctctgtggctcagagcagaattctacctcrtgcttagtggtctagtatatttccaatgtctgcacatttataatttgtaaggaatgtcttgtatttgttcacagtaagggctccttgtgagaattaccca

SEQ ID NO: 343245 - DNA, 201 bp, Homo sapiens
caaacgtatcgtcaaagttgatctttccttgtagtcttcctataccaacaggtggattatatagaacactttcagtttacctgtgaattgaaagggaaggwgagagggataaccattgtttgtaggtatttgcagtggaatgttttcatgccatttttgtttcatgaatacattcattcattcattccacaaacacttatt

SEQ ID NO: 343246 - DNA, 201 bp, Homo sapiens
tactttacatagtaactatccttctgtaacttggatctcactaagttcttcatagagccgggactgttgggccatgcttgaaatgtgtgtgacagatccarggtggtaatgagacatataagctgctcatagtggaatgctgatgtgcattttcttggtgattttaattgtatgagcagagttttgacttggggatgtttt

SEQ ID NO: 343247 - DNA, 201 bp, Homo sapiens
atagtttttgttaacactacccctctccctgttctatttttgcaactttaccataggcctgttttctttttcttttttcataaggtattgcagtacaggcrgtattaggttacataagtaagttctttagtggtgatttgtgagatcctggtgtacccatcacctgagcagtatacgctgcactgtatttgttgtctttta

SEQ ID NO: 343248 - DNA, 201 bp, Homo sapiens; identical to SEQ ID NO: 72393

SEQ ID NO: 343249 - DNA, 201 bp, Homo sapiens
gaaattagcatactttgacataactgaatgaaaagaaaaaacagatagttttgactctcttcaaacacaagatgcaaaatagggaattaatcaggtccaamcagtttggaggtttatgtgaccactcttgccactaaaaaacaagaagttgcatgaaatttttccctttggatcggtcatgcaaatttgcattgtataagc

SEQ ID NO: 343250 - DNA, 201 bp, Homo sapiens
tatagagaatttcatggtaagttcttattggcaaattctgttcactgtgggaatcctttatttgtgaaaatatttttatcacatacatcccttatcctccmaaaatattttgtcttctcttgtcttacctatgtggttgcatatttagaagtctagttatccctccctggcctcaaccttttgagggctggggtaatatca

SEQ ID NO: 343251 - DNA, 201 bp, Homo sapiens
agttatgtgcacaaagcatatgcttgtcttagactggattcctccagaagccaaccgtaaaatgaggatttgaatgcaagtagtttatctgggtggtaatyccagaaagtactatagagagcacagaaatggaaaagaaatgaagctgatacagggtgcattaaagagcacctctcattgtggagaaatggggctctgtgc

SEQ ID NO: 343252 - DNA, 201 bp, Homo sapiens
ccagaaaaatctgtataaagagatggatgaggtgacaagacagatgctggtaataaaaaagggagcttagggattgctatcactgaaggactgaaggactraggattaggtcagaaatatttttgttcaagtccattcaagaatcaatcacattctgcaggaatgctggggaaaattacaatttgacctgctacagaggta

SEQ ID NO: 343253 - DNA, 201 bp, Homo sapiens
catacagcttcatattaccccatccaaaaagaaggcacactttcatggtagctccacagaaatttaactgtttttcctcttaagctccagaaaaatatttyactggttctcattgagtcatatgcccatctctgaaccaacggttgcagctagaaggttgaacatgttgttggctttagccaatcaaggctctaccctgga

SEQ ID NO: 343254 - DNA, 201 bp, Homo sapiens
gtgggctgcacacaaagggctgcagagctaaccagtatagatcagcaccttgagggcctctttgatgcactaggatcccgtaggggagccccaataatcaygactgggaatacatttcctgtggcccaatgtgatggtggcttcaatgccatacatacattcactttaaaaaataaaaaaatgtaaaagtgttcctttttc

SEQ ID NO: 343255 - DNA, 201 bp, Homo sapiens
ttggggatgtgacgtattagggaaatgagattatttaaaagcagaaccaattgagtacaccataaacgctagacaggaaagggggagtcataatctaaaayagttaaatagtgaattttgtgcagaagttgaaggcaactggacaaagtagcagccgaatttttgggagagtagattgactagagaagaccaataggaagt

SEQ ID NO: 343256 - DNA, 201 bp, Homo sapiens
tgaaaagagcaagctcacagctcagatatgaggtagacgaccctgaaggagctaacagctggagggtgccagataatcacattccttgtaactgggcagcraaacctttcttgaaggaagatctgagtggtaaaagtcagtttttggcacaacggtttatcgttaccaaatcaatcaatcaacatttgtagtggttgcttt

SEQ ID NO: 343257 - DNA, 201 bp, Homo sapiens
gtagacgaccctgaaggagctaacagctggagggtgccagataatcacattccttgtaactgggcagcaaaacctttcttgaaggaagatctgagtggtamaagtcagtttttggcacaacggtttatcgttaccaaatcaatcaatcaacatttgtagtggttgctttagctgtttctgggtaacaaaccaccctatttt

SEQ ID NO: 343258 - DNA, 201 bp, Homo sapiens
tttaagtgattctctacagttagtgagtggcagaggcaagatataaacccaatctcttcccttctagagtctggtgccttaatcacagaattatactatcyctcaacagcaaaagaaagtaactatatctggtgcccattgccgtaataccagtgtgtaacaaagcactccaaaattcagtggcatacaacagtaggcatt

SEQ ID NO: 343259 - DNA, 201 bp, Homo sapiens
accagttttctgaatccaaatctatctgatcatctctctcactaggtgatcccaactttctccttcaccaagagaatatctcattagactttatcttacaygtaagtgaaaggaggtacagaaagtttaagtaacttgcccaaagtcttactgctaataatagtagagcagagattcaaactttgtcattctagctataga

SEQ ID NO: 343260 - DNA, 201 bp, Homo sapiens
ttgattcccaaaacagccctgactgtactgtcatacccactgtgtaaatgaacagacaggttcaagttatcaggttattcacaaataataagcaagtggcmgatgcaggatttaaatccagatcctctgactaaaatcctgagcttttctgctgtaccaggctacctacacagcacagagatagcatcgatgaggctgtgt

SEQ ID NO: 343261 - DNA, 201 bp, Homo sapiens
tgaaaagattttaactattcttttaaaatccttttcctgagtcactaatttaatatacagttatttatagtttctctgcaaaggattatttttatatttayagtagcctacttacaaatcatttttatattaatgaaattgttgtgaagactaagtttaatagttaatgaagctgctagagttttactttttcaggcgtat

SEQ ID NO: 343262 - DNA, 201 bp, Homo sapiens
cagctcctggaaggagggacgcccaacaatgtgtcatttggatccaagctttaagacaactggattcagaaacgtggtctccacggaagatttttccatgrgagagaaaaaaacagaagcagcaacacaaaggcaactccagcagccttcctcaggcttctagatgaccacattgggtcttacatcaaccacttagcatct

SEQ ID NO: 343263 - DNA, 201 bp, Homo sapiens
aactttattatatctctgatctcctttgaaaactatgaaacagtaggttcatgaaaatattcctcattttttagagcaaaattattacactgatagctgtratgaattacagtggagggttccacagcatttcatggttgtggacttttgtacaagagtcaacagcaatcaggtgtcttttttttttaatttgataaaaga

SEQ ID NO: 343264 - DNA, 201 bp, Homo sapiens
cctatggaacacatcaagttggtggtcaggagaaaacccagagctacaaatgatgataggagagtcaatggaatcaatataagaatggaagccacgaaaakagatgagatctccctagaagagaacatagaaagaaaatgacaaaggggttaaagatagatcctgggtgggtaccaccatttatagaccaggctgaagaaa

SEQ ID NO: 343265 - DNA, 201 bp, Homo sapiens
aatggaggaagaggagacctcagtcaacctctactatcaccccaaagtaaaaaagcactgaaaaggaagagcaaatagaaatttaaaagcaagaaaaagakctgagtacttatcaagtgccaggcattgtactaagctttttatatacatcatgtcattgtgttaattgcaggttttcagtgtaaaaagaacagttaaatg

SEQ ID NO: 343266 - DNA, 201 bp, Homo sapiens
aatggatactagactttatacctacgtgatgaaataatctgtacaacaaacccccatgacacacatttacctatgtaacaaacccgtacatcctgcacatrtacccctgaacttaaaagttaaaaaaaaaaagatatagctctgtatttaactaactggagacttactagaaaaatagtctctaattcactgctgcccatt

SEQ ID NO: 343267 - DNA, 201 bp, Homo sapiens
agaatacctgccaataacttagggtgtcgaaatttcccttaacccatctaggatttagctttcctgttaatttcttcatttgtccattccttcgtttactygtggtttacctacctttcatatttcataaggtaagtctacctgtaatattatatgaaattgctcatgaacagttctcacatctatgtcttgacaactctt

SEQ ID NO: 343268 - DNA, 201 bp, Homo sapiens
aaactaaaaaaaaaaatgttacccatgcaccatatgacccagccattccattgctagatatttatccaagagaaatgaaagcatatgtccacacaaaaacytgtaaacaattgttcatagtagttgtatttgtaacagcccagaactagaaactacccaaaaacctatccacttacaggtgaatggataagcaattctggt

SEQ ID NO: 343269 - DNA, 201 bp, Homo sapiens
gaatacctgccaataacttagggtgtcgaaatttcccttaacccatctaggatttagctttcctgttaatttcttcatttgtccattccttcgtttactcrtggtttacctacctttcatatttcataaggtaagtctacctgtaatattatatgaaattgctcatgaacagttctcacatctatgtcttgacaactcttt

SEQ ID NO: 343270 - DNA, 201 bp, Homo sapiens
tacaaaataaggacaactgaatgcttacctcatgcgttgctgtggggcttagaaatgacttagcgcagtgcctggcatttacgaagtgttcaggaacaggraaacaaaaaacctggctggaactgctctttgccctctttggaatcacagaccaacttcctacttctgaaaggaatgaaattccactgagaaccctcatta

SEQ ID NO: 343271 - DNA, 201 bp, Homo sapiens
gctttctccatgtctgtgggttttctctgggtactctaccttccttgcacatcccaaagctacgcacattaggtgaagtggtgtgcttatgtggtcccagmctgagagagtgggtgtggtgtgagtgtccctcccatgggatggcgtcctgtccagggctggttcctccagttgctgggatgaataatatcaaccctcaac

SEQ ID NO: 343272 - DNA, 201 bp, Homo sapiens
gtaggttttcctgttcatctgttgaatgtctacccatatgtgagctaattatattttccctgtaactactatccatacctgaaagtactcattcctccagractcagagctgcttcaaggaccaagctgcaccagggccaaagagatttcaagcaccaccaggaccttgacatcctttctaatggcatagagtggaccacc

SEQ ID NO: 343273 - DNA, 201 bp, Homo sapiens
ttaatggacctcattggcttccctccctttcccatcccatcccatccctttgggaagtgatcccatccaacatgtttcctgggatcacttcacaaataaastgcttacacccacatcattgtttcaaagttcactttatgggaaacccagtaaggcagagaatacatacagagtggaaaaactttattctaacaaaactag

SEQ ID NO: 343274 - DNA, 201 bp, Homo sapiens
tatagtctctgagagggtaccagcaaaatagaatgccagttgcccatagtgataacacactcattaatggacctcattggcttccctccctttcccatccyatcccatccctttgggaagtgatcccatccaacatgtttcctgggatcacttcacaaataaactgcttacacccacatcattgtttcaaagttcacttta

SEQ ID NO: 343275 - DNA, 201 bp, Homo sapiens
tctattgtgtgctggctgccaccccaactgctattgtaagtacagaaatagactttcctctttattgtcagatacccaagaatattttctgtctgcttttyctcctctttcttctcttcctgagcattcaccagcagttttatcagtggcatcctatttcagccaaaacagagtgaatggagctctgcagaaaaactcatt

SEQ ID NO: 343276 - DNA, 201 bp, Homo sapiens
aatgaaattccactgagaaccctcattaagacctcttctctccaattctagagtgaagggagatatgcccattcctcagaggaagggtaatctctgtatgyctcttaccagcctacagaataagagaaagcatacaggacacctttccatgtacctcacaatgtgacacactccacaccccacgtaaaactaggaggccag

SEQ ID NO: 343277 - DNA, 201 bp, Homo sapiens
atgtctcttaccagcctacagaataagagaaagcatacaggacacctttccatgtacctcacaatgtgacacactccacaccccacgtaaaactaggaggmcagactcggttctgtctggtatggtttcatggtggctctacctggaggctgtgggctcagtctagaattgggtcctggtttcttcctgtctcataagcat

SEQ ID NO: 343278 - DNA, 201 bp, Homo sapiens
tctcttttttcctgaaagcaaatattctctaccacttggaaatgagaatgtgttttccatgtaggatcagaatagggaaaggaatttgagaaagagttatrtctttgtttttcttattactggcctgattaagtggtctgtaaagataaatatcagtggaaactttgtgtggatgtactaagattgcttcccctgtaacgc

SEQ ID NO: 343279 - DNA, 201 bp, Homo sapiens
gctaactcatttaaaattcccatttctcttgtattcactgttcagataaaaagatataagagaacactatgctttggaaatatgataccgccctggtgctstattttatatcaagtgccacctaaagacaccttctgaacgggtggatgtggcctctggagtaagaccagtagagaggctccagtttacaaaaacacttat

SEQ ID NO: 343280 - DNA, 201 bp, Homo sapiens
aaacacttattatcccatttactgaactcttttcagaatcatccaaacagccttggttccatttaagccttgagctttgaaacgcataggaagtgtctagrgctgaattgcatcatttacacctaagagctcttgaactagccaaagttctgcaagtaaggggacaggaagctctctgcaggtctggggttatcaatgtga

SEQ ID NO: 343281 - DNA, 201 bp, Homo sapiens
ccttggttccatttaagccttgagctttgaaacgcataggaagtgtctagagctgaattgcatcatttacacctaagagctcttgaactagccaaagttcwgcaagtaaggggacaggaagctctctgcaggtctggggttatcaatgtgacagcactcatcaggaaagattaaagtggagcatggagacattggcagtta

SEQ ID NO: 343282 - DNA, 201 bp, Homo sapiens
taataaaagatgcattgaaaatggtagaaaggagaattttacattacctgcaccacccctcccccaaccatcacaacattgagagagacaccatccacttrggggaaagagaggggtgtgagaacaggactttgccttggaccccaaccctgggcccaccacagcgaaatccagcatcaggcaggctggcaggcacccaca

SEQ ID NO: 343283 - DNA, 201 bp, Homo sapiens
tctacagatagtctagagcaggagtcctcaaattgggttctgcagagggctagccttctgagagagagccttaaagatggtatgaggtgggaccaggaggmaacctgtgtgttttttcttcactgcttctcctagggtacctccacttcagcatgtttctaatatttgagttctatgtaagattgtgtctgtgaaggacat

SEQ ID NO: 343284 - DNA, 201 bp, Homo sapiens
gagcaaagttgacagtccagaaaaataaagatatgaaacaattacacaatacatactatattaatctgttctcacactgctaataaagatataaccaagawgggtaatttgtaaaggaaagaggtttaatggagtcacagttccacatggctggggaggcctcacaatcatggcagaaattaaagaggaagcaagacacat

SEQ ID NO: 343285 - DNA, 201 bp, Homo sapiens
cacacacacatacacacatacacatacaaccttgatagtaagagagggactctgcatagtttaatccctagaaatgtgacattgctgggcttgaatatttktataatatatattaaggtggttactgaataaggcttcaaacaaagtaataaaaatttttgagagtattttaaattgcaatgacaaatataaagtacttct

SEQ ID NO: 343286 - DNA, 201 bp, Homo sapiens
gtggctctgtactaagtgtcagcttcaaagggagagaccagagcataaacagacaattctctaggttgcaaattgggaggattaggaacaagtaagagagwtccatgcaggatggacaagaaaaaaaagttttataccaaaaattgtatttcatggcattagggcagtctactggggtaaggcactatgcagtactaggca

SEQ ID NO: 343287 - DNA, 201 bp, Homo sapiens
gccctactaaacacaaacttcactttatccattgctgtgtgtggacttcacccaggagagtttctccttggacattttcccagttttctgccctttttttyccccagagctacttttcccttgcttttgtctttgtctactcttctggccattttagacagccttgctgttcctaaatgcatgacgccctccccttccccc

SEQ ID NO: 343288 - DNA, 201 bp, Homo sapiens
actgcaagctctgcctcccgggttcacgccattctcctgcctcagcctcccgagtagctgggactacctgcgtctgccaccacgcccagctaatttttttktgtgtttttagtagagacaaaactttcaccatgttagccaggatggtctcgatctcctgacctcgtgatccacctgcctcggcctcccaaagtgctggga

SEQ ID NO: 343289 - DNA, 201 bp, Homo sapiens
gttgtttctgtttttactgctatctcagttaaggatgtaattattttgcccataagtttttacccatatcctcttctctccatcccttccaattctttgttactactactactactactactactacttctactactactactactaccactaccactatctctctctctctctgtctctctcttgctaatcattattgcc

SEQ ID NO: 343290 - DNA, 201 bp, Homo sapiens
ttgtttctgtttttactgctatctcagttaaggatgtaattattttgcccataagtttttacccatatcctcttctctccatcccttccaattctttgttactactactactactactactactacttctactactactactactaccactaccactatctctctctctctctgtctctctcttgctaatcattattgccc

SEQ ID NO: 343291 - DNA, 201 bp, Homo sapiens
tgtttctgtttttactgctatctcagttaaggatgtaattattttgcccataagtttttacccatatcctcttctctccatcccttccaattctttgttactactactactactactactactacttctactactactactactaccactaccactatctctctctctctctgtctctctcttgctaatcattattgcccc

SEQ ID NO: 343292 - DNA, 201 bp, Homo sapiens
gcaacaataattttatcacctcatggattttgtggggcaagaattcagaaagtgcttggctaaacctggctcagagtttctcatgggattaatatttatadaatgaatgaatgaatgaatgaatgaatagggttatggaatgaatatttatggaatgaatgaatgaatgaatggggttatggtcaaatatttgctggagct

SEQ ID NO: 343293 - DNA, 201 bp, Homo sapiens
ttccttatttttgatgaccttgacggttttgaggaatgctggtcagatatttcatataatgtttttcaatttgggtttgtctgatattttctcatgagtawcaggacttatggatttgggggatgaaaatagtctgttctacccatgtctcatatcaagagcacatactatcaatgtgacttatcagtattgatgttaacc

SEQ ID NO: 343294 - DNA, 201 bp, Homo sapiens
gcctcctatttagccccaagacacttcacaggcctcacactgatctgtcaagtctgtcattcgaaattcttcaggctagagactcctccatgtgggttgcmtgccaaggaaaaagccgtctgtccaaataggacaagtggcgactgtagcctcagagaatgaattctgcagtaaacttttctctttttaaggaaagcccac

SEQ ID NO: 343295 - DNA, 201 bp, Homo sapiens
gttgcgaggtcataaatttttttcctgctggtagtcaactattttataggttcaaactgtaactgaacaatataatatttctgtctcagtacaagtcaccaaaaaaaaaagactcaaaggcaggacctatatttagtgagcaaataacattacttcatataatatcaccatcattatcttggtctgctttaggataggatt

SEQ ID NO: 343296 - DNA, 201 bp, Homo sapiens
tgcctcctatttagccccaagacacttcacaggcctcacactgatctgtcaagtctgtcattcgaaattcttcaggctagagactcctccatgtgggttgyctgccaaggaaaaagccgtctgtccaaataggacaagtggcgactgtagcctcagagaatgaattctgcagtaaacttttctctttttaaggaaagccca

SEQ ID NO: 343297 - DNA, 201 bp, Homo sapiens
catttaagatgatctagccttccctagtggctgttgttattttccatatggatgctcttcaggaggaaagcaagaaaacaaaccagcatatttgtttaggaaaaaaaaaagctgtgatgctgcaaaactcatattaaaatctacagcagcctggctcctgataacctgtgagttgctgggcgtaaccacctttttaaatcc

SEQ ID NO: 343298 - DNA, 201 bp, Homo sapiens
ctgaaatgatatctcttgaataaacgaatgctttaaatgggtcctgttaccaaacaccttcccaaggctgtgagtagatgcacgctccaatattgtctcaytttcccgcggcttcgtcaccccactctatgcactctgcaccggtgataccactttaaggtagatgaccgtctccctcgactgtgagcccctagggttgta

SEQ ID NO: 343299 - DNA, 201 bp, Homo sapiens
agcatctgtgagatgggcattggcatgaggctttggtgagagaatggctgtaaagtgcttgacatggagtaagtgctcagtagtcattagccagtacatayggggttaggtttaggatcagggtcagtgtcagggttacggttaggtatgtcattaagcaacacaagagtacctactgtgtgcaagacactgagttgtggg

SEQ ID NO: 343300 - DNA, 201 bp, Homo sapiens
gtgatgaccagaaaggtgcctcatggggctagaataagagcaaggagaggccgggcgcggtggctcatgcctgtaatcccagcactttgggaggccgaggmgggcggatcatgaggtcaggagatcgagaccatcctggttaacacggtgaaaccccgtctctactaaaaatgcaaaaaattagccgggtgcggtggcggg

SEQ ID NO: 343301 - DNA, 201 bp, Homo sapiens
ggaggcaaaggcaggcggatcacctgaggtcaggatttcaagaccagcctggccaacatggtgaaaccccatctctactaaaaatacaaaaattagctggrcatggtggtgcatgcctgtaatcccagctactcaggaggctgaggcaggagaattgcttgaacccaggaggcagaggttgtggtgagccgagatccgcca

SEQ ID NO: 343302 - DNA, 201 bp, Homo sapiens
acccaggatacacacaggtgcacacgtgtgatgtatgtatctttgtacatgcaacaatctatgacattttcttctttttttttttttttttttttgagacrgagtctcactctgtcacctaggctggagtgcagtggtatgatcttggctcactgcaacctctgcctcccaggttcaagtgattctcctgtgtcagcctcc

SEQ ID NO: 343303 - DNA, 201 bp, Homo sapiens
tgtgatgtatgtatctttgtacatgcaacaatctatgacattttcttctttttttttttttttttttttgagacggagtctcactctgtcacctaggctgragtgcagtggtatgatcttggctcactgcaacctctgcctcccaggttcaagtgattctcctgtgtcagcctcccgagtagctgggactacaggcacaca

SEQ ID NO: 343304 - DNA, 201 bp, Homo sapiens
ttctcctgtgtcagcctcccgagtagctgggactacaggcacacaccaccacaccgagctaatttctgtatttttagtagagatggggtttcaccatgttrgctgggctggtctcgaactcctgacctcaggtgatccgcctgcctcggcttcccaaagtgctgggattataggcatgagccactgcgctcggcccgatat

SEQ ID NO: 343305 - DNA, 201 bp, Homo sapiens
agagaaaaacattatataaaaaaatatgcaagccgggcacggtggaccacacctgtaatcccaacactttaagaggccgaggtgggcggatcacctgaggycaggagtttgaaaccagcctggccaacatggtgaaaccccatctctaccaaaaatacaaaaattagccaggtgtggtggcacgggcctgtgatcccagct

SEQ ID NO: 343306 - DNA, 201 bp, Homo sapiens
ggggctcatttgattcacttactataccttgaatagctgtgactggaaaaagacggctttttgcttctgcgaaacaccttgtgccaggcactttcacaaayttgcccgagtaattttttcaaggaccatatctaataagcagcaaagctaagatgcattcattccatatatacttatatgtgtgtgtgcattgactgtgtg

SEQ ID NO: 343307 - DNA, 201 bp, Homo sapiens
gcacacaccaccacaccgagctaatttctgtatttttagtagagatggggtttcaccatgttagctgggctggtctcgaactcctgacctcaggtgatccdcctgcctcggcttcccaaagtgctgggattataggcatgagccactgcgctcggcccgatattttctatcctatttattttttaagatgctggttgctag

SEQ ID NO: 343308 - DNA, 201 bp, Homo sapiens
ctgtaatcccaacactttaagaggccgaggtgggcggatcacctgaggtcaggagtttgaaaccagcctggccaacatggtgaaaccccatctctaccaamaatacaaaaattagccaggtgtggtggcacgggcctgtgatcccagctactcgggaggctgaagcaggggaattgcttgaacctgggagttggaggctgc

SEQ ID NO: 343309 - DNA, 201 bp, Homo sapiens
acatggtgaaaccctgtctctactgaaaatacaaaaattagctgggcatggtggcgcacacctgtagtcccagctactcgggaggctgaggcaggagaatygcttgaacctgggaggcagaggctgcagtgagctgagatcgtgccactgcactccagcctggatgacagagcaagactcagtctcaaaaaccaacaaaaa

SEQ ID NO: 343310 - DNA, 201 bp, Homo sapiens
aaagtatacatccaaagagtgtaaggttgcagatgactattcccaagacagttctctgcccactttcttgctcaaactttggccaatgaacaagtctttcttttttttttctttgagacggagtctcgctctttcactcaggctggggtgcagtggcacaatctcggctcactgcaagctctgcctcctgggttcacgcca

SEQ ID NO: 343311 - DNA, 201 bp, Homo sapiens
ccattttctgttgcaggatcccatcctgtctccttaggctccactgggggatagctgtttcttaggctttccttggttttggtgacagttttggggagtaycggtcagatattttgtaggatgcccctcaactggaatctgtctgatgttttttctcatgattagattggagttgtgggtttgggaggaagatcacagaag

SEQ ID NO: 343312 - DNA, 201 bp, Homo sapiens
gtagctgggactacaggcgcccaccaccatgttcagataattttttgtatttttttttgagacagagtcttgctctgtcacccaggctggagtgcagtggygcgatctcggctcactgcaagctccgcctcccgggttcacgccattctcctgcctcagcctcccgagtagctgggactacaggcgcccaccaccatgcct

SEQ ID NO: 343313 - DNA, 201 bp, Homo sapiens
tagctgggactacaggcgcccaccaccatgttcagataattttttgtatttttttttgagacagagtcttgctctgtcacccaggctggagtgcagtggtrcgatctcggctcactgcaagctccgcctcccgggttcacgccattctcctgcctcagcctcccgagtagctgggactacaggcgcccaccaccatgcctg

SEQ ID NO: 343314 - DNA, 201 bp, Homo sapiens
ccttgatttccaaaccaatgggggtctttcttctccccattccctgtctatccccgctgcctcctagtctgggcaggcctccatctctgccctattaggcytctcagggttggtcactgtctcttctctttctgaattaacttgacataaccagacagatggaaatgataaaattagaacatagctttcctttggggacat

SEQ ID NO: 343315 - DNA, 201 bp, Homo sapiens
ggtgcccgatacacagtgggagatcaggactgtctgtccctttccccctcccactcccacctctagcacttggttgacatctcactgctgctgacacagcyagttccctgaagttcaggtcaaggatcactggctggctggtcaatggcaatgtgtcatttcacagtaaagtgtgaggggcatctggtgggcatgactaca

SEQ ID NO: 343316 - DNA, 201 bp, Homo sapiens
gagtggatcacccgtacctgtcgaaagggctaggatgagatcgtgggtcacaggcccgagccgtgaactctgtggctgcctccaccagaggtttccatctrccctactagcattggctgccctgggggacgggctgtagttctagaacctgattttaactcaggaataaagactttctgcggtcagtggccccaggtgtat

SEQ ID NO: 343317 - DNA, 201 bp, Homo sapiens
ctcgctcaaggtctgtgggctagtgacagaattccagtgcccaagctcttaaccatcatgccacactgccccctccctgcgaatcctctgaagagctgatrtttccttgcagctgttctgagactttcaggatctctttttcccccagctgtgcactgacctgcaggctgcactaatgtcacctggtgacctgggcacagc

SEQ ID NO: 343318 - DNA, 201 bp, Homo sapiens
cttttcaaaggtgggaccagctgttggtggaccattgttctaggcagccttccctgaccatctcttctgtcctccactccactgctttgcctgggttgggygtccctcctctgtgctttccaagcctacctcttagcacttagccatggacagtagaagtatctttattagcctatctcccccacaagtctgggagcagct

SEQ ID NO: 343319 - DNA, 201 bp, Homo sapiens
aaaggggcattgtggtagtacctattggagaaattatggttagaaaaaaagattaagtattcaaaatacataggacagcacctggcccaagacaggtgtcstgtgactggtacttgtggctgttatcattatgatgattattgactcaggctggagagaaagaagtgagttagagcctgggatttgttaagctttctctag

SEQ ID NO: 343320 - DNA, 201 bp, Homo sapiens
agtttttgtttggttggtccaattcttgaagctgcttgggttcgagcacctaggtggggccatgcactgcccagatccctcccactcccttctgtgtgacyctagcagcatcagtcatttctggtacccgccttaaagcctttgagctccgggtccttccatctcagacttctcatgcatccagtgagctgggaatgggct

SEQ ID NO: 343321 - DNA, 201 bp, Homo sapiens
tcatgcatccagtgagctgggaatgggctcatcctgagattgggaaactaggtcttggagcgatgaatgacagacatgtgatagtgaagctggaactcaarcccactcccatcttaccacagcccagtggtctctccgctaccctctactgctgcttacattgggaccataaagccttaaatgatagcaactgtagacagt

SEQ ID NO: 343322 - DNA, 201 bp, Homo sapiens
gctgggactacaggcgcccaccaccatgttcagataattttttgtatttttttttgagacagagtcttgctctgtcacccaggctggagtgcagtggtgcratctcggctcactgcaagctccgcctcccgggttcacgccattctcctgcctcagcctcccgagtagctgggactacaggcgcccaccaccatgcctggc

SEQ ID NO: 343323 - DNA, 201 bp, Homo sapiens
agttattacatattctaatcaatactgcaaacacaaaacaaaagagagactgagttaggatctcttgccccacagaggctggggagctgagagaggtgagmgagatggcgtggtgtggtggttaaaagcctggggcctggaatccatgcctcaggctggcctctagtcctagatctaccactgaccagctctgtgatcatg

SEQ ID NO: 343324 - DNA, 201 bp, Homo sapiens
accatgttcagataattttttgtatttttttttgagacagagtcttgctctgtcacccaggctggagtgcagtggtgcgatctcggctcactgcaagctcygcctcccgggttcacgccattctcctgcctcagcctcccgagtagctgggactacaggcgcccaccaccatgcctggctaattttttttttgtattttta

SEQ ID NO: 343325 - DNA, 201 bp, Homo sapiens
caggggtggtggcacacctggagttcagctactgggaagctgaggtaggaggatctcttgaacccaggagttcagaggctgaagtgagccatgatcacacygtgcactacagcttgggtgacagaatgagaccccctgtctataaaaattttttttctttttttattttgagacagagtcttgctctgtcgcccaggctgg

SEQ ID NO: 343326 - DNA, 201 bp, Homo sapiens
cccagaagatgctcttctatggggaaaagccggagcaggcccaaggccttccacctccccgccctgtggcaggctttgcctaggcaatgactcctcagtcaatattgacaatgctgtggccttggcctctggccaccactgccagcaaagttcaaagcctctttcttgtcaggagtggtgatggggatgcctgggcattgc

SEQ ID NO: 343327 - DNA, 201 bp, Homo sapiens
tgatgggaaactggtagactaactctagcccttccccctcctacacgtccctgtcattcctcttaggaaggataagctagagcctcgctggcagtttgtaygagtatctctttcatggggctgttgcttgcctcagtgttactagtagtaatcatctgcaaaataactgtaccactaatctttactccctcctcccaatta

SEQ ID NO: 343328 - DNA, 201 bp, Homo sapiens
ccagaagatgctcttctatggggaaaagccggagcaggcccaaggccttccacctccccgccctgtggcaggctttgcctaggcaatgactcctcagtcartattgacaatgctgtggccttggcctctggccaccactgccagcaaagttcaaagcctctttcttgtcaggagtggtgatggggatgcctgggcattgct

SEQ ID NO: 343329 - DNA, 201 bp, Homo sapiens
gcaagtggcagagctggaattggaagccaggtccagctgacttcaaagctaaagacaatgttagagctgactttgaatgagaagttggagtttactagtgmaagaaagaaagaaccgagggcctgcctagcagccctatattttatagagatataaaaagtatacatccaaagagtgtaaggttgcagatgactattccca

SEQ ID NO: 343330 - DNA, 201 bp, Homo sapiens
ctgggtctagtggtcaacaaatcaaacatggtccctgcattgagagcttacagtctaatgggagagaaaaacattatataaaaaaatatgcaagccgggcrcggtggaccacacctgtaatcccaacactttaagaggccgaggtgggcggatcacctgaggtcaggagtttgaaaccagcctggccaacatggtgaaacc

SEQ ID NO: 343331 - DNA, 201 bp, Homo sapiens
gttatgagccaccacgcccagccaaaatatcttatttcaattaacaaaatgcgtgaagttaccaagacattacattggagggtaggaaaaaagccaataattttttttttttttttgagacagagtcttgctctgtcaccatgctggagggcagtggcgcaatctcggctcactgcaacctctgcctcctgggttcaagtg

SEQ ID NO: 343332 - DNA, 201 bp, Homo sapiens
caccagctgtgtgaccttgagctaggcccttaacttctctgagcttcagtttcttcacctgaaaaaatggggacagaaatagaccccccttccagggctgkggcctgaagtgagatgacatgcatgaggtgagatgacacactccagcaagaacagcggctggccctaaagaagcacctttcggtgcatgttgacaatcac

SEQ ID NO: 343333 - DNA, 201 bp, Homo sapiens
cttgctcaaactttggccaatgaacaagtctttcttttttttttctttgagacggagtctcgctctttcactcaggctggggtgcagtggcacaatctcgsctcactgcaagctctgcctcctgggttcacgccattctcctgcctcagcctcccaagtagctgggactacaggcgcccaccaccatgttcagataatttt

SEQ ID NO: 343334 - DNA, 201 bp, Homo sapiens
atttatttatttatttatttatttagagacaggttctcaactctgtcacccaggcaatcacagctcaccgcagcctcaaccaccccaggctcaggtgatcstctcacatcaacctcccgagtagctgggaccacaggtgcttgccaccatgcccagctaatttttctattttttgcagagaggaggttttgccatgttgcc

SEQ ID NO: 343335 - DNA, 201 bp, Homo sapiens
ggtgcatgttgacaatcacagtcgtgatccttttacacccagggtgaaaaggtgaaaagcaggggcctccttaactccacatcccaaagggaggagccagygttaccatggcaaactgaagtctggcctcctcccatctgcttttaattctaatttcaagactggactagaggtctgtggttttctgatctctctacccag

SEQ ID NO: 343336 - DNA, 201 bp, Homo sapiens
aaagccaataattattttaattatttttctattgtcaatacccattagtgaaagaagatttgggaaataaaagcggaaagagaaactctctcatcccactrtgcagggctattattcacatttcaatttatctttaatttttcttctgtgcacagttatgacataggatatactatgtgtacttttatttcttgtctcttc

SEQ ID NO: 343337 - DNA, 201 bp, Homo sapiens
tcgggaaccgacctggtggtgggcaggatggcggacgggggtggatgcggaggtgggtggactcctggccgcagcttggacactggatctcagcggctgargggcagctgtggggcgcccacgggcagatgcggaagtgccggcagcgttagtactgaaaaaggatgacctgcaagaggagggcatgggaggtggctgagc

SEQ ID NO: 343338 - DNA, 201 bp, Homo sapiens
aaattagccaggtgtggtggcacgggcctgtgatcccagctactcgggaggctgaagcaggggaattgcttgaacctgggagttggaggctgcagtgagcygagatcgcgccattgccctccagcctgggtgacagagcaaaaactccatctcaaaaaaaaaaaaaaggcaaataagtatagattcaaaaattgtgatctg

SEQ ID NO: 343339 - DNA, 201 bp, Homo sapiens
tgatcccagctactcgggaggctgaagcaggggaattgcttgaacctgggagttggaggctgcagtgagctgagatcgcgccattgccctccagcctgggygacagagcaaaaactccatctcaaaaaaaaaaaaaaggcaaataagtatagattcaaaaattgtgatctgaggggaccatgaaagaaaagggagtgaatg

SEQ ID NO: 343340 - DNA, 201 bp, Homo sapiens
tacacaaaacaacagcacatattttacagagcaacatgcattttgaggggtctctatcccaccattggtgtaggtccctgcagtggtggaggaggggcccrgtatgggtttggaggagaaaggaggaaaaatgaaaataaagtaaatccacggaggggtcttgcacagagagatgatggcagcgtgctgtggactgaatgt

SEQ ID NO: 343341 - DNA, 201 bp, Homo sapiens
tatgatcttggctcactgcaacctctgcctcccaggttcaagtgattctcctgtgtcagcctcccgagtagctgggactacaggcacacaccaccacaccsagctaatttctgtatttttagtagagatggggtttcaccatgttagctgggctggtctcgaactcctgacctcaggtgatccgcctgcctcggcttccca

SEQ ID NO: 343342 - DNA, 201 bp, Homo sapiens
tgtagagacagggtttcaccatgttggccaggatggccttgatctcttgacctcgtgatccacccacctcagcctcccaaagtgctgggattacaggcgtragccaccgcgcccggcaaaagccaataattattttaattatttttctattgtcaatacccattagtgaaagaagatttgggaaataaaagcggaaagaga

SEQ ID NO: 343343 - DNA, 201 bp, Homo sapiens
gtgagccactgcaactggccaattttttgtatttttagtagagatggggtttcaccgtgttagccaggatggtctcgatctcctgacctcgtgatccgccygcctcggcctcccaaagtgctgggattacaggcatgagccactgcgcctggccaatgaacaagtgtttcagtgccactgacaaaccaagactcccctaat

SEQ ID NO: 343344 - DNA, 201 bp, Homo sapiens
ctccagcgagacaaaaggcaatttaccgaaatgttataatcacctggaggctggcacgcggggacatccatgctttatctgcggtgttgttagcagcaccrtaatgaaggctttgtggagggataatacgctgtaactgccaaatcaaatgcccgcaccaatcacacatccctgccagcagacgcgcatttgctgtaagca

SEQ ID NO: 343345 - DNA, 201 bp, Homo sapiens
aggaaagaaagttatgagtattgaacgcctccatggtgccagggacttaccacatcccagttctttgaggaatagaccattattcgtatttggcagatgcrgaaactgaggctctgggagtaagttatttactgacaatcaagcagctagtaaagggaggaaccagggtatgaacccaggtccctctgacaccagaggcca

SEQ ID NO: 343346 - DNA, 201 bp, Homo sapiens
ggcctccttaactccacatcccaaagggaggagccagtgttaccatggcaaactgaagtctggcctcctcccatctgcttttaattctaatttcaagactrgactagaggtctgtggttttctgatctctctacccagcccctggcattctgttacggacgtgtccccatcatcctcatcgtttcttatgcacctagagcc

SEQ ID NO: 343347 - DNA, 201 bp, Homo sapiens
ggcattctgttacggacgtgtccccatcatcctcatcgtttcttatgcacctagagccttaggccccctaagctccccctagacacaggcctttgttgagyccctgcatccaccagggtttcacttggggatcagacccagggcctggcccccaccaaaaccagtgcagggctagagggaacatatacataaatagacagt

SEQ ID NO: 343348 - DNA, 201 bp, Homo sapiens
ataagtgctcaaaaagaaaagggggcaccaggaagcaggaggaacagcaacatcaacagtgttggtgattttgcatcccctctccattcagcacacatgcrttctgcagtgaatgtgaggacactgcatcagtcctctccatccctgtgtgcctcctgtccggggagcaccttgctacagaggatgattctagcatttaaa

SEQ ID NO: 343349 - DNA, 201 bp, Homo sapiens
tggggtattgggcattttaggcacaaaaagttgagaaactacattaattttcgatgggctgtatatgggtgagagagaaacacacagacaaggtaaaagayggaaggctttcaaccatttgcctttggccttctgtgtattttcattgggtttgtgtgctgaatcagccatttccatgctttggccctaggaatttgggct

SEQ ID NO: 343350 - DNA, 201 bp, Homo sapiens
atctgtaaaatgggaaagcaatgcacattcagcagcagtgttccaaggaatatgtaatgatcatatatggatgttatttacaaatggtagatactcaatcrattttttttaatttagggaggggatattttcctcttggagtttaaatgaatagagtaacctctctatacagtaggaagttgatatttaacgtttggttta

SEQ ID NO: 343351 - DNA, 201 bp, Homo sapiens
ttttgtcttgattgtgatgatgttttcccaggtgatgtcaaaacgtgtcaaattgtacactttaaacacgtggcctattgtatgtcaattacacttcaatrtatctacttaaaaaaaaaaccttaaaagagacatgatttccctgtaccacgtgtgaatattaaaaaaaaaaaggttaatgtagtatctgtctgacctcaa

SEQ ID NO: 343352 - DNA, 201 bp, Homo sapiens
ctctgggtggctttgcctgcatcttctcttcacagggactctttgagatagatatcattatcctattttacagatgggaaaagtaaggctcggagtaaacytgcccaaagtcacccagttagcatttggcagagcaggtattaaaacccaggtcgatcagactgtaaagcccacaggcttcctacaatagagccctgctgc

SEQ ID NO: 343353 - DNA, 201 bp, Homo sapiens
aaaattttgttttcagcagagtactgctgggatgagaaggatgagaatgctgagaacggggttcctgctcactctgttgcctgccagctctgatcctccasctgtcacacagggctcagtgatttccctgtgtctttacaggatggagggcaaagccaagtacatcctccctaccgaaacaatatatgttggggaaatgaa

SEQ ID NO: 343354 - DNA, 201 bp, Homo sapiens
gtaacaattcctcccctgccgccccccgactcccccatggcagcctcctggaggcattcgaaggacacagcttccccttcagtagctggagtcaacctggrccagcactgtaatggtttgttttgtctcctttaatagaagtgagtggaaagccagaccctatgaggccggagcctactctctttctcagcccaagctctg

SEQ ID NO: 343355 - DNA, 201 bp, Homo sapiens
  misc_feature (1)...(201): n = A,T,C or G
ggcatgtttcacggcgagggaaccctgtacttccccagcggaagccaatacgacgccatttgggaaaacggattggccataaaggtgatcagctggggggncggatgctgtggaggagagatcctcacgcaagaagagcctcaccctctggcaccccatcctccctgtctggtgcccaccttgttccattcactcttctct

SEQ ID NO: 343356 - DNA, 201 bp, Homo sapiens
ccccaccccagttccaaaggccctggaaattccccttccagccatggtgcccatcagattctggtaacaattcctcccctgccgccccccgactcccccayggcagcctcctggaggcattcgaaggacacagcttccccttcagtagctggagtcaacctggaccagcactgtaatggtttgttttgtctcctttaatag

SEQ ID NO: 343357 - DNA, 201 bp, Homo sapiens
acgcaaagggggagcaagggcacatcttacatggcagcaggcaagagagcatgttcaggggaattgccctttataaaaccatcagatctcatgagacttaytcactatcatgagaacagcatgggaaaaacccacccccatgattcagttacctcccactgagtccctcccatgacatgtggggattatgggagctacaat

SEQ ID NO: 343358 - DNA, 201 bp, Homo sapiens
aggggactaagtttttctccaggaaaagcatctatagctttcatcagtttcactaagagcatcttggggcctgactcatgacctaaaaaaggttaagaaakgctccttgttttatagcttggagagtctaagccccaggaaggggatgtgactttcccgaggtcacacagtgaattaatagtatcattggaatttccaccc

SEQ ID NO: 343359 - DNA, 201 bp, Homo sapiens
ttggtcatgggggacagagaaatcacagaactagctgccagaaaacctgggctctagtgtccacagtttttactgtgtgtggttttgggcacatctctacrctctctgggcctactaggggggtttatttcagggagcagtgtgaactccaaggtgagagtgagcctctaggtgaaggggagaatgaacagagcaaactct

SEQ ID NO: 343360 - DNA, 201 bp, Homo sapiens
gccaaaggagatcagattaggtaggagatccttctggtaagatgatgggagagaggagcatgtgaagggcatgggctcagggtgatgggataggtgacctsggatcctggtcctggccccagctctcaggctgcctgctggatgaccctgggccaatgccttccctctctgggcccctttctcttcatctgtaaaatgaga

SEQ ID NO: 343361 - DNA, 201 bp, Homo sapiens
gccaggatggtctcagtctcttgaccttgtgatccacccgccttggcctcccaaagtgctgggattacaggtgcgcaggtgtgagccaccgcacctgacctttttttttttttttttttttgaaaacgagtctctgtcgcccaggctggagtgcagtggtgtgatctcagctcaccacaacctctgcctcctgggttcaag

SEQ ID NO: 343362 - DNA, 201 bp, Homo sapiens
ggcatgagaatcgtttgaactcaggaggtggagtttgcagtgagctgacatcacaccactgcactccagcctgggcgacagagcgacactctggtctcagaaaaaaaaaaaaaaaaatcaaaatggggtcaatagcatcatctacctcccaagattgttgtaaataagataattcatgtcaggtgtttagaacagtgcctt

SEQ ID NO: 343363 - DNA, 201 bp, Homo sapiens
aagcagtctgtccacctcagcctcccaaagtgttgggagtacagttatgagccaccacgcccagccaaaatatcttatttcaattaacaaaatgcgtgaarttaccaagacattacattggagggtaggaaaaaagccaataattttttttttttttttgagacagagtcttgctctgtcaccatgctggagggcagtggc

SEQ ID NO: 343364 - DNA, 201 bp, Homo sapiens
ctggggagcctgctttgcagtgcaccccccatcccagcctggagtcctctgaggatgggcctagacccccccaaaagacgacagcccctatgacagaagcktccttcctccaggtcctggtccagccctgtgctcactgccaccctggcattcggcataagccctgggctgtctctgtgggttggaagtgcctctgctctc

SEQ ID NO: 343365 - DNA, 201 bp, Homo sapiens
tgagcctcaagacgaggggaggagagggatagtattaggagaaatacctaatgtagatgacaggttgatgggtgcagcaaaccaccatggcacgtgtatamctatgtaacaaacctgcacattctgcacatgtaccccagaacttaaagtataataaaaaataaataagtaataaaaaaataaaaaaagaaaagtgtagtt

SEQ ID NO: 343366 - DNA, 201 bp, Homo sapiens
cttgatgacctgactccggagatccccacttggcgcccttgaggtcattctccattctgcagtcacttccatctttttttttttttttttttttttttgaracagagtcttgctctgttgcccaggctggagtgcagtggtatgatcatagctcactgtaactttgaactcctgggctcaagcgatcctcctgccaagtga

SEQ ID NO: 343367 - DNA, 201 bp, Homo sapiens
cactcccactaggaatatcaaaagatacggaccctcttgccagaaaaatgtccaatgcatgcacacacacacacacgtgcacccacacgcgcacatgcatmcacacacacattttgcagatagtcttaaggggtgaatggtccctctaaagacctaggtcaagaaaccttgctctataatgagaaagaaactgccaggtag

SEQ ID NO: 343368 - DNA, 201 bp, Homo sapiens
tcctcatgcaagccttcaagacaggcatctttgtagatgaggaaatgagacctagggaggtgtgaggccactcgctcaaggtctgtgggctagtgacagarttccagtgcccaagctcttaaccatcatgccacactgccccctccctgcgaatcctctgaagagctgatatttccttgcagctgttctgagactttcagg

SEQ ID NO: 343369 - DNA, 201 bp, Homo sapiens
agagaacatgaggatctcaccttttagggagcacactgggttttcatgtatttcttaaactgtttatttgaaagcagttaaattaagagaattctcgcaargatagtacagagttgtcaatgtaccccacgctcaatttccctgttatgactgtcttacattggatggtacatctgtcacagttagtgaactaatattgat

SEQ ID NO: 343370 - DNA, 201 bp, Homo sapiens
tcaccttttagggagcacactgggttttcatgtatttcttaaactgtttatttgaaagcagttaaattaagagaattctcgcaaagatagtacagagttgwcaatgtaccccacgctcaatttccctgttatgactgtcttacattggatggtacatctgtcacagttagtgaactaatattgatgttatgattcactaaa

SEQ ID NO: 343371 - DNA, 201 bp, Homo sapiens
cggtgcaggaaggatgagcaggactcgttgaccctcctcctggaaggaacgtaaccccagagacattctccacgtatctgtgaaggagtgtggccaagaaygcttgtcccagcattgttcctggtagtgggagttgcaggcaacctccgcgtccaccaccggcatggagaggaaaatgtgacggaagccaagcatggaata

SEQ ID NO: 343372 - DNA, 201 bp, Homo sapiens
accttgggaggctaaagtgggaggattgcttgaagccaggagtttaagaccagcctggacaacaatccaagaccccatatctacaaaaaaaagattttttwaaattagccaggggtggtggcacacctggagttcagctactgggaagctgaggtaggaggatctcttgaacccaggagttcagaggctgaagtgagccat

SEQ ID NO: 343373 - DNA, 201 bp, Homo sapiens
cttccttcctccaggtcctggtccagccctgtgctcactgccaccctggcattcggcataagccctgggctgtctctgtgggttggaagtgcctctgctcyctgcacgtgatgacacacactgagactttagggactcacatcctgccacactcagccagtcacatgagccacacaccatgtgcacgcctcccctcagctg

SEQ ID NO: 343374 - DNA, 201 bp, Homo sapiens
ccccactttttttttttttttttagtctcactctgtcaccaggctggagtgcagtggcacaatctcggctcactgcaacctccgcctcctgggttcaagcragtctcctgcctcagcctcccgagtagctgggactacgggcgtgcaccaccatgcccagctaatttttgtatttttagtagagattgggtttcaccatgt

SEQ ID NO: 343375 - DNA, 201 bp, Homo sapiens
ctcacatcctgccacactcagccagtcacatgagccacacaccatgtgcacgcctcccctcagctgcagccactcccacactcacgcacacatctcttcaygcttatgctggtgtgagagcagttggatgggaatacacacacacctgtgtctgtgcacacactcgcagcttcactgagcgtaactctggtgccagacaca

SEQ ID NO: 343376 - DNA, 201 bp, Homo sapiens
gtagggctgcccaatctattgccccaaatcacaaaaggaaccagcagctggcggtcttggacttgcccttggcgtgcctgccttgccctctcacaagctcygtttgcccagggtggggaagaaattcctccccctttgtcaaaaccccacagggtaaacctgttgcttttatgtccccaaatttacatttctttattcatt

SEQ ID NO: 343377 - DNA, 201 bp, Homo sapiens
agggtggggaagaaattcctccccctttgtcaaaaccccacagggtaaacctgttgcttttatgtccccaaatttacatttctttattcattattcaccasgtacttatgaaatactttaagtgctagatctgtgctgggccctgaccatcaaaagtaaatggtacaggctggagggggtgactacaacgaacactgtgac

SEQ ID NO: 343378 - DNA, 201 bp, Homo sapiens
ccactgcactccagcctggcgacagagcgagactccgtctcaaaaaagaaaaaaaagtaatttgtcaaatgtaaatgtttaaactatactgtaattgttakcaccttgcttaggcctgttttcaattttatatacactaatactacaaaatggaaagtaccttgggtctctgttgtgttctgagaggccctgaacccaaac

SEQ ID NO: 343379 - DNA, 201 bp, Homo sapiens
ctagtcccatgtcactccaggttgaggctgtggagttcagacatggttccctgtggcagagctcacactggtagcccagtcttcctctctgaggtcctctktatcatgctacctccctgcaaaaaccgtgtctcatcatggagggctacatttggactataagtctggattcagagagtggcaccttaaaattttgagacg

SEQ ID NO: 343380 - DNA, 201 bp, Homo sapiens
agggagaccagagttaagaggacatcatctctcccttcaaagagctgccagtctagctgcagcttgagaaccttgcaaatcactcctcccgaattagttawgatgggaggcctggactttgccatgggctcttcaccccaattaaggctgtaggcaaaaagccctcagccttaagccttagctctcacacaatggctggtt

SEQ ID NO: 343381 - DNA, 201 bp, Homo sapiens
gagtcaaagttctccaccacctgccccttgtccacctgatccatttcttttctgctgttctccttcatacgtgctctgctctacaaggtttccagagtggkgcttaaggatccatgcctctggcctctgcccacgctttgaatgccacccctcttctggatctgatgctctcctatccatttgccaactctgacttaccct

SEQ ID NO: 343382 - DNA, 201 bp, Homo sapiens
atgcctgtaatcccagcactttgggaggccgaggagggcggatcatgaggtcaggagatcgagaccatcctggttaacacggtgaaaccccgtctctactraaaatgcaaaaaattagccgggtgcggtggcgggcgcctgtagtcccacctactcaggaggcaggatgagacaggagaatggcgtgaacccgggaggcgg

SEQ ID NO: 343383 - DNA, 201 bp, Homo sapiens
gagttggagatgtctgtgagaggtctgaacagtgatgtccagttcaaggtaagaaaaggggtggggtctaacctcagagaagggtgtagaacttgaatatrgagatggtgcttagaaatgatagatgtgagctcaagcaaagagtacaggagggaaggagaagaggaattctcccttccccccatgtcttgcactagaata

SEQ ID NO: 343384 - DNA, 201 bp, Homo sapiens
gatcgagaccatcctggttaacacggtgaaaccccgtctctactaaaaatgcaaaaaattagccgggtgcggtggcgggcgcctgtagtcccacctactcrggaggcaggatgagacaggagaatggcgtgaacccgggaggcggagcttgcagtgagccgagatcgcgccactgcactccagcctgggcgacagagcaag

SEQ ID NO: 343385 - DNA, 201 bp, Homo sapiens
tagccgggtgcggtggcgggcgcctgtagtcccacctactcaggaggcaggatgagacaggagaatggcgtgaacccgggaggcggagcttgcagtgagcygagatcgcgccactgcactccagcctgggcgacagagcaagactccgtctcaaaaaaaaaaaaaaaaaaaagagcaaggagaattgtcagctgatcctat

SEQ ID NO: 343386 - DNA, 201 bp, Homo sapiens
tctgcctcagcctcccaagtagctgggattacaggcacctgccaccatgcccagctaatttttgtatttttagtagaggcggggttttgccatgttggccrggctggtcttgaactactgacctcaggtgatccatccacctcggcctcccaaagtgctggaattacctgacactgcacctaaccaggtgtcaatagcttc

SEQ ID NO: 343387 - DNA, 201 bp, Homo sapiens
taggtgacctgggatcctggtcctggccccagctctcaggctgcctgctggatgaccctgggccaatgccttccctctctgggcccctttctcttcatctktaaaatgagagagttgaactggataatttctagggcccttccaaccttaagtaagagtctatgatggaggagaaaggtagccaaggagtattttggtcct

SEQ ID NO: 343388 - DNA, 201 bp, Homo sapiens
ggcagggagaaggcagcgtggtgtgaaaaaagcatgggcagctggaaggacggtgcaggaaggatgagcaggactcgttgaccctcctcctggaaggaacrtaaccccagagacattctccacgtatctgtgaaggagtgtggccaagaacgcttgtcccagcattgttcctggtagtgggagttgcaggcaacctccgcg

SEQ ID NO: 343389 - DNA, 201 bp, Homo sapiens
tctttgcttgcctttgcctttgaggctctgtggctgtggggctgagtggcatcatggcggctcagaaagatctctgggacgccattgtgattggggcgggkatccagggctgcttcactgcataccacctggccaaacacaggaagaggatcctcctgctggagcaggtactgtgtcccttctgcacccccagctgtaagg

SEQ ID NO: 343390 - DNA, 201 bp, Homo sapiens
agtgcccacaaattgctgggaccccccacctcctccttggaggaagcctgaaccacgcatatcacagggcccctgtggccccgggctctgctgctattctsctggtatgaccctgccttttgcccggtaggcccatccactggtgtctactgacctcggcaggctggctctgtctcattccactgggggtcgtgggggtca

SEQ ID NO: 343391 - DNA, 201 bp, Homo sapiens
tgattggggcggggatccagggctgcttcactgcataccacctggccaaacacaggaagaggatcctcctgctggagcaggtactgtgtcccttctgcacycccagctgtaaggactgtcctaccctcctcccctgcagaagggttttcagagccagcaggctacagggcaaggccaaagggactgaatcatcaaaaattc

SEQ ID NO: 343392 - DNA, 201 bp, Homo sapiens
agatgatcagggagaaggctgcaccagtctcattggattcttcacaccagctggtgctgaaggttcaggggttgaagttgaaagaagcctgtggggtcctycataaaggactcaaggtgctggccttccaacagcctggtaagagtggctttctcctctagatttgcataatgctttgcatctcatttgaatactattaat

SEQ ID NO: 343393 - DNA, 201 bp, Homo sapiens
agcctgggtgacagagggagactccatctcaaaaaaaaaaaaaaaaaaagattcaaaagcctaagcccatacccactaaaaagaaaaagcccggccaggcrcggtggctcacgcctgtaatcccagcactttgggaggctgaggtgggtggatcacgaggtcaggagatcaagaccatcttggctaacatggtgaaacccc

SEQ ID NO: 343394 - DNA, 201 bp, Homo sapiens
cccagggctgatgaaggtgagcggaaagaccgagataaggcaggtagatgccagtgcagattaggggaagctgctctaactttcccctccatagatgcccytgggtctcggggccagcagcaggagcctgcttcactcatggcgatttgcaaggaaagaccctcagctgccctgaggcccagcaaaaggagcccttccttt

SEQ ID NO: 343395 - DNA, 201 bp, Homo sapiens
aaaaaaaaaagattcaaaagcctaagcccatacccactaaaaagaaaaagcccggccaggcacggtggctcacgcctgtaatcccagcactttgggaggcygaggtgggtggatcacgaggtcaggagatcaagaccatcttggctaacatggtgaaaccccatctctactaaaaatacaaaaaattagctgggagtggtg

SEQ ID NO: 343396 - DNA, 201 bp, Homo sapiens
tggcttccttatgaagagcaaatgaaagtggcagagagcaacagagagcagggatgagcccccacctcacttctctgctcagcactgagccctttcccctggggcactcaccgatgcagacgggctcctttgaatcccagaagggctgggtggcattgagacaggtgagatgcctggcgcccttcagctggtagccagtgg

SEQ ID NO: 343397 - DNA, 201 bp, Homo sapiens
cctgtaatcccagcactttgggaggccgaggcaggtggatcacaaaatcaggagttcgagaccagctaacatggtaaaaccccatctctactaaaaatacaaaaaaaaaaaaaaatgatctgggcatggtggcacgcgcctgtagtcccagttacttgggaggctgaggcaggagaatcgcttgaactcgggaggcagagg

SEQ ID NO: 343398 - DNA, 201 bp, Homo sapiens
ggctgttttcctgcactttatagataagggaaccttgtaatcagggaagttgagagatcctctttggtcacacagtgagtccaagacaaagccaggactckaggccaggactcatgattcctggtccagtgtcctgtcttgtgtgcctggcaaccccaggccctccccagaactgggagaattccaagtggatgtcctcca

SEQ ID NO: 343399 - DNA, 201 bp, Homo sapiens
ctcaggcctgtcccttgtctccaccttgttttgacctccaaggaccctgcagagctgggtgtgtggacaccttgagttgacagggctaagccctcctcccytgtctctttcagtctcctgtgtgtgcagcttagggtagggaaggaccaagggtcaccggaggcagcatcagggatagagttacagcacagaccagagtta

SEQ ID NO: 343400 - DNA, 201 bp, Homo sapiens
cctccaggaagccttccctgacccccaggctggtggagtgtgcccgtcctgtgcttcccatccccatccctgccagcactgggcattccgtggtcattgtktatgatttctgtcttccctactaatcatgaaggtctgtgtccccagtgcccagcgcagagcatggcacatagcaaattctcaatgtttgcttgtggaaca

SEQ ID NO: 343401 - DNA, 201 bp, Homo sapiens
gaaggtctgtgtccccagtgcccagcgcagagcatggcacatagcaaattctcaatgtttgcttgtggaacaaatccactcaacaaaactaattagtaattaactgactgacttttggcaagtcccttttcttgcctgggcctcagtttttccaactctccagtgggtattgttgggtagtgtcagaaattcttcaggtcc

SEQ ID NO: 343402 - DNA, 201 bp, Homo sapiens
ttaacataatatcctccaggttcacctgtgttgtagtatgtgtcagaatgccatttctttcttcttcttttcttctctatctttctttctttctttctttyttttttttttgacacaggatctcgttctgtcacccaggctggagtgcagtggtgtgatcacagctcactgcagcctcgacctcctgggctcaagcgatcc

SEQ ID NO: 343403 - DNA, 201 bp, Homo sapiens
agtcacacagcaaacttggggcagggttgggactcaggatggggctgggacatctagcccaactactgggaagagtgaaccctccagtctggagctgtctkttatctgtgggcatacctccagggacagagaccccactgcctccttagccatcctggttggggacaggggtaactgtgggctttggcatctccagagttg

SEQ ID NO: 343404 - DNA, 201 bp, Homo sapiens
aattttgcctagaggcaaaggttgatttatcagcctaagaggtaggattctgtcttgcatattcctggcctctcacaccagaacccagcagaagcttctgktttttttttttattttttattttttgccacctccagataatagcagcctccttgtttgacacatgataagtgagactgaggccttatttttcctgctacg

SEQ ID NO: 343405 - DNA, 201 bp, Homo sapiens
gagaagccagtgcatttcctctaggctcccagggaaggggagcctttctcatgaattcttacaatcagcaattgttccttgaattttcatctcaatgcttyaggtactgagtagaggatgttgaggaaagagagggtcaagaggctgagctggcctccttcccacaccccagctctgtcccaccccacttgcaccccatca

SEQ ID NO: 343406 - DNA, 201 bp, Homo sapiens
agaacacaggatgcactccgcagttgctcagtcctcccctcccgcagggccgggggctgcattctccgagtgggctgggtccgggaaacacccctcccttycccgcgggccatccctggtggagactgcccaggaacttcccagcgcctgccgcccccagccctggcatggccccgccgccgcctgggccctccccccgca

SEQ ID NO: 343407 - DNA, 201 bp, Homo sapiens
ccagactcctagagggggcgcggggattctcagggtgtggggaacaggtcctccagagacaaatctgccttgcaggtggggagtggaccagggccgggcasgaaggcaggccgggagggaggcagagctcggggcagtggtgtgtgtgtgtgtgtgtgtgtgtgtgtgtgtgtgtgtacaaggaaaggactttggggagga

SEQ ID NO: 343408 - DNA, 201 bp, Homo sapiens
agaggaggagaaaattactctcttctaagacagctttcaaaccagagctatatcttttgtggagccaaaggggttttggtgtttcagggaggcaagggcakgggctgccacctcactccagaggctcccaggggttcagagctgcctgcttacctcaacccacttcatggagcaggattccagaccttgcagctcctggaa

SEQ ID NO: 343409 - DNA, 201 bp, Homo sapiens
aaggtctgtgtccccagtgcccagcgcagagcatggcacatagcaaattctcaatgtttgcttgtggaacaaatccactcaacaaaactaattagtaattaactgactgacttttggcaagtcccttttcttgcctgggcctcagtttttccaactctccagtgggtattgttgggtagtgtcagaaattcttcaggtccc

SEQ ID NO: 343410 - DNA, 201 bp, Homo sapiens
aggtctgtgtccccagtgcccagcgcagagcatggcacatagcaaattctcaatgtttgcttgtggaacaaatccactcaacaaaactaattagtaattaactgactgacttttggcaagtcccttttcttgcctgggcctcagtttttccaactctccagtgggtattgttgggtagtgtcagaaattcttcaggtccca

SEQ ID NO: 343411 - DNA, 201 bp, Homo sapiens
caggagtggggaaggctggaatgatggatggggctgtcctgtgtacacgcctgcccttcggctgtgggtgtgtgtggaaggccagccctcaccactcatgmcactctgattgggagccaggtcagctatcaccacggcaaccacgcagaccctgaggagcgggactgccccacagcacgcacagacatcggagacgtccag

SEQ ID NO: 343412 - DNA, 201 bp, Homo sapiens
ggtctgtgtccccagtgcccagcgcagagcatggcacatagcaaattctcaatgtttgcttgtggaacaaatccactcaacaaaactaattagtaattaactgactgacttttggcaagtcccttttcttgcctgggcctcagtttttccaactctccagtgggtattgttgggtagtgtcagaaattcttcaggtcccaa

SEQ ID NO: 343413 - DNA, 201 bp, Homo sapiens
acaacagacacggggcttatgtgaggggtgggcatccagcatggggcttgtgcctgggccagagagggggcaggcagagccagcatcttgctccattgtgkagggtgccagggctgggctcagccttgtccagtgggcttcagtaggggtggtaggcttggggggggcagacagagcctcccaggcctgtaggggggcact

SEQ ID NO: 343414 - DNA, 201 bp, Homo sapiens
cactccagcctgggcgacagagtgagactccatgttccaaaaaataaaataaataaataaaataaaataaaataaaataaaagtgaagatccagctgggcrcggtggctcacacctgtaatcccagcactttgggaggccgaggcaggtggatcacaaaatcaggagttcgagaccagctaacatggtaaaaccccatctc

SEQ ID NO: 343415 - DNA, 201 bp, Homo sapiens
taaataaaataaaataaaataaaataaaagtgaagatccagctgggcgcggtggctcacacctgtaatcccagcactttgggaggccgaggcaggtggatmacaaaatcaggagttcgagaccagctaacatggtaaaaccccatctctactaaaaatacaaaaaaaaaaaaaaatgatctgggcatggtggcacgcgcct

SEQ ID NO: 343416 - DNA, 201 bp, Homo sapiens
aagtgctgggattacaggcgtgagccactgcacccggccccctaacatgtgcaatcttatctcagttttcacagtagctcaatgaggtttgttttctttctttttttttttttttgagacggagttttactcttgttgctcaggctgaagtgcaatggcgtgatctcagctcactgcaacctctgcctcctgggttcaagc

SEQ ID NO: 343417 - DNA, 201 bp, Homo sapiens
tctcagctcactgcaacctctgcctcctgggttcaagctattctcctgctcagcttcccgagtagctaggattacaggtgtacaccaccatgcctggctatttttttttttttttgagacagagtctcgctctgtcacccaggctggcgtgcagtgacatgatcttggctcactgcaagctctgactcccgggttcacgcc

SEQ ID NO: 343418 - DNA, 201 bp, Homo sapiens
gccaattttttgtatttttagtagagacggggtttcaccatgttggccagactaatcttgaacttctgatgtcaggtgatccacctgcctcggcctcccamagtgctgggattacaggcatgagccaccgtgtccagccagaagtttattttcttattgccattttacagatgaggctcagagatgagatgttaaatagaa

SEQ ID NO: 343419 - DNA, 201 bp, Homo sapiens
gctgggccctggaggtaggggagctgtgattcgaagcataggggactctgactccggactccagggtccctccttggactggggctgagtgggtaccgcasccatggctggagtggggctggtaaagacagggcggctgtcctggttggccaggcggggaaggggacttggggtgaagggtgcaggtgggtcaggctggaa

SEQ ID NO: 343420 - DNA, 201 bp, Homo sapiens
aagtttcgcctggagacagatgaaagccactccaccctccttttccttttgtctcagtgcatttccttttgtcccagtgaggtctgagggtgctcattcaygagtttatcctgcctgcccctcacttccaggctaaatcatgactttgtattttctcgaggttatggtcttagttcccaagacttttcttattttctgccc

SEQ ID NO: 343421 - DNA, 201 bp, Homo sapiens
aggaccacttctgagcactctgatttctcatttttcccactgcctgctgagctttaatggggccttctccaaaagcctaggggtagaaatatacacactcrgatgtacatgtgtatgaagacaccacttaatgaatacctggggatattttggggcaccacagtcagataagtgtgcaaatatggacatgtctttatgtag

SEQ ID NO: 343422 - DNA, 201 bp, Homo sapiens
tctaagtgtctcagatttgattccatgtctcctctttgcttccaggtgcttgtcactgcctaatacttgtggttgtcacccacagcctttgtactcttagrttctctggcaaattgacccatttcatttggaaagcttcagaagaaactgggcagacacaagacggacttgttgatttaattgaaaagatggtattctgaa

SEQ ID NO: 343423 - DNA, 201 bp, Homo sapiens
acgggctcatttctgtgggtaggttcacctctaccagggagggtcctgttcgaaattattcctattcttcttcattaggaaactaggttatgcctggcagwcggtccttcactctgattcccagaagagctctaaaagattttctggcaagctcctccagttgagcaggccttagggacaaagagaagagacagatgtcac

SEQ ID NO: 343424 - DNA, 201 bp, Homo sapiens
gccaagttcttagcggggccctctagaatctctaaagcaaatcaggctgaagaggggaaaaccagcagggggaggcagcattcccggtgcccagtatggtytaggaggcattgaaattccagggccgaagtcctgagacaaagatcataatgagacaggaaggtggcaaaggaaggagcccatttgcatgacaataattga

SEQ ID NO: 343425 - DNA, 201 bp, Homo sapiens
caccagtccaaatcacaaggccaaaagttgtacagcaacaacccaaggctggacttggatcctcaccagggacctaagcgccaccttctgcagtggcaccrcagagctaaaggcacagctgagatggttcctcttggagttcttctagcccatgagagttacatggcctcaagagcatgcagacatggaggaccttctagg

SEQ ID NO: 343426 - DNA, 201 bp, Homo sapiens
gcttgttgagttcttaacttattaaagataagcacatggaaatagggagcaaatctctttatttatgacataatctccagcccagaaaagcggcaggaacrgtgttgcctatattagggaaccaataggaaaaaaatcaattagatccgccagaccgtttcgctattaactttcttctgatgtttctcttaaggctggcca

SEQ ID NO: 343427 - DNA, 201 bp, Homo sapiens
tgaatttctctgctcccacctcctctgggtccagtttagagtgaattcagaccgggaacgcaggtcttcagcagcttcaggggcaggaacaagaggcagcmtagtgagaatttacaaggatcatggccttataaatagcatccacttattcattcagcaaacagtttctggggatctactacgtgatgtattaaaatgatt

SEQ ID NO: 343428 - DNA, 201 bp, Homo sapiens
tggacaattccggaggagttatctatgcatataaggccctcagagccctgcaggtaatgtcgtatagcactggggcgatgcaggtgctccctgctctgggygtcctgggtcccaagcagccagcccaagacccccctctggatgaggcctttgccctgcaggctttagtcttgacttttccagcagggcagtgaaatatat

SEQ ID NO: 343429 - DNA, 201 bp, Homo sapiens
ttcccctggggcactcaccgatgcagacgggctcctttgaatcccagaagggctgggtggcattgagacaggtgagatgcctggcgcccttcagctggtakccagtggcacaatggaagcgggcactaccccctgggtggaggctggtgacagtcacatctccataagctggacgacggggaaagtggcagctcaggagat

SEQ ID NO: 343430 - DNA, 201 bp, Homo sapiens
ggtccctccttggactggggctgagtgggtaccgcagccatggctggagtggggctggtaaagacagggcggctgtcctggttggccaggcggggaagggsacttggggtgaagggtgcaggtgggtcaggctggaagggcagtgctggcctcagctcctcatctcccttttccagcccctcttgtaggaattcctcaagc

SEQ ID NO: 343431 - DNA, 201 bp, Homo sapiens
gctgctggcttctcatcctacaggtctcaggccaggtgtcatcacctccaggaagccttccctgacccccaggctggtggagtgtgcccgtcctgtgcttyccatccccatccctgccagcactgggcattccgtggtcattgtttatgatttctgtcttccctactaatcatgaaggtctgtgtccccagtgcccagcgc

SEQ ID NO: 343432 - DNA, 201 bp, Homo sapiens
atggctggagtggggctggtaaagacagggcggctgtcctggttggccaggcggggaaggggacttggggtgaagggtgcaggtgggtcaggctggaaggrcagtgctggcctcagctcctcatctcccttttccagcccctcttgtaggaattcctcaagcagcgggtggtggttgagcagcttcaaggtgggggctgtt

SEQ ID NO: 343433 - DNA, 201 bp, Homo sapiens
tgtctgggctggtctcaaactcctgggctcaagcaatcctctcacctcagcctcctagggattacagcatgagccaccgcacccgaccatgggtgcatgacttctttgttaggggcccagtagtttctctccgttctcaggaaatcatttcttttgtactcatttctgtttttatggtccttctagagcagtaatatgagt

SEQ ID NO: 343434 - DNA, 201 bp, Homo sapiens
gataaggtcatggatggtggggtggagaatgtcatgtgaattggctgccctctgctttctaccattctgagccaacaataaacttcaggagctgtggaccrgagatgtggccatcagagaggggagggctgagctagattgtttgtatgaaagaggcaagattttctatctcctatggctatattttatgtcacaggctct

SEQ ID NO: 343435 - DNA, 201 bp, Homo sapiens
gtctgggctggtctcaaactcctgggctcaagcaatcctctcacctcagcctcctagggattacagcatgagccaccgcacccgaccatgggtgcatgacttctttgttaggggcccagtagtttctctccgttctcaggaaatcatttcttttgtactcatttctgtttttatggtccttctagagcagtaatatgagta

SEQ ID NO: 343436 - DNA, 201 bp, Homo sapiens
cgctgatgcctggcagaaataaacacaatgtggtgtaaaagaaggcactttcataagaaaataattccaatatatttgttcaagcacagctaccagaataytgttaaagacagccaagcctataagaaaataaggctccatgagtgagactcagagaaacaagagacaaaataaaaaattcgtgaggacttcacacattaa

SEQ ID NO: 343437 - DNA, 201 bp, Homo sapiens
tctgggctggtctcaaactcctgggctcaagcaatcctctcacctcagcctcctagggattacagcatgagccaccgcacccgaccatgggtgcatgacttctttgttaggggcccagtagtttctctccgttctcaggaaatcatttcttttgtactcatttctgtttttatggtccttctagagcagtaatatgagtag

SEQ ID NO: 343438 - DNA, 201 bp, Homo sapiens
cccctttcaagttttaataggggattagtgagggcctggtccctgcagacccctattatccgagaacctgagggagctgagagtgcttgggccccccagakccagagtccctccttacagtgacaattccacgggcccagccctgccctctgtactgtgaggccccagctagaggctggcagggctatatagggccgctgg

SEQ ID NO: 343439 - DNA, 201 bp, Homo sapiens
aaccaaaaaaacaccaaaaccctagcctccaaatattcagggaggctgatttgagtagtaataaaactctggtctctcatttatttatttattaaaaaaawttttttttgagacagtctcactctgtcactcaggctggagtgcagtggcatgatctcgtctcactgcaacctctgcctcctgggttcaagcaattttcct

SEQ ID NO: 343440 - DNA, 201 bp, Homo sapiens
tgtctctgtgtgtgtgcatgtatgtgggggggggtgcattaggtgaggaataggagtcagggatggaggtgtgagaagagggcctggagagagcgctaagktttctgggcagctgctgtgtgctagactccatgctgccccatcatctacaccatctgattaatcgtctccatcccgcaggtggagaaacagggtctgaga

SEQ ID NO: 343441 - DNA, 201 bp, Homo sapiens
acagtgttaaaaactggccccctggccgggtgcggtggctcatgcctgtaatcccagcactttgggaggctgagaggtgcggatcacgaggtcaggagatygagaccatcctggctaacacggtgaaaccccatctctactaaacaaaatacaaaaaattagccaggcgtggtggcaggcgcctgtagtcccagctacttg

SEQ ID NO: 343442 - DNA, 201 bp, Homo sapiens
ggactacaggcgcccgccaccgcaccctgctaattttttgtatttttagtagagatggggtttcaccatgttagccaagatggtctcgatctcctgacctygtgattcgcccgcctcggcctcccaaagtgctgggattataggtgtgagccaccgcgcccggcctatatttgtattttttgtagagatggggtttcacca

SEQ ID NO: 343443 - DNA, 201 bp, Homo sapiens
actgtactccagcctgggtgaaagagcaagactctctcaaaaaaaaaaaaaaaaaaaaggagaagtggaggattgagggtcatcctgagcattggctggayctcagaggcaggcctgagttcaaatcatcccaacctaatgtttgccttgggcaagttttggaacctccatttctttacctatgaaaggaaaatgatgcca

SEQ ID NO: 343444 - DNA, 201 bp, Homo sapiens
tcctggctccaggcatttgctcttgctccaggattgactgcaggaagagctcagggtagatggagacagcagcagaaagtggtttgatgtgagctactttmcatctccaaacagaggcctccagcctgcccaccacccccagccgaggcctttgatcctccacagctccataaatgtttaatgccaccggctgggcaggaa

SEQ ID NO: 343445 - DNA, 201 bp, Homo sapiens
gcctgccgcccccagccctggcatggccccgccgccgcctgggccctccccccgcattagctcttaagctgtgcaaatagacatcggagggagccctgttkaaagtatttagacgaaatgaaaaaaggctttcatcggcactaatgagccattcaggatgcctccccggtggattctctcccgctcccgcctccctgcccg

SEQ ID NO: 343446 - DNA, 201 bp, Homo sapiens
tgctaggcatagtgaaggctgggctcagggcacactgtttccaagccccgattctgcctctctgcacactcagaaggcaacctgctccccaaagtgcctakcccttggccagcaaggtgagcaggagtgggtcctgccaggagaagatgggcagccagcccttggccatgccccatcacagccccaactggcagttgatgg

SEQ ID NO: 343447 - DNA, 201 bp, Homo sapiens
gaagccttccctgacccccaggctggtggagtgtgcccgtcctgtgcttcccatccccatccctgccagcactgggcattccgtggtcattgtttatgatwtctgtcttccctactaatcatgaaggtctgtgtccccagtgcccagcgcagagcatggcacatagcaaattctcaatgtttgcttgtggaacaaatccac

SEQ ID NO: 343448 - DNA, 201 bp, Homo sapiens
ccagcatgatgcgcttgtcctcttccacatgcacaccccagatacaatcctgcccacgaccgtagggctctggccagttgggagagagtaccacgccagcygagtctgtgatctccccgctgcacacggctggaaggcagaggaggcccagaagggtcttttcaagcttaccatggtgttgcttaccatctgcccgcagga

SEQ ID NO: 343449 - DNA, 201 bp, Homo sapiens
ggggcttgtgcctgggccagagagggggcaggcagagccagcatcttgctccattgtggagggtgccagggctgggctcagccttgtccagtgggcttcaktaggggtggtaggcttggggggggcagacagagcctcccaggcctgtaggggggcactcagcctggcacctgccccctcccaccccctttcccacacctg

SEQ ID NO: 343450 - DNA, 201 bp, Homo sapiens
gagttggctcggcctgacccggtaggcactcacactcggatgtccagcatgatgcgcttgtcctcttccacatgcacaccccagatacaatcctgcccacraccgtagggctctggccagttgggagagagtaccacgccagccgagtctgtgatctccccgctgcacacggctggaaggcagaggaggcccagaagggtc

SEQ ID NO: 343451 - DNA, 201 bp, Homo sapiens
tcccgcagggccgggggctgcattctccgagtgggctgggtccgggaaacacccctcccttccccgcgggccatccctggtggagactgcccaggaacttyccagcgcctgccgcccccagccctggcatggccccgccgccgcctgggccctccccccgcattagctcttaagctgtgcaaatagacatcggagggagcc

SEQ ID NO: 343452 - DNA, 201 bp, Homo sapiens
gggccgtcaggtcatccccatcatagaaggtaagcacatcaccagggcctatgcgcagcctgtgaaggaggagcgtcagggcagagccggcctgggggccygaggatgggctggacaagggatatccccagacctcaggagttggctcggcctgacccggtaggcactcacactcggatgtccagcatgatgcgcttgtcc

SEQ ID NO: 343453 - DNA, 201 bp, Homo sapiens
taaggtcatggatggtggggtggagaatgtcatgtgaattggctgccctctgctttctaccattctgagccaacaataaacttcaggagctgtggaccagrgatgtggccatcagagaggggagggctgagctagattgtttgtatgaaagaggcaagattttctatctcctatggctatattttatgtcacaggctctca

SEQ ID NO: 343454 - DNA, 201 bp, Homo sapiens
ctgagggcgtcaagggtgacctgggaagacatccgagagtgaggcagctggtgaggcccgcgtgcccttgtggcagttccgtcttgggacgataatgaagrtggcttttgagcgtacaaaggataataaattattactttgcgctcaataaatgccagggctccaggcagctgcatcagcagcaaactgtgctcacagaaa

SEQ ID NO: 343455 - DNA, 201 bp, Homo sapiens
cagaaaggcctcggggaactgggcgtagcagctactcattcctcagggaggattcttgtcatccaccgatgaggtttgcttcccaaacttggccgcgcacwggtgctctgagggttggatgtatgatgggcaattctggaagctcagagccagtttaggaggattttatgggtggaggacagccaggaacacttagcttcg

SEQ ID NO: 343456 - DNA, 201 bp, Homo sapiens
agctccagctcagatgatcagggagaaggctgcaccagtctcattggattcttcacaccagctggtgctgaaggttcaggggttgaagttgaaagaagccygtggggtcctccataaaggactcaaggtgctggccttccaacagcctggtaagagtggctttctcctctagatttgcataatgctttgcatctcatttga

SEQ ID NO: 343457 - DNA, 201 bp, Homo sapiens
tcgtgggggtcaacacactcgatgatgatggagccctgctccagggtgtagccagggtcgcagctgaactccacagtggtacccacagggtaggtgggtgygctgctgctgaagttaccgtatttgacaaagggctcatagcaatggccctgctggaaggctgtaaaccacaggtcccagcccagctcagccttgactggt

SEQ ID NO: 343458 - DNA, 201 bp, Homo sapiens
tagaaactcccaccctcacacttcacatcaggcccttcaaaccatatggcaagggatggcaggtctcaactccaagtgcggttctgccgaccctaccagcmtactgcagcgggagaaggacgtgggtgccagtagcttccatgagagcttgtttgagccaggacggcaggtccagacaagactcttccccgaggcacggaa

SEQ ID NO: 343459 - DNA, 201 bp, Homo sapiens
aggtcacacagccagcaaaacccatcactgggtgtcctgactccctgaccagccttcttcctcttatgttcttcctttaggactcccccctcctccttgarcacaacttggctccccacactgcctgatgcctccctgcccccacccccaggctctgggactccttaggcacctgctggctggtgggacccaggccagaca

SEQ ID NO: 343460 - DNA, 201 bp, Homo sapiens
actcctctgggttccagaggttaagctggcccagcacggggacaatgagaatttaatgggatccatttattatcccataaaagttaatgagtttattctgraggttccctggcccctttcaagttttaataggggattagtgagggcctggtccctgcagacccctattatccgagaacctgagggagctgagagtgcttg

SEQ ID NO: 343461 - DNA, 201 bp, Homo sapiens
gaaatgaaaaaaggctttcatcggcactaatgagccattcaggatgcctccccggtggattctctcccgctcccgcctccctgcccgcgccgccccgctayggcccctcttgggattggaggccccttcctcccaaccccagcctgggactccctgggaggaccgcttaccccgcctcacttcccagggcccagctgggtg

SEQ ID NO: 343462 - DNA, 201 bp, Homo sapiens
gagatgtggcccttggctctcagagtaggtacctgtgtgactcttcctgggagagggagtgcacagagattctctaattcaggaagtgtccagggcaggcrcagctcttcccgctggctgccaggtgggtgctgagcaatggagcagcactaatgggcacctcccatcactgtcgattgcactgattgtgctatctgggat

SEQ ID NO: 343463 - DNA, 201 bp, Homo sapiens
ctgattttaaatgactagatcagaaggctactatttaatcaatcctttattattgtggttttaggatgtttgcaagtcttcctattatagacaaacctgaratggacatttttgtatctttttgtaggttggagcaaaagtaattgctgttcttgccattgaaagtaatggcaaacccaatatatctttgcacacttatct

SEQ ID NO: 343464 - DNA, 201 bp, Homo sapiens
tcgttccacacgcctcagcctcccaaagtgctgggattacaggcatgagccaccgcgcccggccaattttttgtatttttagtagagacggggtttcaccrtgttggccagactaatcttgaacttctgatgtcaggtgatccacctgcctcggcctcccaaagtgctgggattacaggcatgagccaccgtgtccagcca

SEQ ID NO: 343465 - DNA, 201 bp, Homo sapiens
cagccatggctggagtggggctggtaaagacagggcggctgtcctggttggccaggcggggaaggggacttggggtgaagggtgcaggtgggtcaggctgraagggcagtgctggcctcagctcctcatctcccttttccagcccctcttgtaggaattcctcaagcagcgggtggtggttgagcagcttcaaggtggggg

SEQ ID NO: 343466 - DNA, 201 bp, Homo sapiens
cccagagaggtgagtgacctaatcaaggtcatgggcaaggtgaagccaggactagagacagagccagatctctcagtttaggaccctttccacaaaacagrcagcctctgaggaatgagagacagagacagacacacaggaagggacaaacatatatgacaagaaagaaaaagagggaagcggggagggcaggggagaata

SEQ ID NO: 343467 - DNA, 201 bp, Homo sapiens
taacactgattccatatgcacattctatccattctttttcaaaagcatggcatcgagcagcaatcttgtagggctgttcagcactctggattgtccaccaytgatctatgttaaggccgaatcttttctggatggccaagaaaggcatggtgatccgatgctcatgtctttgtgtcttctctggccgccgcttcaggatga

SEQ ID NO: 343468 - DNA, 201 bp, Homo sapiens
gaggcaggcattgccaggaattgatttgcggaagcagcgggggctttctcttcctccttacttccttggtctttgatctcctgtcctccctccatagtccwttttccccctccttcccttgatttattcctctttttctttctttagctgaatcatagccactccctagaaggcaaaggctgggagaggcagttctttgtc

SEQ ID NO: 343469 - DNA, 201 bp, Homo sapiens
ctcagagagggggatgggtaggagggacacagctgagacagcggcaaagtcctgagccccttttcctccctctcccatcctgccagtcatgtaatactggkttccttaatgaagcatgtgctaagcacttgacatgtaccattttgcttaatcctaaccatgactttgtggggtaggtgttttggtttcatattacagcag

SEQ ID NO: 343470 - DNA, 201 bp, Homo sapiens
gatggtggggtggagaatgtcatgtgaattggctgccctctgctttctaccattctgagccaacaataaacttcaggagctgtggaccagagatgtggccrtcagagaggggagggctgagctagattgtttgtatgaaagaggcaagattttctatctcctatggctatattttatgtcacaggctctcagagtttagaa

SEQ ID NO: 343471 - DNA, 201 bp, Homo sapiens
ggggccctgagtactggcccagaacccgggccgtcaggtcatccccatcatagaaggtaagcacatcaccagggcctatgcgcagcctgtgaaggaggagygtcagggcagagccggcctgggggcccgaggatgggctggacaagggatatccccagacctcaggagttggctcggcctgacccggtaggcactcacact

SEQ ID NO: 343472 - DNA, 201 bp, Homo sapiens
cctcctactcaattgacacttacggagacatttaggggcccggtcactccacttggggctgccagcctggcgatcatggcaggtgaggatggagctgcccrtcagcacaaaaccctggtcacagatatattgcacggtggcccccacgggaaacttggggctggatatgaggcgtcggctgtgctccacatctccaggatc

SEQ ID NO: 343473 - DNA, 201 bp, Homo sapiens
tagggctatgaggagtaaatgagataactcatgcagaggcaaatttaccatgaagcaaatgaaacttcaaccatgggggtccttaattgaacagtttcttycacatccgggcatctaattttgtattaataattctccttttttctttttctcaaagagtaccctcgaactgtatgacaatcaagccctacccaaatgcca

SEQ ID NO: 343474 - DNA, 201 bp, Homo sapiens
gttttcctgacttttcgcttttctgatgaccctcttggtgcctggaaagaatgataaggtcatggatggtggggtggagaatgtcatgtgaattggctgcyctctgctttctaccattctgagccaacaataaacttcaggagctgtggaccagagatgtggccatcagagaggggagggctgagctagattgtttgtatg

SEQ ID NO: 343475 - DNA, 201 bp, Homo sapiens
atgcgaggggtgcccaggcacacacttgatgctggcctggcccttcagcacatagccaggggcacacgagaagtggatggtggcccctgctgggtgtagcygcttctcaggacttcgggcaccattctcaggggcactgagaccatggcatggcttgagctgttccactacaaagcaggcagagtgcagtgagggtgtcat

SEQ ID NO: 343476 - DNA, 201 bp, Homo sapiens
cttgacttcaaaggaaggaaggggacccaaggcagaaacagaaaaaagaacagaataagaaacagtgagaaaaaagagtaagaaagatgtgtctgcaggcrtcgtggccgagagatgggccagactggcttaggggccagtctggaggcaacaagcagaaggtgggcactgaagaaggcttagaagttgttatccagaatt

SEQ ID NO: 343477 - DNA, 201 bp, Homo sapiens
agctcctcatctcccttttccagcccctcttgtaggaattcctcaagcagcgggtggtggttgagcagcttcaaggtgggggctgttgtgacaaagtggaygcctcgttctggctgctcaggtgtgggggctgctgtcagctcgccatctgtctcctcgatgcctggggcttgtcctttccccacggttggggcctctaaa

SEQ ID NO: 343478 - DNA, 201 bp, Homo sapiens
ctgggcagacacaagacggacttgttgatttaattgaaaagatggtattctgaaagcaccccctcccctctggagcctggcatcttcacagtagctgaggwttcctcttgatggggcgaaaagagaaagcccaagattgcatctcattggtgagatgaataatacatttgaagcatctcacaaactgtgtttgatccgcct

SEQ ID NO: 343479 - DNA, 201 bp, Homo sapiens
acaaagtggctttcagccagctcctgggcgtctccctggggctctcctaccacctgttccatgccaaattcctgggtccttggacctctgctcctctccaraatatgcccaccccctccccttatcccataacacagtggtcaagaggagagcctgacaagtggctggaattggaggagggactattagggtgaagatgtt

SEQ ID NO: 343480 - DNA, 201 bp, Homo sapiens
ctccagaatatgcccaccccctccccttatcccataacacagtggtcaagaggagagcctgacaagtggctggaattggaggagggactattagggtgaaratgtttgcaacagctaaataaacatcggaggaaagtctccctttcctcagggtatagggtggtcagtggaaaatggcgtgtcctgctttggtgtggagca

SEQ ID NO: 343481 - DNA, 201 bp, Homo sapiens
acccagcactccagcccatgaggctggcctggcccttcacttccccagcaaacctgagtgggggaggggaggggtgcagagctgctaaaaatagctgcagmagctccagctatgagtctccttgaggggtcagtgaagcccaagattggggaggaagagactggagtgggctgcagggagggagagagaccagcctgggct

SEQ ID NO: 343482 - DNA, 201 bp, Homo sapiens
ggaggcctgggctctgcccttagggacttggcgaggttgtagaggcagagggaggtcatcgtgggacctctcccatcggcatgcaggaggaatgagcttckcctgccccagggtgtgggccctgagcctgtgggctatcccaggcaccttttgcctgaggggaaggggccccgcccacccagcactccagcccatgaggct

SEQ ID NO: 343483 - DNA, 201 bp, Homo sapiens
ggcttagggaggagtcactggaggcctgggctctgcccttagggacttggcgaggttgtagaggcagagggaggtcatcgtgggacctctcccatcggcakgcaggaggaatgagcttcgcctgccccagggtgtgggccctgagcctgtgggctatcccaggcaccttttgcctgaggggaaggggccccgcccacccag

SEQ ID NO: 343484 - DNA, 201 bp, Homo sapiens
gtggatcacaaaatcaggagttcgagaccagctaacatggtaaaaccccatctctactaaaaatacaaaaaaaaaaaaaaatgatctgggcatggtggcaygcgcctgtagtcccagttacttgggaggctgaggcaggagaatcgcttgaactcgggaggcagaggttgcagtgagtggagattgcgctactgcactcca

SEQ ID NO: 343485 - DNA, 201 bp, Homo sapiens
gacaaacatggatgagttcaactgggtgtccaggcttgtgttagagggccgcaggggcccagagaaactgctttcattgctgtagagttccatggcttttyttcatttcccacttcctctccctgcctcaagaccctgcggatcaacgtgtgttactggcgagagatggttcctgggagctatggtgtgtcccaggccttt

SEQ ID NO: 343486 - DNA, 201 bp, Homo sapiens
catgcctgtaatcccagctacgggggaggctgaggcaggagaatcgcttgaacccgggaggtggaggttgtggtgagctgagatcactccattgcattccwgcttgggcaacgagagcaaaactccatctcaaaacaaacaaacagccgggagtggtggctcatgcctgtaatcccagcactttgggaggccgaagtgggc

SEQ ID NO: 343487 - DNA, 201 bp, Homo sapiens
agggaccaacagctaagcagcctcaggtgacagcccacagcacctgccaggagtggggaaggctggaatgatggatggggctgtcctgtgtacacgcctgyccttcggctgtgggtgtgtgtggaaggccagccctcaccactcatgccactctgattgggagccaggtcagctatcaccacggcaaccacgcagaccctg

SEQ ID NO: 343488 - DNA, 201 bp, Homo sapiens
gccaatggccatggacttcttttaaaaccagaatggtggccgggccggtgtctcatgcctgtaatcccagcactttgggaggccgaggtgggcggatcacytgaggtcgggagttcgagacaagcctgaccaacatggataaaccccgtctctactaaaaatacaaaattagccgggcatggtggcgcatgcctgtaatcc

SEQ ID NO: 343489 - DNA, 201 bp, Homo sapiens
tcccaggtcactttatgtcttttcattggtgctttttacttcttcccctggaaattggtgacctctgtgctttctcctttctccctttcctggaaatgtgkgttctttgagggcagagtccctgtttaattcagctgtttgtacctgtggtgccttcatctggtagatgctcaataagtgcaggttggatgaatgccactg

SEQ ID NO: 343490 - DNA, 201 bp, Homo sapiens
cccaggtttctggaattggtggagaaaatggcataggcatgagagagggtttcctagagctgttattttattttattttattattgtttttagagacaggktctctgttgcttaggctggaaatgcagtggcacaattatattaatagctcacccaaactcctgggctcaagagatcctcccacttcagcctctcaagtag

SEQ ID NO: 343491 - DNA, 201 bp, Homo sapiens
aaaagggaaaggaaatctcagagtatatgagaggccaaagctggtatattgcaggcagagattagaatatgctgctctggaatttccaggtcagggatttyacattacatctgcttaggtgtggtttaagccaggtctgtcccagaatccctcccagccaggaccccattgggtaaaaaggactcaaggaaatacacctga

SEQ ID NO: 343492 - DNA, 201 bp, Homo sapiens
ctcagactgggcaggtggcactggagctgggggcctggagtgggggttaggtgagagggagggactgaccttgaggtaggggcaggaatcgaccccagccyctggggtaggatggaaggaatggtcttcttggcatcacccctcaccagtctgataaataatcaatctgctgtacctcaccctgcttatgccacctcccag

SEQ ID NO: 343493 - DNA, 201 bp, Homo sapiens
ttcttggcatcacccctcaccagtctgataaataatcaatctgctgtacctcaccctgcttatgccacctcccaggagtgtggccagggcagagtcctagrtagggctggagctggggactgggcttcgttctctccctggaggcgtttctgtccatcagctccttctgtccatctgctagccccaggccccttctcctac

SEQ ID NO: 343494 - DNA, 201 bp, Homo sapiens
aaagaatttggggccatccttaatctgccaaaagtaggcataaaaatactcctaagccaggtgcagtgtctcacacctgtaatccaagcttttgggaggaygaggtgggaggattgtatgagtccaggagttcgagaccagcctgagcaacacagtgagccctcgtctctacaaaaaataaacaaaattagctgagcatgg

SEQ ID NO: 343495 - DNA, 201 bp, Homo sapiens
ccatgctgggccctggaggtaggggagctgtgattcgaagcataggggactctgactccggactccagggtccctccttggactggggctgagtgggtacygcagccatggctggagtggggctggtaaagacagggcggctgtcctggttggccaggcggggaaggggacttggggtgaagggtgcaggtgggtcaggct

SEQ ID NO: 343496 - DNA, 201 bp, Homo sapiens
tgtacctcaccctgcttatgccacctcccaggagtgtggccagggcagagtcctaggtagggctggagctggggactgggcttcgttctctccctggaggygtttctgtccatcagctccttctgtccatctgctagccccaggccccttctcctacctgctatgttaggaggcagagaatgaggagctacccactggccc

SEQ ID NO: 343497 - DNA, 201 bp, Homo sapiens
gatggatggcctgcatcctcaaacacagacgcacatgtcttatttaattctcacaacacagcggattgaaaatatctgtcatcagcttataaataacggcyataccaggtctcggacttgctgtctagattcttcccccagggtgggtgcttgcaagcaactccagccctggggaccttctgttctagcaggtggcaccct

SEQ ID NO: 343498 - DNA, 201 bp, Homo sapiens
cccacccgccttggcctcccaaagtgcttggattacaggcgtgagccaccgcgcccggccgacttgtcacttttcttttgagtgtgctggagcctgtcacytcatctccctctgctgagcatctgcagggctaggctgtgtgtatgtgtttgtgtgtctgtgtgtgtgcacatgtgtatgtatgtaggtgtgtgagcatat

SEQ ID NO: 343499 - DNA, 201 bp, Homo sapiens
ggaggagggactattagggtgaagatgtttgcaacagctaaataaacatcggaggaaagtctccctttcctcagggtatagggtggtcagtggaaaatggygtgtcctgctttggtgtggagcatgagtgcccagggaagcccaacctgaggtgggggtagggtccccctgaaccccttaggatctcctagaattactgcc

SEQ ID NO: 343500 - DNA, 201 bp, Homo sapiens
aagcaggcagagtgcagtgagggtgtcatgcccttggcctccagggcagcatcttttatctccagctagaggttttccctcctactcaattgacacttacrgagacatttaggggcccggtcactccacttggggctgccagcctggcgatcatggcaggtgaggatggagctgcccgtcagcacaaaaccctggtcacag

SEQ ID NO: 343501 - DNA, 201 bp, Homo sapiens
ctcccagccctggccttaggcgatgccccacaattgatgcccctaatcatccccacatcctctcatagcatgtgcctctctgaagaaagagaatacacccrccccagctttgcccttgccagatccagatcactcaccttgatttccacgccatagccagggtagacagagatgtagaagaagcagtccaggccaacatca

SEQ ID NO: 343502 - DNA, 201 bp, Homo sapiens
ttggcttaggccattgccaaacacacggggcagaatctaaccatttaggcccatctcccagccctggccttaggcgatgccccacaattgatgcccctaakcatccccacatcctctcatagcatgtgcctctctgaagaaagagaatacacccgccccagctttgcccttgccagatccagatcactcaccttgatttcc

SEQ ID NO: 343503 - DNA, 201 bp, Homo sapiens
tttgtctccaaatgctcaaggcagcagaatattgtaacctagtaaagctcctggggggctggggcaagtttcttctctgcagaaaggacagacctgcctcrgcttggtctcagaatggaactgcccttcaaatctgatcatgccccatcctttgctgaaaattgcttagtggctccccattaccctcaggatagagttaaa

SEQ ID NO: 343504 - DNA, 201 bp, Homo sapiens
gtggtgggtggaagagagaagatcctggaggtttcagatacgcgatacttacctccaattgtccagagcttcactggacatttgtgctatgtgtcactagsccctctctgctccttccctctaggatgtaattgcacagagacccccctccccagcaaggagggcagcgagtctgggctggttccaccttcaactacccag

SEQ ID NO: 343505 - DNA, 201 bp, Homo sapiens
ctactaccccagagcagctgcctggcctcgggcacaggagaggcactcacatttactgagcacctgctatgggctagccatgcacttcacaaagagctgtmttccacctagagtggcagccctttgtgcttggaatcaatagtttatgcttggcctatgaagaaactaaggctgagaggcaaagtgaatcctcctagttca

SEQ ID NO: 343506 - DNA, 201 bp, Homo sapiens
ggttaagtaacttgtcctgagtcacacagcttgtaagtggtagagcgtggatttgaactcatgtgtattagacttctgtgcctaagcttcagccaccacartctcctaaagatgacatcagaggtgcccatactctccccctggctagatattacctggttaagtaattcctactttagagaggaggaagcagattctgag

SEQ ID NO: 343507 - DNA, 201 bp, Homo sapiens
gcgccaccttctgcagtggcaccgcagagctaaaggcacagctgagatggttcctcttggagttcttctagcccatgagagttacatggcctcaagagcargcagacatggaggaccttctaggactggctccaactcctgccttctctaagtgtctcagatttgattccatgtctcctctttgcttccaggtgcttgtca

SEQ ID NO: 343508 - DNA, 201 bp, Homo sapiens
gtggtgatggtggtggtgatgatggtggtggtagtggtggtctcctcatcatctcctgaagctgtggaggaggtgatggtcccctggatcccgatccctgygccctgggacacaacctctgcaacccacggccttcccatgtctccaggaccctcttgggttggtgtccaggctctgctggggggtgtagtgctggctatc

SEQ ID NO: 343509 - DNA, 201 bp, Homo sapiens
tgtaatctcagcactttgtgaggctgaggtgggcagatcatgaggtcaggagttcgaaaccagcctggccaacaaggctcaatacaaaaatgagccgggtrtggtggtgagcgcctgtaatctcagctactccagaggctgaggcaggagaattgcttacacccgggggcagaggttgcagtgacctgagatcgcaccact

SEQ ID NO: 343510 - DNA, 201 bp, Homo sapiens
ccctgaggcccagcaaaaggagcccttcctttgcaaacatagggtggttgcagggaccaacagctaagcagcctcaggtgacagcccacagcacctgccakgagtggggaaggctggaatgatggatggggctgtcctgtgtacacgcctgcccttcggctgtgggtgtgtgtggaaggccagccctcaccactcatgcca

SEQ ID NO: 343511 - DNA, 201 bp, Homo sapiens
actgtgtgcccctaagaagtcagtcccttggagggtccatctcctgtgtttctggtgggaaatcagaggtgggaaattgagccttgagccttgccagttgccaagcaccaaagatgcttccttcatctcatgggaagcagagagtaacagtgttaaaaactggccccctggccgggtgcggtggctcatgcctgtaatccc

SEQ ID NO: 343512 - DNA, 201 bp, Homo sapiens
tgctgctattctcctggtatgaccctgccttttgcccggtaggcccatccactggtgtctactgacctcggcaggctggctctgtctcattccactggggrtcgtgggggtcaacacactcgatgatgatggagccctgctccagggtgtagccagggtcgcagctgaactccacagtggtacccacagggtaggtgggtg

SEQ ID NO: 343513 - DNA, 201 bp, Homo sapiens
agaatggcgtgaacccaagaagtggagcttgcagtgagccgagatcatgccactgcactctagcctgggcaacagagggagactccatctcaaaaaaaacaaaaaaaaaacttcccctgactgagctcagggacagcactgtgcctgtgtttttaccaacatgcttccagtcactcttcgtgtctctctgcaggccgacct

SEQ ID NO: 343514 - DNA, 201 bp, Homo sapiens
gaatggcgtgaacccaagaagtggagcttgcagtgagccgagatcatgccactgcactctagcctgggcaacagagggagactccatctcaaaaaaaacaaaaaaaaaacttcccctgactgagctcagggacagcactgtgcctgtgtttttaccaacatgcttccagtcactcttcgtgtctctctgcaggccgacctt

SEQ ID NO: 343515 - DNA, 201 bp, Homo sapiens
gggcaggaatgaggcaggtgctgaaacagggagactggggataggacttaagacgtacaatgttggctagattattttcacataggagctctgggatggakgggaggaggctttcccccatcatgtggcaggagaagtcccagggttcaaatttggggcactaataaagaaaactctttgaaaactaccaaggggatgaaa

SEQ ID NO: 343516 - DNA, 201 bp, Homo sapiens
gaggatagggtggaaacagacgtcctttccacagtggtctctttcgtacactatgttgttctatatgtatgtattacctacaaaaaaatgacaatgaaaakaaggctttttctccttaaagagcttgggggaaggcaggcatgcaaacaattacaatgcaatatgctcagtgttattgagatgcgcagggtgggaagggag

SEQ ID NO: 343517 - DNA, 201 bp, Homo sapiens
gggagctgtccagttgtgatgtggatgctggcctgttccggggggtgggagtggcatatggagttgtgaggatttctggactcttgaaatatacatacatatatatatatatatatatatatatatatatatatatatattctggggttttttttttttagaagaaaaaaaagccaagcatggtaggttttgcttgtaacc

SEQ ID NO: 343518 - DNA, 201 bp, Homo sapiens
ggagctgtccagttgtgatgtggatgctggcctgttccggggggtgggagtggcatatggagttgtgaggatttctggactcttgaaatatacatacatatatatatatatatatatatatatatatatatatatatattctggggttttttttttttagaagaaaaaaaagccaagcatggtaggttttgcttgtaacct

SEQ ID NO: 343519 - DNA, 201 bp, Homo sapiens
ctcagcactgagccctttcccctggggcactcaccgatgcagacgggctcctttgaatcccagaagggctgggtggcattgagacaggtgagatgcctggygcccttcagctggtagccagtggcacaatggaagcgggcactaccccctgggtggaggctggtgacagtcacatctccataagctggacgacggggaaag

SEQ ID NO: 343520 - DNA, 201 bp, Homo sapiens
gagctgtccagttgtgatgtggatgctggcctgttccggggggtgggagtggcatatggagttgtgaggatttctggactcttgaaatatacatacatatatatatatatatatatatatatatatatatatatatattctggggttttttttttttagaagaaaaaaaagccaagcatggtaggttttgcttgtaaccta

SEQ ID NO: 343521 - DNA, 201 bp, Homo sapiens
agtgcaggtgtagccgctggccctcaggagcctcaagcagccagtgacaggtgaggttgttgctgtagttgcccgggaagcctggagagacgatgcggccrgtggtggcattgcggatcactccgccgcaagcagctgttaagaccaggacaggacgtaggctaggcccctgcctgaacccaggcagcctaacatgccttc

SEQ ID NO: 343522 - DNA, 201 bp, Homo sapiens
agctgtccagttgtgatgtggatgctggcctgttccggggggtgggagtggcatatggagttgtgaggatttctggactcttgaaatatacatacatatatatatatatatatatatatatatatatatatatatattctggggttttttttttttagaagaaaaaaaagccaagcatggtaggttttgcttgtaacctag

SEQ ID NO: 343523 - DNA, 201 bp, Homo sapiens
atgagcctggatgtattctaatacaactttatttatagacactgaaatttgaacttcatataattttcatgtgtcactcaacattattcttctttggattaaaaaaaatcaacaattaaaaaatttaaaaaccatcttggctcatggaccagaccaaaacaagcagaaggccagatttggtccctgagtggtagcttgctg

SEQ ID NO: 343524 - DNA, 201 bp, Homo sapiens
ccttcctgaccctcatcctggaagcaggtggtgaaatttctgctcaagttccttagagagtgttttggtcctcttgaccagagtctcccaactctgctggktggattctctccagaccctcttcttgtgggctctggggagctgtgatgactgctgtaaagagtcccaggcagcaggcagatggcgtgtggaattaggaag

SEQ ID NO: 343525 - DNA, 201 bp, Homo sapiens
cttcagcttcgattttccgctgccctttgcaaaaaaccaagcctggaggcctctctgggctgcctcccaaatcaggaagctgcagaggtaggctgcctatmtcaggcaccaggacaactgcctttttggtctgggagattgagtttgtctggcagggcaacaaaaaactcatcaggacagatgtagtcatgtattgggtgc

SEQ ID NO: 343526 - DNA, 201 bp, Homo sapiens
tgaataatcaattgcaaaagcccaatctctggtttgattgaaggagaaagatggaaagttaaatgacaatcaaatgcaaatacagctcaacaaacaccacrgcaattaccaggcgcaggaaccacatggtgcttgcaggcagcgggggttggcaatttggaagcctgagcctgtgcagaggtgacgggcgaggggccattt

SEQ ID NO: 343527 - DNA, 201 bp, Homo sapiens
gaagaaggttagaaaaaaggatatatatacctctcccaacaggtatgatgtcttctctattttgagctttctgttactttttgttacctttcccatgtatstaaatctttattccattgccattctgcttaaagaagtttatagcatcacaaaattaatttgtagtagatgtgaacacaggccacagtactctattgaaat

SEQ ID NO: 343528 - DNA, 201 bp, Homo sapiens
agtgctcaacaactgaaagcatttcttctcccacttccttactaacagtgtggcaggactgccagttctgtctgatagaaaggccctgttctagactttayttgaccatattaagcaggtggatcaggtagtagttatattacaaagtgatgattagagtctgaggactaatcaattttttaaaatgaagcttccgttaat

SEQ ID NO: 343529 - DNA, 201 bp, Homo sapiens
ttgtgcctgggtcagaattttgaaagctgctgcagcactctaactatgtacttaactttatagatgtaaaaaaaattgaggataagagaagttagacataycttgcttaaggtccctggtatatttttggatttttaatttggtgttgggaactgtatgatggaacaactaataatagcagtagtagcaaatgttagtctt

SEQ ID NO: 343530 - DNA, 201 bp, Homo sapiens
aggggagagatgggaccagaaagatggtacaatagtgggaggttacaggttatgatgaaaaaatgggggtaggtggtaggtggataaaaatatcatgggargaactgaaggacttttaagagcagggatttctaattttaggttttttgcatccttaatttaaaaccacttatctgctccaaaccttctaaagagttggct

SEQ ID NO: 343531 - DNA, 201 bp, Homo sapiens
ttaaacagtaattcatgaagcaatcccgtgaagtaggtgtcttactatcccgactttacagatgaagaaactgtggtacagagcgctaaaacttgccagcstctcacagtgagacatggatactggaagaatggaatttgtgaagtcacacatctttttcctgtttaaccttaagatttttcatgttatgtagttccccac

SEQ ID NO: 343532 - DNA, 201 bp, Homo sapiens
gtgtgaggctggaaaggggataataatagatatggcatgtggttaaaaatggaatacacatatgggatctagagggctacagatacatacatagctatagwaagagaaaaggtaggaaaacagaggtagagacatttcaagagagaactaagattagacacgaagtgatagagtccctttcccaagaatcaaaaagagaca

SEQ ID NO: 343533 - DNA, 201 bp, Homo sapiens
atccattgttgggcacttaggttgattttgtattttggctgttgtgaatagtgctgtgataaacacaggagtgcaaataattcttcgacatatcgatttcyttttttttttttgtatatattcccggtagtggaattgctggatcatatggtagatctgcttttagttttttgaggaacctccacacagttttccacagtg

SEQ ID NO: 343534 - DNA, 201 bp, Homo sapiens
ggaggctgaggcaggagaattgcttgaacccgcgagttggagtttgcaatgagccaagatcgcgcaactgcactccagcctggcaacagagtgagactccwtctcaaaaaaaaaaaaaaaaaatcacttctgtatcattacaaaatatctgactttatcaatttattttgtccttgctgtgcttttgtagtatttattggc

SEQ ID NO: 343535 - DNA, 201 bp, Homo sapiens
acttcctgcgagaccttgtattagtcagagtcctgcagagaaacagaaccaacaggatgtgtatatataaagaggtttattttaggcagttggctcacacsattatgggggctggtaagtccaaaatctgtacactgagctggcaggttagaggcccaggaagagctgatactgcagttcaggtccaaaggctatcaggct

SEQ ID NO: 343536 - DNA, 201 bp, Homo sapiens
gtgagccctatggagccaaagagcagtagaaagaaggtccttaccctccaggagctcatgttttctttgcacagaacttgacaatccaccaggctacaagsgttctgatatagtttggatctatgtccctgcctacatctcatgttgaattgtaatctctaatgttggtggaggggcctggtggaaggtgattagatcatg

SEQ ID NO: 343537 - DNA, 201 bp, Homo sapiens
tgagcccccgcacctggccaatttttgtattattagtagagatggggtttcaccacgttggccaggctggtctcgaactcctgacctcaggtgatccaccygccttggcctcccaaagtgctgggaatccaggcgtgagccattgcgcccggcgttgtcagtcttttttaggtataatcatatctcattgtgattttccca

SEQ ID NO: 343538 - DNA, 201 bp, Homo sapiens
gttgattcgtctgttggacagaatctattgttagaaaattctttcttttgctgatctgaaatctatctcttttgttactggcccttgctttttttttttttttttttttttggcttaatacctagtaggcctgttggttgtattgccccattagaatttacttcttcagcttaaatgtctctagtttccttggtcttcctc

SEQ ID NO: 343539 - DNA, 201 bp, Homo sapiens
ttaaagattctaagttactttatcaaatgagtgtaggtcagataggataaggattgagaattggcatggatttagcagcaggagatcactggtggccttgwtgcacagttttggtgaaatggtagagaatgatggaatgggttcagagaacgcagagagaggagcagaagatgataagtatgcacagctccctcaatgagt

SEQ ID NO: 343540 - DNA, 201 bp, Homo sapiens
gctctttttggttccatatgaaatttaaagtagtttttttctaattctgtgaagaaagtcaatggtagctaatggggatagcattgaatctgtaaattacrttgggcagtatggccattttcacgatattgattcttctatccatgagcatggaatgtttttccattagtttgcgtcctctcttgtatccttgagtagtgg

SEQ ID NO: 343541 - DNA, 201 bp, Homo sapiens
gaagtaaggacaaactctacctgtgggggtggaatccatgaggatacattggaatctatgttgaactctttttttccactgagactcctaaccttgatgartggactttcctacagaagaagctagctaaatgtatacctggctcaaaagtcaaaaaaggtgaaggaagaaatgtggcagaaactaccaagagctgaaggt

SEQ ID NO: 343542 - DNA, 201 bp, Homo sapiens
gctttgttctttttgcttaggattgtcttggctatatgggctctttttggttccatatgaaatttaaagtagtttttttctaattctgtgaagaaagtcartggtagctaatggggatagcattgaatctgtaaattacgttgggcagtatggccattttcacgatattgattcttctatccatgagcatggaatgttttt

SEQ ID NO: 343543 - DNA, 201 bp, Homo sapiens
gcgcgcgcgcgcgcgtatgtgtgtgcacacaccccgcccccaacatatatgcacacattttctttatccattcatctgtcaatgtatgtttagtttgtttycatatttggctattacagtaatgctgaaatgaacatgagagtgcagagatctgacacactgatttcattttctttggctgtatgctcagaagtgggattg

SEQ ID NO: 343544 - DNA, 201 bp, Homo sapiens
cttaaagaagtttatagcatcacaaaattaatttgtagtagatgtgaacacaggccacagtactctattgaaatttcttatgtttcagagaaattcttaartttggaacaatattcatcttaataaatatggtagcacttttaagttttcacttttcaacttgaagtttttttggatctttttcagaatatgctgttttgg

SEQ ID NO: 343545 - DNA, 201 bp, Homo sapiens
ctgtagccttgtagtatagtttgaagtcaaggtagcatgatgcctccagctttgttctttttgcttaggattgtcttggctatatgggctctttttggttycatatgaaatttaaagtagtttttttctaattctgtgaagaaagtcaatggtagctaatggggatagcattgaatctgtaaattacgttgggcagtatgg

SEQ ID NO: 343546 - DNA, 201 bp, Homo sapiens
cttttgccattgttttaaaagatttttttaaatactccaattgttttatgagattattgaatgatttctttaaaatattttcataaaggctagattttatkcccctaccacgatcttcattgatgagatagattctatctgcagtcgaagaggaacctctgatgaacatgaggcaagtcgcagggtcaagtctgaactgct

SEQ ID NO: 343547 - DNA, 201 bp, Homo sapiens
ttttcatgtttgttggccacataaatatcttcttttgagaagtgtctgttcatatcctttgcccactttttgatggggttatttgtgtttttttcttgtaratttaagttccttgtggattgtggatattattagccctttgtcagatggatagattgcaaaaattgtctcccattctgtaggttgcctgtttgctctgat

SEQ ID NO: 343548 - DNA, 201 bp, Homo sapiens
atgatgcccccataaatcagttctgtccacctggaatcttttttgaaaagggcagtgtagttctattttaatagttcttgacacactgatgagaattgggrtgatgggttttgtggggtagttggtgtatcttcagtgtatctttttctttaaggtaaagcaaggccttttggcatcctgtccactcagggtggaagaaga

SEQ ID NO: 343549 - DNA, 201 bp, Homo sapiens
aatttttgtaattttttttttttttttgagacggagtctcgctctgttgcccaggctggagtgcagtggcaccatctgggctcactgcaagctccgcctcstgcgttcacgccattctcctgcctcagcctcctgagtagctgggaatacaggtgcccaccaccacgcccggctaattttttgtatttttggtagagatgg

SEQ ID NO: 343550 - DNA, 201 bp, Homo sapiens
ccggctaatttttgtaattttttttttttttttgagacggagtctcgctctgttgcccaggctggagtgcagtggcaccatctgggctcactgcaagctcsgcctcctgcgttcacgccattctcctgcctcagcctcctgagtagctgggaatacaggtgcccaccaccacgcccggctaattttttgtatttttggtag

SEQ ID NO: 343551 - DNA, 201 bp, Homo sapiens
agcccaggagttcaagaccagcctgggcaacatagtgtaaccccgtctctactaaaaacacaaaaattagctgggtgtggtggtgcatgcctgtaatcccrgctacttgggaggctgaggcatgagaatcgcttgaacctgggagggaggcagaggttgcagtgagctgagatccagccactgcactccagcttgggcaac

SEQ ID NO: 343552 - DNA, 201 bp, Homo sapiens
ggtgaggggtgcatgagcaagcaagcaccagggtccggccactgtgcattgccaggcacgctggctattgggtagtctgactttttcttgctgatttttaraaattccttaaatattcttgatacaagtctttggttgcttatatatgttacaaatatcttctcaaactctgtaacttatctgttttcactgtgtcgacag

SEQ ID NO: 343553 - DNA, 201 bp, Homo sapiens
acaaaaattagccgggcatggtggtgcacccctatagttgcagctactcaggaatcacttgaacctgggaggtggaggttgcagtgagtcaagatcatgcygctgcactccaatctgggcaataaagtgagtctctgtttcaaaaaaaaaaaaaaaagtagttttaaacatattttaaagaataataaatgttttaaagtc

SEQ ID NO: 343554 - DNA, 201 bp, Homo sapiens
tatagaattatgattttttcaaactaatttctacccttttctcagtattacttgaaatagttctttgtatttatgaatgttttaatgattcatttttcacmctttgacattaagaaaacgtgcactctatagtaatttattatttacaatttatgaagtatttaaacagcttctagcataaagcctattttttttttttaa

SEQ ID NO: 343555 - DNA, 201 bp, Homo sapiens
gacaattttgagtttatcttttgatggaaaaatctcaatgtacattaatagctgatgataatttataaaaaaattttttaatctgataaatcatttaattygtcttttgaaatttcagggtgtactgatggttggacccccaggcactggtaaaactatgctagctaaagctgttgccactgaatgtggtacaacattctt

SEQ ID NO: 343556 - DNA, 201 bp, Homo sapiens
catgcctggactaatttttttgtttccccaggctggtcttgaatgtaatttttaatctttatctgtttgctttggaaaattagtttgggctcaaagtttgmaaacacaagaatttcctcatagtatgtgttcagttaaattttttaaatacaggaaaaatcttgtctttgaaatcaaaataaactttactcagaactcaaa

SEQ ID NO: 343557 - DNA, 201 bp, Homo sapiens
acaaatcttgctaatttgattatgtttgaattaccactggattttttactgttaaccttattaactcataaatgggtctttattttttactgaaagctgtrtattataaatgcactgtggaagataggttctgtcccttatagagggtaaagaatgtgtaattctgccacatgtgatagaaaatgtcttatttttattatg

SEQ ID NO: 343558 - DNA, 201 bp, Homo sapiens
tttaatgttttaattgatcagtaccttttagcatagttcttgctttgctgttctaattccaaattaattgtaacttttaaaaaagaatttttttttttttwacaaataatacttataagcaatatatctttaaggaaataaaagcatcttcaatgatgtttaaacaaaattggcttttgttttataaggacttattattta

SEQ ID NO: 343559 - DNA, 201 bp, Homo sapiens
attctttcattgacatgtaagtactcagaatgtcactagaaagtaacccttttatgtaagaaaagaaaagaactccgcagttgtttggagataaaagataygttctgagtcactgtggaaacagaggggactacagtttttcaaaacaaactcatgcaaacttcataagcctttgaaaggtatatttgactcagttacaat

SEQ ID NO: 343560 - DNA, 201 bp, Homo sapiens
tgtggctggaagtatagagtgtttatatgggacatagtaacaaaagacactgctggaatggttggtgtgacctacttctcacaaagagccctgcatgccaygctaaagatgtcagtgagccattgaagagtttttagtagaagggtgatttgcaagtgtaggaagatctcttttctgtagcagtatggaggacaggttggg

SEQ ID NO: 343561 - DNA, 201 bp, Homo sapiens
aaaaacattactatatttgctgtcttttgactatataatttgattatttaataagacagttaaaaacttgaattttaatttgcctacttaccgttttttamatttaatgttttaattgatcagtaccttttagcatagttcttgctttgctgttctaattccaaattaattgtaacttttaaaaaagaatttttttttttt

SEQ ID NO: 343562 - DNA, 201 bp, Homo sapiens
agctttactgagcgggatttgtgtggagaatggactacagcaggactcctaggcggccattgaatcgcaagctgaggtggggaaagcgcaagctgaggaggcagaaggaatgttgtctgagacctgctgcagtgcaccctgagcagtgaggtcacagcaagcccagccatgggcaagcagcctggcatccagctgggaggg

SEQ ID NO: 343563 - DNA, 201 bp, Homo sapiens
aaggaattatttttgagttttaaattttggtataatattaatgtggaaatgcaccaagttagaaatacagggctgaagcttgtgagagaggtaaaagatgracatattaagtgccttttcaaaaatacgttatctctgggatgaacttttctctaacagaataatattgaggtccttctttacaagttttaagatcagatt

SEQ ID NO: 343564 - DNA, 201 bp, Homo sapiens
cagctttactgagcgggatttgtgtggagaatggactacagcaggactcctaggcggccattgaatcgcaagctgaggtggggaaagcgcaagctgaggaggcagaaggaatgttgtctgagacctgctgcagtgcaccctgagcagtgaggtcacagcaagcccagccatgggcaagcagcctggcatccagctgggagg

SEQ ID NO: 343565 - DNA, 201 bp, Homo sapiens
taaaatgaattaatgaggccttagaactatgtaaatgttgaaaatataaattagtggaagattcaaatgggaaggtaggttgaggccagattgtatttccyaggagttcgattctttttctgtaggtgtttgggagacctctttgagcaggtaggtagcatagttaaattagtgagttgggaaaaacaacctggttgcaat

SEQ ID NO: 343566 - DNA, 201 bp, Homo sapiens
gatataaggggagtataagcattgggtaaatatacctgttccaaatgggagaaattggctaaaacaaagggatataggccatgcagttctgaaatccaatmgggcagtcattaaaccttaaacttccaaaattatctcctttgactccacgtctgacatccaggtcacactgatgtcagaggtaggttcccatggccttgg

SEQ ID NO: 343567 - DNA, 201 bp, Homo sapiens
acagctttactgagcgggatttgtgtggagaatggactacagcaggactcctaggcggccattgaatcgcaagctgaggtggggaaagcgcaagctgaggaggcagaaggaatgttgtctgagacctgctgcagtgcaccctgagcagtgaggtcacagcaagcccagccatgggcaagcagcctggcatccagctgggag

SEQ ID NO: 343568 - DNA, 201 bp, Homo sapiens
ctatttaaatagcaggtgaagccgcttacaaaagagcaaacttgatgcaaattctgtgtggaaaagattgttggtctcattttattgtctttggccatacycataaatctgactcaggaaagacatttatatgtacacaagtgtatacaaataaaagtaaagttttactctattactttccaccccttcatccaaaaaaaa

SEQ ID NO: 343569 - DNA, 201 bp, Homo sapiens
aaggcaagttccttccacctatgagcctgcttcaaaagcaagttagttactttctagatataaggggagtataagcattgggtaaatatacctgttccaartgggagaaattggctaaaacaaagggatataggccatgcagttctgaaatccaatcgggcagtcattaaaccttaaacttccaaaattatctcctttgac

SEQ ID NO: 343570 - DNA, 201 bp, Homo sapiens
agttgtttatttgaaaagtcaaggctgagtttgaagtgttaaataatcttaatgaatagtgtgtgtagaatagctaaagataagaatatttcaaaaagttragaaaacactaatggcatgcaacctgaatgaagtgtagtctgctaagatgtgttataactgatggtagtaaaaatttgtatagaatagaaaagaattcag

SEQ ID NO: 343571 - DNA, 201 bp, Homo sapiens
ttagtagagacagggtttcgccatgttggcatggctggtctggaactcctgacctgtagtgatctgcctgtctcggcctcccagagtgctgggattacaartgtgagccactgtgtccgacccttaatacagccttttacgttgtatagcatagtgcctttcattcattaagatttagctatttgttgaaagaattaataa

SEQ ID NO: 343572 - DNA, 201 bp, Homo sapiens
gatgggcttggagtgttgaaactatatagtctttaggtcacttcactcagggatgctgagctagagattagttttaagaattttctggatgtatggttctrtaaataaaaagttaagcagattaagcagaaataatatatggtcttatagaagaaaggtgtgatcaaacagttttcaaaagttggaatatttctcactgat

SEQ ID NO: 343573 - DNA, 201 bp, Homo sapiens
taaatttcccttctcgcttcatttcattcacttcatcttccatcgctgataccctttcttccagttgatctcatcggctcctgaggcttctgcattcttcrcgtagttctcgagccttggttttcagctccatcagttcctttaagcacttctctgtgttggttattctagttatacattcttctaaacttttttcaaagt

SEQ ID NO: 343574 - DNA, 201 bp, Homo sapiens
ttgttattcattaatctgattatgaccacatctataatatgaaagtatagaattgacgagacagttctgtcgaatgtaaccaaggacattttacatgttartttgaagttgatgtgtaactgacaagttgttaattcaatgacatgtcctcattaataactaatgttttcactgatctttttatgcagtaagaattagaat

SEQ ID NO: 343575 - DNA, 201 bp, Homo sapiens
ctaaatttcccttctcgcttcatttcattcacttcatcttccatcgctgataccctttcttccagttgatctcatcggctcctgaggcttctgcattcttygcgtagttctcgagccttggttttcagctccatcagttcctttaagcacttctctgtgttggttattctagttatacattcttctaaacttttttcaaag

SEQ ID NO: 343576 - DNA, 201 bp, Homo sapiens
ttgtggcgttctctgtatttcctgaatctgtatgttggcctgccttgctagattggggaagttctcctggatgatatcctgcagagtgttttccaacttgrttccattctcccgtcactttcaggtacacaaatcagatgtagatttggtcttttcacatagtcccatatttcttggaggctttgctcatttctttttatc

SEQ ID NO: 343577 - DNA, 201 bp, Homo sapiens
ccactccccccaccccacaacagtccccagagtgtgatgttccccttcctgtgtccatgtgttctcattgttcaattcccacctatgagtgagaacatgcrgtgtttggttttttgttcttgtgatagtttactgagaatgatgatttctagtttcatccatgtccctacaaaggacatgaactcatcattttttatggct

SEQ ID NO: 343578 - DNA, 201 bp, Homo sapiens
tctgccgagagatccgctgttagtctgatgggcttccctttgtgggtaacccgacctttctctctggctgcccttaacattttttccttcatttcaacttyggtgaatctgacaattatgtgtcttggagttgctcttctcgaggagtatctttgtggcgttctctgtatttcctgaatctgtatgttggcctgccttgct

SEQ ID NO: 343579 - DNA, 201 bp, Homo sapiens
tttttcatgaagaatctcagattctttgttctcatagtaggtatcttcacagtctttaaagaaaacctaggtggtttttggtgtttttttttttttttttttcaatttttagttactgcaacagaggcacataggaatttaaatgattccatgagtcatgcagtgaattggtaataatactaatggacacacagttattga

SEQ ID NO: 343580 - DNA, 201 bp, Homo sapiens
tggtctaaaattctcttttttgggtgtgtctctgcccggctttggtatcaggatgatgctggcctcataaaatgagttagggaggattccctctttttctrttgattggaatagtttcagaaggaatggtaccagttcctccttgtacctctggtggaattcggctatgaatccatctggtcctggactctttttggttgg

SEQ ID NO: 343581 - DNA, 201 bp, Homo sapiens
tatggctagcaagttttcccagcaccatttattaaatagggaatcctttccccattgcttgtttttctgaggtttgtcaaagatcagatagttgtagataygcggcattatttctgaggactctgttctgttccattgatctatatctctgttctggtaccagtaccatgctgttttggttactgtagccttgtagtatag

SEQ ID NO: 343582 - DNA, 201 bp, Homo sapiens
cttgaattaatttttgtataaggtgtaaggaagggatccagtttcagctttctacatatggctagcaagttttcccagcaccatttattaaatagggaatsctttccccattgcttgtttttctgaggtttgtcaaagatcagatagttgtagatatgcggcattatttctgaggactctgttctgttccattgatctata

SEQ ID NO: 343583 - DNA, 201 bp, Homo sapiens
ggttttaggtctaacgtttaagtctttaatccatcttgaattaatttttgtataaggtgtaaggaagggatccagtttcagctttctacatatggctagcmagttttcccagcaccatttattaaatagggaatcctttccccattgcttgtttttctgaggtttgtcaaagatcagatagttgtagatatgcggcattat

SEQ ID NO: 343584 - DNA, 201 bp, Homo sapiens
tctgatggtagtttcttttgctgtgcagaagctctttagtttaattagatcccatttgtcaattttgtcttttgttgccattgcttttggtgttttagacrtgaagtccttgcccatgcctatgtcctgaatggtaatgcctaggttttcttctagggtttttatggttttaggtctaacgtttaagtctttaatccatct

SEQ ID NO: 343585 - DNA, 201 bp, Homo sapiens
aattttctcccattttgtaggttgcctcttttctctgatggtagtttcttttgctgtgcagaagctctttagtttaattagatcccatttgtcaattttgkcttttgttgccattgcttttggtgttttagacgtgaagtccttgcccatgcctatgtcctgaatggtaatgcctaggttttcttctagggtttttatggt

SEQ ID NO: 343586 - DNA, 201 bp, Homo sapiens
ttctctgatggccagtgatgatgagcatttttttcatgtgttttttggctgcataaatgtcttcttttgagaagtgtctgttcatgtccttcgcccacttkttgatggggttgtttgtttttttcttgtaaatttgtttgagttcattgtagattctggatattagccctttgtcagatgagtaggttgtgaaaattttct

SEQ ID NO: 343587 - DNA, 201 bp, Homo sapiens
aatctaaaagtaaaatattaggtagcagaagaaatgtttttgttttgtaaccttaatttataaaactctgattctcaagtattttttttttttttttttttgaggcagagtcttgctctgtcgcccagagactggagtgcagtggcgcgatctcggctcgctgcaagctctgcctcctgggttcacaccattctcctgcct

SEQ ID NO: 343588 - DNA, 201 bp, Homo sapiens
acctgccacaaggaaatggtaggatttccttctcttaaggttgaataatattcctgtgtgtgtgtgtgtgtgtgtgtgtgtgtgtgtgtgtgtgtgtgtgygcgcgcgcgcgcgcgtatgtgtgtgcacacaccccgcccccaacatatatgcacacattttctttatccattcatctgtcaatgtatgtttagtttgttt

SEQ ID NO: 343589 - DNA, 201 bp, Homo sapiens
ctaaggacaggagttcaagaccagcctggccaacacagtgaaacccatctctactaaaaatacaaaaattagccgggcatggtggtgcacccctatagttrcagctactcaggaatcacttgaacctgggaggtggaggttgcagtgagtcaagatcatgctgctgcactccaatctgggcaataaagtgagtctctgttt

SEQ ID NO: 343590 - DNA, 201 bp, Homo sapiens
tggatgcctgactttttcaaagggattagaaggccatggaaggtgagaatttattaaattggttttgatataagaatgctacttggcactggaatgaaagrcagcattgctgtagtttttgatgtatttaacccattttgaaaaggttgggagaagtttatgtacacccaaaacacctggatttgaatttgtagttgtgat

SEQ ID NO: 343591 - DNA, 201 bp, Homo sapiens
caggaatgatttttgcatttttataaggttgaagaaaaatcaaaagaagaatactattttgtgacatgtggaaattaaatgaaattcagatttcattgtcyacatataaggttttattggaacacaaccacacttagttgtttacaaattgtctctggctgcttttgtgctggaatggcaaagttgaggggttgtgacaga

SEQ ID NO: 343592 - DNA, 201 bp, Homo sapiens
ttggatgattttactctttttagtttccagttatttcttgtatgtggaaataagattgatttttgtacactgacctcttatgctgcaaccttacacaactygtttattagttctggagctatttgcagattccctaggattttctccactgacaatcatgttttctgtaaataaaagcagctttacttcttttccaatctg

SEQ ID NO: 343593 - DNA, 201 bp, Homo sapiens
ggtgatggaaatgttctttacctttgttgtggtggtagtggtggttatgcagtttataaagttttcaaaactcatcaactgtacacttaaaattagtggawttaattgtatgaaaattatacctcaataaagctgatttttaaaaagcaggcagaattcatctgtggtatcagaatagtgattaaagtactgactgggagg

SEQ ID NO: 343594 - DNA, 201 bp, Homo sapiens
ttattaacttattttactttgtaaaataaagtcttaagagtgggatgcaatttagaaaccttgtctaactttttcctttgttgtttctcacactggggtargagtagcccaggggtgtgcagcagtatgctagggtacaaagtggttgaaagcactgattctggagctgtattccctaggatctagctgcgtgtccttggg

SEQ ID NO: 343595 - DNA, 201 bp, Homo sapiens
tccgggaaaaggaggcccgaggagaagagagagagagggcaacagcctattggtagggcagtcagaacacagtatttatcaattatattcaccttgctatrgggcatggtttgtggtgccccaatacaattacaacagtaacatcactgatcactattaacagatataataaaaatggagaagtttggaatattgtgagaa

SEQ ID NO: 343596 - DNA, 201 bp, Homo sapiens
tgctattctggttttttactcacccaccgttgtttttttcctgtgcaaatgtcagcttagtctttgacagggatgagtcttaggtcataggaagagttgcrttcaaatattttaacctcttattcagaagactaatacacatacttttcttagactgaacagtctttctgtatttcagccttgccaagtgagagtgcttta

SEQ ID NO: 343597 - DNA, 201 bp, Homo sapiens
acactttctccatatcagcaataaggctgttttgctttctcatcattcatatgttcactggagtagcacttttaatttctttcaagaacttcttctttgcrtttacaacttggctctttggcacgagagatctacctcttgccctatcttagctttcaacatgccttgcttgctaagcttagtcatttctggcccttgatt

SEQ ID NO: 343598 - DNA, 201 bp, Homo sapiens
ttgctcgttagttgatgcagtttcttcctagtctcgatggtctttacattttggcatgattttgcagcggctggtatcggttgttcctttccatgtttagygcttccttaaggagctcttttagggcaggcctggtggtgacaaaatctctcagcatttgcttgtctgtaaagtattttatttctccctcactatgaagct

SEQ ID NO: 343599 - DNA, 201 bp, Homo sapiens
ttttctgaatatttctatttatgagatagttcaaagacatattctacctccctgcctcaataggacactgaaaatgaattagatttttttaatgtttgtartttgtgggagcttttatgccatgaaacagcaagtgattctatttcagatcctttttgggattagtgaagggtagtaataaatacattaacttttaaaatt

SEQ ID NO: 343600 - DNA, 201 bp, Homo sapiens
cccgtttatgttttgtcatgagattgcagcaattcagtcacatctacaagctccacttctaatgctagttctcttgctttttctaccacatctgcagtgayttcctccaataaagtcttgaaaccctcagagtcatccatgaggactggaatcaatttctgtaacactcctgttagtgttaatgttttgacatcctccctt

SEQ ID NO: 343601 - DNA, 201 bp, Homo sapiens
ggtgcatatatatttaggatagttagctgttcttgttgaattgatccctttaccattatgtaatggccttctttgtctcttttgatctttgttggtttaamgtctgttttatcagagactaggattgcaacccctgcctatttttgttttccatttgcttggtagatcttcctccatccttttattttgagcctatgtgtg

SEQ ID NO: 343602 - DNA, 201 bp, Homo sapiens
gactcgtatctagactatataaagcagtaccaataacatttacaaataatattgatatttaatatagctttgaaagaggaagtattggatttcgaaggagwtgaggcttatttgcatgtgatagaataaggcatatttcttattcctatagggaaatctcaaataggagaattgaacacagcacagatatttttgtctttc

SEQ ID NO: 343603 - DNA, 201 bp, Homo sapiens
tcgaattagatcctgatattcaactggaagatatagccgagaagattgagggctattctggtgctgacatcactaatgtttgcaggtatttttttaatgayctgtgattttagacattagttatagacttcgcaggaggactggtcttaaagtcaatgtagttagcccagtgtagttagacatgaaagcagctacccattt

SEQ ID NO: 343604 - DNA, 201 bp, Homo sapiens
ggcagggtctcactctgtcacccaggctggagggctggagcgtagtggtgtgatcataacttactgcagcctcaaactctcagactcaagcgatcatcccrccccagcctcttgagtagctaggaccacatgtgactaattttttttttcttgtccctaatactttattggtcacctctaggcctgtgtgctgctgggcgg

SEQ ID NO: 343605 - DNA, 201 bp, Homo sapiens
ggtgtggtgtggtgctgaaaaaaatgtatattctgttgatttggggtggagagttctgtagatgtctattaggtccgcttggtgcagagctgagttcaatwcctgggtatccttgttgactttctgtctcgttgatctgtctaatgttgacagtggggtgttaaagtctcccattattaatgtgtgggagtcttaagtctc

SEQ ID NO: 343606 - DNA, 201 bp, Homo sapiens
ggactcgtatctagactatataaagcagtaccaataacatttacaaataatattgatatttaatatagctttgaaagaggaagtattggatttcgaaggasatgaggcttatttgcatgtgatagaataaggcatatttcttattcctatagggaaatctcaaataggagaattgaacacagcacagatatttttgtcttt

SEQ ID NO: 343607 - DNA, 201 bp, Homo sapiens
ttcttccttcctcctccttcttttcttttttctttttttttttttttagaggcagggtctcactctgtcacccaggctggagggctggagcgtagtggtgygatcataacttactgcagcctcaaactctcagactcaagcgatcatcccgccccagcctcttgagtagctaggaccacatgtgactaattttttttttct

SEQ ID NO: 343608 - DNA, 201 bp, Homo sapiens
ttcaacttcttcctggtttagtcttgggagggtgtatgtgtcgaggaatttatccatttcttctagattttctagtttatttgcgtagaggtgtttatagwattctctgatggtagtttgtatttctgtgggatcggtggtgatatcccctttaccattttttattgcatctatttgattcttctctcttttcttctttat

SEQ ID NO: 343609 - DNA, 201 bp, Homo sapiens
ataaaatgagttagggaggattccctctttttctattgattggaatagtttcagaaggaatggtaccagttcctccttgtacctctggtagaattcggctrtgaatccatctggtcctggactctttttggttggtaagctattgattattgccacaatttcagctcctgttattggtctattcagagattcaacttcttc

SEQ ID NO: 343610 - DNA, 201 bp, Homo sapiens
tgctgaagttgcttatcagcttaaggagattttgggctgagacgatggggttttctagatatacaatcatgtcgtctgcaaacagggacaatttgacttcstcttttcctaattgaataccctttatttccttctcctgcctaattgccctggccagaacttccaacactatgttgaataggagtggtgagagagggcatc

SEQ ID NO: 343611 - DNA, 201 bp, Homo sapiens
aaattaccttgggcagtatggccattttcacgatattgattcttcctacccatgagcatggaatgttcttccatttgtttgtatcctcttttatttccttragcagtggtttgtagttctccttgaagaggtccttcacatcccttgtaagttggattcctaggtattttattctctttgaagcaattgtgaatgggagtt

SEQ ID NO: 343612 - DNA, 201 bp, Homo sapiens
gtgcatcatttacgttaaacctctctctttttgcctttttttggtcatcttgtctgtgcagtctcttctttcttcaaggaatacccataatccccatctcyaaacaactcatattcattcaagtctcaactcaactgactatcccctctgcagcctcttttgatttgcccagacatagcagtttgttcatagtggttatca

SEQ ID NO: 343613 - DNA, 201 bp, Homo sapiens
ccaagatactaagaaggttttttttaaaaaaagagatttgattatttttccctgctaaaaactgtaaatgccttatgttcttttcagataacttaagtctkacctaaactccagtattcatctgatgctgtaaattgcccttctttctgagacacagattataagatgccagatcataagacatcatgattttattgtaat

SEQ ID NO: 343614 - DNA, 201 bp, Homo sapiens
agatcagatagttgtagatatgcggcgttatttctgagggctctgttttgttccgttgatctatatctctgttttggtaccagtaccatgctgttttggtyactgtagccttgtagtatagtttgaagtcaggtagtgtgatgcctccagctttgttcttttggcttaggattgactttgcgatgtgggctcttttttggt

SEQ ID NO: 343615 - DNA, 201 bp, Homo sapiens
ttttgttatttctggtgagccttgtttgtggtaaagttgagaatgtttcttcagtaagggtttaacaagtcatttcaatatgtggcttgtttggaagaagktgtcactcctgagacatctgtgtttgcttcagccaggtgccttagggatgttacctgcgtaggcccacttttaggcccactttctctgcttaaggtagtg

SEQ ID NO: 343616 - DNA, 201 bp, Homo sapiens
taacatcttatagaaaggaaaataacaatagttatttgcatggccaaaaagatatagagaatgatggggtcttagaagattacaaattggggttcagagastgtaatttataggtgtttgcttagatttaagtttgaggcaattacatgagtataaatggtacatggacaactatagactgttctttaaaatgtattcttt

SEQ ID NO: 343617 - DNA, 201 bp, Homo sapiens; identical to SEQ ID NO: 320946

SEQ ID NO: 343618 - DNA, 201 bp, Homo sapiens
tatttctccacatcctctccagcacctgttgtttcctgactttttaatgattgccattctaactggtgtgagatggtatctcattgtggttttgatttgcrtttctctgatggccagtgatgatgagcattttttcatgtgttgtttggctgcataaatgtcttcttttgagaagtgtctgttcatgtccttaacccactt

SEQ ID NO: 343619 - DNA, 201 bp, Homo sapiens
tgataaagtacagaagtaaatgacttgttacatatcttgcttttagaatgctttattacgctaataacaatagatgcctattgctagtcctaaaatttatyagttaagagaggtcttttgggtttcgtaatggcagcatcaaaacttggatagttttgcttttttgcttgaggagactctaacaacttcaaatgaagtagt

SEQ ID NO: 343620 - DNA, 201 bp, Homo sapiens
aaataatctagccaaacaatgaggacaaatgcctgcagaaagtcatgggctttttggttagtgaaaaatgaatggatttgtgagagatgtttagaaggtaycagtgactgattgtttacagggatgcgggagagagacaagttgtatgactcccagattccaggcttgaattgaatgacttctgacatcacctacccagag

SEQ ID NO: 343621 - DNA, 201 bp, Homo sapiens
tgaaaaagtaatctgatcaggaggttgttgaaataatctagccaaacaatgaggacaaatgcctgcagaaagtcatgggctttttggttagtgaaaaatgmatggatttgtgagagatgtttagaaggtatcagtgactgattgtttacagggatgcgggagagagacaagttgtatgactcccagattccaggcttgaat

SEQ ID NO: 343622 - DNA, 201 bp, Homo sapiens
acagttattgactcttctttgcattggcctcatttttcccccaaatgttaatatgtcatttctcagcaaaattatttgtaaagtaaaacatctaacaacamcaccaaaatcttgtaacagcaaaaggaagagctgagcttctgaagatcaaccttcgtgaggtcgaattagatcctgatattcaactggaagatatagccg

SEQ ID NO: 343623 - DNA, 201 bp, Homo sapiens
caagtgtaggaagatctcttttctgtagcagtatggaggacaggttggggatggacatagatggatatgaaaaagtaatctgatcaggaggttgttgaaakaatctagccaaacaatgaggacaaatgcctgcagaaagtcatgggctttttggttagtgaaaaatgaatggatttgtgagagatgtttagaaggtatcag

SEQ ID NO: 343624 - DNA, 201 bp, Homo sapiens
atgccatgctaaagatgtcagtgagccattgaagagtttttagtagaagggtgatttgcaagtgtaggaagatctcttttctgtagcagtatggaggacakgttggggatggacatagatggatatgaaaaagtaatctgatcaggaggttgttgaaataatctagccaaacaatgaggacaaatgcctgcagaaagtcat

SEQ ID NO: 343625 - DNA, 201 bp, Homo sapiens
tttatattctctttaggtgcttctagttaattgatgttcacagtgaagcatgttttgaacaaagtatgaaaaattatttttggggacatgtaatttcagtrtctgtttttaatattcacatttatacatttacagttttgtatttgataaagtacagaagtaaatgacttgttacatatcttgcttttagaatgctttatt

SEQ ID NO: 343626 - DNA, 201 bp, Homo sapiens
tggcataaccaaattaattttagttttcctatgtctgttttttataacctcaccattttgatttgaaaacgtttccagaatcttttttgtagtcctcgatyggtattcaagtctcatgtgtaccactgagaaactttgggttctcgggcaggtcatttaactggcctatacacacacttcttcttcagtgtagtgagaggc

SEQ ID NO: 343627 - DNA, 201 bp, Homo sapiens
aatggtaggatttccttctcttaaggttgaataatattcctgtgtgtgtgtgtgtgtgtgtgtgtgtgtgtgtgtgtgtgtgtgtgcgcgcgcgcgcgcgygtatgtgtgtgcacacaccccgcccccaacatatatgcacacattttctttatccattcatctgtcaatgtatgtttagtttgtttccatatttggctat

SEQ ID NO: 343628 - DNA, 201 bp, Homo sapiens
aatcaggcagggaggttgcagtgggccgagatggcagcagtacagtccagcttcggctcggcatcagagggagaccatggaaagagagggagagggagacmgtggggagagggggagggggagagggagagggagcagctttatttttctttatagtactcattgtcacctgatattattatattatatattatactatat

SEQ ID NO: 343629 - DNA, 201 bp, Homo sapiens
caggagaatcaggcagggaggttgcagtgggccgagatggcagcagtacagtccagcttcggctcggcatcagagggagaccatggaaagagagggagagrgagaccgtggggagagggggagggggagagggagagggagcagctttatttttctttatagtactcattgtcacctgatattattatattatatattata

SEQ ID NO: 343630 - DNA, 201 bp, Homo sapiens
gtgccaccatgcctggcaaattttttgtatttttagtagagacggagtttccccatgttgggcaggctggtctcgaactcctgacctcaggtgatctgccygcctcagcctcccaaagtgctgggattacaggtgtgagccaccacgcctggccaagagactgatttaaaaaaaaaaaaaatctcttaaaagggacttcta

SEQ ID NO: 343631 - DNA, 201 bp, Homo sapiens
tgagagtgggccactgcactccagcctgggtggcagagtgagtgagacttttttttttttttttttttttttgagatggagtttcattcatcttgcccagrctggagtgcagtggcacaaactcggctcatggcaacctccacctcctgggttcaagcaattctcctgcccccgcctctcaagtagctgggattataggca

SEQ ID NO: 343632 - DNA, 201 bp, Homo sapiens
cttatttaaaatatttaccccttcactgtcaccactcttgttcccttagtcagctttatttttctttttttttttttattttattattttttgtttattgwtcattcttgggtgtttctcgcagagggggatttggcagggtcataggacaatagtggagggaaggtcagcagataaacaagtgaacaaaggtctctggtt

SEQ ID NO: 343633 - DNA, 201 bp, Homo sapiens
tttttttttttttcctcttttcttttattctgactgcagcttcttttatctcttccacttgttgctccctagtccttagctttgtgagccctatggagccmaagagcagtagaaagaaggtccttaccctccaggagctcatgttttctttgcacagaacttgacaatccaccaggctacaagggttctgatatagtttgg

SEQ ID NO: 343634 - DNA, 201 bp, Homo sapiens
taatacttgataatgttgaccatcttctttggaactctctttttccctcctaaggcttctgtgacattacacaactctgtttttttttttttttttttttycctcttttcttttattctgactgcagcttcttttatctcttccacttgttgctccctagtccttagctttgtgagccctatggagccaaagagcagtaga

SEQ ID NO: 343635 - DNA, 201 bp, Homo sapiens
cacctgccacaaggaaatggtaggatttccttctcttaaggttgaataatattcctgtgtgtgtgtgtgtgtgtgtgtgtgtgtgtgtgtgtgtgtgtgtkcgcgcgcgcgcgcgcgtatgtgtgtgcacacaccccgcccccaacatatatgcacacattttctttatccattcatctgtcaatgtatgtttagtttgtt

SEQ ID NO: 343636 - DNA, 201 bp, Homo sapiens
tggtaggtccttttttcccccaactttattgaggtataattgacaattaaaaattgtatatatttaaggtatacaggttgattatttgatatatatatatwttttttgaaatatttatcacaataagctaattagcatatcaattacctcacatttcttttgtttttcattttgtggtgagaacacttaagatctaccctc

SEQ ID NO: 343637 - DNA, 201 bp, Homo sapiens
gacggggtggtggccgggcagaggggctcctcacttcccagtaggggaggccgggcagaggcgcccctcacctcccgggtggggcggctggccgggcgggrggctgaccccccacctccctcctggacggggtggctggccgggcgggggggctgaccccccaacctccctcccggacggggcggctggccgggcgggggg

SEQ ID NO: 343638 - DNA, 201 bp, Homo sapiens
ttagcttaaaaaataaatatggtaggtccttttttcccccaactttattgaggtataattgacaattaaaaattgtatatatttaaggtatacaggttgawtatttgatatatatatatattttttgaaatatttatcacaataagctaattagcatatcaattacctcacatttcttttgtttttcattttgtggtgaga

SEQ ID NO: 343639 - DNA, 201 bp, Homo sapiens
aaagagccctgcatgccatgctaaagatgtcagtgagccattgaagagtttttagtagaagggtgatttgcaagtgtaggaagatctcttttctgtagcartatggaggacaggttggggatggacatagatggatatgaaaaagtaatctgatcaggaggttgttgaaataatctagccaaacaatgaggacaaatgcct

SEQ ID NO: 343640 - DNA, 201 bp, Homo sapiens
tgaaagactccttaaaaatacaaatgagtcagtaatctaataaaaaacattactatatttgctgtcttttgactatataatttgattatttaataagacagttaaaaacttgaattttaatttgcctacttaccgttttttaaatttaatgttttaattgatcagtaccttttagcatagttcttgctttgctgttctaat

SEQ ID NO: 343641 - DNA, 201 bp, Homo sapiens
tgttagccaggatggtctcgatctcctgaccttgtgatccgcccgccttggcctcccaaagtgctgggattacaggtgtgtacagtgcagtttttatagayagcatatagttgagccttgctatttgtccagtctgtatctcttttttgtttgtttgtttaagtcggagcctcactctgttgcccaggcgggagtgcagtg

SEQ ID NO: 343642 - DNA, 201 bp, Homo sapiens
gttggtgtgacctacttctcacaaagagccctgcatgccatgctaaagatgtcagtgagccattgaagagtttttagtagaagggtgatttgcaagtgtakgaagatctcttttctgtagcagtatggaggacaggttggggatggacatagatggatatgaaaaagtaatctgatcaggaggttgttgaaataatctagc

SEQ ID NO: 343643 - DNA, 201 bp, Homo sapiens
ttgaaagactccttaaaaatacaaatgagtcagtaatctaataaaaaacattactatatttgctgtcttttgactatataatttgattatttaataagacagttaaaaacttgaattttaatttgcctacttaccgttttttaaatttaatgttttaattgatcagtaccttttagcatagttcttgctttgctgttctaa

SEQ ID NO: 343644 - DNA, 201 bp, Homo sapiens
ggaatggttggtgtgacctacttctcacaaagagccctgcatgccatgctaaagatgtcagtgagccattgaagagtttttagtagaagggtgatttgcawgtgtaggaagatctcttttctgtagcagtatggaggacaggttggggatggacatagatggatatgaaaaagtaatctgatcaggaggttgttgaaataa

SEQ ID NO: 343645 - DNA, 201 bp, Homo sapiens
tccttaattgcttttatttatagcagccattgtatgacataaactggacttcggtgatttggagaaacttttttttttttcattaagcatgtaaagcctgsacatattgataaaattcattgtggtacaaaatattgaaaataaaacttgatttgttgttttgcttaccactgttctaattagtgttatttagttcacatt

SEQ ID NO: 343646 - DNA, 201 bp, Homo sapiens
tgaacccaggaggcagaggttgcagtgagccaagatcatgctgctgcactccagcctggtgacagagcgagactccgtgtcaggaaaaaaaaaaaaaaaaagagttgtgtgtatgtgtttgcgggaggagcctacaaatgagaccctagttaggaggcatagaggaagaagaactgggagagagcataacaaaggagggga

SEQ ID NO: 343647 - DNA, 201 bp, Homo sapiens
tatgggcatttgccagataaattcaaggcatagattgtgagagtagtttaaaaaaaatggagtagtttttcaaggtggtttaatcttcactggatgtcttyagatatgtttcttttgctggggtatggtttgattgtggtcctaactgaacggatggcaaaggagtaaatgaccttttaagtccttttgtaactttgttct

SEQ ID NO: 343648 - DNA, 201 bp, Homo sapiens
aactccagccccagtgtagagaatggacctgggaggggaaacattacaggtagtagaaaagccagttgtataatagaaaaaaacaaagtccagtagagaartgaagagagtctgaattaagcatttggagttacagaaagacatggattcaaggaatatttaagagataaaattgatatgacttgataagagtttggatgt

SEQ ID NO: 343649 - DNA, 201 bp, Homo sapiens
gttctgaatgactggatcccagaatacttgcaattagtgggtgaggccagatcttaaagtacttggcaccatattcagagtttagaatttttcttgatatrgggcagtcattgaagaattttagctagagtggtggtggcgtcagatttgtattttagaaagataactccagccccagtgtagagaatggacctgggaggg

SEQ ID NO: 343650 - DNA, 201 bp, Homo sapiens
gaattttatttcttgaggttcaaggttgtgaaatgagtgctccaccccaccccccccttgccagcctgaacactgcctacacatattttgattagttcagytttaaattactagtaacttttaaaaacagacttttttagcagtaggcagcaataattctttgattattccagtgttattcagaatttctcagcatgtttt

SEQ ID NO: 343651 - DNA, 201 bp, Homo sapiens
gttgagtggtcgcggacctgggctctgtgcgttgggaaagggaagtggaggtgagcctcgggcttcccgccctgtagctgggcccgccccagttgcagcgytcagccccaccccggctgggccaccgccctgcacagtctcagggatgagcagccgcccaagctgcagggcctcgggtcttcggcgcctctgaccctcgca

SEQ ID NO: 343652 - DNA, 201 bp, Homo sapiens
ccaatgagtaaacaatactgagcagccactcagcagtatggtcagctgtcaagggagtgagattggcaggaaatattctgagcacagagcagggtgatatractgagcaggaatgatctggaaaggtttcatgtgaaggtttgttttcagaatacgtagaccttagatagggtaaggcgctggtatcttagacgaagagaa

SEQ ID NO: 343653 - DNA, 201 bp, Homo sapiens
ctctagccaacagcccctctcggcctcccactgccggagacgccagggcagtgggctgcggggttcctcgggcgctggctcccgtgcggggacggggaggrgcgcgggagcgccaggctcgcggtgcatcatgggaattgtagttcagcgactcctcgggctcgcggtcttggtggggtagctcggactggcgaactacaa

SEQ ID NO: 343654 - DNA, 201 bp, Homo sapiens
ctctaataataataacaacacatttttatgttctcttttgaggtaaatttacatgcagtgaaatgtacaaatcttaaatgtcccattccaagagttttgayaagtgcatatacttctgtaaccgaaactcttagctatagaattttttcatcactacaaaaaattctctcaaactcctccccgacagccaaccactattct

SEQ ID NO: 343655 - DNA, 201 bp, Homo sapiens
ttacttccaccccacttgatgttcacatggcaaatgccctcacctcatttgttcaaatgtcactcacatagaaagccctaccctgaccaccttatttaaartatttaccccttcactgtcaccactcttgttcccttagtcagctttatttttctttttttttttttattttattattttttgtttattgttcattcttgg

SEQ ID NO: 343656 - DNA, 201 bp, Homo sapiens
tttgaaagactccttaaaaatacaaatgagtcagtaatctaataaaaaacattactatatttgctgtcttttgactatataatttgattatttaataagacagttaaaaacttgaattttaatttgcctacttaccgttttttaaatttaatgttttaattgatcagtaccttttagcatagttcttgctttgctgttcta

SEQ ID NO: 343657 - DNA, 201 bp, Homo sapiens
ttttgaaagactccttaaaaatacaaatgagtcagtaatctaataaaaaacattactatatttgctgtcttttgactatataatttgattatttaataagacagttaaaaacttgaattttaatttgcctacttaccgttttttaaatttaatgttttaattgatcagtaccttttagcatagttcttgctttgctgttct

SEQ ID NO: 343658 - DNA, 201 bp, Homo sapiens
taaagtatttcattcattcattcttttttttttttttttttttttttttgagacagagtcttgttctgtcgcccaggccggagtgcagtggcgcaatctcrgctcactgcaacctctgcctcccaggttcaagcagttctcctcctcagcctccggagtagctgggactacaggcatgtgccaccacgcccagttaatttt

SEQ ID NO: 343659 - DNA, 201 bp, Homo sapiens
cttgttacttatgcaaatttctgcagctggcttgaatttctccccagaaaatgggtttttcttttctattgcattgtcaggctacacattttctaaacctstattcactgcttcccttttaaacataaattccaattccaaaccatatctttgtgaatgcttaaaactgtatgcttttaagagcaatccccccttccaaat

SEQ ID NO: 343660 - DNA, 201 bp, Homo sapiens
catcagttcctttaagcacttctctgtgttggttattctagttatacattcttctaaacttttttcaaagttttcaacttctttgcctttggtttgaattyccccccatagctcagagtaatttgatcgtctgaagccttctctcagctcatcaaagtcattctccgtccagctttgttgcgttgctggtgaggaactgca

SEQ ID NO: 343661 - DNA, 201 bp, Homo sapiens
catttttccctcttaggcctctgggcttgtgatgggaggggttgccgacatctctgacatgccctggaggcattttccccattgtcttggtgattagcttytgattccttgttacttatgcaaatttctgcagctggcttgaatttctccccagaaaatgggtttttcttttctattgcattgtcaggctacacattttct

SEQ ID NO: 343662 - DNA, 201 bp, Homo sapiens
attcaactggaagatatagccgagaagattgagggctattctggtgctgacatcactaatgtttgcaggtatttttttaatgatctgtgattttagacatyagttatagacttcgcaggaggactggtcttaaagtcaatgtagttagcccagtgtagttagacatgaaagcagctacccatttctttaaaatggtttccc

SEQ ID NO: 343663 - DNA, 201 bp, Homo sapiens
ggccctggacccagcccaggaaacccatttttccctcttaggcctctgggcttgtgatgggaggggttgccgacatctctgacatgccctggaggcatttkccccattgtcttggtgattagcttttgattccttgttacttatgcaaatttctgcagctggcttgaatttctccccagaaaatgggtttttcttttctat

SEQ ID NO: 343664 - DNA, 201 bp, Homo sapiens
tgttgccttggctggagtgcagtggcgcgatctcggctcactgcaacctcctccttccaggtcaaagcagttctcctgcctcagcctcccgagtagctggsattacaggcatgccccaccgcacccggctagttttatatttttagtagagacgaggtttcttcatgttggtcaggctggtcttgaactctcaaccttagg

SEQ ID NO: 343665 - DNA, 201 bp, Homo sapiens
gtggggggatcttatcttgatggctgctgacagatcagggtagtggttgctgaaggttggggtggctgtggcaatttcttcttcctccttcttctcttttycctctcttcctactcctcctcatccttcttccttcctcctccttcttttcttttttctttttttttttttttagaggcagggtctcactctgtcacccag

SEQ ID NO: 343666 - DNA, 201 bp, Homo sapiens
gcatataaaagttacgtttacactatactatagtttattaagtgtgcaataacattacgtctaaaaaatgtacatgtctcaatttaaaaatactttaaaawtttttaacttttattttagatttagggggtacatctgcacgtttgttacatgggtatattgcatgatgctgaggtttgggatatgaatgatcccgtcacc

SEQ ID NO: 343667 - DNA, 201 bp, Homo sapiens
tgagtttatttattttgcattctagaactgacaaaactgcaggcatacttgagagatactgtgggctttgtttcagaccattttggtaaagcaaatattgygataaagctagtcacacaaattttctggtttcccagtgcatataaaagttacgtttacactatactatagtttattaagtgtgcaataacattacgtcta

SEQ ID NO: 343668 - DNA, 201 bp, Homo sapiens
tgtggcaggagtgatgctgccaagcatagcaggctgtcaggaaggagcaagttgcttccctctcctccagccttgtgctcttcctctggtcctgctgtgcygccccagcctctccacccagatgacagaggagaaatgtggtttgcacaattctagccccaccaacacaaagcagaggacagagggtaggtttgaagctga

SEQ ID NO: 343669 - DNA, 201 bp, Homo sapiens
tctttggctctaaaccacatgtcgagcaggtgtactccctgcgagcctgttggctgggatcaaggatgggggctcctgggattagggaactgtggaggtasacgttttccagtcctgccctttctgttttctggtaatcccaaatcacacctgcttgctgcttttggcactgctctgcttggtctcactgtgtgtttgtgg

SEQ ID NO: 343670 - DNA, 201 bp, Homo sapiens
cccagataggcaggcccagaatgtagttgttgtctcctgtactggactgcctggtatattcaagaggagttgtataaggagtgtatgattcctctaacaacatttatttaaatttagaatgtgtgttaattttgtgatacaggattggcagtttgttacactatgattaacaacacattaatcccttgttaaatcttttca

SEQ ID NO: 343671 - DNA, 201 bp, Homo sapiens
ggtggaaatggcatcgaattttatgaattacccttggaggttatgtaatgtcccttctgctcatacttctgacattctcaggcccacaccaattcaagggkaggggaattagactgcctctggtttggggagtggtaggatcacattgtagaaatgggtgtgggatgagagagaactgttactgctgtcttggtaaataca

SEQ ID NO: 343672 - DNA, 201 bp, Homo sapiens
attagatgtaatgcctctttatataatttccataaagaaatacccatatttatttaagaattagaaattggtggtaagaaaagccaatatatcacttactyttgcagtttaacaaaccactccaaaatttaatgagacaaaataattgtattattctcacattggatggggcacagtggagatggtttgtgtctgttccat

SEQ ID NO: 343673 - DNA, 201 bp, Homo sapiens
taatttttctttttcttttttctttctgagatggagtttcactcttgttgcccgggctggagggcaatggcgcaatcttacctcactgcaacctccgcctyctgggttcaagggattctcctgcctcaggctcccaagtagctgggattacaggtgtgtgccactgcacctggctaattttatacttttaatagagacagg

SEQ ID NO: 343674 - DNA, 201 bp, Homo sapiens
tagtaatttatctctattcttcatcatttttggttgaaatttatcaatattgttaatcttttcaaataaccaaatttttgctttgttaattttctactttstatttcaatgatttcttctctgttaaaaaaattttttttttgctttacactttgagtataattttttctatctgaagttagaaactaaggttattggttt

SEQ ID NO: 343675 - DNA, 201 bp, Homo sapiens
ggcggtgggggcagtgtcgcggttcagtgttgtgttttattcagaccttccattggttagatgaggcccacccacattaggaagggcaatctgctttactyaaagtccaccaatttaaatgttaatctcattgaaaaacatgttcacagacacattcagaataatttttctttttcttttttctttctgagatggagtttc

SEQ ID NO: 343676 - DNA, 201 bp, Homo sapiens
ttttaataggagtatttagtccatttaaatttaatgtaattggtgatatgactgtgtttaagtctgccatcttgctatttgtactgtttgtttctctgtamcccccttgctaatttcttttgggctaattgactgtttttactattcattttaatgccattattggatttttagctatacctgactatatttattttagca

SEQ ID NO: 343677 - DNA, 201 bp, Homo sapiens
ttattagtagagacggggtttcgccatgttgtccaggctggtcttgaactcctgagctcaggtgattcacccaccttggcctcccaaagtgctgagattaygggcatgagccactgcacctggctgtctctgctttttaataggagtatttagtccatttaaatttaatgtaattggtgatatgactgtgtttaagtctgc

SEQ ID NO: 343678 - DNA, 201 bp, Homo sapiens
tctggatacaagctagcttttcattttttcaattatatgtcttagtcttggcatgagataaaaaattcaagtatgttgggagagaatgtgtgtgtgtgtgtgttgtgggtgatggtagatttaaaggagagaacagaaaggttggagatgtagctgaaaagatggctttatgtgttacatttagatctgagtcatgaaaca

SEQ ID NO: 343679 - DNA, 201 bp, Homo sapiens
tgggttctggatacaagctagcttttcattttttcaattatatgtcttagtcttggcatgagataaaaaattcaagtatgttgggagagaatgtgtgtgtgtgtgtgttgtgggtgatggtagatttaaaggagagaacagaaaggttggagatgtagctgaaaagatggctttatgtgttacatttagatctgagtcatg

SEQ ID NO: 343680 - DNA, 201 bp, Homo sapiens
gggagaatggaccagctcacattggagtaatgagtagaaaagaaaaaggaagaggtttggatatggaactctcatttaagaaatgtgtgtaggccgggcgmagtggctcgcgcctgtaatcccagcactttggaaggctgaggcgggcagatcaggagatcaagagatcgagaccatcctggccaagatggtgaaacctcg

SEQ ID NO: 343681 - DNA, 201 bp, Homo sapiens
tatgcattgggaccttgtctttggagacttcgtcatggctgtaggctgcactacaaccttggccagctgccttgcaaagaaagacaagtgatcggtcacargggaaaccagatcagggagagatggatccggtgaacctatcatccctactacaaacatgtgttcagctggtagcagatcagtaacatcttctccaggagt

SEQ ID NO: 343682 - DNA, 201 bp, Homo sapiens
gtcttggtggggtagctcggactggcgaactacaaagcccggcggccccgaccgccgggaaagaccgataaactttgagcggaccgggacagaaaaaaaaatctctctttgtcttgagggggctgttgagtggtcgcggacctgggctctgtgcgttgggaaagggaagtggaggtgagcctcgggcttcccgccctgtag

SEQ ID NO: 343683 - DNA, 201 bp, Homo sapiens
agtttctgctttatgttttgcttcatgtgttttgatgttctgttgttaagtaaataaattatcattgttacatcttctcggtcctattaccattatgcaaygcctctgtatctctgagaatacactttgacttggtatctgctttgactgcttttaatttagccttaccgtctttcttttcctattgttgttgtgctatat

SEQ ID NO: 343684 - DNA, 201 bp, Homo sapiens
ggtcatagggtaggcatatgtttagcttttataggaaatacccaaactgtttttcagaatggtcataccattttgtattccatcatcaataaatgagaatkcaaatacttccatatccttgccaacatgtggtgttgtcactattttaatttcagtcattctagtaagtatgaaatgctgtctcatgattttaattggtat

SEQ ID NO: 343685 - DNA, 201 bp, Homo sapiens
ttatcttttatttctcactacatattttctaaagtttctgttgtgtgacctgaaattttttattctaaaattttaattctgaaaaggagacactgtgtatrtacatgtagttggtttggttatttttatctgtgattactgggttcattcttaaatgtcttatttattttttacaggtcacttaaaagtttaaaggacaac

SEQ ID NO: 343686 - DNA, 201 bp, Homo sapiens
gtatatgtgggttgactggtatttctggatctctagggagctgatggaacagaagaatattttcatatgtattttaaaaatcagagtctgacccgtcattraagtttattcctttttcatatgggatttgcagtaacttaagaatgtatatttgaggattgaggttgatttatttttgaaaaatttttccattatggaaat

SEQ ID NO: 343687 - DNA, 201 bp, Homo sapiens
aaagcaaggccttttggcatcctgtccactcagggtggaagaagagactttggtcgtatatgtgggttgactggtatttctggatctctagggagctgatsgaacagaagaatattttcatatgtattttaaaaatcagagtctgacccgtcattaaagtttattcctttttcatatgggatttgcagtaacttaagaatg

SEQ ID NO: 343688 - DNA, 201 bp, Homo sapiens
tttttgaaaagggcagtgtagttctattttaatagttcttgacacactgatgagaattgggatgatgggttttgtggggtagttggtgtatcttcagtgtwtctttttctttaaggtaaagcaaggccttttggcatcctgtccactcagggtggaagaagagactttggtcgtatatgtgggttgactggtatttctgga

SEQ ID NO: 343689 - DNA, 201 bp, Homo sapiens
ctcataaatgggtctttattttttactgaaagctgtgtattataaatgcactgtggaagataggttctgtcccttatagagggtaaagaatgtgtaattckgccacatgtgatagaaaatgtcttatttttattatgtgtaaacagaacagttgcttttaagcagtgctgaatattatatgtatatgtcatatgctaggtt

SEQ ID NO: 343690 - DNA, 201 bp, Homo sapiens
gaggaggtgaagtttataaatatcgtacagtagctataaacagctgctaatgttagaaattaactcctataggaggtggccacattaatggcattacaggmtggccctctcagagagcatggaaaaaggcatcggagaaataagaactttgctctggttatgcctatagcatcaattggtcgttttcatggtttttaaaat

SEQ ID NO: 343691 - DNA, 201 bp, Homo sapiens
atgtcttcttttgagaaatgtctattttgaccttttgcccattttaaaattggattatttgtctttttgctattgagttgcttgagctgcttatgtgttcyggttactaatcccttgtcagatggatattttgcatatattttctcccattgtgggggtgtctctttgttgtttcctttgctgtgcagaagctttttagtt

SEQ ID NO: 343692 - DNA, 201 bp, Homo sapiens
ttgaggtccttctttacaagttttaagatcagattatatgatttttataaaggcaacatttaaaattgtacttagaaaataaggagatgcccaagaaatagactactgtattttcagtgctgaagtatataaacatatgcttgaatcactcttacattgagactctgttcatctatccatttatcatccagcctatcttag

SEQ ID NO: 343693 - DNA, 201 bp, Homo sapiens
agaagctaagaagttgctaagggaagctgttgttcttccaatgtggatgcctgactttttcaaagggattagaaggccatggaaggtgagaatttattaawttggttttgatataagaatgctacttggcactggaatgaaaggcagcattgctgtagtttttgatgtatttaacccattttgaaaaggttgggagaagtt

SEQ ID NO: 343694 - DNA, 201 bp, Homo sapiens
ttgggagacctctttgagcaggtaggtagcatagttaaattagtgagttgggaaaaacaacctggttgcaatgagcacagaaagacgggaggcaaagagcrcgttcagaagtgattggcagtagtttaggcttaaaattcaaagagcctgaattgggatggtgattatgaattaggaatggaaggacagatgctagtgata

SEQ ID NO: 343695 - DNA, 201 bp, Homo sapiens
aaattcagtactattcgagcttaacttagacttttagggttcgttaactatacatttcatgtttttggttgtttgcatcctgtcttaacttctgctgaacycccaggatgtttcttaagtggaaaattctaagaagcctcataaaaacatataaaataatcttttgatttttttttcataactttgttacaattgaaagtg

SEQ ID NO: 343696 - DNA, 201 bp, Homo sapiens
gtacaattcagtatttcaaaatttgacttcagtttcctaaacttcttggctgtctttgaggagcaagtggagaaaagaaaattcagtactattcgagcttwacttagacttttagggttcgttaactatacatttcatgtttttggttgtttgcatcctgtcttaacttctgctgaacccccaggatgtttcttaagtgga

SEQ ID NO: 343697 - DNA, 201 bp, Homo sapiens
gattttagacattagttatagacttcgcaggaggactggtcttaaagtcaatgtagttagcccagtgtagttagacatgaaagcagctacccatttctttraaatggtttcccatttgtccctttttttttacatataactttatttttcattgtgagatgaaaattatatagcagtggtcgttgatgtttttgatctttg

SEQ ID NO: 343698 - DNA, 201 bp, Homo sapiens
tgtcattgcgattatatggtggtatctggcatttttaactttttgcatttttgaattttatttcttgaggttcaaggttgtgaaatgagtgctccaccccmccccccccttgccagcctgaacactgcctacacatattttgattagttcagttttaaattactagtaacttttaaaaacagacttttttagcagtaggca

SEQ ID NO: 343699 - DNA, 201 bp, Homo sapiens
cagcctggcaacagagtgagactccatctcaaaaaaaaaaaaaaaaaatcacttctgtatcattacaaaatatctgactttatcaatttattttgtccttsctgtgcttttgtagtatttattggcaaactggattaagaaaataaagatatatttctaaagaatctttttcctgaccaaataatttttttctgcaacagt

SEQ ID NO: 343700 - DNA, 201 bp, Homo sapiens
gattagaaggccatggaaggtgagaatttattaaattggttttgatataagaatgctacttggcactggaatgaaaggcagcattgctgtagtttttgatrtatttaacccattttgaaaaggttgggagaagtttatgtacacccaaaacacctggatttgaatttgtagttgtgatgtgttacatctgcatagcaggag

SEQ ID NO: 343701 - DNA, 201 bp, Homo sapiens
taattcaatgacatgtcctcattaataactaatgttttcactgatctttttatgcagtaagaattagaataatgttcttactatgagaataatttcataartaaaaaaaaattaaaagaattagttttgaccataaatcaaagatccctgagtaaacattatgaaagtttgctgttctttcaaagggatgacatagcagat

SEQ ID NO: 343702 - DNA, 201 bp, Homo sapiens
gttgtcttggtgtgtgagttttctcttgttattcattaatctgattatgaccacatctataatatgaaagtatagaattgacgagacagttctgtcgaatrtaaccaaggacattttacatgttagtttgaagttgatgtgtaactgacaagttgttaattcaatgacatgtcctcattaataactaatgttttcactgat

SEQ ID NO: 343703 - DNA, 201 bp, Homo sapiens
gttgcaatagttcctactgctactatagcaaaatatttaagaacttgacatttttgttggcttggccttcctaatagcttttttgtgattatgaattatcsttttcttccagaccttcatatttatttatagttggtcaaagagagctgcacatgggatcaagagaagccagagtttatgccttcagttgcctacaaatac

SEQ ID NO: 343704 - DNA, 201 bp, Homo sapiens
tggttccaagtctttgctattgtgaataatgccacaataaacatacgtgtgcatgtgtctttatagcagcatgatttatagtcctttgggtatatacccastaatgggatggctgggtcaaatggtatttgtagttgtatatccctgaggaatcaccacactgacttccacaatggttgaactagtttacggtcccatcaa

SEQ ID NO: 343705 - DNA, 201 bp, Homo sapiens
aggagaacacaaattataggttgtcttggtgtgtgagttttctcttgttattcattaatctgattatgaccacatctataatatgaaagtatagaattgaygagacagttctgtcgaatgtaaccaaggacattttacatgttagtttgaagttgatgtgtaactgacaagttgttaattcaatgacatgtcctcattaat

SEQ ID NO: 343706 - DNA, 201 bp, Homo sapiens
ttttcccccaaatgttaatatgtcatttctcagcaaaattatttgtaaagtaaaacatctaacaacaccaccaaaatcttgtaacagcaaaaggaagagcygagcttctgaagatcaaccttcgtgaggtcgaattagatcctgatattcaactggaagatatagccgagaagattgagggctattctggtgctgacatca

SEQ ID NO: 343707 - DNA, 201 bp, Homo sapiens
gggttggttccaagtctttgctattgtgaataatgccacaataaacatacgtgtgcatgtgtctttatagcagcatgatttatagtcctttgggtatatayccactaatgggatggctgggtcaaatggtatttgtagttgtatatccctgaggaatcaccacactgacttccacaatggttgaactagtttacggtccca

SEQ ID NO: 343708 - DNA, 201 bp, Homo sapiens
tcctagcattcattggttagagtctttcaaattattgaattaaagtagaggagaacacaaattataggttgtcttggtgtgtgagttttctcttgttattyattaatctgattatgaccacatctataatatgaaagtatagaattgacgagacagttctgtcgaatgtaaccaaggacattttacatgttagtttgaagt

SEQ ID NO: 343709 - DNA, 201 bp, Homo sapiens
cctcctaaacaccaaggtattatagtcctttcaactcggggtgactctgacttcctattacatcagggtcaggtcctttatatatatatatatatatatawattccttttactgcaagttcacatcttatgtatcctatctgtgtctatttgcatctatcagtattttattgtatttttctacttacctttttcccccatt

SEQ ID NO: 343710 - DNA, 201 bp, Homo sapiens
gactatctcagaagtgggattggagaagtttgtcttgttctcttgtctcttttccggttgaagtttaggagattgactcattttgaccattttcttgtttygtttttactctaggcagtaactggggctaaagctctggggaggcacttggctgtgcttgctgaagtatttccatagttggactgtctctggcaaataagt

SEQ ID NO: 343711 - DNA, 201 bp, Homo sapiens
ccatttcttctttgacctcatcttctttctcccctcctctcatttctttctgttggtttctgtgttgttcctcagatttgtgaagtatatgctgactgtgrcaaatttgaacttgctgttctgtctctgttttactatatattttacttattaatatattgtgcctcctaacttgagtatatgcctcatgagggcaggggt

SEQ ID NO: 343712 - DNA, 201 bp, Homo sapiens
tttgcttttaggctgacctcctaaacaccaaggtattatagtcctttcaactcggggtgactctgacttcctattacatcagggtcaggtcctttatatatatatatatatatatatattccttttactgcaagttcacatcttatgtatcctatctgtgtctatttgcatctatcagtattttattgtatttttctactt

SEQ ID NO: 343713 - DNA, 201 bp, Homo sapiens
aaaattctctagtatgtttgaacttattcagttcacatttaaatcatactggaacagcaaatgtctgtgggctggctctccaagtaaaaaatacattaatragctttttgtgccaattactgattttcaggaaatgttctttaaactactgataagagttctggagatccatgtcatactaacaggtgagcaaagtaattc

SEQ ID NO: 343714 - DNA, 201 bp, Homo sapiens
aagagttgcgttcaaatattttaacctcttattcagaagactaatacacatacttttcttagactgaacagtctttctgtatttcagccttgccaagtgasagtgctttagcttcttgattttagaatttgtatatccttattgaactatcttaagtttcccactttcaaggctgtcttaataggagtgcatgagctctta

SEQ ID NO: 343715 - DNA, 201 bp, Homo sapiens
ttctgttttgcttttaggctgacctcctaaacaccaaggtattatagtcctttcaactcggggtgactctgacttcctattacatcagggtcaggtcctttatatatatatatatatatatatattccttttactgcaagttcacatcttatgtatcctatctgtgtctatttgcatctatcagtattttattgtattttt

SEQ ID NO: 343716 - DNA, 201 bp, Homo sapiens
gaaattccttaaatattcttgatacaagtctttggttgcttatatatgttacaaatatcttctcaaactctgtaacttatctgttttcactgtgtcgacartatcttttgatgaatagaagttcctcattttaatgtggtcagtttatcaatcttttccttgttgattttttttgaatatatgtcttgagaatacttccct

SEQ ID NO: 343717 - DNA, 201 bp, Homo sapiens
gagtgcagtggcgcgatctcggctcgctgcaagctctgcctcctgggttcacaccattctcctgcctcagcctcccgagtagctgggactacaggcggccrccaccacgcccagctatttttttgtacttttagtagagatggggtttcaccgtgttatccaggatggtctcgatctcctgacctcgtgatccgcccgcct

SEQ ID NO: 343718 - DNA, 201 bp, Homo sapiens
aaggcaaaataataggcacaagtgagttctaatgttcttaccttaaggctcttttcattttaagcatctaaattatggcagcaactacctgttgagcccartgtactcctttctcaacctctcttcatttagttctgttttgcttttaggctgacctcctaaacaccaaggtattatagtcctttcaactcggggtgactc

SEQ ID NO: 343719 - DNA, 201 bp, Homo sapiens
gcctataggtggccatcttgtcccggcgtcttcatgtggtcttccccttaggggtttttgtgtcctaaccgcttcttcttataaggacaccagtcatgttsgattagagcccacccatatgacctcattttaccttaattacctctcctgtctctaaatacagtcacattctgaagtactgggggttaggagttgcctaaa

SEQ ID NO: 343720 - DNA, 201 bp, Homo sapiens
gggagtgcagtggcgcgatctgggcttactgcaacctctgcctcccaggttcaagtgattctgctgcctcagcctcctgagtagctgggactacaggcatrtgccactatgcctggctaatttttttatattattagtagagacggggtttcgccatgttgtccaggctggtcttgaactcctgagctcaggtgattcacc

SEQ ID NO: 343721 - DNA, 201 bp, Homo sapiens
ttcttctagattttctagtttatttgcgtagaggtgtttgtagtattctctgatggtagtttgtattttctcatagtaccggaagctagaagtacaagacyaaggtgtaggcagggtggttgcactctggggcctctctccttggcctataggtggccatcttgtcccggcgtcttcatgtggtcttccccttaggggttt

SEQ ID NO: 343722 - DNA, 201 bp, Homo sapiens
gctaattttttgtatttttagtagtagagacggagtttcaccgtgttagccaggatggtctcgatctcctgaccttgtgatccgcccgccttggcctcccraagtgctgggattacaggtgtgtacagtgcagtttttatagacagcatatagttgagccttgctatttgtccagtctgtatctcttttttgtttgtttgt

SEQ ID NO: 343723 - DNA, 201 bp, Homo sapiens
acagtcttattctgttgcccaggctggagtgcagaggcatgatctcaggtcactgcaacctccacctcctaagttcaagtgattcttgtgccttagccttycaaatagctgggattacaggtgtgtaccaccacacccagctaattttggtgtttttagtagagacagggttttgccatgttgtctaggctggtcttgaac

SEQ ID NO: 343724 - DNA, 201 bp, Homo sapiens
cctaaggacaggagttcaagaccagcctggccaacacagtgaaacccatctctactaaaaatacaaaaattagccgggcatggtggtgcacccctatagtygcagctactcaggaatcacttgaacctgggaggtggaggttgcagtgagtcaagatcatgctgctgcactccaatctgggcaataaagtgagtctctgtt

SEQ ID NO: 343725 - DNA, 201 bp, Homo sapiens
tatgtatatgtcatatgctaggttcaggaaactgagattatatctaaatatatgagaaacttgtttgttgtctagtctttttgttaggttatctctgactrcctctggcttgagacattttgtgaaatttcttcattttttctagctataaaataatactcttactaaatgcatcatgattttactgtgacaattttgagt

SEQ ID NO: 343726 - DNA, 201 bp, Homo sapiens
attttgtattttggctgttgtgaatagtgctgtgataaacacaggagtgcaaataattcttcgacatatcgatttccttttttttttttgtatatattccyggtagtggaattgctggatcatatggtagatctgcttttagttttttgaggaacctccacacagttttccacagtggctcccaccaacagtataggagca

SEQ ID NO: 343727 - DNA, 201 bp, Homo sapiens
ggttctgtcccttatagagggtaaagaatgtgtaattctgccacatgtgatagaaaatgtcttatttttattatgtgtaaacagaacagttgcttttaagyagtgctgaatattatatgtatatgtcatatgctaggttcaggaaactgagattatatctaaatatatgagaaacttgtttgttgtctagtctttttgtta

SEQ ID NO: 343728 - DNA, 201 bp, Homo sapiens
tttttctcatgggaatgattgatttagcctttgccataaccagatgatggcattaaaacagtgagaagtttctgctctcttttgccattgttttaaaagayttttttaaatactccaattgttttatgagattattgaatgatttctttaaaatattttcataaaggctagattttatgcccctaccacgatcttcattga

SEQ ID NO: 343729 - DNA, 201 bp, Homo sapiens
ttcatcccatttggaaaattagaagaataacccttgcctgccatcctgagctcttgcagtaagacagaagctgagaaggtgctctgtacattgtaaagtgytatgtacctgtaagagatggcagtcattgaggctgggcacggtggctcacgcctgtaatcccagcactttgggaggctgaggcaggcggatcacgaggtc

SEQ ID NO: 343730 - DNA, 201 bp, Homo sapiens; identical to SEQ ID NO: 72434

SEQ ID NO: 343731 - DNA, 201 bp, Homo sapiens
agttgaggccacgggaatgcagctttggattccagaagccaaggacctgttacaaaggtggttttctgggaagcaaattagagggattagacctggcttcracatctgacttgactccaacctaccaaaggatctcccagttcacctgggagttaacacaccagggttctagtccttttgctcgctgtgtggctttgggta

SEQ ID NO: 343732 - DNA, 201 bp, Homo sapiens
aattgtctgtttggaggttgagacatgactggggaggcctggcctgcccctgtgttaggtgatggggctggcccacccaggggtgtggcagcagggctggsccctgtgtgacttgtgataaccccaccctaccaaggaggaagactggataaaatgggcccctgagatggctgaaggcagctaaaggggcctaagagacta

SEQ ID NO: 343733 - DNA, 201 bp, Homo sapiens
cagcatttggagtccagaacaaattcaaattctggctcagtcactaagtagctatgtggtcttgggcaactggcttacattttggtaattctctcaatatkcaaaaatattctctcggccaggtgcggtggctcacgcctgtaatcccagcactttgggaggcagaggcgggcggatcacttgaagtcaggagtttgagac

SEQ ID NO: 343734 - DNA, 201 bp, Homo sapiens
aaagtcccgttgcctctttataccccattttccacattaaagtgtaagggattaaacaggattggcaattttcaagcttttaatattttcagcactgacakccgtttctcaaatcaaatctgtctctgaatcttaaaattcaaaaacagatcaaagtggactgctgtagtgagactgttccctttactctaaccctgcccc

SEQ ID NO: 343735 - DNA, 201 bp, Homo sapiens; identical to SEQ ID NO: 72439

SEQ ID NO: 343736 - DNA, 201 bp, Homo sapiens; identical to SEQ ID NO: 72442

SEQ ID NO: 343737 - DNA, 201 bp, Homo sapiens
acaggtgctgacatcatcatcacctactacacaccgcagctgctgcagtggctgaaggaggaatgatggagacagtgccaggcccaagaactagaactttmaaacgttcccggggcctcagacaagtgaaaaccaaagtaaatgctgcttttagaactgtgccctcatgccctcttcctgctcacatgctagcggggccca

SEQ ID NO: 343738 - DNA, 201 bp, Homo sapiens
accatgctgtgagtagcattgggctagagagaggggaggcaggaatctagaagagctgttttccagatgtgaccatctcctgaggacagggaccatgtctyatgtgccacccatcaccccccacagacagagcctgcagccaatgccccaggagccctcggttccaaccaactgatgcccctgtgcccactggcccacgcc

SEQ ID NO: 343739 - DNA, 201 bp, Homo sapiens
agagcccagtgtaacatggggcaaattatttaatctagctggcaattgttttcccaatccgtaaagtgagaatagtaacatcgttgctgtcaagattagayaaatgaatgtaaaatgcatggtactgtccctgactctttaatgcacagcaaacattatttgctttctatccccttccttgttgaatacagatcagaactc

SEQ ID NO: 343740 - DNA, 201 bp, Homo sapiens
ctccctctcgccgtgtaccacgtctctggagagtttgccatgctgtggcatggagcccaggccggggcatttgatctcaaggctgccgtactggaggccaygactgccttccgcagagcaggtaggcaggcaagggtggggtgttttgacctgcgccacagggactgataagcactctgcctagatcggggaacgacgtcc

SEQ ID NO: 343741 - DNA, 201 bp, Homo sapiens
ggcaatccatctgttgaggaagaccttccccaacctcctggtggcctgtgatgtctgcctgtgtccctacacctcccatggtcactgcggtgagttccctycctcccaccagccctgctgccacccacactcctactgcccacttctcaacagggtggggacaggccagggcccaaggtgctccccaaaacccagtcatct

SEQ ID NO: 343742 - DNA, 201 bp, Homo sapiens
ctcccaggcacctccaaaaggaagtgtctaaaacagagctctccacctcctctccaagcccagctccccactgccctcttcctgccctgtccctgtctccrctgccctttagatcaggcaggcaggcaggcctagagcatccgccctgagacactgcctgttggctgccttaagacgccccttccttctctgcccgcagcc

SEQ ID NO: 343743 - DNA, 201 bp, Homo sapiens; identical to SEQ ID NO: 72450

SEQ ID NO: 343744 - DNA, 201 bp, Homo sapiens
ccacctcctctccaagcccagctccccactgccctcttcctgccctgtccctgtctccgctgccctttagatcaggcaggcaggcaggcctagagcatcckccctgagacactgcctgttggctgccttaagacgccccttccttctctgcccgcagcctccccagcctctgcattcctctgcttcctgtctgctctgctc

SEQ ID NO: 343745 - DNA, 201 bp, Homo sapiens
ctgcagaagctctgtctactggcatgaggtaagacaggtccacagataacttacataagagagactgcaatctggacaagacagcctcagtgggagagggwaggagaaccctgtagatttgggtgcggggaggctgtggggagagcacagcctttcaggtaaagggacaaggttaggaaagcaagaaggtgtagcttgtgc

SEQ ID NO: 343746 - DNA, 201 bp, Homo sapiens
agcttggtttctaacagaggcacacagtgtggtggggtccggaggaccgttgcctgggacctgccttccttcaacccctctacccacacccacacaggtayggtgtgaagcggctggaagagatgctgaggcccttggtggaagagggcctacgctgtgtcttgatctttggcgtccccagcagagttcccaaggtgaaga

SEQ ID NO: 343747 - DNA, 201 bp, Homo sapiens
tggtcaggctccatgcactcaatcagccctgcctgccaggactgtagtgcccacttgatgagaaatcacctgtgaaaatgccaggcatggtctggcacacrgtaggtgctcaagaaacaaatgttaatgccccagcttccttctgtcttgtgtccactaatttggcatttggagcatatttttgtacttcacgtaattaaa

SEQ ID NO: 343748 - DNA, 201 bp, Homo sapiens
tgcagaagctctgtctactggcatgaggtaagacaggtccacagataacttacataagagagactgcaatctggacaagacagcctcagtgggagagggawggagaaccctgtagatttgggtgcggggaggctgtggggagagcacagcctttcaggtaaagggacaaggttaggaaagcaagaaggtgtagcttgtgct

SEQ ID NO: 343749 - DNA, 201 bp, Homo sapiens
ccacatccaccctccatttcagcctgtctccctgtctgcttccctgcagcaccctgacctccctctcgccgtgtaccacgtctctggagagtttgccatgytgtggcatggagcccaggccggggcatttgatctcaaggctgccgtactggaggccatgactgccttccgcagagcaggtaggcaggcaagggtggggtg

SEQ ID NO: 343750 - DNA, 201 bp, Homo sapiens
gtccacactgactgcaccctcactcccacattgtgctggccctggggccacaggtgaatggacgtggtctttgcccttaagtcagcacccatgtagggtcrgtcctctgtgcttccttatccaggggctgtgatgatgaaggaaggagaaggccagggctatgctctgtgatggctgtcatcctgccttccaaagctacat

SEQ ID NO: 343751 - DNA, 201 bp, Homo sapiens
gtggcgctatctcggcttactgcaacctcctcctcctggattcaagcagttctcctgcctcagcctccccagtagctgggattacaggcacgcaccaccaygcccagctaattttttttgtatttttagtagaggtggggtttaactgtgttggccaggctggtctcgaactcctgacctcaagtgatctgcccatctcag

SEQ ID NO: 343752 - DNA, 201 bp, Homo sapiens
aacaaaaaatccatgtcccaagtacttttctcttttctttctttctttttttttttggaatgaagtcttgctctgtcgcccaggctggagtgaagtggcgstatctcggcttactgcaacctcctcctcctggattcaagcagttctcctgcctcagcctccccagtagctgggattacaggcacgcaccaccacgcccag

SEQ ID NO: 343753 - DNA, 201 bp, Homo sapiens
gctggagtgcaatggcacgatctcggctcattgcaacctccgcctcccaagttcaaaggattctcctatctcagcttctgaagtagctgggattacaggcrtgtgccaccacacccggctaatttttttttatttttagtagagatggggtttcaccatgttggtcaggctggtctcaaactcctgacctcaagtgatcca

SEQ ID NO: 343754 - DNA, 201 bp, Homo sapiens
gatggctgaaggcagctaaaggggcctaagagactatggggagaagggcagccagttcctaggcagccctgccccactgtttctgataagcaggaggcagktgttccctcagcctcctgaaagcaatgaggagttgaggccacgggaatgcagctttggattccagaagccaaggacctgttacaaaggtggttttctggg

SEQ ID NO: 343755 - DNA, 201 bp, Homo sapiens
ggggtttctccctgttggtcaggctagtctcgaactcccgagctcaggtgattcgcccacctcggcctcccaaagtgctgggattacaggcgtgagccacyacgcccggcctgacccattcatttcttacaacaacccattgaggtcggttctagtccccatttactaaacgaagaaactgaggtcacacaactagaaagc

SEQ ID NO: 343756 - DNA, 201 bp, Homo sapiens
ccgaggtgcgggtggtggttggtgggggggtagggaggtgaaaacaataacagccgttttgtactaagcgttgcgtgcattgaccattcatttattttatktatttatttatttttgagacggagtttcgctcttgttgcccaggctggagtgcaatggcgcgatctcagctcactgcaacctccgcctcccgggttcaag

SEQ ID NO: 343757 - DNA, 201 bp, Homo sapiens
ctggagcggaggagccccccagaagaccgccttcagggggcgtggcctggactgtggagggggcggaccgtggggaagctgcttccgggtgagccccccccgctcttacgcggtctgtgggagaccggagcgggagacagcggtgacaggagcagcggccgggagcccttagggaggcaggtgagcgggggctggatgcgg

SEQ ID NO: 343758 - DNA, 201 bp, Homo sapiens
acttggcacgtggatcttcctggagcattgctgggttacagaccctccttgtttcctattaaatcaaatctatacttaaacctattattcaaagcctgcawgagaagggctcaccctgctacctattttaacctgccactctctaacaaggctatgtgctctagtcaacggtgaatccccaaaagaactcttccatatggc

SEQ ID NO: 343759 - DNA, 201 bp, Homo sapiens
ggaacgacgtcctgagagcttgggatcttattccgggaattactagtgatctaaacagacacacactgaggaagagatatggaactgcagcatagaacacsgcccggtgaagcaagcagagcccttcatttttggttgtgagaacgtgggcaagccacttctctgaacctcagtgtcctcacccataactggataactggg

SEQ ID NO: 343760 - DNA, 201 bp, Homo sapiens
aaggattagttcttttttttctatttccaatttattgattctttgataaaatgcaatgcaataaaattattatttttttttagagacgtctccctctctcrcccaggctggagtgcagtggtgcaatcatagcttactgcaaccttgaactcctgggctcaagcgatcctcttgctttagcctcctgagtagctgggacta

SEQ ID NO: 343761 - DNA, 201 bp, Homo sapiens
cagccaatgccccaggagccctcggttccaaccaactgatgcccctgtgcccactggcccacgccatgcagccccagtccgttctgcacagcggctacttscacccactacttcgggcctggcagacagccaccaccaccctcaatgcctccaacctcatctaccccatctttgtcacgtgagtctccaagaatgggccag

SEQ ID NO: 343762 - DNA, 201 bp, Homo sapiens
cccagctattgaggcaatccatctgttgaggaagaccttccccaacctcctggtggcctgtgatgtctgcctgtgtccctacacctcccatggtcactgcrgtgagttccctccctcccaccagccctgctgccacccacactcctactgcccacttctcaacagggtggggacaggccagggcccaaggtgctccccaaa

SEQ ID NO: 343763 - DNA, 201 bp, Homo sapiens
ggctccatgcactcaatcagccctgcctgccaggactgtagtgcccacttgatgagaaatcacctgtgaaaatgccaggcatggtctggcacacagtaggygctcaagaaacaaatgttaatgccccagcttccttctgtcttgtgtccactaatttggcatttggagcatatttttgtacttcacgtaattaaatattta

SEQ ID NO: 343764 - DNA, 201 bp, Homo sapiens
aaccatgctgtgagtagcattgggctagagagaggggaggcaggaatctagaagagctgttttccagatgtgaccatctcctgaggacagggaccatgtcycatgtgccacccatcaccccccacagacagagcctgcagccaatgccccaggagccctcggttccaaccaactgatgcccctgtgcccactggcccacgc

SEQ ID NO: 343765 - DNA, 201 bp, Homo sapiens
tccctgcccaggaaccatcgtggccttctatgtcggggcttgcacgagcctcaaacagccctgctttaacagttcaagagtgggccaggctgccagccgcrgtaacccaggacacggggctcaagatggtcacagattgagcaggggggaagggacgcttccagagccacatccaccctccatttcagcctgtctccctgt

SEQ ID NO: 343766 - DNA, 201 bp, Homo sapiens
gcccttcccacagctaccaatccatatcccacccccgctcttgcagggatgttcctgatgacatacagcctatcaccagcctcccaggagtggccaggtaygagacgtggagttggggggccagcgggtggtggagggagagattccacaggtggaagtgctgggaggcagaagcagacctaggaagtagaagatgcggac

SEQ ID NO: 343767 - DNA, 201 bp, Homo sapiens
acactcctactgcccacttctcaacagggtggggacaggccagggcccaaggtgctccccaaaacccagtcatctgtcctgaagggctcctgagtgaaaayggagcattccgggctgaggagagccgccagcggctggctgaggtggcattggcgtatgccaaggcaggtgagtgaaccaccagcagggatgggcacctct

SEQ ID NO: 343768 - DNA, 201 bp, Homo sapiens
aggtgctccccaaaacccagtcatctgtcctgaagggctcctgagtgaaaacggagcattccgggctgaggagagccgccagcggctggctgaggtggcaytggcgtatgccaaggcaggtgagtgaaccaccagcagggatgggcacctctgggtcaggaggtggcagagtggctaggagggccccagagttctgaaggc

SEQ ID NO: 343769 - DNA, 201 bp, Homo sapiens
gctaccagctgccccctggagcacgaggcctggctctccgagctgtggtgagtgactaggacttgagccccaccctcagccccctcctaggcaccacccayattataccctcatcccttaggaccgggatgtacgggaaggagctgacatgctcatggtgaagccgggaatgccctacctggacatcgtgcgggaggtaaa

SEQ ID NO: 343770 - DNA, 201 bp, Homo sapiens
tgatgcccctgtgcccactggcccacgccatgcagccccagtccgttctgcacagcggctacttccacccactacttcgggcctggcagacagccaccacyaccctcaatgcctccaacctcatctaccccatctttgtcacgtgagtctccaagaatgggccaggcctctgctctgctggttggggttggggttggggag

SEQ ID NO: 343771 - DNA, 201 bp, Homo sapiens
tctaacagaggcacacagtgtggtggggtccggaggaccgttgcctgggacctgccttccttcaacccctctacccacacccacacaggtatggtgtgaascggctggaagagatgctgaggcccttggtggaagagggcctacgctgtgtcttgatctttggcgtccccagcagagttcccaaggtgaagaatcaaagga

SEQ ID NO: 343772 - DNA, 201 bp, Homo sapiens
gaggcctggctctccgagctgtggtgagtgactaggacttgagccccaccctcagccccctcctaggcaccacccacattataccctcatcccttaggacygggatgtacgggaaggagctgacatgctcatggtgaagccgggaatgccctacctggacatcgtgcgggaggtaaaggacaaggtgagcacaggtacgag

SEQ ID NO: 343773 - DNA, 201 bp, Homo sapiens
tcctctgtgcttccttatccaggggctgtgatgatgaaggaaggagaaggccagggctatgctctgtgatggctgtcatcctgccttccaaagctacatgyaatagacacactgctttgtccctcccctgcccctaggacgagcggggttccgcagctgactccgaggagtccccagctattgaggcaatccatctgttga

SEQ ID NO: 343774 - DNA, 201 bp, Homo sapiens
tggatttctcagttctggccaccttctatctagctggctctcctgactgcctcctccctggccagtggcagagcctgccagggctggcagcaggtcctaascctctgtgcgaagacccacagcctctggaatcctcagcatagtacaacttgcaggggtggggggtggcacatgaagctcatagcccctcctggtagcagt

SEQ ID NO: 343775 - DNA, 201 bp, Homo sapiens
agattgagcaggggggaagggacgcttccagagccacatccaccctccatttcagcctgtctccctgtctgcttccctgcagcaccctgacctccctctcrccgtgtaccacgtctctggagagtttgccatgctgtggcatggagcccaggccggggcatttgatctcaaggctgccgtactggaggccatgactgcctt

SEQ ID NO: 343776 - DNA, 201 bp, Homo sapiens
gaaggcagggactccacttcagaaatcttggaaaaccctgtggcccacaagggtttgagctcatattcccatctggtgaggtgcagaaggcacagagctgygccaggacatctcgttccaacccagccccactcctaatagtaataaaagtagctacatgtttactgtgcagctacttggtgccagacacctaccttatcc

SEQ ID NO: 343777 - DNA, 201 bp, Homo sapiens
cgtactggaggccatgactgccttccgcagagcaggtaggcaggcaagggtggggtgttttgacctgcgccacagggactgataagcactctgcctagatyggggaacgacgtcctgagagcttgggatcttattccgggaattactagtgatctaaacagacacacactgaggaagagatatggaactgcagcatagaac

SEQ ID NO: 343778 - DNA, 201 bp, Homo sapiens
actgcactccagcttgggtgacagagccagactctgtctcaaaaaaaaaaaaaaaaaaaagaaaaggaaaaaaaactcctggcagacatgagagcaaaatygagtacgaaatgggcagctgggacctcatatctactgaataattgtctgtttggaggttgagacatgactggggaggcctggcctgcccctgtgttaggt

SEQ ID NO: 343779 - DNA, 201 bp, Homo sapiens
agttaacacaccagggttctagtccttttgctcgctgtgtggctttgggtaagtccttgcccctctctggaccttgaggtcccattcatacaaaaagcagytggactcaggcctgccagcccccatttttgtggctcttccccgcccctccccatcctttggctatgggatagtctcccaggcacctccaaaaggaagtgt

SEQ ID NO: 343780 - DNA, 201 bp, Homo sapiens; identical to SEQ ID NO: 72433

SEQ ID NO: 343781 - DNA, 201 bp, Homo sapiens
tcacttgaggtcaggggttcaagaccagcctggccaacatggtgaaaccccatctctactaaaaacacaaaaattagctgggcgtggtggcaggcgcctgyaatcccagctactggggaggctgaggcaggagaatcgcttgaacccacgaggcagtgagctgagatcatgccactgcacttcagcctggatgacagagct

SEQ ID NO: 343782 - DNA, 201 bp, Homo sapiens
ttggttttcataactggattgagataaggacaggtgtggttgggcccagggtcaaaccccatggaggtctctgtccctttctaactctcgtctgtgtttgycccagctttatactcaggtgggtttttgccacttgccagcaacatgatcctcaataattctaggcttaaatagttgttaagatttgtaatcccagagaaa

SEQ ID NO: 343783 - DNA, 201 bp, Homo sapiens
tacaaaaaatacaaaagttagctgggtgtgggggtatgtgcctgtagtcccagctactcgggaggtggagaggtgggaggattgcttgagcccagaaagtygaggctgcagtgagccaaaatcgcgccagtgcactctagcctgggtgacagagcaagaccctgtctccaatacaaacagaaaaaggaagggaggttgggc

SEQ ID NO: 343784 - DNA, 201 bp, Homo sapiens
catggtcactgcggtgagttccctccctcccaccagccctgctgccacccacactcctactgcccacttctcaacagggtggggacaggccagggcccaasgtgctccccaaaacccagtcatctgtcctgaagggctcctgagtgaaaacggagcattccgggctgaggagagccgccagcggctggctgaggtggcatt

SEQ ID NO: 343785 - DNA, 201 bp, Homo sapiens
gagctacagtgccaaatttgcttcctgtttctatggccctttccggtgagcaggggtgggcaggggtctgctgtgaatccctggccctttggcccaaagckggagcccaccctgatgactctgctttgcagggatgcagctaagtcaagcccagcttttggggaccgccgctgctaccagctgccccctggagcacgaggc

SEQ ID NO: 343786 - DNA, 201 bp, Homo sapiens
tcatagcttagcctagcctgccttaaacatgctcagaacacttacattagcctacagtgggcaaaactatccaacacaaaatctatattgtaataaagttrtaaagaattttgaataaaaattcaatatttgaagtacagtttctactgaatgtcttgtttcatactgttgtaaagtcaaaaattgtgaattgaatgatca

SEQ ID NO: 343787 - DNA, 201 bp, Homo sapiens; identical to SEQ ID NO: 72444

SEQ ID NO: 343788 - DNA, 201 bp, Homo sapiens
ccaaattttatatcattagattctgattgtcatgaaagtttctaaagacttactttcatttctcaacttaccttgttgaccagcagggattggtgaaccakgctgtgagtagcattgggctagagagaggggaggcaggaatctagaagagctgttttccagatgtgaccatctcctgaggacagggaccatgtctcatgt

SEQ ID NO: 343789 - DNA, 201 bp, Homo sapiens
aggacgagcggggttccgcagctgactccgaggagtccccagctattgaggcaatccatctgttgaggaagaccttccccaacctcctggtggcctgtgaygtctgcctgtgtccctacacctcccatggtcactgcggtgagttccctccctcccaccagccctgctgccacccacactcctactgcccacttctcaaca

SEQ ID NO: 343790 - DNA, 201 bp, Homo sapiens
aaagtgctgggattacaggcgtgagccaccacgcccggcctgacccattcatttcttacaacaacccattgaggtcggttctagtccccatttactaaacraagaaactgaggtcacacaactagaaagctacagaactaggatttgtacccacatctatcagactccagagcccacatacttaaccatcctgctaccaac

SEQ ID NO: 343791 - DNA, 201 bp, Homo sapiens
ccgcctgggcagactccatcgatgcagaacccgaggtgcgggtggtggttggtgggggggtagggaggtgaaaacaataacagccgttttgtactaagcgwtgcgtgcattgaccattcatttattttatttatttatttatttttgagacggagtttcgctcttgttgcccaggctggagtgcaatggcgcgatctcagc

SEQ ID NO: 343792 - DNA, 201 bp, Homo sapiens
cgcctgggcagactccatcgatgcagaacccgaggtgcgggtggtggttggtgggggggtagggaggtgaaaacaataacagccgttttgtactaagcgtwgcgtgcattgaccattcatttattttatttatttatttatttttgagacggagtttcgctcttgttgcccaggctggagtgcaatggcgcgatctcagct

SEQ ID NO: 343793 - DNA, 201 bp, Homo sapiens
gttaacacaccagggttctagtccttttgctcgctgtgtggctttgggtaagtccttgcccctctctggaccttgaggtcccattcatacaaaaagcagtyggactcaggcctgccagcccccatttttgtggctcttccccgcccctccccatcctttggctatgggatagtctcccaggcacctccaaaaggaagtgtc

SEQ ID NO: 343794 - DNA, 201 bp, Homo sapiens
cccatcctttggctatgggatagtctcccaggcacctccaaaaggaagtgtctaaaacagagctctccacctcctctccaagcccagctccccactgcccycttcctgccctgtccctgtctccgctgccctttagatcaggcaggcaggcaggcctagagcatccgccctgagacactgcctgttggctgccttaagacg

SEQ ID NO: 343795 - DNA, 201 bp, Homo sapiens
cttaagcatgcatcctctcctccccttccctgcccaggaaccatcgtggccttctatgtcggggcttgcacgagcctcaaacagccctgctttaacagttyaagagtgggccaggctgccagccgcagtaacccaggacacggggctcaagatggtcacagattgagcaggggggaagggacgcttccagagccacatcca

SEQ ID NO: 343796 - DNA, 201 bp, Homo sapiens
ctagagcatccgccctgagacactgcctgttggctgccttaagacgccccttccttctctgcccgcagcctccccagcctctgcattcctctgcttcctgwctgctctgctcagcctgcaggattgatcttcccaaagccaggtgtcaaccaggccactaaccctacccactgctcagaaatcttcccacagcctcagcct

SEQ ID NO: 343797 - DNA, 201 bp, Homo sapiens
aattagacagcaatctagtcagtggcagaccaaggctggaattcaggtctcttaactccaagcccagtgctcaaaactcgggaaggggctgggcatggtgrctcacacctgtaatcccagcactttaggaggccgaggtggcaggattgcttgaaaccaggagttcaagaccagcctgggcaacaaagcacgaccccattg

SEQ ID NO: 343798 - DNA, 201 bp, Homo sapiens
ctatatggctgtctctcttgttaagatctcagctcaaagcatcccttcctctgagaaacctgacccaacacccaatctaaagtcactcttggagctgggcrtggtggctcacacctgtaatcccagcactttgggagaccaaggcaggcggatcacttgaggtcaggagttcaagaccagcctggccaacgtggcaaaacc

SEQ ID NO: 343799 - DNA, 201 bp, Homo sapiens
gaggcaggagaatcgcttgaacccacgaggcagtgagctgagatcatgccactgcacttcagcctggatgacagagctagactccatctcaaaaaaaaaaagaatcacagaactgaagacagtgctggatgaggctttggggaaccatttaaacctctgggcctctgcagggaaatcaagcccagcactccaacaggacca

SEQ ID NO: 343800 - DNA, 201 bp, Homo sapiens
cccagctacttgggaggctgaggcaggagaatggcgtgaacccgggaggcggagcttgcagtgagccgagattgcaccacttcactccagcctgggcgacrgagccagactccatctcaaaaaaaaaaaaaaaaaaaaagagatggcaatcgtgattgttaataataatgcagacatttactgagtacttactatctacca

SEQ ID NO: 343801 - DNA, 201 bp, Homo sapiens
agtcccagctacttgggaggctgaggcaggagaatggcgtgaacccgggaggcggagcttgcagtgagccgagattgcaccacttcactccagcctgggcracagagccagactccatctcaaaaaaaaaaaaaaaaaaaaagagatggcaatcgtgattgttaataataatgcagacatttactgagtacttactatcta

SEQ ID NO: 343802 - DNA, 201 bp, Homo sapiens
cagttctcctgcctcagcctccccagtagctgggattacaggcacgcaccaccacgcccagctaattttttttgtatttttagtagaggtggggtttaacygtgttggccaggctggtctcgaactcctgacctcaagtgatctgcccatctcagcctcccaaagtgctgagattataggtgtgagccgccatgcccggcc

SEQ ID NO: 343803 - DNA, 201 bp, Homo sapiens
cactccggcctgggctacagagggagatcctgtctgcaaaaaaaaaaaaaaagaaaaagaaatgtctggccctatttaccaaagctgaacatatgcatacyttatgaccctgtgattccacacctaggtattacccaacagtatttacccaacattacctacgttcataagacacatgttcaacagcattcatagcagcat

SEQ ID NO: 343804 - DNA, 201 bp, Homo sapiens
gccctgccttgggccgctgccccctgtctacccatcatctgcatgtgtagcagctcttagacctacatttgatgccgggaggggacccaggcctggccgcrgaagggagcggggttaagaggaagcaggggctctgtgaggactggacagaagcacctagcacagcccatcctaggagagctcagggccccgtggatgagt

SEQ ID NO: 343805 - DNA, 201 bp, Homo sapiens
agctgttagttcgaggggaccaggctctgtgtggtcccgacagcactgtgtcttccaggcaccagctggtggtgagcagccctccgagacctgtgaggcayggggacatggtgcagctggtccacggcatgaccacccgctccctgaacacgtgagtgtgcccgccgtctgctctgctgcacctgtgggtttcctctgtgg

SEQ ID NO: 343806 - DNA, 201 bp, Homo sapiens
aaagggagcacccggggatgatgtgccgctgggatagaaggcagggaggcactgggggcagatgcatccttgaggagagatgaggaggccccgaggctcgkccaggttggggtccctgggctgtaagcagctgagatggcacccaggagctgcccagggtcaggtagctgtggccgcactgtgggcttctggtcgtcgggg

SEQ ID NO: 343807 - DNA, 201 bp, Homo sapiens
ggctgggtggagggctgaccaaggtccaaagggcctgcgcagcctccgggagggcagcttctccagccagaggcttgtgtgagccatcgtgtgctgggctygtttttaagtaagaaacaaggaaatcactccagattctgtcattccaaggaaagggaaggggacagttcaggtttctcagctgttcttaggggtcactga

SEQ ID NO: 343808 - DNA, 201 bp, Homo sapiens
tcttcctctaccactacctgcccgcactcaccttccaaatccttctgctccctgtggtcctgcagcacatcagcgaccacctgtgcaggtacgggggctgyggagacagtggctggaccgggcagcagccctctgctgggaagcccatgcgcagcaaacacatggggtgcagcgaacctcacccatttcacgttacactga

SEQ ID NO: 343809 - DNA, 201 bp, Homo sapiens
gccgaggcagctcccaccagcaacaggtgacctgttaccccttcaaagacgtcaataactggtggattgtaaaggatcccaggaggtgagtgcaggtcctrtgactccagagcagagctcacctcctggcctggccaggcgagaccctgggatgcagtcctgggcccccttctttccctccctcactgactctagtcaccg

SEQ ID NO: 343810 - DNA, 201 bp, Homo sapiens
ggcgtatggcagggcccagggtcggccccagctctgtggctgtggctgacctcagcactgcctgcctaaatcatctgatttcggctccttgtctgtggtaycttcattttccctgaaaccccttgctaggttgtatttgttgaaatctgcttccctttgcagaaactttaggagaaaggcgtgtgggcccgatcgatgacc

SEQ ID NO: 343811 - DNA, 201 bp, Homo sapiens
aaccagccttgtgttatgaaacagaaaacagaaaacatgaggacatgtaacatgtaaaaaaggaaagtacttgttcacaaaacttttgagttatgtgtgtgagtgtgtaagaaccagatcagactggaaaaaactctctcccactgtgggttcactgtcaacaaaacatcaggccagccagtgtctaggctgtctcctcaa

SEQ ID NO: 343812 - DNA, 201 bp, Homo sapiens
ttgctaggttgtatttgttgaaatctgcttccctttgcagaaactttaggagaaaggcgtgtgggcccgatcgatgacccacttccagatacgtttctttycctttcttttctttttctcataaatagacacagggtctcactatgttgcccaggctggtgtcaaactcctgggctcaagcagttatcctacctcagcctc

SEQ ID NO: 343813 - DNA, 201 bp, Homo sapiens
accagccttgtgttatgaaacagaaaacagaaaacatgaggacatgtaacatgtaaaaaaggaaagtacttgttcacaaaacttttgagttatgtgtgtgagtgtgtaagaaccagatcagactggaaaaaactctctcccactgtgggttcactgtcaacaaaacatcaggccagccagtgtctaggctgtctcctcaat

SEQ ID NO: 343814 - DNA, 201 bp, Homo sapiens
gtgggcccgatcgatgacccacttccagatacgtttcttttcctttcttttctttttctcataaatagacacagggtctcactatgttgcccaggctggtstcaaactcctgggctcaagcagttatcctacctcagcctcccaaagtgctctgattacaggcctgagccaccgcgcctggcccagatacatctctttgtt

SEQ ID NO: 343815 - DNA, 201 bp, Homo sapiens
cagtgagccgagattgtaccactgcactccagcctggtgacagaacaagactctgtctcaaaaaaataaataaataaaattagccaggtgtggtggcatgygcctatagtcccagctactcaggagcctgaggcaggaggatcccttgagccctggtggtcaaagctgcagtgagccatgatggtgccactgcactccagc

SEQ ID NO: 343816 - DNA, 201 bp, Homo sapiens
gcgcctggcccagatacatctctttgttgacttcacacagatatgagaacggccgaggcagctcccaccagcaacaggtgacctgttaccccttcaaagaygtcaataactggtggattgtaaaggatcccaggaggtgagtgcaggtcctgtgactccagagcagagctcacctcctggcctggccaggcgagaccctgg

SEQ ID NO: 343817 - DNA, 201 bp, Homo sapiens
tcactgtctcctgatggtgtcctcccattgctgcctgcccagctccagcacctgcagcccgagtgggctttttcttttttttcttcttattttttcggggkacagagtcccaccctgttgcccaggctggagtgcagtggtacgatctcggctcactgcaacctccgcttcccgggttcaagcgattctcctgcctcagcc

SEQ ID NO: 343818 - DNA, 201 bp, Homo sapiens; identical to SEQ ID NO: 72590

SEQ ID NO: 343819 - DNA, 201 bp, Homo sapiens
gagctcagggccccgtggatgagtgtacaaggacaggctgggaatgttgacccgctttctatgcagagaatggagtttgggcacacctccttaaagtggtmaagcttaaagtatgagtgagtccaagaagcctggaagctcgggcacgagtggagccgtgaaggcttcttccttctcagtccttcgtccttgtccgacttg

SEQ ID NO: 343820 - DNA, 201 bp, Homo sapiens
tctgcgagaatgttcttggacttggctcccccatggcccctctatgtaggggtctgctgggatgtcactgcatccaaaagtgcctcctgggtgctgtcccycaccatttgttttattagtggcactcctacaggtgcacgctctgcccaccggcatgatggctgtttcccagagggctgtgagggccttgtcttgttcaca

SEQ ID NO: 343821 - DNA, 201 bp, Homo sapiens
agcctgggcaacatagtaagaaccctctctctaaaaaagcaaaagagagagaagacccggcctgtgggagcagcagagtcggtgtagctcgagccctttcmtatagatgcctggctgcgctgggtgctggctggggcgctgtgtgccggtggctgggcagtgaactacctcccgttcttcctgatggagaagacactcttc

SEQ ID NO: 343822 - DNA, 201 bp, Homo sapiens
gagcgatgctgacagctgacagtcatagattcatcctgtttgttgagaattccttgcattaagagcagccgctgcaccctagaaagtgctgggtttctccmaagcttttcctgacaaaggcctgtgacttggttttctctaaacgctttggcaacctggagccaggagtaggggtgtggcatgtgtgcctgttgaaggaaa

SEQ ID NO: 343823 - DNA, 201 bp, Homo sapiens
cacaacagccccacacagttgtatcgcttctgaagtaatgccttttttcatgagtgtttttcatcctcatacgttttcccttgctaccttaaaattgacaygtgtttcctctttgaaacagagaatgctctcatcactcagtcaaggctaatgcttttggaatcagtgttaatatttttcaatctattggccgtgttgtcc

SEQ ID NO: 343824 - DNA, 201 bp, Homo sapiens
ggccaaagtgagggagtcacctgaggccaggagttcaaaaccagcctgggcaacatagtaagaaccctctctctaaaaaagcaaaagagagagaagacccrgcctgtgggagcagcagagtcggtgtagctcgagccctttcctatagatgcctggctgcgctgggtgctggctggggcgctgtgtgccggtggctgggca

SEQ ID NO: 343825 - DNA, 201 bp, Homo sapiens
tacctgctccgacggcgaagaaatgtccatgacctccctcagggttagtacctctcccacatggctttctttctttttaatatagacatggggtcttgctrtgttgtccagggtgttcttgaactcctgggcttaagcgatcctcctgcctcggcctcccatagtgctaggattacaggtgtgcgctgagcattcaccgcc

SEQ ID NO: 343826 - DNA, 201 bp, Homo sapiens
cgatgacccacttccagatacgtttcttttcctttcttttctttttctcataaatagacacagggtctcactatgttgcccaggctggtgtcaaactcctrggctcaagcagttatcctacctcagcctcccaaagtgctctgattacaggcctgagccaccgcgcctggcccagatacatctctttgttgacttcacaca

SEQ ID NO: 343827 - DNA, 201 bp, Homo sapiens; identical to SEQ ID NO: 72483

SEQ ID NO: 343828 - DNA, 201 bp, Homo sapiens
agtgggtcaccctggacaccaatattgcctactggctgcaccccaggaccagcgtaagcgagcgatgctgacagctgacagtcatagattcatcctgtttsttgagaattccttgcattaagagcagccgctgcaccctagaaagtgctgggtttctccaaagcttttcctgacaaaggcctgtgacttggttttctctaa

SEQ ID NO: 343829 - DNA, 201 bp, Homo sapiens; identical to SEQ ID NO: 72493

SEQ ID NO: 343830 - DNA, 201 bp, Homo sapiens
aaggcaaccagtttatccccgtgcaagtggagctttctcagggtcgaaatcacctcatttgaccgggcagtcttgggtgtggtggggaaagctaagtggartgatgcggttcgataaggggtctttgttagaaaggcaggaagccagctttttgctgcactgacagcttctgctctgagctcttgaccttgtgctacttct

SEQ ID NO: 343831 - DNA, 201 bp, Homo sapiens
tgctggcgctgagaagtgatgactcggaacacaagtacagctccagcccactggagtgggtcaccctggacaccaatattgcctactggctgcaccccagraccagcgtaagcgagcgatgctgacagctgacagtcatagattcatcctgtttgttgagaattccttgcattaagagcagccgctgcaccctagaaagtg

SEQ ID NO: 343832 - DNA, 201 bp, Homo sapiens
gtgtgtgtgtgtttttgagacggagtcttgctgtgtcgcccaggttggagtgcagtggtgccatctcggctcactgcaacctctgcctcctgggttcaagcaattctctgcctcagcctcccgagtagctgagattacaggtgcccgccaccacacccagctaatttttgtatttttagtagagacgggatttcaccatct

SEQ ID NO: 343833 - DNA, 201 bp, Homo sapiens
acctccctgactgggggtatcggcaactggagatcgtcggggagaagctgtcccggggctaccacgggagcacggtgtggaacgtggaggagcaccgatayggcgcgagtgagtccgcggcgtggcttccgccgctcctggaatgtactttcagctgctcaatatttgataacaccccagagttctcattttggtgggaag

SEQ ID NO: 343834 - DNA, 201 bp, Homo sapiens
ataactcaagacgcttcttccgaggtgtcgctggaaggcaaccagtttatccccgtgcaagtggagctttctcagggtcgaaatcacctcatttgaccggrcagtcttgggtgtggtggggaaagctaagtggagtgatgcggttcgataaggggtctttgttagaaaggcaggaagccagctttttgctgcactgacagc

SEQ ID NO: 343835 - DNA, 201 bp, Homo sapiens
ggctcaagtcagtatcattgtttggtgacaggtctttatttttacattgaaggaaatttgaaaaggaatgaaataatccttgagatgtctttttgcaggarattgtgaacagaggatctgacacagacgtctggaagaccatcctctcagaggtccgctttgtgcacgtgaacacttccgctgtcttaaaggtaaggacac

SEQ ID NO: 343836 - DNA, 201 bp, Homo sapiens; identical to SEQ ID NO: 72476

SEQ ID NO: 343837 - DNA, 201 bp, Homo sapiens
taataactcaagacgcttcttccgaggtgtcgctggaaggcaaccagtttatccccgtgcaagtggagctttctcagggtcgaaatcacctcatttgaccrggcagtcttgggtgtggtggggaaagctaagtggagtgatgcggttcgataaggggtctttgttagaaaggcaggaagccagctttttgctgcactgaca

SEQ ID NO: 343838 - DNA, 201 bp, Homo sapiens; identical to SEQ ID NO: 72477

SEQ ID NO: 343839 - DNA, 201 bp, Homo sapiens
gggcattgggaaggaaggccagtaccagccccttatagcttccctcacttggggacttgtccctttgtctcaggctcaagtcagtatcattgtttggtgayaggtctttatttttacattgaaggaaatttgaaaaggaatgaaataatccttgagatgtctttttgcaggaaattgtgaacagaggatctgacacagacg

SEQ ID NO: 343840 - DNA, 201 bp, Homo sapiens; identical to SEQ ID NO: 72580

SEQ ID NO: 343841 - DNA, 201 bp, Homo sapiens; identical to SEQ ID NO: 72479

SEQ ID NO: 343842 - DNA, 201 bp, Homo sapiens
ttctttctgtctctcactcatcaaccttctgcttctgtctcagggaggactagctcggatcacccagggtcagccactggaggtggcctttgggtcccagrtcactctgaggaacgtctttgggaaacctgtgccctgctggcttcattcccaccaggacacctaccccatgatgtaaggtgatggttttactttgaagat

SEQ ID NO: 343843 - DNA, 201 bp, Homo sapiens; identical to SEQ ID NO: 72482

SEQ ID NO: 343844 - DNA, 201 bp, Homo sapiens
tgtgattaaatgggagatcattaccactgttacaagaatggccaccagcctaaacatcaccccagagggaggagtggccatcgggaaggctggcttagggkcatttttctttctgtctctcactcatcaaccttctgcttctgtctcagggaggactagctcggatcacccagggtcagccactggaggtggcctttgggt

SEQ ID NO: 343845 - DNA, 201 bp, Homo sapiens
tgggcggcagagcaagaccctgactcaaagaaaagaaagagacagtagaaaatcaaaagagatgtgtattgggtgatgactgtatgaggccttgtgtctayagaatgttttaacattcacaacagccccacacagttgtatcgcttctgaagtaatgccttttttcatgagtgtttttcatcctcatacgttttcccttgc

SEQ ID NO: 343846 - DNA, 201 bp, Homo sapiens
tgaggccaggagttcaaaaccagcctgggcaacatagtaagaaccctctctctaaaaaagcaaaagagagagaagacccggcctgtgggagcagcagagtyggtgtagctcgagccctttcctatagatgcctggctgcgctgggtgctggctggggcgctgtgtgccggtggctgggcagtgaactacctcccgttcttc

SEQ ID NO: 343847 - DNA, 201 bp, Homo sapiens
cttcgtggttcccgggtgttgctggagggacttggcgtatggcagggcccagggtcggccccagctctgtggctgtggctgacctcagcactgcctgcctraatcatctgatttcggctccttgtctgtggtaccttcattttccctgaaaccccttgctaggttgtatttgttgaaatctgcttccctttgcagaaactt

SEQ ID NO: 343848 - DNA, 201 bp, Homo sapiens; identical to SEQ ID NO: 72586

SEQ ID NO: 343849 - DNA, 201 bp, Homo sapiens; identical to SEQ ID NO: 72587

SEQ ID NO: 343850 - DNA, 201 bp, Homo sapiens; identical to SEQ ID NO: 72589

SEQ ID NO: 343851 - DNA, 201 bp, Homo sapiens
acttcctctaacacaggacacttcctcacacggaacacttcctcacacggagcacttcctgtaacaggacacttcctcacacggagcacttcctctaacayggagcacttcctgtaacacaggacacttcctcacacggagcacttcctctaacacaggacacttcctcacacggagcacttcctcacagggagcactttc

SEQ ID NO: 343852 - DNA, 201 bp, Homo sapiens
cctctaacacaggacacttcctcacacggaacacttcctcacacggagcacttcctgtaacaggacacttcctcacacggagcacttcctctaacatggagcacttcctgtaacacaggacacttcctcacacggagcacttcctctaacacaggacacttcctcacacggagcacttcctcacagggagcactttctcta

SEQ ID NO: 343853 - DNA, 201 bp, Homo sapiens; identical to SEQ ID NO: 72492

SEQ ID NO: 343854 - DNA, 201 bp, Homo sapiens
aaagctaatttcaaagccttcacccatagtttatgcactctgctgctgatggggtccccagttttgtaaacgtgcattttagagtctgtgaacatgacggygctatgtgaaagcatagctgcagtacacagagatggtgtgtgcacagtgtagtcagctctgcagtgtggttgcttttccagaatacagtagcaacgtgcc

SEQ ID NO: 343855 - DNA, 201 bp, Homo sapiens
aggagtggccatcgggaaggctggcttaggggcatttttctttctgtctctcactcatcaaccttctgcttctgtctcagggaggactagctcggatcacycagggtcagccactggaggtggcctttgggtcccaggtcactctgaggaacgtctttgggaaacctgtgccctgctggcttcattcccaccaggacacct

SEQ ID NO: 343856 - DNA, 201 bp, Homo sapiens
ggaaacctgtgccctgctggcttcattcccaccaggacacctaccccatgatgtaaggtgatggttttactttgaagataattaaatgctttatttgctcrtagatttgcttatcttagcaactttccctttctttgaggaagtttgtttgcaggacagaaagaagttgagcagcccgggtgctgattgccagtgagcttc

SEQ ID NO: 343857 - DNA, 201 bp, Homo sapiens
ccctgaacacacatgccgggcgggagacctgccctgaggctcggcagcccctcagtggggtctgctgctggactccaaatgtgaccgtttgccagaggtcrgcatcccagggtggtcccctggctcagaaaaggtccgcttgtagctccgcccattggaccctcctcggtgccatttgcagatgtcaccattcagaatgtc

SEQ ID NO: 343858 - DNA, 201 bp, Homo sapiens
ggcggcttttgtaacttctcaggatggaatcccaatgtgaatctcccacaaggggcacctgctgacagcgtgacccgggcaggggttccccttccaacccragtggacacgggagccacggccttcccatcacgccctttactctcctgcggtgtcaccagctgagcggggctcacctccctgactgggggtatcggcaac

SEQ ID NO: 343859 - DNA, 201 bp, Homo sapiens
acaggacacttcctcacacggaacacttcctcacacggagcacttcctgtaacaggacacttcctcacacggagcacttcctctaacatggagcacttcctgtaacacaggacacttcctcacacggagcacttcctctaacacaggacacttcctcacacggagcacttcctcacagggagcactttctctaacacagga

SEQ ID NO: 343860 - DNA, 201 bp, Homo sapiens
caggacacttcctcacacggaacacttcctcacacggagcacttcctgtaacaggacacttcctcacacggagcacttcctctaacatggagcacttcctgtaacacaggacacttcctcacacggagcacttcctctaacacaggacacttcctcacacggagcacttcctcacagggagcactttctctaacacaggac

SEQ ID NO: 343861 - DNA, 201 bp, Homo sapiens
ggacacttcctcacacggaacacttcctcacacggagcacttcctgtaacaggacacttcctcacacggagcacttcctctaacatggagcacttcctgtmacacaggacacttcctcacacggagcacttcctctaacacaggacacttcctcacacggagcacttcctcacagggagcactttctctaacacaggacac

SEQ ID NO: 343862 - DNA, 201 bp, Homo sapiens
cttcctcacacggaacacttcctcacacggagcacttcctgtaacaggacacttcctcacacggagcacttcctctaacatggagcacttcctgtaacacaggacacttcctcacacggagcacttcctctaacacaggacacttcctcacacggagcacttcctcacagggagcactttctctaacacaggacacttcct

SEQ ID NO: 343863 - DNA, 201 bp, Homo sapiens
acggaacacctcctcacacggaacacttcctcacacggagcacttcctcacacggaacacctcctcacacggagcacttcctcacacggagcacttcctcwaacagaacacttcctcacacggagcacttcctcacagggagcactccatcacacggagcacttgctcacacggagcacttcctgacatggaatgtttgaa

SEQ ID NO: 343864 - DNA, 201 bp, Homo sapiens
cggaacacctcctcacacggaacacttcctcacacggagcacttcctcacacggaacacctcctcacacggagcacttcctcacacggagcacttcctctmacagaacacttcctcacacggagcacttcctcacagggagcactccatcacacggagcacttgctcacacggagcacttcctgacatggaatgtttgaaa

SEQ ID NO: 343865 - DNA, 201 bp, Homo sapiens; identical to SEQ ID NO: 72591

SEQ ID NO: 343866 - DNA, 201 bp, Homo sapiens
aacacctcctcacacggaacacttcctcacacggagcacttcctcacacggaacacctcctcacacggagcacttcctcacacggagcacttcctctaacrgaacacttcctcacacggagcacttcctcacagggagcactccatcacacggagcacttgctcacacggagcacttcctgacatggaatgtttgaaactg

SEQ ID NO: 343867 - DNA, 201 bp, Homo sapiens
cctcacacggaacacttcctcacacggagcacttcctcacacggaacacctcctcacacggagcacttcctcacacggagcacttcctctaacagaacacytcctcacacggagcacttcctcacagggagcactccatcacacggagcacttgctcacacggagcacttcctgacatggaatgtttgaaactgccattga

SEQ ID NO: 343868 - DNA, 201 bp, Homo sapiens
tgacgaagtatattatgggcagtacatctctttttacatgaaacaaatcttcttcttggatgacagtgggccgccatttggccacatggtgctggccttgrgaggtaggagtcatcaggagagtagcccctacccttcaggacctcaaatacatttaaaacttatcagtgcatttcttacaggcagaaaccaggtcttatt

SEQ ID NO: 343869 - DNA, 201 bp, Homo sapiens
gctggtcatcccggtcgtcctgtacttactgttcttctacgtccacttgattctagtcttccgctctgggccccacgaccaaatcatgtccagtgccttcyaggccagcttagaggtaagtaagcagtgggcatcgtggccactggagaaggaagatgatagtggacccagagttttcttacaaacacatcaagtgaacat

SEQ ID NO: 343870 - DNA, 201 bp, Homo sapiens
ctataatgtaacgtgatgtgattaaatgggagatcattaccactgttacaagaatggccaccagcctaaacatcaccccagagggaggagtggccatcggraaggctggcttaggggcatttttctttctgtctctcactcatcaaccttctgcttctgtctcagggaggactagctcggatcacccagggtcagccactg

SEQ ID NO: 343871 - DNA, 201 bp, Homo sapiens
acaaccagccttgtgttatgaaacagaaaacagaaaacatgaggacatgtaacatgtaaaaaaggaaagtacttgttcacaaaacttttgagttatgtgtgtgagtgtgtaagaaccagatcagactggaaaaaactctctcccactgtgggttcactgtcaacaaaacatcaggccagccagtgtctaggctgtctcctc

SEQ ID NO: 343872 - DNA, 201 bp, Homo sapiens
ctcagccatgagaattcagagctgtgcccctccggtgcagctgttagttcgaggggaccaggctctgtgtggtcccgacagcactgtgtcttccaggcacyagctggtggtgagcagccctccgagacctgtgaggcacggggacatggtgcagctggtccacggcatgaccacccgctccctgaacacgtgagtgtgccc

SEQ ID NO: 343873 - DNA, 201 bp, Homo sapiens
gagccgggtggctggggatcccttctgtagcctctcgtgagccctcatggaccacggctcctcccttcttttctagggcgtctgcctgagcccgcttttckacaagatgtggggatttttgaagcgccctgtagtggtgacggctgacatcaacttgagccttgtggccctgactgggatggggttactgagccggctgtg

SEQ ID NO: 343874 - DNA, 201 bp, Homo sapiens
caaccagccttgtgttatgaaacagaaaacagaaaacatgaggacatgtaacatgtaaaaaaggaaagtacttgttcacaaaacttttgagttatgtgtgtgagtgtgtaagaaccagatcagactggaaaaaactctctcccactgtgggttcactgtcaacaaaacatcaggccagccagtgtctaggctgtctcctca

SEQ ID NO: 343875 - DNA, 201 bp, Homo sapiens; identical to SEQ ID NO: 72494

SEQ ID NO: 343876 - DNA, 201 bp, Homo sapiens
aagcaaaagagagagaagacccggcctgtgggagcagcagagtcggtgtagctcgagccctttcctatagatgcctggctgcgctgggtgctggctggggygctgtgtgccggtggctgggcagtgaactacctcccgttcttcctgatggagaagacactcttcctctaccactacctgcccgcactcaccttccaaatc

SEQ ID NO: 343877 - DNA, 201 bp, Homo sapiens
atgctttccagagacagccaccacgcaggagggaggatcaccccaggcaacccagacacgggtgttcacatgtgaggctgtgagctccacatagcacaaargaggcttgctgactttgggcggccatgtctgctgggacctgggtgatccagtgcgtgccacagccagaagcaccattccctgcatatggccactagccac

SEQ ID NO: 343878 - DNA, 201 bp, Homo sapiens
cacgtcacgtctgcatcactactgtgggtgagcctggacggacgggggctggggctgcccgtggcagcggcaagggatgctttccagagacagccaccackcaggagggaggatcaccccaggcaacccagacacgggtgttcacatgtgaggctgtgagctccacatagcacaaaggaggcttgctgactttgggcggcc

SEQ ID NO: 343879 - DNA, 201 bp, Homo sapiens
ggagttcaaggaattttctgaaatctcggtcttggttttccaggcatgatgttgcagcccccctgagcccccattcacaggaggtctcctgctacattgamtataacatctccatgcccgcccagaacctctggagactggtgagtaaggctgcggctatagcagccacaaccgtcagtaatgaacactccctcacacgga

SEQ ID NO: 343880 - DNA, 201 bp, Homo sapiens
cttcccaccaaaatgagaactctggggtgttatcaaatattgagcagctgaaagtacattccaggagcggcggaagccacgccgcggactcactcgcgccrtatcggtgctcctccacgttccacaccgtgctcccgtggtagccccgggacagcttctccccgacgatctccagttgccgatacccccagtcagggaggt

SEQ ID NO: 343881 - DNA, 201 bp, Homo sapiens; identical to SEQ ID NO: 72683

SEQ ID NO: 343882 - DNA, 201 bp, Homo sapiens
gtgtccttacctttaagacagcggaagtgttcacgtgcacaaagcggacctctgagaggatggtcttccagacgtctgtgtcagatcctctgttcacaatytcctgcaaaaagacatctcaaggattatttcattccttttcaaatttccttcaatgtaaaaataaagacctgtcaccaaacaatgatactgacttgagcc

SEQ ID NO: 343883 - DNA, 201 bp, Homo sapiens
  misc_feature (1)...(201): n = A,T,C or G
ctcctcggagccccaagtccgtgctaaccccgttgggcccccgcggcccttccgctgagaccatccacacctgttggtgtcctcccgccttccgagcatancccccagggggcgggtgggtcagtgtctccagaagccggccccgtgcctgtcacaggacgagcggttccaggcgggaatcccgcttctgtgtctccagtc

SEQ ID NO: 343884 - DNA, 201 bp, Homo sapiens
cacactcaaggtaagcaggtggttctagggagggccgaggagaggggccagctaggacgtcccctcgggctcacacagacctgcctggcggcaggcctccsccggttggtttctgtgggtcccccaccccttcccacagtcagtgtccctgcaatggaagctgactgtgtgtgtggcctggagaccctgtgtctgcagcag

SEQ ID NO: 343885 - DNA, 201 bp, Homo sapiens
tcccctttcacaaggacacatgggacccagtactgtgagagggcttagtgctgggtgacagtgatctgattgaaaaaaaggagaagaatttggctcattayggccacataccctgggagtagttctcagctgtaaaaacattctctgtgcctgctcctccctctgcctaaaaaagccccatatctcccccacattcacact

SEQ ID NO: 343886 - DNA, 201 bp, Homo sapiens
ggttaatttttaaattttttgtagagatggggtctccctgtgttgcccaggctggtctccatctcctgggatctagtggtcctcccacctcagcttcccaragtgctgagattacaggtgtgagccactatgcctggcctattggctgctatataaagaaaacttttgtttttttttgcattcatgctgtctgaaatttct

SEQ ID NO: 343887 - DNA, 201 bp, Homo sapiens
catccctgctggcggttaagacccctgtcagctctcccggactcctccagcccgtcagactatcagactagaatagaaagcagccctcgcccttgcgctcrtgctttcatgagatggggtcccaccaactgcagacacagctgtccccaggacttggtccctgtctgcctcttgcagcttgtctcttctgccgccttcttg

SEQ ID NO: 343888 - DNA, 201 bp, Homo sapiens; identical to SEQ ID NO: 72694

SEQ ID NO: 343889 - DNA, 201 bp, Homo sapiens; identical to SEQ ID NO: 72682

SEQ ID NO: 343890 - DNA, 201 bp, Homo sapiens
agttctctgggccctgagtgtccccccaggagcgtggttggagccagtcaggaagcctgttgcactgtggggagccctgccctgccctgccacaactgtgrtcctggagaaatcctcccatcttcccttcccacgttggggcctttagggccctccacacacacctctgcccactgtgccctcccgtgctttggggcaaag

SEQ ID NO: 343891 - DNA, 201 bp, Homo sapiens; identical to SEQ ID NO: 72684

SEQ ID NO: 343892 - DNA, 201 bp, Homo sapiens
gttgctgtgccagggtatttgcagaagcttcatgattccagaggaacaatgtcacactttgtagaagtgccacacttagcttggcccagtgaattgagtcrttagcgtagccagctgtctcctgtaatggagtgggaacactggaagggggctgtcttctgtgatggaatggggacactggaagaggcactttcttttggc

SEQ ID NO: 343893 - DNA, 201 bp, Homo sapiens
ggtctctttttgtcgtctagggtggagtgcaatggcacgatctcggctcactccaaactccacctcccaagtttaagcaattctcctgtctcacccttccragtagctgggattacaggcgtacgccaccacacccagctaatttttgtatttttagtggagatggggttttgccatgttggctgggctggtctcgaactc

SEQ ID NO: 343894 - DNA, 201 bp, Homo sapiens
gcctgttaaggtaaaaatacagcacaaaggaactgaaaccaagattcctgcctttgataatgtaggacaagtaagttctatctgctgctttttttttttttgagatagggtctctttttgtcgtctagggtggagtgcaatggcacgatctcggctcactccaaactccacctcccaagtttaagcaattctcctgtctca

SEQ ID NO: 343895 - DNA, 201 bp, Homo sapiens
tgcctgttaaggtaaaaatacagcacaaaggaactgaaaccaagattcctgcctttgataatgtaggacaagtaagttctatctgctgctttttttttttttgagatagggtctctttttgtcgtctagggtggagtgcaatggcacgatctcggctcactccaaactccacctcccaagtttaagcaattctcctgtctc

SEQ ID NO: 343896 - DNA, 201 bp, Homo sapiens
ctgtgccaggcacggagcgggggggcggcagggatggaacccggcacatgggcctctgcctccttggcgcgctgtaggcgcgagcctaaagtcatcaggcracagcccccgccacgttccggggcgccccgacggctccagcagcgggtggggtgggaggcgtccggacagtccggaggcctcgatggccaagaggagcct

SEQ ID NO: 343897 - DNA, 201 bp, Homo sapiens
ccatccacacctgttggtgtcctcccgccttccgagcataacccccagggggcgggtgggtcagtgtctccagaagccggccccgtgcctgtcacaggacsagcggttccaggcgggaatcccgcttctgtgtctccagtcgaccgtgtgtgagaagatcatggagttgctgggacagaacgaggtggaacagcggcagcg

SEQ ID NO: 343898 - DNA, 201 bp, Homo sapiens
ttgccgctgcagttctccgggacgtgcgccgagggagggacctggagcagattctgacgcagtacaccaccttcgtgaagccggccttcgaggagttctgyctgccggtacctgtgctcgctgcttcagagcccattttcccctttcacaaggacacatgggacccagtactgtgagagggcttagtgctgggtgacagtg

SEQ ID NO: 343899 - DNA, 201 bp, Homo sapiens
gttagcgtagccagctgtctcctgtaatggagtgggaacactggaagggggctgtcttctgtgatggaatggggacactggaagaggcactttcttttggytgcctcagctgcactttctgcctcacttcttggatcatggcctctcacacctggctgatgactgagtctgtgtcccccatttgccgatgacaccagcacc

SEQ ID NO: 343900 - DNA, 201 bp, Homo sapiens
gccaggagatccgggacatgttccacctgcgcctcttcgtggacaccgactccgacgtcaggctgtctcgaagaggtaaggcggccgcgggcctccgtgcstgcctggccgaggctggcggcaggtcctgaggtctgaagcacgcctgccccttgccgctgcagttctccgggacgtgcgccgagggagggacctggagca

SEQ ID NO: 343901 - DNA, 201 bp, Homo sapiens
tcttggtgttctacagccaggagatccgggacatgttccacctgcgcctcttcgtggacaccgactccgacgtcaggctgtctcgaagaggtaaggcggcygcgggcctccgtgcctgcctggccgaggctggcggcaggtcctgaggtctgaagcacgcctgccccttgccgctgcagttctccgggacgtgcgccgagg

SEQ ID NO: 343902 - DNA, 201 bp, Homo sapiens; identical to SEQ ID NO: 72689

SEQ ID NO: 343903 - DNA, 201 bp, Homo sapiens
ttagcgtagccagctgtctcctgtaatggagtgggaacactggaagggggctgtcttctgtgatggaatggggacactggaagaggcactttcttttggcygcctcagctgcactttctgcctcacttcttggatcatggcctctcacacctggctgatgactgagtctgtgtcccccatttgccgatgacaccagcacct

SEQ ID NO: 343904 - DNA, 201 bp, Homo sapiens
ccgtgctttggggcaaagtcctcagagaggccagtgtgggaggcggtaggtaaactagtgctggtggcttgaagctccgggccaggtaaacgggcagatgyggcagggagacacctgccactgctagaagattccaccctggctggctggcatggtcagccttttcccaaggacttgtgggaagaaggcctgcaaagccgc

SEQ ID NO: 343905 - DNA, 201 bp, Homo sapiens; identical to SEQ ID NO: 72686

SEQ ID NO: 343906 - DNA, 201 bp, Homo sapiens; identical to SEQ ID NO: 72687

SEQ ID NO: 343907 - DNA, 201 bp, Homo sapiens
cgtgggggaagggggctgagccctgtggctgggttctgacaactgtaacggttttgtcgagcttaggcccctttggagggagaatcaataaataacaaacmccaactacaaacgccagttggttccttttttaattacatttaaaaaagacaaaggcatggagctgtatggatgacacaccttgaccactgacgaggaaga

SEQ ID NO: 343908 - DNA, 201 bp, Homo sapiens
gatttggaaggtgagtgcgggcaggtagtggtagaggaagagtgtcttctccatcaggaagaacgggaggtagttcactgcccagccaccggcacacagcrccccagccagcacccagcgcagccaggcatctataggaaagggctcgagctacaccgactctgctgctcccacaggccgggtcttctctctcttttgctt

SEQ ID NO: 343909 - DNA, 201 bp, Homo sapiens; identical to SEQ ID NO: 72691

SEQ ID NO: 343910 - DNA, 201 bp, Homo sapiens; identical to SEQ ID NO: 72692

SEQ ID NO: 343911 - DNA, 201 bp, Homo sapiens
cactttctagggtgcagcggctgctcttaatgcaaggaattctcaacaaacaggatgaatctatgactgtcagctgtcagcatcgctcgcttacgctggtyctggggtgcagccagtaggcaatattggtgtccagggtgacccactccagtgggctggagctgtacttgtgttccgagtcatcacttctcagcgccagca

SEQ ID NO: 343912 - DNA, 201 bp, Homo sapiens
gtagctgttgcattcacttatgaatgtgtcagtgtctccattcaaatgtgtgaaatatttagcagcgtttagcaggttttggtgaaatgttagaaagtgawttgaatagataccatcatatacttttgtaaggaagaggaacgtgctccaactgtgacccaggtcactgtatctctaaacactggagacacagcagtgaat

SEQ ID NO: 343913 - DNA, 201 bp, Homo sapiens
aaaaagtaataatgctagcaaagacaaagaatttatgctagttacaggtgataaactaaagctttcctcgtcctcaccttcattctgtggtctcttaaccataaacatcaatgtagcaaagaaaaattgattttgtaattgattttgaaattgtaattaccttgatttccttagtgatggttatttaaaatactgaagcat

SEQ ID NO: 343914 - DNA, 201 bp, Homo sapiens
aattgtaattaccttgatttccttagtgatggttatttaaaatactgaagcattttaagctaaataaaactaattttaaaataaaactaatttttattttwaaaaaaagtggagaaggcccatgtaaattccctgccttttagaacatgcattctgaatattgttttaaagcatttcaacaaaaatgctttgatggaatgc

SEQ ID NO: 343915 - DNA, 201 bp, Homo sapiens
agctgagaaactcgtttaaaacaggcagaagggggctggggcaagggggaccctgtgggaggagaaagagagaagcacagagggaccaggaaggcatgggsgggggtgagggagcagctggtgtttctgttcctccaaatatctgggcttcctgctcccccaaccctggagggtggggtgaggatgaaattagatacaagg

SEQ ID NO: 343916 - DNA, 201 bp, Homo sapiens
gctgagaaactcgtttaaaacaggcagaagggggctggggcaagggggaccctgtgggaggagaaagagagaagcacagagggaccaggaaggcatggggsggggtgagggagcagctggtgtttctgttcctccaaatatctgggcttcctgctcccccaaccctggagggtggggtgaggatgaaattagatacaagga

SEQ ID NO: 343917 - DNA, 201 bp, Homo sapiens
cttgtctcccaaatccatctccttctgcctttcccaactttggttttagacctttgtttcgtctcagaattagccatccttctctaattcatgcgaaattytctctttaatccatgtgaaattcagaaaaaacaatacaggtttttgaaatgagtccttgattcaaattggttcagatctttgttcttccgtgtactggct

SEQ ID NO: 343918 - DNA, 201 bp, Homo sapiens
tatcagtcccctgcttaaaaccctccagtggcgtttcatcatattcagaatgagatccaactcttaccctctcctaacactcccgctcttatgcttcagcggcactgcccttttttctttttctgctaactcatcaaactcatggctgcctccggccttagcacttgctattctctctgcttggaatactcattccccaga

SEQ ID NO: 343919 - DNA, 201 bp, Homo sapiens
aaccaaacaccacatgttctcactcacaggtaggaactgaacaatgagaacacttggacacaggaaggggaacatcacacatgggggcctgtcgtggggtsgggggaggggggaaggatagcattaggagatatacctaatgtaaatgacgagttaatgggtgcagcacaccaacatggcacatatatacatatgtaacaa

SEQ ID NO: 343920 - DNA, 201 bp, Homo sapiens
gcaactagagtcattcttttaaaattgcggacctgatccttccatctcccagctgaacgcttttcatttgcttcctgttctcatgagtatgccaaaatgtattaattctgggctaggaggccctgaggaatttggtccttccctcctcccccctcgttttctgtgcttcgccctcactggcttgcctttcttttccttaaa

SEQ ID NO: 343921 - DNA, 201 bp, Homo sapiens
caactagagtcattcttttaaaattgcggacctgatccttccatctcccagctgaacgcttttcatttgcttcctgttctcatgagtatgccaaaatgtattaattctgggctaggaggccctgaggaatttggtccttccctcctcccccctcgttttctgtgcttcgccctcactggcttgcctttcttttccttaaat

SEQ ID NO: 343922 - DNA, 201 bp, Homo sapiens
aactagagtcattcttttaaaattgcggacctgatccttccatctcccagctgaacgcttttcatttgcttcctgttctcatgagtatgccaaaatgtattaattctgggctaggaggccctgaggaatttggtccttccctcctcccccctcgttttctgtgcttcgccctcactggcttgcctttcttttccttaaata

SEQ ID NO: 343923 - DNA, 201 bp, Homo sapiens
actagagtcattcttttaaaattgcggacctgatccttccatctcccagctgaacgcttttcatttgcttcctgttctcatgagtatgccaaaatgtattaattctgggctaggaggccctgaggaatttggtccttccctcctcccccctcgttttctgtgcttcgccctcactggcttgcctttcttttccttaaatac

SEQ ID NO: 343924 - DNA, 201 bp, Homo sapiens
  misc_feature (1)...(201): n = A,T,C or G
acagaaccatttgctatattatttctttggtgtttacagaagcagatcatgtttatgaagcatgtccagaagaaggaaatgatatatggaaaatctctacntggggtatagagtcaagtgatccctaggttacagttgagagctataaataggccagtgacttcatgtgtaccatgggactggtattttccatctttcggc

SEQ ID NO: 343925 - DNA, 201 bp, Homo sapiens
aaatctctacatggggtatagagtcaagtgatccctaggttacagttgagagctataaataggccagtgacttcatgtgtaccatgggactggtattttcyatctttcggcccacagtttggataaacttagatggattttttaatagttctttgaaaatggaacattagctatccacagagatttaacttgggacaaaaa

SEQ ID NO: 343926 - DNA, 201 bp, Homo sapiens
ttatgcatgtgtatctttgtctgtttaatgtctctttcccccactagactagaaactcccatgagagcaagaaccacgtctctttttcggcttatgcttcscacaatgcctaaaataatgcctggctcatactaagtgctcagatctttgctggcagaatgaacagcctctgactgaatggggttctgagggaacctcttc

SEQ ID NO: 343927 - DNA, 201 bp, Homo sapiens
tgactcatattttttggtacttcccagataattttacagtgagcatgcataaccagaagaaaagttttttaaaaggctatgtagcctgggcacggtggcamatgcctataatctcagttactcgagaggctgagatgggaggactgcttgaactgaagagtttgaggctgcagtgagccatgatcacaccactgcattcca

SEQ ID NO: 343928 - DNA, 201 bp, Homo sapiens
tccatccacacattatgtgtgtgtgcattaggctagctctcctgctttttcctgtaactcaacatgaaattaaaaaggattggtgagttgaaaaggcagckaattgttccatcatccttagtgagacatttagttcagattttatgtatctagttattctgcatggctttttaaaggccattcaccttcacactgtagagt

SEQ ID NO: 343929 - DNA, 201 bp, Homo sapiens
tcatatgcattggctgtgataatgattatttataggacagagagcacatgcagtccagggtcacctaaacgcctaactggtccagaatgcaagtgcgttgrctgagggctgtgagggcacagcagacgaagcattgcattcttcaaggaagtcctcagggggaggcatttgagattggcacagccctggagaggctagctc

SEQ ID NO: 343930 - DNA, 201 bp, Homo sapiens
tgtcccagctcaatagccagaaaatagtaatgtgatgatacctacctaaaagagaaccaggcaaaatacccagttgaaatccattactatatcacaaggtytccgaacctcagcactattgacatttgggctagataattgtttgttgaggggggctgttctgtgcattgtaggatgtttagcacatccctggcctctgtc

SEQ ID NO: 343931 - DNA, 201 bp, Homo sapiens
aggatttggtcacacatttccttttaagatgttagcagatactttcttttgaaagagaataaattatagatgatcttcttcttctttcttggaaaggagcmcataatttctcagttctgtggaagactgttaataacctttcagcatgaaagatctacattttgtccaccgctaaggactgacttcagtcataatgcactt

SEQ ID NO: 343932 - DNA, 201 bp, Homo sapiens
ttggtggtggtggttttgtttgttttattctgtgatcatctcttgcagcagtcattttatgaaggccaggcaggatgccttgggacggggaaagagaagarggtaaagagtggggagaaggttacatctcctttcgagaaaacctgagttggtttccctttggtgcaaaggcaataatatcttgcatattttcccaccctc

SEQ ID NO: 343933 - DNA, 201 bp, Homo sapiens
caaaaccaacctagtttctgttccttttaacaatcttctctttctactcctcctctttatatacagacaagtagtgtttttatgtttggaagaatgataakaaagaatatagtgatcttaaatattattaatggatctgcaatttacattggggattgatgtatgtttccttctgataaagaatttaaatattaattagtt

SEQ ID NO: 343934 - DNA, 201 bp, Homo sapiens
gtgctttccttgcttcgtagacagacttaagacatgcagtggattcgacatgtttcatagtgggcttttaatttaatatacactttttttctttctttttyaaaccatgcccatcattgtgctctctggatcacttgatcatatgtttggtaataaagtaaggaaacaaaacagcaacaacaattaaaaagcaatgcaacg

SEQ ID NO: 343935 - DNA, 201 bp, Homo sapiens
aacataatgacttccggtttccaccatgttgctacaaatgacaggatctcgttcttttctgtagctgaataatattcctctgtgtgtgtgtgtgtgtgtgwgagagagagagagagagacgttttctttgtgcattcatccactgatggacacttacattgattctatgtgttgactattgtgaataaatgctgtagtaaa

SEQ ID NO: 343936 - DNA, 201 bp, Homo sapiens
gtagtaaacaggggagtgcagatatctctttgatatactgattttctttcttttggatatatacctaacagtgggattgctggatcaaatggtagtcctatttttttttttcttttgaggaacttacatcgttttccgtaatggctgtacatctttacattcccaccaatagtatacaaatattgccctttctctacatcc

SEQ ID NO: 343937 - DNA, 201 bp, Homo sapiens
tgagaaaaccaaggccattttctcaagtccctattactgtctattttttttccttttgaatttaggcccttttggtttttttattattattattataaactttttttattattaacttgaagaccatttcccagctaactttagcaacttgctttattttactagtgctgctacttctgttttgaatcaaatgataggtaa

SEQ ID NO: 343938 - DNA, 201 bp, Homo sapiens
aatatgttcaatcatcatttaaaaattatctttcttagctctaaagtaataattgcaagaaatgcattagggtactggtatatgggggttgcatagggagaaagaaggaattttgaagaaaggtttaacaagaatttaaaatatttagatgaatggagatatttatatccaaatatattcatgttcttataatatccttct

SEQ ID NO: 343939 - DNA, 201 bp, Homo sapiens
gaaaataattttataacagaataaggttaagcagataatgtcaaataattgggtcttgtgtatgtacacccaaacgcacatgagcgcgcacacacacacayatacacacacgcacccactcactcacccttgtggacctttttctgcgttcctggagccatatttagctttcctgccactttagattttcttctatttttc

SEQ ID NO: 343940 - DNA, 201 bp, Homo sapiens
ttctttcttggaaagagtgggcattacaattgattctggcacagtgggcaggcatccatgaaaagctcataatccgttgctggtgatgtggaggtgggttggggggggggcggcgcggtgggagatgatgatgatgatgacgacgacgatgatgtggttggaacctgtaccaattttgatgctttgcacatccattgaatt

SEQ ID NO: 343941 - DNA, 201 bp, Homo sapiens
tatttgcggtgagattttattccatttacaacacagtgccatttagaaattcattcaacaagcatttattcagcatttactgtggcacatgtgtttttttkttgtttgtttgtttgtttgtttgtttgtttttgagacagagtctcgctctgtcgcccaggttggagtgcagtggcgcgatctcggttcactgcaagctcc

SEQ ID NO: 343942 - DNA, 201 bp, Homo sapiens
atgactgagtgttcgtcagcctagaaagaggtttctagtggcaggtatttagggttttcttggccccaaactgaagcaggatccttagaacttggatagaratctgaaaaattcatatgtatgtggctgatgatgtaaacctatagaataaatcttcataatatgaactatgaaaataggccaacaccaactaggtacatt

SEQ ID NO: 343943 - DNA, 201 bp, Homo sapiens
aagaaagaatagataaagaatatatagttcaaattatctgctaaattttttgtgctgttagtaattaatactccaaaatgtgataaagatcactgtgccckttttgttttgttttgttttgttttgttttgttttagcattggaaaagccttgggctatacattctgagatttcaaacaaagtagatttatagtggaaagg

SEQ ID NO: 343944 - DNA, 201 bp, Homo sapiens
gctgcctgctcccactctgtgttgccagctccttctgttcctttaggattccttaatgttccttccttagtaaagacttctttgttcaaaccccacctaartagatctcccctaattttctgttttctgttaccgcaattccctttatttccctcacagtacatcttatattataaatgataacgtttccaaataaattat

SEQ ID NO: 343945 - DNA, 201 bp, Homo sapiens
tgaatataatataccacttgaaagaagtacatttggtcaggctggacggaatctcatcaaagagataagggaaagtccggaagacacacctgagtatggtytgaagccaaagaacagcatgctccaaaacaagcccaatctcaggttaagaagccttcatcatttagagtggccaccacacggactctccttgttttgtct

SEQ ID NO: 343946 - DNA, 201 bp, Homo sapiens
tgcaacctccacctcccaggtttaagcaattctcctgccgcagcctccctagtagctgggactacaggcgtgtgccaccatgcccggctaattttgtttctttttttttttttttttttttttttttgagatggagtctcacaccgtcaccgaggctggagtgcagtggcgtgatctcagctcactgcaagctccacctcc

SEQ ID NO: 343947 - DNA, 201 bp, Homo sapiens
cctgagctgcatcttggaggacaaagagcactcagcctgagagtgaaggggatgtgccaggcattgaagtgtgtgcaaaggtaagatgcaaagagaaccaygcattctgagagctgacagtcatcccatgtggctgcagttgtgttggggtgagctgggaggagatatgagagtcgtgagaggtcatacgctgtgccaaaa

SEQ ID NO: 343948 - DNA, 201 bp, Homo sapiens
tccctagtagctgggactacaggcgtgtgccaccatgcccggctaattttgtttctttttttttttttttttttttttttttgagatggagtctcacaccstcaccgaggctggagtgcagtggcgtgatctcagctcactgcaagctccacctcctgggttcacgccattctcctgcctcagcctcctgagtagctggga

SEQ ID NO: 343949 - DNA, 201 bp, Homo sapiens
acctttgctttctcctgctttttgttgttgttgttgttactgttgtttttgttgccaaacccacattaaaaaaaataccacgcctctttgtaagggctctrgaagaactataatacttcctatcttcccagcaaaactgtttaccaggctgacgttttcctaagaatagctccctaggttttcatgaatccatataaattt

SEQ ID NO: 343950 - DNA, 201 bp, Homo sapiens
ttccagctggagttataaaggcacactggctttccagttcaattaggctcagagttagcaattgaatgacagtttgcagggctgcagtagctttttttctytttttttttctgttaggtcctagctttacagtgaatcttggcttgcaggctagcttgatttctactttctttttttctttttttcttttttcttttcttt

SEQ ID NO: 343951 - DNA, 201 bp, Homo sapiens
tttcggtaactatagagttttaaaaagctcctctaccaccttttcaattaagacatgccctctgggttgaggcttactgatgtagaacaagttttataggaaaaaattatgtaaattaatataattggctaaccttttgattgcatttacaaattgaaaaatgcggtgcaatattgattagacaatcttctcattgttttt

SEQ ID NO: 343952 - DNA, 201 bp, Homo sapiens
tgtgtgtgtgtgtgtgtgtgtacagaggttcacctggggacagagctgaaatgtcactccagggtctgtagtctctgagctcctctgccaaagcaccagcrctgagagggaggaacttcaccacagttaggttggccaagatgaacaacactgacaagtcccgtgaggtctctgatccctgagcggtcaaaccttatttca

SEQ ID NO: 343953 - DNA, 201 bp, Homo sapiens
tgttatgcaaccactacctctatgcagttccaaaacatctgcatcaccccaaaaggaaactcagtgcagtcagcccttggtatctgcgggagattgattcyaggacctgtggataccaaaatatactcaagtcccttatctaaaatgacacagtatttgcttttgtttctctttttgagacaggctcttcctttattgccc

SEQ ID NO: 343954 - DNA, 201 bp, Homo sapiens
agtgacagcaactgctccttctttagtgaccactcatttctttctttttttttttctttagagacagggtctctctccgtcacccaggctggaatgcagcrgtgtgatcatagctcactatagcctcaaactcctgggcttaagcaatcctcccaccttagcctcctgagtagctgggaccacaggcacatgccaccacac

SEQ ID NO: 343955 - DNA, 201 bp, Homo sapiens
ctggcctcaagcaatcctcccacctcagcctcctgtgtagctgggaaaataggtgcaagacattgaacctggctaattttttattttttatagagatgagktctcactgtttttcccaggctggtctcatactactggcctaaagcaatcatcccatcctggcgtcccaaagtgctgtgattacgggtgtgagccacaatg

SEQ ID NO: 343956 - DNA, 201 bp, Homo sapiens
ccgtcacccaggctggaatgcagcggtgtgatcatagctcactatagcctcaaactcctgggcttaagcaatcctcccaccttagcctcctgagtagctgsgaccacaggcacatgccaccacacccagctaattattttattttattttttatttttgtagagacagggtctcactatgtggccaaggctgttcttgaac

SEQ ID NO: 343957 - DNA, 201 bp, Homo sapiens
acctgcaccatacatcaaagttatcagactgaggctgaatgaaatccaccagtccaccttaaagacagctatcctgggaatgtgggcaacgtcccacttgmccactgctatagcttatagcaccttacactcacctcttcctacagattatttttgagtaacagcgtgaccatgttgtgcatttagccaagcaaacctttc

SEQ ID NO: 343958 - DNA, 201 bp, Homo sapiens; identical to SEQ ID NO: 72704

SEQ ID NO: 343959 - DNA, 201 bp, Homo sapiens; identical to SEQ ID NO: 72705

SEQ ID NO: 343960 - DNA, 201 bp, Homo sapiens
cggttgaagccttgtagtccctggtccttggaagagagtaacttcacctctaatgctgagtccaaatatattttttaagtacaaaggtaggaaatttggayctgagcgtgcctaagtttcctttcggcaatgcagttccatagcactgtgattttcttctgttcacactgctatgtcctgattctgcagcactagcacgtg

SEQ ID NO: 343961 - DNA, 201 bp, Homo sapiens
ttcaaggatggcgaaagtcctgccttctgcctcaaggcttctcggttgaagccttgtagtccctggtccttggaagagagtaacttcacctctaatgctgmgtccaaatatattttttaagtacaaaggtaggaaatttggacctgagcgtgcctaagtttcctttcggcaatgcagttccatagcactgtgattttcttc

SEQ ID NO: 343962 - DNA, 201 bp, Homo sapiens
ccaattgtacacatccttcaaggatggcgaaagtcctgccttctgcctcaaggcttctcggttgaagccttgtagtccctggtccttggaagagagtaacktcacctctaatgctgagtccaaatatattttttaagtacaaaggtaggaaatttggacctgagcgtgcctaagtttcctttcggcaatgcagttccatag

SEQ ID NO: 343963 - DNA, 201 bp, Homo sapiens
tagtgtgggatgctttaatgaggcatctggaggccggcaggaggcctggcactccatgtgctgccaacaccccagaattcaaccaacagtctaccagatcwggaacaaaatagctgtcttcatcccaattgtacacatccttcaaggatggcgaaagtcctgccttctgcctcaaggcttctcggttgaagccttgtagtc

SEQ ID NO: 343964 - DNA, 201 bp, Homo sapiens
gggactacaggtgtgcaccaccacacccagctaatttttgtatttttagtagagacggggtttcaccatgttggccaggatggtcttgatctcttgacctygtgatccgccggcctcagcctcccaaagtcctgggattacaggcatgagccaccgcgcctgggctaaacccaaactctttaaactcaagtgaccatgtct

SEQ ID NO: 343965 - DNA, 201 bp, Homo sapiens
cccccaggagacattagacagtgctgtcagaactgaggggagtaggtgctactggtaggaggccagggacactgcccccccaccccccgacaacaaatactcatcagccccaagtgtcaatagtgctaagttgagaagccctgagttagagaaataggcagcagcctagacaaaggttgtggactagaggagaaagaagaa

SEQ ID NO: 343966 - DNA, 201 bp, Homo sapiens
acctccacctcctgagttccagtgattcttctgcctcagcctcctgagtagctgggactacaggtgtgcaccaccacacccagctaatttttgtatttttmgtagagacggggtttcaccatgttggccaggatggtcttgatctcttgacctcgtgatccgccggcctcagcctcccaaagtcctgggattacaggcatg

SEQ ID NO: 343967 - DNA, 201 bp, Homo sapiens
tttttaaaaattaagcagcaaggaggtgagctgcatcatttacagagggaacattttttaaataattccgttacacttagaagcatgtgtaatcatatcaygttaccatgcaccccccgccctgtcagatcacccctccaaacacttgtgcttctgtctccttcctcactaagtactaaagcaggtgattgcaagtctgcc

SEQ ID NO: 343968 - DNA, 201 bp, Homo sapiens
ttcttgtgatttatttatacaagtaaatttgcagaagaaaaatttaaaaatacctgctctaagaaataaaatatattaattaagtttttaaaggatagctrcagtggccgggcgcagtggctcatgcctgtaatccttacactttgggaggcctaggtgggtggatcacttgaggtcaggagttcgaaaccagcctggcca

SEQ ID NO: 343969 - DNA, 201 bp, Homo sapiens
gggattacaggcacccgccaccactcctggctagttattgtatttttagtagaggcggagtttcaccatgttggccaggctggtctcgaactcctgacctyaagtgatccaccctgctcagcctcccaaagtgcagggattacaggtgtgagccaccgcacccagccaatgggcttacgttaatgtctacctatagtattt

SEQ ID NO: 343970 - DNA, 201 bp, Homo sapiens
gatctcagctcactgcaagctccacctcctgggttcacgccattctcctgcctcagcctcctgagtagctgggactccaggcgccagccaccacgccttgytaattttttatatttttagtagagacggggtttcaccatgttagccaggatggtcttgatctcctgaccttgtgatctgcccgcctcggcctcgcaaagt

SEQ ID NO: 343971 - DNA, 201 bp, Homo sapiens
caattgtgaaattgcaatgaaatataaagcattgagggtttggtattgctcctggttttaaaatgggtgtgtatgtctttcagtggaagttcaggcaaggrttggaattgtaagtactaggggtccagagattataattatcttgaattggaactaaagttcagacaggactgcagaaagttcattcagtttgtaagagaa

SEQ ID NO: 343972 - DNA, 201 bp, Homo sapiens
tttgctaagtgtaccctgcccaagaatttatttagtcaagcaggttttcaataattagtataggtaattctatgattaatgtctccagtaggatatttaaytcagcaatgttttttaggttgtaaaaactaaaaatcaaattctatggtaggagaaataaggaaagacacagaaaacctaaggggaccagaaatttttttt

SEQ ID NO: 343973 - DNA, 201 bp, Homo sapiens
gaaggttgtttcaaaaagcagtggaattctgtggcaaaaggaaatctaaccttcatggattaaagacacctttttaaaaagcctgtgcctagaaagtgaattttttttttttttttgctttccgtcatattaaataaaaacgacaaattttctgttgtagctttaccatctctcagtgtctgatttagtttgaggaagcta

SEQ ID NO: 343974 - DNA, 201 bp, Homo sapiens
tttgtaagcactaatatatttagggccttgcatttttgttgcagatgcttttccattcttaaattagacttttacttttccttactttgtgtttttttttkttttttttttgacccaagcttttatatagtcaaatttgttaatagttcccttaaggcttttatctttgctcttattttgtaattttgtgctagtaatgcc

SEQ ID NO: 343975 - DNA, 201 bp, Homo sapiens
catggggtatagagtcaagtgatccctaggttacagttgagagctataaataggccagtgacttcatgtgtaccatgggactggtattttccatctttcgkcccacagtttggataaacttagatggattttttaatagttctttgaaaatggaacattagctatccacagagatttaacttgggacaaaaaaagggaata

SEQ ID NO: 343976 - DNA, 201 bp, Homo sapiens
ctttcggcccacagtttggataaacttagatggattttttaatagttctttgaaaatggaacattagctatccacagagatttaacttgggacaaaaaaarggaataaaagtcatcatttctgatgacaggattagacagaccttttttcttgaaagtaattgaatattctgtgtgttttttgcagtttctgttgaattga

SEQ ID NO: 343977 - DNA, 201 bp, Homo sapiens
gagtctggtggccagatccaatgggggagatccagtgggggagatccaatgggggagatctaatgggggagagccaaaggtgtttgttggtagctctgacrccaacttttatgacctgggcaacaaccaaaacaatttaataacgctctctcagagttcaagagaaaaggactaaacagaaataagcagcagcccagcctc

SEQ ID NO: 343978 - DNA, 201 bp, Homo sapiens
caaaggcaagtggattatcattcagagacactcactgtggactaggtcctatcaaaaaataaacttctcttgaatcaagacattgaattttaggggtgtgttttttttataggacttggtatttgaggattgatttattacagcatttagcattaacaggaactcaattgtagaaagttttgaaggccaagcaaagaattt

SEQ ID NO: 343979 - DNA, 201 bp, Homo sapiens
cataatcatattccaagttcaggtgccagcctgccatgtagaacttggggaaggaggtggtctaagaccagttgaatgatcaccccactctatgaaagggmctggctggcccactgtgagatatggaagaggaaatttggaaagagttgttgatatgtcatgagtaacccacataagggagaggcttgggagagggtctgc

SEQ ID NO: 343980 - DNA, 201 bp, Homo sapiens
tttttattattattattattattattaagctggactgtacataccagatgtctagatgagaccatttttacagatctatgactgggaataaacagaaaacttttttttttttttttttttgagacagggtttcattctgtcatccaagctgaaatgcagtggcacaatcacagctcgctacaacctttacctcctaggctc

SEQ ID NO: 343981 - DNA, 201 bp, Homo sapiens
ctcatagctttagatattccatcaagttgtagtatttatattatcagatgaaagagctacttgtggagacggttgtcacccctttcttcaaactctctttycttggtttcagtgaagccatatttccctgattttcttctactgtgttagtcactcctacgtctcctccaaagcttttcctccttccatctattttctaaa

SEQ ID NO: 343982 - DNA, 201 bp, Homo sapiens
atactcatagaaatgtcttagctaattctagacacatgggatagatctttagtttgagaattcctcaaagaggcttgtaagcttgaggaacccaagtgagwctccctctgataaggcaggtgacacagtttgggagcagatagccatcacccatgcccttacaaaacacttctgctttattaccaatacatcatttgtgaa

SEQ ID NO: 343983 - DNA, 201 bp, Homo sapiens
ggcgtgcagaaaaccgaagtgaggcacagaaactactggcttggtcagagctcggcgtttgccttatttgaacacggtccgaacagttggctacatctgaytggccaagactcagtggttggcacaaatgtaaactatggttggtttacacttccgcttgttgtatagttatcgatgtacagaaaaacctttaggccaaac

SEQ ID NO: 343984 - DNA, 201 bp, Homo sapiens
agtctgcttttctgtctccttagatttgtctgttcttagacattttgcataaatgaaattatgtaatatgtggtcctctatgactggcgtctttcacttgscataatgttttcaaggtttcctcatgttgttgcatatatcagagctttattctttttattactgcataatattccattttatgaattatttgtccattca

SEQ ID NO: 343985 - DNA, 201 bp, Homo sapiens
accactctgccccttgctgtttctgagccacacttgcaactgccagcttcacaccctctgtgcagcactctcgttgccccctttggaatgttctcagcatyggtcgaccacgcttcaggtcaattctaaggttacttttgaaaggaggccttggccacccatccccagtctaggacaggaccagtggttccctctccagga

SEQ ID NO: 343986 - DNA, 201 bp, Homo sapiens
aaaattaaaccacacactcttaaactagcaatgagttaaagaagaaattacaaggaaattagaaaaacctcaagatgaatgaaaaggaaaacaaacatacsaaaaatttatgggatgctgtgaaggcagtgctctgaggaaaatttatagctataaactcttacctttaaaaaaaaaaaaaaaaaaaggaggccgggcgcg

SEQ ID NO: 343987 - DNA, 201 bp, Homo sapiens
aggacattctctaggatggatcatatgttaggccacaaaacaagtctcagtacattttaaatgactgaaatcatacaaagtatcttttctgatcacaatgraatgaatcaataaacagtgaaaactgaaaacttctcaagtatttgaaaattaaaccacacactcttaaactagcaatgagttaaagaagaaattacaagg

SEQ ID NO: 343988 - DNA, 201 bp, Homo sapiens
ttcctgttttctatctctgggccacctttggttaagaatgttggctaacagagaaccaattgcatagatctctcttctgacttgagatgaacattaagagstgaccctgtgatcctgggtttttgtcttttcaggacactgtttctgttcatagaccaagcttttatgcagacagatttcttaagttcatgaattccagag

SEQ ID NO: 343989 - DNA, 201 bp, Homo sapiens
tttgctgactctcctctgctcagtttggtcttgagtgtctagaatctttgttccgattgagtctgtgccctcctccctcagccccagactcctgggccccrcgggctacaggacattcctgttttctatctctgggccacctttggttaagaatgttggctaacagagaaccaattgcatagatctctcttctgacttgag

SEQ ID NO: 343990 - DNA, 201 bp, Homo sapiens
cagaacttctgagaatgtctttcctccttccttttatgtgtacatggaaaatacacatgattataacttcaaaaaaaatttttagagacgatgtctcgctktgtctttcaggtgaaattcatataacataaaattagccatttaaaaatgaacaattcagtgttcatttttagtacagtttagtacatttacaatgttatg

SEQ ID NO: 343991 - DNA, 201 bp, Homo sapiens
ggaaggagacctttgtaccccacatcacctaagagacctagctaattactctttcacctttagtttatcccttcccccctttactacatgccacttcatcraaggaatgaaacttaacaagtgcgttttagcttaacatctacagtatattgtttagtttactgtttgacttgaaaatattctgaggggttaaagtactgt

SEQ ID NO: 343992 - DNA, 201 bp, Homo sapiens
tccaatgttatcattttctctagaggaaggagacctttgtaccccacatcacctaagagacctagctaattactctttcacctttagtttatcccttcccmcctttactacatgccacttcatcgaaggaatgaaacttaacaagtgcgttttagcttaacatctacagtatattgtttagtttactgtttgacttgaaaa

SEQ ID NO: 343993 - DNA, 201 bp, Homo sapiens
ttctgtggtgacaacagttaggacttttaacatagaaattttaggggaacacagtttagcccgtaacagctacttgggtgtttttgtaaaggaaaatgccrccgaggaaagtgctgagatggaaaaggcttgatgggggcacaacttttttttttttttttctttttttgatggaatcttcctctgtcacccaggctggag

SEQ ID NO: 343994 - DNA, 201 bp, Homo sapiens
aggcagggcaaagactttttaccatgtaaacacagaaggaacatgaggctcacagattcagagatttatcaaggtaacaagtgctggtattagaatcacasttaggttttctgtcataaccaggtgcctgctctgtacttatataaggtggttttttaaatggcagagttcttctgcatttattgtggtctgcatagtctc

SEQ ID NO: 343995 - DNA, 201 bp, Homo sapiens
cacttgagctcaggagtttgagacaagcctgggcaacatagtgtgagaccccatctctacaaaaaaatttaaaaaattagccaggtgtggtggcgtgcacyggtaatcccagctactcaggaggctgaggtgggaggatcgcttgagcccaggtggtggaggttgcagtgagccgagatcatgccacttcactccagcctg

SEQ ID NO: 343996 - DNA, 201 bp, Homo sapiens
aggtcacctttatgtccccagtttgtacaaaggacacagccagtctttgttgacacgacttgttgactggcccattctcacttttcaggtctcagcctacrgatcattcctcagagagacctctgagactccatcattcttgagtgggtctccgcccttctgacctcaattatttcacgctgttctttctgtcactgactt

SEQ ID NO: 343997 - DNA, 201 bp, Homo sapiens
agcatacacctgaagtcacagctacttgggaggctgaggtgggaggatggcttgagcccaggagtttgaggttacaatgagctgtgatcataccactgcastccagcatatgttgtagaaccggggtggttactgaagaggaatgaaggagaaataataaataaatggggaggctggtcagcatctcccttcccatacacc

SEQ ID NO: 343998 - DNA, 201 bp, Homo sapiens
accatttattatatggtgctgacccctaacaacacaagccagctccatcctctggtactcagcaaaaaaaaaaaaaaaaaaaaaaaaaaaacagtcatctrtaatcgtgcaggaggaaaaactagttgcgttggttatattgaatagatacttcctaaatagttttcaagggtgacctgtgactatgctgaatttctgcct

SEQ ID NO: 343999 - DNA, 201 bp, Homo sapiens
atctctgatttagaattagactctcaaaatctatggttttgggaaaatagatcttctcagaaacagagaaagcattggacctcatccctggtaaaaatgcmcacaagcaaaaattttcacatgtagtttttaggggttcataaggtcagcttgctcaaaggatagagtatttggtttttaaaatatatatcaggcgtggga

SEQ ID NO: 344000 - DNA, 201 bp, Homo sapiens
attaaaaattctattactacgttcatttaggaagagaagaagtaatcattaaataagtatcaccacaagtgacaggatttttcaaatgaaaaataaaaatmaagaaaataaaaataaagatattcaatttggggacttgtctttggagctgtgagaattgattttaacatttctcttaaaaataagtcatgttattaccag

SEQ ID NO: 344001 - DNA, 201 bp, Homo sapiens
tagtatttctaaatgccattttacccacttttatataattacttgcccatttaaccacacttagaaaattaagaaaaaatatatctactctttcattctckaacacagataaaatcattgttcatgttctggagtattagcttccttttttctgagcagatatatctaagaatgcctaaaacagtgtgtgtacatacattt

SEQ ID NO: 344002 - DNA, 201 bp, Homo sapiens
ttaaaaattctattactacgttcatttaggaagagaagaagtaatcattaaataagtatcaccacaagtgacaggatttttcaaatgaaaaataaaaatamagaaaataaaaataaagatattcaatttggggacttgtctttggagctgtgagaattgattttaacatttctcttaaaaataagtcatgttattaccagg

SEQ ID NO: 344003 - DNA, 201 bp, Homo sapiens
ttgtaattatactgtttacttttgaaaactgcctattgttcacttcactgtatttcaggaagcattttataataagcaaactgcaacccttttttaatgtktgtggaaggaggtgtgggaagtaatggcgttgactctcagccacttctggctggtctctgtcttcgagggattcctgagcctccaccgaagcaccatggg

SEQ ID NO: 344004 - DNA, 201 bp, Homo sapiens
tgtttgcatccagtgtctgaattttctctctgaagaaatggaagatcttgggatggatcttttggtaagatttagatgttgcgtagctcctaacaaggctktataaatagaagtacttaaagcctttaggacatggatactctcagaaagtgtttttagtttatctgatttctatacatgtttttgggctgactaaatgtt

SEQ ID NO: 344005 - DNA, 201 bp, Homo sapiens
tattcattcaagcaaccttactaaaaacaccccatgaaaataaaagtctatatcttcccttcaaaaaaaaatggcaatacaatatttaacatttgatgcatttttttttcttgttatttttaaatgaaaaagaattattgtcccggtttggctctacaccctcggactccggctcccacgccaccctggcaggtgccggcc

SEQ ID NO: 344006 - DNA, 201 bp, Homo sapiens
acggggtttcaccatgttggccaggctggtctcgatctcttgaccttgtgatccacccgcttcggcctcccaacgtgctgggattacaggcgtgagccacygtgcccggcaatacttagactctttaaaggatcatttaactagtatatttattaggaggcagtagaatgtattgtggtgattaagagcttgaatttgggc

SEQ ID NO: 344007 - DNA, 201 bp, Homo sapiens
cacctagaaagcaacttaagaaaagaaagacacctgaaattcatgcttgctagttctgtgaccctgagcaagccacaatctttctattctcagtttctggrcctaaaaaagggccttcctcttcctcatacatgtggatggtttgagatatgcaatgtgaatgttggattccagactctaaagccctccacaaatgttatt

SEQ ID NO: 344008 - DNA, 201 bp, Homo sapiens
caaaacagaaagccagttctgtgtggcccaaggctctgctatatatgtgtttgcatccagtgtctgaattttctctctgaagaaatggaagatcttgggayggatcttttggtaagatttagatgttgcgtagctcctaacaaggctttataaatagaagtacttaaagcctttaggacatggatactctcagaaagtgtt

SEQ ID NO: 344009 - DNA, 201 bp, Homo sapiens
ggctgctgcctgagtgtaatcctagcctttcaagataaccatttattatatggtgctgacccctaacaacacaagccagctccatcctctggtactcagcaaaaaaaaaaaaaaaaaaaaaaaaaaaacagtcatctgtaatcgtgcaggaggaaaaactagttgcgttggttatattgaatagatacttcctaaatagtt

SEQ ID NO: 344010 - DNA, 201 bp, Homo sapiens
atccctaccagtaagataaagggagcaaaacagaaagccagttctgtgtggcccaaggctctgctatatatgtgtttgcatccagtgtctgaattttctcyctgaagaaatggaagatcttgggatggatcttttggtaagatttagatgttgcgtagctcctaacaaggctttataaatagaagtacttaaagcctttag

SEQ ID NO: 344011 - DNA, 201 bp, Homo sapiens
gctataggaattcttttttgttgctgtttcctcctccctcagctagatacaagattaggtaggcaggaggttaggcggccagtctaggtccagaaaagtaratcaagtgggtagcaaggtgagccgcaaatcttagctgggcctgagtttgcactgttctgctctaagggccaacaaataaggctctattaaaaattattt

SEQ ID NO: 344012 - DNA, 201 bp, Homo sapiens
agagtctctgcttatctgaaaaacagttctttgacctcactacctgtggccattccttcctgctactgtgtccttgatcagccagctccccaccctttgcytagaaagcattcccaatccctaccagtaagataaagggagcaaaacagaaagccagttctgtgtggcccaaggctctgctatatatgtgtttgcatccag

SEQ ID NO: 344013 - DNA, 201 bp, Homo sapiens
aaggcaacacatttatataaccaaaaataccagacacaaaattaatataagcaccttgaatatttctggaatgaaataaagtgagagcagtggttttctcaaatgttgagaattgggggaagaatcaaggatagcagagacacttttcattgactacatgccgttttgtaaactattttaatttcttatctactttaaaag

SEQ ID NO: 344014 - DNA, 201 bp, Homo sapiens
accaccaccctataaagtagagtttgttacctccactttatagatgaaacaacaaggttccaagaagatgttgcataatattctacagatgaaataattargaaatcaggccgggtgaggtggctcacgcctgtaatcccagcactttgggaggccaaggtgggcggatcactaggtcaggagttcaagaccatcctggct

SEQ ID NO: 344015 - DNA, 201 bp, Homo sapiens
gagagatgttggaggatgacagaataatgcaataaattcatagctgattctattcatatgccataacataggtaatgactgagtgttcgtcagcctagaargaggtttctagtggcaggtatttagggttttcttggccccaaactgaagcaggatccttagaacttggatagaaatctgaaaaattcatatgtatgtggc

SEQ ID NO: 344016 - DNA, 201 bp, Homo sapiens
aggaatgaagcttgccaattagggcagacaccattccatgcaaacttagctggagtgattgtccaaagtggggaggaattcccccaggctgcaatgctttaaaaaaaaaaaaaaaaaaaaactaagggaagattttttctaacatggtgaaaagagataaaaatttttttagagaaaagaaaaatgcagtgctaataactt

SEQ ID NO: 344017 - DNA, 201 bp, Homo sapiens
ttataataagcaaactgcaacccttttttaatgtgtgtggaaggaggtgtgggaagtaatggcgttgactctcagccacttctggctggtctctgtcttcragggattcctgagcctccaccgaagcaccatgggtggggctgctgtgaactagtcacgagctagatttgcttgctagccactcctgaaattcttactgtg

SEQ ID NO: 344018 - DNA, 201 bp, Homo sapiens
aaaattaaaagggtgttactaaaagggatttggatgacaatgaaagaaaatccaggtaatttgaatgcatttacctctctggggcacactggattgtatcycagggttagcagggttgaaggagttagcaggcatcatctttgagccattgctggtgattgttgagtgaacttggagagtggcagaggttccagaagacca

SEQ ID NO: 344019 - DNA, 201 bp, Homo sapiens
tctcctacatgacaatttataatgcaaacatgatgcatcatttcattttgtgtaaactttatagaaggaatagtcttttccacatatgtcaaaagacttcyggaagcattttagaactgaatgctaagtatcctacacatgtgcctggaagctttagaaatgatcagcagcagcactttctgaccttacatttttgtttgt

SEQ ID NO: 344020 - DNA, 201 bp, Homo sapiens
cagattacagtctttcttctgtctcttgctttttgcacctttaaaagtctagaccaatttaataaccccacgccccatggtctctttgctactcagctgawtttttgatcccaactcttacctctttgaacaaactctatacttgcagctgtgcagtcaccttttaaaaattcagtccacctcccttcccaaatactgttt

SEQ ID NO: 344021 - DNA, 201 bp, Homo sapiens
ccactctgcctccctagaagtgatttctcaggcacacattctctttggtcctcttgctcctgtgactctttgggaactttccctagaggcttctgtttcayttgttctctgcttatctctccaagcagattcgagtcctgacagcagggatcatatctttgcctgctttgtctcccccaaccaaaacctaacagctctttc

SEQ ID NO: 344022 - DNA, 201 bp, Homo sapiens
aattgagttattctgttatttctcctattatgttggttaaaactatatatgtgtatactcatacacacacacatacacacacacacgcacacacacacgtrtacagtagttattctccaagttaacattacatcagcttaattattggatgatattagaaaagtagtaaatgggaaatattggtgtccccatgctgtatgt

SEQ ID NO: 344023 - DNA, 201 bp, Homo sapiens
ttgtcttccacaaaactggtccctggtgccaaaaaggttggggaccactgtcttatatcatgtgggtcagcatacaacagcccatgggacaggccccgctwactgcccgtttttgtaaataaggtttaattggaataaagccacatccattcatttacaaattgtctgcggctgctatctacaatggctgcagagttgagt

SEQ ID NO: 344024 - DNA, 201 bp, Homo sapiens
gattcgagtcctgacagcagggatcatatctttgcctgctttgtctcccccaaccaaaacctaacagctctttctttattttttatttttattttttgagrtggagtctccctctgtcacccaggctggagtgcagtggtgcgattttggctcactgcaacttcacctcccgggttcaagcgattttctggcctcagcctc

SEQ ID NO: 344025 - DNA, 201 bp, Homo sapiens
tgagagcagcctggccaacatggcgaaatcccatctctactaaaaatacaaatattagccagatgtggtggtgcatgcctgtagtcccagctactcaggcrgctgaggcatgagaattgcttgaacccgggaggcagagattgcagtgagccgaggttgcacgactgcactccagcctgggcgacagagtaagatgctgtc

SEQ ID NO: 344026 - DNA, 201 bp, Homo sapiens
atggagtctccctctgtcacccaggctggagtgcagtggtgcgattttggctcactgcaacttcacctcccgggttcaagcgattttctggcctcagcctyctgagtagctgggattacaggtgcctgcctccgcgccaggctaatttttgtatttttagtagagtcggggtttcatcatgctggccatggttggccaggc

SEQ ID NO: 344027 - DNA, 201 bp, Homo sapiens
gcctccgcgccaggctaatttttgtatttttagtagagtcggggtttcatcatgctggccatggttggccaggctggtctcgaactcctgacctcaagtgwtccgcccgcctcggcctcccagagtgctgggattacaggtgtgagccaccgcacccggcccttaacagctctttctatactctagctgctcctgctactt

SEQ ID NO: 344028 - DNA, 201 bp, Homo sapiens
ccattctcctgcttcagcctcccgagtaggtgggactacaggcacccgccaccatgcctggctaattgttttgtatttttagtagagacagggtttcgctscattagccaggatggtctcgatctcctgacctcgtgatccgcccgcctcggcctcccaaagtgctgggattacaggcgtgagccactgcgcctggcccac

SEQ ID NO: 344029 - DNA, 201 bp, Homo sapiens
ctggcaggtgccggcctcaacatttgattcagaccaagaatttctttcagcagatgctatcttgtttgtttaagtaacacaggcacaccagatggatttayagtaaacagaagaaacttatgttagtcttgcctcagtttcatcatctggactcagtgtcttcgtggatttagcaaagggatttggcccagtgtttctcaa

SEQ ID NO: 344030 - DNA, 201 bp, Homo sapiens
tggctgctgtggatctggttgtggattctgacgtaagccagtcatacagatcatgatgcaaaacagggcagagttgccaacagccaatccaaaagagatgttaggggcagcaaaccctggtgatttacaaaatggaattgaggctccataccttgggaggaacttctggaagctagtgagggactgagttacagagattta

SEQ ID NO: 344031 - DNA, 201 bp, Homo sapiens
ggctgaaaatgtttttgtccccattaactacatattcaaaacattcaccacaagaggaaggaatagactttgaatttgaataaacatgttttattgtttatttattttttttttttttttgagacagagtctcactctgtcacccaggctagagggcagtggtgccatctcagttcactgcaacctccacctcccaggttc

SEQ ID NO: 344032 - DNA, 201 bp, Homo sapiens
gaaaatgtttttgtccccattaactacatattcaaaacattcaccacaagaggaaggaatagactttgaatttgaataaacatgttttattgtttatttattttttttttttttttgagacagagtctcactctgtcacccaggctagagggcagtggtgccatctcagttcactgcaacctccacctcccaggttcaagc

SEQ ID NO: 344033 - DNA, 201 bp, Homo sapiens
atgttcaatcatcatttaaaaattatctttcttagctctaaagtaataattgcaagaaatgcattagggtactggtatatgggggttgcatagggagaaagaaggaattttgaagaaaggtttaacaagaatttaaaatatttagatgaatggagatatttatatccaaatatattcatgttcttataatatccttcttat

SEQ ID NO: 344034 - DNA, 201 bp, Homo sapiens
ttcttataatatccttcttataagaacttttcaaattcttctacttgaaatatataatttttaaatcactgattattgaagagtaggagtaaactcttgcyttctgttacctagggcaaagcatatcttggttcatttctgggagatagaaaaaagctctagtctaattgatttttccagaatagaaaaggaaaataattt

SEQ ID NO: 344035 - DNA, 201 bp, Homo sapiens
gaaatatataatttttaaatcactgattattgaagagtaggagtaaactcttgccttctgttacctagggcaaagcatatcttggttcatttctgggagayagaaaaaagctctagtctaattgatttttccagaatagaaaaggaaaataatttcttaacatgttcaactgtattaaaatttatattaaaaccaatataa

SEQ ID NO: 344036 - DNA, 201 bp, Homo sapiens
accaatataactaagattatctaaaaggcagtgagaaagggaacatatctatatctatacacacataatggtcagtatcccgaatatgtaaggtatgtgtrtaattatacaagaactaacctttatttggataaatggccaaaggttaggtactatcatttttatacatgaaaaggaccaacatagacaaaagtaatcatc

SEQ ID NO: 344037 - DNA, 201 bp, Homo sapiens
gttagctttcaaattagtatatacttcctaaagggtaccaacaatatttaacaaaagccatttcattgaatatacccgtagatccagtaatttcccttttsaagggaaaataagtcaaaggagaaaaaaaaaaatcttgttagaacaacattcattatagtcatgaaaggctaaaaatgacttcgatatctaacatttggg

SEQ ID NO: 344038 - DNA, 201 bp, Homo sapiens
gacataatgttgtgaaagactgtttataagcaagtacactgatcaggatgaaaaagcatagaatggttacatacaatttgcattgatgattttgtttaccytttaattgtgtatttggctgcatatgaatatggcatgaagaacagaagaaaatataattcacttaaaggaggtatatcataggatatagaaaataatatc

SEQ ID NO: 344039 - DNA, 201 bp, Homo sapiens
aattcacttaaaggaggtatatcataggatatagaaaataatatccagggtcaacaagatttggagcacctgatacgaacagccaggaaatgggatgccartgagggtctactctatgcttccaatgaaagtgaggatggagtaattgaagaaatactcctcaagactaattgaaactaacattcattcccaaaaagtaag

SEQ ID NO: 344040 - DNA, 201 bp, Homo sapiens
agacagccttaggattgcaaattaagcctttgaggttagtgcatgtgatggtttgtataacccaaatttgaagaaaggctggtacacagggcaaatgcatrctaggaaaatactctgagagacagtcacacactttaaaaagtgataaaatgttgtaattatactgtttacttttgaaaactgcctattgttcacttcact

SEQ ID NO: 344041 - DNA, 201 bp, Homo sapiens
ggttggaacctgtaccaattttgatgctttgcacatccattgaattttggtgccctcttcctcatagcagaagggaaagttatttgatctaggtgtgggcygcaaggtgattgtaaatgctcatgtacttgtgtagttgaattggtggtaacttatttttagaagtcctctaagaagccaaccatccaaccacaaaatttc

SEQ ID NO: 344042 - DNA, 201 bp, Homo sapiens
tcttgaatcaagacattgaattttaggggtgtgttttttttataggacttggtatttgaggattgatttattacagcatttagcattaacaggaactcaaytgtagaaagttttgaaggccaagcaaagaatttggattcatttctacagatggttaaaaattagtggaggcttctatgctgggaggtggttttaaaagga

SEQ ID NO: 344043 - DNA, 201 bp, Homo sapiens
taaccataaaaaaatgaaaattataaagttaagagcaaataatacaattaatacacaaaaagagaatctgtctcactagtgatcaggaaaatggagactaraacaacaagactggcaaaagttaacaatattgatgatactggtattggtaggagtatgaggatagaatcattcttacacagcactctgttggtgagtatg

SEQ ID NO: 344044 - DNA, 201 bp, Homo sapiens
tgccacgtcgttataaagtgcgcgctgtaacatggcagtgttttcctttatgctgtctttttgatgagtatcattatttacactaataataatggcttgcrtttgaaatatgcttcagagttaacacagcacttccattttattatctcatctggctctgttataaggaaatgcaagcaggcaactaattttaggagagtt

SEQ ID NO: 344045 - DNA, 201 bp, Homo sapiens
actggtggatctcctcaggcatcactcaggtgatgtacactgtccctctcagagtctggcactggaagtgagacacagaactccagtgtgatctatagaaygaggaaagcaaaactatcacctctttttgtttttattctgctttgttttttaagaacgcaggacttctaaatctaatcagtaggacctcatcattttatg

SEQ ID NO: 344046 - DNA, 201 bp, Homo sapiens
accacaaattttaaaaggttaattttttttggttcaagcagtattaactttggatatttagaaggatttttttcacatttcctcagaattggtgacagagaaaagtattttatggtattgcaaatattatatcagaaatgtatggcactgagaggagaaactaagtataatcgtcacctttgatcaatttataatttttag

SEQ ID NO: 344047 - DNA, 201 bp, Homo sapiens
tgaggcaggagaatggcgtgaacccaggagccggggcttgcagtgagccgagatcacgccactgcaccccagcctgggcaacagagcgagactccacctcaaaaaaaaaaaaaaaaaaaaaactgtaaatgagataatgtatgtggcaggctcagagcctcaatcaagggaagctattactattattaggggtgctgattg

SEQ ID NO: 344048 - DNA, 201 bp, Homo sapiens
tcttgccttcatgcagtagcatgccagagcccacatcttcttgcttgccagagtcaaattttgcaagccagttgttaagaacagcgatttttattatttaygtatttatttattgatttatttattttattatactttaagttctgggatacgtatgcagaacgtgcaggtttgttacataggtatacatgtgccatggtg

SEQ ID NO: 344049 - DNA, 201 bp, Homo sapiens
atattcttttatatataagagcttccagaatattcttttatatatttgatatatattaatatatttgatacacttaatattaggaaagaaataaaaatcayaaataaaaactcaagaatggaaaaacttagttgtttttttggggtttttttttttttttttttttttgagatgaagtctcactctgtcacccagtctgga

SEQ ID NO: 344050 - DNA, 201 bp, Homo sapiens
ctagtaaaactgaatactatatattttttttttgagacagagtctcactttgttgccgggctagagtgcagtggtgcgatctcagctcactgcaacctccrcctcctgagttccagtgattcttctgcctcagcctcctgagtagctgggactacaggtgtgcaccaccacacccagctaatttttgtatttttagtagag

SEQ ID NO: 344051 - DNA, 201 bp, Homo sapiens
tgcatgtatgctacgtctttgtatgcctgcacaaaaaaaaattttttttgggggggggcagagttttgctcttgttgcccaggctggagtgcaatggtgcratctcggctcaccgcaacctccgcctcccaggttcaagcaattctcctgcctcagcctccctagtagctgggattacaggcatgtgccaccacgcctggc

SEQ ID NO: 344052 - DNA, 201 bp, Homo sapiens
ggggcaggagaatggcgtgaacccgggaggcggagcttgcggtgagccgagatcacgccactgcactccagcctgggcgacagagccagactccgtctccaaaaaaaaaaaagtcctccaggccctgcatggtctggtctcccctgcatctccgacctgccccctccctgggtctccctcttccttgctgatgctattcta

SEQ ID NO: 344053 - DNA, 201 bp, Homo sapiens
atgtgtcttacaagagtgagggaaggatacagaaaggaaggaatgagggggttttattgagaatattttttgtaaaattctttcactgttttttcctgaattttttttttttttttttttgagatggaatttcactcttgtcgcccaggctggagtgcagtggcgcgatctcgactcactgcaacctccacctcccaggtt

SEQ ID NO: 344054 - DNA, 201 bp, Homo sapiens
attaaatcaggttcattctaaattacaaagagatatagaaataagattttccaaggtgggaagattgcttgaggccaggagttcgagaccagccaaggcarcacagtgatacctcatctctacaaaaattaaaaaaaaaaaaaattagccatgcttggtggtgcatgcctgtagtcccagctacttgtgaggctgaggctg

SEQ ID NO: 344055 - DNA, 201 bp, Homo sapiens
cacccaagtagctgggactacaggtgcaggctaccatgcccagctaatttttgtatttttagttgagacggggtttcaccatgttggccaggctggtctckatctcttgaccttgtgatccacccgcttcggcctcccaacgtgctgggattacaggcgtgagccaccgtgcccggcaatacttagactctttaaaggatc

SEQ ID NO: 344056 - DNA, 201 bp, Homo sapiens
aagtatatacagaaaagtagatgaagttcaccccattaaagagtttactacagtgttgttgaggaaatacgcatgtgagacacaaccaactgcctgggaaytcaaagtgagacaggttttattagagttcagaggagagaaagatcactcctatgtaggaggcacacagaattaataaagctagaagaaacaatagaaagg

SEQ ID NO: 344057 - DNA, 201 bp, Homo sapiens
tctcagcatttgagggccttttctcttcctgcttcatctctaaaggtccttctaggagagaggtgaaaggtaattcttttgaaaatacctattttaaagcrgtattattcccttcgagagacccattgattccctttgatggagcccaataccatgctggatctttgctgtttctgagtggtgtgaatgggcagctgatgt

SEQ ID NO: 344058 - DNA, 201 bp, Homo sapiens
ttgggcccaaaactgcaacaaaatgagaaactccatttaggtggaacatgggtgttttatcttacctctttgaatgttgaaggaaatctgctccagtagawtgagttactttgtatgagatagaaggtgaaaaagagagaagaaattggcaacactcttagcccactgaaagcagcctgcttcagaacctaaggccttgtg

SEQ ID NO: 344059 - DNA, 201 bp, Homo sapiens
acaggcacgaggcaggcttggcccaaaatgtcttttaatgtcagttttgaatgagctttcataagaacactgcatatgtgtgaggagaaatccctttcacwtggtgtagatttggtaagcaatatttccaatatcagaaagacttggtcagtgtatgttgatttgccaaaacccactggcatataaggatgctgtggctgt

SEQ ID NO: 344060 - DNA, 201 bp, Homo sapiens
acaatgggagattgaatgggtggagttaaagaggcccctgtccttctattgattctccttgggtttcctgctgagtatgggttgaggctctggccttctcmactgggtgccagatgaatgtaccgggaatcctgttagggtgacatctaagaagaagactcataaagcacaatattgggaactcaatcagagcttgtttca

SEQ ID NO: 344061 - DNA, 201 bp, Homo sapiens
gaacataaaattaaccattttattatgaaaaatggaggtgaacactacctctatctagttccaagatattttcaccattccaaaataaaaccccatcctcmctaagcagtcactccccattccctactccctgtagcccgaggtaacccctaatctgctttctgtttctgtggatttaactgttctgggtagttcacataa

SEQ ID NO: 344062 - DNA, 201 bp, Homo sapiens
agagagatgaagattttgatatgaaatctgccatttttaaataacagcaactaattcaaatgtttttaaaaatacactctgggcaaaacagtttgcctgcrgaccctatctgtcccgtaggcagtggccagtttacaacctctgacctccctgttggtgtaaaaaagtgagaagaaaaaaggaggatgcaaaagaagtgta

SEQ ID NO: 344063 - DNA, 201 bp, Homo sapiens
gtgccatcataatttttacagacagtgcttagaatacgcctggatttgtagttttcttgcagtaggccccactcggcggctgagtttcagatttcttttcytttttttttttttttttttggtttgagacagagtttcactcttgttgcccaggctggactgcaatggcaccatcttggctcactgcaacctccgcctccc

SEQ ID NO: 344064 - DNA, 201 bp, Homo sapiens
tgtattcttcagacactcatatcatgaaagtttgtgccatcataatttttacagacagtgcttagaatacgcctggatttgtagttttcttgcagtaggcmccactcggcggctgagtttcagatttcttttcttttttttttttttttttttggtttgagacagagtttcactcttgttgcccaggctggactgcaatgg

SEQ ID NO: 344065 - DNA, 201 bp, Homo sapiens
aacttttttaaccaaaatgcctaggaataattttgcattatttatcttctttaggagaaaaataaatattaaatatattctgtttttatttgaaagtattsagtaagcgtagttctcaaatgcccagagtggcttaatagtgagtttggttcagggtacagagacaagaatggactttaagcttctctaagttaatcagct

SEQ ID NO: 344066 - DNA, 201 bp, Homo sapiens
tggcccttggaggcatttcaatagaaacccctggtgctaataataaagtaaagatactgggcaaaccttctccactcttggtcatacaacagtacttttaraaattagctagtcgtagtcgccctgttgggaaaagccacggaagcatttgaacaaatgatgaagtgtttgcctcagtaaatgtacaacttgtttattccc

SEQ ID NO: 344067 - DNA, 201 bp, Homo sapiens
aggcttaatgcaaggatcctggcattctctatgacagaggctgtgcacagtggggaacagattcacaaacagactcatgttatgtgtgaatgggtacatayggtaataagagcacagaagaagggagcatctgacttttcttaggatggaccgggatatctgggtttttcagaggaagctttgctcaaacagagtcttgaa

SEQ ID NO: 344068 - DNA, 201 bp, Homo sapiens
tgctataaaattgctgcaaagtattatggtagagaaggcaatgatcattaagatatggtagtctgctggagttcttgtctctcctttgggggaagaaataytcacatgctttagagattacagaaataatttatttcttctctgaggtgaaatttcctatattcatttcttattgctgctgtaacaaatttatacagaatt

SEQ ID NO: 344069 - DNA, 201 bp, Homo sapiens
atctgtgtttttgtatccttaaccaatttctcttcatcccctcgtctcccctacccttcacagcctctcataactatcattttattctctacctccatgaratccacatttttagctcccacatacgagtgagaacatggaatatttgtctttctgtgcctagcttatttcaggtaacataatgacttccggtttccacca

SEQ ID NO: 344070 - DNA, 201 bp, Homo sapiens
caataatttaatagtctcttttgagccggagattgaaacatgtgacagatctgtaatgaaacaattgctaatatttctgcatatgctactatgggtacgcrgagagaaataagagaaaaaaagaccaattcttccaaaagagagctcacagagaaaaagatatttcaactaaatcctgaaaatgtaacccagagttcatta

SEQ ID NO: 344071 - DNA, 201 bp, Homo sapiens
aacagaaataaaggtttcatgaaacagtacttagccataccacatgaaatgtcctctgttattttctgttgtgttccctcccaactccaacttccaccatrcactggtcatgagccactgaattgactttactccctactgaagggcagagacctgcaatttatttagaaagcatgagtgcaatctgccatccccctggca

SEQ ID NO: 344072 - DNA, 201 bp, Homo sapiens
accttttatagattgttgtttatgttttcttttctttaatctatgttgtattcattttggtgtatgaagtgagggagatctaaccttgttttttcacaggyagttaactattgtcctaataccacttattgaataagatatttcacttcaaagcacagtcaagtactttatcacttttgtttattgcgtaggtagtagtga

SEQ ID NO: 344073 - DNA, 201 bp, Homo sapiens
ggggaaccgtgtgactcccctggcaagatagctgtcccattacacgtgcctctaatgtagaagcaaagcctaggaagctcctacaccctcaagtttatgawctgggcttgccaatgagttcctgctttcagcaagccctctactgccacctactgataatcaaggcggggaaggagtgatggagcccctagagttgaaacg

SEQ ID NO: 344074 - DNA, 201 bp, Homo sapiens
ggaacacagtttagcccgtaacagctacttgggtgtttttgtaaaggaaaatgccgccgaggaaagtgctgagatggaaaaggcttgatgggggcacaacttttttttttttttttctttttttgatggaatcttcctctgtcacccaggctggagtgcagtggcgcaatcctggctcactgcaacctccacctcccaggt

SEQ ID NO: 344075 - DNA, 201 bp, Homo sapiens
tttactgtcaggtatcagaattttaaatagttcatgaattctcagagtatctcagtgcataggcaaaaatgctgcacctttgtgggcgtgtgtgtgtgtgtttgtgtgtgtgtgtgtgtgtgtgtgtgtgtgtgtgtacagaggttcacctggggacagagctgaaatgtcactccagggtctgtagtctctgagctcctc

SEQ ID NO: 344076 - DNA, 201 bp, Homo sapiens
ttactgtcaggtatcagaattttaaatagttcatgaattctcagagtatctcagtgcataggcaaaaatgctgcacctttgtgggcgtgtgtgtgtgtgtktgtgtgtgtgtgtgtgtgtgtgtgtgtgtgtgtgtacagaggttcacctggggacagagctgaaatgtcactccagggtctgtagtctctgagctcctct

SEQ ID NO: 344077 - DNA, 201 bp, Homo sapiens
actgtcaggtatcagaattttaaatagttcatgaattctcagagtatctcagtgcataggcaaaaatgctgcacctttgtgggcgtgtgtgtgtgtgtttgtgtgtgtgtgtgtgtgtgtgtgtgtgtgtgtgtacagaggttcacctggggacagagctgaaatgtcactccagggtctgtagtctctgagctcctctgc

SEQ ID NO: 344078 - DNA, 201 bp, Homo sapiens
tgtcaggtatcagaattttaaatagttcatgaattctcagagtatctcagtgcataggcaaaaatgctgcacctttgtgggcgtgtgtgtgtgtgtttgtgtgtgtgtgtgtgtgtgtgtgtgtgtgtgtgtacagaggttcacctggggacagagctgaaatgtcactccagggtctgtagtctctgagctcctctgcca

SEQ ID NO: 344079 - DNA, 201 bp, Homo sapiens
tcaggtatcagaattttaaatagttcatgaattctcagagtatctcagtgcataggcaaaaatgctgcacctttgtgggcgtgtgtgtgtgtgtttgtgtgtgtgtgtgtgtgtgtgtgtgtgtgtgtgtacagaggttcacctggggacagagctgaaatgtcactccagggtctgtagtctctgagctcctctgccaaa

SEQ ID NO: 344080 - DNA, 201 bp, Homo sapiens
aggtatcagaattttaaatagttcatgaattctcagagtatctcagtgcataggcaaaaatgctgcacctttgtgggcgtgtgtgtgtgtgtttgtgtgtgtgtgtgtgtgtgtgtgtgtgtgtgtgtacagaggttcacctggggacagagctgaaatgtcactccagggtctgtagtctctgagctcctctgccaaagc

SEQ ID NO: 344081 - DNA, 201 bp, Homo sapiens
ccaagcttgcatttaatctttgcacatagcttttccagttagtcaaatttgaactgtaaataagagaaaaataccaacttgtcttaggtggttcaggctgycataacaaagtgtcaaaaactgggtggttcataaacaaaaacagtttatttctcatagttctggaggctaagagtccaagatcaggtgccagcatgatca

SEQ ID NO: 344082 - DNA, 201 bp, Homo sapiens
gaattatcattcaacccagcaatcccattactggatatatacccaaaggaaaataaattgttttatcagaaagacacctgcactcacacgttcattgcagygctattcataatagcaaagacaaggaatcaacctaggtgaccatcaatgatggattggatgaagaaaatgtggtatatatacaccatggaatattatgca

SEQ ID NO: 344083 - DNA, 201 bp, Homo sapiens
agagatgtgaaggaatgggaatgattatttagaggaaagaagatggacatgcagttgaaagggggttgtcctgaaaagaattcctgtcttcaaggatacarccagttacatctgacttgctctgcacatctatggagaactatatggcttcaacttaaaagggatgccataacatataacttgacttaaataggtttgtct

SEQ ID NO: 344084 - DNA, 201 bp, Homo sapiens
ggtaaacattatcaatgataagtcatgttaatagtgcataaccttgacttaatatggtacttgacctctgtgatcttccttccaaaaacttacaaataccrtgtctaaccatgagaaaaacatcaagcaacccaaatcatgtgggacattctgcagtatacctgatgagtactcttcagaactgtcaaggtcatcaaaaac

SEQ ID NO: 344085 - DNA, 201 bp, Homo sapiens
cttgcttccaaaaagtacagcatggaaagggaggtgggggtacctttgcagtagagaagcctggtaaacactacctcagccaggtaatcaaggtaaacatyatcaatgataagtcatgttaatagtgcataaccttgacttaatatggtacttgacctctgtgatcttccttccaaaaacttacaaataccgtgtctaacc

SEQ ID NO: 344086 - DNA, 201 bp, Homo sapiens
tggaggagaggagacaaaattcccatacagaagaattccaaatactgtatgtagctactccaccctgaaggaagtggaacacaacaccccatcccttaagygttggccacacttagtggcttgcttccaaaaagtacagcatggaaagggaggtgggggtacctttgcagtagagaagcctggtaaacactacctcagcca

SEQ ID NO: 344087 - DNA, 201 bp, Homo sapiens
ctctgtggcacagttcatgtaactcagccatgagcacagctctcttttggaatgggtcatccatccattgctttacctagtacttctcacaaatcaataamaactactctagttaatcagaactaaaaatattgttgtcaaactactctttctctgaaaaagttactttaaccatacattccaacctgaagcaaacagaag

SEQ ID NO: 344088 - DNA, 201 bp, Homo sapiens
ccaacatacttagcagtttcccaagaacagaaacaagcatcaattttttaaaaactttaattaccattatataaaatttaaagttcaccctgtcagttacrggcttatcaaatactaagtggctgcatgtggctagtagctagtggctatagtatttggcagcacatttctagaattttaattttctattttaaaagacaa

SEQ ID NO: 344089 - DNA, 201 bp, Homo sapiens
attcattcagccatagccattggaatatggtttggtttcctttttattctttctttttttttcttcctttctttttctttctttccctcccttgctgtctsccttgctccttctcttccttctttcttttcctttctctttttttagatttacaaacctgataatgcagaaaaatcatgtttctaggggactgcaaagccc

SEQ ID NO: 344090 - DNA, 201 bp, Homo sapiens
gctcataactttataatgtcatacattaatgcaagtggggttaaactagacagtgttagagatcttcaagttcagcttgctctaagatgagcaacaaggcygagaagttaggtcacttacatagttagtgcaagggtaggatattgctttttaagttaacatttgtagaaacatgcataagtaattcattcagccatagcc

SEQ ID NO: 344091 - DNA, 201 bp, Homo sapiens
cagctgaatgcccaatatttttaatatcaaaacatttctgggattatggaaactccagccccacagacacacagtcccaccatatccttctctccactggsaatgacttctcacaaatgtgggattttagtccataataaagtacaaatgctaaagaagcatgtgtagttatagctgtaatttgctgcattttactttaga

SEQ ID NO: 344092 - DNA, 201 bp, Homo sapiens
atcttagctagaagccactcctctagaatttgatccacagtatggtttaacactacattgtaaggaaatggattgtctaccccagagtttgcttagcataraggcttcatttatgtatttatttaggtaaaacttatagaacataaaattaaccattttattatgaaaaatggaggtgaacactacctctatctagttcca

SEQ ID NO: 344093 - DNA, 201 bp, Homo sapiens
atggaagatcttgggatggatcttttggtaagatttagatgttgcgtagctcctaacaaggctttataaatagaagtacttaaagcctttaggacatggayactctcagaaagtgtttttagtttatctgatttctatacatgtttttgggctgactaaatgttaagtagttctaatacagtatgatacaatgggtctcta

SEQ ID NO: 344094 - DNA, 201 bp, Homo sapiens
gagaccagcctggccaacgtggtcaaaacccctctactaaaaatacaaaaattagccaagtgtggtggtgggtgcctgtaatcgcagctactgatgatgcygatgcaggagaatcacttgaatccgggaggcggaggttgcagtgagccgagatccgccactgcactccagcctggcgacagagcaagactctgtctcaaa

SEQ ID NO: 344095 - DNA, 201 bp, Homo sapiens
agggccaggtgcagtggctcatgcctataatcccagcattttgggaggccgaggagggcagatcacttgaggtcaggagttcgagaccagcctggccaacrtggtcaaaacccctctactaaaaatacaaaaattagccaagtgtggtggtgggtgcctgtaatcgcagctactgatgatgctgatgcaggagaatcactt

SEQ ID NO: 344096 - DNA, 201 bp, Homo sapiens
tcacttacttatacatgtggaaagcagtataacaaatattcattcctactgtgttcagagcacacagcaaaatgcactaagtcaaaccagtctttgttgagaaatgaagtcttgtgtgtatgatacaaagaatataggtgtaacctgaggtagaattttatatgacagagggacactaataatgtgcttgggtcttcagag

SEQ ID NO: 344097 - DNA, 201 bp, Homo sapiens
aatattaatttttttgtagacatttcctcctctctcctgtttttattgaataatttgtagcattctttcagccacttacagttgaacttcagtcatttgtrtctcctgttcatcctctgcacagcatgctattaggttctgttgttgccttgtctcccaaatccatctccttctgcctttcccaactttggttttagacct

SEQ ID NO: 344098 - DNA, 201 bp, Homo sapiens
atctactacttagagtttctggcttttttgtaaaaagaacctactggtctctgattagatgaccctaagtgtaggagtaaggtcaatataggccccaagcrgaaagacccacaaagtatttgggggagggagcaaagggaaggaaatgcccccaaggacccctcttctcctccctgttgagaatcctgggagtgcagagag

SEQ ID NO: 344099 - DNA, 201 bp, Homo sapiens
aggtggctcacgcctgtaatcccagcactttgggaggccaaggtgggcggatcactaggtcaggagttcaagaccatcctggctaacacagtgaaaccccrtctctactaaaaatacaaaaaattagccaggcgtgatggcaggcagctgtagtcccagctactcgggaggctgaggcaggagaatctcatgtacgtggga

SEQ ID NO: 344100 - DNA, 201 bp, Homo sapiens
caggccgggtgaggtggctcacgcctgtaatcccagcactttgggaggccaaggtgggcggatcactaggtcaggagttcaagaccatcctggctaacacwgtgaaaccccatctctactaaaaatacaaaaaattagccaggcgtgatggcaggcagctgtagtcccagctactcgggaggctgaggcaggagaatctca

SEQ ID NO: 344101 - DNA, 201 bp, Homo sapiens
gcatttagccaagcaaacctttctagcttaggtgaatgagagggagcggccaacgtataaaacaaaatagtaagttcataaaaattacagtgcacaatagkctcagataaaatattaattgttaaacagaattccctgtatgtgacatgttctctttcctaataattttcagttatttcaaactttttactcaagtttttt

SEQ ID NO: 344102 - DNA, 201 bp, Homo sapiens
gtctctacacccattcggtcaggatgggtctgaatcttggttgaccttgaggagaagctgctaatcttttgggcaataatgccctgaagagtccatctgcktgctggggagcagaagggacttctgcgtgtaccacactttgaagaatgagctcaagctatgagttagtttccttccagggtagagaactgatgtttgtgt

SEQ ID NO: 344103 - DNA, 201 bp, Homo sapiens
tatttataggacagagagcacatgcagtccagggtcacctaaacgcctaactggtccagaatgcaagtgcgttgactgagggctgtgagggcacagcagaygaagcattgcattcttcaaggaagtcctcagggggaggcatttgagattggcacagccctggagaggctagctcaagtagaacaaacactgttggtgcag

SEQ ID NO: 344104 - DNA, 201 bp, Homo sapiens
aattgatatttatatcaaataaataacaatttttatttgaatacacagacaaatgaaatattcttccctagtgtgtaagaatagtattaaggatattatastgtgttacatttataatgaatatctcagtttaaagtgtaatatttctgaaagactaatataacagcaaatatatacagcaaatataacagctctatccta

SEQ ID NO: 344105 - DNA, 201 bp, Homo sapiens
gaattttgctgattagattctatttgaaagcctttctatgttaattgccttatttgtaccattcctctcaactaccttggcccacaatcatttcaccttgrcctacaaatttgagtaaacattgtaaagaatctggatagttttgttctcaagatctcttcaggcagactttttaaacatatttttagttggtacaagggc

SEQ ID NO: 344106 - DNA, 201 bp, Homo sapiens
ttgatttaaaggtgtctaaaagattcgctagtctcctttcagacaaggtggataagtatgggttaaatattatgtttattgtgtttgtatctggttggacygatggtctcgaaaactggcaattttgctccctgttcactcggtttccaccagcatgatgcatgagttggccctgggtagcttaccatgttcacccatgac

SEQ ID NO: 344107 - DNA, 201 bp, Homo sapiens
ttgatgtttatctctatgctttttattcattttttggagaaattttgtttttagcatatgggatatgtacacacatacatctacacacacacacacatatrtatagcttatttttaagtgtgcattttttttgtttttttttattatgagggtcctgaattgcttcagatgagttaatagatgggtgggaagaaactacac

SEQ ID NO: 344108 - DNA, 201 bp, Homo sapiens
ttgaagtagaggtggagaacaagcactgtcagatctgttgggaatgacaattgatgtagactttctcaagggtgatgtgtttacaagaagccttgctatayatatcctctgatctagcagttccactgctggaaatttaaccttaggaagtaattggacaaggggccaaaaaataagacaatgatattcatgatagcattg

SEQ ID NO: 344109 - DNA, 201 bp, Homo sapiens
cagaaacagctctatcattgcctttgtccaccctcccaggcagtggctgtcagtcaccctccccagcctccctcagcaccctgcacttaaccctgttatgwcacaggtgactttgttttgtaataattgttggcagttatgtcctgccaactgcactgtgagtggctggggagcaggagccttgcccaattattttgacat

SEQ ID NO: 344110 - DNA, 201 bp, Homo sapiens
taaatggatccaggccatggcttacacaagaacaagttcaataaaaccaggcatgcttgggttttaaaagaaatgatggcgccctttcacttctgcaaatrgtgcttcttttcacaagcaatgttttcctacaatttattacacaaaagaacatctaggtcaatacgaaatcaccacgtataacaagagaacgaatcctct

SEQ ID NO: 344111 - DNA, 201 bp, Homo sapiens
ttttccagcaaagggttaccttccagttcaacatttaccttggaagaggggaccatctacttgaccgctgagcccaacactctggaagtgcaggatgacartgcttctgtgcttgacgtctatttagtaagtaattttttagtttcctctcctccacttctggtttgtaaatggatccaggccatggcttacacaagaaca

SEQ ID NO: 344112 - DNA, 201 bp, Homo sapiens
ttcctatcagtggaggcaggcagcggtgaggaaggaggaaatagtacctgaccgtgaccacattccaaggaaagatgccttttattgctttttcaccatgrgtaagataatagctcagagacactttgatctaaaaggaagtatttctttaaatacagggtcttttataaaatgtttctgacagctggtaacactgtctgt

SEQ ID NO: 344113 - DNA, 201 bp, Homo sapiens
catgggaaacgtgcactgccatttgcctttcttcttgtctcacctcttcaccctgaggttgtcgttctaggcccctcaccccttcctcttctgtttctccygcctttctgggcctgcccacaataggcctccactgggagattctggttttgatgaccgcaggctgccgtggggtcagaggccacctgcctgtggcaccga

SEQ ID NO: 344114 - DNA, 201 bp, Homo sapiens
agagatgaagattttgatatgaaatctgccatttttaaataacagcaactaattcaaatgtttttaaaaatacactctgggcaaaacagtttgcctgcggrccctatctgtcccgtaggcagtggccagtttacaacctctgacctccctgttggtgtaaaaaagtgagaagaaaaaaggaggatgcaaaagaagtgtaag

SEQ ID NO: 344115 - DNA, 201 bp, Homo sapiens
aagtctccaaagaatggtgagcgcaaggttgaaagtccctagcatactgctgcccttaaatgtatatattactctctttctctcaccactcccctttcatwgaagcctcaggtgcctctacccatcactaccaatgcaagtacacaagcacacgcatttgttctgtgtgtgtgtgtgtgtgtgtgtgtgtgtgtgtgtgtg

SEQ ID NO: 344116 - DNA, 201 bp, Homo sapiens
attttaggggaacacagtttagcccgtaacagctacttgggtgtttttgtaaaggaaaatgccgccgaggaaagtgctgagatggaaaaggcttgatgggrgcacaacttttttttttttttttctttttttgatggaatcttcctctgtcacccaggctggagtgcagtggcgcaatcctggctcactgcaacctccacc

SEQ ID NO: 344117 - DNA, 201 bp, Homo sapiens
taaagtaaatgatctttattacatccattcatgtcagggtttcttaacctgagcattattgacattttggtctggatgattctttgtggtgggagctgtcytgtgcagcatccctggcctctacccactagacgtaatgccaccacctccagttgtgattaccaaaaaatgtcttcagatatcatcagatgttcctggtga

SEQ ID NO: 344118 - DNA, 201 bp, Homo sapiens
tgtcttttagaagatatactgaaatatctatggatgaaatggtttgatatctgggatgtacttcaatagtatctgaggagttggtcaaagcatacaaaatktgaattagacagccaggcacggtggctcatgcctgtaatcccagcacctcaggaggccgaggtgggaagatcacttgaggtcaggagtttgagaccagcc

SEQ ID NO: 344119 - DNA, 201 bp, Homo sapiens
agatggaatttcactcttgtcgcccaggctggagtgcagtggcgcgatctcgactcactgcaacctccacctcccaggttcaagcgattctcctgcctcarcctcctaagtagctgggattacagggacctgccaccacgcccagctaatttttcgtgttttcactagagacggggtttcgccatgttggtcaggctgatt

SEQ ID NO: 344120 - DNA, 201 bp, Homo sapiens
agcgaggaaatgtttccctttgactcagccgtgctccctgatgtttgaatcttctgtgtgttggcgttgctcccttggtaagttagtaggccgagaggctyagaactgggtcatgggaagaacccaaattcagtgctggagaatcttggctgattctctcctcagttgtcaccaaccagctgtgtgatttgggaaggaacc

SEQ ID NO: 344121 - DNA, 201 bp, Homo sapiens
cagcgaggaaatgtttccctttgactcagccgtgctccctgatgtttgaatcttctgtgtgttggcgttgctcccttggtaagttagtaggccgagaggckcagaactgggtcatgggaagaacccaaattcagtgctggagaatcttggctgattctctcctcagttgtcaccaaccagctgtgtgatttgggaaggaac

SEQ ID NO: 344122 - DNA, 201 bp, Homo sapiens
tctataaaataataacagtccctacatcacagggttgttgtaaggatattcaaatgatgtaatatgtgtaaaggcttcagaacagtgcctggcaaattgcmaagtatttaatgcaggaaaatggttattaacccatgctctgccatgctactttgtcacactgttttccatagtttctgttatagaactaatggccattga

SEQ ID NO: 344123 - DNA, 201 bp, Homo sapiens
tatttgcttttgtttctctttttgagacaggctcttcctttattgcccaggctggagtgcagtggtgcgatcatggctcactgcagcctcaaactcctggsctcaagcaatcctcccacctcagcctcctgtgtagctgggaaaataggtgcaagacattgaacctggctaattttttattttttatagagatgaggtctc

SEQ ID NO: 344124 - DNA, 201 bp, Homo sapiens
cttcaccaacaaaccaaaacaaaagaaaaaattgtcatatttttgtttctatcattttttcctttagagcccacctagtcctatgtggcaataaatagacrctactctaaatctcatctggccaactgagtttcaaaacctaatccagagagcctggaaagaaaatgcattgaaaagaaaaaaaaaagaaagaaaaagaaa

SEQ ID NO: 344125 - DNA, 201 bp, Homo sapiens
aggtaaatctggttcctgttacttcactatggctagaagtggaagtctctacaaaggctttgaaaactaaactgatgttggaaacgtaacccacagaaagrggtttagaacttgaagcctgaagctattcacgacaattgcctgctaagacaaaaatagcaacattctcagtaggattgaaacaaaactcagaatcttgta

SEQ ID NO: 344126 - DNA, 201 bp, Homo sapiens
aaagagaggtaaatctggttcctgttacttcactatggctagaagtggaagtctctacaaaggctttgaaaactaaactgatgttggaaacgtaacccacrgaaagaggtttagaacttgaagcctgaagctattcacgacaattgcctgctaagacaaaaatagcaacattctcagtaggattgaaacaaaactcagaat

SEQ ID NO: 344127 - DNA, 201 bp, Homo sapiens
attgtaaatgatagcaaacagactacacaagtgttgtcaaggccaccatacatcttattccctttacaaataccttaaatttctttcccagtcctgaagcyctgatcataaggtatgcacagatttactaagaagctttgatgacccattgtgtttttgcattgactgaagccagtccatggatcccaggttaaggcccct

SEQ ID NO: 344128 - DNA, 201 bp, Homo sapiens
gtagtgagagaaggcgaattaaaaccagagatgcctatcaggtgagcaaacacttttaaagatggcgaacaccagtgctgatcagtgtgtcaataagcagrcactcaccatgcacatttgggctgattgcttcaacctttgcaccggaaagaaatgtagcaatagtcattcaaatagttaacatgcttattatgtttggcc

SEQ ID NO: 344129 - DNA, 201 bp, Homo sapiens
agtggttagacagatttgcatatagaaaagtccctttagcaatgttgttcaccaacaaggcagactaattaggaggctagggcagcaatctgtgttagaartgatgagatctcaattaagtttgtataagggaaaatgcagagaaagactcagagtcaaggaacatcaaggagattgattggaaagagcttaattgatagg

SEQ ID NO: 344130 - DNA, 201 bp, Homo sapiens
cttgtccttgagaactggttttgctgtgtttcagttctgtccagttctccctggtgaccctttcctcccttgattagttccacagcactgcaggctaaggrgaaaaaggaatgtgtgggcccaggaggggactgtcctaggagacaggccgatactttttacttttagataagaaatgaaaaagtgttcatgacttttccc

SEQ ID NO: 344131 - DNA, 201 bp, Homo sapiens
tgttgttgaaattcaaacttaaatagcctgacttcttgttgggtaacttgccctgcctccagaggtatttgaacttcattatcttcagcacaggaattgtyaatcttctcacttcacctgttcttgcattagctcaattgatgtcatcactgatttcctaaactagaaactatggaagcatctttgacttttccttttctc

SEQ ID NO: 344132 - DNA, 201 bp, Homo sapiens
tcaccttccttggatctgcgtattctcatctgaaagctggagatgacaaggggtggggtgaagttagtcactttgctccattccggctgtcatgtgatatsaggcagtacaacttgattctcatgttccttggcgagtttggccaaatttctagacttttaaatggacccttccacatatttctagcttaaacagaccctt

SEQ ID NO: 344133 - DNA, 201 bp, Homo sapiens
aaaaaaaaaaaaaatccacacaattcttttaacaagttttttttttaatattaaaaaggtcagggcttttaatatttcacatatcttcaattaataggtamatatgtacaaagacaggattatgtgcagttcccaggttcccagacgcgggaaagacagagattataatgtcctcagtggcctcctgttcagcttggaggc

SEQ ID NO: 344134 - DNA, 201 bp, Homo sapiens
agctctgagattcccaaggctaaacacaattactctaatacacttactatcaggctacccctttatgcaaacttctaaaggaagagagacactgccaaaarcatattcaggggaaaacataaagaggcctcaacttccctctccccctccctccaaggaaattctctagcaatattaagccaagaagaattattgcagcaa

SEQ ID NO: 344135 - DNA, 201 bp, Homo sapiens
tgtattatataaaaggatgtccttgtttttaggaaattcacactgatgggcttatgggtaaaggaatgacttgtatgcaatttagtcttcccaaacagttyagggaaaaaatgcttatgggtatttataaataaataattacaaagcaaatatggtcaaatgataggaagggtatcctggacttttcagcattccttccct

SEQ ID NO: 344136 - DNA, 201 bp, Homo sapiens
cagtcctcactctgcagtatcaggattgcagccccttctctcacagtacctctcctgattcagccactgtgttttttggtttgcaggttttattattattwttttttttgcataaagttgtggccccaaacaggtctctttgcctcccatcatgtacccattcaatccaatttccacacacacacactgcagctagaggaa

SEQ ID NO: 344137 - DNA, 201 bp, Homo sapiens
tcaaatccaaactcctgatttttacagagaagggaactgtggagtacaggaaaattcaatgtcttacccaaatacagtactcacagctacttagtgccacrttgctaccacaaccccactaccctgcctcttgctgtagctccttctttcacatattgtactgctcctctgagccacaggggccatcggtgccctatgaca

SEQ ID NO: 344138 - DNA, 201 bp, Homo sapiens
tggaagcagcaacttcaaaatattatgctaaaattggctcctaatgttttcctcttgccttcatgcagtagcatgccagagcccacatcttcttgcttgcyagagtcaaattttgcaagccagttgttaagaacagcgatttttattatttacgtatttatttattgatttatttattttattatactttaagttctggga

SEQ ID NO: 344139 - DNA, 201 bp, Homo sapiens
gttttctgagaccatttcaatttcctgttaccagatggatctgaatcgtctagtcttgtaccaaccaggtgcatctaagggccccccacctttctctattkaaaacccaacactttggggggagaccaaagcgggcggatcacttgaggtcaggagttcgagaccagcctggctaacatggtgaaaccctgtctctactaa

SEQ ID NO: 344140 - DNA, 201 bp, Homo sapiens
tgagaaggttcagcctagttcttcagtggttccatacttaaaccatccaaaaatacaggtatgtatccttatctattgaaaagaagaaaaggcagcggggygcagcggttcacacctgcaatcccagcgctttgggaggccaaggcaggtggatcacctgaggtcaggggttcgagaccagcctggccaacatgatgaaac

SEQ ID NO: 344141 - DNA, 201 bp, Homo sapiens
aagtgctgggattataggtatgagccactgcacccagcctgagtaaagatgttttaagcaaatacacaataagaatgatgttcgcaattcagagctttttrtctgcctaaggggattctgttgttctagtcctgcaccctgacagatgtggtctctcgtctcagccagatgtggtagtaactacaggattaatttgcatgt

SEQ ID NO: 344142 - DNA, 201 bp, Homo sapiens
atgttggtcaggctggtctcgaactcccgacctcaggtgatccgcccacctctgcctcccaaagggctgagattacaggcgtgacccaccgcactcggccrggtttcagatcttttctccagcctctgtaggtgacaatgtataaagaaaaaagaatgagcttctgaggtggacagagctgggttcaaatcccgcctctac

SEQ ID NO: 344143 - DNA, 201 bp, Homo sapiens
aaatactgtagattgagtgatcaagtagcttaaacaacgaacatttatttcacacagttctgaaggctgggaagtccaagatcaaggtgctgacagatccrgtgtctggtgagggctcactttatggtttacagatggccatcttctcgttgcatcctcacatgcagacagcagagaggaagtgagctctctatgtctctt

SEQ ID NO: 344144 - DNA, 201 bp, Homo sapiens
cttgagcccaggagtttgagaccagcctgggcaacatagcaagaccccatctatacaaaaataaaaaattagctgggtatggtggcacgtgcctgtggtcscagctacttgggaggctgaagtgagaggatcactggagcctaggagttcaaggttgcagtgagctatgatcgcaccactgtactctagcctgggtgacac

SEQ ID NO: 344145 - DNA, 201 bp, Homo sapiens
cgcaactggtcttggtagcggaggcacccgaatgctgcccgggtgaggtaagtttcctgtgcgtccccggccccttcccactagacccttctgaggggctygcgcttaggggctctgcatctctgctgaaacccgtcggtctctctacccttccactttgcctgtctgcgttgtgctgggggtgacgtggagagggcgccc

SEQ ID NO: 344146 - DNA, 201 bp, Homo sapiens
tgaaaatgtttttgtccccattaactacatattcaaaacattcaccacaagaggaaggaatagactttgaatttgaataaacatgttttattgtttatttwttttttttttttttttgagacagagtctcactctgtcacccaggctagagggcagtggtgccatctcagttcactgcaacctccacctcccaggttcaag

SEQ ID NO: 344147 - DNA, 201 bp, Homo sapiens
tgaagtggcagccacaggtaactgaatcttcaggcctgatcccctctttactatatcataaatatcaaaaggcagttgggctgaacaagaacaagaagcayaagaaattctggattattttatccctaaacaattatctataggctatgatccttcagggtgtttcctagctaaagtataggaacagcttctcatgttggt

SEQ ID NO: 344148 - DNA, 201 bp, Homo sapiens
aatgttagtacctgttgatgaccactgattagactcattcattcatcaggagtggtaaaatggggatgttctaattttattatatgtctgctagactgcamaaaggaattttaaacaaaagagtacctgtcacatagtaggtgcgcaataaaatacgtattgaatgggttaatttccataagaacccctatgacaagggag

SEQ ID NO: 344149 - DNA, 201 bp, Homo sapiens
ttccaaggacaaaccattatcacgaccaactcagtgtttgctgcattttcataagcacttggtgatctctcttcaaatgatgacgggagttctttagacayagagattctccatcctctgatattcctcattctgaattggctatccaacttttttttctagtttgttagcaatttcagaaaaaggtctacaatcaaattt

SEQ ID NO: 344150 - DNA, 201 bp, Homo sapiens
aaagtaaaataaataatccaaacatttaattttaaaagtttaatgaaaagcataatcaagcccattgacatttgccaactgttaccaatgtgcatgcacaygaaatcctattaagttaaaagcgaggcttccttctgagcaatgcagcggttacaggggggttgattgtttttgaaatcttgcaggggaggagattaggga

SEQ ID NO: 344151 - DNA, 201 bp, Homo sapiens
actaaggaacacaaagtaaaataaataatccaaacatttaattttaaaagtttaatgaaaagcataatcaagcccattgacatttgccaactgttaccaaygtgcatgcacacgaaatcctattaagttaaaagcgaggcttccttctgagcaatgcagcggttacaggggggttgattgtttttgaaatcttgcagggga

SEQ ID NO: 344152 - DNA, 201 bp, Homo sapiens
agttcatgaaatcttgcagcctatttcaaggaaggaacacagtgccaagtgactaaggaacacaaagtaaaataaataatccaaacatttaattttaaaartttaatgaaaagcataatcaagcccattgacatttgccaactgttaccaatgtgcatgcacacgaaatcctattaagttaaaagcgaggcttccttctga

SEQ ID NO: 344153 - DNA, 201 bp, Homo sapiens
ccacagagctcacagtgctgcatccagaatttatacccaggtctctctgactccaaacccatgttctttcatcattacactctccttaaggagcttgtgtrtaatggtggtaaggccactgaaatgaaaacattaagtaataacatggacagatataggcagcatgggctagaagtgctcaatgactggtcacctaactct

SEQ ID NO: 344154 - DNA, 201 bp, Homo sapiens
cttctttaggtgtatgtactgtctctccagcgagactttaaatgtctcaaagggcaaagctcattctttacacctctctgcagctgcagcacctggcttaytctatacactcagtacatgttgcaagattgtgattgaaaactcttttgaattgaaaatgtatatattaattttaaaagaacaattaggatctatttttgt

SEQ ID NO: 344155 - DNA, 201 bp, Homo sapiens
tgtggattacttattttaaaaattagaattgtaaaagtaaaaggaaggaaagcagagcaagagatgtgaaggaatgggaatgattatttagaggaaagaakatggacatgcagttgaaagggggttgtcctgaaaagaattcctgtcttcaaggatacaaccagttacatctgacttgctctgcacatctatggagaacta

SEQ ID NO: 344156 - DNA, 201 bp, Homo sapiens
ttgcagcgctattcataatagcaaagacaaggaatcaacctaggtgaccatcaatgatggattggatgaagaaaatgtggtatatatacaccatggaataytatgcagccataagaaagaacaaaatcatgttctgtagcataatggatgcacctggaggccgttatcctaagcaaattaacacagaagcaaccaaatacc

SEQ ID NO: 344157 - DNA, 201 bp, Homo sapiens
atttcgcccacttcttcagatttcaggagattgttccttcctcgaggaagccctccctgattaggccaagcgccactccacgtcatacagccccacatcaycatgggcctctctttcagggctttgttttatgagtatgcaatccagaatatgacaatcttattgacatgcgtcaacgcgagcttgcgctcaatagctatt

SEQ ID NO: 344158 - DNA, 201 bp, Homo sapiens
aattaacacagaagcaaccaaataccgcgtgttctcacttataagtgtgagctaaccattgggtacacatggacataaaattgggaacagtagatactggragctccaaaggggacagggaaggagggaggtaagggttgaaaaactacctgtcaggtactgtgttcactacttgggtgatgggttcaattgaagcccaat

SEQ ID NO: 344159 - DNA, 201 bp, Homo sapiens
gcattgctggtacttttctgtcccttatttctagtttgcagcaaattctgtctccctccctccaatatatctcaaatccacctcctctgcccatcctctcrttcatcacccttctctaagccatcagtatctctatatgaaccactacaactgcccccaatcactttcctgcctataatccctccaatgaaactggttgta

SEQ ID NO: 344160 - DNA, 201 bp, Homo sapiens
caattgtagaacctgatttatcaataatggcatcaatctcttcaatcacatcaaaataggcctcattgttggtgtatttcaccccagtacctcgccaaggyaccattgacagttatccagtgggaagttggtcacccacattggtgcttcctgtgatggtgttgacaactgttcgaaggatagtgggaggctttatctttt

SEQ ID NO: 344161 - DNA, 201 bp, Homo sapiens
gcatcaatctcttcaatcacatcaaaataggcctcattgttggtgtatttcaccccagtacctcgccaaggcaccattgacagttatccagtgggaagttrgtcacccacattggtgcttcctgtgatggtgttgacaactgttcgaaggatagtgggaggctttatcttttctttgaggatatttgactcggtagccaac

SEQ ID NO: 344162 - DNA, 201 bp, Homo sapiens
aaaccaaagacctgtaatcccatgggaggccgaggtgggcgaatcacttgagcccaggagtttgagaccagcctgggcaacatagcaagaccccatctatrcaaaaataaaaaattagctgggtatggtggcacgtgcctgtggtcgcagctacttgggaggctgaagtgagaggatcactggagcctaggagttcaaggt

SEQ ID NO: 344163 - DNA, 201 bp, Homo sapiens
gtggattcaagcaatccacaggcatcggcttcccacagtgctgggattacaggtgtgagaccctgtgctcggccaaaatgtttgtttttatctattcactrtgattcttctggcttatgtgcatcaccagactcagaaataatactttgctccaatcagtgctgggagagaggaaactgttcaaatagaaaccaaagacct

SEQ ID NO: 344164 - DNA, 201 bp, Homo sapiens
gcaggaaaaggagagactgggattaccattcccagattccaaactagcctgctagttacagcggtatgatgctgccccctatacagtgattcgtaccagtmagatgaacggttctttgatcggttcttctgtcctccaccactggtctatccaccccatcttgaactttgttaatacaatatttctgctagttattgttca

SEQ ID NO: 344165 - DNA, 201 bp, Homo sapiens
gagaccttagtttcctcatctgtaaagtgggagggctggactagatgtatgttcctcctgctctgagctgtgaagcgtctaggatgccaggagaaaaccaracccaagtcacagggttctaaacaaaccataccttaaatctctcagtaatggccagccacatctgcaagaagcaggctgggaaaacagctgaagaataac

SEQ ID NO: 344166 - DNA, 201 bp, Homo sapiens
cgcgagtacggacatcgcgagcgcctgcgcgaagggctacgcatgcgcagaggggccagcccgctgacagattctcggtggcggcggcagcggcggcggcsctggactgcggggaatgggaatcctaggtccctgactgagcacctcccccgcctccctgcccccgacatggctcaggagaagatggagctagacctggag

SEQ ID NO: 344167 - DNA, 201 bp, Homo sapiens
aatagagttctcttcccttttagacaaagctatattaatccatcctttcattcattatcatgcattcacacaatgattcaacaagtacttactcagtacartgtgccaggccctgttctagatattaagcatataacagagaacaaaacaaaggtctttcccttgtagagcttactttctcagcaaagaaacaggcaagaa

SEQ ID NO: 344168 - DNA, 201 bp, Homo sapiens
taaatatgtaaggtctccttttttggaaaatgtaaataaaagagttcagattggggtcctattccatgtgatggttctctctgttggtaggatgttttaaraattatttcacttatccctggttaacaatgtttgtcaaatatccaaaattcgtggttaaaaaaatgcatttttgaaattgctccacactctaaggcctag

SEQ ID NO: 344169 - DNA, 201 bp, Homo sapiens
gtttggtgtacagattatttcatcactcaggtaataagcatagtacctaataggtaaattttccatctttctaccctcctcctcccgccctccaccctcargtaggcccttgtgtctgtcattttctactttatgttcacatgtgctcaatgtgcaactcccatttagaagtaagaacatgcaatatttggttttctgtta

SEQ ID NO: 344170 - DNA, 201 bp, Homo sapiens
cttgggattatttgaaaagttgtactggttgtcctcctatcaagagtcatttgtgtaacaaaagtacatttatattgcagtgagttttcccatggaagcartgttgtaaatggtcattagactttttttctttccaacttttattttaagttcaggggtacatgagcagatttgttacatgggtaaattgtcatgagggtt

SEQ ID NO: 344171 - DNA, 201 bp, Homo sapiens
ttttaagttctgcctattttggaggaagtatccagtttcactgcaatgcctgccaaaaattgcactgagaatttaataaagtagattatctccattttgartcacttgggattatttgaaaagttgtactggttgtcctcctatcaagagtcatttgtgtaacaaaagtacatttatattgcagtgagttttcccatggaa

SEQ ID NO: 344172 - DNA, 201 bp, Homo sapiens
acggcctcagtgacacttcgccggtgttccaggccgaggcgccgagcgccaggcggaacagcacaacgttcccgagccgccacggcctgctgctgccggcstcccctgtccgcatgcacagcagccgcttgcaccagatcaaacaagaagagggcatggacttgatcaaccgagagacggtccacgaacgggaggtgcaga

SEQ ID NO: 344173 - DNA, 201 bp, Homo sapiens
aaagcaggcatccagatgtcaggttctgcaccccatctccacattgctattccccattggctgtgtgtggtgggggagaaatggatatgtaaatgatgagwcccctttcttgaaggctttcctatcccttggcctgaccctctatatgctcactgccacagccatccatacccacaagttaatttgagccaaggaaagagt

SEQ ID NO: 344174 - DNA, 201 bp, Homo sapiens
gaaaagacctgaacagcctcatcctgcactgagtcctcctgacacataccatcttctcctggcatccttgtggcagcccctgagtccctttgcctggcttycccaagcccagtcccagacccctgtgtataataagcctgccctttgggatggttcattcctgaccaactcctccatgtagcacattggccacttggaact

SEQ ID NO: 344175 - DNA, 201 bp, Homo sapiens
ctctcctttcatattttggcttgacatctcagaccctggaattctatttcctttagcatgagtgctggccggaagggccagcttgacctagcttattcccygctccccatggactgcttccctgactgccaatcagagctgccgtttctgagctctgcgtctgaaaagacctgaacagcctcatcctgcactgagtcctcc

SEQ ID NO: 344176 - DNA, 201 bp, Homo sapiens
cacctctcctttcatattttggcttgacatctcagaccctggaattctatttcctttagcatgagtgctggccggaagggccagcttgacctagcttattscccgctccccatggactgcttccctgactgccaatcagagctgccgtttctgagctctgcgtctgaaaagacctgaacagcctcatcctgcactgagtcc

SEQ ID NO: 344177 - DNA, 201 bp, Homo sapiens
ggattctctttctgaatttccttgaacttctcaccagctgaagagatgccttagacttgcgtttcacactgttgatccagtcaatatgaccagatggatgyctgtctttagccctcccatatccattgccccaaaggctggaagtccattctttcattcatctggacctcacaaatttgctttctttggggaagatccttt

SEQ ID NO: 344178 - DNA, 201 bp, Homo sapiens
atccagaatatgacaatcttattgacatgcgtcaacgcgagcttgcgctcaatagctatttgccgaaggaatatacggactagcggcccgaccactcctcrcccctcccctaccactgccgcgcacatattacgcattaagcaggcgccgcgagtacggacatcgcgagcgcctgcgcgaagggctacgcatgcgcagagg

SEQ ID NO: 344179 - DNA, 201 bp, Homo sapiens
agtgggaggctttatcttttctttgaggatatttgactcggtagccaacgagtcagcttggaaacccattgccaagcgtctcttctgatgccgcataaatyacaatcacattgtccttcatcactaattctgaacagactccaacatagtcctgaaatgtgtccactactcagtgaagaaactctgacaaatagaggggag

SEQ ID NO: 344180 - DNA, 201 bp, Homo sapiens
gtcaacgcgagcttgcgctcaatagctatttgccgaaggaatatacggactagcggcccgaccactcctcgcccctcccctaccactgccgcgcacatatkacgcattaagcaggcgccgcgagtacggacatcgcgagcgcctgcgcgaagggctacgcatgcgcagaggggccagcccgctgacagattctcggtggcg

SEQ ID NO: 344181 - DNA, 201 bp, Homo sapiens
gtctggagagattgttgtgcagttcatgctcaaaagaagtggactggtaccagtctgcggcctgtaaggaaccaggccacacagcacgaggtgagcagcargccagtgagtcttactgcctgagccccgcctcctgttggatcagtggcagtattagattctcatagaagcgcaaaccctactgtgaactgtgcatgtgag

SEQ ID NO: 344182 - DNA, 201 bp, Homo sapiens
aatattttcagacgtttccccaataagtgtgttgaagcatacatctttacgctgctaatatgtctaaatacatatgttatcccttgatttttttaaataaytgagagctctatttatttatgggattattaagttctgatgaaaatataaatgttgacttaatcagcatagtaaactgatgtttaaaattccatacttcat

SEQ ID NO: 344183 - DNA, 201 bp, Homo sapiens
agtctgcggcctgtaaggaaccaggccacacagcacgaggtgagcagcaggccagtgagtcttactgcctgagccccgcctcctgttggatcagtggcagyattagattctcatagaagcgcaaaccctactgtgaactgtgcatgtgagggatctaggttgctcactccacatgagaagctaatgcctaatgatctgaag

SEQ ID NO: 344184 - DNA, 201 bp, Homo sapiens
  misc_feature (1)...(201): n = A,T,C or G
ccattctcgaccctgttgttgaaattcaaacttaaatagcctgacttcttgttgggtaacttgccctgcctccagaggtatttgaacttcattatcttcancacaggaattgtcaatcttctcacttcacctgttcttgcattagctcaattgatgtcatcactgatttcctaaactagaaactatggaagcatctttgac

SEQ ID NO: 344185 - DNA, 201 bp, Homo sapiens
tctctgttaacattatgttgaagactcattccttcactcaacaaatacttattgagtgtctgctatgtgccaggcattgatgcaagaatctgattgatctsaacaacttaaactatagtagatccaaagtgtttattctgtgctgaaagcctttgtcatttgcccagtcctttttgtgtggtatccataaaaagcagacca

SEQ ID NO: 344186 - DNA, 201 bp, Homo sapiens
tgcacattagcaaatgttttagactttaggaaatcttccagactaaaactctttctagggaaatggtgttgcaattttgatggtatataggaagtcagtgrgctttccttttagttttcctaacattcatgaaaatttctgggtttctcctatttcattcatattttcatagagaattcagaaatctgctttaattttaac

SEQ ID NO: 344187 - DNA, 201 bp, Homo sapiens
  misc_feature (1)...(201): n = A,T,C or G
tttgttcttggagttattacacgactcttacaactaataaaactcaaatcattttttaaaagcatcttaaatgtcaaaatgacatctattagcactttgcntctttggccttcactgtcatccaaggtagcagcagcaggtgtgtcactggcagaggagtagctagctgactttcccttatttagaggcatccattgtcac

SEQ ID NO: 344188 - DNA, 201 bp, Homo sapiens
tggaaaccaggaatctcagagtcaagttgtagactgtaaagtttattcaacaaccataccagactctgtggcttatgttctatgcacagcccttgctgatrgaatcatcttgctctccatgtttattttccctcacccacattccttcctttgttttaattttaactgcttatgttgcatgtatccctatagctacctctg

SEQ ID NO: 344189 - DNA, 201 bp, Homo sapiens
ttagagagagtgttgttttactggcaggtaaaagctcagctgaattattcggtttagttctctgatcttcaaactagagaaggtgttcatggtggacttasgagttagctattgcaaatgtgtttatctccaggtccagataaaccatttcccagatgaaagaacttaaagctagaataggaaaacctctgaatgtgagct

SEQ ID NO: 344190 - DNA, 201 bp, Homo sapiens
gttcagtatcataatcacagtttattgcacattgatgctagtctatgaatagcccccaaagggttattaaagtggatcaaaacaatttattatttcattcrtgttatgtataaatgacataataaaagaatatttgacaatgtagtaaccaatgaaatagtcttcatattatgtcactgcatttttttttaatgtcactgc

SEQ ID NO: 344191 - DNA, 201 bp, Homo sapiens
ccaatgaaatagtcttcatattatgtcactgcatttttttttaatgtcactgcttatagaagaattggagactttaattgggagcagatgttcaggtctgratccagtttcttctagacacctctttccggatcaccccctaatttctcaatttgcaacctctaatttctgcatcctttgttgttttcatattttcacaac

SEQ ID NO: 344192 - DNA, 201 bp, Homo sapiens
agtcttcatattatgtcactgcatttttttttaatgtcactgcttatagaagaattggagactttaattgggagcagatgttcaggtctgaatccagtttyttctagacacctctttccggatcaccccctaatttctcaatttgcaacctctaatttctgcatcctttgttgttttcatattttcacaacataaactcct

SEQ ID NO: 344193 - DNA, 201 bp, Homo sapiens
tatttgttgctgaaacatgttctctttgtatcaagtgcattaatgggagttggaaggaatccttcatttttttttagaagctggccagttagaactgtacwttatgtagctctactgttcatttgtggtcttatcaatagagcaggatgtgttactttttgctgagtgccagagaactggggtgggaggaaacctaggctt

SEQ ID NO: 344194 - DNA, 201 bp, Homo sapiens
atttggaggccgaggtaggaggactgttggagcccaggagttcgagaccagcctgggcaatactagtgagaccccatccctacaaaaaaaattaaaattarccaagtgcagtgacacacctgtagtcccagctactcagaggctcagatggcttgagcctgggtggttgaggctgcagtgagctgttattgcaccattgta

SEQ ID NO: 344195 - DNA, 201 bp, Homo sapiens
ccttatatggcaaaagggactttacaaatgggattaaattaaagatcctgaaatgggatgattatcctgaattatccagataggcccaatataatcacagrgttcttgtaaggggaagacagaagaaaggtgagaatcagagaaggagacacaacatcagaagcagaaggcaggatactccatttgccctgatatgattat

SEQ ID NO: 344196 - DNA, 201 bp, Homo sapiens
gggctctcgcataagtaatttcatgggcccctaagttttaaagaaaaaataagtgttttctcatttttaaaaaaggcagctttgctgttaaaatatgtcartaagagtcctggataatgtttaaaagtatttatgggctcagatggggttaaggtagagctgactgttagtctgttgaagtatttgtttcccagctcttga

SEQ ID NO: 344197 - DNA, 201 bp, Homo sapiens
ggtctgtgattgaactttaactgcttcttagtgaataagtggggaagaggacagagaaacttctgttctttatttgaaatttctttctccttttttggagmtaaaaatgccctgatgtgatagggattgtaacgtgtgcttgcttaattgtttaggttcttacttggcaaaataaagttggaaatccaaggttggattcca

SEQ ID NO: 344198 - DNA, 201 bp, Homo sapiens
acctaccacactggctttagaaaaaagcatatgggagcatgaggaaacacttctctccctcaaagaactgctcctcatgggttgaggggtcaccttcccartgatgtgtgacctgagactgagtcactggacagatgtgttttgctctgtcactcaggccatgtctactttgtgaagtaaagctggtatgcccaaaaccta

SEQ ID NO: 344199 - DNA, 201 bp, Homo sapiens
aatggggaattccagatggcggctaatgcttcctcaagcttcaacattgtgtaattctgaacatacgttgccattaagatatatgtatttttagactaagwcaagcagtagctttggccttaaaaatgaacttgcctcagaagaggtgaatatcagaatgccagagctggtctgtgattgaactttaactgcttcttagtg

SEQ ID NO: 344200 - DNA, 201 bp, Homo sapiens
aaagattcatataaaatattgcctcatatcatcactcaatgttacaggtttgacaaactagccaactgcctgcatttctaggcataatgacataaacttakccaagagtccatcttataccagggattcccaatccctgggctgtggacaagtaccagtccatggcttgttaggaaaccagcagcacagcaggaggtgagc

SEQ ID NO: 344201 - DNA, 201 bp, Homo sapiens
tggccaggatggtcttgaactcctgacctcaggcgatccacctgcctcggcctcccaaagtgctgggattacaggcatgagccaccacacctggccaacakatctcttcttcaaaacagttcttccagccagactgggtttgtgggacagcagtgtgtaacctctgggcaggacatccccaggatggaggtgctctggccc

SEQ ID NO: 344202 - DNA, 201 bp, Homo sapiens
attttatgatctgtattgtgtcctgctttttaaacttaacatagtatcttatttttctaagttaaggatcacttctaaaatatgatttaagtgatggcatratttgacgagtccatcaaataattttgtcaaatatgctagatccagatttaggtttatatatgaattaacaatatgaatgagaaaaatatagagaatttg

SEQ ID NO: 344203 - DNA, 201 bp, Homo sapiens
agggtcatagacctgccgtatatttcatgctggggcagaagaaaaatctaaccccagaatacatttagaggaacagtgggagacaaaaataaacttgttaygattacattttataaaagcacaatcattacataggtttgttgcattaaggccttgacctaaaagaaaaagctaaaaagatgagcaactcctaaacatgcc

SEQ ID NO: 344204 - DNA, 201 bp, Homo sapiens
aggcacaattgcagtttctccatatctttctgcctaggtgtgtttctcaacccccacttcacccacaagctgctgttacatgttcctccaagagtccagcrtcccagtgagccaattagggaacacactccttatttgttattgcaaaagtatatatttaattgtgaatatgggtgtaaattcttctaaaggactatttta

SEQ ID NO: 344205 - DNA, 201 bp, Homo sapiens
tgcattcacacaatgattcaacaagtacttactcagtacaatgtgccaggccctgttctagatattaagcatataacagagaacaaaacaaaggtctttcycttgtagagcttactttctcagcaaagaaacaggcaagaaaatgtatacatatatgtcatgtggtactccggaggacaataaaaacagagtaaggggcat

SEQ ID NO: 344206 - DNA, 201 bp, Homo sapiens
agaagaattggagactttaattgggagcagatgttcaggtctgaatccagtttcttctagacacctctttccggatcaccccctaatttctcaatttgcarcctctaatttctgcatcctttgttgttttcatattttcacaacataaactcctacccataaggaagttctgtgtcaggaattcaaatgccatggaacaaa

SEQ ID NO: 344207 - DNA, 201 bp, Homo sapiens
  misc_feature (1)...(201): n = A,T,C or G
attttgatacggaaacatacaacgcgcttatgaaaacacttcagagagactgccgggtaaggaagtttgattgttgtgatttcctttgaactctgtgctcntgtaaactgtggctgccacttattgaaagcatagaaataaggaatgtccaaagtggcagacatgtggaatcctatctttcccaatcctggcgctgagcca

SEQ ID NO: 344208 - DNA, 201 bp, Homo sapiens
gatatgagcagcacgtttgctgaaattattttatgtggtctgaataagaggtgagcaggaatgaagcttgccaattagggcagacaccattccatgcaaasttagctggagtgattgtccaaagtggggaggaattcccccaggctgcaatgctttaaaaaaaaaaaaaaaaaaaaactaagggaagattttttctaacat

SEQ ID NO: 344209 - DNA, 201 bp, Homo sapiens
aaaattgaacaaataacgtttcaggattttggagggaagaggggctggagtgtgttctctgtcctgaccattcttcttttccttcagattctggaaagccrccacttccataaaacaagcaaactcgtttgtgctaagcagcagttgtcatgaatagcagctatgctggtctctaggatgaatgaccctttggtattctaa

SEQ ID NO: 344210 - DNA, 201 bp, Homo sapiens
ctgaaattattttatgtggtctgaataagaggtgagcaggaatgaagcttgccaattagggcagacaccattccatgcaaacttagctggagtgattgtcsaaagtggggaggaattcccccaggctgcaatgctttaaaaaaaaaaaaaaaaaaaaactaagggaagattttttctaacatggtgaaaagagataaaaat

SEQ ID NO: 344211 - DNA, 201 bp, Homo sapiens
gtcatttttcttccttctatagaaatgtgtgatgtaaacatttgtctcatagcaacagcaacaagtggcttgtgtctctcattttataaagctctggggcrtagtaaaagttccaagttttataatgattataaatttagcttcaagaaatttgatgtgactttgtagcttttactgataactgcaaaatctgtggtggta

SEQ ID NO: 344212 - DNA, 201 bp, Homo sapiens
tcgggaggctgagatgagaggatcacttgagcccaaaaggtcaaggctgcagtgagtcatgtttgcaccactgcctccagcctgggtgatggagtgagacyctgtttcaaaaaaatatttttttaatttaaaaaagaagtttagagatgttctgaaggaaatatattgggctgcagcttaggaatgaagtcagattaaatg

SEQ ID NO: 344213 - DNA, 201 bp, Homo sapiens
ttactggcatttccatgtatatatgtatataaatgcaggaaaccaacatgtcattgacacctctcttctttacttttccccatatctaatcattcctcaartcttactgatttttatcagctagaatctatctccttatttctacctctattgccactctgatccaggctaccagcatttccctcttaggcttctgaagca

SEQ ID NO: 344214 - DNA, 201 bp, Homo sapiens
cttgcagtattccaacttgctttcagttttaaatagttctgtgaatcattcctgtttcctttttttacaagtagggaagtaaagtcctgccagagctagayggaaaggcacctgtatttgcattgtaacctgagttttgaatagtaaatgcacaggtacagaatatactagcaacagtaaggtcaggcagacattctggaa

SEQ ID NO: 344215 - DNA, 201 bp, Homo sapiens
ataaggaaaagaggcatgaaggtgctaaaaaaatcttaaagacaacagtttgagaactcccaggagtcaatatccctatttccctgacccactgtgcccarccctcattattcaactggcaaacttcaccaacaaaccaaaacaaaagaaaaaattgtcatatttttgtttctatcattttttcctttagagcccacctag

SEQ ID NO: 344216 - DNA, 201 bp, Homo sapiens
tttctatcattttttcctttagagcccacctagtcctatgtggcaataaatagacactactctaaatctcatctggccaactgagtttcaaaacctaatcyagagagcctggaaagaaaatgcattgaaaagaaaaaaaaaagaaagaaaaagaaaatatgttgaatattgatgttataatttacatgtgagatttttctc

SEQ ID NO: 344217 - DNA, 201 bp, Homo sapiens
agaggcttgtaagcttgaggaacccaagtgagtctccctctgataaggcaggtgacacagtttgggagcagatagccatcacccatgcccttacaaaacayttctgctttattaccaatacatcatttgtgaacccaccacccctgcaacatcttatctgaatctttcttagtctggagcaaacacagaatgaggggaaaa

SEQ ID NO: 344218 - DNA, 201 bp, Homo sapiens
ggcttcaagaaccctttttcctcatctgtctctgactacacattcaaactgttcttcctgggacaatagagtttttctgggcagaagcaagtgccaccctmttgaaggacagagagtacagtagaatggggtgagggtgtatggttgaagacagtagggtaagggaaggtgggagtgggcagacaacatctaaaacccgtt

SEQ ID NO: 344219 - DNA, 201 bp, Homo sapiens
gtttgaggaagctatattgggcttcaagaaccctttttcctcatctgtctctgactacacattcaaactgttcttcctgggacaatagagtttttctgggsagaagcaagtgccaccctcttgaaggacagagagtacagtagaatggggtgagggtgtatggttgaagacagtagggtaagggaaggtgggagtgggcag

SEQ ID NO: 344220 - DNA, 201 bp, Homo sapiens
actgtgagtggctggggagcaggagccttgcccaattattttgacatccagagggtcccacgcagcgtctggtacagcatccaaaggatgtatcacttttwtcttcttaattctaagattgttatagattttccaaagagatatgttcttgagcctacagttctggaggtgcaattagaggtgaaatatggggcggggctg

SEQ ID NO: 344221 - DNA, 201 bp, Homo sapiens
aatggtaggggggaaacaagtcttccaatttggacatgtgagtttgagaatgtcagagaggcaagtgggtggctggacatggacttgggactcaaggaagrggtctggggctcagcttcaatttgtcaaattgcagatgcataggcattggtgaaatagatggagaagagaggcctcaggaagggggaacatccatatttt

SEQ ID NO: 344222 - DNA, 201 bp, Homo sapiens
tgcagcttgggtagccagctgggttttggaggagagtgcatctcttccgaagaccttagttgctttccttgcagaagggctgatcctggcctccgggaacrggagaaacatagtaattttaaaggttatgaggaaaggaggatagggatcccgaaggccagggaggaaaagccagtgagtttggagcgtgggagctgcagg

SEQ ID NO: 344223 - DNA, 201 bp, Homo sapiens
atttttgaaaaaaaatttccatatttgggggttttccccattgccaggtggttacattccaaagaaattatatcatgggatacagacacaagtatttccartcatgcttattgtgtagggctgatggcaaggtgattcccctccatggccacacatcataaccaggcaagcccgttaagtatcagcaactggaagtccagc

SEQ ID NO: 344224 - DNA, 201 bp, Homo sapiens
cccttccttggtgtattaaatgttctgcatgcagtttaaggtaagacccttaaattatggttccctaattatgaagttatccttgtttaccacagaagtarcataactggctttaaaaattcagatgaattataggtcacatgtgaaaatcttatcattaggaagagagagaaacacatttgaagatcagatctcccaatg

SEQ ID NO: 344225 - DNA, 201 bp, Homo sapiens
acatcaaagaagtctcgaatccaaaatgtcaatagtgccaaagttgagaaatcctggcctacaggaatttatgacttatctgctactgggctttgaaggcyatatagacagttgattaatttagaaacagcttggcttgtggaataaacatacctggtatagtctgtgaactgaagtgagccaaggtggtcccagtattgc

SEQ ID NO: 344226 - DNA, 201 bp, Homo sapiens
tttttatagagatgaggtctcactgtttttcccaggctggtctcatactactggcctaaagcaatcatcccatcctggcgtcccaaagtgctgtgattacrggtgtgagccacaatgcccaacgtaattatataatgttttttaaaacaatgttttgaattcatacttaccttgacttcattagttacagatgatgtggtg

SEQ ID NO: 344227 - DNA, 201 bp, Homo sapiens
tacaatggacagctccacacatcaaagaagtctcgaatccaaaatgtcaatagtgccaaagttgagaaatcctggcctacaggaatttatgacttatctgmtactgggctttgaaggccatatagacagttgattaatttagaaacagcttggcttgtggaataaacatacctggtatagtctgtgaactgaagtgagcca

SEQ ID NO: 344228 - DNA, 201 bp, Homo sapiens
ttttgcacttagacaaagtcttagttctcaaccagagctgattttgctcaccacccctccagagggcatttattactgtctgcaggtatttttggtttttrtgtctggaggaagtggtgctacaggcaccatttgtaaagaccggggatgctgctgaacatcctacaatggacagctccacacatcaaagaagtctcgaat

SEQ ID NO: 344229 - DNA, 201 bp, Homo sapiens
atttgtgtctctatgtccaaacttcccctttttataagaacaccagtcataccgaagtaggacacaccctattccactatgacctcatcttaactaattaygtctgcaacaaactcattcccaaatagggtcacattctgaggtactgggggctaggacttaaacatatgaattttagggagatgcaattcaacccataac

SEQ ID NO: 344230 - DNA, 201 bp, Homo sapiens
gcactgttctgctctaagggccaacaaataaggctctattaaaaattatttaactcatctaaactatacaaagttatttgatttggtcagtttccttggaytggagaaatttaaaatgacttaaattaatgtgtaatacttagtagtaatgtcaaatgtttaaacctggtatgtaaattagtcaagcaacggcctttcctg

SEQ ID NO: 344231 - DNA, 201 bp, Homo sapiens
ctttacattgaatgtaagacaccatagttctatttttacagcttctaagcatacaaatgtgtaacataccatatgtctgaacatatgtatgtagaagtggsctccattgtacaaatatttaacatacagattttctgcatttctttgagagtttatgcaaatattctttaaaaaactctaagcctatagtttcttaatata

SEQ ID NO: 344232 - DNA, 201 bp, Homo sapiens
tgtaccaaaaatacaaaaattagcctggcgtggtggtgtgcatctgtaatattagctactcaggaggctgaggcgggagagtcacttgagcctgggaggcrgaggttgcagtgagcagcgatcatgccactgcactccagcctgggtgacagagcaagattctgtctcaaaaacaaaacaaaacaaaaggggaagaaaaaa

SEQ ID NO: 344233 - DNA, 201 bp, Homo sapiens
cgataaactgcaattgaagcattttaaatttatagtgcctgcgagatactatagaaaccctaaaagcagctgggaatataaatcttgagctcaagaaagtytgggctcaaagagttatttgggagtcatcacaagtaggttgcagttaaacccattggtgatggaagagattattcagaagcagtgagaagaaaagaattc

SEQ ID NO: 344234 - DNA, 201 bp, Homo sapiens
tctgggactacatttggccgtatgacctgggccatcatatcacttccaagtctcaagtgtctcacatataaaacaaaacgtttgtatgaaattatgttttytctttccaactttagcattttgtgatgtttaccaatgtgtttgtaatccaatgttatcattttctctagaggaaggagacctttgtaccccacatcacct

SEQ ID NO: 344235 - DNA, 201 bp, Homo sapiens
ccttaatagaaccctaagctttccaccagtgtcttcatttcttctcaaaccatttaagtgcatgaggttctgttccttttattgtcttgcagaagtttccrccagacacttctgaccagcctggactgaactggttgccctctaggacctgatgtacaaatgttactttggggcctctctgctccatcattctggggattc

SEQ ID NO: 344236 - DNA, 201 bp, Homo sapiens
aaacctaagaaaggaaccattctaagcccaggaatccatgcagttgcataggtcacatgaccctgtagtcagccctgaaattatctgtagaaggaagacaygtttgatgtccctgccaatgataatttgctttggttcagctgttacggtgactaacacttccccagatcagggacctttacaatggtagtgggggcattc

SEQ ID NO: 344237 - DNA, 201 bp, Homo sapiens
tattgcccaggctggagtgcagtggtgcgatcatggctcactgcagcctcaaactcctggcctcaagcaatcctcccacctcagcctcctgtgtagctggraaaataggtgcaagacattgaacctggctaattttttattttttatagagatgaggtctcactgtttttcccaggctggtctcatactactggcctaaag

SEQ ID NO: 344238 - DNA, 201 bp, Homo sapiens
gccaaatttggaaacagtctgcatgttcatccacagaagagtgattggttaaacaatggtatgtccatcttgtgaatatatgcagttatttttaaatgagrtagatatatagatttttaaaatattttgataagagcaagtggcagaaataaatgtgtgtgtgaaaaagcatagggaagattttgaaaggctataaaacaa

SEQ ID NO: 344239 - DNA, 201 bp, Homo sapiens
aaaatcaaatacaaaatgacaaattctctggaagttaattaaaaagaacatttcacatcaaaacttatgaagaaattgttaatgcatttaggaatactttrtagcctaaatgcttttggtactattaaaaaaaaaaaagagtgaaaaataagctaaatattgcatctaagaaatttttttaagaatcagaagaaagaaggt

SEQ ID NO: 344240 - DNA, 201 bp, Homo sapiens
agcaaaagtagtacacttcactgagatgccattgtttgcacttcatgtatattgttccaggctttttctatgtctaaatatgtatatgtgatttcatacgrtgatagcatcctgctgtatattcagctccataaacagcttttattccccatgtaatatacagtgaatgttttaaatatgcttctgcatttttttgatagt

SEQ ID NO: 344241 - DNA, 201 bp, Homo sapiens
aaactttcataagatatgtattttaatcatgtgaaaaaaagattagaataacaaaatatactgaaacaggcaaattacaccttctaatgagagaagcgatscaggttcattttagaaattgtagaaagttctgataagcaaaagtagtacacttcactgagatgccattgtttgcacttcatgtatattgttccaggcttt

SEQ ID NO: 344242 - DNA, 201 bp, Homo sapiens
actatgcagtatgagtaaaagacctctccacttcaacatatcccctggattccagtactctagctaactgagctgcctgcagttcagtgttttctgtataygcttactggctgtgctttcagacaagctgtgtcctctgcttaaaatggcatcttcttcctccttcctccacaacccctgccaactgtttttccttaacta

SEQ ID NO: 344243 - DNA, 201 bp, Homo sapiens
tctttagcctcagatagaaggacctttatgatctggccatattctgaaatagcttcaatcctctcctcatctctgttccagtatacatctttccttcttaytctgcaaacattagaccacttgatattctttaaatatgtcatgtacttttcttgtgtctgttctttgggataattcctatccttttcagggaggcaaatt

SEQ ID NO: 344244 - DNA, 201 bp, Homo sapiens
cacattggtgcttcctgtgatggtgttgacaactgttcgaaggatagtgggaggctttatcttttctttgaggatatttgactcggtagccaacgagtcarcttggaaacccattgccaagcgtctcttctgatgccgcataaatcacaatcacattgtccttcatcactaattctgaacagactccaacatagtcctgaa

SEQ ID NO: 344245 - DNA, 201 bp, Homo sapiens
  misc_feature (1)...(201): n = A,T,C or G
aaaataaaattttttcctttttttttttaaccggaaagtgcatttgcttgggtgtaatcctaaagtgaaatgggacagtgccttgcagtctttgcccactntacataggctaaggctaagctctttgtactactgcaaacttaaaagtttttcaaatgtgggaaacgtgtgggaaggcttgttgaactttggcgcactcag

SEQ ID NO: 344246 - DNA, 201 bp, Homo sapiens
agtgaactactgtctcagaaactgatattatatttgacatacactgggattgcaaccagtttctttgcactgacaggataagagagcaggcggaaatttcyatcaagagggatgaaagaaaggatatgctcagatttccagcacttaaacacaaggatggaagctgatatcatccaaccacctggggttcatgaagggaag

SEQ ID NO: 344247 - DNA, 201 bp, Homo sapiens
agagtttaaagttaaagaggaatctagagaccaaacattagggagcaatccttacagacttcatcaagcatcctagctctctcggatgcctttttcacccygaagaaatcattggctccttctgaacctcagactccctgctgatgaaagttagtgaaggtgatttctaaagtccctttcagatctgacatgctgtggttc

SEQ ID NO: 344248 - DNA, 201 bp, Homo sapiens
caaactgctgaaaacccaagacaagaaaaaatctcgaaaacagaggaaaagaatgcattacctgtagagaaacaatgatttgaatgactgtgtatttctcmtcatggagaaagtgatataacattttaaaactactaagagaaaataattgtcaactcagagttctatattcagcaaaaatatccttaaggaactttcaga

SEQ ID NO: 344249 - DNA, 201 bp, Homo sapiens
tctggcatttcatataaatcatataatgtgaacttttctgtttggctttttgcacttaacagaatatttttgaggtttatctgtagcctcgtagcatgtaycagtaatttattctttttattgcagaatattccattatattgatataccatagtttgtttattcatcagttgatggatatttgggatgtttccattttgg

SEQ ID NO: 344250 - DNA, 201 bp, Homo sapiens
tcagcctgtgggaggccaaggtggacagatcacttgagcccaggagttggagactcacctgggcaacatagtaaaaccccatctctaccaaaaaaaaaaaraaattagccagtcatagcagcgcacacctgtggtccctgctactcaggaggctgaggcagaaggatggagcctgggaggtcgaggctgcagtgagtggtg

SEQ ID NO: 344251 - DNA, 201 bp, Homo sapiens
gggaaccaggggcttactgcgggacggccttggagagtactcgggttcgtgaacttcccggaggcgcaatgagctgcattaacctgcccactgtgctgccyggctcccccagcaagacccgggggcagatccaggtgcgggggccagccctgcgcgtggctggggatgaggtggtcgtggtgatagcctgtgtccaggcat

SEQ ID NO: 344252 - DNA, 201 bp, Homo sapiens
atctctactgaaaaaaaaaaccaaaaattatctgggcatggtggcagcctcctgtaatcccagctactcgggaggttgaggcaggagaatctcttgaaccyggaaggcaggggttgcagtgagctgagatcgctccactgcactctaacctaggcaacagagcgagactccaccccaaaaagaaagaaagaaaaactctga

SEQ ID NO: 344253 - DNA, 201 bp, Homo sapiens
aagtgctgggattacaggcgtgagccaccacgcctggccacacttagtctagttctataccctggaggaagaataaatgagttggtttggtgagtgcttcraggtctctacccgccctgcctcccagcacagagccaggccgctctggcctgaataccctgcccggacgtcacagggcctgtcccctcaaaaggccagtcc

SEQ ID NO: 344254 - DNA, 201 bp, Homo sapiens
tgcggcaggtgctttgaattggcaaagggacagagccgggcatggtgctctgggggttgggggaaggactaaggtcagagcaaactctcctggcttcagtrcttgtgaatcagagggtttaaaagaaaaacccacctggtaaggtggctgagcgccctctgtctttccatgggagcgcagccatttggggccatcctgaac

SEQ ID NO: 344255 - DNA, 201 bp, Homo sapiens
ggtggtcacgacagtgccattccctggcccctgcattgtggcttctggcctccctggccctgctcacgctctggctttctcttcccaggaacaccatggargcactgcccgcctgcctgctccgagacgtggcccaggaggccctgggcgtggctgtcataggcatcgacgaggggcagtttgtaagttggcttgtcttgg

SEQ ID NO: 344256 - DNA, 201 bp, Homo sapiens
cccgttttctgggtcagcagggaaagcctttcacagagtagccaccgtgccatcctgaggaaggccctgggtcagaagcttctgtgcttctttgtaccccrggcgagacacacaggtgctcacactgctctgtagaaactgttggcatccaagagagactcacctggaaatctctggaaaacctgaagctcctagctgggg

SEQ ID NO: 344257 - DNA, 201 bp, Homo sapiens
gggctcagccaccacagggttacggccgagctgctcaggccttggctgagccaagggactccatggtctgtgcagactgcgtgccatctgttgcggcaggkgctttgaattggcaaagggacagagccgggcatggtgctctgggggttgggggaaggactaaggtcagagcaaactctcctggcttcagtgcttgtgaat

SEQ ID NO: 344258 - DNA, 201 bp, Homo sapiens
cttccctgttttatgtgtagctgtttgagctcgctggacatttccgcctgcaacctcagtttgggagttaaattcacttccttggcagcagatgtgggccygatgtttctgagcctgagacgctttgcttggtcctctggacttgtccacctgggcacccagtggcaaagccatgctgtgccacacattatagggcttcag

SEQ ID NO: 344259 - DNA, 201 bp, Homo sapiens
agggactccatggtctgtgcagactgcgtgccatctgttgcggcaggtgctttgaattggcaaagggacagagccgggcatggtgctctgggggttggggkaaggactaaggtcagagcaaactctcctggcttcagtgcttgtgaatcagagggtttaaaagaaaaacccacctggtaaggtggctgagcgccctctgtc

SEQ ID NO: 344260 - DNA, 201 bp, Homo sapiens
ggtcacgacagtgccattccctggcccctgcattgtggcttctggcctccctggccctgctcacgctctggctttctcttcccaggaacaccatggaggcrctgcccgcctgcctgctccgagacgtggcccaggaggccctgggcgtggctgtcataggcatcgacgaggggcagtttgtaagttggcttgtcttggcat

SEQ ID NO: 344261 - DNA, 201 bp, Homo sapiens
gggttgggggaaggactaaggtcagagcaaactctcctggcttcagtgcttgtgaatcagagggtttaaaagaaaaacccacctggtaaggtggctgagcrccctctgtctttccatgggagcgcagccatttggggccatcctgaacctggtgccgctggccgagagcgtggtgaagctgacggcggtgtgcatggagtg

SEQ ID NO: 344262 - DNA, 201 bp, Homo sapiens
agagcaaactctcctggcttcagtgcttgtgaatcagagggtttaaaagaaaaacccacctggtaaggtggctgagcgccctctgtctttccatgggagcrcagccatttggggccatcctgaacctggtgccgctggccgagagcgtggtgaagctgacggcggtgtgcatggagtgcttccgggaagccgcctatacca

SEQ ID NO: 344263 - DNA, 201 bp, Homo sapiens
gtgaccagggctcagccaccacagggttacggccgagctgctcaggccttggctgagccaagggactccatggtctgtgcagactgcgtgccatctgttgyggcaggtgctttgaattggcaaagggacagagccgggcatggtgctctgggggttgggggaaggactaaggtcagagcaaactctcctggcttcagtgct

SEQ ID NO: 344264 - DNA, 201 bp, Homo sapiens
cgggggaggcaagagcacaaagcgcccacctattcaccgaagagcatgtatataacttagggccttccatccttaaacaacaggaccttccttgctcttamggaaaaggaaacaggttcagagacgttaattcattgccaaggtcacacagataatgggtccagcgaagagtggtgtccgagcccaaggcagcaggccttt

SEQ ID NO: 344265 - DNA, 201 bp, Homo sapiens
tcccctgtccctgcggccaggtcgaggtgattgggggagcagacaagtaccactccgtgtgtcggctctgctacttcaagaaggcctcaggccagcctgcygggccggacaacaaagagaactgcccagtgccaggaaagccaggggaagccgtggctgccaggaagctctttgccccacagcagattctgcaatgcagcc

SEQ ID NO: 344266 - DNA, 201 bp, Homo sapiens; identical to SEQ ID NO: 72712

SEQ ID NO: 344267 - DNA, 201 bp, Homo sapiens
gcaagaggtaggttgatcttgtgtgggtttgggttttttttttttttttgagacggagtcttactctgtcgcccaggctggagtgcaatggcgtgatctcrgctcactgcaacctctgccacccggattcaagcgattttcccacctcgcctcccaagtaggtgggattacaggcacccaccatcatgcctggctaatttt

SEQ ID NO: 344268 - DNA, 201 bp, Homo sapiens
gaggcagcccagaggccaccggcacagggtggtggcccccagatcatacagcagtgggcacaggggaagcaaacctgagtgaggacacaagagcctggtcyggctccgctgcacagggcaggtgtgatggcccccacgagtctttggcagagaacgcagataatagcggctcccacggcctgacccgggccggggggaagc

SEQ ID NO: 344269 - DNA, 201 bp, Homo sapiens
cctggcctctgtgtgcccttgttctcttcaagaagttccgggtcaccagcctgaccaacatggagaaactccgtctctactaaaaatacaaaaattagccrggcgtggtggcgcatgcctgtaatcccagctacttgggaggctgaggcaggagaatcgcttgaacccggtaggcgaaggttgcagtgagccaagatcgcc

SEQ ID NO: 344270 - DNA, 201 bp, Homo sapiens
ggctaggctggtcttgaactcctgacctcaggtgatccacccgccttggcttcccaaagtgttggaattacaggcatgagccgccgtgcccggcctttttwatttttattttttttgagatggagtcttgctctgttgccctggctggagtggagtgacgtgatcttagctcacagcaacctccgccttttgggttcaagc

SEQ ID NO: 344271 - DNA, 201 bp, Homo sapiens
gctcaagtgatcgtcccacctcagccccctgagcaggtgggactacaggcgcacaccaccacacccagttaatttttacatttttttcacacagtgtctckctgtgttacccaggctggtctcgaactcctgagttcaagtgatcctcccgtcttggcctccccaaagattacgggcatgagctgctgtgtctggccagaa

SEQ ID NO: 344272 - DNA, 201 bp, Homo sapiens
ccagttaatttttacatttttttcacacagtgtctcgctgtgttacccaggctggtctcgaactcctgagttcaagtgatcctcccgtcttggcctccccraagattacgggcatgagctgctgtgtctggccagaatacaggattttaaaaatttatgttttgcaacataattaatataaagacaaatataacccaggcc

SEQ ID NO: 344273 - DNA, 201 bp, Homo sapiens
tgccagtctttgtatggaaatctttcttttgtcatctagtttaagctgggcagcaagaggtaggttgatcttgtgtgggtttgggttttttttttttttttgagacggagtcttactctgtcgcccaggctggagtgcaatggcgtgatctcggctcactgcaacctctgccacccggattcaagcgattttcccacctcg

SEQ ID NO: 344274 - DNA, 201 bp, Homo sapiens
cccagacccccgaggcagaaacctttcccttctccttcctcgacatccaaatgccctgagtcaggagccagcgtatgaagtcctgtcccctgttcagcctrtaggagggatttctcggtctacttcctccctggccagcaagtaaaacttgagttcattcagtgagtatttattacaccctacccagacatcagcattctg

SEQ ID NO: 344275 - DNA, 201 bp, Homo sapiens
caacaactagaaacaattttgtcgcagctggggggtgggaggtgtgttcctggcatctatctaatgggtgggggcgagggacgcagcccaacaccctacastgcacaggacacagcgagatccggcctcaaatggcagccatggcagcgtcagccctccagggggcgcgcccctggcgcaggtggtgtgccggcccacagc

SEQ ID NO: 344276 - DNA, 201 bp, Homo sapiens
tgcaagcagttctagatcgaggagaggggttcctagcatgggacccagcagaaggactgtccttcgctccttcattgtctacgtggacagtggatgaagcycagccgaacctgccttgttcccgttttctgggtcagcagggaaagcctttcacagagtagccaccgtgccatcctgaggaaggccctgggtcagaagctt

SEQ ID NO: 344277 - DNA, 201 bp, Homo sapiens
ttttctgggtcagcagggaaagcctttcacagagtagccaccgtgccatcctgaggaaggccctgggtcagaagcttctgtgcttctttgtaccccgggcragacacacaggtgctcacactgctctgtagaaactgttggcatccaagagagactcacctggaaatctctggaaaacctgaagctcctagctgggggtgc

SEQ ID NO: 344278 - DNA, 201 bp, Homo sapiens
ccaggaaggccagcaccccgatggcactgccatagcggcaggcatcctcgttgcggttgaacacgcagtacatctgcttagactcgtgggcattgctgtasccctcaccatagatgcaggagaacacgatcaaggcgaagacctgccgggaggggaggacctggtagggctggtggccgcctgaggggcacacacagcggg

SEQ ID NO: 344279 - DNA, 201 bp, Homo sapiens; identical to SEQ ID NO: 72707

SEQ ID NO: 344280 - DNA, 201 bp, Homo sapiens
cttgggaatgagccccaagtgtaaacacaaaatccatttatgttttatagacatcttaggcacatagcctgagagtaattttatgtatttagtaatttggrcgtgagccacagtttttgactgtgacctgtcccatgaggtcaggtgtggaattttccacttgtggtgggcgctcaaaaagtttcagattttggagccttt

SEQ ID NO: 344281 - DNA, 201 bp, Homo sapiens
gtgggggtatggctctgcctccttcctgtcctggcccttcacccatcccctgtccctgcggccaggtcgaggtgattgggggagcagacaagtaccactcygtgtgtcggctctgctacttcaagaaggcctcaggccagcctgccgggccggacaacaaagagaactgcccagtgccaggaaagccaggggaagccgtgg

SEQ ID NO: 344282 - DNA, 201 bp, Homo sapiens
cctgcctcagcctcccaaagtgctgggattacaggcgtgagccaccacgcctggccacacttagtctagttctataccctggaggaagaataaatgagttkgtttggtgagtgcttcgaggtctctacccgccctgcctcccagcacagagccaggccgctctggcctgaataccctgcccggacgtcacagggcctgtcc

SEQ ID NO: 344283 - DNA, 201 bp, Homo sapiens
agctgggcagcaagaggtaggttgatcttgtgtgggtttgggttttttttttttttttgagacggagtcttactctgtcgcccaggctggagtgcaatggygtgatctcggctcactgcaacctctgccacccggattcaagcgattttcccacctcgcctcccaagtaggtgggattacaggcacccaccatcatgcctg

SEQ ID NO: 344284 - DNA, 201 bp, Homo sapiens
tcagatctggcagcgtcttcgctggggctccagggagctgctgctggggtggaagctctcacactctttctccacgtgccctttccagttccctgacatcrtggagttctgcgaggccatggccaacgccgggaagaccgtaattgtggctgcactggatgggaccttccagaggaaggtaaggcgtctgatccaggtctg

SEQ ID NO: 344285 - DNA, 201 bp, Homo sapiens
tagtttccctgtcatagtgtcatagtcttgtaggattcgttttacttttttttttttttttttgagacggagttttgctcttgttgcccaggccggagtamgatggcacaatctcaccgcaaactttgcttcctgggttcaagcaattctctcctgtctcagcctcccgagtagctgggattacaggcatgcgccaccacg

SEQ ID NO: 344286 - DNA, 201 bp, Homo sapiens
gagtgagtgggggctgaggaccttcatcctgaaaccctgatgcaggagagtctggggtctgccttctaccctcatgtggcgggtgaaggagcaaggttctyaactcaggagggttcttcccctctccattcccacccaggggacatctcacaacaactagaaacaattttgtcgcagctggggggtgggaggtgtgttcct

SEQ ID NO: 344287 - DNA, 201 bp, Homo sapiens
acaggcagatacctgagaagagcaggtcaccaatgaccaggtacttgcggtcagtggcgttgctgatctgggggaaatacgcgtcgaccaccaagaagaargccgaggccaggaaggccagcaccccgatggcactgccatagcggcaggcatcctcgttgcggttgaacacgcagtacatctgcttagactcgtgggcat

SEQ ID NO: 344288 - DNA, 201 bp, Homo sapiens; identical to SEQ ID NO: 72713

SEQ ID NO: 344289 - DNA, 201 bp, Homo sapiens
caggtgtggtggcccacgcctttaatcccagcgctttggaaggctgaggtgcgttgatcacttgaggttaggagtttgagaccaccctggtcaacgtggtraaaccccatctctactgaaaaaaaaaaccaaaaattatctgggcatggtggcagcctcctgtaatcccagctactcgggaggttgaggcaggagaatctc

SEQ ID NO: 344290 - DNA, 201 bp, Homo sapiens
cgcccctttaaacttggtgggcggaccgaggcggggctcagaccaggccccaccccgatcagccacgtccatcgccctgatttccaggccctcccagtccytgggcgcacgtcccggattcctcccacgagggggcgggctgcggccaaatctcccgccaggtcagcggccgggcgctgattggccccatggcggcggggc

SEQ ID NO: 344291 - DNA, 201 bp, Homo sapiens; identical to SEQ ID NO: 72722

SEQ ID NO: 344292 - DNA, 201 bp, Homo sapiens; identical to SEQ ID NO: 72724

SEQ ID NO: 344293 - DNA, 201 bp, Homo sapiens
tacctgcaccgggaggtggtggagctggcccagggctatgataacgtgcgggtgacgccctggcgcatggttaccatctggggcggggccagcctcctgasgatgtacctgcggagcatgcgggacctgctagaggtgcctggctgggcctgggacttcttcatcaacctcagtgccactgactatccaaccaggtgtggg

SEQ ID NO: 344294 - DNA, 201 bp, Homo sapiens
caggtagaagtccctagaggatctgatttaatgagcacacaagatcaatatttaattaacatatcaattgccgggatgtcaactgatgttttccaaaatcrttgaagtgtaggctctcttaagtagccaaactgtcgtcggaaacatagtttacaattctcccatttaacaaacgcggaggaacagaatgattacaaatgc

SEQ ID NO: 344295 - DNA, 201 bp, Homo sapiens
gagtgctgggtcttaggtggacacttgtaccctcggtggggtctttgcacccttcccttgggacacacgtagatatttattttaacatctgctgaaaaagraagtggtatctgagtccagaacagaaaaccaagcacactgccatgtaatctgagagccagtgggggacgggggtgttggtatgatggagggaggcccagt

SEQ ID NO: 344296 - DNA, 201 bp, Homo sapiens
caatggggctgggagggatctgggactgagaagtgcagagatctgggcgagttggagtcccactggctgtcaggttcagcagaagcagggcctgttccccscaacccctgctctgaaggttgtagtgggacactcatagctgccaggcctgcagaggcaggagaggctgagctcctggaaagctgcttacagatgcccctg

SEQ ID NO: 344297 - DNA, 201 bp, Homo sapiens
cagtgaccaggccagccggctccagagtctggaggtgggacaggtcccccacttgctttctcccaacccccacccagacttggggtagtgggaagagaggracagacaccaagggaggggtaaggttatttttcccagtcatggcagccatggtgatgcccccatgcagacatcctgtgtcaccccccagcctgtgcacac

SEQ ID NO: 344298 - DNA, 201 bp, Homo sapiens
cctggaggcttgggttttttgaggtttctttgaaatccactcctggctgggccactggggtcaaaatcaggatttgggccaggcaggacacagagtggggrcggggagcggccaaaggcaggctgggcccccagagctgcacaataactgctttggagggaggaggagagcctgggcagagaggcttttgtatttcatggc

SEQ ID NO: 344299 - DNA, 201 bp, Homo sapiens
ccactgcctagcagtcagaatggaagcctagaacgaatctcagagctgggagagatattaaaggtctcctagtctgaccccttcattttgcagatggggamactgaggcccagaaagagacagtgactggcctgagattacacagtgagaggcagcttcagaggagggagaaggacctttcccccacactcctgcccagct

SEQ ID NO: 344300 - DNA, 201 bp, Homo sapiens
gggatcctacctccctgcctaagtcttcatccagtgtacttactaagtggcagaggcagagtggggacccacgagcatggagctccaagtctaggtttcttcggaaggcaggcagctccctcttcccatctcacccccaccctgtgacctagggtgggcctcgccaacgcctgtcctctgctctcagggaagatgagcccc

SEQ ID NO: 344301 - DNA, 201 bp, Homo sapiens
cgcagtgaccaggccagccggctccagagtctggaggtgggacaggtcccccacttgctttctcccaacccccacccagacttggggtagtgggaagagarggacagacaccaagggaggggtaaggttatttttcccagtcatggcagccatggtgatgcccccatgcagacatcctgtgtcaccccccagcctgtgcac

SEQ ID NO: 344302 - DNA, 201 bp, Homo sapiens
tcaaggaacaggaggaggtgagggtctgccccagtgatgtgtctgcatctctcttacagaaaggaaggcagaggaagccacggccactggaccctggcgarggttccaaggacacagacagttcagcagggcgacggggcagcacaggcagaaggcatgggcgctggcggggccgtgctgagagcccaggagtgcccgtgg

SEQ ID NO: 344303 - DNA, 201 bp, Homo sapiens; identical to SEQ ID NO: 72756

SEQ ID NO: 344304 - DNA, 201 bp, Homo sapiens; identical to SEQ ID NO: 72754

SEQ ID NO: 344305 - DNA, 201 bp, Homo sapiens; identical to SEQ ID NO: 72757

SEQ ID NO: 344306 - DNA, 201 bp, Homo sapiens
ctctcccactccagcaagtctccagacccaccttcttcgcccggaagttcgagtcgactgtgaaccaggaggtgctggaaatcctggacttccacctgtayggcagctacccccccggcacgccagccctcaaggcctactgggagaacacctacgacgcggctgatggccccagtgggctcagtgatgtcatgctcactg

SEQ ID NO: 344307 - DNA, 201 bp, Homo sapiens
ggtttgagcccaggggcttgccgtccagcgtgcacctgtatttctatgacgaccatttccagggctacctggtgacgcaggcggtgcagccctcagcccasgggccggcagagacgcttgagatgtggctgatgccccaagggtcgctgaagctgttggggcgcagtgaccaggccagccggctccagagtctggaggtgg

SEQ ID NO: 344308 - DNA, 201 bp, Homo sapiens
tgtcccaacccctcccacacagttgggctcggtggctccagccctgggtttcaaagcctccacaccagtcacaggttgaggagtgttggttgccaggcggrtgaaagagcttagaccccaccctgcaggatccccagccatggcctctctgctgcccacaggttcatcaagaaacagggcctggaccggctcttccatgag

SEQ ID NO: 344309 - DNA, 201 bp, Homo sapiens
tgtgggtagggtagtgggtaggttgggggaagtcctggggaggtgaggagcacagagaacccaacccagccgagtccaagatgtccaggatcttgggtctytcttgacttcacgtttgactaatttcctcctcccatctgagtaatcataatgataaagatagcagcattgggccaggtatggtggctcacgcctgtaatc

SEQ ID NO: 344310 - DNA, 201 bp, Homo sapiens
ttcgagaccagcttggataacatagcaagactatctctattaaaataaataaaataaaaagatcagaaggctggctgggtgctaggcacagagggcatggmtgtaggcatggggctctggcctgaaggtagctgtcagcctgacagcatgaggttcctgatgtgcccatactggtagtgggtagggtgtgggtagggtagt

SEQ ID NO: 344311 - DNA, 201 bp, Homo sapiens; identical to SEQ ID NO: 72748

SEQ ID NO: 344312 - DNA, 201 bp, Homo sapiens
agcgcttctctgggtaaaaggtgggcaggaacatctaggtctgagggtgcccccaaccaagatggaactcaaggaacaggaggaggtgagggtctgccccmgtgatgtgtctgcatctctcttacagaaaggaaggcagaggaagccacggccactggaccctggcgagggttccaaggacacagacagttcagcagggcg

SEQ ID NO: 344313 - DNA, 201 bp, Homo sapiens
gcagtggggctatctgggggagggtttgccaggcacaggggatagtgggtgcaagggttggagccaggagtgccaggggggatgaggggacgcagagaaarccactgtggctgcaggagagtgagcatgacaaattcccagatgaggtcagagaggcctgggtggagaagggggcatccagacagctcatggagcctctgt

SEQ ID NO: 344314 - DNA, 201 bp, Homo sapiens
acctggtgttctgggtcagacagcaaggggcaaaggaaggatggggtggtcttcctcaggggcctctggtgctcaccaccccagacatcagccaggggtasggcacatggccagccagcaatcaggcagagaagaaaagccagaaggtccgctctgggccagtgactgagcaactatctcatgtggctgcctgtcacccca

SEQ ID NO: 344315 - DNA, 201 bp, Homo sapiens
ccagctgctgtgatgagaacggaatttaggggaacaagagtaggagctggaagaccagggaatccaggcagggatagtgagggaggtgttgagaagggatsgcattccacatgtattctgaaggtggccccgatgggatttactgatggagtggatgtggggtgtgagggaaagagagtcaaagatgactcctggctgggc

SEQ ID NO: 344316 - DNA, 201 bp, Homo sapiens
cagcccaggggccggcagagacgcttgagatgtggctgatgccccaagggtcgctgaagctgttggggcgcagtgaccaggccagccggctccagagtctrgaggtgggacaggtcccccacttgctttctcccaacccccacccagacttggggtagtgggaagagagggacagacaccaagggaggggtaaggttattt

SEQ ID NO: 344317 - DNA, 201 bp, Homo sapiens
ccgtgacatccgtggggtgtagacctacaagtaggacaagcaagtaggagagtgtttcaggcccagtgtaagaagactgtttgggcagatgggacattccragatggaatgggctgccaaagcagttagggagccctctgaccctggaatatgtgaccactctgggctaccgcccccatcccccaccacctcctcctccag

SEQ ID NO: 344318 - DNA, 201 bp, Homo sapiens
agctgcctctctctctacaggttggcactgattgggaccccaaagagcgtcttttccggaactttggggggttactggggccgctggacgagcctgtggcygtgcagcgctgggcccggggccccaacctcacagccacagtggtctggatcgacccaacctatgtggtggccacatcttatgacatcacagtagatacgg

SEQ ID NO: 344319 - DNA, 201 bp, Homo sapiens
tcaccaggaaaatggcagggtgggccagtaagagaatctggggggccacggcctgcagcaaccctcaggggtctggggctacaacagcagcaggaaaagcygcaggaggctgagctctaggcagtgctgaggggccagccccaccatgccctctggggcttccagagcccttcaccctccttgcctctcccactccagcaa

SEQ ID NO: 344320 - DNA, 201 bp, Homo sapiens; identical to SEQ ID NO: 72747

SEQ ID NO: 344321 - DNA, 201 bp, Homo sapiens
gctggcaccttaggtttgagcccaggggcttgccgtccagcgtgcacctgtatttctatgacgaccatttccagggctacctggtgacgcaggcggtgcarccctcagcccaggggccggcagagacgcttgagatgtggctgatgccccaagggtcgctgaagctgttggggcgcagtgaccaggccagccggctccaga

SEQ ID NO: 344322 - DNA, 201 bp, Homo sapiens; identical to SEQ ID NO: 72753

SEQ ID NO: 344323 - DNA, 201 bp, Homo sapiens
gtgtggaggtggctcagggctcaccagctccaggcagtacatgtgccggagttttcccaggagccggccaggacttcctcgaggctgtgctggaggtggaygctcttcttgcccctctccttgcatggccgtctcctttgcggtccaaagcctttccctgccagctcctgccccatcgttcacaggggtacccgcagtgaa

SEQ ID NO: 344324 - DNA, 201 bp, Homo sapiens
gagcccagcccattccactgcagggcaaatggaatggctgcatgccaggggccttggagctggatctgaaagcatggatgggatttggtcaggcagggcargtaggatgggggaacggaggaggaggtggctggacatgctgttcagtcaccaccaggccatctagggaagtgcctggatttgaggagaggcagcaggtac

SEQ ID NO: 344325 - DNA, 201 bp, Homo sapiens
gcacaggattcagtgtgcatttaagacgtgcactctgcccatctatggagaggctgagagtggatcccagggatggtcacgaacctccagagagccacttkatagtttccaaagcttccacaaacaccatctcaccacttgttttaaatgcagcccgagaagtcaaaggaggtggggtatggggggagcatttctgtgttc

SEQ ID NO: 344326 - DNA, 201 bp, Homo sapiens
gggccctggtggattgggagtcgggcggggggagcaggtcatgctagggtggtctccggccaagggagcgatgaaggtcaggcgcggcgagcggggctggkaggcggggctgggcccgaacctgctcggaggtggggagccccaggccaaactttctgaagttgggagggggcggggatatgcgcgccgtgggcggaggag

SEQ ID NO: 344327 - DNA, 201 bp, Homo sapiens
gttggtgtaagatgatctaagaattgagcatgataggagatggggaggaggaggagccagaggtctgtacctggtgttctgggtcagacagcaaggggcaraggaaggatggggtggtcttcctcaggggcctctggtgctcaccaccccagacatcagccaggggtagggcacatggccagccagcaatcaggcagagaa

SEQ ID NO: 344328 - DNA, 201 bp, Homo sapiens; identical to SEQ ID NO: 72762

SEQ ID NO: 344329 - DNA, 201 bp, Homo sapiens
agcttcagaggagggagaaggacctttcccccacactcctgcccagctgcctctctctctacaggttggcactgattgggaccccaaagagcgtcttttcyggaactttggggggttactggggccgctggacgagcctgtggccgtgcagcgctgggcccggggccccaacctcacagccacagtggtctggatcgaccc

SEQ ID NO: 344330 - DNA, 201 bp, Homo sapiens
ggctacctggtgacgcaggcggtgcagccctcagcccaggggccggcagagacgcttgagatgtggctgatgccccaagggtcgctgaagctgttggggcrcagtgaccaggccagccggctccagagtctggaggtgggacaggtcccccacttgctttctcccaacccccacccagacttggggtagtgggaagagagg

SEQ ID NO: 344331 - DNA, 201 bp, Homo sapiens
gcagagcaggggcaaccaacagccgtctcagcccccaagtccctgcctcgagggtctttctccctcttccccgatgtggtttcagcgggaggctcagacayctcagcggtgtggtgaggaagggtccattgggtctgggttcgtgctgcggagatggagaggacaggccacaccacagccctaagctgtggcccagaggtc

SEQ ID NO: 344332 - DNA, 201 bp, Homo sapiens
gcactccagcctgggtgacagagtgagaccctgtctcaaaaaacatctaatccagctcctttttctgaggggtaaacaggcccagagaggctcaaagactwcttctttgccacccagcaagccaggggaccagcaggacctgagcttagtttgagagccctgacccagcactcccacccccaccaccaggccaggctgcag

SEQ ID NO: 344333 - DNA, 201 bp, Homo sapiens; identical to SEQ ID NO: 72752

SEQ ID NO: 344334 - DNA, 201 bp, Homo sapiens
attttcattgttgtggggggaattcttggcaggtagaagtccctagaggatctgatttaatgagcacacaagatcaatatttaattaacatatcaattgcygggatgtcaactgatgttttccaaaatcattgaagtgtaggctctcttaagtagccaaactgtcgtcggaaacatagtttacaattctcccatttaacaa

SEQ ID NO: 344335 - DNA, 201 bp, Homo sapiens
gtctgggatgagcagagcagaaacagaaggttgcagacagacagagtctctgacctggcccaggtagcctagagagggaaactgaggccctgaacaggggrgtggcagcacgagccagctcagccgcttaggggctggagccctgccctgtgctttcctcgtcttgtgtcccttcactctgtcctggggtgggattgggga

SEQ ID NO: 344336 - DNA, 201 bp, Homo sapiens
tgcactccagcctgggtgacagagtgagaccctgtctcaaaaaacatctaatccagctcctttttctgaggggtaaacaggcccagagaggctcaaagacktcttctttgccacccagcaagccaggggaccagcaggacctgagcttagtttgagagccctgacccagcactcccacccccaccaccaggccaggctgca

SEQ ID NO: 344337 - DNA, 201 bp, Homo sapiens
cccgagtgccagaggggcaggatccttccctgaacctgagccatagcactttgaggagtttcccagttttcaaagcagtatgaccaagtgatctcagatamtccaatctacacaaccccctttgagacagatggtgttattttcttttttttttttttttcctttttttttttttgagatggagtctcactgtgttgccca

SEQ ID NO: 344338 - DNA, 201 bp, Homo sapiens
ggtggaagtcctgggcaggaccttttcctcccttcaacaggggacccagtcgtcccctcctctctctgtaaaaatggagggtctgcctgaccctccagggscagggggtatcctggaagataccagctcacttgctggaatcaccaaagagggacataggggacctgtttacctggcccccacctgtttaatggcggccag

SEQ ID NO: 344339 - DNA, 201 bp, Homo sapiens
gcaggggagtaaatataatacatacatacatttatatttatagaaatctcaggaagaaattgcagcatgggaagatggacagcaaagcaccgatgtcctgmtagaacgtcctggcaggtgggggctggcagagttggggcatgggctttaaaaccctttctggaagcaaggggtggggcaaggatctgatgattgtttcca

SEQ ID NO: 344340 - DNA, 201 bp, Homo sapiens
tttaaaacacaggctaaatattaatcctttgtctcatatataaaatgaaatttataaatccaggctgttgcttgtcttttagccttgttgatgatgtatgyttctctgtggacctagggaccagcctcccatggggggtaaggagcagaggccagtccatggcttggaacaaaacaggatattgctttcaatttaattttg

SEQ ID NO: 344341 - DNA, 201 bp, Homo sapiens
agctatgctcccagtcttttatatagggggcaagaaggacgctgtaaaaatgtgggtgggagggagggagatccccagtgtccctggacaccagcccaggsccagctgccaggtgtaggaaaggctcggggtcagaggagaaaagggaatgttcctcccctgaatgagctgtaggtgaaaggactccactgggcctggaga

SEQ ID NO: 344342 - DNA, 201 bp, Homo sapiens
gatctaagttattggttttacctgctgtatagcagtccatgctattactatatctctagcagtgaaattgctgtgctgaagagttcttttttaggtattgycctggcgagactgtgctactgtgaccaccagcagcaaccaagttttgctattttcccacatccttgcaaatatttagcattgctggactttaaagtgttt

SEQ ID NO: 344343 - DNA, 201 bp, Homo sapiens
ggcctctcccatcttcaatggcaagaaggcactggaggccatcagcagagagaggtgggcactggtggacaggctacttgtgggctgataaaaccctcttsttcctcactcctgggccctgacacctttccaagctgcctcctccctccagccaggagactgaggatggggacagtggaggacccccaggagaggaccagt

SEQ ID NO: 344344 - DNA, 201 bp, Homo sapiens
ggtgggtgtgtcccaggttagtgggtggtgcatcattcagcatccctgattccttcacttcctacccaccctgccccctccctcagcccctgtctctcacmatcgtccccaaccccaggctcccagatctgaccacagtcatctcggtggatgcccctttgccggggaccctgctcctggatgaagtggtggcggctggca

SEQ ID NO: 344345 - DNA, 201 bp, Homo sapiens
caaggagagcgtggttggtcagacacaaacctggcgtgagtgtgcagggacgggggcatgtgtgtgtcagggcagaggtgtgtgtgtgtgtgtgtgtgtgygcgtgtgtccatcctcatatgtgatgcatatgtgtctcagggtgtggtgtgtgtgtctcggggctggtacatgtgtgcatttgtcttggagtgtggtgcc

SEQ ID NO: 344346 - DNA, 201 bp, Homo sapiens
tctccctttagaactaaacatgttgtatttctagcttacaaatcgtgctttataaacctcagtggcatgcatgtattcctccatttgggagttagttgacrggaaagcaaatcccagtcctaccagtcctaacttagtgtggctttaggcaagttactgaacctccgcagaccttagtttgtttgtaaaataggctgtttg

SEQ ID NO: 344347 - DNA, 201 bp, Homo sapiens
gctgatgaataaaacaagcttgctcttgttctcagcctttcctttgaggcagggctgatccctggaaacccttgactggtgtctgggtgggaattctgacwgatttgaaagtaggagaggatcccctgattggtggcctctttctggaacccaattatttctcctagctgattgccaagatggtgacttccacccagctac

SEQ ID NO: 344348 - DNA, 201 bp, Homo sapiens
agagttgatccgagccatcatcaacaagataaatatgaaggacctggtggtgagtggtgactgcggcccgggctgtgggcaggccaggcctgggatgacarcagatggacagacatggggatgagtccaggccagatgttcaaaggagaccctctcagccagccctccttccagaaagcagatgtgagaaaagatagtctg

SEQ ID NO: 344349 - DNA, 201 bp, Homo sapiens
ccccagtcccccactcccccttagcacacatgcacagcccccaccaggaacagggtctctttgtgggcctgatctgcccagctcctctggaaggctcctcrataaacaaaccttcctttatggggtggtaggtttactggagacgggaaaaacagcagaggaggggtggaaggcccaacaggaagaggtggctgctgctca

SEQ ID NO: 344350 - DNA, 201 bp, Homo sapiens
attggcctctgcaaaggtgaccggctgggcatgtggggacctaactcctatgcatgggtgctcatgcagttggccaccgcccaggcgggcatcattctggwgaggaggggcttgcttggcacagcttggtgtgcatgggggaacatcactgaaggggagcccctcaggccctcagccccaggatcaaaccagtgccttgtt

SEQ ID NO: 344351 - DNA, 201 bp, Homo sapiens; identical to SEQ ID NO: 72766

SEQ ID NO: 344352 - DNA, 201 bp, Homo sapiens
gtgacctctagcccccgactttagttgccagccctgagtgtcacagaatgccacagctatttcacctgcattgccctgaaccagctggctcgtgttttctstccagttcctgctggtaggcaaggctgggctgggcagggctaatgctggggcagaaggctttccaggtgggtccgaccaggtggctgcacaggtagggtg

SEQ ID NO: 344353 - DNA, 201 bp, Homo sapiens
tctgtgttctttggtggggggacccccagtctagccagtccccacacggtggctgctgtcctggaggctgtggcacagacagcccacctgcctgcagactyggaagtcacattggaggctaatcctacttcagctccgggctccagactggcagagttcggggcagcaggggttaacaggttgtctataggcctccaggta

SEQ ID NO: 344354 - DNA, 201 bp, Homo sapiens
attctctttccccagggtggagtctgtgttctttggtggggggacccccagtctagccagtccccacacggtggctgctgtcctggaggctgtggcacagrcagcccacctgcctgcagactcggaagtcacattggaggctaatcctacttcagctccgggctccagactggcagagttcggggcagcaggggttaacag

SEQ ID NO: 344355 - DNA, 201 bp, Homo sapiens
ggggtggtgagaacatctaccccgcagagctcgaggacttctttcacacacacccgaaggtgcaggaagtgcaggtgaggcacttggctcaggtgagcccycagaaacaagaaacacacatgaacacggtgatgtctgatatttttctttggccctggaaggtggtgggagtgaaggacgatcggatgggggaagagattt

SEQ ID NO: 344356 - DNA, 201 bp, Homo sapiens
tgattgtttccacgtggcagggaaagaggaacagaggaaggatgatcctgggagggtggccatcctgatgaccaacctgttgtggttctgattgacttggkgggggggtctcagcaacagcttctccaagaggagctggagggtggggaaggcatgaaggctggggagaggctcagccttccttctccccaggacactgct

SEQ ID NO: 344357 - DNA, 201 bp, Homo sapiens
agcaatatataaggattacagtgtcctcacatgcttgccaacacttgttattttgtttttttattttttatttttttgagacagagttttgctcttgtcayccaggctggagtgcaatggcacaatgttggctcattgcaaactccacctttcaggttcaagcgattctcctgcctcagcctcccaagtagctgggattac

SEQ ID NO: 344358 - DNA, 201 bp, Homo sapiens
cagccaggaggccgaggctgagcaagagcattgggcggaccatggctgggacgcctggggccggggctgggggcagcagcggcggcggggcgcgggcagcsgcgagtcctaggcgctcgggtctgccgccctctttatacggtggccctgaccgcagccggcagccgagccagctcctacgtggagcatcgaggccactgg

SEQ ID NO: 344359 - DNA, 201 bp, Homo sapiens
gggtagttcctgaaaggccgatggagaaaactggggagtaggttactactcccgtgactgcccaggcctctacccagacctgtttccacctgtgcactgaratggataggtagccacatgtgagaggtgaagagtcccggccccagactagaacccgagccaggtcccgagctggctgcttcctccactcaacatccccag

SEQ ID NO: 344360 - DNA, 201 bp, Homo sapiens
cccagggccccctaggctgaggaccacaccattggtggccatctctggccaggagggtgtggaggtttggagggacatgcagcatcttccttcatcactartgggatgggaagaggaccagttttccactctagaccttggcagatctcagtagaccctgagggcccacagatttcatagacatatggaattgaatgaaat

SEQ ID NO: 344361 - DNA, 201 bp, Homo sapiens
tctttaagtcactgaccctcaccaactgaccattctcctgacttctaacagcatagattagttttgcctattttgtacgtataaatggaattagacagtayaccttttaaaatctggcttctttcattgaacattgttttatgagattcagattgctgggcataatcatagttcctttgctctcattattgtataattaca

SEQ ID NO: 344362 - DNA, 201 bp, Homo sapiens
cctgtgtcttaatttgaattctcctgagaacaaggacttgggtgcaggtagtttattttggagagtgatcctaggaagtggggataggaagtagagagagyaaacagggagtggggaagctgatgaggggatgttattaacatcatcaccctaggcaacaagagcttcattcacctggacctctgagaaggtacagatacc

SEQ ID NO: 344363 - DNA, 201 bp, Homo sapiens
aggtggcaggggagtaaatataatacatacatacatttatatttatagaaatctcaggaagaaattgcagcatgggaagatggacagcaaagcaccgatgwcctgctagaacgtcctggcaggtgggggctggcagagttggggcatgggctttaaaaccctttctggaagcaaggggtggggcaaggatctgatgattgt

SEQ ID NO: 344364 - DNA, 201 bp, Homo sapiens
ctgtgccatcatactcctggcaatgaacttcaggttttaaatccatgagcttggatctaagtctccactctgccaaacctgatgttccatacccatttgayctctgtaatccaaataatagattccattgtagggatggatatgccacattttgtttatccgttcatctgttgctggacatttggtttgtttccgcctttt

SEQ ID NO: 344365 - DNA, 201 bp, Homo sapiens
ctcactgcaagctccgcctcccgggttcacgccattctccggcctcagcctcctgagtagctgggactacaagtgcccgccaccatgcccggctaattttyttgtatttttttagtagagacgcagtttcaccatgttagccaggatggtctcgatctcctgacctcgtgatctacccgcctcagcctcccaaagtgctgg

SEQ ID NO: 344366 - DNA, 201 bp, Homo sapiens
ttcccagttttcaaagcagtatgaccaagtgatctcagataatccaatctacacaaccccctttgagacagatggtgttattttcttttttttttttttttcctttttttttttttgagatggagtctcactgtgttgcccaggctggagcacagtggcacgatctcagctcactgcaagctccgcctcccgggttcacgc

SEQ ID NO: 344367 - DNA, 201 bp, Homo sapiens
ctgtcctaaagactgtaggcaattgtaacacaagggtaagtagtcgtgtatgtgaacatatctaaacgtagaaaaggtatagtcaaaatacaatattacartataatcttatgggaccactgtcatatatgccatccatcataagccaaaatgtcattttgcagtgcatgactgtattttagagtccagtagctgaggtca

SEQ ID NO: 344368 - DNA, 201 bp, Homo sapiens
ggagagcgtggttggtcagacacaaacctggcgtgagtgtgcagggacgggggcatgtgtgtgtcagggcagaggtgtgtgtgtgtgtgtgtgtgtgtgcrtgtgtccatcctcatatgtgatgcatatgtgtctcagggtgtggtgtgtgtgtctcggggctggtacatgtgtgcatttgtcttggagtgtggtgcctgt

SEQ ID NO: 344369 - DNA, 201 bp, Homo sapiens
acattgtcaacaactccaacattttaggagagcgcctgaaactgcatgagaaggtgaggcggcactaggcccagggcaaggctgcaggaggggtggctcasgcaggggtggggggctggctgggctccccttgccagctagagaggaactggcgtctggctccaagacagacccagcctcctgtctccatcaccagacacc

SEQ ID NO: 344370 - DNA, 201 bp, Homo sapiens
aaggagagcgtggttggtcagacacaaacctggcgtgagtgtgcagggacgggggcatgtgtgtgtcagggcagaggtgtgtgtgtgtgtgtgtgtgtgtkcgtgtgtccatcctcatatgtgatgcatatgtgtctcagggtgtggtgtgtgtgtctcggggctggtacatgtgtgcatttgtcttggagtgtggtgcct

SEQ ID NO: 344371 - DNA, 201 bp, Homo sapiens
agatgttaacattgggaaaatttgaatattgatgctgaagaatgcatgagctatttctgtattgtttcttttttgtagttttttgtggttgttgttttggrtttgtgtgtgtgtgtgtgtgctgttgttgttgttgttgttgttgtttctgagacaggctcttgctctgttgcccaggctggagtgcagtgggtgtaatca

SEQ ID NO: 344372 - DNA, 201 bp, Homo sapiens
agaaatatcagctgctaaaggatcagagactagatatcttccccagcccccgagtttctctctctgcaaacacacacacacacacacacacacacacacamttttgccaccatctgaaaataagttgcaggcatcataatatccatatttttcatctttgcttatctcgtggggaacaaatgcctcatgtttgtttttctt

SEQ ID NO: 344373 - DNA, 201 bp, Homo sapiens
cagggacgggggcatgtgtgtgtcagggcagaggtgtgtgtgtgtgtgtgtgtgtgtgcgtgtgtccatcctcatatgtgatgcatatgtgtctcagggtrtggtgtgtgtgtctcggggctggtacatgtgtgcatttgtcttggagtgtggtgcctgtgagtgtgctggaggtgtgtgtgtcagaagcgggtgcatctg

SEQ ID NO: 344374 - DNA, 201 bp, Homo sapiens
gcagtgagctgagattgtaccactgcactccagcctgggtgacaagagtgaaactccatcccaaaaaaacaaaacaaaacaatttttttttttttttttttgtagagactgggtctgctatattgcccaggctgatctcaaactcctggaatcaagtgatcctcccgccttggcctccaaaagtgctgggattacagccat

SEQ ID NO: 344375 - DNA, 201 bp, Homo sapiens
gggtggctcaggcaggggtggggggctggctgggctccccttgccagctagagaggaactggcgtctggctccaagacagacccagcctcctgtctccatsaccagacaccagagcagttgcggatgatcctgcccaaccccctgtaccattgcctgggttccgtggcaggcacaatgatgtgtctgatgtacggtgccac

SEQ ID NO: 344376 - DNA, 201 bp, Homo sapiens
tgggctcaagtgatcctcctgcctcagccttccaagtacgtaggactatgggtacacgccacaaagcccagctaatttaaaaaattttttcatagagatggatggcactgtgttgcctaggctggtctccaactcctgtgctcaagtgattttcccacctcagcctcccaaagtgctaagattactttacagacgtgagcc

SEQ ID NO: 344377 - DNA, 201 bp, Homo sapiens
aatgtgggtgggagggagggagatccccagtgtccctggacaccagcccagggccagctgccaggtgtaggaaaggctcggggtcagaggagaaaagggartgttcctcccctgaatgagctgtaggtgaaaggactccactgggcctggagaattggggagctgtgtcagccctctctctgattcaggtgtcattgctgg

SEQ ID NO: 344378 - DNA, 201 bp, Homo sapiens
cattcatcattaccaaggttgactgcactcctgtctttcccaccagacccttatctctgcaaggacagggactgtatttggctttgttcattttttaccaytgggccctctctgtggtgggtgtttcctaaatatttgttggaggaataaatgttggctaagtactccgtagggctgaggaggccatagtatgggtggccc

SEQ ID NO: 344379 - DNA, 201 bp, Homo sapiens
ggcagcaggagggacagggtctgcccagaatactgatatgccctcgccgcttccaccaggtgtctgtgaacccagcctaccaggctatggaactggagtaygtcctcaagaaggtacagctcatttgtcggggaggggcccggctggggcctggcacagggggctgcacagactctgcttgtcagagtctgacggtgtgag

SEQ ID NO: 344380 - DNA, 201 bp, Homo sapiens
ttagatgggatctcattatgttgcccaggctggtctccaactcctcggttcaagcaattctcctgcctcagcctcccaagtagctaggattacaggtgcaygccactgcacccagcgctcagtgagtgtttttttttgttgtttgtttgtttttaatggatcttgcttttggtgtcaagcctaataactttttgcctagct

SEQ ID NO: 344381 - DNA, 201 bp, Homo sapiens
tcacccttcagctgtcagcttaggcataaatttcttaagggagttttccttggagccccaggtgatcccagattccgtcttacaggtgctcctaggaccayggccccttccttatctcagctttctaaacatacattcatcattaccaaggttgactgcactcctgtctttcccaccagacccttatctctgcaaggacag

SEQ ID NO: 344382 - DNA, 201 bp, Homo sapiens
aaaactccgtctcaaaaaaataattttttttttttttactgtagtccttactagtctttgtagtcgtttgtagtttgttctttgtagttggtatttttcakaggtcacatactcctcagggtggttatgtcgagtggtagaaagatcatggggctttatgatataattacatacagtaaactgcacagatctttttttttt

SEQ ID NO: 344383 - DNA, 201 bp, Homo sapiens
catgcccagctaacttttaaattttttttgtagagatggaatctcactatgttgcccagactagtctcaaactcctgggctcaagcgatcctcccaccttrgctcagagagtactgggcttacaggcatgagccactgtgcctggcccaagtttttgtttgaacacatgttttcagttcttttgggcatatattataacta

SEQ ID NO: 344384 - DNA, 201 bp, Homo sapiens
tctgttgctggacatttggtttgtttccgccttttgggtattgtgaatagtgctgctgtaaacattcatgtacgggtttttgtttgttttgtttgagacartttcactctgtcacccaggcctgttgtgtagtggtgtaatggtagctcgctgtagcctcgacctctcaggctcaagtgatccttcagagtagctaggcct

SEQ ID NO: 344385 - DNA, 201 bp, Homo sapiens
tcctatgcatgggtgctcatgcagttggccaccgcccaggcgggcatcattctggtgaggaggggcttgcttggcacagcttggtgtgcatgggggaacaycactgaaggggagcccctcaggccctcagccccaggatcaaaccagtgccttgttggtttcaaaccaggtagtgctttctcctgaggcccaccaaggagg

SEQ ID NO: 344386 - DNA, 201 bp, Homo sapiens
gtgccaccacgcctgacttattttgtatttttagtagagatgggatttctccatgttggtcaagctggtctcaaactcccgacctcaggtgatttgcccgyctcggcctcccaaagtgctgggattacaggcgtgagccaccgtgcctggcctgtgtctggctttttttgctcagaagccaaggagtgcttttgggaggag

SEQ ID NO: 344387 - DNA, 201 bp, Homo sapiens
caggctggagtgcaatggcgcaatcttggctcatcacaacctccgcctcccaggttcatgcgattctcctgcctcagcctcccaagtagctgggattaccsgcatgtgccaccacgcctgacttattttgtatttttagtagagatgggatttctccatgttggtcaagctggtctcaaactcccgacctcaggtgatttg

SEQ ID NO: 344388 - DNA, 201 bp, Homo sapiens
aggttgagcagcttggtcttctctgacaccttggggatcttctgcagccccaccttgtcgcagatgacgtgctgcaggtcgctgtggcagtggcagttctkggggcaggcggccagcgccggcagcagaccagccaggaggccgaggctgagcaagagcattgggcggaccatggctgggacgcctggggccggggctggg

SEQ ID NO: 344389 - DNA, 201 bp, Homo sapiens
gcctgtccctttgtccccagtgactgtgatgagaactccgggctaagggctgagggtgggagtcttgggccccttcctgcttgccccctttcaccccttgygccccatcttttacactaggtggacaaagctgcttctggcctcctgagcattggcctctgcaaaggtgaccggctgggcatgtggggacctaactcctat

SEQ ID NO: 344390 - DNA, 201 bp, Homo sapiens
accttctccaggttggtgttgtccagccagagggtctccaggtatctgccaaaggactggaaggcattgtccgggatgcttttcagggggttgtgggacarcttcagctcctccaccacccgtagcttgctcagggcagctgaggggtagctggacagctggttcctgtccacgtggaatttggcgaggttctccacgtcg

SEQ ID NO: 344391 - DNA, 201 bp, Homo sapiens
agccgtgccagagccagagcagctgatatgggggaagcttggtgcagggaggaggatggatgagatctggtatccgttgattaaaggggacctaggatacrgggtaactagcctctcttcccttacccagtaccctcgtgttggggcctggtttccagggcctgcccttttcccaaacctctctgccccttgcctctagga

SEQ ID NO: 344392 - DNA, 201 bp, Homo sapiens
taatcccagcactttgggaggctgaggtgggcggatcacttgaggtcaggagttagatcagactggccaacatggagaaaccccatctctactaaaaatayaaaattagcctggcgtggtggcacatgcctgtaatcccagctacttgggaggctgaggcaggagaattacttgaacctgggaagcggaggttgcactgag

SEQ ID NO: 344393 - DNA, 201 bp, Homo sapiens
cctgtccctttgtccccagtgactgtgatgagaactccgggctaagggctgagggtgggagtcttgggccccttcctgcttgccccctttcaccccttgcrccccatcttttacactaggtggacaaagctgcttctggcctcctgagcattggcctctgcaaaggtgaccggctgggcatgtggggacctaactcctatg

SEQ ID NO: 344394 - DNA, 201 bp, Homo sapiens
cgccgaaggccccggagctggcaggtacacttccaggggttattggtaagggcgagggtctccaggctgtcgaaggggaagttggagggtagctggttcargcggttgttctccaaatggacgtgtttcagcgtggttacacccaggaaggcaccatctgagaactggggagcaaggtgggagcaaggtgggagcaaggtg

SEQ ID NO: 344395 - DNA, 201 bp, Homo sapiens
caggccaggcaaggtggtttatgcctgtaatctcagcactttggaaagcagaggtggtaggatcacttgagcccaggagttcaaggctgcattgagccgtyatcatgccactgcactctagcctgagcagcagagcaaaacctagactcaaaaaataaaaataaaggctgggtgggtggctcatgcctgtaatcccagcac

SEQ ID NO: 344396 - DNA, 201 bp, Homo sapiens
gtttataattcttcagctggctctgcagtccacaaacctctttctttgcagcagctgcctgcccactctgtttcctcagccctcccagcctgggactcagytcttctttcatgcccagctcaggtctctcactggctttgggtcgactctagcctttgtctcccttctctggatggggataagcagagccagggggcctca

SEQ ID NO: 344397 - DNA, 201 bp, Homo sapiens
tgctggactttaaagtgtctgctgctgggctcagtggcagtttgcttttcagaactttgtggaatttttttttccaaatatttttctttttcttttttttkgggagatggagtctcactctgtcacccaggctggagtacgacagcgctgtctaggctcactgcaacctccacctcccaggttcaagagatgctcctgcct

SEQ ID NO: 344398 - DNA, 201 bp, Homo sapiens
agagctcctggatgggtccgggaactcgcctgggcacaaggtgccaaaaggcaggcagcctgcccaggccctccctcctgtccatcccccacattcccctstctgtccttgtgatttggcataaagagcttctgttttctttggcttcttgctggtgggctctcttggcagctactacaggatggagaagggaagacactg

SEQ ID NO: 344399 - DNA, 201 bp, Homo sapiens
gagatatattggaccaatgagctataacacaagagtgaatatgttgaatgaggactgaggacttagctatgagtacagcatgtgaatttcatggacaagtsagggctcttgcttattgcataaatgttggtcttggctaggcacaatggcttacgcctgtaatccctacactttaggaggctggagtgggagggttgcttg

SEQ ID NO: 344400 - DNA, 201 bp, Homo sapiens
ttaaacagctcaatgtttcagagttctgtatgtattctagtattattcctttgtcagacatgtggcttacaaatgtttttccccactttgtagctttttttcatcctcttaaaagggtcttttgcagagcaaaattttttaatccttttttttttttaattttttgagaaaggcctcactctgtcaccctggctggagcac

SEQ ID NO: 344401 - DNA, 201 bp, Homo sapiens
ggaagtgttcttaccgccgaaggccccggagctggcaggtacacttccaggggttattggtaagggcgagggtctccaggctgtcgaaggggaagttggarggtagctggttcaagcggttgttctccaaatggacgtgtttcagcgtggttacacccaggaaggcaccatctgagaactggggagcaaggtgggagcaag

SEQ ID NO: 344402 - DNA, 201 bp, Homo sapiens
agatctaggatgcatgtccaacatgtcttagtgcagggctaatgtgcctctatcacatgagggtgggctctgggagtgacatggaagtgttcttaccgccraaggccccggagctggcaggtacacttccaggggttattggtaagggcgagggtctccaggctgtcgaaggggaagttggagggtagctggttcaagcgg

SEQ ID NO: 344403 - DNA, 201 bp, Homo sapiens
cacaggtggcatctgggcgggaggccttggcttccagccacctggagagacagaaacttgctggggctggggaagaaggtgggagtgctggggggaagggyagtgaactatggggccaggattgacttggccacaggatagtctgaagctgtcatcttcattttacaaatggggaaactgaggctcccagggtcccatgct

SEQ ID NO: 344404 - DNA, 201 bp, Homo sapiens
cgcttgaacccaggaggcagaggctgcagtgagccaagatcatgccactgcactccagcctgggagatagagtgatactttgtctcaaaaaaaaaaaaaaagtgatcctgcgagccatttccattttgtggatttgctggcaggtttcagaactctcctgctgtcactgtcagcatagcttctcatagtactaccaatgct

SEQ ID NO: 344405 - DNA, 201 bp, Homo sapiens
tagattagttttgcctattttgtacgtataaatggaattagacagtataccttttaaaatctggcttctttcattgaacattgttttatgagattcagatygctgggcataatcatagttcctttgctctcattattgtataattacaaataagtcaccacttatttatctgttccatcgttgatggacatttgggtattt

SEQ ID NO: 344406 - DNA, 201 bp, Homo sapiens
aaagtgggcaagtactagctcccaagctgccctagctgggcagaaccaggagcgtgggcacctggctatggggcaatgtgctagggctgccagagaacccygagggatggcaggagaaggagacaggactgacgcacaaggggtccaatgcctcctgtatcagcagctcctggggcacctgttaactatgcaggccccagg

SEQ ID NO: 344407 - DNA, 201 bp, Homo sapiens
aaaccagaacccacactgaaccaaaccccagccgtgccagagccagagcagctgatatgggggaagcttggtgcagggaggaggatggatgagatctggtrtccgttgattaaaggggacctaggatacggggtaactagcctctcttcccttacccagtaccctcgtgttggggcctggtttccagggcctgcccttttc

SEQ ID NO: 344408 - DNA, 201 bp, Homo sapiens
ctcaggccaggcaaggtggtttatgcctgtaatctcagcactttggaaagcagaggtggtaggatcacttgagcccaggagttcaaggctgcattgagccrtcatcatgccactgcactctagcctgagcagcagagcaaaacctagactcaaaaaataaaaataaaggctgggtgggtggctcatgcctgtaatcccagc

SEQ ID NO: 344409 - DNA, 201 bp, Homo sapiens
cagatctaggatgcatgtccaacatgtcttagtgcagggctaatgtgcctctatcacatgagggtgggctctgggagtgacatggaagtgttcttaccgcygaaggccccggagctggcaggtacacttccaggggttattggtaagggcgagggtctccaggctgtcgaaggggaagttggagggtagctggttcaagcg

SEQ ID NO: 344410 - DNA, 201 bp, Homo sapiens
gccccagggcagacccactgaggctgggaatctgcctgtccctttgtccccagtgactgtgatgagaactccgggctaagggctgagggtgggagtcttgrgccccttcctgcttgccccctttcaccccttgcgccccatcttttacactaggtggacaaagctgcttctggcctcctgagcattggcctctgcaaaggt

SEQ ID NO: 344411 - DNA, 201 bp, Homo sapiens
ggtgggagtgctggggggaagggcagtgaactatggggccaggattgacttggccacaggatagtctgaagctgtcatcttcattttacaaatggggaaaytgaggctcccagggtcccatgcttattaggtagcagatctaggatgcatgtccaacatgtcttagtgcagggctaatgtgcctctatcacatgagggtgg

SEQ ID NO: 344412 - DNA, 201 bp, Homo sapiens
atctgggcgggaggccttggcttccagccacctggagagacagaaacttgctggggctggggaagaaggtgggagtgctggggggaagggcagtgaactayggggccaggattgacttggccacaggatagtctgaagctgtcatcttcattttacaaatggggaaactgaggctcccagggtcccatgcttattaggtag

SEQ ID NO: 344413 - DNA, 201 bp, Homo sapiens
agtgggcaagtactagctcccaagctgccctagctgggcagaaccaggagcgtgggcacctggctatggggcaatgtgctagggctgccagagaaccccgwgggatggcaggagaaggagacaggactgacgcacaaggggtccaatgcctcctgtatcagcagctcctggggcacctgttaactatgcaggccccagggc

SEQ ID NO: 344414 - DNA, 201 bp, Homo sapiens
ggggggttgggggcaggcaaagctctctccatttccaaggaccacctatcctgaagcaagaggataggaagccccaacctgaggccatcctgtcccaggcscggatcatgaacatggaggcagggacgctggcaaagctgaacacgcccggggagctgtgcatccgagggtactgcgtcatgctgggctactggggtgagc

SEQ ID NO: 344415 - DNA, 201 bp, Homo sapiens
agcagtgttctgactcggtagctgggaaaatggctcataggaaaattgtatgaaaattatatgatcccagaaagagcttgggttgaattccttcctgacgkctgctggttggaagaggcagcgtaacaaaggagtgagcctcagttttctcacattgaagtggatgtaataaccccagtgcgacctgccttggggagttgt

SEQ ID NO: 344416 - DNA, 201 bp, Homo sapiens
cccgcccctgggggatcgctgcccccgtgcacaagcagctgcttcccctggggctgaccgctgtcctggcgtgaatctgccctgccctcccgccagagcarccatgtacccagggattgagtagggatgtgagcctcctcccgtgtgtgctacagctgcactgccactgtcactaagatgcccacctggaagggaaacagg

SEQ ID NO: 344417 - DNA, 201 bp, Homo sapiens
cttggacctcttggtggggaacttgcagctgcggaaggcgtccgtgtcacggatgtgctggcccttgaacttggcaggtgaggcacaggtggcatctgggmgggaggccttggcttccagccacctggagagacagaaacttgctggggctggggaagaaggtgggagtgctggggggaagggcagtgaactatggggcca

SEQ ID NO: 344418 - DNA, 201 bp, Homo sapiens
agcaggcagggtcacagctctggcctcagggtgagctccaagctgcctggcacaggatattgtctgtgatgaggggtggaaggagaaaccagaacccacaytgaaccaaaccccagccgtgccagagccagagcagctgatatgggggaagcttggtgcagggaggaggatggatgagatctggtatccgttgattaaagg

SEQ ID NO: 344419 - DNA, 201 bp, Homo sapiens
gatgtcagtactccaacaacacagatgatgcttgaagaaaatggtggaagtcctgggcaggaccttttcctcccttcaacaggggacccagtcgtcccctsctctctctgtaaaaatggagggtctgcctgaccctccaggggcagggggtatcctggaagataccagctcacttgctggaatcaccaaagagggacatag

SEQ ID NO: 344420 - DNA, 201 bp, Homo sapiens
tctgtagtcccctgagcaaaaagaagcatcaagttttgttttatacacacacacgcacacacacacttaaatatgtttttctttttcttttttttttttttgagacggagtctcgcactatcaccaggctggagtacagtggcgcgatctgggctcactgtaacctccgcctcctgggttcagcaattctcctgcctcagc

SEQ ID NO: 344421 - DNA, 201 bp, Homo sapiens
atgcgtctccctgcggtgggccagctgcctgcgctttaaaggggcgcttgtgcggcgcctgccgagcgtgagagccgccccggcgtcggtctcccacttcrgactcgacgcgccgaagctggccctgggtagacccgagctccttccccaccctcgggcgcgcccccacccctctcttccaaccccgcttgcgtttctgtc

SEQ ID NO: 344422 - DNA, 201 bp, Homo sapiens
gagcttatgctgaagatgggaataaagctggtcatgcattcaacaggccaacatgcaggctgtaatttcatcttctgggttggccttgccatgggactgtyctaataacgaagggtaggaacaattctgccagtgcctctccctttagaactaaacatgttgtatttctagcttacaaatcgtgctttataaacctcagtg

SEQ ID NO: 344423 - DNA, 201 bp, Homo sapiens
acagcttcagctcctccaccacccgtagcttgctcagggcagctgaggggtagctggacagctggttcctgtccacgtggaatttggcgaggttctccacrtcgtccagggccccgggctgcagggagctcaacgcgttttccgacaggtagagccagcgcaggtccttggctccctggaaggcgcctgcgcgcagctcac

SEQ ID NO: 344424 - DNA, 201 bp, Homo sapiens
tggggccagggcagtcccactccttttatatgtaagaatcctaggagggcagtggtcgagactggcagcagacagggattagggtagggatgtgacaaggygaggaagggaggtggcagagctgctcaccttggagatagccagagggacagggaacctggggacgggggatggtgccagctgtggccctggctcctgggg

SEQ ID NO: 344425 - DNA, 201 bp, Homo sapiens
ggaggaggctggggagggcagcctgggctctggggccccatagggccccacctctgtttccttcagcaatgggtgtggagagactggcagtagggtgaccrggtcacctaatcctggtttgcctggggactttccctgttttggcactaagagcctgagaaaccccttattcttgggtgaaccaagacagctggtaaccct

SEQ ID NO: 344426 - DNA, 201 bp, Homo sapiens
gctgggattacaagcacaaaccaccatgtgcacctggctacctcaaaggttttcttcctagaaaactaatatctagccttgtatgtattttagtaatcctrtcaagggacaagtgtcttgactcagcccccatccctgattcctaggcactcttctcctggggtctctgtccagctattccaaaagaaaacctgcagcatg

SEQ ID NO: 344427 - DNA, 201 bp, Homo sapiens
gataccagctcacttgctggaatcaccaaagagggacataggggacctgtttacctggcccccacctgtttaatggcggccagctttcttggacctcttgrtggggaacttgcagctgcggaaggcgtccgtgtcacggatgtgctggcccttgaacttggcaggtgaggcacaggtggcatctgggcgggaggccttggc

SEQ ID NO: 344428 - DNA, 201 bp, Homo sapiens
gacctggtggtgagtggtgactgcggcccgggctgtgggcaggccaggcctgggatgacagcagatggacagacatggggatgagtccaggccagatgttyaaaggagaccctctcagccagccctccttccagaaagcagatgtgagaaaagatagtctgacctcatcagcacctggtgggtgaaggagataggtggcag

SEQ ID NO: 344429 - DNA, 201 bp, Homo sapiens
tagataagtgatcaaaaggaattgagtttgaaatatcagccactggctgggcgcagtggctcacacctgtaatcccagcactttgggaggctgagatggayggatcacttgaggtcaggagtttgagactaacctggccaacatggcaaaaccctatctctactaaaaatacaaaaaaattagttgggcacggtggtgcat

SEQ ID NO: 344430 - DNA, 201 bp, Homo sapiens
gtctggctccaagacagacccagcctcctgtctccatcaccagacaccagagcagttgcggatgatcctgcccaaccccctgtaccattgcctgggttccrtggcaggcacaatgatgtgtctgatgtacggtgccaccctcatcctggcctctcccatcttcaatggcaagaaggcactggaggccatcagcagagagag

SEQ ID NO: 344431 - DNA, 201 bp, Homo sapiens
gggtagtgggggctgtaggcagcgttttgggaaatatttggaggagtggtgggggataggtgcaggcatcccagagggctcccccaggtctcatttctccrttctctttccccagggtggagtctgtgttctttggtggggggacccccagtctagccagtccccacacggtggctgctgtcctggaggctgtggcacaga

SEQ ID NO: 344432 - DNA, 201 bp, Homo sapiens; identical to SEQ ID NO: 72771

SEQ ID NO: 344433 - DNA, 201 bp, Homo sapiens
atgtgctctaaacactgttctaatagtattaaacgcaggagaaagatctagaccagtcgttctcaactgggggcaattttgccccccaaagaatttttggyagtgtctggagacatttttggttgtcacagctgggtcaggggaggggtgggaagttactatgggtatctagtaggcgtagatgtcggagattttgctaaa

SEQ ID NO: 344434 - DNA, 201 bp, Homo sapiens; identical to SEQ ID NO: 72772

SEQ ID NO: 344435 - DNA, 201 bp, Homo sapiens
ggaatcacttgaactgggaggcagtttgcagtgaactgaaattgtgctactggactccagcctgggcaacagaccaagactctgtctcaaaaaaaaagggraaaaaagaaggttatataaatggaattatacagtatataaccttttgggacagttttctgttgtttcatttttttcactcaacataaatgccttgagatg

SEQ ID NO: 344436 - DNA, 201 bp, Homo sapiens
gtcacagctgggtcaggggaggggtgggaagttactatgggtatctagtaggcgtagatgtcggagattttgctaaacatccacaagacagcaagcagtcmcctgcaatgaataattagtagtgccatggttgagaaactctgatctggcctgaggatacagatactaccttctggatcataagcgtgtgaatatcatggt

SEQ ID NO: 344437 - DNA, 201 bp, Homo sapiens
cttcaagataggcagtactttgaactttcaactgttttcagttaaaacacacacacacactttgaactttcaactgttttcaattaaaacacacacacacwcacacacacaccccttatattgggaagtgctccagcatcataatgaagtcaaaaaactagattctgatcctgcatcagtgtatcttaatttagataagtt

SEQ ID NO: 344438 - DNA, 201 bp, Homo sapiens
agttttctgttgtttcatttttttcactcaacataaatgccttgagatgaatccaggttgttgtgtggcagtattcgtttctttttattgctgagtagtaktacatggtgtggatgtaccaaaatgtgtttaaccattcactcattgaaggatatctgatttgtttttagttttgggctatgatgcattaggcttctgcga

SEQ ID NO: 344439 - DNA, 201 bp, Homo sapiens
taaacaccagtgatatcaagtgcttgtttaaaatggaaaggatctgacttattaaatgtaaattgcataataattctttaccatgtgacagtccctatttmagtatattaaaagatgtgtattagtccgttttcacgccgctgataaagacatacctgagactgggcaatttacaaaagaggtttaatggacttaacagtt

SEQ ID NO: 344440 - DNA, 201 bp, Homo sapiens
agggacatgactgaataggtaagaaacggattcttcattgtgaattttcctgatggcttctgcaaggctcatagagatgttgatcacctgtattttggaayggtgcttcatcttgtcctcctggggtatgttattggtgactactactgctttaaagcatgcgttgttgatgtgagaaatagctggaccagagaagattct

SEQ ID NO: 344441 - DNA, 201 bp, Homo sapiens
tcaaataccaagggaaaacaaggggtggggtggattttattcttaaaaagcctcagaagttactgtattataaagggacatgactgaataggtaagaaacrgattcttcattgtgaattttcctgatggcttctgcaaggctcatagagatgttgatcacctgtattttggaatggtgcttcatcttgtcctcctggggta

SEQ ID NO: 344442 - DNA, 201 bp, Homo sapiens
gcttccatactctccctgtttaaaataacagcacctactctccaccccagcaccccatccctcttctagtgtgtctgtttgctctatacttccttgatatyactatgtgacaaattactgttatatattttacttatttattgtctgtctcattctattagaatgtaagccccttgagagcagagcttttagtctgttttg

SEQ ID NO: 344443 - DNA, 201 bp, Homo sapiens
ttgtttaagaagccatttcagctagctcacaaattcgttaagtgtggcctgtggacccttgggtctctaaggtggtacagaggcaatggagggtaaaactrctcgtgccttagcatgaaccaagggaatgacactagaatatactgattatcattgagttcttcaccaacatgcctgcacagtaaaataaaatgccagttt

SEQ ID NO: 344444 - DNA, 201 bp, Homo sapiens
agccagaatgagacaatgcagataggaagtcccagcagttaatctcaatccttctttcttcatttcggataagctcagatatacctgatgtgggatatagmaagctacactggagcaagctgggtcttctgctgaattcgtcatcaaataccaagggaaaacaaggggtggggtggattttattcttaaaaagcctcagaa

SEQ ID NO: 344445 - DNA, 201 bp, Homo sapiens
aagccagaatgagacaatgcagataggaagtcccagcagttaatctcaatccttctttcttcatttcggataagctcagatatacctgatgtgggatatasaaagctacactggagcaagctgggtcttctgctgaattcgtcatcaaataccaagggaaaacaaggggtggggtggattttattcttaaaaagcctcaga

SEQ ID NO: 344446 - DNA, 201 bp, Homo sapiens
cataatatttgaggccacacgtgctgttgtgaatgtgactgaattgtacttacctgttaattttatgtggcatatgataggggagtcattcttgtgcattytcccgtttttaatagaataatttcaaataaggacagccttcgttagtagtaatgtagcatttgtgctcatctgagtccttcagacattccttttgtggct

SEQ ID NO: 344447 - DNA, 201 bp, Homo sapiens
tgctaaaaaaaaaaaaaaaaagaaaaagaaaaatacttgtgaaattctttgagtcatgagttaaaataactgcttttttatggaacactatttttacttgrgaatgactgacaaactgtgattatttagacttgggtatttggcaactatatttgcaaaagtgaaggaagtgggccagtcacttcaaggagaacaattgac

SEQ ID NO: 344448 - DNA, 201 bp, Homo sapiens
ggctaattttgtatttttagtagagacggggtttcaccatgttggtgaggctggtcttgaactcctgacctcaggtcatctgcccaccttggtctcccaargtgctgggattacaggcgtgagccaccgcgcccagcctacgtcaaatcttttttttctttttaacagaaatctctgttcatttgaaaagccaaatagatc

SEQ ID NO: 344449 - DNA, 201 bp, Homo sapiens
ttccacgtacacttttgccaatttccacacaggtctcctagttgctgaatttctcaatcactgccttgccgagctccaggcccaggcgatcggcagttttytgagataagccctggtgggagctgccgctgaagattttgatattcaggatcctggccaactaccctaagcactcttcactaagtgatcactgctgctgca

SEQ ID NO: 344450 - DNA, 201 bp, Homo sapiens
gagacaatgcagataggaagtcccagcagttaatctcaatccttctttcttcatttcggataagctcagatatacctgatgtgggatatagaaagctacastggagcaagctgggtcttctgctgaattcgtcatcaaataccaagggaaaacaaggggtggggtggattttattcttaaaaagcctcagaagttactgta

SEQ ID NO: 344451 - DNA, 201 bp, Homo sapiens
ccccttctggccttcgggctgccccaggacccgcagctgtaacagctttatttagaaggctcggctccccaccccatccctgggtctcccgcagtcggagscgagcccccgcggcagtgccctcgggatggggtcgcctccaccggaggtgacaggagcgcggagtggccggcgtctgacaggagatgccaccggctaccg

SEQ ID NO: 344452 - DNA, 201 bp, Homo sapiens
tgagacaatgcagataggaagtcccagcagttaatctcaatccttctttcttcatttcggataagctcagatatacctgatgtgggatatagaaagctacwctggagcaagctgggtcttctgctgaattcgtcatcaaataccaagggaaaacaaggggtggggtggattttattcttaaaaagcctcagaagttactgt

SEQ ID NO: 344453 - DNA, 201 bp, Homo sapiens
gccccttctggccttcgggctgccccaggacccgcagctgtaacagctttatttagaaggctcggctccccaccccatccctgggtctcccgcagtcggarccgagcccccgcggcagtgccctcgggatggggtcgcctccaccggaggtgacaggagcgcggagtggccggcgtctgacaggagatgccaccggctacc

SEQ ID NO: 344454 - DNA, 201 bp, Homo sapiens
tagcgcggctgtgcaagtacctgccagagaacgacctgaaggtgagccctatttgcgggctcgccccttccggctgtggggcgcccgccggccggcccttyctttctccaggacccccgccgggtatccagtccagtcgcggtggagggcctcccccattgccagtcgacccggtcctacccggcgtcacgccgagggtct

SEQ ID NO: 344455 - DNA, 201 bp, Homo sapiens
tttttaaatgtaattgttttttaaatgctaatgtttgtaaagcaccttcagttcttcggatgaaaggtgctatattccctcagtgtaaattaataaaaagrttacaggaagtttgtcaaaaaattcaatgcatagtctgtagtatgtcctgacaagaagttagcattttatataagaaattaaaaaatgcttattcctcca

SEQ ID NO: 344456 - DNA, 201 bp, Homo sapiens
aggattataaatcattctactataaagatgcatgcacttgcatgtttactgcagcactattcacaatagcaaagacttggaactagctcaaatgcccatcratgatagactggttaaagaaaatgtggcacatatacaccatggaatactttgcagggacatggatgaagctggaaaccatcattctcagcaaactaacac

SEQ ID NO: 344457 - DNA, 201 bp, Homo sapiens
tcgctctgtcacccaggctggagtgcagtggtgcgatcttcgctcactgcaagctctgcctactgggttcacgccattctcctgcctccgcctcccaagtwgctgggactacaggcgcccgccaccatgcccggctaatttttttgtattttttagtagagacagggtttcaccgtgttagccaggatggtctcaatctcc

SEQ ID NO: 344458 - DNA, 201 bp, Homo sapiens
gggtggctcacacctgtaatctcagcactttgggaggctgaggcaggcggatcacaagatcaggagatcgagaccatcctgaccaatatggtgaaaccccktctcttctaaaaatacaaaaatgagctgagcgtggtggtgtgtgcatgtaatcccagttactcgggaggctgaggcaggagaattgcttgaaccaaggag

SEQ ID NO: 344459 - DNA, 201 bp, Homo sapiens
cagctacttgggaggctgaggtgggatgattgtttaagctcaggagttctagaccaacctgggcaacatagtgagaccccatctctaaaaaaaaaaaaaaattgaatttttaaaaattaaattacttggccgggcgcagtggctcacgcctgtaatcccagcactttgggaggccgaggcaggtggatcacctgaggtcag

SEQ ID NO: 344460 - DNA, 201 bp, Homo sapiens
tgtgaattctcctctcactaaacaatttttttgttttggaaaagttaatttttcattaaaatgtgtttgtgatactttttgatgggtatgttattgatttktttttttgagatggaatttcactcttgtcacccagactgcagtgcaatggtgtgatctcagctcactgcaacctctgcctcccgggttcaagcgattctt

SEQ ID NO: 344461 - DNA, 201 bp, Homo sapiens
atcctcctgtctcctgtctcggcctcccaaagtgctgggattacaggcgtgagtcaccatgcccggccttttttttatttcttttttttttttttttttttggacagggtctcgctctgtcacccaagctggagtgcagtggtgtgatctcagttcattgcagcctctgcctcccgggttcaagtgattcttgtgcctcag

SEQ ID NO: 344462 - DNA, 201 bp, Homo sapiens
agtagagatgggatttcaccgtgttggctaggctggtcttgaactcctgacctcaggtgatccacccgcctcagcctcccaaagtgctgggattataggtrtgagccaccgcacccggccagcccctttcctttcaagtactgtagttaagtaacaaaatggcaagaccaagataggcaatacttttttttttttttctca

SEQ ID NO: 344463 - DNA, 201 bp, Homo sapiens
caccaaaccgtgaacaattgtttatgttgtatgtgttccttaaaaaacaattgttccaggtgcagtggctcacgcctgtaatcccagcactttgggaggcygaggcaggcagatcagaaggtcaggagttcaagaccagcctagccaacatggtgaaaccctgtctctacgaaaaatacaaaaattagccaggtgtggtgg

SEQ ID NO: 344464 - DNA, 201 bp, Homo sapiens
aactctttgttatccttttttgctagttaatagatgagcagattttgtgtgtccatggtggtttatctcctgatatcaaaacactggatcaaattcgaacyatcgaacggaatcaggaaattcctcataaaggagcattttgtgatctggtttggtcagatcctgaagatgtggatacctgggctatcagtccccgaggag

SEQ ID NO: 344465 - DNA, 201 bp, Homo sapiens
cagtagcagctgtaagtttctatttttaaagtctcatgtacgttcctgccaataacacattgcatatttttatctagttgtcatctcaattatattgatakctttagtattcactgatgagtttagatatgcctgaggttatatgttcaactctttgttatccttttttgctagttaatagatgagcagattttgtgtgtc

SEQ ID NO: 344466 - DNA, 201 bp, Homo sapiens
ggaaattagggctagggtaataatctagtggactgaaatttgacaaatgcacaatttgccagttaccaaatttcagtaaatagaaatatgatgaaatatcmttgggtgtcatggatcacacttgtaatcccagcactttgggagactgaggtgggaggattgcctgaagccagtagtttgagaccagcttgggcaaaaaag

SEQ ID NO: 344467 - DNA, 201 bp, Homo sapiens
aggaggggcatacctcatatttagattctgttgtcagtgtttagtctcatgtatatttgtagaattttttcactgggaaatgaaagctgaacagattactyatagagtgctatatgcatacagtgtagttggggccataagacttaataatacattgcaaacaatgtagtctttaaaggatgccaacaggacttactgtca

SEQ ID NO: 344468 - DNA, 201 bp, Homo sapiens
cccactcccattgagttctgttcttgctactgtgtagctattgttgtagctgtaactgttaaagtgtttctcatatattaatgagattatagcatttagaktccttaattaatgtttaagtgatttcattatgcttgttagtttaatttctcctttcttggcagacctatcgtaaaatccaataagcctttggcaatagta

SEQ ID NO: 344469 - DNA, 201 bp, Homo sapiens
gtatagacagggttttgctatgttggctaggctggtctcgaactcctgacctcaaatgatccacctgcctgagcctcctaaagtgctggaattataggtgygagccaccacggctggcctgtttttgttattttttttaatgagtgatggatgtactatatggcaggaccatggattgatttgttgaagcatataggtgtg

SEQ ID NO: 344470 - DNA, 201 bp, Homo sapiens
gacctcaggtgatccacctgccttggcctcccagagtgctgggattacaggcgtgagccactgcgtccggcctgagactccccatctctaaaaaaaaaaawttttttttttttgagacagagtttctctcttgttatccaggctggagtgcaatggcacgatcctggctcactgcaacctctgcctcccaggttcaagcga

SEQ ID NO: 344471 - DNA, 201 bp, Homo sapiens
acgccattctcctgcctcagcctttcaagtagctgagactacaggcgcccgccaccacgcccggctaattttttgtatttttagtagagatggggtttcaytgtgttagccaggatggtctcactctcctgacctcgtgatccgcctgcctcgaccccccaaagtgctgggattacaggcgtgagccaccgcgcccggccg

SEQ ID NO: 344472 - DNA, 201 bp, Homo sapiens
ctcaagggatcctcctgtctttgcctccctaagtggtgggattacaggcgcgagccactgtgcccagcaggggaactctgtactttaagattttttttgttgtttgttttgagacagagtcttgctgtcaccccaggctggagtgcagtggcgccatctctgctcactgcaagttcggcctcccgggttcacgccattctc

SEQ ID NO: 344473 - DNA, 201 bp, Homo sapiens; identical to SEQ ID NO: 72770

SEQ ID NO: 344474 - DNA, 201 bp, Homo sapiens
gctcaagggatcctcctgtctttgcctccctaagtggtgggattacaggcgcgagccactgtgcccagcaggggaactctgtactttaagattttttttgttgtttgttttgagacagagtcttgctgtcaccccaggctggagtgcagtggcgccatctctgctcactgcaagttcggcctcccgggttcacgccattct

SEQ ID NO: 344475 - DNA, 201 bp, Homo sapiens
ggctcaagggatcctcctgtctttgcctccctaagtggtgggattacaggcgcgagccactgtgcccagcaggggaactctgtactttaagattttttttkttgtttgttttgagacagagtcttgctgtcaccccaggctggagtgcagtggcgccatctctgctcactgcaagttcggcctcccgggttcacgccattc

SEQ ID NO: 344476 - DNA, 201 bp, Homo sapiens
ttaaagaaaatgtggcacatatacaccatggaatactttgcagggacatggatgaagctggaaaccatcattctcagcaaactaacacaggaacagaaaaygaaacaccgcatgttctcactcgtaagcgggagttgaacaatgagaacatatgggcagaggggaggggaacatcacatgctggggcctgtcagggggtcc

SEQ ID NO: 344477 - DNA, 201 bp, Homo sapiens
ctcaaactcctgggctcaattgatccttctgcctcagcctcaaaagtagctgggagtacaggtgtgcaatagtgtgcccagctgattaattattatttttwtttttgagatggagtctcactctgtcaccaggctggagtgtaatggcgcgatctcggctcactgcaacctctgcctcctgggttcaaacaattctcctgc

SEQ ID NO: 344478 - DNA, 201 bp, Homo sapiens
ccatctaggtttatgtaaggacatccgatgatgttcacacaacgatgaaatcacctaacaatgcattttttagaatgtatccccatggttaagggacatayaactgtatgtagttagtcactagcgttcttttggctctatgtggaggtcctagcaggactaaatatgtgtcatatcttgctatcctagtttaagctgaat

SEQ ID NO: 344479 - DNA, 201 bp, Homo sapiens
tttggggagcaggggttctataacttggaggttgtctaatctcttggacagttcttaagggtgacatgtttacctgaggttttttttttttttttttttttgagactgaatctaactctattgcccaggctggagtacagtggtaccatctcagctcactgcagtctccacctcctgggttcaagcagttctgcctcagct

SEQ ID NO: 344480 - DNA, 201 bp, Homo sapiens
ataaaggatattaatataagcagtgtcttaacacattcctgaaaactggaataaaccaagtcatgttttcccccagtgtagtgtttcccccagttgtagastttttaagatgtgaagtacagccatgatcaaaggtcagaaagttagagaccaacctcgaactactaaaattggaagcataaaattgaacttttgtattat

SEQ ID NO: 344481 - DNA, 201 bp, Homo sapiens
ctgtagaaaagaagacagaaatttacttgtgttttaaattgattagaagataaaatactaaatgcatacgatgttccagatttaatcacaatttctgtttygctaagttggaaatggtcacatcactagtactggatcaaatctacataactgtttttgtttgtttgttcgctcttgttgctcagggtggagtgcaatggc

SEQ ID NO: 344482 - DNA, 201 bp, Homo sapiens
atttttagtagagacagggtttcactatattgaccaggctggtctcaaactcctgacctcatgatccgtccgcctcggcctcccaaagtgctgggattacmggcgtgtgccaccatgctgggcccttttttttcccccaaaggacacaagtacaggtaagaaaatgtagttttttgttttttttttttttttagacagggt

SEQ ID NO: 344483 - DNA, 201 bp, Homo sapiens
cccgttacactcagtagaagcccaggtccttattttcaccaccagtgacctaaataattctgtgatgctctcctgtttttcttctcattcagtttactctraacacaccagccttgatgatgtttcttagacacaagcatgcttcacatcaggacttttggtctttatttctctgcctgtagtattgtgtccccatagcct

SEQ ID NO: 344484 - DNA, 201 bp, Homo sapiens
ctgagcgggtgttgtggacctgtagtcccagcttctcaagaggctgaggtgggaggattgcttgagcccaggaagtcaaggctgcagtgatgcagtgagcygtgatcatgccactgcactccagtgtggggaacacagcaagaccctgcctcaaaaaataaactaattttattgagcatctactatgtgccaagtactgtg

SEQ ID NO: 344485 - DNA, 201 bp, Homo sapiens
gctcctcagttttagatttgaattttataattaattatagttagcctttttatttcaaaataacccagttttccccagtggtaacattttgtagaactatrgtgtaatgccacaaccaatacaacatcagccaacattgacactgatacaactcatgatctttaggtacaacccaagatcatcacctcatgatgttcagat

SEQ ID NO: 344486 - DNA, 201 bp, Homo sapiens; identical to SEQ ID NO: 72774

SEQ ID NO: 344487 - DNA, 201 bp, Homo sapiens; identical to SEQ ID NO: 72775

SEQ ID NO: 344488 - DNA, 201 bp, Homo sapiens
cgcgcctggcaaaaaaaaaatttttttaagggatagcgtcttgctatgctgtccaggctggtcccaaatgcttcaggtgattctcctgccttggcctcccmaaatgctgagattataggtgtgagccactgtgcccagccaacaaacacttatttacatggttccttgtgttgagtactgttccctgtgggtgccaggggc

SEQ ID NO: 344489 - DNA, 201 bp, Homo sapiens
tgtttatgtagctgtacagtttccatagttgtgcacttgactcaggccaaaattgctgtttgcctaaacttattaaattgttggagataattatagagtgygttctataatcttgatgcctttagtagtaataggatttggtattttatttaaatgattatgtaggccgattgttttttaagtgctaagtacttacagtgc

SEQ ID NO: 344490 - DNA, 201 bp, Homo sapiens
tgcagggattataggcgttagccaccgcgcctggcaaaaaaaaaatttttttaagggatagcgtcttgctatgctgtccaggctggtcccaaatgcttcargtgattctcctgccttggcctcccaaaatgctgagattataggtgtgagccactgtgcccagccaacaaacacttatttacatggttccttgtgttgagt

SEQ ID NO: 344491 - DNA, 201 bp, Homo sapiens
acaaagactgtaatagaggctgaccagggtgttggcaaacagaagaagcagtatgtaactttagagtcagagatgatttcataaaggagcagttacgaggrgcagagttcaggtagacaaaatgagaaggaaagaacatgcaaacagaataaacaccatgtgcaatagtataatgtaatttgcaagaacatggctggttcg

SEQ ID NO: 344492 - DNA, 201 bp, Homo sapiens
aaacaccagtgatatcaagtgcttgtttaaaatggaaaggatctgacttattaaatgtaaattgcataataattctttaccatgtgacagtccctatttcrgtatattaaaagatgtgtattagtccgttttcacgccgctgataaagacatacctgagactgggcaatttacaaaagaggtttaatggacttaacagttt

SEQ ID NO: 344493 - DNA, 201 bp, Homo sapiens
ttaaaataacagcacctactctccaccccagcaccccatccctcttctagtgtgtctgtttgctctatacttccttgatatcactatgtgacaaattactrttatatattttacttatttattgtctgtctcattctattagaatgtaagccccttgagagcagagcttttagtctgttttggttgttgctatttactttg

SEQ ID NO: 344494 - DNA, 201 bp, Homo sapiens; identical to SEQ ID NO: 72777

SEQ ID NO: 344495 - DNA, 201 bp, Homo sapiens
atcctgaagagattgaaaaagaagagcaagctgctactgaaaaggctgtgacaaaggaggaatttcagggtgaatggactgctccagctcctgagttcacygttactcagcctgaggttgcagactggtctgaagggtgcaggtatcctctgtgcctattcagcagttccctactgaagactggagcactcagcctgccac

SEQ ID NO: 344496 - DNA, 201 bp, Homo sapiens
tttttttttgttttgcatttgactctgagctaagtgttccaactctttaaaggcaatgtttattgttacaacctcgatccagtgcccagaactatgcttcrtgagatcatcacaactctttaaattgtatatttacagtgtgtagtgatgctgacgaaatacacggtagtaaaccaaaaagaaacatttggaaagtcccct

SEQ ID NO: 344497 - DNA, 201 bp, Homo sapiens
gcaaaatggtacagccactttggaagacggtttggcagtttcttataaaactaaacaaactcttcatataatccagcagtcctgctccttgatatttaccsaaatgagttgtaaacttatgtccatacaaaaacctgtacatagatttttatagccactttattcataattgccaaaacttggaaggaaccaagatgtcct

SEQ ID NO: 344498 - DNA, 201 bp, Homo sapiens
gttgatgcggggaggctgtggggaggggcagggggtatatgggaactctgcacttttttctttttttctttttctttttttccctttatatggagaacgargtctctctatattgctgagggcggtcttgaactcctgggctcaagggatcctcctgtctttgcctccctaagtggtgggattacaggcgcgagccactgt

SEQ ID NO: 344499 - DNA, 201 bp, Homo sapiens; identical to SEQ ID NO: 72776

SEQ ID NO: 344500 - DNA, 201 bp, Homo sapiens
agaaattaaaaaatgcttattcctccacttggttgcttgactggtgaacaaaagtgaaacctttttttttttgttttgcatttgactctgagctaagtgttccaactctttaaaggcaatgtttattgttacaacctcgatccagtgcccagaactatgcttcatgagatcatcacaactctttaaattgtatatttacag

SEQ ID NO: 344501 - DNA, 201 bp, Homo sapiens
tctgcacttttttctttttttctttttctttttttccctttatatggagaacgaggtctctctatattgctgagggcggtcttgaactcctgggctcaagsgatcctcctgtctttgcctccctaagtggtgggattacaggcgcgagccactgtgcccagcaggggaactctgtactttaagattttttttgttgtttgt

SEQ ID NO: 344502 - DNA, 201 bp, Homo sapiens
taagaaattaaaaaatgcttattcctccacttggttgcttgactggtgaacaaaagtgaaacctttttttttttgttttgcatttgactctgagctaagtgttccaactctttaaaggcaatgtttattgttacaacctcgatccagtgcccagaactatgcttcatgagatcatcacaactctttaaattgtatatttac

SEQ ID NO: 344503 - DNA, 201 bp, Homo sapiens; identical to SEQ ID NO: 72778

SEQ ID NO: 344504 - DNA, 201 bp, Homo sapiens
actactggcatgtaccaccatacctggctaatttatatatatatatatatatatatatatatatatatatatatatatatatattttttttttttttttttttgaggcagagtctagctctgtcacccaggctgaagtacagtggcgcgatcttggctcactgcaacctctgcctcctgggttcaagcaattctcctgcct

SEQ ID NO: 344505 - DNA, 201 bp, Homo sapiens
gcatcctaaatagttgggactactggcatgtaccaccatacctggctaatttatatatatatatatatatatatatatatatatatatatatatatatatattttttttttttttttttttgaggcagagtctagctctgtcacccaggctgaagtacagtggcgcgatcttggctcactgcaacctctgcctcctgggtt

SEQ ID NO: 344506 - DNA, 201 bp, Homo sapiens
tagcatcctaaatagttgggactactggcatgtaccaccatacctggctaatttatatatatatatatatatatatatatatatatatatatatatatatatattttttttttttttttttttgaggcagagtctagctctgtcacccaggctgaagtacagtggcgcgatcttggctcactgcaacctctgcctcctggg

SEQ ID NO: 344507 - DNA, 201 bp, Homo sapiens
cttagcatcctaaatagttgggactactggcatgtaccaccatacctggctaatttatatatatatatatatatatatatatatatatatatatatatatwtatattttttttttttttttttttgaggcagagtctagctctgtcacccaggctgaagtacagtggcgcgatcttggctcactgcaacctctgcctcctg

SEQ ID NO: 344508 - DNA, 201 bp, Homo sapiens
gccttagcatcctaaatagttgggactactggcatgtaccaccatacctggctaatttatatatatatatatatatatatatatatatatatatatatatwtatatattttttttttttttttttttgaggcagagtctagctctgtcacccaggctgaagtacagtggcgcgatcttggctcactgcaacctctgcctcc

SEQ ID NO: 344509 - DNA, 201 bp, Homo sapiens
gtgccttagcatcctaaatagttgggactactggcatgtaccaccatacctggctaatttatatatatatatatatatatatatatatatatatatatatrtatatatattttttttttttttttttttgaggcagagtctagctctgtcacccaggctgaagtacagtggcgcgatcttggctcactgcaacctctgcct

SEQ ID NO: 344510 - DNA, 201 bp, Homo sapiens
ctacagaagtccaattaagtgagcgattaatgttgaagatttgagaaacacttgtgtgatgaagtgtctagcagagctctggcactaaatggaagatgttmttgtaacacagaaacaaaaataacagagacagtgtggatataaggctttgaaatgcgttgggcagggtgtctggataaaaaagtcatgcttgtggtcgag

SEQ ID NO: 344511 - DNA, 201 bp, Homo sapiens
ttgtgccttagcatcctaaatagttgggactactggcatgtaccaccatacctggctaatttatatatatatatatatatatatatatatatatatatatatatatatatattttttttttttttttttttgaggcagagtctagctctgtcacccaggctgaagtacagtggcgcgatcttggctcactgcaacctctgc

SEQ ID NO: 344512 - DNA, 201 bp, Homo sapiens
tcttgtgccttagcatcctaaatagttgggactactggcatgtaccaccatacctggctaatttatatatatatatatatatatatatatatatatatatatatatatatatattttttttttttttttttttgaggcagagtctagctctgtcacccaggctgaagtacagtggcgcgatcttggctcactgcaacctct

SEQ ID NO: 344513 - DNA, 201 bp, Homo sapiens
attcttgtgccttagcatcctaaatagttgggactactggcatgtaccaccatacctggctaatttatatatatatatatatatatatatatatatatatatatatatatatatattttttttttttttttttttgaggcagagtctagctctgtcacccaggctgaagtacagtggcgcgatcttggctcactgcaacct

SEQ ID NO: 344514 - DNA, 201 bp, Homo sapiens
cgttattttaggtagattggaggagggaatgggtgactacctccttccgcatgtggaagcacctttctgcaaaatgctttgcatgccatggcagcctgtgyccttgcccctcactaagggtgatgcttgccttgtgtcttctcagctaatagaagtgcaagctgaataccacaggaagtccctgacactattgcaggctgt

SEQ ID NO: 344515 - DNA, 201 bp, Homo sapiens
aggagaagtagcacgttgaacccatatttctcagttgccgaagtttgccagtgttatttagcaagtctcgcccagtacctaccccatgcccaagctgacamcttcccttggtaaaccagaagatcaccaaggaggctggtgtctgagattcctgatgctagaaggtactgttggggaaatagaaggcatcccccaccagct

SEQ ID NO: 344516 - DNA, 201 bp, Homo sapiens
tgattcttgtgccttagcatcctaaatagttgggactactggcatgtaccaccatacctggctaatttatatatatatatatatatatatatatatatatatatatatatatatatattttttttttttttttttttgaggcagagtctagctctgtcacccaggctgaagtacagtggcgcgatcttggctcactgcaac

SEQ ID NO: 344517 - DNA, 201 bp, Homo sapiens
cgatctgtgaatagattccccttcttggcagcatactgagcaattttattatttctgtcttcaggttgagttttatctagacatttgaacatttacatatrccatcttgctttggaaggtaaatgcacttttaggcttccaacagcattgctgctgccgttgtgattgatttactgtgtaaagatttatattactgtttga

SEQ ID NO: 344518 - DNA, 201 bp, Homo sapiens
atcataacatggcggaaggggaagtaagcacatgagacacaggcaccaggggctgcactcacaatatagcaacagactcttgtgataactaacctgctacygcaataacaacgttaattcgttcacgagaactctgccctcatgacccagtcacctcttactaggccccacctttcaacactgttgtcttggggattaagt

SEQ ID NO: 344519 - DNA, 201 bp, Homo sapiens
aaaatacccacgtttccattatgataaatcctatgcaaatataagatgctggcaggcagggaagattgttcttcagtgggtctaccttgccaaaatgaggrcttatcacctgactcccatcctgtgcatctcaatgatgagcagtgtcaattctggattccctgccccttgtcttcttactctgagagagagcagtggtcc

SEQ ID NO: 344520 - DNA, 201 bp, Homo sapiens
ctctgcatctccagcttgtccacatcataaaacaccattggcttagctagctagaccctactacaacccactgtatgaccgctcagcttctgccaccaggkcatggtgcaaggacatgctaaatacatctcagcactcaataattgataaactatcttcatggaaatgccggaaacaggaagggaggtattagctccattc

SEQ ID NO: 344521 - DNA, 201 bp, Homo sapiens
tctgcatttgttgattctcatttgcctacagctcaaaataatccttatccaaagtggcatattatagggtagcatattctgatcttctataacagtgtggyttggagattgattgagtcatacttatgaagaatgtggaattacagaaagtgagaggagagatctagtatgttcacctgtcactcacaaggaaacatgaca

SEQ ID NO: 344522 - DNA, 201 bp, Homo sapiens
aagagctaagggctttatggccacagtttcattggctccttacaacaaatcgaaggaagagaagcatattattccattttacaaaggatgattcgaggatratcagatagaactcctccatattatagagttagtcattggaaaatctaggattcatacccaaattctctgctttcaaagccctgctgtcctgagctggag

SEQ ID NO: 344523 - DNA, 201 bp, Homo sapiens
gtaattcataggggttattggaacctgggcttgtacagcatcttagcaaagaagaataaatttagagagaggtgaaaagacaaagggaaaaggtttttagkcttctaggagctgtagaccctgggaaggtaaatgtgtgggggaaactcatactatcttagcagtgtttgtgcaggtctgtcttggtgctgacttttcatc

SEQ ID NO: 344524 - DNA, 201 bp, Homo sapiens
cctgagacggcacaagtagacaagcaaattctggtgtcctggttgaggatcttgaagctgcaggagagaaccccagctccacaaaccccactgatgaccgygatgtgaacacaccatcctgtttgtgcacagtggtaccctgacctgacccagctcaggagttcttaggggtcggttccccatcctgcaggactctgacct

SEQ ID NO: 344525 - DNA, 201 bp, Homo sapiens
tcagcagtagagtatccttttcccccctttatcaacatattttagacctgcgttcattctctttctttctctgaggagattttcaaaaacaagtcatatgygcttggcacctataagcacaaagcattctcattgacactacatcttactgatttcttagtaagagctaagggctttatggccacagtttcattggctcct

SEQ ID NO: 344526 - DNA, 201 bp, Homo sapiens
ttctgccatgtcttggttgtactgtaatcttagatttaaaaggaatgacatattagtacccaggatgctgacctagggagccacagtcaaataagccactyttgtttgccactagttggccattctcctcatctcatcagtcttttagttgctttctttgtcccccaattccttgggattcaacttgtatcctaggtcacc

SEQ ID NO: 344527 - DNA, 201 bp, Homo sapiens
attttggcttttttttctccttttttctccccctcttcttccttctcctcctccttcccctgccccaaccccagcacccttcttcctcattttttttttttgttttgctgggcaggtctttgtttctctttaatttttgtaaggtctccatccagggtgtgtcaatgcctggacactggccagggttaaacttcggggtgt

SEQ ID NO: 344528 - DNA, 201 bp, Homo sapiens
atttgggaagctaccaggtttccctgccccctctttcttggctggcctttgccaaatgtaactgatctctagaacaaaaaccaaaaccttccaaatctctrtagacttgaacacttcacagccatgtattggctgacacctcccctggctaggattcttcctgaccaggagtcaaaaacagcactgcagatgtctgatctt

SEQ ID NO: 344529 - DNA, 201 bp, Homo sapiens; identical to SEQ ID NO: 72803

SEQ ID NO: 344530 - DNA, 201 bp, Homo sapiens
cagtacagggcaaacaaaattcctgtttgcctggaacctgcattctaggccgggcgtggtggctcacgcctgtagtcccagcactttgggaggccaaggarggtggatcacctgaggtcaggagttcgagaccagcctggccaacatggcgaaaccccgtctctactaaaaatacaaaaattagctgggcatggtggcggg

SEQ ID NO: 344531 - DNA, 201 bp, Homo sapiens
atttctcagtgtccaggagcaagacaagaagcttcaggctctatggaatgcttgtgaaaagttgcccaaggccaatcacaacaacatccggtaagtggatrcttaccaagtatagacacatggcttgggcttatgtaagcctcagagatacaactgcccgggtaaaagtcatggtaactaccatgcatagcattttgtgat

SEQ ID NO: 344532 - DNA, 201 bp, Homo sapiens
gaggccaggtgcagtgactcacacctgtaatcccagcactatgggaggctgaggcaggaggactgcttgaggccaggagctcaagaccaatctgagcaacmcagtgagacatcatctatacaaacaatttttaaaaattagccaggcatggtggcacacacctatagtcccagcttagtcagaaggctgagacgggtgaac

SEQ ID NO: 344533 - DNA, 201 bp, Homo sapiens
aggacctgtggagaagcccagaggcaagaatagaagcgacaggctgggcgcagtggctcacacctgtaatccctgcacttcgggaggccaaggtgggcggwtcacttgaggtcaggagttctagaccagtctggccaacatggtgaaacctcatctctactaaaaataccaaagaaatgagctgggcgtggtggcagacgc

SEQ ID NO: 344534 - DNA, 201 bp, Homo sapiens
ccagcctgggcaacaggagtgaaacaccatctcaaaaaaaaaaaaaaaaaaaaaaaagcaatttctgttgttcaccaaccttgtggttggtactcatgacrgcagccataggaagccaatacaatcatccactgcagctccacaccaagagctttgataaagatggcagcagatgctttgcttgtcctcccagggagtgtt

SEQ ID NO: 344535 - DNA, 201 bp, Homo sapiens
ttgtgcaactcagcaaggattaaagacaaaaacaaaaacgtgggcatggggatgagtaagggatgtgttgtcttcaggtgtttccatttacctggttatcrattgatagaaaacaatgttatcagtaaaactgaagttttgagattagattattgtggtttttgtttataacctgggtcagaaggttattcacaaaataaa

SEQ ID NO: 344536 - DNA, 201 bp, Homo sapiens
ctctactaaaaatacaaaattggccaggcatcgtggcgcatgcctgtaatcccagctacttgggaggctgaggcaggagaatcgcttgaacccagggaggmggaggttgcagtgagccgagatagtgccattgcactccagcctgggcaacaggagtgaaacaccatctcaaaaaaaaaaaaaaaaaaaaaaaagcaattt

SEQ ID NO: 344537 - DNA, 201 bp, Homo sapiens
tggcttagatccatcaagaccccatctggagttggacgtggggatagcctcgcctaagtcaggagaccttcatggcgaagggatgggtacctgggcaaatmagagttttcatgggaaggaaggaggaggaaagtattcaagtaaacagccaacactatccactgtgacttggtttaagccagcattttgagtgtgaatact

SEQ ID NO: 344538 - DNA, 201 bp, Homo sapiens
tgttcacagcaatgcagcctttttctagcctgctcttccagactcgtctagtctccactatccagttccaaagctgcttccacaattgtaggtatttgttrtagcagtacctcactctctggtaccaattgtctttgtgctgccataaatgaatactatggtctctaatttataataaacaaaaatttattggccgcagtt

SEQ ID NO: 344539 - DNA, 201 bp, Homo sapiens
tctctactaaaaatacaaaattggccaggcatcgtggcgcatgcctgtaatcccagctacttgggaggctgaggcaggagaatcgcttgaacccagggagrcggaggttgcagtgagccgagatagtgccattgcactccagcctgggcaacaggagtgaaacaccatctcaaaaaaaaaaaaaaaaaaaaaaaagcaatt

SEQ ID NO: 344540 - DNA, 201 bp, Homo sapiens
agaagatcagttcttacctgaccttaaagagtgggtgtttttggagagaggagagaaatttgcatctcttgagtccctatgttatcttagtaacattaggscagttctctatattggccccatttctgatcttttgaaatctatgagatacattttaaagtcttcacactgctcattgaaaccctgacaaattaaagctca

SEQ ID NO: 344541 - DNA, 201 bp, Homo sapiens
aaaattagcccggtatgatggcgcatgcctgtaatcccagctactcggaaggctgaggcaggaaaattgcttgaacctgggaggtggaggttgtggtgagycaagatcacgccatgcatggcagcctgggcaacaagagcaaaactctgtctccaaaaaaaaaaagttaaattcaatgaaggtcttaccggtttagggtgg

SEQ ID NO: 344542 - DNA, 201 bp, Homo sapiens
catctactttaagagtataggaaatttattacataatgtattgttgtacataaaataaatgtttcaaaatgtgtattaaatgttaaattcaggccgggcgyggtggctcacacctgtaatcccagcactttgggaggccaaggcaggtggatcacctgagcttgggagttcgagaccagcctgaccaacaggcagaaaccc

SEQ ID NO: 344543 - DNA, 201 bp, Homo sapiens
agcttgagcaatatcttgagcagataccttatctctgataaagctctcctgcttaagaattttctaaatgatatgtccactctgtatactattcttatttraagttgaaactgccaccatctactttaagagtataggaaatttattacataatgtattgttgtacataaaataaatgtttcaaaatgtgtattaaatgtt

SEQ ID NO: 344544 - DNA, 201 bp, Homo sapiens
tttttttttgctttgttaagcattaatattattatagccatcttagtgagtgtaaagtgaggtcttgattggggttttcctaatgactaatgaggttaatyatcttttcatgtgctctttggccatctatcttttttggagtgtgtctttattttcatgcttactctttctgggttataattgcatgtgaacacttttctg

SEQ ID NO: 344545 - DNA, 201 bp, Homo sapiens
gggaggccgaggcgggcggatcacctgaggttgggagttcaagaccagcctgaccaacatggagaaaccctgtgtctactaaaaacacaaaattagccaggcgtggtggtgggcgcctgtaatcccagctactcaggaggctgaggcaggagaattgcttgaacctgggaggcggaggttgtggtgagcggcgatcgcgcc

SEQ ID NO: 344546 - DNA, 201 bp, Homo sapiens
gtctttttatgtgagctcatcaatactatgatcgtaccatctgacattcaagacgaagcatcttcactgacttgtcactgaggtattgtagacacttgcaratcaaaccaggtttctcaaccatggcactattgccattttgagcctagtaattctttgttggaggagactgttctgtgccttgtaggatgtttagcaaca

SEQ ID NO: 344547 - DNA, 201 bp, Homo sapiens
tgctgggattacaggcgtcagccactgtgcccggcctgtaatctctatttcaagggacactctggcctgaaggtgtccactgtctgtactaaccatgtccrtggattttactggtctaatatccataccatagtttcttcaaatctgcaaatcttagaatgcttgtgcaggaaggaaagatcctctgccccaaatccttca

SEQ ID NO: 344548 - DNA, 201 bp, Homo sapiens
agggcttatcacctgactcccatcctgtgcatctcaatgatgagcagtgtcaattctggattccctgccccttgtcttcttactctgagagagagcagtgktccagcctgggtaacatggcgaaactcatctctaaaaaaattatgaaaattagccagatgtggtggcatgtgcctgtattccaagctactcaggaggctg

SEQ ID NO: 344549 - DNA, 201 bp, Homo sapiens
ttttctcaaaggggacacttggcacatttttgtgttttacgtggccaggctgtgaattttccagatggttacattctgcttctcttttaatcataaattcyacctttaaatattttctctcctcttgcatcttactgtatgcagttaaaggaagccatgcagattcttccatattttgcttagaaatttcttccaccatgt

SEQ ID NO: 344550 - DNA, 201 bp, Homo sapiens
gatgcattggagtactcagagttcactggcccactatctgcaggcagatgcagaagcttgagcaatatcttgagcagataccttatctctgataaagctcycctgcttaagaattttctaaatgatatgtccactctgtatactattcttatttaaagttgaaactgccaccatctactttaagagtataggaaatttatt

SEQ ID NO: 344551 - DNA, 201 bp, Homo sapiens
gctttcaaagccctgctgtcctgagctggagaggctgtggagtcaccacgttatacccaaaaaacacaagccagatactaggcctttatattccgtccatyaaggtgttgtctgatgctctgcatctccagcttgtccacatcataaaacaccattggcttagctagctagaccctactacaacccactgtatgaccgctc

SEQ ID NO: 344552 - DNA, 201 bp, Homo sapiens
aatgggaggagcagcctcaaagatctctgaaatatcttggaggtcattctctcattgccttgatgaatagcacctggcttcctgctatccatgctaagccytttctcaaaggggacacttggcacatttttgtgttttacgtggccaggctgtgaattttccagatggttacattctgcttctcttttaatcataaattcc

SEQ ID NO: 344553 - DNA, 201 bp, Homo sapiens
tgggatgacggtcaagctttcacaatggccagtatctcttctttgttacttcacctatcagagacaatttgtatgtggcagatgggagttgtttgtgtgcrctatgctggtgtttattgttctccacttagtggagaaagaaaaaaaaaggaaattcttagaaattcaaatgagtatgaaaaaatgtctttcttttttgtt

SEQ ID NO: 344554 - DNA, 201 bp, Homo sapiens
gtcactgatcatatttgtctaggtctactttttgtacttttattcttttccactgatctgggtttctttatttttgccaagaccgtactctcttgattgaytacttaattttatactaaatcttaacattggatcatgtgagtcctgcttttctttctagaaaattttaactatttcctttgtactttcgtatcaatttta

SEQ ID NO: 344555 - DNA, 201 bp, Homo sapiens
ggcatcttgggctagtctgatgaaaccattctcccctcctagagctctgagcctgtaatgggaggagcagcctcaaagatctctgaaatatcttggaggtmattctctcattgccttgatgaatagcacctggcttcctgctatccatgctaagccttttctcaaaggggacacttggcacatttttgtgttttacgtggc

SEQ ID NO: 344556 - DNA, 201 bp, Homo sapiens
tcttacttttcaccccacttctttctgaatgggagttggtattggagaactaaagttggcagaggagacctaggcttgtttcctgggatgacggtcaagcyttcacaatggccagtatctcttctttgttacttcacctatcagagacaatttgtatgtggcagatgggagttgtttgtgtgcgctatgctggtgtttatt

SEQ ID NO: 344557 - DNA, 201 bp, Homo sapiens
gaatcatcagcaggggggtggaactgaagcatttaatcagggcagtgctgagcagagaggagggctgaggaatggcctgtggggcattagaaagtactagrtgttgtggaagtaaagggaaaatactggtagctcccatttagcttagagtgtcacccataagggaaatccttgtttgacccactgtgttagtttcccaga

SEQ ID NO: 344558 - DNA, 201 bp, Homo sapiens
ttaccacttatgccctctggagagcagcagcccagactacacttggggttacttgagtaatggctggggcagccaaggagctctgcactggaatgcagggracagagtccttgggcagtgaacccatggaaggcatcttgggctagtctgatgaaaccattctcccctcctagagctctgagcctgtaatgggaggagcag

SEQ ID NO: 344559 - DNA, 201 bp, Homo sapiens
tggtgggggtggatgggtgacgcataagaaaaatacaattacgggaaggctgcactgactctcagcagtttaggtgactcgtagcaattaaactgtatctrctgtgtctgggatgagtttctttggcttgccgccctttagaccagaggtcagtgtagccttcttagctgacacagttgtgatcagtattaattagttctc

SEQ ID NO: 344560 - DNA, 201 bp, Homo sapiens
ggatgggtatgaactggtgtctctttctcagcactggggattaggggaggtggtgggggtggatgggtgacgcataagaaaaatacaattacgggaaggcygcactgactctcagcagtttaggtgactcgtagcaattaaactgtatctgctgtgtctgggatgagtttctttggcttgccgccctttagaccagaggtc

SEQ ID NO: 344561 - DNA, 201 bp, Homo sapiens
aatttatcatttttgagaattccattgatgtatttcttgtgtttgtcttgttccattttgtgctctaacagaatgccacattctgagtaatttataagaarctgaaattttattttctcagagtcctggaggctgggaagtccaacaaggggctagcatctggtgaaggccttcttgaaacattataacatggcagaaggg

SEQ ID NO: 344562 - DNA, 201 bp, Homo sapiens
cagtacacgtgaaccataatgccaactacagctcaatgccctccccagacatggaccctgctgaccggcgccagcccgagcaggcccgccggcccctcagygtcgccacggataatatgatgctggagttttacaaaaaggatgggtatgaactggtgtctctttctcagcactggggattaggggaggtggtgggggtgg

SEQ ID NO: 344563 - DNA, 201 bp, Homo sapiens
aaaacatttggtagaattatctaatgaaatcttctgggcctgaagatttttgcagggaagtttttaaagtacaaattcaaatttttatagctatagagaayattcaaatgatctatttcatattatgtgtattgcaatcatttttgttttttttttttttaggaatttgtccatttcatctaagttgtcaaatttgtgtgt

SEQ ID NO: 344564 - DNA, 201 bp, Homo sapiens
gcatgaggttttagaaagatgatttcatatatttcagaaagtatccgttcctgtttttacaaactttttttttttttcacaaattgacattgctttattaratgcctatataggtgatcacatgtgtccccctttttggcctgttaatgtgatgcattatattaataaggtgaaccatgggatgaaattttctagggatga

SEQ ID NO: 344565 - DNA, 201 bp, Homo sapiens
tttgacagccaaaaaacaactttaatgaaatctatatttctaatatcttgaatttattctctatggttttccagaaaggcagtgtcatcatctataaataktaatattgcctcttattttattttcttgactaattccattggctagtgtttctcaaatggtgttaagtaatggtagtggtagtgagcattgccatttctc

SEQ ID NO: 344566 - DNA, 201 bp, Homo sapiens
cattgactgggaaaggatgggatgagtacttctgtatatctctttgacagccaaaaaacaactttaatgaaatctatatttctaatatcttgaatttattytctatggttttccagaaaggcagtgtcatcatctataaatattaatattgcctcttattttattttcttgactaattccattggctagtgtttctcaaat

SEQ ID NO: 344567 - DNA, 201 bp, Homo sapiens
cttcccgtgatgtttctgcctgcagctgagttggaggaggtgactctaacgcaggttggtaccactgtgacttcttgaccactcaacttaagtgagccccrattcttgcctcacatccttttgtcagatcagcttgttcttcattctccagaacgatagtatttctttccttttttactttcctcaaacttctccagtcct

SEQ ID NO: 344568 - DNA, 201 bp, Homo sapiens
attacagaacaattctgttacctcaaaaagttccctcatgcggcatctttgcagtcaaaccttccccacccccatctacatcacccactgcgctgctttcygtccctatgacttagcttttccagggtgccttataaatgaaatcattcagtatgtatgaggcctttggggactggctttttacactgagcgtaatggttt

SEQ ID NO: 344569 - DNA, 201 bp, Homo sapiens
ctggccggacgcagtggcccctgcctgtaatcctagcactttgggaggctgagatgggcagattgcctgagctcaggagtttgagaccagactggacaacrtggtgaaacccgtctctactaaaatataaaaaaatcagctgggcgtggtggtgggcgtctgtaatcccagctactcaggaggctgaggcacaagaattgc

SEQ ID NO: 344570 - DNA, 201 bp, Homo sapiens
ctactcctgtgacactcctggatgtagctgtttatgtagctgcttacgtgcctgagaattgactcagcagctctagctgcctattttctgttttctgtggrgtaatgaccctccctactgttcttgctctttagcccagcctgaagcatcccccgccctccacaggcaagttgaggtcctctccctgtcctccccagcttg

SEQ ID NO: 344571 - DNA, 201 bp, Homo sapiens
acgatctcagctcactgcaacctccatctcccgggttcaagccatcctcctgcctcagcctcccgagtggctgggattacaggcacatgtcaccacgcccrgctaatttttgcatttttagtggagacagggtttcgccatgttggccaggctggtctcaaactcctgacctcaggtgacctgcctgcctcggcctcccaa

SEQ ID NO: 344572 - DNA, 201 bp, Homo sapiens
tggagtgcagtggcacgatctcagctcactgcaacctccatctcccgggttcaagccatcctcctgcctcagcctcccgagtggctgggattacaggcacrtgtcaccacgcccagctaatttttgcatttttagtggagacagggtttcgccatgttggccaggctggtctcaaactcctgacctcaggtgacctgcctg

SEQ ID NO: 344573 - DNA, 201 bp, Homo sapiens
acaggaaccagatttttgagtgacatcctcatgtttttaagggggcaacgtggcggggcccactttcccactgatgaggcgtcccgatccagccctttccytgccacctcgggtgcttgaatgtttttatctgtctccaccttaccacgagcaattgagctaattctacaagcaagagatatacaaacaccaagggcttcg

SEQ ID NO: 344574 - DNA, 201 bp, Homo sapiens
acatggtaaatgttagctgttcttagtacaggaaccagatttttgagtgacatcctcatgtttttaagggggcaacgtggcggggcccactttcccactgrtgaggcgtcccgatccagccctttccttgccacctcgggtgcttgaatgtttttatctgtctccaccttaccacgagcaattgagctaattctacaagca

SEQ ID NO: 344575 - DNA, 201 bp, Homo sapiens
agctttggaatcaggctccctctgagttcaaatcctggttactgaactctgaatgcctcagtttcttcatatgcaaaatggggaaatcatggtaagcaccracttgaatcattctgagcattgaacgaaatattgcttacaaagtgtttagagcaaagctcagcacatggtaaatgttagctgttcttagtacaggaacca

SEQ ID NO: 344576 - DNA, 201 bp, Homo sapiens
tgaatgagtggtaggagcaaatgcacttgccttgattcctgttttggaggaaagcatgtagtctttcaaaagtatagattttttcatatatgttatttatsaagttgaggaagtttccctctactcctagttttctaagagtttttttttttttttttttttttaccatgaatgggttttgaatcttgttaaatgcttttt

SEQ ID NO: 344577 - DNA, 201 bp, Homo sapiens
tgttgaagggcatttgagttgcttccagatttttagtattacaaataaagctctatggacattcacagagtaggtgtgtgtgtgtgtgtgtgtgtgtgtgkaacataaatgttcttttctctagagtggctctgctgggtcatatggcaagtgtatgttcaagtttatgacaaactgccaaagtgttttctacatcggctg

SEQ ID NO: 344578 - DNA, 201 bp, Homo sapiens
tttagtagagacgggggttttaccatattggccaggctggtcatgaactcctgatctcaggtgatctacctgcctcggcctcacaaagtgctgggattacrggcgtgagccaccgtgcctggcctaccgtctattttttaactatctaccatggatctatgttcctctgttaagaattcttttttcttttaatttcttttt

SEQ ID NO: 344579 - DNA, 201 bp, Homo sapiens
aattctcgtaacttcttgatgagttaaagttttctaacattatattgctgtcctctttctttcataatgttttttttctccctcaaagtctattagattartttgaaataggctggtatatgtttttatttctcttttgatctccctgattgtttgtgttttagatacagctttttattattagcacagagctagattttt

SEQ ID NO: 344580 - DNA, 201 bp, Homo sapiens
aggggaaaggagggcgtaggacatggtggcacaggtcaggcaagctcttagactctgtcataagaggacacatcccagcctcaggattcggagggatagarggctgtctccagagatagcagtgttggaaagaggatgagaatcacagggacgggagggaggagaatcacacctcacgttgaaagtggctttgtagggatt

SEQ ID NO: 344581 - DNA, 201 bp, Homo sapiens
tatattattagtttctttttttattgttttttcttctaatttattgaagtttattctgtttacttcttaaatattttcttaaatattttcagcttcttaartattttcagcttctcttctaagaaattgagtttctgtattttttctaaatatcattttgctaccgaacaaatttgatatacagtattttcattgtctttc

SEQ ID NO: 344582 - DNA, 201 bp, Homo sapiens
gtgcagtgtagtaggttttagtgtgttcatatagttttgcaactattactggtgtctcattttagaacatttcccttaccccaaaaaagaaatccccttcygataagcactccttattttccccaaccatgcccctaagcaaccactaatgtactttctggctccatagatctgcctattctaggcatttcatataagtgg

SEQ ID NO: 344583 - DNA, 201 bp, Homo sapiens
tatttctatatagcttctttgttggctctttttataaaataactttattaagctatgattttcataccattgaacctttttaacatgtgcagtgtagtagkttttagtgtgttcatatagttttgcaactattactggtgtctcattttagaacatttcccttaccccaaaaaagaaatccccttccgataagcactcctt

SEQ ID NO: 344584 - DNA, 201 bp, Homo sapiens
actgagctgggtagacagtaatagtgggaatccttgtcttactcatgattctaaagagcatggttttattttattttattttcaccctctccccaagggcrtgtttttaacatgtttccagtaagaataatgttttataggtgctttttaaaaataagttagggattttccctgttatatttttcatcaacagacatggag

SEQ ID NO: 344585 - DNA, 201 bp, Homo sapiens
cagacctgtgtggcctcttggagggtggggcatggccaggagaggccgtgcgtggagttgtcacagtgacagctaagtgattacatggtaggacatgagtytgctggactttctaccgggctcacgaaggtgagcagaaaatcccgaatgagtcgcttcactatgatccaagcaaaatggggttaggaccacagcctattg

SEQ ID NO: 344586 - DNA, 201 bp, Homo sapiens
tgaactcctgggctcaagagatctttctgcctcagcctcttgagcagctgggactacaggcatgcatcttcgcacccagctatgttttcatttttgtaagrcaacgtctcactatgttgtctaggctggtcaagaccagtcttggcctcttggccttcagtgatcctcctgcctcagcctcccaaagtgccaggatttcgg

SEQ ID NO: 344587 - DNA, 201 bp, Homo sapiens
caaagccctgagattacaggcatgagccacggcgcctggctgagattattgtttaatcgggacaaggtttagctagggaagatgaaaacattcaggaaacrgatggtggtgacaggttcataacactgtgaatgtacttaatgccaccaaattgtacgtctaaaaatggctaaagtagtaaattgtacgtatattacaaat

SEQ ID NO: 344588 - DNA, 201 bp, Homo sapiens
tgctttgtggttttaatttgtatattcctccttacgaatgaagttgaccaagcttttatatattcagtaatagttacaatttcctcctttaaaaagtgctratctttagctcattttttttagggttgatttttttttctggcagttgtattttcttatatatgtcttttttctagtgtctttctttttattgttttttca

SEQ ID NO: 344589 - DNA, 201 bp, Homo sapiens
ctggagtccagtggtgcaatctcggctcactgcaacccccaccacctgggattcgagtgattctcctgcctcagcctcctgagtagctgggactatgtgcrtgcgccaccatgcctggctaatttttgtgtttttttttttttttagtagagacggggtttcaccatgttagccaggctggtctcaaactcctggccacag

SEQ ID NO: 344590 - DNA, 201 bp, Homo sapiens
cccaggctggagtccagtggtgcaatctcggctcactgcaacccccaccacctgggattcgagtgattctcctgcctcagcctcctgagtagctgggactrtgtgcatgcgccaccatgcctggctaatttttgtgtttttttttttttttagtagagacggggtttcaccatgttagccaggctggtctcaaactcctgg

SEQ ID NO: 344591 - DNA, 201 bp, Homo sapiens
tttgttttgttttgtttttcttgagacagagtctcactctatctcccaggctggagtccagtggtgcaatctcggctcactgcaacccccaccacctgggrttcgagtgattctcctgcctcagcctcctgagtagctgggactatgtgcatgcgccaccatgcctggctaatttttgtgtttttttttttttttagtaga

SEQ ID NO: 344592 - DNA, 201 bp, Homo sapiens
tctcaacaccactgcattggggatccggtttccaacacaggaacttcaggagacatattcagcttttagcattctgcctctgacccccaaaattcatgtcytcacatgaaaaatgcatttgctccatctcaatagccccagaatcttaactggttccaataccacctcaaaagtccagaatctcatctagatcagatattg

SEQ ID NO: 344593 - DNA, 201 bp, Homo sapiens
tttggggagaagtgatatctttgccagatacaaataccacagacatgctttttctctctatttagatttgcttttatttatttcataagcattttttagckttctgcctatacattctgtacatgttttaatggattaacacctaagtgtttttttaagaaactgtcagtggtattttttatttcagtattcatgtgttca

SEQ ID NO: 344594 - DNA, 201 bp, Homo sapiens
tttttttttcttttcttttttctttttttttttttttttgacagggtctccctctgttgcccaggctggagtgcagtggcacgatctcagctcactgcaayctccatctcccgggttcaagccatcctcctgcctcagcctcccgagtggctgggattacaggcacatgtcaccacgcccagctaatttttgcatttttag

SEQ ID NO: 344595 - DNA, 201 bp, Homo sapiens
ggtaacctgcagcctgaggtccttgtccagcctgagtgaggcaagggttttctgtttctgtttttcatgaacagaatagagaaaggaattactgctcttttggttcctctgaataaaatggtttttgccccttggggaactaggtatagtgtgtaagactcatcccaagtgggagagaatgtgcctccacattgaatgtga

SEQ ID NO: 344596 - DNA, 201 bp, Homo sapiens
tggatcccgatgggccggcgatctgccacggagatccagctacctcaggccgtgattctcagaagaccaacatacagctcctctttgcaggcctgaaaccygacgcacctactgtcattacacttgctccaccgtggtctgatcctcaggggttctctaccagagccaggtgacagcaacccgaatggtctatgggatatt

SEQ ID NO: 344597 - DNA, 201 bp, Homo sapiens
agatgacagtgagctgagatcatggcactatactccagctgggcaacagagcaagactccatctcaaaaaaaaaaaaaaaaaaaaaaaaaaagtgtgtttsgtggcagggaacagaaggaagagctcattcctagattccttggatagatgtgtgtccaaaggaaggaagaagagtctacccacccacaagaagcaatttt

SEQ ID NO: 344598 - DNA, 201 bp, Homo sapiens
ccggcgatctgccacggagatccagctacctcaggccgtgattctcagaagaccaacatacagctcctctttgcaggcctgaaacccgacgcacctactgycattacacttgctccaccgtggtctgatcctcaggggttctctaccagagccaggtgacagcaacccgaatggtctatgggatatttacatcagggccag

SEQ ID NO: 344599 - DNA, 201 bp, Homo sapiens
tggtctcctcctcctataaagagtaaatcctcaaagcataactgagggaaaggcacgaaggaagccagaaggactttggtgtatttgcctcagtaagtagrggtggccaaagcaaaccaggtcttctccccgatttggcccatggtcctgcagagactaccgaggcgcaccaggatatctggtgctcacagacaggtctcc

SEQ ID NO: 344600 - DNA, 201 bp, Homo sapiens
aactcaagaaatccacagaagctctcccttcagttgagcaaatttcagtggaatacctattctgggtaagctatgaagcccatctctgtatattgtgtaagatctgaggttccattggtggtaggaagtacacataagacagggttccggtattaaaaaatctatttaggaaaacatatctaaaaataggtgagtgagaac

SEQ ID NO: 344601 - DNA, 201 bp, Homo sapiens
cctataaagagtaaatcctcaaagcataactgagggaaaggcacgaaggaagccagaaggactttggtgtatttgcctcagtaagtaggggtggccaaagyaaaccaggtcttctccccgatttggcccatggtcctgcagagactaccgaggcgcaccaggatatctggtgctcacagacaggtctcctggcgggtgctt

SEQ ID NO: 344602 - DNA, 201 bp, Homo sapiens
tctactaaaaatacaaaaaattagccgggcgaggtggcgggcgtctgtagtcccagctactcgggaggctgaggcaggagaatggcatgaacccgggaggyggagcttgccgtgagccgagatcgcgccactgcaccccagcctgggtgacagagcgagactccgtctaaaaaaaaaaaaacactaaagatatataaacat

SEQ ID NO: 344603 - DNA, 201 bp, Homo sapiens
atctgtgtcctcctgcagccccatagccctgccacaccagagcaggtctctggctctggcacatattcacttggggcctctgaggtgtgtggaggaagcaytgttaaaatcgcacaggacaagacagaaggagaacatagaggggtaaataataacaaccaaatttttaaatactagcttgctgatatggtcagttacagt

SEQ ID NO: 344604 - DNA, 201 bp, Homo sapiens
atttgctaacatgttcaaagaactttaaaaaatgaccaaagataatcctggctaacacggcgaaatcccgtctctactaaaaatacaaaaaattagccggrcgaggtggcgggcgtctgtagtcccagctactcgggaggctgaggcaggagaatggcatgaacccgggaggcggagcttgccgtgagccgagatcgcgcc

SEQ ID NO: 344605 - DNA, 201 bp, Homo sapiens
gctaataagtggcagaaggggaacttgaatccaaggagtccggtttcagggcctttacacttaaccacagcactttttgcctctctaggacaagaatgtgktcctagggatgaagccaagtgagaacatatcctttgatggaaactgtcactcttattatttattggatatataagtgatcttgatgatatacagttagat

SEQ ID NO: 344606 - DNA, 201 bp, Homo sapiens
taaatttgctaacatgttcaaagaactttaaaaaatgaccaaagataatcctggctaacacggcgaaatcccgtctctactaaaaatacaaaaaattagcygggcgaggtggcgggcgtctgtagtcccagctactcgggaggctgaggcaggagaatggcatgaacccgggaggcggagcttgccgtgagccgagatcgc

SEQ ID NO: 344607 - DNA, 201 bp, Homo sapiens
agtctttaccctcatctataatagctgaatatattttaacaataagtaataatgaacttaaagggaggtcacgtgtcatgacacgtgggcagcagcagcckctctctcccctcctgaagatgcgcccaagggagaggccgcagcccaaagccaggcgcagggctgtagcagtgtgtcgggaagagtacagctgcatggagc

SEQ ID NO: 344608 - DNA, 201 bp, Homo sapiens
tgagaccagcctggacaacatagcaaggccttgtctctactaaaagttttaaaaattgccaggtgtggtggtacgtgcctgtagtccccagctcgggaggytgagatgggaagatggcttgagtccaggagttcaagattccagtgagctatgattgtgccactgcactccagcctgggcaacagagcaatactctatctc

SEQ ID NO: 344609 - DNA, 201 bp, Homo sapiens
tatcttacacgtacaagaacaagatgtctaagtgcccaagattcatttatccagtaaatagttactgagccagtgtgatgagccacccctgcctgaggctrtggggacacaacagtgggtaaagccagttcctgctctgaagttgcttatgtgccaagagggagacattgagaaagcaggcaactgggggattgggagatg

SEQ ID NO: 344610 - DNA, 201 bp, Homo sapiens
gtttcgccatgttggccaggctggtctcgaactcctgacctcaggtagatccgtctgcctcagcatcccaaagtgctgggtttacaggcgtgagccactgygcccggctgctttgggggattgttgacagtacagtccccttgaaaactcagttgatttccccttcaggtgtcagctttggtaaccgtggcgggagatcta

SEQ ID NO: 344611 - DNA, 201 bp, Homo sapiens
atcgcttgaacccagaaggtggaggttgcagtgagccaagagtgtgccactgcactctagcctgggtaagaagagtgaaactctgtcttaaaaaaaaaaaaggcagttgtgcccaattgtattaaacattctactccattttaataagcaagtgcaggatacttgctatgccaggtgactgtgctgggtgcaggtggtgct

SEQ ID NO: 344612 - DNA, 201 bp, Homo sapiens
aggagtaaggactgttctgcctgcttgtttatcagcctgtgggatgcattacagaatgcaaggaactaagatgaaacagaaaccgataggtctttaacccrtgtgtcacttacctgtgacgtggaggtttctttccaactctgacctgcattcatcttctcttccacacagccctctcctcttctctttcgcttcatagct

SEQ ID NO: 344613 - DNA, 201 bp, Homo sapiens
gagaaaactagacagtgcattggaacttgtttttaaatcttattaacgcagttcctatgtgaaatctctgtaagctgaagggatgctcctgagggtaaatyctggtcctggttgggtgatacagcactcctgatattccttcccaggtgtttctaccccaaagtgtgcccctccatccctcctccatcctctctgccagat

SEQ ID NO: 344614 - DNA, 201 bp, Homo sapiens
ctgcatatgactttcattctttcaaattagttgaggtttgttttgtagttccagatgctgtctatcttggtatatgttccgtggaaactggaaaataacayatattctgctcatgttgggtggagtgttctgtaagtatcaattagatcttattggttaatggaggtgttgtgttttttatatattgttgctgatttttaa

SEQ ID NO: 344615 - DNA, 201 bp, Homo sapiens
ctggaacaggttggcccaggggaagccatggagatcagccagcttattaacactgacttgtgaaagtttacaagtgagccaggaggtgaggggagggtaaygccagtgaaatgttgtcttcaagagtattcactatttctttcccccttggattacaggaagatgctgaaactctgtggagagacggaggacaagctggct

SEQ ID NO: 344616 - DNA, 201 bp, Homo sapiens
atatacagcttagtgttatatgaagagctttagggagaagtcaataattgctctaatgatttgtgtgaaatatgtgcaatttcaagaacatcaaataattrcatttttactctgaataaaactaatcttaaaatgtgttcctctgctgcaagtatatgaaactagaattgcattgaagtatagtataagaaaccaccagct

SEQ ID NO: 344617 - DNA, 201 bp, Homo sapiens
gagtaggaacactttttctaaaggaaattggaagtctatatggccataaaagattaaaggagtaaggactgttctgcctgcttgtttatcagcctgtgggwtgcattacagaatgcaaggaactaagatgaaacagaaaccgataggtctttaacccgtgtgtcacttacctgtgacgtggaggtttctttccaactctga

SEQ ID NO: 344618 - DNA, 201 bp, Homo sapiens
aggcagaggttgcagtgagccgagattgtgccattgcactccagtctgtgtgacaagagcgaaactccaccccccccaaaaaaaaaaaaaaaaaaaaaaaactaagcaggcggaggaaggggacagcatgacgagagtaaaggacccaggggatctgtggttttctggctctctggctgtagcacatcctggaggagtcag

SEQ ID NO: 344619 - DNA, 201 bp, Homo sapiens
ggaaggcatttttctcacatggtttccttgcttgccccatcacaataccagtgaccttctcacttcgagtaaaaggaatgacccattttctaagttcaggrggcttagaagtgagcagacaacatcttctactggtttacccttagctgctctaggtgatcgctgagcacctcctcaccaacacatcacttcattgcttcc

SEQ ID NO: 344620 - DNA, 201 bp, Homo sapiens
ggcagatcacctgaggttaggaattcgagaccagcctggccaacatggtgaaaccccgtctctactaaaaatacaaaaattagctgggcatagtggcacaygcatctgtaatcccagctactcaggaggctgaggcaggagaatggcttgaactggggaagcggaggttgcaatgagccgagatcacgccactgcactcca

SEQ ID NO: 344621 - DNA, 201 bp, Homo sapiens
caggagaatcgcttgaacccaggaggcagaggttgcagtgagccgagattgtgccattgcactccagtctgtgtgacaagagcgaaactccaccccccccmaaaaaaaaaaaaaaaaaaaaaaactaagcaggcggaggaaggggacagcatgacgagagtaaaggacccaggggatctgtggttttctggctctctggct

SEQ ID NO: 344622 - DNA, 201 bp, Homo sapiens
atgaggaacggatggccatattctagtcattctttcccctggtttaacatgtttggataatttgggcattctgctattttttttttttcttttgagacagagtcttgctgtggcacaaggctggagtgcagtggcgcgatcttggttcactgcaacctctgcctcctgggttcaagtgattctcctgcctcagcctcccaa

SEQ ID NO: 344623 - DNA, 201 bp, Homo sapiens
tgagacagagtcttgctgtggcacaaggctggagtgcagtggcgcgatcttggttcactgcaacctctgcctcctgggttcaagtgattctcctgcctcakcctcccaagtagctgggactacaggcgtgtgccaccacgcccagctaatttttttttttttttttttagtagcaatggggtttcaccatgttggccagga

SEQ ID NO: 344624 - DNA, 201 bp, Homo sapiens
gcaggagaatcgcttgaacccaggaggcagaggttgcagtgagccgagattgtgccattgcactccagtctgtgtgacaagagcgaaactccaccccccccaaaaaaaaaaaaaaaaaaaaaaaactaagcaggcggaggaaggggacagcatgacgagagtaaaggacccaggggatctgtggttttctggctctctggc

SEQ ID NO: 344625 - DNA, 201 bp, Homo sapiens
cacctgaggtcatgagttcgagaccagcctggccaacatggtgaaacccaatctctactaaaaacaccaaaaaaaaaaaaaaaaaaaaaattagccgggcrtggtggtgggtgcctgtaatcccagctactcgggaggctgaggcaggagaatcgcttgaacccaggaggcagaggttgcagtgagccgagattgtgccat

SEQ ID NO: 344626 - DNA, 201 bp, Homo sapiens
tgaagatggattcccccaggctctgaaggcattccaggaacattctcggtgggtgaccttgcagagttacttgtgggcaggcaatggcaccctctggtttygattattttaaagccaactcacattgctctatagccaaatgtctttcccctttgcccgggctgaccggtttagtaacttttctttggatgttagtgtttt

SEQ ID NO: 344627 - DNA, 201 bp, Homo sapiens
ggtgaatcacctgaggtcatgagttcgagaccagcctggccaacatggtgaaacccaatctctactaaaaacaccaaaaaaaaaaaaaaaaaaaaaattasccgggcatggtggtgggtgcctgtaatcccagctactcgggaggctgaggcaggagaatcgcttgaacccaggaggcagaggttgcagtgagccgagatt

SEQ ID NO: 344628 - DNA, 201 bp, Homo sapiens
tgtgtgtgtgtgtgtgtgtgtgtgtgtgtgtttggaggaatggagtggatattagaatgaggcttattgtctgggtcatcctacaaactgtgttgcttgtrcccaagatagttttagagagaatagtcatctcagaaatgtcagattgactatatcgaaactctgggacagtctgtctttccttcccttaattctcaaggt

SEQ ID NO: 344629 - DNA, 201 bp, Homo sapiens
gagttcaagaccagcctgaccaacatggagaaaccctgtgtctactaaaaacacaaaattagccaggcgtggtggtgggcgcctgtaatcccagctactcrggaggctgaggcaggagaattgcttgaacctgggaggcggaggttgtggtgagcggcgatcgcgccattgcactccagcctgggcgacaaaagcaaagct

SEQ ID NO: 344630 - DNA, 201 bp, Homo sapiens
tgtgtgtgtgtgtgtgtgtgtgtgtgtgtgtgtgtgtgtttggaggaatggagtggatattagaatgaggcttattgtctgggtcatcctacaaactgtgytgcttgtacccaagatagttttagagagaatagtcatctcagaaatgtcagattgactatatcgaaactctgggacagtctgtctttccttcccttaatt

SEQ ID NO: 344631 - DNA, 201 bp, Homo sapiens
cagtgaaaccccgcctctaccaaaaatacaaaaaattagctgggcatggtggcaggcgcctgtagtcccagctacttgggaggctgaggcaggagaatggyatgaacccgggaggcggagtttgcagagagccgagatcgcgccactgcactccagcctgggtgacagagcgagactccatcttaaaaaaaaaaaaaaaaa

SEQ ID NO: 344632 - DNA, 201 bp, Homo sapiens
tggacaacgtggtgaaacccgtctctactaaaatataaaaaaatcagctgggcgtggtggtgggcgtctgtaatcccagctactcaggaggctgaggcacragaattgcttgaacctgggaggtggaggttgcactgagccaagatcgtgccactgccttccagcttgggcagcaaagcaaaactctgtctccaaaaaaaa

SEQ ID NO: 344633 - DNA, 201 bp, Homo sapiens; identical to SEQ ID NO: 72790

SEQ ID NO: 344634 - DNA, 201 bp, Homo sapiens
ttgtcagatatacaaaataatgacattgttttctacaatgcttttaacaagttatccttatagtagtgggttcccattactccatatctccaccaattggrattgtcagacttctacatttttaccaaaatggcagatataaaatggtaatgctttgtggttttaatttgtatattcctccttacgaatgaagttgaccaa

SEQ ID NO: 344635 - DNA, 201 bp, Homo sapiens
tccagcattctacttctttcccttaaccttctccccaacattgtttttcatcagggattcttacctaaccacatggtcaagattcccaaatatgtcctttyagcatttgctaccccttctcctacccattctcttccctgcaggcattcctagaagtaaggtggaaagctggcagcttacccgcttccccacccacagcct

SEQ ID NO: 344636 - DNA, 201 bp, Homo sapiens
tttgatatttatagaatgactcaggcttcctctgtattctttagtgaattttgtcttgcttttgtttttctaaatggccattttgtctaagttttttttttaaaaacttgctcacaaatgttatatatcttttaaatctctgtagcttttctgtttatattccacttttatttcctattattatttacctgtttctttttc

SEQ ID NO: 344637 - DNA, 201 bp, Homo sapiens
tccttgaactcttgctacctatggatctgaaattggaaattcaatactaaacctaagagagttagaggagaattccttgtaacattgtgcctggcatctaracccagtgaatgttaacttctttattttttattttttttttattttgagacagagtctctctctgtcgcccaggctggagtggagtgttgtgatctcagc

SEQ ID NO: 344638 - DNA, 201 bp, Homo sapiens
cctatgccctcctcctccaggaagcctttctcaatgactctccaaactatctgtctagtgagtatttctgtacttaggtttatatacagcttagtgttatrtgaagagctttagggagaagtcaataattgctctaatgatttgtgtgaaatatgtgcaatttcaagaacatcaaataattgcatttttactctgaataaa

SEQ ID NO: 344639 - DNA, 201 bp, Homo sapiens
tggatgagcatccctatttccagacctccagcaaccctgtgtattgtccttaaagaaacaaaattgaaataataggtggatgtggttttcaaaatcaggtrgtggagaagggtttataatgaaaaggtatcagcccacttagcctgatccagctcctagtcctgctccctggagacactttttaataccttctgtgtttat

SEQ ID NO: 344640 - DNA, 201 bp, Homo sapiens
atcacctgtagatgagccttttggacttacttccaaactggtgccttgagtcgggggtgcgtaggggtgcccatagaacattaaccccagtggccctggaygcaattggctggccatcccccaccccctcctccagtcctcctgtcatccttaaaaccacagaatggaggctcaattgggcctccctctctttggtaatct

SEQ ID NO: 344641 - DNA, 201 bp, Homo sapiens
gtgccagaggaagaagggtggtgataaaatcaagctctctaagccacgttccagctctgaagagctccccctattcctgtctggttctcctgcttcccaartttccacttgtagtgactttgttgttatggaggctaaagaggaagcatgctcgttattttaggtagattggaggagggaatgggtgactacctccttccg

SEQ ID NO: 344642 - DNA, 201 bp, Homo sapiens
gccatcacacctgactcagtaaatgtatttctaaatgtgttttccatttccacttgctacagttacccctttctttgttgccttttgcactgaggatgggktgccagaggaagaagggtggtgataaaatcaagctctctaagccacgttccagctctgaagagctccccctattcctgtctggttctcctgcttcccaaa

SEQ ID NO: 344643 - DNA, 201 bp, Homo sapiens
gcctcccaagtagctgaaattaaaggcgtctaccaccacacctggctaatttttgtattttcagtagagatggggtttcaccatgttggccagactggtcwcgaactcctgacctcaggtgatctgcccacctcggcctcccaaagtgctgggattacaggcgtgagccactgtacccggccaggcacctctttgttttag

SEQ ID NO: 344644 - DNA, 201 bp, Homo sapiens
ttctttggactgcatcattttcaccaaagcaatcccacctccagggtatttgaagaagattgcagatcaagccacaagttttctgatcagttatatgttaractaactttgcagaaacaaaagatgtatacaagttaatgacatttaagtcgtacatatctcataagtaaattatttttcatatttatttcaacaaatttg

SEQ ID NO: 344645 - DNA, 201 bp, Homo sapiens
agaagccccttctactggaaaaggagttgatatgcattacttccaacttggaaagtttaattaattaatttatttatttttattttttgagatggagtctygctctgttgcccaggctggagtgcagtggcgtgatctcagctcaccacaacctccacctcctgggttaagatgattctcctgcctcagcctcctgactag

SEQ ID NO: 344646 - DNA, 201 bp, Homo sapiens
gctactcaggaggctgaggcaggagaatcgcttgaacccaggaggcggaggttgcagtgagccgagatggtgccactgcactccaacctgggtgacagagygagactctgtgtcaaaaaaaaaaaaaaaaaaaagtattttcactgtaaaaccaggaaatgacaaagggacagggggatagatagtcttagagcataggag

SEQ ID NO: 344647 - DNA, 201 bp, Homo sapiens
cggccaatgaatcttaacttcttttactctttctttattctgtgaaactggaccaagcataacattgtctaatctgtacttcaagctctctggagaacacmcttcctcttttcactctgtgagtctgttctgttgccttgtgtacaagaactcttgaatgatgttctcagcaattgcttgcctgtcacagatactgaaaat

SEQ ID NO: 344648 - DNA, 201 bp, Homo sapiens
tctactaaaaatacaaaaattagctgggtgcagtggtatatgtctatagtcccagctactcaggaggctgaggcaggagaatcgcttgaacccaggaggcrgaggttgcagtgagccgagatggtgccactgcactccaacctgggtgacagagcgagactctgtgtcaaaaaaaaaaaaaaaaaaaagtattttcactgt

SEQ ID NO: 344649 - DNA, 201 bp, Homo sapiens
gagaattccttgtaacattgtgcctggcatctaaacccagtgaatgttaacttctttattttttattttttttttattttgagacagagtctctctctgtygcccaggctggagtggagtgttgtgatctcagctcaccgcaagctccgcttcctgggttcacgccattctcctgcttcagcctccagagtagctgggact

SEQ ID NO: 344650 - DNA, 201 bp, Homo sapiens
ctcactgcaacctccgccttacaggctcaagcgattctcctgcctcagcctcccaagtagctgggattacaggcatgtgccaccatgcttggctaattttkgtatttttagtagagatggggtttcactatgctggccaggctggtctcaaactcctgactttaagtgatccacccgcctcggcctcccaaactgctggga

SEQ ID NO: 344651 - DNA, 201 bp, Homo sapiens
ggaggctgaggcaggagaatcgcttgaacctggaaggcggaggttgcagtgagccaagattgtgccactgcactccagcctgggtgacagaaaaaaaaaawttctgccataaaatcatgagctattctaccacaaactcatgaattgtaaaatattgctaacaagatttgacaagaagacaatctttgacaatataatgac

SEQ ID NO: 344652 - DNA, 201 bp, Homo sapiens
tggggtttcaccatgttagccaggatggtctcaatctcctgacctcatgatccaccagcctcggcctcccaaagtgctgggattacagatgtgagccatgrcgcctggtcataaataagtaaaatgtttttttaaaaaaagaagtgagcagatgactacttttaccagtttctttcttccttctgcctctttcttccccat

SEQ ID NO: 344653 - DNA, 201 bp, Homo sapiens
cattctcctgcctcagcctcccgaatagctgggactacaggtgcctgccaccactcccggctaattttttgtatttttagtagagatggggtttcaccatkttagccaggatggtctcaatctcctgacctcatgatccaccagcctcggcctcccaaagtgctgggattacagatgtgagccatggcgcctggtcataaa

SEQ ID NO: 344654 - DNA, 201 bp, Homo sapiens
aagaatggagtactctagtatatttcaaaatggctacttttttcctcctggtgctgaaagcaggagaggatttttctctgaaatttcctgtgagaacctgrtcttagagctcctagaggtaaaagtgggtccccctggaggatttaactttcacacttgtccatgctgggcctccatcaactcgtcaattacagtactggt

SEQ ID NO: 344655 - DNA, 201 bp, Homo sapiens
gagtttgagaccagcctggccaagatggttaaaccctgtctctactaaaaatacaaaaattagctgggtgtggtggcgggtgcctgtaatcccagctactygggaggctgaggcaggagaattgcttgaacccaggaggcagaggttgcagtgagtggagatcgcaccattgcactccagcctgggtgacaagagcgaaac

SEQ ID NO: 344656 - DNA, 201 bp, Homo sapiens
gcgaatggatcacctgaggtcaggagtttgagaccagcctggccaagatggttaaaccctgtctctactaaaaatacaaaaattagctgggtgtggtggcrggtgcctgtaatcccagctactcgggaggctgaggcaggagaattgcttgaacccaggaggcagaggttgcagtgagtggagatcgcaccattgcactcc

SEQ ID NO: 344657 - DNA, 201 bp, Homo sapiens
tgaacccgagaagttggggctgcagtgagccatgattatgtcactgcagtccagcctgggcgacagagcaagaccctgtctcaaaaaaaaaaaaaaaagaaaagaaaaagaaaaagaagagaagagaaaagaaaaaagaagcagtggagagaatcacctcaggttccactccccagattctgtaggctccctacctcctgc

SEQ ID NO: 344658 - DNA, 201 bp, Homo sapiens
ttgaacccgagaagttggggctgcagtgagccatgattatgtcactgcagtccagcctgggcgacagagcaagaccctgtctcaaaaaaaaaaaaaaaagaaaagaaaaagaaaaagaagagaagagaaaagaaaaaagaagcagtggagagaatcacctcaggttccactccccagattctgtaggctccctacctcctg

SEQ ID NO: 344659 - DNA, 201 bp, Homo sapiens
ccacacgccgccccgggcaggtctcctcttccacgagacagagcttacaggatcctctctcctgtaccatctccactccggcccccacgaatccaaatggyttaagacagtggctcagacccatcttctgcagaacacaaattgatcctgccttttaccgtgagccttcatttgacaagaagagagaattgtgatggccat

SEQ ID NO: 344660 - DNA, 201 bp, Homo sapiens
aaacaattctcctgcctcagcctcctgagtagctgagattacagacgcccacctccacgcccagataattttggtatttttagtagagatggggtttcacyatgttggccaggctggtcttgaactcctgacccatgatctgcccgcctcagcctcccaaagtgttgggattacaggcgtgagccaccacacccggcctcc

SEQ ID NO: 344661 - DNA, 201 bp, Homo sapiens
ggcaggatcacttgaagccaggagttcgagaccagcctggacaacatagtgagatcctgtctctataaaaatacagtttaaaaaaatgagctgggagtggyggtatacacctgtagttccagctactcagaaggctgaggtgggagattgaggctgcagtgagccatgattgtgccactgcactccagcctgggccacaga

SEQ ID NO: 344662 - DNA, 201 bp, Homo sapiens
gctggagtgcagtggcgcaatctcggctcactgcaacctccgcctcctgggttcaagcgattctcctgcctcagcctcccgagtagctgggactacaggtrcccaccaccacgcctggctagtttttgtatttttagtagagacagggttttgccatgttggccaggctggtcttgaactcctggccccaaatgatccact

SEQ ID NO: 344663 - DNA, 201 bp, Homo sapiens
ctttcgtatcaattttagaatcaatttgtctgtaactataataaatcttattaagattttgattgggattgcatttaatctgtgatcagtttggggagaaktgatatctttgccagatacaaataccacagacatgctttttctctctatttagatttgcttttatttatttcataagcattttttagctttctgcctata

SEQ ID NO: 344664 - DNA, 201 bp, Homo sapiens
agaattagtttccctgacttctcaggtttctctggaggcagcccactttgtttgccttgtggccccttccgccgtcttcaaagccagtagcactgggttgygctgtcctcataccacatcgctctgatccttctttggtcacatctccctctgaattcctcttctgcctcctcttccactttttttttttttttttttttt

SEQ ID NO: 344665 - DNA, 201 bp, Homo sapiens
tgacccaatcaataggacattagaggaaaatcagaaccaattccaaatttggctttggactgctttgttccttcccttctatttcccttactgtgagttasacctgccagaccaacacaggccctgccatgggcttcctgttagcccagcagggctgggcggacccaaactcgtcccccaaagagcgctgtgcacattgaa

SEQ ID NO: 344666 - DNA, 201 bp, Homo sapiens
ccttccctactcttgagccgtgtggtgtaagtgggactaacttcaccctttgattcagggaagggatgtgacttgggtctagccaaaatcattgattcacrcagagcaggtgaatcaaattggaccaatcggtatatggtttttttctattctttttttttttttttttttttttgagacaaggtcttgctctgtcactct

SEQ ID NO: 344667 - DNA, 201 bp, Homo sapiens
ggtgtttcctctttcttcaaaagctgtgaccttcagagggaagcaaagttggaatgtcatcagtagcctaagttttatctccagcatttccagtgctaggyaacatggtgaagctctatctctacaatatctacagatacatctattgatatatccagggttttttctggccctctcatttgtcctcatatagattggata

SEQ ID NO: 344668 - DNA, 201 bp, Homo sapiens
cgtgacccaatcaataggacattagaggaaaatcagaaccaattccaaatttggctttggactgctttgttccttcccttctatttcccttactgtgagtwagacctgccagaccaacacaggccctgccatgggcttcctgttagcccagcagggctgggcggacccaaactcgtcccccaaagagcgctgtgcacattg

SEQ ID NO: 344669 - DNA, 201 bp, Homo sapiens
cgatataccctcttgtctcttgtcagataactgtctggaaagtgcaggcttgttatatagcaccctctatccatggattttggctgttccatttattggtrtttcctctttcttcaaaagctgtgaccttcagagggaagcaaagttggaatgtcatcagtagcctaagttttatctccagcatttccagtgctaggcaac

SEQ ID NO: 344670 - DNA, 201 bp, Homo sapiens
tttttctccttttttctccccctcttcttccttctcctcctccttcccctgccccaaccccagcacccttcttcctcattttttttttttgttttgctgggcaggtctttgtttctctttaatttttgtaaggtctccatccagggtgtgtcaatgcctggacactggccagggttaaacttcggggtgtgaatcagaaga

SEQ ID NO: 344671 - DNA, 201 bp, Homo sapiens
gactccaaatgccacagcatcaagaatatagaaagtaggaaaatataattaatacattgacattatccagctgttcagttttatatagctattcttccctycccacttcaatttatactttaaagaattccttataaggtcaacaaggctcctgacaatagcatttgcgatataccctcttgtctcttgtcagataactgt

SEQ ID NO: 344672 - DNA, 201 bp, Homo sapiens
gttcttgtatatgtatattttgagataccagcatttactcgcagttggaaggaagaacaggactaagtcttatgccaagtctgtagtaagcctttggctaygtattagtccatagtgtgtgggcacagaaatcctgtgaatggaaagttccaaccacgtctgctattctgaagacacccaggtcagccaaatatgggaact

SEQ ID NO: 344673 - DNA, 201 bp, Homo sapiens
tggcttgaggattggctgccactaatcctgctcatccccttaccactgatactcttgtgcaaggaacccagtaggttcttgtatatgtatattttgagatrccagcatttactcgcagttggaaggaagaacaggactaagtcttatgccaagtctgtagtaagcctttggctacgtattagtccatagtgtgtgggcaca

SEQ ID NO: 344674 - DNA, 201 bp, Homo sapiens
ggagttttgctcttgttgcccaggctggattgcaatggtccgatccggctcatcgcatcctctgcctcctaggttcaagcaattctcctgcctcacccccwctacccactgagtagctgggattacaggcatgcaccaccacgcccgactaattttgtatttttagtagagacggggtttctccatgtcgctcaggctggt

SEQ ID NO: 344675 - DNA, 201 bp, Homo sapiens
cattttatggttgggaagctgatacccaactagcttaaagtcggtgcctccctgactctcttgactcttttccgtgtgttttgtttttgttttttcctttygtactttatagaattcacatttccccaaggatgtttctgtgatgcttgatgggccccttggattaccacctggtcctgctcttcctcttctttcagtttt

SEQ ID NO: 344676 - DNA, 201 bp, Homo sapiens
caggagtatcactgcgagttctgagcctttgaagccaagtaccactgcccacaggcttttttttttgattcccctataaacacacacacacacacacacamgcatgcagacatgcacaaaggcacacacgtatcagggtggagtcatggcagcttcctgttctgtaatctctatattttttgagatggagttttgctcttg

SEQ ID NO: 344677 - DNA, 201 bp, Homo sapiens
cctccttggccacagtgctgcctggtgttcctaatgtaaccatcctcgaaacttctagttcctttggccctctggttccctctggcctctgaccacagggrcatcagggttctctgtttagcaccatggtcccctctggcctctgacctaggggcatcagggtcctctgtttggcaccatggtccccaccctgccctgcta

SEQ ID NO: 344678 - DNA, 201 bp, Homo sapiens
tcacataaattcttatccttgcttcacccacgtctctgtttttctcatttagccttgtcctctctctcttttagtttgtatctcttcttttccattttatwcttcttcaatgtataatctttcctttttgaaagtcaaacttgagtctgggaaagacaacaacagcaggacagatgtctagctcattttgtcctccccaca

SEQ ID NO: 344679 - DNA, 201 bp, Homo sapiens
atgttggccaggctggtctcgaactcctgacctcaggtagatccgtctgcctcagcatcccaaagtgctgggtttacaggcgtgagccactgcgcccggcygctttgggggattgttgacagtacagtccccttgaaaactcagttgatttccccttcaggtgtcagctttggtaaccgtggcgggagatctaactcaagg

SEQ ID NO: 344680 - DNA, 201 bp, Homo sapiens
attattattattcctttcttaggtgggacagaattgctagagggggttggcgttgagtatttcccttcctcttggtaggttaggcaattttaaaagcccartagtttaggcttgggtaaaataatttctctttaggggagaccttgttaagaatggagtactctagtatatttcaaaatggctacttttttcctcctggtg

SEQ ID NO: 344681 - DNA, 201 bp, Homo sapiens
agggaagcacctgaattctcactggggactttagtggaaaaaaggaaaatgttaccagtaggaaatcagaactcttggctctaaagtcatattgtctgtgyggtgaggcaaggcccaagtggagagattaacatgaaactgatgaaggacaattgaaatccctagggccctagcagaagcaaatatgaaacctgtcaattc

SEQ ID NO: 344682 - DNA, 201 bp, Homo sapiens
gctgaattgtatctcccctagaagatgttgaggacctaatcccccagtatctgtggatgtgagcttatttggaaacaaggtctgtgcagatgactaaattragatgaggccattagagtgggcctttgtattagtacattttcatgctgcttataaagacatacccaagactggataatttataaagaaaaagaggtttag

SEQ ID NO: 344683 - DNA, 201 bp, Homo sapiens
aaatagttctttggtgatgtggtaaggtgtgggagaaggggaagcattcatagtgctatgatcggtctctttcttttggtgagcctgtgccttagggctgygaatttcaccagtgcctctcattttgttgttgttttaattattattattcctttcttaggtgggacagaattgctagagggggttggcgttgagtatttc

SEQ ID NO: 344684 - DNA, 201 bp, Homo sapiens
tgggcaaatgccaaagagcataattgcctgatcatatggtgagagtatgtttagttttgtaagaaactgtcatactgtcttccaaagtgactatactctgyattcccaccagcaatatatgagaggtcctgttgctccacatctgtgcctgcatttagtgttgtcagtgttttggattttggccatttcaattaaggttct

SEQ ID NO: 344685 - DNA, 201 bp, Homo sapiens
ctggatataccacagtctatccactcgcctactgaaggacatttttgtggctgccaagtttgggcaattatgaacaaagatgctgtaaacatccacatgcragcttttatgtgacatacgttttccattcatttgggcaaatgccaaagagcataattgcctgatcatatggtgagagtatgtttagttttgtaagaaact

SEQ ID NO: 344686 - DNA, 201 bp, Homo sapiens
cttgaacccgagaagttggggctgcagtgagccatgattatgtcactgcagtccagcctgggcgacagagcaagaccctgtctcaaaaaaaaaaaaaaaagaaaagaaaaagaaaaagaagagaagagaaaagaaaaaagaagcagtggagagaatcacctcaggttccactccccagattctgtaggctccctacctcct

SEQ ID NO: 344687 - DNA, 201 bp, Homo sapiens
actggcttctttcacatagtaatatgcatttcagtttccttcaagtcttttcatggcttaacaactcatttctttttagccctgaataatatttcattgtytggatataccacagtctatccactcgcctactgaaggacatttttgtggctgccaagtttgggcaattatgaacaaagatgctgtaaacatccacatgca

SEQ ID NO: 344688 - DNA, 201 bp, Homo sapiens
tcatttctgctgtcctcattggtaaaatgagaataagatgctatgatctgtagagtccgtttcagctttaaatttgtggttctgtgctcctcaagcatcarcagaatgtgacttggaacagctttgtcagcatcagacgtagcagtgtttattccccgggtcctgcctgtcagccatgtggcctgcccacgtaaaggctgg

SEQ ID NO: 344689 - DNA, 201 bp, Homo sapiens
catcctgtgcatctcaatgatgagcagtgtcaattctggattccctgccccttgtcttcttactctgagagagagcagtggtccagcctgggtaacatggygaaactcatctctaaaaaaattatgaaaattagccagatgtggtggcatgtgcctgtattccaagctactcaggaggctgagatgagaagatcacttgaa

SEQ ID NO: 344690 - DNA, 201 bp, Homo sapiens
agaggttgatttagctcatggttctggaggctgggaagtctaagagcatggaactagcatctggtgaggcccttcatgctgtgtcataacatggcagaggrtgttacatgcaagagagcaagagtgtgcatgtcagctcaagacactcttcctcatcttataaagccaccagtcctatcatgggagccccatcctgatgac

SEQ ID NO: 344691 - DNA, 201 bp, Homo sapiens
ttacataacaaagagccagaacaagcttaaaaaaaaaaatccttcaacctgtcccaaatctacccatctgatttaaatggcctggcctgggataagtatgwgattctaatgtgctggggttgggaactactgaataattttgccactctgaatgaagaatttggcaatgctacattttttttaatttatcaaaactttcct

SEQ ID NO: 344692 - DNA, 201 bp, Homo sapiens
aaatgggccagggttcatagttttgcctatttatgtattctgtagcaatttgttagactatccttcctccattgaattgcctttgtgccttttttagaggycactgatcatatttgtctaggtctactttttgtacttttattcttttccactgatctgggtttctttatttttgccaagaccgtactctcttgattgatt

SEQ ID NO: 344693 - DNA, 201 bp, Homo sapiens
tccttcctgcttaggccgaagtggctgatgaggtctgcgttagttcattttctgttgctttaactgaacaccacagactgggtattttataaagaataaasagggtaatttataaagaatagaggttgatttagctcatggttctggaggctgggaagtctaagagcatggaactagcatctggtgaggcccttcatgctg

SEQ ID NO: 344694 - DNA, 201 bp, Homo sapiens
agaatcgcttgaacccagggaggcggaggttgcagtgagccgagatagtgccattgcactccagcctgggcaacaggagtgaaacaccatctcaaaaaaaraaaaaaaaaaaaaaaagcaatttctgttgttcaccaaccttgtggttggtactcatgacagcagccataggaagccaatacaatcatccactgcagctcc

SEQ ID NO: 344695 - DNA, 201 bp, Homo sapiens
aaaaccagccgggagtggtggcacgcacttgtaatcccagctactcaggaggctgaggcaggagaatcacttgaacctgggaggtggaggttgcagtgagstgagatcgtgccattgcactccagcctgggcgacagagcaagactccatctcaaagaaaaaaaaagaaagagagtctcgctctgtcacccgggctggagt

SEQ ID NO: 344696 - DNA, 201 bp, Homo sapiens
taggtgtgggggcaagaggcagggaacaggagtatcactgcgagttctgagcctttgaagccaagtaccactgcccacaggcttttttttttgattccccyataaacacacacacacacacacacacgcatgcagacatgcacaaaggcacacacgtatcagggtggagtcatggcagcttcctgttctgtaatctctata

SEQ ID NO: 344697 - DNA, 201 bp, Homo sapiens
tttcctgacacgtgacgcatgttcattacattgcaggtgcacgagtctcctagtcagtgagatatgtgacatgagagaagcttctgtccagtccccgggggacatggctggtgttgagccttggttaaacctggcccttctaattttcttttagatacttgataaaatttttatccaagctgtcagaatatcaagatgtaa

SEQ ID NO: 344698 - DNA, 201 bp, Homo sapiens
catggtctctttttttttttttttttttgagacagagtctcactgtgtcgcccaggctggagtacagtgggatgatctcagctcactgcaagctccgcctyccaggttcacaccattctcctgcctcagcctcccgagtagctataggcacccaccaccacgcgtggtctctgtgtgtggtggcaccaccacaggtcccaa

SEQ ID NO: 344699 - DNA, 201 bp, Homo sapiens
agctgggcatagtggcacacgcatctgtaatcccagctactcaggaggctgaggcaggagaatggcttgaactggggaagcggaggttgcaatgagccgaratcacgccactgcactccagcctgggcaacagagtgagactctatctaaaaaaaaaaaaaagtattaatattcccccaaaagtaacagtaacctattaaa

SEQ ID NO: 344700 - DNA, 201 bp, Homo sapiens
ggacatcgttctgaaaactgcgactctgtactcgtgtaatgatgtccttcgttgtactcattcagatgtttcccatctccttttcttgcaaatatttcacrggacttaggtagcaatagaccattcacgatgctctgtgtatatgtacatctctttacctgcatatatgtcagcttgggtttctaaggaaaccaaaactct

SEQ ID NO: 344701 - DNA, 201 bp, Homo sapiens
taagatagcggatgttttgaaatataatttttggctgagcacagtagttcacacctgtaatcccagcagtttgggaggctgaggtgggaggatcgcttgarcccaggagttcaagaccagcctgggcaacatagtgagatgctctctaaaaaaaaaaaaaaaagaaattagttaaaaaatataataggctgggcttggtgg

SEQ ID NO: 344702 - DNA, 201 bp, Homo sapiens
aatatttttgaccctaaatgaattgaggttattttgcttgtaagagttttacccgtaagttctaacctcaaaacacataatcagcaccctgcctttgcacyccacagcatcagcctagaccacagttgcctaacttcatgtgtggctgcatatctgctaagaagccttcacagtgtaagagagagagaggaaaaaaaaaat

SEQ ID NO: 344703 - DNA, 201 bp, Homo sapiens
tctgtgcatgcatagttcaggagtcagcaagaaatctggaaagtttacgtgtagattgggggccgctatgccgtagagctcactcatctttttctcttagkctgttttctgttgctgtgacagaataccagagaccgggtaacttataaagaacagatgattatttggctcgtgtttctggaggctggcaagtctgagagc

SEQ ID NO: 344704 - DNA, 201 bp, Homo sapiens
gggccagtactagttccctggatatgactggagacagggagcctccacccctgttgaatctccagcagtcttctttctctccgcttccactgctcatgacwgtcttttgaatctacagtcttctctgccccgccctaccctccgacgttcaggtatgctcactgcaaactctgcctcccgggttcaagtgattcttctgcc

SEQ ID NO: 344705 - DNA, 201 bp, Homo sapiens
tgggtgaattgtatggtcaccctacttataagacatggttgtgcagatttggattccatctgagaaccaatggtaaattactgagtggccacttgacatckccccatagtttttggttatgagcatggattctgatgtcagattcccataggtgcatattttggctctatcacttgctagttgtaaaaccatggacaagcc

SEQ ID NO: 344706 - DNA, 201 bp, Homo sapiens
actgttaaaatcgcacaggacaagacagaaggagaacatagaggggtaaataataacaaccaaatttttaaatactagcttgctgatatggtcagttacartggttggtatcaaatattacaatgattggttaatatgatttccgatgagactttattgattcgtgctcaaccaatgacctttcctatcaatttctcagtg

SEQ ID NO: 344707 - DNA, 201 bp, Homo sapiens
ctgcactcacaatatagcaacagactcttgtgataactaacctgctaccgcaataacaacgttaattcgttcacgagaactctgccctcatgacccagtcrcctcttactaggccccacctttcaacactgttgtcttggggattaagtttccaatgcattaactatgggggacacattcaaatcatagcactcacctttc

SEQ ID NO: 344708 - DNA, 201 bp, Homo sapiens
tgggggccgctatgccgtagagctcactcatctttttctcttaggctgttttctgttgctgtgacagaataccagagaccgggtaacttataaagaacagrtgattatttggctcgtgtttctggaggctggcaagtctgagagcctggcaccagcttcagtgagagccttcttgctgcatcataacatggcggaagggga

SEQ ID NO: 344709 - DNA, 201 bp, Homo sapiens
aggaggctgaggcaggagaatcgcttgaacctggaaggcggaggttgcagtgagccaagattgtgccactgcactccagcctgggtgacagaaaaaaaaaatttctgccataaaatcatgagctattctaccacaaactcatgaattgtaaaatattgctaacaagatttgacaagaagacaatctttgacaatataatga

SEQ ID NO: 344710 - DNA, 201 bp, Homo sapiens
gcaggctaaggaaagtgggaatggcaggtgtgattgccaagggatatagagtatgtctcttttaagaaagtaaaataaattcttcatgttgggaatatcaytgggagttggggtgaggcttgcaaataggatgaccatctaatgtattatacaaactggggccatttctgagagtgatcatgtaattaataatgctgggga

SEQ ID NO: 344711 - DNA, 201 bp, Homo sapiens
tttgggaagggtggggatggttgaaaaatcaaagggaagagctggacagtgcggcctgggagtgaccacagagtgtccctgctgcagggcaaaggacagtstcgtcagaggccactggcaaaggagttgcttcaaaattcttttctgtcattgggtcactcaggtgattcacatatgacagtctagttcgttaagtccgat

SEQ ID NO: 344712 - DNA, 201 bp, Homo sapiens
ctgaatgagattaggaaatattttttaagtagaaaaataatgcaggtatggaatcgattttagtaaacaacagaattgacactgcagaaaggtgagccaaygatgtagagaaaaatttgagaatttcttctagaatgttaaggtgagagccaaaaagaatgaaagaaaagatggcagatgttgaagataatggaaaaccaa

SEQ ID NO: 344713 - DNA, 201 bp, Homo sapiens
tgacctcatgatctgcccgcctcagcctcccaaagtgctgggattactggcaaattaattcttttcctataatagatatgatagagaatgagatagggcargagggagaggttatgctccttgttaaaattaaaaagcatatcccttaagaattcacttaattctgtcctctctgctacctaagaggatgtcaaaatcatt

SEQ ID NO: 344714 - DNA, 201 bp, Homo sapiens
gggaatatggattttaggcaccaatagataaaggtgagataaaattgtcaagtaaagtggaaagggaactgaatgagattaggaaatattttttaagtagraaaataatgcaggtatggaatcgattttagtaaacaacagaattgacactgcagaaaggtgagccaatgatgtagagaaaaatttgagaatttcttctag

SEQ ID NO: 344715 - DNA, 201 bp, Homo sapiens
catgcccttggaaaataggggtgtctacaagagacccaccctggcttagactctttaagggaaaaaaggaaaaagaatctcaaccattttaagatcatcgwtggtttataaaattttcaatgcttagttatttaaagaaaatttaattaaaagatatttaggaagtattaaatttgctaacatgttcaaagaactttaaaa

SEQ ID NO: 344716 - DNA, 201 bp, Homo sapiens
cgtgaacctgtttctccatcagtcagtgtgaaaagccatcttctcatcatcacttaagatttcgagtttgctttactgcccacattttggtttggcgctgkggcctaaagattgtttcctgactcttctgttattctctcttaatatttcctgagatgtctcattgttattcttgttgagtcatatctgccatcttttgct

SEQ ID NO: 344717 - DNA, 201 bp, Homo sapiens
agccacctagcatgtggtacttcattatggcagccatagggaactaatacaggagccttttataagtcctagatctgccccctttttcctggcgtgaaccygtttctccatcagtcagtgtgaaaagccatcttctcatcatcacttaagatttcgagtttgctttactgcccacattttggtttggcgctgtggcctaaa

SEQ ID NO: 344718 - DNA, 201 bp, Homo sapiens
aagagagaatgagagccaagtgaaaggggaaaccccttataaaccatcagatctcatgagacttactaccacgagaacagtatagggaaaactgccccccrtgattcaattctctcccactgggtccctcccacagtgaatgggaattatgggagctacaattcaagatgagatttgggtggggacacagccagaccatat

SEQ ID NO: 344719 - DNA, 201 bp, Homo sapiens
caagttttgtaagcttgccaaaacctcaatttccccatcaataatatgatgttattaatagtcctgacctcaggggttgttgtgaaagttaaatgaatgtygagctttaacaatctgatgcttagtgaaagcttaatgtttgttttggtgctttctaatgaataaagaccctgatcatgataatgcattcttgttgctctt

SEQ ID NO: 344720 - DNA, 201 bp, Homo sapiens
ctgcttattaaaatttgtctaaaattgagtgtctgtctacagaagtccaattaagtgagcgattaatgttgaagatttgagaaacacttgtgtgatgaagygtctagcagagctctggcactaaatggaagatgttcttgtaacacagaaacaaaaataacagagacagtgtggatataaggctttgaaatgcgttgggca

SEQ ID NO: 344721 - DNA, 201 bp, Homo sapiens
cgagaactctgccctcatgacccagtcacctcttactaggccccacctttcaacactgttgtcttggggattaagtttccaatgcattaactatgggggasacattcaaatcatagcactcacctttcagcttctagggtagcttcaaactctgttctctggttctttaagacagtaacactgatgatacatacatactaa

SEQ ID NO: 344722 - DNA, 201 bp, Homo sapiens
aggtgttcagcagtagaagaccaccttgcacactgggtgggtaaaagaaatctgctcagcattgttctttcatatttcacctcgagctttataaaccctgycagaggaagatctctggggccaggagttcaagaccaacctgggcaacatagtgagacccccatctctaaagataataaataaataaacaaacaaacaaat

SEQ ID NO: 344723 - DNA, 201 bp, Homo sapiens
agcctggcaccagcttcagtgagagccttcttgctgcatcataacatggcggaaggggaagtaagcacatgagacacaggcaccaggggctgcactcacartatagcaacagactcttgtgataactaacctgctaccgcaataacaacgttaattcgttcacgagaactctgccctcatgacccagtcacctcttactag

SEQ ID NO: 344724 - DNA, 201 bp, Homo sapiens
ctgggtagtccctgagcccacatgtccatgggcaggggtcatggggatgtcaagggctttctcttgctctggcaaagttcacctctccattggcctccacrtcaccatggggtggagtggagagagggcccaggggctccagaaagagagtctcaccctcctttttccattcccttggcaccagcactcacagcctgatct

SEQ ID NO: 344725 - DNA, 201 bp, Homo sapiens
gatacagcccccttcagctctcagcacatccctcaacctttattgtttttttagtgaaacaccagtgtacattttacctattgccatttgctgtggatatrtgtattaacacttgatttcttaattaattctttatggtttagattttcagcagagatttttttttgtgtgtcatcagggagtttaataataaatatattt

SEQ ID NO: 344726 - DNA, 201 bp, Homo sapiens
tgtatatattatcagcacatcttgaacaatagtcccatgactggatctttaatttctgccacaattctgatggatactgtcaaatccaattaatttatctygtgtttaattagatcccaataagatgtgtatgtttgtcactattgaagtaaatctggcttgtctgcttcaaaagccaatgatacagacctcaatattctc

SEQ ID NO: 344727 - DNA, 201 bp, Homo sapiens
cggctgctttgggggattgttgacagtacagtccccttgaaaactcagttgatttccccttcaggtgtcagctttggtaaccgtggcgggagatctaactyaaggcctcaagttatagattccccataagtatgagttataggctacaggatgaaaagggcatttttagcaaaggtatactctttgtttccgctttactct

SEQ ID NO: 344728 - DNA, 201 bp, Homo sapiens
gagctcgtgaccagcctggccaacatggtgaaaccccatctctactaaaaatacaaaaattagctgggtgcagtggtatatgtctatagtcccagctactyaggaggctgaggcaggagaatcgcttgaacccaggaggcggaggttgcagtgagccgagatggtgccactgcactccaacctgggtgacagagcgagact

SEQ ID NO: 344729 - DNA, 201 bp, Homo sapiens
ttttagtagagacgaggtttcaatatgttggccaggctagtcttgaactcctgacctcaagtgatctgcccacctccgcctcccaaagtgctgggattacyggcatgagccactgcacctgacccaagaagttcttgataagtgttgttttattgctgtgtaaatcatttcctgggagatagagctcatctttggtttctt

SEQ ID NO: 344730 - DNA, 201 bp, Homo sapiens
tgttttgtcttcttatgagaaggagaattattcctggtcacattgatggtccgttctcctgcctcagcctcccgagtagctgggattacaggcacctgccatcacactcagctaatttttgtatttttagtatagacggggtttcgccatgttggccaggctggtcacgaactcctctagcaggaacactagacaaagtct

SEQ ID NO: 344731 - DNA, 201 bp, Homo sapiens
ttgagagctgcactgcaaagggcttgtcccacccctgtggactttaatctagatgttcagtaatttggaaaaggcacacttgattgagagggttctagaawaattcgaactgtgccctatggtataccagtttccactggtagttggttatattatgaatggggaggagggtggactctgatgtctaataagttcctgaag

SEQ ID NO: 344732 - DNA, 201 bp, Homo sapiens
gtggcgcgatcttggttcactgcaacctctgcctcctgggttcaagtgattctcctgcctcagcctcccaagtagctgggactacaggcgtgtgccaccamgcccagctaatttttttttttttttttttagtagcaatggggtttcaccatgttggccaggatggtctcgatcccttgaccttgtgatccacctgccatg

SEQ ID NO: 344733 - DNA, 201 bp, Homo sapiens
ttgttaaaaaagaagaaggggaggcgaggcgttaggtggttttaaaattattctgatgcaaatatgagactaacctctttagcgtgcttggaggaatagasagcagaatgagtgggaagtactgatttgctattacctctatgaccttgtgccacgtaaaattgcatcccataatatgagtgttcaagtaccctattttgg

SEQ ID NO: 344734 - DNA, 201 bp, Homo sapiens
atgatcacagctctctatagccttgacctccctaggctaaagtgatcctcctacttcagcctcccgagtaactgggactacaggcacatgctaccatgccmagctaaattttgtattattttgtagagatggggttttgtcatgttgcccaggctggtctcgatctcctggactcaagccatcttcccaccttggcctccc

SEQ ID NO: 344735 - DNA, 201 bp, Homo sapiens
tagatgttctcaactacccaaatccactgtagataaaattcttcaagacatgacagagttaactcgcattttctctgttatcagggcggcttttgttacayggttgcaaacctgttctacacacctgctttgccaccttcacttcctgacaatttctgatttccacttcagcttctggagcattctgtctcctgcccttcc

SEQ ID NO: 344736 - DNA, 201 bp, Homo sapiens
gcacctcctcatttaaacctggattttaagtctcaattgtacatagaacccagcctctcttggaagttctatttgttagtggtgatcatttgattatatcrcactcagctttgatcaacctgacctgttcgtattgacataatcacaccaacatattccaccttaaggctttttcactactcttttcttcttttgcatcat

SEQ ID NO: 344737 - DNA, 201 bp, Homo sapiens
agtttcccaaggtatttatatcatctgtactcccaccagttatgtccagttgctccatacccttgtcagtatttgatactgtcaagtttttttttttttttaatttttgccacttcagtagctgtgttgtagtagtttatcatggctttaatttgtacttccttaacaggtaatgatgtgaaacaccttttcatgagttta

SEQ ID NO: 344738 - DNA, 201 bp, Homo sapiens
cagagtcttgctgtggcacaaggctggagtgcagtggcgcgatcttggttcactgcaacctctgcctcctgggttcaagtgattctcctgcctcagcctcscaagtagctgggactacaggcgtgtgccaccacgcccagctaatttttttttttttttttttagtagcaatggggtttcaccatgttggccaggatggtc

SEQ ID NO: 344739 - DNA, 201 bp, Homo sapiens
ctcctgacttcaagtgatctgcccacctcagcctcccaaagtgccgggaaatttttattatttttaaaaattttgagacaggatctcactctgtaactcargctggagtgcagggatgtgatcatagctcactgcactcttgaactcttgggctcaagcaatccttctgcctcaggtctcccaagtagctgggactacagg

SEQ ID NO: 344740 - DNA, 201 bp, Homo sapiens
attctagtcattctttcccctggtttaacatgtttggataatttgggcattctgctattttttttttttcttttgagacagagtcttgctgtggcacaagrctggagtgcagtggcgcgatcttggttcactgcaacctctgcctcctgggttcaagtgattctcctgcctcagcctcccaagtagctgggactacaggcg

SEQ ID NO: 344741 - DNA, 201 bp, Homo sapiens
tttttgtatttttagtatacacagggttccgccacgttggccaggctgttcacgaactcctgacttcaagtgatctgcccacctcagcctcccaaagtgcygggaaatttttattatttttaaaaattttgagacaggatctcactctgtaactcaggctggagtgcagggatgtgatcatagctcactgcactcttgaac

SEQ ID NO: 344742 - DNA, 201 bp, Homo sapiens
tgaggaacggatggccatattctagtcattctttcccctggtttaacatgtttggataatttgggcattctgctattttttttttttcttttgagacagagtcttgctgtggcacaaggctggagtgcagtggcgcgatcttggttcactgcaacctctgcctcctgggttcaagtgattctcctgcctcagcctcccaag

SEQ ID NO: 344743 - DNA, 201 bp, Homo sapiens
cgcggtctctgctcactgcaacctccgcctcccaggttcaagtggttctcctgcctcagcctcctgagtggctgggattacaggcacctgccaccacgctyagctaatttttgtatttttagtatacacagggttccgccacgttggccaggctgttcacgaactcctgacttcaagtgatctgcccacctcagcctccca

SEQ ID NO: 344744 - DNA, 201 bp, Homo sapiens
tgttcattacattgcaggtgcacgagtctcctagtcagtgagatatgtgacatgagagaagcttctgtccagtccccgggggacatggctggtgttgagcyttggttaaacctggcccttctaattttcttttagatacttgataaaatttttatccaagctgtcagaatatcaagatgtaaacaagatgactcccagtaa

SEQ ID NO: 344745 - DNA, 201 bp, Homo sapiens
tcttgtgctgttgccatgtttgccccaacctgaacacgtaggctcttctctcctcaactgagtgcctcttctaaggatctgcagcctagagcagctgcacagggaggaaccttagagatcgtatgacttgagcaagcaagttcggataagtgacatgctcaaaaatatggttaatgacagagtctacattctgctcaaaat

SEQ ID NO: 344746 - DNA, 201 bp, Homo sapiens
actcactcaccttttcctgaagctgatggtgtaggtgtctgctttctgtagcctttctcttaacttgagtcctttcagagagcagtcaagtacctgtaggrctgttcttccacacccatcttccagagtccaccagaaaattcctgtagtagcaggcgggtgccaaaggccctgagacagcattgcctgtggctgtcagag

SEQ ID NO: 344747 - DNA, 201 bp, Homo sapiens
gcagattgcttgaggtttcatggaagagcctcttcctgaagcatatagttacctgctttcattagttcagcatctaggtcagctttcttgtgctgttgccrtgtttgccccaacctgaacacgtaggctcttctctcctcaactgagtgcctcttctaaggatctgcagcctagagcagctgcacagggaggaaccttaga

SEQ ID NO: 344748 - DNA, 201 bp, Homo sapiens
caggaagggtgtggcagaccaagagttcacatgtaccaattctttcttccccgcagagatagagttcaacattactggcaattatgggagtccagtacacrtgaaccataatgccaactacagctcaatgccctccccagacatggaccctgctgaccggcgccagcccgagcaggcccgccggcccctcagcgtcgccac

SEQ ID NO: 344749 - DNA, 201 bp, Homo sapiens
aatacaatgtgatttcatctgataaataagacattttcataccatagagcagtctgctcaattcatgaacagttctgggacatttggttagctatatatttaaaaaaaaaaaaaaaaaaaaaaaacagctgcctggtgggattacaggttaatttggttacttttatatttttctgagtgtggattagttgtaaaatcaga

SEQ ID NO: 344750 - DNA, 201 bp, Homo sapiens
tcccgggttcatgccattctcctgcctcagcctcccgagtagctgggattacaagcgcctgccaccatgcccggctaatttttgtatttttagtagagacrgggtttcaccgtgttagccaggatggtgtcgatctcctgacctcgtgatccacccgcctcagcctcccaaagtgctgggattacaggcgtgagccaccgt

SEQ ID NO: 344751 - DNA, 201 bp, Homo sapiens
actgcaagctccgcctcccgggttcatgccattctcctgcctcagcctcccgagtagctgggattacaagcgcctgccaccatgcccggctaatttttgtrtttttagtagagacagggtttcaccgtgttagccaggatggtgtcgatctcctgacctcgtgatccacccgcctcagcctcccaaagtgctgggattaca

SEQ ID NO: 344752 - DNA, 201 bp, Homo sapiens
cattgctactaattttaaagacataacattttgagacttggtctgtatgacacatagctgaaatttgctggttcccccataatcagttagggttctctggrtgcagcagcagaaatagactctagctaattttagcaaaaaaggagttttgggaagggtggggatggttgaaaaatcaaagggaagagctggacagtgcgg

SEQ ID NO: 344753 - DNA, 201 bp, Homo sapiens
gtttttgagtatatcattgtatttctattgtcattcctaatttacaattctgtttttccctttgacaagttttgccccagaggaagtctctccctaccccrgtcagtaattagatttaagctattttcatttggatttctttctcattagcttttgatcagcacatatgttttctagtaaattctgcttttctcagatcct

SEQ ID NO: 344754 - DNA, 201 bp, Homo sapiens; identical to SEQ ID NO: 72798

SEQ ID NO: 344755 - DNA, 201 bp, Homo sapiens
aatattgagtataatgcgaattcttctcatctgggaatagggcatgtttattccaatctatttataatcctataaagtagtttttgtccattttgctcctrtacaattttgcttttacttataggtaatttgtcagtgttgttactgtagcttcagtgatttgaatcttttattaaattatatattttttcttactctttg

SEQ ID NO: 344756 - DNA, 201 bp, Homo sapiens
ctccattatgaaagaaagttgatcagttttcttgactgtgctcatttgtttattgtctctcagtattactttttaaaagtgtatattaagatggaaaaaaatgggcatttttacaatattgagtataatgcgaattcttctcatctgggaatagggcatgtttattccaatctatttataatcctataaagtagtttttgt

SEQ ID NO: 344757 - DNA, 201 bp, Homo sapiens
atccaaaccctgccttcctccctacttcaagatgagacaagcccaactcttcacaagtggtactttctttctcttttcttcccaaggctttctataaaagwcccctgaatcaatacatccaaggaagtataagtagttggtaatttttcaataagaggagagaaagtgaagaaggacctgtgagcaatgatgtaacaatag

SEQ ID NO: 344758 - DNA, 201 bp, Homo sapiens
tgcagcactgccttcctgtgttctttcaggagcccatccaaaccctgccttcctccctacttcaagatgagacaagcccaactcttcacaagtggtacttkctttctcttttcttcccaaggctttctataaaagtcccctgaatcaatacatccaaggaagtataagtagttggtaatttttcaataagaggagagaaag

SEQ ID NO: 344759 - DNA, 201 bp, Homo sapiens
ctgcctgtagtcccagcactttgggaggccgaggtgggtggatcacctgaggtcaggagttcgagaccagtctggccaacatggtgaaaccccatctctastaaaaatacaaaaaattagccgggtgtggtggcagcctcctgtaatcccagctactcaggaggctgaggcaggagaatggcttgaacccaggaggcggag

SEQ ID NO: 344760 - DNA, 201 bp, Homo sapiens
caaggctgcctgtagtcccagcactttgggaggccgaggtgggtggatcacctgaggtcaggagttcgagaccagtctggccaacatggtgaaaccccatstctagtaaaaatacaaaaaattagccgggtgtggtggcagcctcctgtaatcccagctactcaggaggctgaggcaggagaatggcttgaacccaggagg

SEQ ID NO: 344761 - DNA, 201 bp, Homo sapiens
tttactgaagcgctgcatgtaatagccaaaaactcttgtttgtgggacagcttaacataatggtggtatattcaaagaacgaaattctccattgcaaaatsatctgattccgcatgtaccaacatgggtaagctccagacataatgatagagtaaaaaagcaaggctgcctgtagtcccagcactttgggaggccgaggtg

SEQ ID NO: 344762 - DNA, 201 bp, Homo sapiens
aaatagctctcaacatttgcagctcctgcatctttgccaccacctacagatcttcctctggtgttgcttcgcccctgtcactgggctaaaactgtcctccrggatccccagcaacccccaaattgccaaatccgatgacttactgccagcctccttggccacagtgctgcctggtgttcctaatgtaaccatcctcgaaac

SEQ ID NO: 344763 - DNA, 201 bp, Homo sapiens
aaaggagaaaattagactcctcagttgctgtttgtcttctgagaacagtaatcttctgacttaaaaagataaaatgagtatttgtgatttggagttaatactcagatttcataagaaagcattatcgtgtttttaccgtggttacgtggcatggtcacaattgctggtaattttatttaattaaaaaaaattgtgaaaaac

SEQ ID NO: 344764 - DNA, 201 bp, Homo sapiens
gctgccggactccagacaccatgctgttcacctgtgctgtgctttctcctgttattttaccaaaatctcctgtttacctctgtcaacaaccagcaaagccrgacgcttgttaaagtggtaggggcagtttaatgggtaacatactatggcagtagggaggatgtttcagcatgaactggactcagcttcgtttgtacagag

SEQ ID NO: 344765 - DNA, 201 bp, Homo sapiens
ataggattttttttcttattgttaagtttcagagttctttgcatgttctgtatacaattcttatatatgtgagttacaaataatttctctctttttctgarttatcttttcatcttttaacagtgtctttcacagaacaaaagcttttagttttgaagaagtctaatgtatcattttttttcttttatgaatcatggtttt

SEQ ID NO: 344766 - DNA, 201 bp, Homo sapiens
tgagccccaattcttgcctcacatccttttgtcagatcagcttgttcttcattctccagaacgatagtatttctttccttttttactttcctcaaacttcyccagtcctttctcttatggccaacctcactttctccttcctagagaaaattgaagctctgtcagatggatggaacgatcttaactttttgctaagaagtt

SEQ ID NO: 344767 - DNA, 201 bp, Homo sapiens
gaggtgactctaacgcaggttggtaccactgtgacttcttgaccactcaacttaagtgagccccaattcttgcctcacatccttttgtcagatcagcttgytcttcattctccagaacgatagtatttctttccttttttactttcctcaaacttctccagtcctttctcttatggccaacctcactttctccttcctaga

SEQ ID NO: 344768 - DNA, 201 bp, Homo sapiens
gccattattttaggggaaggaaaaagacaggaattcattccatgggtagcttgatgaatattaactgataactttctctttttaaagataaaaagatggcygggcacggtggctcacgcctgtaatcccagcactttgggaggccgaggcgggtggatcacgaggtcaggagatcgagaccatcctggctaacacggtgaa

SEQ ID NO: 344769 - DNA, 201 bp, Homo sapiens
tcagatttgtggccatgaggaaaggagccatggaagggtttcagagataaaggccatggtggaacttgcgggagcagtgggagataaagctgctgctgggsttggtgcttgggcaaagggtgcttgtgccagtcactgagaaggagcctgtgagaaatgcaaggagagaaacccaacaggcaggtgggatgaggggctgga

SEQ ID NO: 344770 - DNA, 201 bp, Homo sapiens
accacagttgaccacaggtaactgaaactacagaaagtaaaaccacggataagggggactactgtatcctattttgaagtttacaatttctgtgtttctcyttctctttatagtcatagcagccacttttttttttcttttgatgccgctaaaatgggtgcaagtcagggaatgaatggaggtggcggttgtactgggcct

SEQ ID NO: 344771 - DNA, 201 bp, Homo sapiens
aaggtcttcatcctggtcttcacattgagtaggctgagagggagaaggaagaggatgggttggtcttgctgtctcaagggtggcagaggcagaagaggtgyggaggtggaagaggaggcaggacaggcaggcatatttggtgtaacttttattggaaaaagtctgtgtataagtggacctgcacagttccagcctgtgttg

SEQ ID NO: 344772 - DNA, 201 bp, Homo sapiens
tggggacacagccaaaccatatcaggggagaagactggtgccagagtgactaggtaggatgtgatacactcaaccaggagactaattacgcagtcaaagtsagataatggtcatctagatcagatttgtggccatgaggaaaggagccatggaagggtttcagagataaaggccatggtggaacttgcgggagcagtggga

SEQ ID NO: 344773 - DNA, 201 bp, Homo sapiens
aattgactcacagttccacatggctggggaggcctcacaatcatggcggaaggcaaaggagaagcaaaggcatgtcttacatggtggcaggcaagggagtrcgtataggggaattcctctttataaaactatcagatcttgtgagacttagtcactatcacaagcacagcatgggaaagacccatccccataattcagtta

SEQ ID NO: 344774 - DNA, 201 bp, Homo sapiens
tgctgtctttctctccatttttcttcgctttgccttcatctgtgtcttggcttgtttccctgtcaaaatacaggtgtttgcagcaattagggtgatttgcytccacgttcacaaaccaaagaggagacaaagaagcagcccaagtggtcctgatcatggaataagagcgctttcctctagtctaggccaatttatttcaca

SEQ ID NO: 344775 - DNA, 201 bp, Homo sapiens
ctataaatataaacatttgcttcctttctttttataaatatagaatctgtatcctagatgcagccatagcctctccacgctcttcctccttcagctgtccrttttgcctcaggtctgtgtcagacatgactgcgtggctcccttcatttctacccacttttggcccttctggaagtaaagagggatgtggttgagccctgg

SEQ ID NO: 344776 - DNA, 201 bp, Homo sapiens
agatgttgaagataatggaaaaccaatgtacagataataggggatcctgaaaaataagccaaacaaatcagaagagcatagaaaaataaaattgacttgcrtcaaagatctcaatctcaaatctgtgattctgaaaaacagagattttgcacttttctttacctttgaaatgattttttaaacaaacgttcttaaatcagt

SEQ ID NO: 344777 - DNA, 201 bp, Homo sapiens; identical to SEQ ID NO: 72799

SEQ ID NO: 344778 - DNA, 201 bp, Homo sapiens
agttgggattctcccctattaggggaagttggctcacataatcacagagggggagaggtcccatgataagccatctgtaagctggagaaccagagaagccmgtagcatggctcagtccagaaacctcagaacccgaaactcagtccaggaacctcagaagctgatcgtgcagccccgaatatgaggtggaaagccagagag

SEQ ID NO: 344779 - DNA, 201 bp, Homo sapiens; identical to SEQ ID NO: 72801

SEQ ID NO: 344780 - DNA, 201 bp, Homo sapiens
aattatattttatctgtttctcctttttaatttatttaaacttgatttaagagacagtgtcttactctgttgcccaggctggagtgcagtggcgtgggtcrtagctcactgtatgctcaacttcctgggctcaaatgatccacccatctaggcctcttgctttttaaatttctgtatcttaattatagtctgcttctctag

SEQ ID NO: 344781 - DNA, 201 bp, Homo sapiens
gatgctcaaccggtaaatatgatgcaaatattccaaaatcccaaaaactcccaatcccaaatatttctggtcccaagcatttcagataagggacactccayctatataaaatctaaccagcactatcccctagaactctgtattagtcagggttctccagagagagagaaccaacaggatatatgagaggggtttctcccc

SEQ ID NO: 344782 - DNA, 201 bp, Homo sapiens
caaatcaagcccagtttttctgtatttagccaagagcatgcctgaaggcagcaccttgaggtatcagtaattgtaatggcttcactcattgaatccccatkgtgactaatagttattgtatcactcaatttaagtctaggttaagcagctgtaacaaaagcccccaagtctcagctgcttatagcactggccagtggaggg

SEQ ID NO: 344783 - DNA, 201 bp, Homo sapiens
tcgtacaggagactggctgcagtcttaggattttcactgtaaagtgacactttccatcatcacctttcctgcttttatctccccatatttcatcacataamttcttttttttttttttttgagacggtgtctggctctgtcgcccaggctggagtgtggtggcacgatctcggctcactgcaagctccgcctcccgggttc

SEQ ID NO: 344784 - DNA, 201 bp, Homo sapiens
tgttttcagggactatgactgtacgagattctggatcactttcctggccgggtttcttaaggcgtttggtggggggaaagggtgaggggtgggagaggaargaaggtgctggtggaatggcgttgctgcctgcttgatgttaggactgatttcagtggagggagggaggctgcaaaaaggaggcccaagtcctcgggaaga

SEQ ID NO: 344785 - DNA, 201 bp, Homo sapiens
ttcagagttgtggttgacaaatatgcaaatgcccatggaaagtttgtatcatatcaagtattaaaaaggagattaagcagtgtttaaggctctttctcacrtgatgtgttgacttatgcattagccactctccattggtttatgttttaccttggttgtatattttaccttgcacaggaccagctctcagctgatatgtac

SEQ ID NO: 344786 - DNA, 201 bp, Homo sapiens
tgattcttctgcctcagactcccgagtaactggaattacaggcgcatgccaccacatctggttaatttttgtatttttagtagagtcggagtttcgccatrttggccaggctggtctcgaactcctgacctcaggtgatccacctgccttggcctcccaaagtgctgggattagaggcatgagccaccgcgcctggccagg

SEQ ID NO: 344787 - DNA, 201 bp, Homo sapiens
tggccaacatggtgaaaccctgtctctactaaaaatataaaaaattagctgggtgcagtggtgcacacctgtaatcccagccactcgggaggctgaagcargagaattgcttgcacccgggaggtggagtttgtggtgagccaagtacgcgtcactgcactccagcctgggtgatagagtgagattttgtctcaaaaaaaa

SEQ ID NO: 344788 - DNA, 201 bp, Homo sapiens
tcctgggttcaagtgattcttctgcctcagactcccgagtaactggaattacaggcgcatgccaccacatctggttaatttttgtatttttagtagagtcrgagtttcgccatattggccaggctggtctcgaactcctgacctcaggtgatccacctgccttggcctcccaaagtgctgggattagaggcatgagccacc

SEQ ID NO: 344789 - DNA, 201 bp, Homo sapiens
ctggtcatgaactcctgacctcaagtgatccaccctcctcggcctcccaaagtactgggattacaggagtgcttatgtagcattttaacaaagaatgatawttttttagagaagtgacaagacaaaagagaaggacttttacgtttctgtggtggcagaatcagtatttcaagctcctgtattgtttgaaaggaggataaa

SEQ ID NO: 344790 - DNA, 201 bp, Homo sapiens
tgtattatatataatatatattgtatatatataatatatatgtatatataatatatatgtatatacataatatatatacatatataatatatataatatatgtatgtataatatatgtatatatattatatatgcatatatattatacatacatatatattatatatataacattgtaaattgtaaataaaatttcttata

SEQ ID NO: 344791 - DNA, 201 bp, Homo sapiens
atgagtagatcaaaggatagaacatgggcttatgtagcctttttttttttttttttttttttgagatagattcttgctctgtcacccaggctggagtgcartgacgcaatctcagctcactgcaacctctgcatcccgggtgcaagggattctgcctccacctcccgagtagctgggattataggcgggtgccaccacgcc

SEQ ID NO: 344792 - DNA, 201 bp, Homo sapiens
atgtattatatataatatatattgtatatatataatatatatgtatatataatatatatgtatatacataatatatatacatatataatatatataatatatgtatgtataatatatgtatatatattatatatgcatatatattatacatacatatatattatatatataacattgtaaattgtaaataaaatttcttat

SEQ ID NO: 344793 - DNA, 201 bp, Homo sapiens
ccccgcgctctctccatccggcctgggcctccagcctgggcccgagcgcaccaggtaagcgcgggccactgccgtccgggcgggctggtgtgcggtgcagsgggtgtctgggttggccgcactggaggcctcttggatttcgtcgtttcccatgcccccgcccccatttctaagcattcatatttggcttctgcgtcgcgc

SEQ ID NO: 344794 - DNA, 201 bp, Homo sapiens
ccatggcactattgccattttgagcctagtaattctttgttggaggagactgttctgtgccttgtaggatgtttagcaacatccctggcctctacccatcrgatgccaatagcatctcccatgctgtgccaatcagaaatgtctccagatgttgccaaatgaccccaggaggacaaaaatcacccctggttgagaaccaat

SEQ ID NO: 344795 - DNA, 201 bp, Homo sapiens
tatatgtattatatataatatatattgtatatatataatatatatgtatatataatatatatgtatatacataatatatatacatatataatatatataawatatgtatgtataatatatgtatatatattatatatgcatatatattatacatacatatatattatatatataacattgtaaattgtaaataaaatttct

SEQ ID NO: 344796 - DNA, 201 bp, Homo sapiens
aaactgggtggctcgaagaggctcctcggccggtcggaaagtgtcctgcgccccgccctccatgcagcctcccgccccgcccgccgagctggctgcgcccytgccttcgccgctgccggagcagcccctggacagccccgcggcccccgcgctctctccatccggcctgggcctccagcctgggcccgagcgcaccaggta

SEQ ID NO: 344797 - DNA, 201 bp, Homo sapiens
atatatgtattatatataatatatattgtatatatataatatatatgtatatataatatatatgtatatacataatatatatacatatataatatatatawtatatgtatgtataatatatgtatatatattatatatgcatatatattatacatacatatatattatatatataacattgtaaattgtaaataaaatttc

SEQ ID NO: 344798 - DNA, 201 bp, Homo sapiens
ctgaccaacatggcgaaaccccgtctctactaaaaatacaaaaattagctgggcatggtggcatgtgcctgtaatcccagctactcgggaggctgaggcaraagaatcgcttgaacccaggaggtggaagttgcagtgagctgagattgcaccactgcactccagcctgggtgacagagcgagacttgatatgaaaaaaaa

SEQ ID NO: 344799 - DNA, 201 bp, Homo sapiens
tagctgggactacaggcatgtgccactacacctggctaatttttttatttttagtagagacagggtctcactgtgttgcgcaggctagtttcagactccasagtaggccaattttaatcatcttcacagcttgttttcattttcttgaaataaagaaacagaatatatttgggcaaagagatgtagcatacagagttcaga

SEQ ID NO: 344800 - DNA, 201 bp, Homo sapiens
gatcgagaccatcctggctaacatggtgaaaccctgtctctactaaaaatacaaaaaaattagccgggcatggtggcgggtgcctgtagtcccagctactygggaggctgaggcaggagaatggtgtgaaccggggaggcggagcttgcagtgagccgagatcatgccactgcattccagcctgggcgacagagcaagact

SEQ ID NO: 344801 - DNA, 201 bp, Homo sapiens
agaaggcttctttctgcatttgttgattctcatttgcctacagctcaaaataatccttatccaaagtggcatattatagggtagcatattctgatcttctrtaacagtgtggcttggagattgattgagtcatacttatgaagaatgtggaattacagaaagtgagaggagagatctagtatgttcacctgtcactcacaa

SEQ ID NO: 344802 - DNA, 201 bp, Homo sapiens
acaaccatgtgacaaatgggttagaactttgagtcaccccaacttctggggaggggagaagtggagatcgagctcagtcctgtggccactgacttaatcartcatgcatatgggatgagatctctggacattgaagctcagtagggctttccagttggtgagagcacattgatgtgctaggagggtgatgcacctgcaatt

SEQ ID NO: 344803 - DNA, 201 bp, Homo sapiens
gacccactgtgttagtttcccagagctgccataacaaatcaccacaaactgggtggcttaaaacaaacagaagtttattcttgcacagttctgcaggatakaagtttgaaatcaaggtgtcaccaaggctgtgctctctgaagaatctaggggagaatctcttccatgctggtttaggataaggaatatcttatcttggtt

SEQ ID NO: 344804 - DNA, 201 bp, Homo sapiens
gctggactccaagtagttggttggcatatcaaaggcatgcccacaagtgagttacttgttacctctaggaattaattaatcctgggaggggcagtttcttkggtccacagactccaaatgccacagcatcaagaatatagaaagtaggaaaatataattaatacattgacattatccagctgttcagttttatatagctat

SEQ ID NO: 344805 - DNA, 201 bp, Homo sapiens
ctaacccaccgattactgggttagcaaatctggagagaatattctttgctcttatcttctaagatcctcactgtgtgggtctgctgggtttcaccttctgmtgagctgctgtcagcagtcagcctgaagctgtctagatttcctgcagaattctgttatcccagacctgcaagtcatcgtgaggaagccatgctcttaaat

SEQ ID NO: 344806 - DNA, 201 bp, Homo sapiens
ggtgctttggttctacgaacttatggggtagaagcaaagcaggcatgagcacaacctgatcgactgtgcaacacaatgcttaaaccaacctccaaatgatytatccctagaatagcagcacccctgcctcctaaggctgacattatttgcctacaactaggttctcatttgccgggaagcctcctttcaaccacctctctc

SEQ ID NO: 344807 - DNA, 201 bp, Homo sapiens
tatcaattttagaatcaatttgtctgtaactataataaatcttattaagattttgattgggattgcatttaatctgtgatcagtttggggagaagtgatayctttgccagatacaaataccacagacatgctttttctctctatttagatttgcttttatttatttcataagcattttttagctttctgcctatacattct

SEQ ID NO: 344808 - DNA, 201 bp, Homo sapiens
cctcccaagtagctgggattataggcacccaccaccatgcccatttaattattatatttttagtagagacggggtttcaccatgttggccaggctggtctygaactcctgacctcaggcgatccacccgccttggcctcccaaagtgctgggattataggcgtgagccatcgtgcccagctgcagtgtatgtttatatggg

SEQ ID NO: 344809 - DNA, 201 bp, Homo sapiens
acttttctgtctcttttttgaccatagctgcctcatttctttttttttttttttttttttggagatggagtttcactcttgtggcccaggctggagtgcartggcacaatctcggctcactgcaacctctgcctcccgggttcaagccattctgctgcctcagcctcccaagtagctggaattacaggcatgcaccaccac

SEQ ID NO: 344810 - DNA, 201 bp, Homo sapiens
accagtttctttcttccttctgcctctttcttccccatgccacaccaatatcaactcttcagctgctctctttacctgtgtgcatggtagggtatgacttrcacttacacaaataggagagtcactttagagagaccaactaaattgtaataattttatagcacaataaaaatcccaccccaagaccctggaccatggaga

SEQ ID NO: 344811 - DNA, 201 bp, Homo sapiens
cctcaccctcctcccaccctttcccctgagtccccagagtccattgtatcattcttatgcctctgtagaagactggatatcattatacttgaaatgggggygaccaaagtttgagggagagagcaaacagtatcttagttagaggcaatcttaggttatatgagattgctacaatgcctggcatctcttgagcagataaag

SEQ ID NO: 344812 - DNA, 201 bp, Homo sapiens
actgcaacctctgcctcctgggttcaagtgattcttctgcctcagactcccgagtaactggaattacaggcgcatgccaccacatctggttaatttttgtrtttttagtagagtcggagtttcgccatattggccaggctggtctcgaactcctgacctcaggtgatccacctgccttggcctcccaaagtgctgggatta

SEQ ID NO: 344813 - DNA, 201 bp, Homo sapiens
ctgcctcccgggttcaagcaattctcctgcctcagcctcccaagtagctgagattacaggcacctgccaccatgcccagctaacttttgtatttttagtasagacagggtttcaccatgttggccaggctggtatcaaactcctgacctcaggtgatctacttgcctcagcctcccaaagtgctggaattacaggtgtgag

SEQ ID NO: 344814 - DNA, 201 bp, Homo sapiens
  misc_feature (1)...(201): n = A,T,C or G
tatggttctcttttatctcattgtgaaaagggagtgctgggtttcatgacattaataattacaacgttaccatttattgagtgcttattagagacttgacnttgttttaagctcattgtgtgtttttaactcctgtaattttgacaagaaccctatgaagtggggtgtgctgtttctcctattttacatttgaggaatttg

SEQ ID NO: 344815 - DNA, 201 bp, Homo sapiens
ggctggagtggagtggtgtgatctcggctcactgcaacctctgcctcctgggttcaagtgattcttctgcctcagactcccgagtaactggaattacaggygcatgccaccacatctggttaatttttgtatttttagtagagtcggagtttcgccatattggccaggctggtctcgaactcctgacctcaggtgatccac

SEQ ID NO: 344816 - DNA, 201 bp, Homo sapiens
ttgagatggagtttcgctcttgtcacccaggctggagtgcaatggtacaatctcggctcactgcagcctctgcctcccgggttcaagcaattctcctgcckcagcctcccaagtagctgagattacaggcacctgccaccatgcccagctaacttttgtatttttagtagagacagggtttcaccatgttggccaggctgg

SEQ ID NO: 344817 - DNA, 201 bp, Homo sapiens
gcgagaccgctagtaaacttgttgggtgactaccaatagttctttaagaatagttcttcttttttttttttttttttgagacagagtctcgctctgtcacmcaggctggagtggagtggtgtgatctcggctcactgcaacctctgcctcctgggttcaagtgattcttctgcctcagactcccgagtaactggaattaca

SEQ ID NO: 344818 - DNA, 201 bp, Homo sapiens
cacctcaaatactgaaatgtatatccagttctttgtgatgattaagtagggagatatgtcaagatcggagcaatgggtgaaaaggaaaagaaataaaatgwaaaggatcaggtaaagggaaggtggggtgggagggagggagtgaatgaacagacactgtctcgggaattgaatgttaagggagggtccagagatggacaa

SEQ ID NO: 344819 - DNA, 201 bp, Homo sapiens
catttaaaataggaaacaatcaaagaactgtgggaaaaaaatttccaaactcaatttttttcagtttttctctgaacacattaagagatgtaataggaaaygtgacacttataaatcacctcaaatactgaaatgtatatccagttctttgtgatgattaagtagggagatatgtcaagatcggagcaatgggtgaaaagg

SEQ ID NO: 344820 - DNA, 201 bp, Homo sapiens
tatttgtccctcttatatctacatgctttttttcttttcttgtcatattacactaacttaaacttccaggaccatgatgaatgagtggtaggagcaaatgyacttgccttgattcctgttttggaggaaagcatgtagtctttcaaaagtatagattttttcatatatgttatttatgaagttgaggaagtttccctctac

SEQ ID NO: 344821 - DNA, 201 bp, Homo sapiens
taaactgggagaagtccgcagtggaagtaggtgcccaagcatgtataggtcagtgatttcactgcatggatttatttatttatttatttatttatttattttgagacagagtctcactctgtcaccaggctggagtgcagtggcgcaatctcggctcactgcaacctccacctcccaggttcaagtgattctcccacctca

SEQ ID NO: 344822 - DNA, 201 bp, Homo sapiens
tagactctgtcataagaggacacatcccagcctcaggattcggagggatagaaggctgtctccagagatagcagtgttggaaagaggatgagaatcacagrgacgggagggaggagaatcacacctcacgttgaaagtggctttgtagggattgttcatgtgcctcgggtttatctccattctgcagatggaaaaagagaa

SEQ ID NO: 344823 - DNA, 201 bp, Homo sapiens
tggagtcttcaacccaagtcagaccacctctgccaatgctgtgtgtgcagacaggccagccttgcatcaatgctgtgtgtgcagacaggccggccttgcaycaatgctgtgtgtgcagacaggctggctttgcaccaatgctgtgtgtgtagacaggtcggccttgcaccagtgccgtgtgagcagacaggccggccatgc

SEQ ID NO: 344824 - DNA, 201 bp, Homo sapiens
gtaaactgggagaagtccgcagtggaagtaggtgcccaagcatgtataggtcagtgatttcactgcatggatttatttatttatttatttatttatttattttgagacagagtctcactctgtcaccaggctggagtgcagtggcgcaatctcggctcactgcaacctccacctcccaggttcaagtgattctcccacctc

SEQ ID NO: 344825 - DNA, 201 bp, Homo sapiens
gagtcattctggagtcttcaacccaagtcagaccacctctgccaatgctgtgtgtgcagacaggccagccttgcatcaatgctgtgtgtgcagacaggccrgccttgcaccaatgctgtgtgtgcagacaggctggctttgcaccaatgctgtgtgtgtagacaggtcggccttgcaccagtgccgtgtgagcagacaggc

SEQ ID NO: 344826 - DNA, 201 bp, Homo sapiens
tgtaaactgggagaagtccgcagtggaagtaggtgcccaagcatgtataggtcagtgatttcactgcatggatttatttatttatttatttatttatttattttgagacagagtctcactctgtcaccaggctggagtgcagtggcgcaatctcggctcactgcaacctccacctcccaggttcaagtgattctcccacct

SEQ ID NO: 344827 - DNA, 201 bp, Homo sapiens
gtgtaaactgggagaagtccgcagtggaagtaggtgcccaagcatgtataggtcagtgatttcactgcatggatttatttatttatttatttatttatttattttgagacagagtctcactctgtcaccaggctggagtgcagtggcgcaatctcggctcactgcaacctccacctcccaggttcaagtgattctcccacc

SEQ ID NO: 344828 - DNA, 201 bp, Homo sapiens
cgtgtaaactgggagaagtccgcagtggaagtaggtgcccaagcatgtataggtcagtgatttcactgcatggatttatttatttatttatttatttattwattttgagacagagtctcactctgtcaccaggctggagtgcagtggcgcaatctcggctcactgcaacctccacctcccaggttcaagtgattctcccac

SEQ ID NO: 344829 - DNA, 201 bp, Homo sapiens
tcctttgtagggacatgcatgaagctggaaaccatcattctgagcaaactattgcaaggacagaaaatcaaacaccacatgttctcactcataggtgggarttgaacaatgagaacacttggacacaggctggggaacatcacacaccagggcctgtcatgggatagggggaggggggagggggagggatagcattaggag

SEQ ID NO: 344830 - DNA, 201 bp, Homo sapiens
ttcttatatgttgtttcttctttctctgtactcttaaatcttgatgatttgttttcatgtgaatttgctgtgtttgtgtgtgtgtgtgtgagagagagagwgagtgtgtgtgtgtgtgtgtgcacgtgcgtgcgtgttgtcagagaaagagagagtgagaaagagagggggagagagagagagagagagagcgttaaatca

SEQ ID NO: 344831 - DNA, 201 bp, Homo sapiens
tttattttgttaaggacttttacacccatattcatagaggaatattggtctataattatttttttggtcatgttttgatatcaaagtagtattagattcayaaaatgaattgagaagcgttccttctttcattttctggaagagattgtttagaataggtgatatttctttttaaaacatttggtagaattatctaatgaa

SEQ ID NO: 344832 - DNA, 201 bp, Homo sapiens
tcctgttttggaggaaagcatgtagtctttcaaaagtatagattttttcatatatgttatttatgaagttgaggaagtttccctctactcctagttttctragagtttttttttttttttttttttttaccatgaatgggttttgaatcttgttaaatgctttttctacattaattgctatgatcgtgtggtttttcttcc

SEQ ID NO: 344833 - DNA, 201 bp, Homo sapiens
cctattctctagtttatccattcacctgttgaagggcatttgagttgcttccagatttttagtattacaaataaagctctatggacattcacagagtaggtgtgtgtgtgtgtgtgtgtgtgtgtgtaacataaatgttcttttctctagagtggctctgctgggtcatatggcaagtgtatgttcaagtttatgacaaac

SEQ ID NO: 344834 - DNA, 201 bp, Homo sapiens
gaagacatggctaccaaacaggcagatttaaaagacagaccttggaaaagaagattgaatgatagagattttatgttatcccagtgtgattttatgttatyccagtgtgatagttatagaagacctgagaatatgtgagtctcggaagaacaacctttgtttctttcacttgttcgggcaggcagaggctttgaagaccat

SEQ ID NO: 344835 - DNA, 201 bp, Homo sapiens
cacctattctctagtttatccattcacctgttgaagggcatttgagttgcttccagatttttagtattacaaataaagctctatggacattcacagagtaggtgtgtgtgtgtgtgtgtgtgtgtgtgtaacataaatgttcttttctctagagtggctctgctgggtcatatggcaagtgtatgttcaagtttatgacaa

SEQ ID NO: 344836 - DNA, 201 bp, Homo sapiens
agttgacccagcactactaattaaataagtcatgtctcctcttcctctcccccaatcttagataacacttttttatctgtcatttttttccatttttgtgrgtttattcctgaacatacccttccttctgtttcagtgaccgatgcaaacattgatataatactttcttaattactgtgacttcagtaagtttcagtatgt

SEQ ID NO: 344837 - DNA, 201 bp, Homo sapiens
ctttagtgtttggaagacaatagagaaaatagtgacaaaccaggggatgctcgtcctatctgaaggggcagctgattctcagcttcagtaagcagttgackcatggaaatatgggcccactgtctccttgcctagtccttggtgccttttcatgacctcccttttccagtgagggtatgtagttccctgggtgatatttgt

SEQ ID NO: 344838 - DNA, 201 bp, Homo sapiens
taaggaagtggccgttaaggacaggtgaaaggtagcagcaccaaaaggggtaaacacacttctcagataagaggacaagatgtgccaggttccgagagacrggagaaagtttggcttttttttttttttttttttttaattgagatggagtttcgctcttgtcacccaggctggagtgcaatggtacaatctcggctcact

SEQ ID NO: 344839 - DNA, 201 bp, Homo sapiens
agatcagccagcttattaacactgacttgtgaaagtttacaagtgagccaggaggtgaggggagggtaacgccagtgaaatgttgtcttcaagagtattcrctatttctttcccccttggattacaggaagatgctgaaactctgtggagagacggaggacaagctggctcaggagctgatacattttgagttgcaagtag

SEQ ID NO: 344840 - DNA, 201 bp, Homo sapiens
ccacaagcttggcagcaggagtccgtgtcatcagcactcgttgggcacagtggccctgagaagtcctcttggctacagtaggaaaagcactttggtgttcyagtttgagaatgttctagaattcctgggttgatggcaggatacggtagaggtgctcaggcccctgccctcacattgctcacggtctccttgaagagagga

SEQ ID NO: 344841 - DNA, 201 bp, Homo sapiens
gccctcactgccatcgaccttcacctctcttgaagcctgggactgggactcaaactggcccacatttaagggcgtggcctggatttctgtccaccctagcytctgctggaatgggtattgagtttgaggatgagtcctagaatccctcctgcctggggggtggctggaggctcagggcaaacagctggagagctgggccac

SEQ ID NO: 344842 - DNA, 201 bp, Homo sapiens
ggatacttaccaagtatagacacatggcttgggcttatgtaagcctcagagatacaactgcccgggtaaaagtcatggtaactaccatgcatagcattttrtgatgtccaaggtattattaacatgcatggtctctttttttttttttttttttgagacagagtctcactgtgtcgcccaggctggagtacagtgggatga

SEQ ID NO: 344843 - DNA, 201 bp, Homo sapiens; identical to SEQ ID NO: 72804

SEQ ID NO: 344844 - DNA, 201 bp, Homo sapiens; identical to SEQ ID NO: 72793

SEQ ID NO: 344845 - DNA, 201 bp, Homo sapiens
ttaagaatagttcttcttttttttttttttttttgagacagagtctcgctctgtcacccaggctggagtggagtggtgtgatctcggctcactgcaacctytgcctcctgggttcaagtgattcttctgcctcagactcccgagtaactggaattacaggcgcatgccaccacatctggttaatttttgtatttttagtag

SEQ ID NO: 344846 - DNA, 201 bp, Homo sapiens
ctgagatgtctcattgttattcttgttgagtcatatctgccatcttttgctgttctataaatgtacccaggacttgtttggagcaggtataatacacacasatgcaaaaacgattgccaggaaggaagaagtgttttattacattcgcagtcgccaagaaacagtaagcacatgagcccattcagggccacacgggaaagc

SEQ ID NO: 344847 - DNA, 201 bp, Homo sapiens
ctgaggtgggcggatcacggacaggagatcgagaccatcctggccaacatggtgaaaccctgtctctactaaaaatacaaaaattagctgggcatggtggygtgcacttgtaatcccagctacgtgggaggctgaggcaagagaatcacttgaacccgggaggcagaggttttagtgacccgagactgtgccactgcactc

SEQ ID NO: 344848 - DNA, 201 bp, Homo sapiens
agttaacaaggtaacagagcctgccacaatgggcaagagagggcattaaaagcagttgtgcccaggcgcggcagctcacacctgtaatcccagcattttgrgaggctgaggcaggtggatcgcctgaggtcaggagtttgagactagtctggacaacatggtgaaaccccgtctatactaaaaatataaaaattagcaggg

SEQ ID NO: 344849 - DNA, 201 bp, Homo sapiens
cattgttgtgcagccattgccaccgcccatctccacaactctttccgtctttgaagctaaaactgtgtccatgaaacagtaactccccactccccttctcycatcccctggcaaccacttttgaaaatacattttacaatgtatgtaatgttcattgtagaagaattaaaaaatttaaaacaataagaacagagaactaat

SEQ ID NO: 344850 - DNA, 201 bp, Homo sapiens
taagataagctatctataacttggtttgttcataaatttataacatgtggtatacaaaatattccaatcttcactattttgtcattttttaatttttttttatttttacaactggaaaaatacatacaacataataaaatttaccatcttaaccattttcaggtatacagttcagtggtgttaagtgtgtttacattgttg

SEQ ID NO: 344851 - DNA, 201 bp, Homo sapiens
attagcaatattaagataagctatctataacttggtttgttcataaatttataacatgtggtatacaaaatattccaatcttcactattttgtcatttttwaatttttttttatttttacaactggaaaaatacatacaacataataaaatttaccatcttaaccattttcaggtatacagttcagtggtgttaagtgtgt

SEQ ID NO: 344852 - DNA, 201 bp, Homo sapiens
atattggccaggctggtctggaactcctgacctcgtgatccacccaccttggcctcccaaaggctgggattacaggtgtgagccaccgcgcccaacatatrtatatattaaaaatatgttatatattaccataaaagagcataaaattatttggaggacacaagaaatacatatttaagggtttggtataataaaagtaaa

SEQ ID NO: 344853 - DNA, 201 bp, Homo sapiens
agatcgtggagaaagtccattcttcacaaccctaatccatgtgcaataaactgagaggctaaaaagccaaaaagtcatttaaaaagtcatatatatgcattatatatatatatatatatatatatatatatatatatatatgaaatgtgtatatattttatttatttttttaattttttttctgagacggagttttgctct

SEQ ID NO: 344854 - DNA, 201 bp, Homo sapiens
ctgggcaacagagcgagactcatctcaagaaaaaaaaaaaaaaaaggaaatcagtagtgagcagtgaatcttgtgatgaatatgtcatttagtataaggaratgagattatttttaccaggactttatactgtatcgtaagtaatgactattgcagcgaagtcattacttaattacaaagtaatgactgttgcagcaaagt

SEQ ID NO: 344855 - DNA, 201 bp, Homo sapiens
catctgaaaataaggattgcgagaccgctagtaaacttgttgggtgactaccaatagttctttaagaatagttcttcttttttttttttttttttgagacrgagtctcgctctgtcacccaggctggagtggagtggtgtgatctcggctcactgcaacctctgcctcctgggttcaagtgattcttctgcctcagactcc

SEQ ID NO: 344856 - DNA, 201 bp, Homo sapiens
actctaaactagaaaatatggcagctattgaaatagaactgaataaggagagagaagagtactttaacaaaatggaataagaaagataattagcatgcaaraaaataaaagactgtatggaactaaaagcattgtttccacaatataaaaactatttttttcagatgtgctaaaagaagatcactgctaagaacataatca

SEQ ID NO: 344857 - DNA, 201 bp, Homo sapiens
ggtgggaggtttccataaggaagtggccgttaaggacaggtgaaaggtagcagcaccaaaaggggtaaacacacttctcagataagaggacaagatgtgcsaggttccgagagacaggagaaagtttggcttttttttttttttttttttttaattgagatggagtttcgctcttgtcacccaggctggagtgcaatggta

SEQ ID NO: 344858 - DNA, 201 bp, Homo sapiens
cctcataccacatcgctctgatccttctttggtcacatctccctctgaattcctcttctgcctcctcttccacttttttttttttttttttttttttttttgagatggaatcttgctcagtccccaggctggagtgcagtggcgcaatctcggctcactgcaacctccgcctcctgggttcaagcgattctcctgcctcag

SEQ ID NO: 344859 - DNA, 201 bp, Homo sapiens
gtgtctgatggaggggtcagctatcctgggagatgacacacttcttgggtaaggtgacaccttgcgtgagtttggtgccaaatctaagtaagtccccatcygtgaaaaggggactagaccctctcagggaagcacctgaattctcactggggactttagtggaaaaaaggaaaatgttaccagtaggaaatcagaactctt

SEQ ID NO: 344860 - DNA, 201 bp, Homo sapiens
tggggtaatgaccctccctactgttcttgctctttagcccagcctgaagcatcccccgccctccacaggcaagttgaggtcctctccctgtcctccccagmttggagcaactgggaagacggcaggggcgtgcttgagatcccacctctagggaagctttatccttgatcgatatctgacccctgattcagctcattcata

SEQ ID NO: 344861 - DNA, 201 bp, Homo sapiens; identical to SEQ ID NO: 72800

SEQ ID NO: 344862 - DNA, 201 bp, Homo sapiens
tgtcaattccagaggtcagaggccagagccctcactgccatcgaccttcacctctcttgaagcctgggactgggactcaaactggcccacatttaagggcrtggcctggatttctgtccaccctagcctctgctggaatgggtattgagtttgaggatgagtcctagaatccctcctgcctggggggtggctggaggctca

SEQ ID NO: 344863 - DNA, 201 bp, Homo sapiens
gtaccgaacaggagcccctcaatcattctgtttccagcattctacttctttcccttaaccttctccccaacattgtttttcatcagggattcttacctaamcacatggtcaagattcccaaatatgtccttttagcatttgctaccccttctcctacccattctcttccctgcaggcattcctagaagtaaggtggaaagc

SEQ ID NO: 344864 - DNA, 201 bp, Homo sapiens
ccaaaaaggtgtcattgagacctactcagcatccttcttatcaagaataaaggaccctgtggcttggcaggggagtgctgttctggccttcctctgaaccrcagtggcgtatcctgggtgctttggttctacgaacttatggggtagaagcaaagcaggcatgagcacaacctgatcgactgtgcaacacaatgcttaaac

SEQ ID NO: 344865 - DNA, 201 bp, Homo sapiens
atgaaatgcagtcgtctgatatagatccccaaaaaggtgtcattgagacctactcagcatccttcttatcaagaataaaggaccctgtggcttggcagggragtgctgttctggccttcctctgaaccacagtggcgtatcctgggtgctttggttctacgaacttatggggtagaagcaaagcaggcatgagcacaacct

SEQ ID NO: 344866 - DNA, 201 bp, Homo sapiens
gaccttctactccacccatgtcagccatccaaaatgcagctgtttcttagagtgaggacactggctcagggttccccattctctcacaggcttgagaggasaaaggggtccactgtctcacgtcctgtccctgcagattctggggaatgaaatgcagtcgtctgatatagatccccaaaaaggtgtcattgagacctactc

SEQ ID NO: 344867 - DNA, 201 bp, Homo sapiens
agaggttttggagaaaagaagcaggcagttgcggggtctctgcgctttgatgttgtaccttggagttgctgtgcgctgaccctctgtcctgttggtagggrctcttccgagtagccccctctgcctccaaactgaagaagctgaaagcggccctggactgctgcgtggtggatgtgcaggagtactcggcagacccccacg

SEQ ID NO: 344868 - DNA, 201 bp, Homo sapiens
actggtgtctctttctcagcactggggattaggggaggtggtgggggtggatgggtgacgcataagaaaaatacaattacgggaaggctgcactgactctyagcagtttaggtgactcgtagcaattaaactgtatctgctgtgtctgggatgagtttctttggcttgccgccctttagaccagaggtcagtgtagccttc

SEQ ID NO: 344869 - DNA, 201 bp, Homo sapiens
tcctcataccacatcgctctgatccttctttggtcacatctccctctgaattcctcttctgcctcctcttccacttttttttttttttttttttttttttttgagatggaatcttgctcagtccccaggctggagtgcagtggcgcaatctcggctcactgcaacctccgcctcctgggttcaagcgattctcctgcctca

SEQ ID NO: 344870 - DNA, 201 bp, Homo sapiens
tagctcatccacatgtgccttcatgacaggcccttttccagcccccttagttccgatctgcagtggcagtttcattctctttgtctgccctcaccaagccygtggatcttattcgatccctactcattccttttgcattctacacaaatttattaaatcctgctatgtacagagctctgtgctttccagagaggaaggcaa

SEQ ID NO: 344871 - DNA, 201 bp, Homo sapiens
gtgctgtcctcataccacatcgctctgatccttctttggtcacatctccctctgaattcctcttctgcctcctcttccacttttttttttttttttttttwtttttttgagatggaatcttgctcagtccccaggctggagtgcagtggcgcaatctcggctcactgcaacctccgcctcctgggttcaagcgattctcct

SEQ ID NO: 344872 - DNA, 201 bp, Homo sapiens
tgtgctgtcctcataccacatcgctctgatccttctttggtcacatctccctctgaattcctcttctgcctcctcttccactttttttttttttttttttwttttttttgagatggaatcttgctcagtccccaggctggagtgcagtggcgcaatctcggctcactgcaacctccgcctcctgggttcaagcgattctcc

SEQ ID NO: 344873 - DNA, 201 bp, Homo sapiens
ttgtttgccttgtggccccttccgccgtcttcaaagccagtagcactgggttgtgctgtcctcataccacatcgctctgatccttctttggtcacatctcyctctgaattcctcttctgcctcctcttccacttttttttttttttttttttttttttttgagatggaatcttgctcagtccccaggctggagtgcagtgg

SEQ ID NO: 344874 - DNA, 201 bp, Homo sapiens
attttccgtaacaggataccccaaccaccacaaactttattgcttcggttgcccatgttatttatttatttatttatttatttatttatttatttatttatatcctgccccattccaaaggggacttgcagatttagttagcagatatcactaggtgttgctaaagattatgtctgatttgggacaagatctgcttttggg

SEQ ID NO: 344875 - DNA, 201 bp, Homo sapiens
tattttccgtaacaggataccccaaccaccacaaactttattgcttcggttgcccatgttatttatttatttatttatttatttatttatttatttatttatatcctgccccattccaaaggggacttgcagatttagttagcagatatcactaggtgttgctaaagattatgtctgatttgggacaagatctgcttttgg

SEQ ID NO: 344876 - DNA, 201 bp, Homo sapiens
gtattttccgtaacaggataccccaaccaccacaaactttattgcttcggttgcccatgttatttatttatttatttatttatttatttatttatttatttatatcctgccccattccaaaggggacttgcagatttagttagcagatatcactaggtgttgctaaagattatgtctgatttgggacaagatctgcttttg

SEQ ID NO: 344877 - DNA, 201 bp, Homo sapiens
cgtattttccgtaacaggataccccaaccaccacaaactttattgcttcggttgcccatgttatttatttatttatttatttatttatttatttatttatttatatcctgccccattccaaaggggacttgcagatttagttagcagatatcactaggtgttgctaaagattatgtctgatttgggacaagatctgctttt

SEQ ID NO: 344878 - DNA, 201 bp, Homo sapiens
ggctggagtgcagtggtgcaatctcggctcactgcaagctccacctcctgggttcacgccgttctcctgcctcagcctcctgagtagctgggactacaggygcctgccaccacgcccggctaatttttcgtatttttagtagagacggggtttcaccatgttagccagaatggtcttgatctcctgaccttgtgatccgcc

SEQ ID NO: 344879 - DNA, 201 bp, Homo sapiens
agaagtcaggagttcgagaccagcctgaccaacatggagaaaccccgtctctactaaaaaaatacaaaattagccaggcgtggtggcgcatgcctgtaatsccagctactcgggaggctgaggcaggagaattgcttgaacttgggaggtggaggttgcagtgagctgagatggtgccattgcactccagcctgggcaaca

SEQ ID NO: 344880 - DNA, 201 bp, Homo sapiens
tggctcagacccatcttctgcagaacacaaattgatcctgccttttaccgtgagccttcatttgacaagaagagagaattgtgatggccatgaggaacggmtggccatattctagtcattctttcccctggtttaacatgtttggataatttgggcattctgctattttttttttttcttttgagacagagtcttgctgtg

SEQ ID NO: 344881 - DNA, 201 bp, Homo sapiens
cctcctcccctgaccttgccctctctcagtggcaccacccgctcttctctctgcaggtggagaagcgtctggagctggtgaaacaggtgtcccacagcacscacaagaagctcaccgcatgtctgcagggccagcaaggggcagaggctgacaagcgctccgtaagtgccctcccagccctggggagctgaaatcttgcct

SEQ ID NO: 344882 - DNA, 201 bp, Homo sapiens
gataccagagatatatgggaggctgaggcaggagaattgcttgaacccaggaggtggaggttgtagttagccgggatcgtgccactacactccagcctggsgatacagcgagactctgtctcaaaacaaacaaaaaacaaacaaataaaaaaacaaacaaccaaaaaaaccaaaaaactaagccatccctcgatgtggtaa

SEQ ID NO: 344883 - DNA, 201 bp, Homo sapiens
ggtaaggcggccattgacactggctcacagataccagagatatatgggaggctgaggcaggagaattgcttgaacccaggaggtggaggttgtagttagcygggatcgtgccactacactccagcctggcgatacagcgagactctgtctcaaaacaaacaaaaaacaaacaaataaaaaaacaaacaaccaaaaaaacca

SEQ ID NO: 344884 - DNA, 201 bp, Homo sapiens
tgtctaggttatttcacttagcatgatgtcttcaagattcatctgtgttgtaccatgcagcattccctttttcatggctgcataatgttccattttatggrtataccacattttgtctgtccatttattcattggtggacatttgagttgttcccaccttttggcctttgtgaatagtgttgctcttcacatttgtgtacc

SEQ ID NO: 344885 - DNA, 201 bp, Homo sapiens
ggaaccccatacccattaagcagtccttccctattttactcacccctgcagccctgtgacaagcactaatctactttctgtctctgtgaatttgcttattytggatatttcattaaatagatttatataatatgtgtccttttgtgtctaggttatttcacttagcatgatgtcttcaagattcatctgtgttgtaccatg

SEQ ID NO: 344886 - DNA, 201 bp, Homo sapiens
caagagggagacattgagaaagcaggcaactgggggattgggagatggtgttgggcaaatgcatgtaagaggttttggagaaaagaagcaggcagttgcgrggtctctgcgctttgatgttgtaccttggagttgctgtgcgctgaccctctgtcctgttggtagggactcttccgagtagccccctctgcctccaaactg

SEQ ID NO: 344887 - DNA, 201 bp, Homo sapiens
cacaatgtgtgcttggagcttgcttcagaataggggcacaagctgtagagatggatggaactaatttgcacatcactcctctacaccaactttgactttarctgtggtccaaatgtcaaaatctctggggaaatgactgacataggtgttcttttcaaacttacgcatttttcagagttgtggttgacaaatatgcaaatg

SEQ ID NO: 344888 - DNA, 201 bp, Homo sapiens; identical to SEQ ID NO: 72802

SEQ ID NO: 344889 - DNA, 201 bp, Homo sapiens
gtacatttctcctgttcatcttgccgggaaaaatgaccttttaatgctcctaataaataaggatgtaaccagaggtgggggttgtcctgcagtcagggacrgttggcaccaatgacaaccagggtcctgagggagaccttctactccacccatgtcagccatccaaaatgcagctgtttcttagagtgaggacactggctc

SEQ ID NO: 344890 - DNA, 201 bp, Homo sapiens
agtcctgtctgtccactaggactcctttgacaccacaccaatgggaaggtgaagagatgcttcgttatcaccacatgggcgtgggtgtccaggtgaccatrtgatttccactggtcctgcagcagaggaggatgggctttgtcagttgcctagtagtgatagacgcttccactccctagatggatgttctctttatgtttc

SEQ ID NO: 344891 - DNA, 201 bp, Homo sapiens
ggaggccgaggcgggcggatcacctgaggttgggagttcaagaccagcctgaccaacatggagaaaccctgtgtctactaaaaacacaaaattagccaggygtggtggtgggcgcctgtaatcccagctactcaggaggctgaggcaggagaattgcttgaacctgggaggcggaggttgtggtgagcggcgatcgcgcca

SEQ ID NO: 344892 - DNA, 201 bp, Homo sapiens
tgcttgaaatcgggaggcggaggttgcagtgagccgagatcgcgccattgcactccagcctggtgacaaagcaagactccgtctcaaaaaaaaaaaaaaamcaaaaaaacaactctttctttcttttagaacctaaacccataaagacaaggaccttatctgtcttgcttctcattttattctctgtacctgtaaatcttt

SEQ ID NO: 344893 - DNA, 201 bp, Homo sapiens
agaacatacttagaatctgcgagtcagagacagagaaaactagacagtgcattggaacttgtttttaaatcttattaacgcagttcctatgtgaaatctcygtaagctgaagggatgctcctgagggtaaattctggtcctggttgggtgatacagcactcctgatattccttcccaggtgtttctaccccaaagtgtgcc

SEQ ID NO: 344894 - DNA, 201 bp, Homo sapiens
ctatagggagattgggaaaaggataatgaaggtaaggcaaaggaggtcagggcaataatgtactttgaaaaatgcggttgattggccgggcgtggtggctyacgcctgtaatcccagcactttgggaggccgaggcgggcggatcacctgaggttgggagttcaagaccagcctgaccaacatggagaaaccctgtgtcta

SEQ ID NO: 344895 - DNA, 201 bp, Homo sapiens
tttagtagagatggggttttaccatgttggccaggctggtctcgaactcctgaccttaagtgttcctcccgccttggcctcccaaagtactgggattacargtgtgagccactgtgcctggcctcagaaaaaatttctttaatctataaaaaagaacatacttagaatctgcgagtcagagacagagaaaactagacagtg

SEQ ID NO: 344896 - DNA, 201 bp, Homo sapiens
ctcagacccatcttttgaaaggtatacatttcttctctactccccatcatgcccacagatggcacacttagcaggtctttttttttaatttttttttttttgacacctcagtcttctgacagcgtgccgacaatttcacatcctattcctgtcaccaccggaagtggtaaatgtcatcacagacatggtgatgcatcctct

SEQ ID NO: 344897 - DNA, 201 bp, Homo sapiens
agtggctaagtaaactgtggagtgtctgtaccatcgcacactctggaacaattaaaaaataggtagagttattcatgctaacataaatagataatgaaagsaagttaacaaggactcctgtgacattctattgttataaaaacgaaaacaaacacccagcacacttaaaacaatagaattttaaaaggacctatatttgtg

SEQ ID NO: 344898 - DNA, 201 bp, Homo sapiens
gaagggagcagccttgttactgctgggtgttggcaagagtcctgtctgtccactaggactcctttgacaccacaccaatgggaaggtgaagagatgcttcrttatcaccacatgggcgtgggtgtccaggtgaccatgtgatttccactggtcctgcagcagaggaggatgggctttgtcagttgcctagtagtgatagac

SEQ ID NO: 344899 - DNA, 201 bp, Homo sapiens
tattccaccttaaggctttttcactactcttttcttcttttgcatcatacctgcatgcatgattcctagttttattgagtctctgctcaaatgtcattttyttcatgtggccttccttgaccactctatttaaaatcgtagtcctactgccccacattcatgatccaacccccatcctctgctttattttaattatatttt

SEQ ID NO: 344900 - DNA, 201 bp, Homo sapiens
ccacctcccgggttcatgccattctcctgcctcagcctgctgagtagctgggactacaggcgtccgccaccatgcccggctaattttttgtatttttagtrgagacggggtttcactgtgttagccaggatggtctcgatctcctgacctcgtgatccgcccacctcggcctcccaaagtgctgggattacagggattaca

SEQ ID NO: 344901 - DNA, 201 bp, Homo sapiens
atgaggctctgttgttagttttgttactgatatgtttctcaatgttctttttagggctgaaaagacagaagttttgagtgaagaccttcttcaggtaaggyggccattgacactggctcacagataccagagatatatgggaggctgaggcaggagaattgcttgaacccaggaggtggaggttgtagttagccgggatcg

SEQ ID NO: 344902 - DNA, 201 bp, Homo sapiens
ttcccctgcaccagctccctccaggcgccgctcgcaggcgcgacccctcctccctaacttcccagaccccggagctcttctcactcgccgccttctgctcygggctccggttgccaagcgcaaagtgtgacgcatcctttacctgcgtccccggctgccccttcgcttcgtcctccctgcctttccccgggactcccttct

SEQ ID NO: 344903 - DNA, 201 bp, Homo sapiens
taaaagggatcctttctctattattcctcagtttacttatttgacaggtgggctcattaggggcgtatagaggccagtgcttcccatacaccaaatgatgycaccagggcaaaattcattgtccacaatgatgtgtgttttccagagacctgccgggccctacctctgtcatttgaaaagctgtatagggtcatctacagg

SEQ ID NO: 344904 - DNA, 201 bp, Homo sapiens
gactaattcccatctggacattagagctttggaagttaaaagggatcctttctctattattcctcagtttacttatttgacaggtgggctcattaggggcrtatagaggccagtgcttcccatacaccaaatgatgccaccagggcaaaattcattgtccacaatgatgtgtgttttccagagacctgccgggccctacct

SEQ ID NO: 344905 - DNA, 201 bp, Homo sapiens
gggatgacatacgagggagtgggtgtctggactcattcctcccctgcccaggaagggtgtggcagaccaagagttcacatgtaccaattctttcttccccrcagagatagagttcaacattactggcaattatgggagtccagtacacgtgaaccataatgccaactacagctcaatgccctccccagacatggaccctgc

SEQ ID NO: 344906 - DNA, 201 bp, Homo sapiens
agggatgacatacgagggagtgggtgtctggactcattcctcccctgcccaggaagggtgtggcagaccaagagttcacatgtaccaattctttcttcccygcagagatagagttcaacattactggcaattatgggagtccagtacacgtgaaccataatgccaactacagctcaatgccctccccagacatggaccctg

SEQ ID NO: 344907 - DNA, 201 bp, Homo sapiens
caggctggtcatgaactcctgatctcaggtgatctacctgcctcggcctcacaaagtgctgggattacaggcgtgagccaccgtgcctggcctaccgtctrttttttaactatctaccatggatctatgttcctctgttaagaattcttttttcttttaatttctttttcaatagacaagagagggtggtggtaagcaagg

SEQ ID NO: 344908 - DNA, 201 bp, Homo sapiens
gcttgggcagcaaagcaaaactctgtctccaaaaaaaaagagtcctttaactttccccacagcactacaatacaggggtgatggctaagtcattgtctcgyccagtgggagagccagggctcctgtagcagccacccagcctcctaatgccagtgacaggttgacccttttcgtttttgcagcacattggacctaggcagc

SEQ ID NO: 344909 - DNA, 201 bp, Homo sapiens
ctttctctccatttttcttcgctttgccttcatctgtgtcttggcttgtttccctgtcaaaatacaggtgtttgcagcaattagggtgatttgcctccacrttcacaaaccaaagaggagacaaagaagcagcccaagtggtcctgatcatggaataagagcgctttcctctagtctaggccaatttatttcacacgttta

SEQ ID NO: 344910 - DNA, 201 bp, Homo sapiens
ataaaaaaatcagctgggcgtggtggtgggcgtctgtaatcccagctactcaggaggctgaggcacaagaattgcttgaacctgggaggtggaggttgcaytgagccaagatcgtgccactgccttccagcttgggcagcaaagcaaaactctgtctccaaaaaaaaagagtcctttaactttccccacagcactacaata

SEQ ID NO: 344911 - DNA, 201 bp, Homo sapiens
tgattcactaaaggccacctggagaattttcttggaaaggattgagaacactgtgggggaagtgtggagatcaattagtaatatctaccatcagcgtatcrggatgacaaatccctggtttgtggtgtagagtgaggtgtcttctaatacgtgcttcatcctcagaagaaggctgaggaacagccttgcagtaacgatgaa

SEQ ID NO: 344912 - DNA, 201 bp, Homo sapiens
gattactaattttttaaaatgacatgagggactgtattagggttctttagagaaacagaaccaataaggagtgtgtttgtgtgtgtgtgtgtgtgtgtgtgcattatagagagagagagattgattgattttaaggagttggctcatgtggttgtggggattgttaagcttgaaatctgccgggcgagtggcaggctggag

SEQ ID NO: 344913 - DNA, 201 bp, Homo sapiens
tgattactaattttttaaaatgacatgagggactgtattagggttctttagagaaacagaaccaataaggagtgtgtttgtgtgtgtgtgtgtgtgtgtgtgcattatagagagagagagattgattgattttaaggagttggctcatgtggttgtggggattgttaagcttgaaatctgccgggcgagtggcaggctgga

SEQ ID NO: 344914 - DNA, 201 bp, Homo sapiens
tcttctccaagatttatcttacacgtacaagaacaagatgtctaagtgcccaagattcatttatccagtaaatagttactgagccagtgtgatgagccacmcctgcctgaggctgtggggacacaacagtgggtaaagccagttcctgctctgaagttgcttatgtgccaagagggagacattgagaaagcaggcaactgg

SEQ ID NO: 344915 - DNA, 201 bp, Homo sapiens
aagcggaggttgcaatgagccgagatcacgccactgcactccagcctgggcaacagagtgagactctatctaaaaaaaaaaaaaagtattaatattccccmaaaagtaacagtaacctattaaaatcatcaaatatctaatcaacataaactggtttttgaagagcagtacctttgacatctcccagctcccgtctctgcc

SEQ ID NO: 344916 - DNA, 201 bp, Homo sapiens
gcttatattcatgccttcataatctccaagatttttctgtactaacaagaatctgactttggcgttagaattattagtagttcctagtgtattgtctttawctccaaagcattctcaagccatacctatgaattgcatagtcatatatgctaagaggagtatgtaagacatggcagcttattgagtacagatggtccttcg

SEQ ID NO: 344917 - DNA, 201 bp, Homo sapiens
ttggcttatattcatgccttcataatctccaagatttttctgtactaacaagaatctgactttggcgttagaattattagtagttcctagtgtattgtctwtatctccaaagcattctcaagccatacctatgaattgcatagtcatatatgctaagaggagtatgtaagacatggcagcttattgagtacagatggtcct

SEQ ID NO: 344918 - DNA, 201 bp, Homo sapiens
gtggtagctcacgcctgcaatcccagcactttgggtggccgaggggggtggatcctgaggtcaggagatcgaggccatcctggccaacatggtgaaacccygtctgtactataaatacaaaaattagctgggtgtggtggcacatgcctttaatcctagctacttgggaggctgaggaaggagaatcgcttgaacctggga

SEQ ID NO: 344919 - DNA, 201 bp, Homo sapiens
gttggcttatattcatgccttcataatctccaagatttttctgtactaacaagaatctgactttggcgttagaattattagtagttcctagtgtattgtcwttatctccaaagcattctcaagccatacctatgaattgcatagtcatatatgctaagaggagtatgtaagacatggcagcttattgagtacagatggtcc

SEQ ID NO: 344920 - DNA, 201 bp, Homo sapiens
tatatatatatatatattttttttttttttttttttgaggcagagtctagctctgtcacccaggctgaagtacagtggcgcgatcttggctcactgcaacytctgcctcctgggttcaagcaattctcctgcctcagcctcccgagtagctgggattacaggcgcccaccaccaggcgcctgtatttttgtatttttagta

SEQ ID NO: 344921 - DNA, 201 bp, Homo sapiens
atatatatatatatatattttttttttttttttttttgaggcagagtctagctctgtcacccaggctgaagtacagtggcgcgatcttggctcactgcaayctctgcctcctgggttcaagcaattctcctgcctcagcctcccgagtagctgggattacaggcgcccaccaccaggcgcctgtatttttgtatttttagt

SEQ ID NO: 344922 - DNA, 201 bp, Homo sapiens
aggggagtgctgttctggccttcctctgaaccacagtggcgtatcctgggtgctttggttctacgaacttatggggtagaagcaaagcaggcatgagcacracctgatcgactgtgcaacacaatgcttaaaccaacctccaaatgatctatccctagaatagcagcacccctgcctcctaaggctgacattatttgccta

SEQ ID NO: 344923 - DNA, 201 bp, Homo sapiens
tactggcatgtaccaccatacctggctaatttatatatatatatatatatatatatatatatatatatatatatatatatattttttttttttttttttttgaggcagagtctagctctgtcacccaggctgaagtacagtggcgcgatcttggctcactgcaacctctgcctcctgggttcaagcaattctcctgcctca

SEQ ID NO: 344924 - DNA, 201 bp, Homo sapiens
ctactggcatgtaccaccatacctggctaatttatatatatatatatatatatatatatatatatatatatatatatatatattttttttttttttttttttgaggcagagtctagctctgtcacccaggctgaagtacagtggcgcgatcttggctcactgcaacctctgcctcctgggttcaagcaattctcctgcctc

SEQ ID NO: 344925 - DNA, 201 bp, Homo sapiens
gcactccaacctgggtgacagagcgagactctgtgtcaaaaaaaaaaaaaaaaaaaagtattttcactgtaaaaccaggaaatgacaaagggacagggggwtagatagtcttagagcataggagggggcacctgaccctgggcatgctgggttgctgttgatgacttcaactcagaggatgctcggtcctggctgtgtaat

SEQ ID NO: 344926 - DNA, 201 bp, Homo sapiens
tgcgtggtggatgtgcaggagtactcggcagacccccacgcaattgcaggtgggcacctctcagcgctcctgtgtgccatggaggctcacagggaaggggyagaggggaggctgtgtggctacaagtccaggacactcaagtcagtggctgcccaaagcacttcagatgtgtccactcagtgcccagtttcagggctgggt

SEQ ID NO: 344927 - DNA, 201 bp, Homo sapiens
tccttgcctctgactggttcccaccttcccactccctaccccaggccccgccttcagttctttccctggctctgtccagccaggctctgcctccacatccygcccaactgcttagcatgaatgctaaccccaaaattctccttcctgcttcttggcaccaaggtcatgggctgagtcatgcatcttcagagctaacttgtc

SEQ ID NO: 344928 - DNA, 201 bp, Homo sapiens
actatgcaaactactttcaaacggtaagtgcccagaaaggtgagattgcttaaaggctgttcgtaggagaagggaatgtgggcatggaattaagagtcccktaattgatcacatcatagaaaaaggtgggagctttgaccattttactagtgaaataaatcctgccatgctcctgatatggatttctccaaaaaccttaga

SEQ ID NO: 344929 - DNA, 201 bp, Homo sapiens
ggacctgagagatgcagatgcgggcacagtgagttcactggagaagcagagtctgagagtggtgggccaggtgaggccgaccaggaggaaacggacccacrggcgggagatgggctgggactgcttcctttttggacactcctcagcttcatcctagtttcccatcttagaaaggggactcagtgccatatggtatttggc

SEQ ID NO: 344930 - DNA, 201 bp, Homo sapiens
gaacccaggaggcggaggttgcagtgagccgagatggtgccactgcactccaacctgggtgacagagcgagactctgtgtcaaaaaaaaaaaaaaaaaaaagtattttcactgtaaaaccaggaaatgacaaagggacagggggatagatagtcttagagcataggagggggcacctgaccctgggcatgctgggttgctg

SEQ ID NO: 344931 - DNA, 201 bp, Homo sapiens
cagctgatatgtacagttttgtggccaaagaaattgactatgcaaactactttcaaacggtaagtgcccagaaaggtgagattgcttaaaggctgttcgtrggagaagggaatgtgggcatggaattaagagtcccttaattgatcacatcatagaaaaaggtgggagctttgaccattttactagtgaaataaatcctgc

SEQ ID NO: 344932 - DNA, 201 bp, Homo sapiens
agcacttggttatgcatacccagggtggcaggggaggagacagtacctggcccttccttgaaaggggcatgatcaggggaggcagattctggatgtgagawttgcaccatgaaacagctttgctgtttgtttctatcttttctcaaacagcaatttagaacaccagaaaagcaatatgaaatcacatgccaccgtgtctcc

SEQ ID NO: 344933 - DNA, 201 bp, Homo sapiens
tgataaaatttttatccaagctgtcagaatatcaagatgtaaacaagatgactcccagtaatatggcaattgttttaggacccaacctcctatggccacargcagaagggtaagtacagggcggagaagtaatgtgggtgatcaggtgggactgcagggcctgagcagggtgggcaggacagctggggcctagctgagcac

SEQ ID NO: 344934 - DNA, 201 bp, Homo sapiens
accttggctgagatgacagcagcagtacctcctagaccagaggaaagggaactaaccacctgctagtctatgtaacttagaagtcagtggataaggccagrcgtggtggctcacacctgtaatcccagcactttgggaggctgaggcgaatggatcacctgaggtcaggagtttgagaccagcctggccaagatggttaaa

SEQ ID NO: 344935 - DNA, 201 bp, Homo sapiens
tatggaggctaaagaggaagcatgctcgttattttaggtagattggaggagggaatgggtgactacctccttccgcatgtggaagcacctttctgcaaaaygctttgcatgccatggcagcctgtgtccttgcccctcactaagggtgatgcttgccttgtgtcttctcagctaatagaagtgcaagctgaataccacagg

SEQ ID NO: 344936 - DNA, 201 bp, Homo sapiens
gtcaatgagtcaatgaaaccttggctgagatgacagcagcagtacctcctagaccagaggaaagggaactaaccacctgctagtctatgtaacttagaagwcagtggataaggccaggcgtggtggctcacacctgtaatcccagcactttgggaggctgaggcgaatggatcacctgaggtcaggagtttgagaccagcc

SEQ ID NO: 344937 - DNA, 201 bp, Homo sapiens
ttcccagaccccggagctcttctcactcgccgccttctgctccgggctccggttgccaagcgcaaagtgtgacgcatcctttacctgcgtccccggctgcyccttcgcttcgtcctccctgcctttccccgggactcccttctccctctggccgcctgtcttcctggaaacaggtgtttgctctgattgtgctggaggcag

SEQ ID NO: 344938 - DNA, 201 bp, Homo sapiens
ttcatttatgtttctctagctgcaagggaggctgagaaggtgaatatgtgtccaagataaatgggtttgctatgactggccatgattcaccagcgaggacrtacactatctggcttctcttactagagaagacacacagtggttgttaccaggctctgaaggctgcagtcacatgcatgcagtgataaacgtgtaaactgg

SEQ ID NO: 344939 - DNA, 201 bp, Homo sapiens
ctaattgctgcctatattgttactgaaccttcagggctcagctagagggtcatttactccagaactgcctcttcttctctagacaagttggatcccagccytctgtatttttcattttccttgcagagcacttagcataatgccactaagctgtttctgttatcgtgtttccttttgtctcctccactggcctgattagag

SEQ ID NO: 344940 - DNA, 201 bp, Homo sapiens
ctgcctcttcttctctagacaagttggatcccagccttctgtatttttcattttccttgcagagcacttagcataatgccactaagctgtttctgttatcrtgtttccttttgtctcctccactggcctgattagagcaaggcctccatctctttttcctgctatatccttggcatctgatataatggatactcagtaaat

SEQ ID NO: 344941 - DNA, 201 bp, Homo sapiens
aagcttcattcaacccatctgtgagaatgccacctttcagaggtaatgaggggtctctagggtgggagaagtgagagctgaaacccagcccagcatcgacwtgggcatcttgtggcaagagctgtgtttctgggaagaccactatctgggtttacagttcagaggccggcactcctgccttaagtcactgttggtagttgg

SEQ ID NO: 344942 - DNA, 201 bp, Homo sapiens
ttttgtctttttacagtatgattcctgccaaatgccttcaggaaggggctgagatctccagtcctgcagtggaaagattgatcagttcgctgttgcgaacrtgtgatttggaagaggtaaggggcacagccgcaggcatcatgggggcgaggtggggagcagagctgcagagccctccagccccaccctttcagtttcaga

SEQ ID NO: 344943 - DNA, 201 bp, Homo sapiens; identical to SEQ ID NO: 72838

SEQ ID NO: 344944 - DNA, 201 bp, Homo sapiens
aaggggcagagccggagccaggcctcgtttttcaggagcttgattttgagagcatctggactgctctcccttccctctccggaggcccttagccaggcctrgggagcctctgcccctttagagggttccctccatgccattcttttttccatttcagctgtggcctgttggcttgtgccaaggaaggggcgttggcgctgc

SEQ ID NO: 344945 - DNA, 201 bp, Homo sapiens
aacagggtctgccatcccgatgaagattcgaaatgtcagtgccacacttgtcaacataaggtatgctgctttcccaggaagcatccttccatcaagggcaygtttactttttaaacaaaagtcctgctgtactcaccagtcgatttgaaatgcggtatcaagccctgtcacttgtcatgtcgactggagtgtccaggagag

SEQ ID NO: 344946 - DNA, 201 bp, Homo sapiens
attgcaatacaatcaaaacaccttgatatggcctacaagtcctgtaggccccggccgctacccacacttccatctgtacccatcgctgaactgcagctgcrtgggctgactcttatgtccctctaactccctggccacttcaggactttcgcccttccgcgggttccctctgcctcttctaattgctgcctatattgttac

SEQ ID NO: 344947 - DNA, 201 bp, Homo sapiens
taaagggtgcatgctttccttggtacttgagctcaggacagtgtctaacaacagaccccatatggatgggcctggggtttatggtccagaggaatgccacwgtattctatgtcaagatatttcctctgacttctgaggacattaggaccagtggccacagactgaagaaaaccttaatgccaagcctcctttcctggccag

SEQ ID NO: 344948 - DNA, 201 bp, Homo sapiens
gttacttttgacaacgatttgtacatgtatttaaagataacaactttcaacccccacccttaccccagactcccattacaaattgaggcatgacctgcccytgccaggaagtgagcaaagctgcaacatcaaaactctgcacatcccactctcagaggagggtgactttacactgtgttgggaaaaataactaagcattta

SEQ ID NO: 344949 - DNA, 201 bp, Homo sapiens
caactgaggctgagggccgggcacaggctttggaaccatcgggtctccctggatttgaatcctgaccctgcctcttaccatcttcactggagacctgggcstctgagcctgtttcccccttgggaagcagagcatttcctacctggtagggctgggaggatgcgaccgaagtgcatggtcttgcagtgagagctggatgca

SEQ ID NO: 344950 - DNA, 201 bp, Homo sapiens
aggctttggtttggctctttatatttgactgctgtttcctcatcatagtgactatgatttaactcatgttttctcctaagaatgattttggggttctccakccaaagacttaaactttggttccagatgtccaagaaacgtttattatcattttaaatgttttgtctttttacagtatgattcctgccaaatgccttcagg

SEQ ID NO: 344951 - DNA, 201 bp, Homo sapiens
tactgaccaggtgaacagaggaggggaaagcaccaaccatggcagagtccagaaaggcctctcagcaggctcagtccagagcgatcttcagactccgagtygaatgaaaatgagccacaccttccacatggtaatagtataaacaaaacagagcagcagaaaggcttgcgttttcttaattctctgccttgtaatgcttgt

SEQ ID NO: 344952 - DNA, 201 bp, Homo sapiens
cagcccttgggtctaaccaggcaaagtgagcctctcccgcaccaccccgaccctgcaaaggacgttcctgaccagccttggatggagaggtgggtgttttytggcatggaggctgaaagtggatcaaaagaggcacaaagtcaaaaggcaaaggtcaaacaaaaggccgaagtcaccacccgaaaggaacaaacaaaacct

SEQ ID NO: 344953 - DNA, 201 bp, Homo sapiens
cagattgtccccctgaatttattctggacatccccaatggggtctgctgaggccatataccctgtccgtcacctgagatgcttctctctcttcctgcaggratgccattattacttgcaatcctgaggaattcatagttgaggcgctgcagcttcccaacttccagcagagcgtgcaggagtacaggaggagtgcgcagga

SEQ ID NO: 344954 - DNA, 201 bp, Homo sapiens
gcctctgaaccatcagcagtcttcctagtggcagtgactctcttcctcttctcttctgcagccccgacacgtctctgctactggactgtggtgagggcacrtttgggcagctgtgccgtcattacggagaccaggtggacagggtcctgggcaccctggctgctgtgtttgtgtcccacctgcacgcagatcaccacacgg

SEQ ID NO: 344955 - DNA, 201 bp, Homo sapiens
agatgggtttccctgccttaagtcggcaagtacctttttttttctttttttgagacagagtctcgctctgtcaccaggctggagtgcagtggtgcgatctkggctcactgcaacctctgcctcccagggtcaagcagttctcctgcctcagcctcccgagtagctgggactacaggagcgcaccaccatgcccagctaatt

SEQ ID NO: 344956 - DNA, 201 bp, Homo sapiens
gccggcaaaccggaacagaactaggggcggggccgcttgagacgctctagtattcctctactctatggccactgtcaattgacaagtcccgagcggtaaarctcctttctattggatgagcagcctcgcgtaggcgggaagctcggtgcacggcgcgctgattggctggatccgccatgcggagcggctaggtggtgcacg

SEQ ID NO: 344957 - DNA, 201 bp, Homo sapiens; identical to SEQ ID NO: 72841

SEQ ID NO: 344958 - DNA, 201 bp, Homo sapiens
caaagcgcttatgctaatgctcaatacaattgatttcctcacatttaatcctcacaaccactacaaccacctctaactcaagctctgagggactgacgtgyccggaggacacagctcttatctggtgggaacaggagcgttttagcgaaactccaaactcctaggtcccgccttccccaggaaggcttttcctggcactgt

SEQ ID NO: 344959 - DNA, 201 bp, Homo sapiens
ggagaaaaacagcttccggaaaaaattgcggccggcaaaccggaacagaactaggggcggggccgcttgagacgctctagtattcctctactctatggccrctgtcaattgacaagtcccgagcggtaaagctcctttctattggatgagcagcctcgcgtaggcgggaagctcggtgcacggcgcgctgattggctggat

SEQ ID NO: 344960 - DNA, 201 bp, Homo sapiens; identical to SEQ ID NO: 72849

SEQ ID NO: 344961 - DNA, 201 bp, Homo sapiens
aaactctgcacatcccactctcagaggagggtgactttacactgtgttgggaaaaataactaagcatttaaatttttcattgtacacctgtacattggttkagattgaatggctcaaattaaacaaatatagagagatttcatatatacaaatattatatcatgtataggtatattatatcatctatttgaaaaggataaa

SEQ ID NO: 344962 - DNA, 201 bp, Homo sapiens
gtcttccagaatgacagcccactgggaaacggagttaaaagtccaagatgagatgtagctcaggagtcaggccgcttcgggagtttgttgtccttaacagraggtcagcgttggcaaagctcggcagctcctctttctgtcctgaggtcttgtctagtgactgagaacaggctgacccctatgtgctgtccttgtttggat

SEQ ID NO: 344963 - DNA, 201 bp, Homo sapiens
tgggtgggaaatccgagattctttgcatccatgtgatttctgcggatctgtgaagaacttcaggcctgggtctgagcgtccttttcccaacccttgggccycggcctggctgtcagcactttcggagctccaccctcttccgtgcaccccaaggccagtgtgtcgttgttagcgtgtggggtggacagatctggtgtgtag

SEQ ID NO: 344964 - DNA, 201 bp, Homo sapiens
tacaggcatgagccgctgtgcctggctattagagattttttattataatttatctccaagataaaagcagtgacattatattgccacataattgaaaaatmcaagagaaataaaaatcatccatgcttttgttagcctatcactgtcattgaaatattatgttacatggcagtttgcttgctggttgctctgttaggcaac

SEQ ID NO: 344965 - DNA, 201 bp, Homo sapiens
aattgtaaggaaacaacatcattttattttttatttttttttttgagacagactttcgcttttgttgcctaggctggagtgcaatggcgcgatctcggctsactgcaacatccgcctctgggttcaagcgattctcctgcctcagcttcctgagttgctgggattacaggcacgtgccaccacgcctggccaattttgtat

SEQ ID NO: 344966 - DNA, 201 bp, Homo sapiens
gtccccgcaggtttattaaagcaagaacagatgccaagctcagggataataaatctattttaataacgttacttttgacaacgatttgtacatgtatttaragataacaactttcaacccccacccttaccccagactcccattacaaattgaggcatgacctgcccttgccaggaagtgagcaaagctgcaacatcaaaa

SEQ ID NO: 344967 - DNA, 201 bp, Homo sapiens
acttggctaaagacattcatgtctggttttacttacatgtgaagagagtaccaagcagtaggggtatttccttgttagtactaactaatgtgatgcttacyaagtagtgctgatgggtgacagaccagagcacccagcaaaggccagagaagtccagaacctggcgaggagatgaggcttacactgactgaaggcagaagg

SEQ ID NO: 344968 - DNA, 201 bp, Homo sapiens
tttatttgttcttcttagccttttggtgacagatagcctgtgggtcccacactggtgcgaagtcctttgtttcagagcggttgccaggggcctgccagtcyccctcctgggaagctggatagaactatgttgcttacccatctgtcttagtctgtgttttgttattataaaagaatatgtgagactgggtaatttatcaag

SEQ ID NO: 344969 - DNA, 201 bp, Homo sapiens
ggagggccccaccctcagtgtgcccatggttcagggtgaatgcctcctcaagtaccagctccgtcccaggagggagtggcagaggtctgtgccatcttgawctaatggaatcgtctcagtcgagttgggaaacatttctgtaaatagccacatagtaaatgttccaggaggctctccagaccatatggtctctgttgtaac

SEQ ID NO: 344970 - DNA, 201 bp, Homo sapiens
gcatgtctcctgtttccttgccagggcttgccaagtatcttgctgcagagagaacgcgccttggtaagtgtggcacttgatgggcgttctgagtttcagcrgtttacacatcatccgccatgcctcttggcactccagtttttattgagatgttctgtcgtcgagtcggcacttgcattttttgttccaggcatctttggg

SEQ ID NO: 344971 - DNA, 201 bp, Homo sapiens
ggttgcccccaaccagctcaaagcctggctccagcagtaccacaaccagtgccaggaggtcctgcaccacatcaggtgagcatccagggcagcctggcccsctgggctgttgcttgctgccgtctccttcagaagctcaaggtggacactggggtagttaccaatatcccccagcagccttgcccttgacatggtcccaga

SEQ ID NO: 344972 - DNA, 201 bp, Homo sapiens
ggacgcaccatatcgcaggcacccgcccgccgcgagcggccgcgcaaggacccgctgcggcacctgcgcacgcgagagaagcgcggaccgtcggggtgctycggcggcccaaacaccgtgtacctgcaggtggtggcagcgggtagccgggactcgggcgccgcgctctacgtcttctccgagttcaaccggtcagtcaac

SEQ ID NO: 344973 - DNA, 201 bp, Homo sapiens
cgtctcagtcgagttgggaaacatttctgtaaatagccacatagtaaatgttccaggaggctctccagaccatatggtctctgttgtaactattcaactcsgctttgagcacaaaagaaacacggacaataagctaatgaatgggcttggctgtgtgccagcgtgaatttatttagaaaagcagcctactccaggctgggt

SEQ ID NO: 344974 - DNA, 201 bp, Homo sapiens
tgtaagaaagccaggtgtgtaaacagatccttcttcctgggcttactataacttggcccgttgggggaatgagaagggttgttgtaaaggtggcagcctgsaactttaataatgaccagtccacagttttggccacccagggtctgggtaggcccaaaactgtgttctgttttcccagaggagaacagggcctgacaaacg

SEQ ID NO: 344975 - DNA, 201 bp, Homo sapiens
gtaatttggtggtatctgtactgaccaggtgaacagaggaggggaaagcaccaaccatggcagagtccagaaaggcctctcagcaggctcagtccagagcratcttcagactccgagtcgaatgaaaatgagccacaccttccacatggtaatagtataaacaaaacagagcagcagaaaggcttgcgttttcttaattct

SEQ ID NO: 344976 - DNA, 201 bp, Homo sapiens
cttatttctgttttctatgcctgtaaactacaatagcctcccatattcattctcgccttcctgtaatccatctgccacacagcagccagagaggtcacttyaagacagaaaagtagtgtgtcacttgccaccctaaagcccttcatgggctccccattgcaatacaatcaaaacaccttgatatggcctacaagtcctgta

SEQ ID NO: 344977 - DNA, 201 bp, Homo sapiens
acaaccttcgcagccacaagattcaaacccagctcaacctcatccacccggacatcttccccctgctcaccagtttccgctgtaaggtagtgtctcagacyggccccttgtcggcccagctctcgtcccctctctttctctccatgaatgtgttttgtctctttcagaaggagggccccaccctcagtgtgcccatggttc

SEQ ID NO: 344978 - DNA, 201 bp, Homo sapiens
tccccctcttcagccccaacttcagcgagaaagtgggagttgcctttgaccacatgaaggtctgtatgtcacacggacagcacagggcggggacggggcarggagacaggactctacacactgagtaggacggtcagctggagtttgctttcttatttggggccaccgtgggaaaaggttatctacccatcactaaccagg

SEQ ID NO: 344979 - DNA, 201 bp, Homo sapiens; identical to SEQ ID NO: 72835

SEQ ID NO: 344980 - DNA, 201 bp, Homo sapiens
gcctatattgttactgaaccttcagggctcagctagagggtcatttactccagaactgcctcttcttctctagacaagttggatcccagccttctgtattyttcattttccttgcagagcacttagcataatgccactaagctgtttctgttatcgtgtttccttttgtctcctccactggcctgattagagcaaggcctc

SEQ ID NO: 344981 - DNA, 201 bp, Homo sapiens
ccccgacacgtctctgctactggactgtggtgagggcacatttgggcagctgtgccgtcattacggagaccaggtggacagggtcctgggcaccctggctrctgtgtttgtgtcccacctgcacgcagatcaccacacggtgagtgttgggctggaccacaaagctggagcctggaggaggcactgccacgttgagttggc

SEQ ID NO: 344982 - DNA, 201 bp, Homo sapiens
aacttcctgcagattgtccccctgaatttattctggacatccccaatggggtctgctgaggccatataccctgtccgtcacctgagatgcttctctctctycctgcagggatgccattattacttgcaatcctgaggaattcatagttgaggcgctgcagcttcccaacttccagcagagcgtgcaggagtacaggaggag

SEQ ID NO: 344983 - DNA, 201 bp, Homo sapiens
aagcaggggagaagtgcattggctgaaggacagaaaccattagatagttcccatgtaatgcttattttcttagaagcatttcttcccagtcctcatttgasttctgagctgctttctaaacttcgagcagcttttcttgatgagacagttccagagccaagcacccaaatagtggctagcacagagaatgtccatagcagg

SEQ ID NO: 344984 - DNA, 201 bp, Homo sapiens; identical to SEQ ID NO: 72848

SEQ ID NO: 344985 - DNA, 201 bp, Homo sapiens
aagaggaagcagtggaaaagacacacaggtagcaaaggccggtcagtccttgtcgcccacatcctctccctcccccactacgtgacactgagcagccgtcrtttgtctccactgatgtggggctgccctgcttcctatcaagggctatgggggcttccttgacctgtggcagtgctcacaggctcttggcctttatttttg

SEQ ID NO: 344986 - DNA, 201 bp, Homo sapiens
tgtgtcttctaggtctgctttggagactttccaacaatgcccaagctgattcccccactgaaagccctgtttgctggcgacatcgaggagatggaggagcrcagggagaagcgggagctgcggcaggtgcgggcggccctcctgtccagggagctggcaggcggcctggaggatggggagcctcagcagaagcgggcccac

SEQ ID NO: 344987 - DNA, 201 bp, Homo sapiens
tacctgcattgaaacaaatgaggtgggtcagagtgtgtgagactgtcgtggtcaagagtccgtgttatgggatggactcacagctggggaatgtcttttgkgctaactgccactctgttgttgtcctctatcgaagttaaccagttttgcggttcagctttcattccagatggaatcatctttgacccacctatctgagtt

SEQ ID NO: 344988 - DNA, 201 bp, Homo sapiens
ttgtggcaagagctgtgtttctgggaagaccactatctgggtttacagttcagaggccggcactcctgccttaagtcactgttggtagttggtgggctccrgtgtacacagcctcaaagtgaaattagaaaagattgaaaactagaaacaactgaggactagaaattcaactagaactcttacagctcttataccagaaga

SEQ ID NO: 344989 - DNA, 201 bp, Homo sapiens
ggaggcactgccacgttgagttggccctttggctgcgtcttttcctccgcttccaaacttgcccagagcttttgttactcatctctggctaggaaatggtyttttgcaaaactcaacatagtccttctgcgccacaagaatgtcttctcttcctgttcagttcctttcctgcagcaggacaggtttgagtttacccagcct

SEQ ID NO: 344990 - DNA, 201 bp, Homo sapiens
ttcagcctttgtattgggacagtagcgtccattaatttttatgtgaagtgaaattaggtatcgggtcataatcagtctgtgatgtcttcacagctttcacrtttaccttgtgataatcaagtgtgtttttcctcaggtgttagccagagaagaggggtcagggactcttccctggtcgtagctttcatctgtaaggtaagg

SEQ ID NO: 344991 - DNA, 201 bp, Homo sapiens
tgccccatcacacctggctaattttttttgtatgttttgtagcgacggggttttgctatgttgcccaggctggtctcaaacttctgcgatcctcctgtctyggcctcccagagtgctgggattacaggcatgagccaccgcacctggcctggaattctttttataccagcccagtcagcagcagcacagagcattaaaagc

SEQ ID NO: 344992 - DNA, 201 bp, Homo sapiens
ggagttgattacggggcttgaaagccgaaatgagaggccagttgttttttatagcaaaagtggtccttgttctgttcatgttatcctgtttaaatgttttytcattcttaggttaaaggttgctcgcctggacaacatattcctgacacgaatgcactggtctaatgttgggggcttaagtggtgagtatattctttgcag

SEQ ID NO: 344993 - DNA, 201 bp, Homo sapiens; identical to SEQ ID NO: 72856

SEQ ID NO: 344994 - DNA, 201 bp, Homo sapiens
agactccgagtcgaatgaaaatgagccacaccttccacatggtaatagtataaacaaaacagagcagcagaaaggcttgcgttttcttaattctctgcctygtaatgcttgtagagagtcattattgtaagaaagccaggtgtgtaaacagatccttcttcctgggcttactataacttggcccgttgggggaatgagaag

SEQ ID NO: 344995 - DNA, 201 bp, Homo sapiens
aagcaaaggagatgggcctcccagtgtgagtgtggggggtaaggcttctggggactcactgggtacacctgtccacttaaggaaatcacatttcacagagkccttgcctcttcatttcagtgggacagctgccatcgctcccatcattgctgctgtcaaggacgggaaaagcatcactcatgaaggaagagaggtgagatg

SEQ ID NO: 344996 - DNA, 201 bp, Homo sapiens
ccaccagcttccccgggtgccctggcagttgatggccagggtctgtgccactgtctgctttgcagtcttgcagttgagttcagcttcagtctgctctgtcyttcacctgcagcacaacgtcccaagccatcagcgtggggatgcggatgaacgcggagttcattatgctgaaccacttcagccagcgctatgccaaggtcc

SEQ ID NO: 344997 - DNA, 201 bp, Homo sapiens
ctgcagcaggacaggtttgagtttacccagccttccttgagtcttgaatctcacacggcctgctcagcggaagctttgaccggatgcaggaggtgtggctrtgagaccctcaccttggtctcctggggtgccgggccctgggccgttgccctcttcccagcacgggtcgtgtcgctttctgcctgtgacatttcagggcca

SEQ ID NO: 344998 - DNA, 201 bp, Homo sapiens
ggccagggtctgtgccactgtctgctttgcagtcttgcagttgagttcagcttcagtctgctctgtccttcacctgcagcacaacgtcccaagccatcagygtggggatgcggatgaacgcggagttcattatgctgaaccacttcagccagcgctatgccaaggtccccctcttcagccccaacttcagcgagaaagtgg

SEQ ID NO: 344999 - DNA, 201 bp, Homo sapiens
agaacaggctgacccctatgtgctgtccttgtttggatggcaccgggtaaagactgacaccagcattttctctgcaggcctttgaacttttgtgttatttyatatattatatgtgttataaagcacattacaatatatttttctctgtcttctccagtcctaggtgaaatgtgtcatttaaaaaaaatttcacttgccatt

SEQ ID NO: 345000 - DNA, 201 bp, Homo sapiens; identical to SEQ ID NO: 72855

SEQ ID NO: 345001 - DNA, 201 bp, Homo sapiens
tggtttctcttgggtgccctcatggacagatttggcagccagcacagagggtgggcttcatccaggggtgtgtgcgaaggctctggccctcaggggagatkgtgctggctacggaggtgcccgttaagaaaacccaccagcttccccgggtgccctggcagttgatggccagggtctgtgccactgtctgctttgcagtct

SEQ ID NO: 345002 - DNA, 201 bp, Homo sapiens
cctgcaccacatcaggtgagcatccagggcagcctggccccctgggctgttgcttgctgccgtctccttcagaagctcaaggtggacactggggtagttaycaatatcccccagcagccttgcccttgacatggtcccagatggcagaagcaggggagaagtgcattggctgaaggacagaaaccattagatagttcccat

SEQ ID NO: 345003 - DNA, 201 bp, Homo sapiens
gtctttcctgacacatctttcaaaagcaatctttccttttgtaatatcagtaacaagaattttcctttttgcaaatcagtcttctgccctccagagatacytggtcgttgaaacgcttcccctttcaagttaaaaagacttgagttctgattaactatgtgaccttgatcaagttactttacctttctgagctttagttta

SEQ ID NO: 345004 - DNA, 201 bp, Homo sapiens
gctggagccatccgtggcccgtgctgcctgagccggaggcagcattcacctgctgggtttctcccagtggcctagaggctttggtttggctctttatattygactgctgtttcctcatcatagtgactatgatttaactcatgttttctcctaagaatgattttggggttctccagccaaagacttaaactttggttccag

SEQ ID NO: 345005 - DNA, 201 bp, Homo sapiens; identical to SEQ ID NO: 72842

SEQ ID NO: 345006 - DNA, 201 bp, Homo sapiens
taatgaggggtctctagggtgggagaagtgagagctgaaacccagcccagcatcgacatgggcatcttgtggcaagagctgtgtttctgggaagaccactrtctgggtttacagttcagaggccggcactcctgccttaagtcactgttggtagttggtgggctccggtgtacacagcctcaaagtgaaattagaaaagat

SEQ ID NO: 345007 - DNA, 201 bp, Homo sapiens
tgtcaattgacaagtcccgagcggtaaagctcctttctattggatgagcagcctcgcgtaggcgggaagctcggtgcacggcgcgctgattggctggatcsgccatgcggagcggctaggtggtgcacgggaaacgcgggcgtaggtgaccggcggctttctcagttttggtggagacgggcgcatgtgggcgctttgctc

SEQ ID NO: 345008 - DNA, 201 bp, Homo sapiens
cacctggctaattttttttgtatgttttgtagcgacggggttttgctatgttgcccaggctggtctcaaacttctgcgatcctcctgtctcggcctcccaragtgctgggattacaggcatgagccaccgcacctggcctggaattctttttataccagcccagtcagcagcagcacagagcattaaaagctgtgactcag

SEQ ID NO: 345009 - DNA, 201 bp, Homo sapiens
agcagcccttgggtctaaccaggcaaagtgagcctctcccgcaccaccccgaccctgcaaaggacgttcctgaccagccttggatggagaggtgggtgttktctggcatggaggctgaaagtggatcaaaagaggcacaaagtcaaaaggcaaaggtcaaacaaaaggccgaagtcaccacccgaaaggaacaaacaaaac

SEQ ID NO: 345010 - DNA, 201 bp, Homo sapiens
gcagcccttgggtctaaccaggcaaagtgagcctctcccgcaccaccccgaccctgcaaaggacgttcctgaccagccttggatggagaggtgggtgtttyctggcatggaggctgaaagtggatcaaaagaggcacaaagtcaaaaggcaaaggtcaaacaaaaggccgaagtcaccacccgaaaggaacaaacaaaacc

SEQ ID NO: 345011 - DNA, 201 bp, Homo sapiens
ttcccaccataattctgaggcaattcagttgctcgtggttggtgatcctgaagttactcttcccacacatcttcactaatgcaatcactttgctgttgtgyggttttcttgtagctgtgcggccccactctgccccagaatacgaggatgaaaccatgacagtttaccagatccccatacacagtgagtatgaaagccagg

SEQ ID NO: 345012 - DNA, 201 bp, Homo sapiens
ggatggagaggtatggagcccagcccagcggcacttggggtaactcttctgggcagtggtggattcccctttcctcccctcgtgctctttccagcgctacytacccttctgcacctgcctaaactttctgtgggattcctgccttcccagaattctaggcttcccagatctgtgctacactcgtgaagaaaatgcaccgct

SEQ ID NO: 345013 - DNA, 201 bp, Homo sapiens
ttaattctctgccttgtaatgcttgtagagagtcattattgtaagaaagccaggtgtgtaaacagatccttcttcctgggcttactataacttggcccgtkgggggaatgagaagggttgttgtaaaggtggcagcctgcaactttaataatgaccagtccacagttttggccacccagggtctgggtaggcccaaaactg

SEQ ID NO: 345014 - DNA, 201 bp, Homo sapiens
aattctctgccttgtaatgcttgtagagagtcattattgtaagaaagccaggtgtgtaaacagatccttcttcctgggcttactataacttggcccgttgrgggaatgagaagggttgttgtaaaggtggcagcctgcaactttaataatgaccagtccacagttttggccacccagggtctgggtaggcccaaaactgtg

SEQ ID NO: 345015 - DNA, 201 bp, Homo sapiens; identical to SEQ ID NO: 72846

SEQ ID NO: 345016 - DNA, 201 bp, Homo sapiens
cacccgcccgccgcgagcggccgcgcaaggacccgctgcggcacctgcgcacgcgagagaagcgcggaccgtcggggtgctccggcggcccaaacaccgtktacctgcaggtggtggcagcgggtagccgggactcgggcgccgcgctctacgtcttctccgagttcaaccggtcagtcaacgagccacgccccgtcccgc

SEQ ID NO: 345017 - DNA, 201 bp, Homo sapiens; identical to SEQ ID NO: 72851

SEQ ID NO: 345018 - DNA, 201 bp, Homo sapiens; identical to SEQ ID NO: 72854

SEQ ID NO: 345019 - DNA, 201 bp, Homo sapiens
actttttcattaatttgagggtaggcactcctgttacctgagacaagaagagatagcagatcttcagaaaagctgatggaaggccgggtgcagtggctcaygcctgtaatcccagcactttgggagtccaaggcaggtggatcacgaggtcaggagtttgagaacagcctgaccaacgtggtgaaaccctgtctgtactaa

SEQ ID NO: 345020 - DNA, 201 bp, Homo sapiens
caggtggatcacgaggtcaggagtttgagaacagcctgaccaacgtggtgaaaccctgtctgtactaaaaatacaaaaattagctgggtgtggtggcgcasgcctgtaatcccagctacttgagaggccaaggcaagagaatcgcttgaacacaggaggcggaggttgcagtgagttgagattgcaccattgcactccagc

SEQ ID NO: 345021 - DNA, 201 bp, Homo sapiens
tgaggatgaagagaaaaatcccggagttttttccattaacaattctcccagatattagcatttggttaaaccaagcacttaaaggagtccgggatcgccaygggaactcaatagaaaatcctcatcttctcactttgtttcatcggctctgcaaactcttattttttcgaattcgtcctatttttgtgtttgatggggatg

SEQ ID NO: 345022 - DNA, 201 bp, Homo sapiens
agaaggggatatatattatgaaatggtcatttttctgaagagaatattttgcttgaaatgcaaaggactgaaagagatttgtaggttgttgattttgttasttcatactggaacttttaaaaagatttcatcaaataaagttttgttttctacttttaattatatgaatgtttttaaacctttgttttaggtagaaggtac

SEQ ID NO: 345023 - DNA, 201 bp, Homo sapiens
tttcctttttaaaaatcatatagacaattagctgtttgaagtgagtattaaatatttcagaagtgtgaatttcatgtatttgagctcctctagttgctgtyggtttttcttctgctgccaacctgtgactcacaaatgactaggatctcttgttctttaattttagggtcttgttccaggactcaaatcagtaacttggtg

SEQ ID NO: 345024 - DNA, 201 bp, Homo sapiens
tgggtgacttagtgcattgattcagatttttaaaatttcttgatgtggtttgtaataatcaaatattgacaagaaccttaggtctcgaaagacttttatargtctagatgacgtttgccttaggggtaaagtaaaagaacaattggcaccttaagtttctatacccaaggttatctgtgaaatgagatctcctgatatttg

SEQ ID NO: 345025 - DNA, 201 bp, Homo sapiens
agtacattcatgcttagaattaagaacttcagcaaaactttttattagaaagaagagaaaattgataagcaatacttacacgatatctcagttaacagtamacagcatttctacatctcagattctaagaagcatcgtatatttatacgtttgagcctatagacatttactctaagaagtttttcttgacttttgacccga

SEQ ID NO: 345026 - DNA, 201 bp, Homo sapiens
ctttaggagtctgatgacttttcacagtaccaactcaaaggcttgcttaaaaagaactatctgaaccagcatatagaacatgtccaaaaggaaatgaatcrgcaacattcaggacacatccgaaggcagtatgaagatgaagggggctttctgaaggaggtagagtcaaggagagtggtctctgaagacacttcacattac

SEQ ID NO: 345027 - DNA, 201 bp, Homo sapiens
atatcatgactctgaattctataaactagcacccctggataatattaatgaaattctatttatgtaataactgtatactgctattaatggattaactactrtagtgccaaaccactttaaaattagctaatgaattaactcctagttgccgattaaatgaaaatgtatatacttatttatgagaaccagtgttctcttatc

SEQ ID NO: 345028 - DNA, 201 bp, Homo sapiens
cttatttttgagttcagttccctcctctgtgaggtgagggtaacgatagggcatggcttgtgtgatgattgggcatgtgaaatatttaacacagtgccaarcacagaggaagacttccataaatgtttgccatcattatacattgtggctaatagtactaaaattaataaaatattctatatagcatacaatttgagttag

SEQ ID NO: 345029 - DNA, 201 bp, Homo sapiens
ctttcctaacccagctgttgccgaggcctacctcaaacccgtggtggatgactcgaagggatcctttctgtgggggaaacctgatctcgacaaaattagakaatatcctttgcttcttaaaagagaaggaaacaccttgtcaaatatgtgtttggtttaaaacttatggaagagaaacttggatcatttttttcttatatc

SEQ ID NO: 345030 - DNA, 201 bp, Homo sapiens; identical to SEQ ID NO: 72865

SEQ ID NO: 345031 - DNA, 201 bp, Homo sapiens
ccatcctgagcagggtctgcataatctgtttaaagatttgtgtactttccagagatgaagcactacccagtcttacccaagttcgaagagaaaacgacctstatgttttgcctcctttacaagaggaagaaaaacacaggtaaatgtttaactatttaagaatattattttagtcattgctacattcagacacatttaaac

SEQ ID NO: 345032 - DNA, 201 bp, Homo sapiens; identical to SEQ ID NO: 72870

SEQ ID NO: 345033 - DNA, 201 bp, Homo sapiens; identical to SEQ ID NO: 72871

SEQ ID NO: 345034 - DNA, 201 bp, Homo sapiens; identical to SEQ ID NO: 72873

SEQ ID NO: 345035 - DNA, 201 bp, Homo sapiens
tgtcacactgtaaaactgaatggtgagaagtgttttaattcttcttaaggtattcaagctaagacagttgcagaagtggattcagagtctcttccttcttscagcaaaatgcacggcatgtcttttgacgtgaagtcatctccatgtgaaaaactgaagacagagaaagagcctgatgctacccctccttctccaagaact

SEQ ID NO: 345036 - DNA, 201 bp, Homo sapiens; identical to SEQ ID NO: 72874

SEQ ID NO: 345037 - DNA, 201 bp, Homo sapiens; identical to SEQ ID NO: 72875

SEQ ID NO: 345038 - DNA, 201 bp, Homo sapiens; identical to SEQ ID NO: 72877

SEQ ID NO: 345039 - DNA, 201 bp, Homo sapiens
ccaaatagaaaaatataacagtaaaggagaggagagagtgaacttcaggcatcgagagtgcaggtgctgtttcagagagttgttgggaaaggctttactcrtgtaacttcaaggcagggacctgcaggaaataggaagcaagcactgtagatagatacctcgggactagtgagtgaaaggggctgaggcagaagcttgtgg

SEQ ID NO: 345040 - DNA, 201 bp, Homo sapiens
ttttgtattgaaatgttattggtctttgggtcttataccgaaagtgatttttggctttgctgcagattttaacttttctgtccgcagaaatttaattttgygtatataaacttactgaaattagacaagtcaaattatacaaatattttcagattgtctcatttttcatatttcttgtctaacaatttatgtgaatatttt

SEQ ID NO: 345041 - DNA, 201 bp, Homo sapiens
gatatgtctgtctttgtatgattttaaaatgcagtatgtgaataggggtaacaagagttcaactaaaagttaactgactttaggtagatcccatgagagcyaaatgtttttcaattttaaatgaatagtgataagtatttagtgttcaacgtttggataatatcagttattaggaaattgaagttgtgaggatgaagagaa

SEQ ID NO: 345042 - DNA, 201 bp, Homo sapiens
cagcagcaagaacggatcgctgctactgtcaccggacagatgttcctggaaagccaggtgggtgcaggcagcttgggtttcctttaccaccttcctcagayccctgggggaatgcactgcatgaagggggtatgcactgtgccccctggtgctcagggcctggtgatgccgttccctgggggtcactgtgtgtccctaact

SEQ ID NO: 345043 - DNA, 201 bp, Homo sapiens
tttagcaatcacttattttttttttaaagaagcaattctttgcaatgagacttcttaaaaggatatgtctgtctttgtatgattttaaaatgcagtatgtraataggggtaacaagagttcaactaaaagttaactgactttaggtagatcccatgagagctaaatgtttttcaattttaaatgaatagtgataagtattt

SEQ ID NO: 345044 - DNA, 201 bp, Homo sapiens
tttttagtagagactgggtttcaccatgttggccagggtggtctcgagctcccggcctcaagtgatctgcctgcctcggcctcccaaagtgctgggattayaggcgtgagccaccatgcccagcctttgctttggttttaaaagtacttacaatactcaaatgcctatgttggctatttatttttacccagctcacaggca

SEQ ID NO: 345045 - DNA, 201 bp, Homo sapiens
agcttgggtttcctttaccaccttcctcagacccctgggggaatgcactgcatgaagggggtatgcactgtgccccctggtgctcagggcctggtgatgcygttccctgggggtcactgtgtgtccctaactctgcaggaatgaatgcattacatgaagtggtaggcactgctccccctgtgctcagggcctggcggtgcc

SEQ ID NO: 345046 - DNA, 201 bp, Homo sapiens
ttcacagtaccaactcaaaggcttgcttaaaaagaactatctgaaccagcatatagaacatgtccaaaaggaaatgaatcagcaacattcaggacacatcygaaggcagtatgaagatgaagggggctttctgaaggaggtagagtcaaggagagtggtctctgaagacacttcacattacatcttgataaaaggtatcag

SEQ ID NO: 345047 - DNA, 201 bp, Homo sapiens
ctgttaatcactgagtagctgtcgcggtgatcagatcaactgtcgcgatattgcagtgcttctcctcaagtcactcttatttgacttaatgatggcacaayagtgcaagagtatgatgctggcaatttgaatatgccaaagagaagctgtaaagtgcctcctttaaatgaaaaggtgaaagttcttgaattaataaggaaa

SEQ ID NO: 345048 - DNA, 201 bp, Homo sapiens
ttgtctgtgtgtttggtgtcctgagagaggtcagccaggaagcgacttggaaatataatgccaggaatgttacatccagcactcctgtcctgtttctcacyatgtgaatcccgtgacgtgttcagtggtgaagtcttgctccatccagaacccagagtcgtgctatactcggggtacatttatcattttgaagattctgag

SEQ ID NO: 345049 - DNA, 201 bp, Homo sapiens
gtgaaatgagacaagtaggctgccatttgacctggtaatttggagttgtggcaattctccgttctgtgagaatcaactttgctaatgagaaaaaaaagctrtcgtgttgcgtcatgtacactttttactttgattatggtcttcttgactctaggtgagcagccccgccacggttccttcctttctctcggctgcatttat

SEQ ID NO: 345050 - DNA, 201 bp, Homo sapiens
ttgtatgattttaaaatgcagtatgtgaataggggtaacaagagttcaactaaaagttaactgactttaggtagatcccatgagagctaaatgtttttcarttttaaatgaatagtgataagtatttagtgttcaacgtttggataatatcagttattaggaaattgaagttgtgaggatgaagagaaaaatcccggagtt

SEQ ID NO: 345051 - DNA, 201 bp, Homo sapiens
attaaggaattaaagtcctagtatgtttaggtagttaatcaactgacttagttaaactttgactagttacccgagatctccacagtgaacaaaaggtggtrgagaggggaagcaggccgcgcctgggcctgtattcgggtttctggcactgatcttcttctgttcatccagcaaatatatgtttggtgactcctatatgcc

SEQ ID NO: 345052 - DNA, 201 bp, Homo sapiens
aatgagacttcttaaaaggatatgtctgtctttgtatgattttaaaatgcagtatgtgaataggggtaacaagagttcaactaaaagttaactgactttakgtagatcccatgagagctaaatgtttttcaattttaaatgaatagtgataagtatttagtgttcaacgtttggataatatcagttattaggaaattgaag

SEQ ID NO: 345053 - DNA, 201 bp, Homo sapiens
tccctgggcgtcactgtgtacccctcactctgcaggaactcctgcgcctgttcggcattccctacatccaggctcccatggaagcagaggcgcagtgcgcmatcctggacctgactgatcagacttccggaaccatcactgatgacagtgatatctggctgtttggagcgcggcatgtctatagaaacttttttaataaaa

SEQ ID NO: 345054 - DNA, 201 bp, Homo sapiens
tagagtagaagttgtcggggtccgctcttaggacgcagccgcctcatgggggtccaggggctctggaagctgctggagtgctccgggcggcaggtcagccycgaagcgctggaagggaagatcctggctgttggtatccttaacgccgcgttgggacttggggtgcagggattcggggctggattcctcgcggggctctgc

SEQ ID NO: 345055 - DNA, 201 bp, Homo sapiens
taatgttttgattgtagatgaagtgaccttttaattttggtacaggaagtttcattgaagtgcaaagtgtgattagtgatgaggaacttcaagcagaattmcctgaaacttccaaacctccctcagaacaaggcgaagaggaactggtaggaactagggagggagaagcccctgctgagtccgagagcctcctgagggaca

SEQ ID NO: 345056 - DNA, 201 bp, Homo sapiens
atggttgttggagtctaaagacagtgttcccatgcagataggtgacatgaaaaatatgtagcgttcatttcctagaatgtcatagccacggagtcttagartaactcttggcatccaagttaaaagctggatcacttcctccaaatagtcttcactcacttccgggagtgggttgtattcacctttagctctgttcacgag

SEQ ID NO: 345057 - DNA, 201 bp, Homo sapiens
attttgcctttaggagtctgatgacttttcacagtaccaactcaaaggcttgcttaaaaagaactatctgaaccagcatatagaacatgtccaaaaggaartgaatcagcaacattcaggacacatccgaaggcagtatgaagatgaagggggctttctgaaggaggtagagtcaaggagagtggtctctgaagacacttc

SEQ ID NO: 345058 - DNA, 201 bp, Homo sapiens
caatcaggtttggtacttctgcagtttcaggcgtcctctgggggtcttggaacataccccaaggatgagggggctgtctactatgttaatagaatcaattrtagtaaattgacatgcttttgatcccagatctaccacttattagccctgtgactctagggaggttacctaacctatttaagtcccaatttcttcatttat

SEQ ID NO: 345059 - DNA, 201 bp, Homo sapiens
atcccattttcttaatatcccgctctccttttcactctttcttccctctcctcagttgttgttttttgtttgtttgtttgttttaaaggaacagtgtatcmctctgtcacccagcctggagtgcagtggtgcaatcatagctcactgcagccaccacttcctgggctcaaggaatcctcctgcctcagcctcctaagtagc

SEQ ID NO: 345060 - DNA, 201 bp, Homo sapiens
ttccggagtgctgcaagcgcagaaaatatacgtcatgtgcggaggcggagcttccgccctgcgcgtcgtattagacggaaaccgagcgggcccatttttcrtgggtttgcggacccaccagcgaaggcgggaggtgtcgcagggacatcttctggctgtttccgtcgcctgcgtggcccttgcaccccggtcttccattag

SEQ ID NO: 345061 - DNA, 201 bp, Homo sapiens
tgttcctggaaagccaggtgggtgcaggcagcttgggtttcctttaccaccttcctcagacccctgggggaatgcactgcatgaagggggtatgcactgtsccccctggtgctcagggcctggtgatgccgttccctgggggtcactgtgtgtccctaactctgcaggaatgaatgcattacatgaagtggtaggcactgc

SEQ ID NO: 345062 - DNA, 201 bp, Homo sapiens
tccccctcccactggcctcctccttggccctgctctcttctttgcttcagctgtgtccttggtgccagctcccagtccctgagagccccctcctctgttcygattgtctccttaaacccagctggacaggccttgccagccctctccacctacagggaaggaaggcaaccattaaatatattttaaggagaaggaaagaca

SEQ ID NO: 345063 - DNA, 201 bp, Homo sapiens
tcctagttgccgattaaatgaaaatgtatatacttatttatgagaaccagtgttctcttatccatcttactagaagcgtattgtcacactgtaaaactgartggtgagaagtgttttaattcttcttaaggtattcaagctaagacagttgcagaagtggattcagagtctcttccttcttccagcaaaatgcacggcatg

SEQ ID NO: 345064 - DNA, 201 bp, Homo sapiens
tgtctaacaatttatgtgaatattttcaggtcgtctaattttacatatttcatctctaagaattcaagccaaaattctcaaccctagctgagaattggcaytacctgtagttaattgaaaaataaaaaataaaagaagtcctacctcagtctctatgatttagaattttaggcccatggggtttaataatccgtatgtttc

SEQ ID NO: 345065 - DNA, 201 bp, Homo sapiens
aactgaatggtgagaagtgttttaattcttcttaaggtattcaagctaagacagttgcagaagtggattcagagtctcttccttcttccagcaaaatgcayggcatgtcttttgacgtgaagtcatctccatgtgaaaaactgaagacagagaaagagcctgatgctacccctccttctccaagaactttactagctatgc

SEQ ID NO: 345066 - DNA, 201 bp, Homo sapiens
ttttacatatttcatctctaagaattcaagccaaaattctcaaccctagctgagaattggcactacctgtagttaattgaaaaataaaaaataaaagaagwcctacctcagtctctatgatttagaattttaggcccatggggtttaataatccgtatgtttcagaagcttcatatcctattctaatggatagcagggatg

SEQ ID NO: 345067 - DNA, 201 bp, Homo sapiens
gcggtgcccttccctgggcgtcactgtgtacccctcactctgcaggaactcctgcgcctgttcggcattccctacatccaggctcccatggaagcagaggygcagtgcgccatcctggacctgactgatcagacttccggaaccatcactgatgacagtgatatctggctgtttggagcgcggcatgtctatagaaacttt

SEQ ID NO: 345068 - DNA, 201 bp, Homo sapiens
agtgttttaattcttcttaaggtattcaagctaagacagttgcagaagtggattcagagtctcttccttcttccagcaaaatgcacggcatgtcttttgaygtgaagtcatctccatgtgaaaaactgaagacagagaaagagcctgatgctacccctccttctccaagaactttactagctatgcaagctgccctgctgg

SEQ ID NO: 345069 - DNA, 201 bp, Homo sapiens
ggtctgcccgccttggcctcccaaagtgctgggattacaagtgtgagctaccgcactcggcctcaatatattttttaaataggaatgtatacaaggaggakgtcttcatctagactgaggaggggacccctggactgagaccttagagtaggagagaactaggcggagagagggagaaactgtttcaggcagaggaagcag

SEQ ID NO: 345070 - DNA, 201 bp, Homo sapiens
tttgtttcatcggctctgcaaactcttattttttcgaattcgtcctatttttgtgtttgatggggatgctccactattgaagaaacagactttggtaagtrtcgtatagtttttagtaagtgtcaaataatttttttctttctgcattcttagaaaaattcacataaaatttttgttttctctttagaattttagaaacag

SEQ ID NO: 345071 - DNA, 201 bp, Homo sapiens
ctacatgataaggcatgtgaacatttcttaatgcatctgaaataggcatgctctatacctttcagaatatttttcaaagactaaattttttatttactatwctttgtgttttggtgattcatgattcttattcctcttcattctaaagaacttctgccagggctgtggattctaaattctccaaggcatgaattttagttt

SEQ ID NO: 345072 - DNA, 201 bp, Homo sapiens; identical to SEQ ID NO: 72876

SEQ ID NO: 345073 - DNA, 201 bp, Homo sapiens
tagaactattatttacagcatgaactgtcatgctgtaacatgtgaacaatggttcactgagaaagcagcagaaagtattggttgttttccattttctagaratgatgaaatcagagtcagttcttagtggtgctgggcttatcctagttcaagggtacaaagccagtcctgtggatttcacaggaatgtagaagttgcctt

SEQ ID NO: 345074 - DNA, 201 bp, Homo sapiens
ccgccagatctgtgtttgggaagaaaagaaggaaactaagacgtgcgaggggaagaaaaaggaaaacctaattaaaaaatatgtatcctctataattagtyatgacagccatttgtaatgaatttgtcgcaaagacgtaataaaattaactggtggcacggtctttgtatttagtgtgtggttcctaaaaacaaatgctaa

SEQ ID NO: 345075 - DNA, 201 bp, Homo sapiens
ctgacagccggtctgagtgggttcctaatgctgcactagcaagcttgtgaagcgggggagcctgagctgcgggcgttttttcaggttccattgagtacatrgattggtgaggattatgttagtaactttgatggcatttattttttcctaattgtgtaaatgtttctggtcagttgtcactgcattacaaactaccttcag

SEQ ID NO: 345076 - DNA, 201 bp, Homo sapiens
cttcagccttagtggcttcacacagcagtagtcactgattttgctcatgcctctgaagctcgctcaggcctggtgggggtgtcttgtctctgttccatgtyggctaggacagctcagctgggctaggaccccttaagatggctcgcggggctgatgaggtggcttcggcctcggggcctgggtggacacttggtgagcttg

SEQ ID NO: 345077 - DNA, 201 bp, Homo sapiens
gaaaaaggaaaacctaattaaaaaatatgtatcctctataattagttatgacagccatttgtaatgaatttgtcgcaaagacgtaataaaattaactggtrgcacggtctttgtatttagtgtgtggttcctaaaaacaaatgctaaatctgacatttgttttttaatgttttacttttctagtattttttagctgaatat

SEQ ID NO: 345078 - DNA, 201 bp, Homo sapiens; identical to SEQ ID NO: 72880

SEQ ID NO: 345079 - DNA, 201 bp, Homo sapiens
gagcttagtgatttctgggtttgaggaaagcccagtagcaggaagtgagcagaggccagatcattcaaggcttcctagaccaggagaagaagttttagatwgtatcttgaaggcagtgggaagctttggagggttttcaccaaagatacgttggtgaaatctagtatataccttcaagatacattagaagatagaattgat

SEQ ID NO: 345080 - DNA, 201 bp, Homo sapiens
ttagaattaagaacttcagcaaaactttttattagaaagaagagaaaattgataagcaatacttacacgatatctcagttaacagtaaacagcatttctayatctcagattctaagaagcatcgtatatttatacgtttgagcctatagacatttactctaagaagtttttcttgacttttgacccgagactaggtctttt

SEQ ID NO: 345081 - DNA, 201 bp, Homo sapiens
aatcaactttgctaatgagaaaaaaaagctgtcgtgttgcgtcatgtacactttttactttgattatggtcttcttgactctaggtgagcagccccgccamggttccttcctttctctcggctgcatttattttccacagcagtggcctgagagcagccaggtcaggtccctgttcaccatcctgagcagggtctgcataa

SEQ ID NO: 345082 - DNA, 201 bp, Homo sapiens
tgttgccgaggcctacctcaaacccgtggtggatgactcgaagggatcctttctgtgggggaaacctgatctcgacaaaattagagaatatcctttgcttyttaaaagagaaggaaacaccttgtcaaatatgtgtttggtttaaaacttatggaagagaaacttggatcatttttttcttatatcccgttaatcccattt

SEQ ID NO: 345083 - DNA, 201 bp, Homo sapiens
tttggtctttaaaccatctatatagcttagtgtcttatttatacagtctaaatgtctgtgtcaaataatgcagaagtaagttaaacttttgtctcttatakattttaatgtttgtaatatgcgtttaagtgtattagcaagatattaccatctctttaggctatgtatactaatggagatttttaagtcacctaactaaag

SEQ ID NO: 345084 - DNA, 201 bp, Homo sapiens; identical to SEQ ID NO: 72882

SEQ ID NO: 345085 - DNA, 201 bp, Homo sapiens
caacttggggctgggttcccgcggcgcgcgagcaaggacggcggagacagaggcgggacacccggggggttggacccacgcaggactctcggggctcaagragggggcggctggaggacccggaccctcaagaacctggccttgggttttgacccgggcggccggagagaaggcgaagaagaggccgagcagacaggcgcg

SEQ ID NO: 345086 - DNA, 201 bp, Homo sapiens
ctccccaacagggtgtcgatgaggccacccgtgcagtgcccacgggagacatggaagacctcccttgtgggctggtgctcagcagcattgggtataagagycgccctgtcgacccaagcgtgccctttgactccaagcttggggtcatccccaatgtggagggccgggttatggatgtgccaggtgagagggtgtgaggag

SEQ ID NO: 345087 - DNA, 201 bp, Homo sapiens
gggtgggctcaggtggactgtgttctgggcctgacctcctcccccattccctgctcccaccttcaaggagcttcgggagatgattcagttaccgggagccyggcccattttggatcctgtggatttcttgggtctccaggacaagatcaagggtgaggggccctggcctggccccccaactactagggagagggtggccta

SEQ ID NO: 345088 - DNA, 201 bp, Homo sapiens
gagcccagggacttacctagttttggcccctggctctggaggtattctgggatccctcccccattttaggccccttgattagaggtacaacctgcctcaamtcccccaccccccgacccccaacccccaacccagcaggacaccttccctttggagagagtctctggtgtccccagcccatgaggatgtcttcctattgga

SEQ ID NO: 345089 - DNA, 201 bp, Homo sapiens
gttacatcggcacaacacccggggtcgaagaaggaggctgctgggctccgggaaggagctccctcgccccagacttccgcactctggttatttcccaacgscgggaaggctcgcttggagccggactcgtgattggctaggacgaagtcacgtgggaggattcgcaatcaaatggcaagggcgtctgcgtcatcagtgagc

SEQ ID NO: 345090 - DNA, 201 bp, Homo sapiens
gtgcccatgccacccagcttccctcctggggacacagagtggtgagggtggtgcagacttggtccctggagctgccttaccctctaacccctcccattccygggggacctggcagaatgtcatcaacacatttacccagacggcccattctggccgctgtgccttctggggcaacgtggaggtgggcagggacgtgacggt

SEQ ID NO: 345091 - DNA, 201 bp, Homo sapiens
ggtggtgtacgggggtgggcggagatctgtgcgtgagatgtgaggcttctagggttagagacggaggtcaacaaaggtgaaaaggagagactttgagatcyacaggtgtgagacggggtgaatggaggatgatacggaggtctgtggggcgagaggaaagtctgagtcgaaacagggatctgtaggaataagacgggtcta

SEQ ID NO: 345092 - DNA, 201 bp, Homo sapiens
agaggtaggtaggacccagatcctggggggcttggaagccattgaccaggctctggaggcaggtttcgctgggaggtgtccacagctgcctcctcttcccygatcagagtctcccggggcatcttatcaaaatgcacattcctgggcctaacttggacctaatcaaactctgtggctgggcccaagagtcagcaatgttaa

SEQ ID NO: 345093 - DNA, 201 bp, Homo sapiens
gggcctggtgtgctattagttggagccatttgcagagttggcagcaatgctccatctggccaccaggggggagcagtggcgcaattttgagccgccagccytctccaggcccacggtggggacatgaccaaatggagagtcccctttcctcggtcagtgtctgatgactccaaggccctccttttgtgccagagaacggac

SEQ ID NO: 345094 - DNA, 201 bp, Homo sapiens
gtagatggttggcttcactggagagttttcgggctgctgttttccttcaggatgccccctctgcctgcagcgtaggtccaggcagggctggtggccagatrgcagtggggagctgctggggttgtagtgaggaagaggactgggaggatgggggattgatgggatcaggtcgggggtcagggaggagccccaggttccagc

SEQ ID NO: 345095 - DNA, 201 bp, Homo sapiens
acatacctatctagtgattaattcacttggtaaacatttaccaagggcctactgaaactgcaggggagcaagcctcagctcctaagcttagggatcccctyatctacagggaaactgaggtgtaagggggtcggcctggtaaaaacagggagagaagaatccagggcagtggaccagcggccacagcaggctcagccgaca

SEQ ID NO: 345096 - DNA, 201 bp, Homo sapiens
gagccccaggttccagcttgggctctgagtggatggggtcgagggaacaggagcagaagtggggagcggtttggggcaaggggacttggcttgaaactggrtggatttgagatgtctggggtgggacatccaagggtctcaggtttggagcttggggagatgtctgggcaggagagagagagtagaaagtcatcagcaagt

SEQ ID NO: 345097 - DNA, 201 bp, Homo sapiens
tgtttctaaactcccgaagaataagagcgtgccaggggcaggtaggcaggtccgggacacctgggttcgcccagggcccccgggcgggcctgggatggtaytggggccgcctgccaggctggcttggtccccccactgcgggactcggggtcacgacccagcttgggggagtgggggtgggggccccggagccgcggacgc

SEQ ID NO: 345098 - DNA, 201 bp, Homo sapiens
cacccccaggcccacgtggacatctacgagaaacagcctgtgccctttggcctggtgcgctttggtgtggcgcctgatcaccccgaggtgaaggtgggtgwctctgggcctggaggctggggtttggagactttggtcaagatgaggagggcagggaggctccctggctggatgacaggacttcatgccatctgtgcccat

SEQ ID NO: 345099 - DNA, 201 bp, Homo sapiens
tccttgttagcggggagcagctagagggacaggagggagggaaggaaggaaggaggaaacctggaagatgaggtcagccacgagagataaggggtaagaayatccggcagacttagcgttccggaggtggccctggagaggacatcgtgacccagagtgaaggatctgtcgcaggaaagaatggaagataaggacagagag

SEQ ID NO: 345100 - DNA, 201 bp, Homo sapiens
gggctgcctgattactcatttaaccttgagcaggacaccacagggctcttcttttggacagagaagaaactttccccagtgcacagagccagctagtgctrgagctgggactggcatccaaggctacctgtttgactccaagcccagagcgctttgtgggtacaacatcgtggggcttgagggaggtggtttgggtagccc

SEQ ID NO: 345101 - DNA, 201 bp, Homo sapiens
tgtgtcagctgtgggacccctgactgctttactgctaaccggcctgtggcccagagtctcaccatcctgacctcctggtgctttccagcagccatgagagrgagctgtcatccatcctagtgtgcagagggggagactgagacttggggaggccctgggacttgctgggatcatgtggctggttggtggcagagccatacc

SEQ ID NO: 345102 - DNA, 201 bp, Homo sapiens
gaaggtgggtgtctctgggcctggaggctggggtttggagactttggtcaagatgaggagggcagggaggctccctggctggatgacaggacttcatgccrtctgtgcccatgccacccagcttccctcctggggacacagagtggtgagggtggtgcagacttggtccctggagctgccttaccctctaacccctcccat

SEQ ID NO: 345103 - DNA, 201 bp, Homo sapiens
cagaatgtcatcaacacatttacccagacggcccattctggccgctgtgccttctggggcaacgtggaggtgggcagggacgtgacggtgccggagctgcrggaggcctaccacgctgtggtgctggtgagtgcagctaggccctggcttggggaggcaggggctgcagaaggaggccggtggctcggggtggaaggcagc

SEQ ID NO: 345104 - DNA, 201 bp, Homo sapiens
gaggtgagtatggggagcacgcccgctgcctcttcctccccgcccctcagcccttggatgccagacctgggggaagagggagctgccatccagtggcgagmtgtgacattgtgctgactgaggcgggaggccagctgtggagggcctcgggggagagctgggtccaggtgggggaggagggaccagagttgtggactttcc

SEQ ID NO: 345105 - DNA, 201 bp, Homo sapiens
gagcactcctggttgccttatggggaaggggctcccagccatctggcctggacacttcccacttgcttcctcacctacacctgaggctcccctcccctccygtcctcagtgtgacaggggtgtaaaacgcacattggtggtgagtggtcagtggcaggtggtcagctttgcctccctggccaagcactccagggggcttat

SEQ ID NO: 345106 - DNA, 201 bp, Homo sapiens
gttgtcccttcctccaggacttccctgaattggtccactcccccatcgtgcctcctcccatagacctgtctacttctgtttcaccgcatatcatcgccacrgcaattttacacacattgatgagtatttgatgagtatttctctccccagcagatcacaagctctgagagggcctgctccttgtctcttttcctcaccatt

SEQ ID NO: 345107 - DNA, 201 bp, Homo sapiens
gcccagctggcttctacacggcccaacacctgctaaaggtaagccacttactcatagtccatcattcacctgctgctccagtcctaagggcaagcctcacycgctttgggttttaagagcactcctggttgccttatggggaaggggctcccagccatctggcctggacacttcccacttgcttcctcacctacacctgag

SEQ ID NO: 345108 - DNA, 201 bp, Homo sapiens
ggtgtctgtgtgcgtgcacgtgggtgtagattgtgggcacaggatggccagggtggtatccagccacctccctcccttccccttttgttaccccctctcakgcctctactgcagcggctgggtgaagagaggacctacaggtgtcatagccacaaccatgactgacagcttcctcaccggccagatgctgctgcaggacct

SEQ ID NO: 345109 - DNA, 201 bp, Homo sapiens
tgaagtaagagaccctgcaaatgccaaagccttgaggaacaagagaaggaggatgcaggtgagggtgaagcttgggaagttccagcttctgttggatattyaggttggtttgggactggggagagaagttaattttgaccttttccctctcctctgcctggccccaggcttctgccaccatttctccacacaggagaagac

SEQ ID NO: 345110 - DNA, 201 bp, Homo sapiens
accagagttgtggactttcccggtgtggggaagccccagggcacagtggggaccaggcatgaggcacctgcagactgagatgagctgagtggagcgaggcygggggaccctatcaagacctttcccctccagctggagccagacctgagctgtgacacagccgtgattctggggcaggggaacgtggctctggacgtggcc

SEQ ID NO: 345111 - DNA, 201 bp, Homo sapiens
ttgggggtagggagactgatgggcaggggcttctttgccttgagtcccagtgaagctggaggtgtcatagcggggacctaagataggatggggggctgggygtgtcagctgtgggacccctgactgctttactgctaaccggcctgtggcccagagtctcaccatcctgacctcctggtgctttccagcagccatgagagg

SEQ ID NO: 345112 - DNA, 201 bp, Homo sapiens
gcccacactctccccaacagggtgtcgatgaggccacccgtgcagtgcccacgggagacatggaagacctcccttgtgggctggtgctcagcagcattggrtataagagccgccctgtcgacccaagcgtgccctttgactccaagcttggggtcatccccaatgtggagggccgggttatggatgtgccaggtgagaggg

SEQ ID NO: 345113 - DNA, 201 bp, Homo sapiens
caggtgggggaggagggaccagagttgtggactttcccggtgtggggaagccccagggcacagtggggaccaggcatgaggcacctgcagactgagatgarctgagtggagcgaggccgggggaccctatcaagacctttcccctccagctggagccagacctgagctgtgacacagccgtgattctggggcaggggaacg

SEQ ID NO: 345114 - DNA, 201 bp, Homo sapiens
tcctggtgaggagctgccaggtgtgtgctccgcccgggccttcgtgggctggtacaacgggcttcctgagaaccaggaggtgagtatggggagcacgcccrctgcctcttcctccccgcccctcagcccttggatgccagacctgggggaagagggagctgccatccagtggcgagatgtgacattgtgctgactgaggcg

SEQ ID NO: 345115 - DNA, 201 bp, Homo sapiens
gcccgcatcctactgaccccacctgagcacctggaggtgagtggtaggtcagggctggcggggttggaggtggggtcaccctgaggagagagtgcccttgyctgcagggttcaggccttacctctccaagctgggctcagtgcctctgtttccccgtggtgcccaggcagaggctctctgaagggcagtgccatgagcttc

SEQ ID NO: 345116 - DNA, 201 bp, Homo sapiens
cccattcccgggggacctggcagaatgtcatcaacacatttacccagacggcccattctggccgctgtgccttctggggcaacgtggaggtgggcagggaygtgacggtgccggagctgcgggaggcctaccacgctgtggtgctggtgagtgcagctaggccctggcttggggaggcaggggctgcagaaggaggccggt

SEQ ID NO: 345117 - DNA, 201 bp, Homo sapiens
tggttatttcccaacggcgggaaggctcgcttggagccggactcgtgattggctaggacgaagtcacgtgggaggattcgcaatcaaatggcaagggcgtytgcgtcatcagtgagcgacgagagcctcccgagaggggcgcggctaagtaaaataagctcctttcttagtggctgtttccttggggagggactgaaacag

SEQ ID NO: 345118 - DNA, 201 bp, Homo sapiens
ggagggaccagagttgtggactttcccggtgtggggaagccccagggcacagtggggaccaggcatgaggcacctgcagactgagatgagctgagtggagygaggccgggggaccctatcaagacctttcccctccagctggagccagacctgagctgtgacacagccgtgattctggggcaggggaacgtggctctggac

SEQ ID NO: 345119 - DNA, 201 bp, Homo sapiens
acatctacgagaaacagcctgtgccctttggcctggtgcgctttggtgtggcgcctgatcaccccgaggtgaaggtgggtgtctctgggcctggaggctgsggtttggagactttggtcaagatgaggagggcagggaggctccctggctggatgacaggacttcatgccatctgtgcccatgccacccagcttccctcct

SEQ ID NO: 345120 - DNA, 201 bp, Homo sapiens
ggggtgggctcaggtggactgtgttctgggcctgacctcctcccccattccctgctcccaccttcaaggagcttcgggagatgattcagttaccgggagcycggcccattttggatcctgtggatttcttgggtctccaggacaagatcaagggtgaggggccctggcctggccccccaactactagggagagggtggcct

SEQ ID NO: 345121 - DNA, 201 bp, Homo sapiens
cagagggtggaagccttgtgttctcagcccagggtcctgaactctcctgctctgtctggggaaggggaggacctgggggcgtcccagcctctctctctcgrccccaccagctgccaccctgttccccagcagcacccccaggcccacgtggacatctacgagaaacagcctgtgccctttggcctggtgcgctttggtgtg

SEQ ID NO: 345122 - DNA, 201 bp, Homo sapiens
ggggcttgagggaggtggtttgggtagccccctgtggctggcctgggatggagagaggcaggaggtgggggagggtggacttgggtgcaggcaggggagtrgaggggaaggggggatttgggcaaaggcgaagaggtgggtgggagcctttgttgggggtagggagactgatgggcaggggcttctttgccttgagtccca

SEQ ID NO: 345123 - DNA, 201 bp, Homo sapiens
gcggggtttggggcggggcctcgcttgtgggcgggcccgggcaggagcgggcttgccctgcggagcagtagctaggaacagatccacttgcaggttgctgytcccagccatggcttcgcgctgctggcgctggtggggctggtcggcgtggcctcggacccggctgcctcccgccgggagcaccccgagtaggagcagggc

SEQ ID NO: 345124 - DNA, 201 bp, Homo sapiens
gtttgggactggggagagaagttaattttgaccttttccctctcctctgcctggccccaggcttctgccaccatttctccacacaggagaagaccccccakatctgtgtggtgggcagtggcccagctggcttctacacggcccaacacctgctaaaggtaagccacttactcatagtccatcattcacctgctgctccag

SEQ ID NO: 345125 - DNA, 201 bp, Homo sapiens
tttttccgaagcccccagcaggtgctgccctcaccagatgggcggcgggcagcaggtgtccgcctagcagtcactagactggaggtgagtctcatgtttcycaaagacacccccttcccaggcctctgccacccgcctggtgttgcccacactctccccaacagggtgtcgatgaggccacccgtgcagtgcccacgggag

SEQ ID NO: 345126 - DNA, 201 bp, Homo sapiens
atgtggggagtcatcctggaatgcaaggccttgggcacgctgccatgtgggagggaggacagcctgggctctgggatggagatcagggagcacatgggggytggagaggccctgaagggctttgtataagggacagtttttttttagctgatcctgacattttggaagggaggagagtaagctttccaggcagtgttcttt

SEQ ID NO: 345127 - DNA, 201 bp, Homo sapiens
aagtcattcaacaaacgtttactgaggtcttttctgggttaggccctgtgcttagtgctgggattggagattaataaggcagcctgtgtcctcagggagcktccagttttactaagtgcccacatacctatctagtgattaattcacttggtaaacatttaccaagggcctactgaaactgcaggggagcaagcctcagct

SEQ ID NO: 345128 - DNA, 201 bp, Homo sapiens
agggaggacagcctgggctctgggatggagatcagggagcacatgggggctggagaggccctgaagggctttgtataagggacagtttttttttagctgakcctgacattttggaagggaggagagtaagctttccaggcagtgttcttttttttttttttttttttttgagatggagtctggctctgtcgcccaggctgg

SEQ ID NO: 345129 - DNA, 201 bp, Homo sapiens
ggtcctgggaggtggggtgggtggtccttctctgggcctcactctttgggagggggctgttctgggaggggtgaaggaggaggtgttgacaatctcccctytgcttcaggggtccggccagtctctttctcagactgggagaagctggatgccgaggaggtggcccggggccagggcacggggaagcccagggagaagctg

SEQ ID NO: 345130 - DNA, 201 bp, Homo sapiens
tcagggagcacatgggggctggagaggccctgaagggctttgtataagggacagtttttttttagctgatcctgacattttggaagggaggagagtaagcyttccaggcagtgttcttttttttttttttttttttttgagatggagtctggctctgtcgcccaggctggagtgcagtggcacagtctcagctcacttcaa

SEQ ID NO: 345131 - DNA, 201 bp, Homo sapiens
aagtgtcgaagggttggaggccagggctgtgggttgtgcttgacctgagaagataaagaagccgccctgatataattccagtcgggggaagccacggcctygtcagctggccacatttctccccatctccgagggccggccgtcgtcgtctttttttttttttttttttttttttttgagacagagtcttgctctgtcacc

SEQ ID NO: 345132 - DNA, 201 bp, Homo sapiens
ccctggctctggaggtattctgggatccctcccccattttaggccccttgattagaggtacaacctgcctcaaatcccccaccccccgacccccaaccccyaacccagcaggacaccttccctttggagagagtctctggtgtccccagcccatgaggatgtcttcctattggagagagtgggaatgagaacattttcagc

SEQ ID NO: 345133 - DNA, 201 bp, Homo sapiens
tgggttgtgcttgacctgagaagataaagaagccgccctgatataattccagtcgggggaagccacggccttgtcagctggccacatttctccccatctcygagggccggccgtcgtcgtctttttttttttttttttttttttttttgagacagagtcttgctctgtcacccaggctggagtgcaatggcgcgatcttcg

SEQ ID NO: 345134 - DNA, 201 bp, Homo sapiens
cccacgggggcgagattgggatgatatggaggccgttggaaggatgtgggattctagccgattggatagggaatgaagtgttgttgggcaggccattggcrgtggtgtagtaggttcatgggtgagatgtgggctctggatgaacccacagcctttgggggttcagatgaagtaagagaccctgcaaatgccaaagccttg

SEQ ID NO: 345135 - DNA, 201 bp, Homo sapiens
cattcgaatgtggaggggacaggtggataatttacaaggtattttagggctctgacggctataagcacagagactggggtgcggggagggggtccatgccyagtctggagggagagatgtcccaattgcagtctgaaggacagtagatgtcaggttgggggacaatagcaggagtgtcccaggcacagagaactgcgtgaa

SEQ ID NO: 345136 - DNA, 201 bp, Homo sapiens
tcgctcactgcaacctctgcctcctgggttcaagcggttctcctgcctcagcctcccaagtagctgggattgcaggtgcctaccaccacgctcagctaatytttgtatttttagtagagacagggtttcaccatgttggtcaggctggtctcgaactcctgacctcaggttatccacctgcctcagcctcccaaagtgctg

SEQ ID NO: 345137 - DNA, 201 bp, Homo sapiens
tgagctgtgacacagccgtgattctggggcaggggaacgtggctctggacgtggcccgcatcctactgaccccacctgagcacctggaggtgagtggtagktcagggctggcggggttggaggtggggtcaccctgaggagagagtgcccttgtctgcagggttcaggccttacctctccaagctgggctcagtgcctctg

SEQ ID NO: 345138 - DNA, 201 bp, Homo sapiens
gtgcctgtaatcccagctactccggaggctgaggcaggagaatcgcttgagcctgggaggtggaggttgcagtgagccaagatgatgccactgcactccascccgggggacagagtgaaactccatctcaaaaaaaaaaaaaaaaaaagtgcacaacgtgtgctggtgctgctagggtataatccgatgtgaataagaagg

SEQ ID NO: 345139 - DNA, 201 bp, Homo sapiens
cgcccggccaagagagctgggcttttaaggctaaataggagttgggagagaatgtatttgtatgccacattgcacactttgaatttgaaaagctacactgkcctttccttttctttttgagacggactcttgctgtgttgcccaggctagggtgcactgatgccatctcagctcattacaacctctgcctcctgggttcaa

SEQ ID NO: 345140 - DNA, 201 bp, Homo sapiens
cagataggctcctgtctcatcctgccaaccaaacacaagggtatcattgtggacctttgaggagtattttaaacaaaggcagggcaggatttcaccatctktgtcagcgccccaagacaacaattcattccatcagctaaaaaagactttagtgatggcaaattttgttacacatttgtcacaaactattggtaagaaagc

SEQ ID NO: 345141 - DNA, 201 bp, Homo sapiens
tcggtactgccaggacttggctctgagcagctttaatcctactcatctttacagtaaaaggaacaagaagaaactggcttctattaccacaaggaggatayagagtagataaaaataattcctttataagcaagggttttgaaatctctttaaagttagggcaggataggtttccatcaatctgagatttcttagagaaga

SEQ ID NO: 345142 - DNA, 201 bp, Homo sapiens
acttgcagaagcagccgggtgctgccatcctaagctggttttccatatgggcttctctgtgagtgttaagaaaagctgtggtttgcctgtcagagtgagcrcccccactcagggtaaccacagtttctccatagagcaataggacagcaggagtgggctgggacgactcctaccttagcagctgctggggtagaatgcagc

SEQ ID NO: 345143 - DNA, 201 bp, Homo sapiens
taacactaagcagtcttctaaggagaccattcattacgcagtgctccttccaccagtcagctccctagggttccatgcagaagagaaatcagaatttcttyacaattcaaggtgctaagaggccattttttggtcatcaagtccagctgtccttttcagatgaagaaaatgaagcttatcatcataaagaattgtccaggg

SEQ ID NO: 345144 - DNA, 201 bp, Homo sapiens
aaatcagaatttctttacaattcaaggtgctaagaggccattttttggtcatcaagtccagctgtccttttcagatgaagaaaatgaagcttatcatcatraagaattgtccagggttccgagttagtgatagggctgagaagacccttgagctcctgttcccagtctaatattctttctactccagtattgagatgcgta

SEQ ID NO: 345145 - DNA, 201 bp, Homo sapiens
accgcggtgcgcagggacctgcccccatccttacttagcgagcaccagcccccagcccccggcactgggacgccccatggagccccgagggtccgcttggwggttgcctggacacccggaccatggggtatgaagactgaggtttggaggagtttccttcctaccgccctgagccttgctgtccgcctctacagaactgat

SEQ ID NO: 345146 - DNA, 201 bp, Homo sapiens
cacatttaaaatccattattaaaggctacagaccgggtgcggtggctcacgcctgtaatcccagcatcccagcactttgggagggtgaggtggggggattscttgagcccaggagttcaaaaccagcctgggcaacatagcgagatgcagtctcatttgaaaaaaagaaaaaaaagaaaaaaaattattaaataaaagtct

SEQ ID NO: 345147 - DNA, 201 bp, Homo sapiens
aggtggatacctatatcaaaacttatcaaatggtgttctttaaatatgtgcattttatcatatttcagatatacctcaacaaagctgttagaaacaaggarttggaattagaaaaattacccaagtagtattcaaatacctaattatttgcttgaaagcactgaaggccaactatggaactcagtggctccaccaaagaga

SEQ ID NO: 345148 - DNA, 201 bp, Homo sapiens
tgaggctcctgcttattctaaaattctcttgatcttgacagctctctattatagctaagttaagttagagtgaattaaatggaagagttaacagccatatraaggaatgacttgtcaataaatgcaacaacatggacgaatttcaaaataattatgcggagtgaaagaagccaacaagaaaaagaagagtatagcatatga

SEQ ID NO: 345149 - DNA, 201 bp, Homo sapiens
cttggcctcccaaagtgctgggattacaggcgtgagcccactgcgcctggccgcacaccttgaattaccttgaatttgaaaagctacactgtctttttttstttttttttgagttggagtcttgctgtgtctcccaggctggagtgcagtgatgcagtctcgactcactgcaacctccacctcctgggttcaagtgattct

SEQ ID NO: 345150 - DNA, 201 bp, Homo sapiens
agatgcgtattcgtttccgcttgggacacagaatgtctttcagtatgacctttaaggattcgtagcttccagccctttgagctcctgggtgtattggcgaygactcactgtccttgtgtttgtagtttaatgcgctgaaggttcccgtgcccttgtgtttgtagtttaatgcgctgaaggttcccgtgccagaggataaat

SEQ ID NO: 345151 - DNA, 201 bp, Homo sapiens
actgatgccatctcagctcattacaacctctgcctcctgggttcaagtgattcttatgcctcagcctctggagtagctgggattatggcgcgggccaccayggctggctaattattgtatttttaatagagatggggttttgccatgttggccatgctggtctcgaactcctgacctcaggtgatccaaccgtcttggcct

SEQ ID NO: 345152 - DNA, 201 bp, Homo sapiens
gaacttaattccatttgatcagatgaccattgaggacttgaatgaagctttcccagaaaccaaattagacaagaaaaagtatccctattggcctcaccaamcaattgagaatttataaaattgagtccaggaggaagctctggcccttgtattacacattctggacattaaaaataataattatacagttctgggtgtgct

SEQ ID NO: 345153 - DNA, 201 bp, Homo sapiens; identical to SEQ ID NO: 72903

SEQ ID NO: 345154 - DNA, 201 bp, Homo sapiens
ctctaagagctcttattttgttatttatcatttttcccaactgaaaattcacctcataaaaaagccttgtttttatttgacttatttttcaggatcccaaratggctgggcgaaaacttgctctaaaaaccattgactgggtagcttttgcagagatcataccccagaaccaaaaggccattgctagttccctgaaatcct

SEQ ID NO: 345155 - DNA, 201 bp, Homo sapiens
agtcgacgcttaggaaaatagaaaagaacctatgtgactatcggggcaagttccccgatacactgatgtttgggaaagtctgtaagggtgcttggttccckggtaactttaaaatcacatgccaattgccttaacacctcccctccacaacaggaaacaggctgtcctgagaaagaaaggaaggacaggacaggtgtttga

SEQ ID NO: 345156 - DNA, 201 bp, Homo sapiens
caatcagataggctcctgtctcatcctgccaaccaaacacaagggtatcattgtggacctttgaggagtattttaaacaaaggcagggcaggatttcaccrtctttgtcagcgccccaagacaacaattcattccatcagctaaaaaagactttagtgatggcaaattttgttacacatttgtcacaaactattggtaaga

SEQ ID NO: 345157 - DNA, 201 bp, Homo sapiens
ttacattaactaaacacattccccctctttccagatggagaagatgaagaacttaattccatttgatcagatgaccattgaggacttgaatgaagctttcycagaaaccaaattagacaagaaaaagtatccctattggcctcaccaaccaattgagaatttataaaattgagtccaggaggaagctctggcccttgtatt

SEQ ID NO: 345158 - DNA, 201 bp, Homo sapiens
gctctgttcattcagcagtagagtgtagccttaatctgggagccagagggctttctgatcagcacaggagttttgacctgctctgtttctgacctgggccrgttcaccccttcttaggcaacctggtggtcccccgctcctgggaggtcaccatattgatgctgaacttggtgaagacacccgatcggcataacgcgctac

SEQ ID NO: 345159 - DNA, 201 bp, Homo sapiens
actgcaggggtgaaataaactccagtctcccatagcgatcccaggcttattaggaaaaggaaattcccacctaataaattttggtcagaccggttgatctsaaaaccctgtctcctgataagatgttatcaatgacaatggtgcccaaaacttcattagcaattttaatttcgctctggtcctgtggtcttgtgatctcac

SEQ ID NO: 345160 - DNA, 201 bp, Homo sapiens
tcctcgccccgcgatcccttcctcagccctccttggcgcgcggggtcaggggggcccggctgtgtcccaggcgccgctgatgtaggcgctgccacaagccktgtctcgtgcagtccgctcccagcgcggcagacttcaatagtttggtggggggactggggaaacattacgcagacagtgttaacctgccgagggacgctc

SEQ ID NO: 345161 - DNA, 201 bp, Homo sapiens
cccgctcctgggaggtcaccatattgatgctgaacttggtgaagacacccgatcggcataacgcgctacagcccagaactcttgggctcaagcaatccacstgcctcagccaggcatgcgccaccacgccccagggggctttcaagttaaatgtttgcccacctcctgggttccttttagcttccttcctgtctccctttg

SEQ ID NO: 345162 - DNA, 201 bp, Homo sapiens
gcgctgccacaagccgtgtctcgtgcagtccgctcccagcgcggcagacttcaatagtttggtggggggactggggaaacattacgcagacagtgttaacytgccgagggacgctcagctggctgcggggctgcgcccttccccttcggcagcttccaggattcgaacgtatagagcgttcagggctcctcgggtgcagag

SEQ ID NO: 345163 - DNA, 201 bp, Homo sapiens
tggtagagacggggtttcgccatgttgcccagactggtctcgaactcctgagctcaggtgatccaccctccttggcctcccaaagtgctgggagtacaggygtgagccaccatgcccagcctctgctttttttaactgtcccttatagctgtaatttctcatccatctatcctcctctgatatttacacaagtctcaatat

SEQ ID NO: 345164 - DNA, 201 bp, Homo sapiens
aaggagttggaattagaaaaattacccaagtagtattcaaatacctaattatttgcttgaaagcactgaaggccaactatggaactcagtggctccaccaragagaagtctggctaggtgctcaggtggcgtgtcctgaccattcagtggctgagccctgtgaaaacaggcattctgtaggtcttcggatgaggaacttgc

SEQ ID NO: 345165 - DNA, 201 bp, Homo sapiens
cagcctctgctttttttaactgtcccttatagctgtaatttctcatccatctatcctcctctgatatttacacaagtctcaatatccagagttcatttgcwtattcattcaaagatgtgtatggagggcctactctgtgccaggtagtgttaagtgctggagccataacactaagcagtcttttttttttttttttgagac

SEQ ID NO: 345166 - DNA, 201 bp, Homo sapiens
tagacaagaaaaagtatccctattggcctcaccaaccaattgagaatttataaaattgagtccaggaggaagctctggcccttgtattacacattctggayattaaaaataataattatacagttctgggtgtgcttcttctctgtggttgagataattaagcctctcttctgagctggcctcactggcagcggggttttt

SEQ ID NO: 345167 - DNA, 201 bp, Homo sapiens
gctttccgtctctgtttacattaactaaacacattccccctctttccagatggagaagatgaagaacttaattccatttgatcagatgaccattgaggacytgaatgaagctttcccagaaaccaaattagacaagaaaaagtatccctattggcctcaccaaccaattgagaatttataaaattgagtccaggaggaagc

SEQ ID NO: 345168 - DNA, 201 bp, Homo sapiens
gctggagtgcagtgatgcagtctcgactcactgcaacctccacctcctgggttcaagtgattcttgtgaagacttgcatgtttctaagatttaaaggattmtctctaagagctcttattttgttatttatcatttttcccaactgaaaattcacctcataaaaaagccttgtttttatttgacttatttttcaggatccca

SEQ ID NO: 345169 - DNA, 201 bp, Homo sapiens
agaatacctcacatgtgctccagccatgaggtcatattgccagcttctgagtatactgataggtgagcctgggtttctccaaaagtcaacaagtagcttaygaaatgtacctgaccaaccagagcattgttctgataatccctccgtgacatcactccccatctccaggcattgggatcccgtggcagttgcagcactgaa

SEQ ID NO: 345170 - DNA, 201 bp, Homo sapiens
gcgcccggcgtggaccttaaaattttaaaaaagtttgtgttaatggcatatttcattggagtgaaacaaaacactggctcccatatgtaaggcccaagaaraacaagatttaagagaaatacgattttctgtttaaatatttttgatttttagaggcccctgtcaaaattgaatgttgaagatgtttgccaaaggcagtaa

SEQ ID NO: 345171 - DNA, 201 bp, Homo sapiens
gtctctactaaaaacacagaaaaaaaaattagccgggcgtggtggctggcgcctgtagtcccagctactcaggaggctgaggcaggagaatggcgtgaacycgggaggcggagcttgcagtgaacggagatcgcgccactgcactccagcctggacgacagagcgagactccaactcaaaaaaaaaaaaaaaaaagtgtgg

SEQ ID NO: 345172 - DNA, 201 bp, Homo sapiens
tgtgaaatgggctctccaaacggagctctttgttcttcttctctcccacttaaccgctctggggtggtcagtctcggtgaagggagccagcatccacacarttgcttggtctagaaacctggagtcctgcttgcctcttctccctccctcatttagtcagtcgccaaggcttgcgtatctttcactttttcccccatgtct

SEQ ID NO: 345173 - DNA, 201 bp, Homo sapiens; identical to SEQ ID NO: 72920

SEQ ID NO: 345174 - DNA, 201 bp, Homo sapiens
ttagtaattccttggtgtttctcctagtataggagttattctatctgacatccaactagatttcaagcatgtctcctctacttgtgcagttaggggttgtrtggtacttggaaagctttctttgagggtgttgggaatgagaagaagccttttgttcttgctccggtgactggaaagttctttgttcttcccagaatattt

SEQ ID NO: 345175 - DNA, 201 bp, Homo sapiens; identical to SEQ ID NO: 72921

SEQ ID NO: 345176 - DNA, 201 bp, Homo sapiens
ataaatttttgtatttttagtagagacagtgttttactatgtcggccgggttcttctcaaactctcggcctcccaaagtgctgggattacagatatgagcsactgcgccttgcctgtctcagaattgttaatagttaggaacagagaggtagtcagaagaactgcagtttgaaaatttgcctttcttgatttataattatg

SEQ ID NO: 345177 - DNA, 201 bp, Homo sapiens
attttattttatatattttgtttatttatttttttgagatggattctcgctctgtcgcccccaggcaggagggcagtggcgtgatctcggctcactacaayctctgcctcccaggttcaagcgattcttctgcctcagccgcccgagtagctgggactacaggtgcctgccaccatgcccggctagtttttgtgtttttag

SEQ ID NO: 345178 - DNA, 201 bp, Homo sapiens
aggtactgtagttgtctaaatcgttggcgtgtgtgcgtgtgtgtgtttctgatatgtggcaagcgcagtgtgtgtgtgtttctaacatgtggcaagcgcaktgtgtgtgtgtgtgtgtgtgtgtgtgtgtttctgtctaatatgtggcaagcgcagtgcccagtgcatcagttgtctcccctaacgtggcattcagtgtcg

SEQ ID NO: 345179 - DNA, 201 bp, Homo sapiens
tagtttttgtgtttttagtagagacagggtttcaccatagtggccaggttggtctcgaactcctgaccttgtgatctgctcaccttggcctctcaaagtgytgggattacaggcgtgagccagcgcgcccggcgtggaccttaaaattttaaaaaagtttgtgttaatggcatatttcattggagtgaaacaaaacactgg

SEQ ID NO: 345180 - DNA, 201 bp, Homo sapiens; identical to SEQ ID NO: 72925

SEQ ID NO: 345181 - DNA, 201 bp, Homo sapiens
cccagctactcaggatgctgaggcatgagaatcgcttgagcctgggagttggaggttgcagtgagctgagatcgagatcgcaccactgcactccagcctgrgtgacagagcaagactccgtctcaaaaaaaaaaaaaaaaaaaagacataaaatagtttacagcaagccattgtgtaaccttgtggtaacatctcacaaat

SEQ ID NO: 345182 - DNA, 201 bp, Homo sapiens
ttacattctgtgctgtagttgattatagagatggtactggtattgcactgtaaagcacaagctctgattccttttttctttcttttcttttctttttttctttttttttttttttttgagacagtttcactcttgttgcccaggctggagtgcaatggcgcgatcttggctcactgcatcccccacctcccaggttcaagt

SEQ ID NO: 345183 - DNA, 201 bp, Homo sapiens
tacattctgtgctgtagttgattatagagatggtactggtattgcactgtaaagcacaagctctgattccttttttctttcttttcttttctttttttctttttttttttttttttgagacagtttcactcttgttgcccaggctggagtgcaatggcgcgatcttggctcactgcatcccccacctcccaggttcaagtg

SEQ ID NO: 345184 - DNA, 201 bp, Homo sapiens
aggctgaagcaggccaaagaagaagctcaggctgaaattgaacagtaccgcctgcagagggagaaagaattcaaggccaaggaagctgcggtggggcaccrtttgtttttgttactgctttagtttctgatcccctgtcccgccaaggctttcagaatatccagcatagctcagagatcctggtcgaagtttgaaaatgtg

SEQ ID NO: 345185 - DNA, 201 bp, Homo sapiens; identical to SEQ ID NO: 72923

SEQ ID NO: 345186 - DNA, 201 bp, Homo sapiens
atcactccccatctccaggcattgggatcccgtggcagttgcagcactgaagtggagaaggagacccaggagaagatgaccatcctccagacatacttccrgcagaacagggatgaagtcttggacaacctcttggcttttgtctgtgacattcggccagaaatccatgaaaactaccgcataaatggatagaagagagaa

SEQ ID NO: 345187 - DNA, 201 bp, Homo sapiens; identical to SEQ ID NO: 72924

SEQ ID NO: 345188 - DNA, 201 bp, Homo sapiens
tggggcctacctgcttccccaaatcaaagatgcatctataccaggaaattaaaataaagtaaaaagaaatagtttctttatagaggaaacaggagagaatyagaccagaaaccagagtaagatttataacagctgagcacttaatttggctctctgagcagacagtaaaacataacaggatgcatgattatcacttgacat

SEQ ID NO: 345189 - DNA, 201 bp, Homo sapiens
ggatggatcacctgaggtcaggagttcgagaccagcctggccaacatggtgaaaccccatctctactaaaaatacaaaaattagctgggcatggtggtgcrtgcctgtaatcccagttacttgggaggctgaggcaggagaatcacttgaacctgggaggtggaggttgcagtgagccgagatcacaccactgtgctccag

SEQ ID NO: 345190 - DNA, 201 bp, Homo sapiens
tgtgagatacggtcttgctctgtcgcccaggctggagtgcagagtggtgcaatatcggctcactgcaaccctggcctcctgagctcaagcaatcctcccacctcagcctcctaagtagctaggactataggcatgcgccatcagactcagctaatttttgtattttttgtagagacaagatctcactatgtagcccaggct

SEQ ID NO: 345191 - DNA, 201 bp, Homo sapiens
tatgcttaaagattttaatagcaacgtaatatttcttttggtgcatgtactatactgtacctaaccattcctctacttttggatacggaagttatttcagttttttttttttttttttttgagacagagtctcaaaaaaactgggggaagagtatataggatttctctgtgttctttcttacagctgcatgtgaatctacc

SEQ ID NO: 345192 - DNA, 201 bp, Homo sapiens
gagtagctgggattgcagtcatgcaccaccctgcccagctaatttttgtatttttagtggagacagggtttcaccatgttgaccaggctgatcttgaactyctaacctcaggtgatccacttgccttggcctcccaaagtgctgggattgtaggtgtgagccactgcgtccagcctcaaatttctgtctctataaatttgc

SEQ ID NO: 345193 - DNA, 201 bp, Homo sapiens
gccaatcagctcattttgtaatcagcccatctcttatgggaatctcatatttagcaggggtgagggggtggggtggagatgtttccatgcctctaggtggkcaagagcgtgcttctttgatccaagcgtgcaaagagccaagtatccctcctaactgccattagccatcccttaaaatatattcgctacctggttattaca

SEQ ID NO: 345194 - DNA, 201 bp, Homo sapiens
tcgcgcctggtcacaattttaatttttaattcagcaaatacgaataaataaaaccacatcaaaaaataaaaataaaaaagatctgcagactctttagtaatttttttttttttttgagacagggtctcactctgttgcccaggctggagagtagcagcacaatcatagctcatagctcaccgcagccttgacggcccaggc

SEQ ID NO: 345195 - DNA, 201 bp, Homo sapiens
acaacagttctttccacatggagttgttatggggatcaaatgagattctcagatagagctctgagcccagcacttggcacacatgagtcggtaaatgcgtrctccctcttctgttgggactgccatattcttcattacgaccccagcccccagcataaggcctggcctgcactatgattctttggtttagagatagctcac

SEQ ID NO: 345196 - DNA, 201 bp, Homo sapiens
ttagagatagctcaccccatctttcctttcccttcatcaatgctactcaactgattttgtatcatttgtgataggttttttaaatgtttatttatttatttatctatgttagagacagggtcttgctctgtcacccaggctggaggttttctcttactgtttttttttttttttcctggttttttttttttttttttttga

SEQ ID NO: 345197 - DNA, 201 bp, Homo sapiens
ggagtttgagaccagtctgggcaacatagcaagaccccgtctctaccacaaaagaaaagaaaaagatggaaggggaaaagagaagagttaaaaataaagcrgaggaagagcagtgagaaaggtgaaggaagggaggaaaggaaggaaacggtgggagggagggaggaaggaaagggagagagggagggaaggaaagggagg

SEQ ID NO: 345198 - DNA, 201 bp, Homo sapiens
tagagatagctcaccccatctttcctttcccttcatcaatgctactcaactgattttgtatcatttgtgataggttttttaaatgtttatttatttatttatctatgttagagacagggtcttgctctgtcacccaggctggaggttttctcttactgtttttttttttttttcctggttttttttttttttttttttgag

SEQ ID NO: 345199 - DNA, 201 bp, Homo sapiens
agagatagctcaccccatctttcctttcccttcatcaatgctactcaactgattttgtatcatttgtgataggttttttaaatgtttatttatttatttatctatgttagagacagggtcttgctctgtcacccaggctggaggttttctcttactgtttttttttttttttcctggttttttttttttttttttttgaga

SEQ ID NO: 345200 - DNA, 201 bp, Homo sapiens
catagtggttgctccagaattttttcctttttttgagaatctacgacagtcactgaaagatgtcctaatgtgtgttgtaggagtgtggggctgattgtgcyaagttccagaagagtgagctagaattcaagtttaatcggaaagccttggagaggccatacacctcgaagcattcctgggggaagacgtacggggagcaca

SEQ ID NO: 345201 - DNA, 201 bp, Homo sapiens
gagatagctcaccccatctttcctttcccttcatcaatgctactcaactgattttgtatcatttgtgataggttttttaaatgtttatttatttatttatctatgttagagacagggtcttgctctgtcacccaggctggaggttttctcttactgtttttttttttttttcctggttttttttttttttttttttgagac

SEQ ID NO: 345202 - DNA, 201 bp, Homo sapiens
taggggtcagccacactggaatcccagagtccctccaagctgtagggacaccccagctgggccaggtttctcccagtagaaaatggtctgggaaccagggmctgggtgtggtggctcacacctgtaatcccagagctttgggaggctgagctggaaggactgcttgaggccaggagctcaagaccagtgtgggcaacacag

SEQ ID NO: 345203 - DNA, 201 bp, Homo sapiens
actgaaagatgtcctaatgtgtgttgtaggagtgtggggctgattgtgctaagttccagaagagtgagctagaattcaagtttaatcggaaagccttggasaggccatacacctcgaagcattcctgggggaagacgtacggggagcacaaacgacatctggagttcagccatgaccagtacagggagctgcagaggtacg

SEQ ID NO: 345204 - DNA, 201 bp, Homo sapiens
cacccaatcgagggtacaattcagtggtgtttagtaatatttacagagttgtgcaaccattaatacaattaccgttagaacattttttatcacccccaaargaaaaactacctattagcagcactcctcaattgccccaattctcccaggcctaggcaaccacttaccgatttttttttttttttgagacagagtctcgct

SEQ ID NO: 345205 - DNA, 201 bp, Homo sapiens
actcctgacctcaggtgatctgcctgccttggcctcccaaagtgctgggattacaggtgtgagccaccgcgcccgcccaggtgattgtattttaagagccyggggctgggaggtccgggtactagtcccatctctgctttggctttctggatggctttggacaagccagtgcaacttctcgaacctgttgcctctcatata

SEQ ID NO: 345206 - DNA, 201 bp, Homo sapiens
ctgcctctggcatggatgaggtgagtcctctgctgctctgtcatttgtcactttagcagaccaagggtcagcaggcagcctggtgacttccggcttagggmcacctccagcccttgctcatcctttctgttcccagctactggagaggctagcaggcgccaaagcccagtgagaatctgtgggaaggatgccattgtttta

SEQ ID NO: 345207 - DNA, 201 bp, Homo sapiens
accatttggccaggctggtctcaaactcccgacctcaggtgatccgcccaccttgtcctcccaaagtgctgggattacaggcatgagccatcgcgcctggycacaattttaatttttaattcagcaaatacgaataaataaaaccacatcaaaaaataaaaataaaaaagatctgcagactctttagtaattttttttttt

SEQ ID NO: 345208 - DNA, 201 bp, Homo sapiens
ccaggtgcagtggctgattcctgtaatcccatcactttgggaggctgaggaaggcagattgcttgagctcaggaattcgagaccagcctgggccacatagygagaccctgtctctaattccattgagctggaatctaggtggctgcagcctttaggaaagggatctggccagctctgctagagacactgtgcaactttagt

SEQ ID NO: 345209 - DNA, 201 bp, Homo sapiens
cactttgttgtaaaggctcctcctctgagtctctgaattcaatctatactggttgaattcctgccatgtatgagatattctgagcagtgtagggggcaacrgagtgcctgctcccaaggtactgcctggggaagactgatcagggaccttgagtgtaaagtaaagtagtgtgcactagttacttctgtgaagctggcactg

SEQ ID NO: 345210 - DNA, 201 bp, Homo sapiens
cttaaggtctctgtcagtctatgttgtttttaaagatggtgatgtcggctgggcgcagtgactcatgcctgtaatcccagcactttgggaggccaaggcgkttggatcacctgaggtcaggagttcaagaccagcctggccaatgtggcgaaaccttgtctttactaaaaataacaaaaattagccgggtgtcgtggtggg

SEQ ID NO: 345211 - DNA, 201 bp, Homo sapiens
ggaagagtacagctcgtgccaggtctcaggtcccatctgctctgtgacctgcctccttaaaattccttcatgtgttcttttgaatgtaaaaaaaattttasttgtaaaaataacattacagaaagtttagaaaatgagaaaagggaaaaaactgacccataatccctctatagcagttctttttatatatttcctcctgaa

SEQ ID NO: 345212 - DNA, 201 bp, Homo sapiens
tgccgctggagctggagctgtgtcccgggcgctgggtgggcgggcaacacccgtgcttcatcattgccgagatcggccagaaccaccagggcgacctggaygtagccaagcgcatgatccgcatggccaaggtgaggcggcagctcccgggacccgggattcgggcgccgggaggggcggggcggggccgcggggagccag

SEQ ID NO: 345213 - DNA, 201 bp, Homo sapiens; identical to SEQ ID NO: 72934

SEQ ID NO: 345214 - DNA, 201 bp, Homo sapiens
tccccaaccaagcagctgctgccctgtgagatggcctgcaatgagaaggtgtgtcctgccggactctactcggttctgctgccgtgtgtggaaaaaggatrggctggcctgagagggatggtcaggaccagccctccctgagccaggctgatgaaatgatcagtgaatgtgctcccacccgtgtcagcttcttcaggcttc

SEQ ID NO: 345215 - DNA, 201 bp, Homo sapiens
acgcccggctagtttttgtatttttagtagagacagagtttcaccatgtcggccaagctggtctcaaactcctgacctcaggtgatccgcccaccttggcytcccaaagtgctgggattacagatgtaagccagtgcacccagccccaactttctttaagacaactcttaaaccttttgtgctagtatcaacattcaaagc

SEQ ID NO: 345216 - DNA, 201 bp, Homo sapiens
tgtgcctcagtctccacgtctgcagcacaggggcctgactgaaataacgtggccaggcacacagcccagacgccagcactgtgtgcactgtgggaggggaygatggtccctagcccagggcctgagctgctgccttgccaattcgtggtgacagctttggcctgggtctggcaggggctggctgctactgctgaaggcctg

SEQ ID NO: 345217 - DNA, 201 bp, Homo sapiens
caggcatggtggcgcatgcctgtaatcccagccactcaggaggctgagacaggagaatcacttgaacctgggagacgggggttgcagtgagccaatatcgygccattgcattccagcctgggcaacaagaatgaaacgccttctcaaaaaaaaaaagaggtttatttggctcatgattctgctggctggaagactgggcac

SEQ ID NO: 345218 - DNA, 201 bp, Homo sapiens
tatgttcgtgtttcttggtgtaaagtgtcagggtcgttggagaccgcctgctgccccgagagcccctggggctgtctcagcaccctgagcgtggctgtggccccatgacgtcctcgtgcattcagggtgtgaagagtgctgtatgggatgtcctttccttcgttggaggagtgtgagggaaaggatgtcagtggactaaga

SEQ ID NO: 345219 - DNA, 201 bp, Homo sapiens
ttctgtcgttttgttggctttattgctgctgttatgttgtccaatttcaaaggcagaaaattagaaaatacagaagaatccaaagcaaataatacaaatctttttttttttttttttttgaggtggagttttgctcttgttgcccaggctggagtgcagtgacacaatctcggctcactgcaacctctgcctcctgggttc

SEQ ID NO: 345220 - DNA, 201 bp, Homo sapiens
cctgacctcaactgatccacccaccttggcccttggcctcccaaagtactgggattacaagtatgagccaccgcgcccggcctctttttttttttttcttwtgagacagagtcattctgtcgcccaggctggagtgcagtggtgcgatcttgactcactgcaacctccgcctcctggtctcaagcgattctcatgcctcag

SEQ ID NO: 345221 - DNA, 201 bp, Homo sapiens
aggaagctgaggcagaaggaccacaagaagtcaaggccgcagtggggtataatcacatcactgcactccaccatgggtgacagaggtgagaccctgttgcaaaaaaaaaaaaaaaaaaagcaaaagaaaagctgcctccatttagcaataatttcaaacatgatgtttgggtacaaaattggtgtacttaatggatatttc

SEQ ID NO: 345222 - DNA, 201 bp, Homo sapiens
ctcctggcctcaaatgtttttttaagtcccagactggtttccagagctttgcttttggggactctgttacctccctaaaggggcatagcttcatttatgtrtgtggacacttgtcactgtgaaccgttttgctctgtgtgcagccagctgtgagtgtgatagagtagcacgggccccgtttttaatagtgatcgactttaa

SEQ ID NO: 345223 - DNA, 201 bp, Homo sapiens
ggatcacttgaggtgatctggacggttccagacacagggctttcctttgtctcctccctgtggagttgaagacagcgctgatgttcccggtgacgttgacwcagagcattgccaaccagagaagcctccgtgtccagaggtttttttttttttttggagatgcagtctcactctgtcactcaggctggagtgcagtggcac

SEQ ID NO: 345224 - DNA, 201 bp, Homo sapiens
tttcctttgtctcctccctgtggagttgaagacagcgctgatgttcccggtgacgttgactcagagcattgccaaccagagaagcctccgtgtccagaggtttttttttttttttggagatgcagtctcactctgtcactcaggctggagtgcagtggcactatcttggctcactgtaacctctgcctcctgggttgaagt

SEQ ID NO: 345225 - DNA, 201 bp, Homo sapiens
ttcctttgtctcctccctgtggagttgaagacagcgctgatgttcccggtgacgttgactcagagcattgccaaccagagaagcctccgtgtccagaggtttttttttttttttggagatgcagtctcactctgtcactcaggctggagtgcagtggcactatcttggctcactgtaacctctgcctcctgggttgaagtg

SEQ ID NO: 345226 - DNA, 201 bp, Homo sapiens
atgggtgtctccagtgtggcatttgctcctggggcttctttatcgggcaaggggacaaggtctggcttcccggagcatccctgttccagccccgtgttgtsccggccatgtgactcacagctcctctcattttcatgagtgtctgggtttgacgagaaatacatgtgccaccctggtgatacgcctccccagcgagggtgg

SEQ ID NO: 345227 - DNA, 201 bp, Homo sapiens
gacgtacgagtacatcatcaaagacaagcacatcctcgccaaggtaacgtgtccctgtgggaaatgccaggccatgggccgagtgctcacacgtgggtcaygctgcccgtctcctccaaagcccctacaagtttcttcccggagtcccacctgcatgtgcgtgaagacagctgccctgtgtaggggaaaggcctaggtggg

SEQ ID NO: 345228 - DNA, 201 bp, Homo sapiens
gaactttctatcagtaaggaaactgaggcctagggttattttctttccacaagggttgtcaagtcaaccacctgggtttgactcctggttttgtctttccrtccctcggtcatcaaggctgccatggcacagaaggacccattcatggtgcctgtagacagaacacaatgtgaatagtgccccctggagttgtgcaagaaa

SEQ ID NO: 345229 - DNA, 201 bp, Homo sapiens
actcttggcctcaagcagtcctcccactttggcctcccaaagcactgtgcttaggtgagcccactgcatctggccgataaagtccttaacttgtgggagayagagtctgaattgagttaaattgtaggacacccagctggtgtttggagacttggagaattacttggaaaagacccacgcatctggtcacagaattgttct

SEQ ID NO: 345230 - DNA, 201 bp, Homo sapiens
tggtcagttgaactacagatgtgtcctctgcatgtgatgtggtcatggccacagggccagagaatccattgcgagtagaggaagggtaggagctcagtgargtctcctgagactgcatctcccatgggtgggctggcatctgggagccgggtggcccctcacctcagcccctcctccgagctggagtagcaggggcacatc

SEQ ID NO: 345231 - DNA, 201 bp, Homo sapiens
aaaagaagaaaaagaaaaagaaggtgtgctgggcctggcatggtgcccgccgcgggtgggatgggagcagccgtcttcacgtgtgtggcctcagccttgtrggtcagggcctgaccgtgtctctctctatttccagaaggcagaaaatgcagaaggacagacgcctgccattgggccggatggcgaggtgaggaagcaggg

SEQ ID NO: 345232 - DNA, 201 bp, Homo sapiens
cctacaagcgcagcaagcgccagtccctgcgcgaggcccgcatcactgagaagctggagaagcagcagaagatcgagcaggagcgcaagcgccggcagaarcaccaggtacgctccggtggccccaaggccctgcagcccgcccacctggctgcctggcttgtccagcggttgccacggggctgtgtttgctttgttccta

SEQ ID NO: 345233 - DNA, 201 bp, Homo sapiens
caagcgccagtccctgcgcgaggcccgcatcactgagaagctggagaagcagcagaagatcgagcaggagcgcaagcgccggcagaagcaccaggtacgcyccggtggccccaaggccctgcagcccgcccacctggctgcctggcttgtccagcggttgccacggggctgtgtttgctttgttcctaaacatgctgcttg

SEQ ID NO: 345234 - DNA, 201 bp, Homo sapiens
gaccctgatgaacaccatcatgcagctgcggaagatctgcaaccacccctacatgttccagcacatcgaggtgagcccgccgcggctgggacggctcaggscctgctgtctgctgagctcctaggcagagctggcttctcctcgacagctctttaaaaacagactcgaatattttcattaggtaatgcctgtacatctgtc

SEQ ID NO: 345235 - DNA, 201 bp, Homo sapiens
ccctgctgtctgctgagctcctaggcagagctggcttctcctcgacagctctttaaaaacagactcgaatattttcattaggtaatgcctgtacatctgtytctcatttggtcttcgcttcaccagtgcttacgggaagaatcccagcagttagggcgcaacgtgcgataggaatatagggccctgaaagcttgccctcag

SEQ ID NO: 345236 - DNA, 201 bp, Homo sapiens
ctttccttttcatcttcccctggcactgggaaatgctctgggtggtgccatgtataacaccctttgtcacagtgctctcatttcgtcgtgtaaaaggccaktccccgcctcgcagtgttggggcagccagcacaggcacgtgagacaggagccacacctgggttctcatctggcatctgcctcttgccatgctcaggttct

SEQ ID NO: 345237 - DNA, 201 bp, Homo sapiens
ctgggcacggtggctcacgcctgtaattccagcactttgggaggccgaggcgggcggatcacctgaggtcaggagttacaaaaaacggaacctaggctcaygcctataatcccagcacttcgggaggccaaggctggcgaatcgctggaatttaagagttccagaccagcctggccaacgtggcaaaaccctgtttctact

SEQ ID NO: 345238 - DNA, 201 bp, Homo sapiens
ctggccaacgtggcaaaaccctgtttctactcaaaatacgtaagttagccgggcatggtggtgggtgcctgtaatcccagctactcgggaggcggaggttkcagtaagccaagattgcaccactgcactccagcctgggtgacagagtgagactccgtctcaaaaaaaaaaaaaaaaaaaaagaaattcaaatctcagtgt

SEQ ID NO: 345239 - DNA, 201 bp, Homo sapiens
ctttcctgcaggaatacctcaatagcattctccagcatgccaaggatttcaaggaatatcacagatccgtcacaggcaaaatccagaagctgaccaaggcrgtggccacgtaccatgccaacacggagcgggagcagaagaaagagaacgagcggatcgagaaggagcgcatgcggaggctcatggtatggtcctgccttc

SEQ ID NO: 345240 - DNA, 201 bp, Homo sapiens
cccagtcattcttgggtgactccaaccctcaggctccttacctcatggttgcaggacggctgcactgcctccctcgcctcatgcaggagagtgggcaggaragagttctaggagagtgggcagggcaaaaggcagcagaagcgcaaggctgctgagcctctgctccccacgcttcttcaggaactctccccagccttcacc

SEQ ID NO: 345241 - DNA, 201 bp, Homo sapiens
tggtgaggtctggggacgcgccagcggccctgccagcccctttccccactacccctgtgaggacgagccctcccgccgtgtcactgggcagttgcaggggrtgcctgtgcccctcttgccacctggccacccggctccaaaagccgagctgtgcatcctgcttcccttgcagggatccccagcagcaagacgggcctttgt

SEQ ID NO: 345242 - DNA, 201 bp, Homo sapiens
ccacccaggctgaatgagagtcccttggggctcccggtggcagagccctccctgagaatcacccgctataagccccatgtggtcagcctggcccctgcagygctcctggcatgagcttggcgtggggtgggtctgtggacactccagtttgtgttactcgtggagaagcagcatgcccgctgccgggggtctttctggtga

SEQ ID NO: 345243 - DNA, 201 bp, Homo sapiens
tcctgcctcagcctcccgagtagctgggattaccggcacctgccaccacccagctaattttttgtatttttagtagagatggggtttcaccatgttgaccrggctgatcttgaactcctgacctcaagtgatccacccgccttggcctcccaaagtgctggaattacaggtgtgagccaccgcgcccggccccattataca

SEQ ID NO: 345244 - DNA, 201 bp, Homo sapiens
gttcaggacgccggggttcacgctggcccgagagcccccaaggccccagcttttcacagccctcccggctcccagacgccccttgctgtgggggtgctgcrttcccagagctcaaggctgtctttccctcccggtcccctccagctcggtccgtcaaagtgaagatcaagcttggccggaaggagaaggcacaggaccggc

SEQ ID NO: 345245 - DNA, 201 bp, Homo sapiens
gtctggcttcccggagcatccctgttccagccccgtgttgtgccggccatgtgactcacagctcctctcattttcatgagtgtctgggtttgacgagaaayacatgtgccaccctggtgatacgcctccccagcgagggtggccgggcttatttcagttgggggaaatggctttgctgaagctttgggtgggtgacgtctg

SEQ ID NO: 345246 - DNA, 201 bp, Homo sapiens
cggtgcagggcaagcggccgatgcccgggatgcagcagcagatgccaacgctacctccaccctcggtgtccgcaacaggacccggccctggccctggcccyggccccggcccgggtcccggcccggcacctccaaattacagcaggcctcatggtaagactggctgccctggccctcaggtgtctcagagcgaatggctgg

SEQ ID NO: 345247 - DNA, 201 bp, Homo sapiens
agccagtttgttgttccctacacgacctcccagagcctttgttgaagctcctgtgcaaggtctgtctcacagcaggacaccccagacctccataccccttktcccgttgatcacttggacctgtgtttgctgggccaacctgcccaggtgccacccggagtgtgccctgtgtgtccctccaaactgcaggtcctccccggg

SEQ ID NO: 345248 - DNA, 201 bp, Homo sapiens; identical to SEQ ID NO: 72958

SEQ ID NO: 345249 - DNA, 201 bp, Homo sapiens
ctaagcctgggtgacagagcgagactctgtctccaaaacaaataaataaacaaataacaagaacaaaattcttggcagccggccaaatctgtgtgcattgmttgccagggtgggcgtgtcatggctgacagcaggtcctggatcgcacctaggggtttgctgctctccagccagctgcttctacctgatgcgcgcccaaga

SEQ ID NO: 345250 - DNA, 201 bp, Homo sapiens
ctgattctagccatcccagcacgtatgaagtgccatctgagtgtggttggatttgcatttccctgatggctaatggtgtggagtatctgttcatatgcttsttggccctttgtgtatcctctagaaagagatgtctagtcacatcatcctttacccaaatttaaaatatatttatcttaatattgaattgtaagttattta

SEQ ID NO: 345251 - DNA, 201 bp, Homo sapiens
cctcccgagtagctggcattacaggcatgcaccaccatacccagctactttttgttttttaagtagatacggggtttcaccaagtcggccaggctggtgtygaacttctcacctcaagtgacccgcccgcctcggcctcccaaagtgctgggattacaggcatgggccaccatgcccagcccatgactcagttttctcatt

SEQ ID NO: 345252 - DNA, 201 bp, Homo sapiens
attggcaacattgttaaaagttgtaaggactgacagcagcaagtgttggggttgatgaagagcacctggaatgctgtccctgtgtgggaggtgggaccgtrtgtgtagatgatacaactattttggaaaactagcaaagctaagtttatgcctccctttataaccaccagtttcattcttggacacccaagaagaaccaat

SEQ ID NO: 345253 - DNA, 201 bp, Homo sapiens
gtccccccccatgagctggggagactcagtcatggggagggaggagagggcaagcccccaagggcctctgaacctggcaggtgctgcacggggctggcagytgcttgtggagctgacgtgagggcccgttctcagcagatggcagctggccctgcaacagcagctgcagatgtctttgagtcagtcgtgcggtgctcctgg

SEQ ID NO: 345254 - DNA, 201 bp, Homo sapiens
agctgcagatgtctttgagtcagtcgtgcggtgctcctggggcttcacccgacccaactttcccagcccaaggcacactgtgacagatgcctggcactgaygtcctcactggggttacggtgacagatcagaccccttcccagctcaggggctctgagttatagagacgatgattcagaatccatccctgaagttgtgtca

SEQ ID NO: 345255 - DNA, 201 bp, Homo sapiens
agagctgtttggctgctgtatgagtgtcaccggccctgcatttttttcttttttaataaagacaaagtcttgctgtgttacccaggctggcctccagttcytgggggctcaagtgatcctcacacctcagcctcctgagtagttcagactacaggtacacaccaacacgcctggctaattttaaattttttgtaaagtggg

SEQ ID NO: 345256 - DNA, 201 bp, Homo sapiens
ttctgtccatatagttttacctgttctgggcgtttcctgtcagtggagtcctacagcgtgggatgctttggtgtcaggcttttttcacgcaatgtaacatrctgacccatgatgcagcaggtgtgttgcattctttgatggtgaaataatcctgcctcgtacagatttgtcacattcggtttttctgtccattcttgatgg

SEQ ID NO: 345257 - DNA, 201 bp, Homo sapiens
tcaggccccggccgccgctggcctgcactgcttcctcttccccctgcagcgcgtgttctgcgtggtgaggtctggggacgcgccagcggccctgccagccyctttccccactacccctgtgaggacgagccctcccgccgtgtcactgggcagttgcagggggtgcctgtgcccctcttgccacctggccacccggctcca

SEQ ID NO: 345258 - DNA, 201 bp, Homo sapiens
agaaggtcccattccgaggttccaggtagacatgagtctggggggcacccgccgctccgccctgggtctgcagggggccttctcctggtgcctcctgcctrctgtgccctccatgctgcttctttgacccggttgccttccatcctcctgggcccctcaggctctcagcttcccatcttctctaagacatgtctgctccat

SEQ ID NO: 345259 - DNA, 201 bp, Homo sapiens
ggatgccatttggctgtgccctgtctcagagtaggagctggtgtagggggaagaggctgtaaaaatcacagacatatgctgccgagtgaccagtgggctgrcctttctctgcaggttacccctcgcccctgggtggctctgagcatgcctctagtccagttccagccagtggcccgtcttcggggccccagatgtcttccg

SEQ ID NO: 345260 - DNA, 201 bp, Homo sapiens
attctctaggaccccgagagccctagcggttgttacgcttgcagttatgatttattacagtgcaaggctacagattaaaatcaaccaaggcaagagatgtrtggggcctcttgggggccaaggtgggcggatcacttgaggtgatctggacggttccagacacagggctttcctttgtctcctccctgtggagttgaagac

SEQ ID NO: 345261 - DNA, 201 bp, Homo sapiens
aaaaagaagaaaaagaaaaagaaggtgtgctgggcctggcatggtgcccgccgcgggtgggatgggagcagccgtcttcacgtgtgtggcctcagccttgygggtcagggcctgaccgtgtctctctctatttccagaaggcagaaaatgcagaaggacagacgcctgccattgggccggatggcgaggtgaggaagcagg

SEQ ID NO: 345262 - DNA, 201 bp, Homo sapiens
gcccccgcccagccccatggaccagcactcccaaggtacagaactgcgttccttcctgccttgtgtttgtcatactccagagtcctcagatcattttcctmccctgggttcccacaggatggattcagggagtacctaggatgatgtagccgggtgggtggcccgccacagagagctgtctggcatggcgtggctggtgct

SEQ ID NO: 345263 - DNA, 201 bp, Homo sapiens
gaagtgattcttctgcctcagcctcctgagcaactgggattacaggctcgcgccaccacgcctggctaatttttgtattttttagtagagatggggtttcwccatgttggccaggctggtctcgaactcccgaccttaagtgatccgcccgcctcagcctcccgaagtgttgggattacaggcatgagccaccgtacccac

SEQ ID NO: 345264 - DNA, 201 bp, Homo sapiens
agccaggcctgcgggcaggcgaggcggggtcctgaggtaagacctgctcctcccgtccactgcaggagcgcattcgcaaccacaagtaccgcagcctcaaygacctagagaaggacgtcatgctcctgtgccagaacgcacagaccttcaacctggagggctccctggtgagggcaccgctgggggttggggatgggccac

SEQ ID NO: 345265 - DNA, 201 bp, Homo sapiens
tagtgctgggcctcagtcatgcagttcccatgcctagtgagccaggttaccgaggctggcgcttcggccacatcctcataggcacgaggaatcctagcccktggggtctccagcacacagccaggcctgcgggcaggcgaggcggggtcctgaggtaagacctgctcctcccgtccactgcaggagcgcattcgcaaccac

SEQ ID NO: 345266 - DNA, 201 bp, Homo sapiens
cccacaggcccgtgtggagagtgcggagccagggatctggggatgctggcaggtgctgatcctgctcctgctctcagaagcaggtgttccttggtgtcccyactctacccctgaggtcaccccgctgaccctgttctcctctgtgcccgtcaggaaccacgaaggcggaggaccggggcatgctgctgaaaaccttcaacg

SEQ ID NO: 345267 - DNA, 201 bp, Homo sapiens
ttttttcacgcaatgtaacatgctgacccatgatgcagcaggtgtgttgcattctttgatggtgaaataatcctgcctcgtacagatttgtcacattcggkttttctgtccattcttgatggacacttgggttgtatccactttcgggctattacaaacaatactaccgtgaacattcacgtacacgtttttgcgtgcacg

SEQ ID NO: 345268 - DNA, 201 bp, Homo sapiens
tggttttggcatctgtgtctggtctcagagccgccgtgggcccgtgccgagcacacagtgtgggggctttgtcctctgagcacgagcggtgtgtgcggacmgcagcggggcccggtggcctgctcctgcctgtcactgacccctctctccttgccttgcaggagtccttttccgagcacttggggttcactggcggcattg

SEQ ID NO: 345269 - DNA, 201 bp, Homo sapiens
ggtcctctctcctgctgttagccatgaaagtggaatgaggtcattttgagcctttcatctcttgtctaagaatatatccctatggctgggtgcagtgtctyacacctgtaattccagcactttgggaagtccaggctggaggatcccttgagccaggatcaacaagtgtttgagaccagcctgggcaacatagagagaccc

SEQ ID NO: 345270 - DNA, 201 bp, Homo sapiens
gccactgcacccggccagtcagaggctatttgagctatagtcctgttctttctgttaggaagataagcaagtggagagcagtgtgaagggtagaccagcaycccctgagacaccctctgccgtgatcaggaatatggcaggagcccctgaaggcccctgtggggcagtgcttgtctgtgagcgtggcccaccccttcctgg

SEQ ID NO: 345271 - DNA, 201 bp, Homo sapiens
cgcctgccattgggccggatggcgaggtgaggaagcagggtttcttgtggaagtatcaagctagccctaaggcgttggtctgtttcagactttaaaacctrtgttcttttaaaattacgaacaatgatatgtgatgatggtgagaatcccagggtgtcctctgacgcccatcccacccgaccccacatcccacatgttgtg

SEQ ID NO: 345272 - DNA, 201 bp, Homo sapiens
gcactgccagctgtcacagccacggtcctttacattgtatacacagagtgcagtgacatgcccctcctgctcaggggccacagtaggaacaggctggagtkttctgtggtaccatgccggcagtgctggcttctgctgtccaggggcttgtggtggctccagtgggaagggccacgtaagcagaacaggaagtgtgagcag

SEQ ID NO: 345273 - DNA, 201 bp, Homo sapiens
gtgagcagtgtccactgggaggagagggacaagtgtcccaggcagagaggacacagtgcatgcagaggctggagggaggctaggggcttgagtggggctgygccagcaccaggggcctcacaggggccctgggccacacacctgcccttagccaagggcgtttctccttggtggtttgaaatctcaaaccacattgaggaa

SEQ ID NO: 345274 - DNA, 201 bp, Homo sapiens
gagtacatcatcaaagacaagcacatcctcgccaaggtaacgtgtccctgtgggaaatgccaggccatgggccgagtgctcacacgtgggtcacgctgccygtctcctccaaagcccctacaagtttcttcccggagtcccacctgcatgtgcgtgaagacagctgccctgtgtaggggaaaggcctaggtgggggcgacc

SEQ ID NO: 345275 - DNA, 201 bp, Homo sapiens; identical to SEQ ID NO: 72947

SEQ ID NO: 345276 - DNA, 201 bp, Homo sapiens
gccaccgcaaggaggtggactacagcgactcactgacggagaagcagtggctcaaggtacatgctggagaggcccagcagctgccgcaggccagcgccagrcagggctggggagacaaagggcccaccgccaggactcaggcctgggtccaaaatgctttccttgggccactcctggccaggctccgcaggcagccgagag

SEQ ID NO: 345277 - DNA, 201 bp, Homo sapiens
cgtgtgtgtgcctttcgctgccgtgtgggtccccatccaccgcagccgtgccgggaccaccagctcattcccacggacgccgccgctcgcctctgagctcrgccgccgcccaccccggcccctcctcagcggcactgacagtttgcaatcttataggaggaagacgaggtgcccgacgacgagaccgtcaaccagatgatc

SEQ ID NO: 345278 - DNA, 201 bp, Homo sapiens
accagatcctcacagtttcctaaggaagagggtgccctgcctggctcccagaaagcataaagcaggctgaaaagccacgtgccaagggcaagatcaccccrggggaccccgtccaccctgtccccacatccgcaccttctagtgagacctctgtcgccctcctttggaggtaacgcttgcttctcctgtcttgggggcttc

SEQ ID NO: 345279 - DNA, 201 bp, Homo sapiens
tcttgctgtgccttattgtaacaggtatagggtggatgctgccatcatgaagagagaggagagctctttgcttataaaattccgtagagtggagaacaggrtgtgccggcttaggagagggaagaggtacaggcccgctctgcccgagctgcagatgggacacacatttcccgactcagaggggagtcgtgtctttctcca

SEQ ID NO: 345280 - DNA, 201 bp, Homo sapiens
ctgtgtctggtctcagagccgccgtgggcccgtgccgagcacacagtgtgggggctttgtcctctgagcacgagcggtgtgtgcggaccgcagcggggccyggtggcctgctcctgcctgtcactgacccctctctccttgccttgcaggagtccttttccgagcacttggggttcactggcggcattgtccaagggtgag

SEQ ID NO: 345281 - DNA, 201 bp, Homo sapiens
gctggcttctcctcgacagctctttaaaaacagactcgaatattttcattaggtaatgcctgtacatctgtctctcatttggtcttcgcttcaccagtgcktacgggaagaatcccagcagttagggcgcaacgtgcgataggaatatagggccctgaaagcttgccctcagagagcaggagcgtttggagacttctctgg

SEQ ID NO: 345282 - DNA, 201 bp, Homo sapiens
ctgtccccacccaccctgtcctcctgagccaggctcaggtatgggtaagagctgggagcgctgtgcacgaggcctggcagcatctcatcactgccgctgtrccgagtgcacaagggcgcttcctgtggtgttcagggggttagatcagtccccagtgaggacagagcagagatccagatgcatcccaggccggctgcagtg

SEQ ID NO: 345283 - DNA, 201 bp, Homo sapiens
ctgatggctccgagaaggacaagaaggtgggccccagagtcccccaactgcattccccactgggtgtccaaggccggcagcgtggcaggcagagcagagcrtgctctgaccatcgggtcatgatctggtcatgatccccagggcatctggccagccctggttatgatggctggtggcttgtgtcaggacacactgactcag

SEQ ID NO: 345284 - DNA, 201 bp, Homo sapiens
ctggccctcaggtgtctcagagcgaatggctggggcgtgggtggcggggtggacagaccgtgctctgttgccgactgggttccccggtttgggattgcacrggcccatactgcacttctgggtgctcgggtggtgggggcagctaaatgctgcttccccagctccccgcttcccctggggccgctggttaataggtgtatc

SEQ ID NO: 345285 - DNA, 201 bp, Homo sapiens
ggtggcaggcttctgtagtcccagctactgggaggctgaggcaggagaatcacttaaacccgggaggcggatcacaccactgcactccagcctgggcgacagagtgagactctgtctcaaaaaaaaaaaaaaaaagtcatgaagtgggaaagtgcatgaagtgggagcttgtgctcagtcctgctgtggctgcctgtcctg

SEQ ID NO: 345286 - DNA, 201 bp, Homo sapiens
gcagaaggacagacgcctgccattgggccggatggcgaggtgaggaagcagggtttcttgtggaagtatcaagctagccctaaggcgttggtctgtttcasactttaaaacctgtgttcttttaaaattacgaacaatgatatgtgatgatggtgagaatcccagggtgtcctctgacgcccatcccacccgaccccacat

SEQ ID NO: 345287 - DNA, 201 bp, Homo sapiens
aaattcctaggagaactgcaaactaaacacttgttcctgagtgtccacagacacttgcttcctggtgtccaaccctgagcacagcccagatgcccggcagygggaactgggcatggctggtgtgtgcccacctcgggacctgctgctgcactcggcaacagggacagcaaggaggcaggaggccaggccaggtttgggggc

SEQ ID NO: 345288 - DNA, 201 bp, Homo sapiens
aggagatggggagatgtacttcatgaacacacgttggggaaggacactcctggaaggcagaggctcaaggcgggctgtgtccaggccaggagattcactcycacctcaatttcctcctcagcacggctggcctggcactggtgcctgcttcagagtttagtgtgtgtaaagtgtggctggcccagcaagcaggggatgatg

SEQ ID NO: 345289 - DNA, 201 bp, Homo sapiens
tcagagcttctgtccccacccaccctgtcctcctgagccaggctcaggtatgggtaagagctgggagcgctgtgcacgaggcctggcagcatctcatcacygccgctgtaccgagtgcacaagggcgcttcctgtggtgttcagggggttagatcagtccccagtgaggacagagcagagatccagatgcatcccaggccg

SEQ ID NO: 345290 - DNA, 201 bp, Homo sapiens
tgttgccgactgggttccccggtttgggattgcacgggcccatactgcacttctgggtgctcgggtggtgggggcagctaaatgctgcttccccagctccycgcttcccctggggccgctggttaataggtgtatctgctgtgtcccctggagccagggctgcccacggggctgggcgcaggcataaacctgggacgcact

SEQ ID NO: 345291 - DNA, 201 bp, Homo sapiens
gaaacccaaccgcggcaggcaaagggtgtccctttattgttttcataatagtctcgtttttattttatgtattatatttatttttttgagatggagtctcrctctgtcacccaggctggagtacagtggtgcgatctcagctcactgcaacctctgtctcctggattcaagcgattcccctgctttggcctcctgagtagc

SEQ ID NO: 345292 - DNA, 201 bp, Homo sapiens
ctgcaacctctgtctcctggattcaagcgattcccctgctttggcctcctgagtagctgggattacaggcatgtgccaccacacctggctaatattttttrtatttgtagtagagatggggtttcactatgttggctgggctggtctcgaactcctgacctcaggcattttgtcctcctcagcctcccaaagcgatattct

SEQ ID NO: 345293 - DNA, 201 bp, Homo sapiens
agcccagggccgccctcagcaggacaccccatccccacccaggggcctggagggtaccctcaggacaacatgcaccagatgcacaaggtagggatccctgygcccgcctcgcacctgcggcctctgcccactagggctgcaggcagcctctggaccgagggccttacttggaggatggggggaagccttcttgttggaggt

SEQ ID NO: 345294 - DNA, 201 bp, Homo sapiens
atgtcctttccttcgttggaggagtgtgagggaaaggatgtcagtggactaagaaagatggttttggcatctgtgtctggtctcagagccgccgtgggccygtgccgagcacacagtgtgggggctttgtcctctgagcacgagcggtgtgtgcggaccgcagcggggcccggtggcctgctcctgcctgtcactgacccc

SEQ ID NO: 345295 - DNA, 201 bp, Homo sapiens
ggacgacgagagcaagaagcagaagaagcgcgggcggccgcctgccgagaaactctcccctaacccacccaacctcaccaagaagatgaagaagattgtgsatgccgtgatcaagtacaaggacaggtaagcgaggaggcggggagggcgggggctgtaggggtccccgtgggagcaggcctggcatctgcactctgactc

SEQ ID NO: 345296 - DNA, 201 bp, Homo sapiens
tgctgccatcatgaagagagaggagagctctttgcttataaaattccgtagagtggagaacaggatgtgccggcttaggagagggaagaggtacaggcccrctctgcccgagctgcagatgggacacacatttcccgactcagaggggagtcgtgtctttctccagggtcaccgagcagcaagcgcatccactgtgtgttc

SEQ ID NO: 345297 - DNA, 201 bp, Homo sapiens
tgccatgaccggggaaaaggtgggtttgcccagctgtgcccatgctgacggttccaggtgcggctggctttgctggttggaacgtgttgagcaccagctayagctggctgggcctgtgctgggtgcctggtgagagtctgcatctgcatggagcaggggagccctggaacccaaggctggggcagccacaagggccccagg

SEQ ID NO: 345298 - DNA, 201 bp, Homo sapiens
gtgcggcagaaaatcgagaaggaggatgacagtgaaggcgaggagagtgaggaggaggaagagggcgaggaggaaggctccgaatccgaatgtgagtcccrggggggttcaggacgccggggttcacgctggcccgagagcccccaaggccccagcttttcacagccctcccggctcccagacgccccttgctgtgggggt

SEQ ID NO: 345299 - DNA, 201 bp, Homo sapiens
cctcaggtctccacagcactgttgctagcctggctctgggcgtgaagcctgtgctctgaagctgcattttcccggcagcaggtccaggcttccccagcccyggcagcattgtttctgtcccccatcacatctctgtgtccctacttctcactctaaagggccttgccctcttttcccagtggcctcccttctgtcctctga

SEQ ID NO: 345300 - DNA, 201 bp, Homo sapiens
aacacagtttctctgcccactcggagggctgtggccatgttggcctcgcccctgacagccagtggctatgggtttgcacagtgagccattgatgagagacyggcacttgactctcatttccttgttccatcagaacgctgtccaactgggcgtacgagtttgacaagtgggccccctccgtggtgaaggtgtcttacaagg

SEQ ID NO: 345301 - DNA, 201 bp, Homo sapiens
tattttgtgtacctgtctcgaggcctaagtaggtgtcagaaccttgccttggagtcatgctggggactggggagatgcgcgtcatcttcgggtggctgttctcggtgccctcgagcttctctcgggcagcgcatagctgcgctgccacctcacgttccacatgctgaccctgccttgccatggtccctctcgcagcccatg

SEQ ID NO: 345302 - DNA, 201 bp, Homo sapiens
tccccagccctggcagcattgtttctgtcccccatcacatctctgtgtccctacttctcactctaaagggccttgccctcttttcccagtggcctcccttstgtcctctgaggcagagcccttcacgtcctcgccagtctctcttcctccctccctccctcagctgccctaaacacagtttctctgcccactcggagggct

SEQ ID NO: 345303 - DNA, 201 bp, Homo sapiens
tcttagtaacataaacgcaaggttcagactgttgtcacatggcagaggccagggcggcatctcataatcagacagatcctgtttctgtagcagaatgtgcraatatccacacggagcagaatcaggtcagattttgcctccagatgaatttccttgcagtaacacatttaggtttgtttatgtcaggggccatcttttcag

SEQ ID NO: 345304 - DNA, 201 bp, Homo sapiens
ttgtaagggttgggggtgtcctgagggatgtcagtgggcagtcggtgttgggtgttccttcaaggtcccactcacttagtgctgggcctcagtcatgcagytcccatgcctagtgagccaggttaccgaggctggcgcttcggccacatcctcataggcacgaggaatcctagcccgtggggtctccagcacacagccagg

SEQ ID NO: 345305 - DNA, 201 bp, Homo sapiens
accacaagtaccgcagcctcaacgacctagagaaggacgtcatgctcctgtgccagaacgcacagaccttcaacctggagggctccctggtgagggcaccrctgggggttggggatgggccactcccacagctgggctttgacccaacccgcccctccttcccttctgaattgatgggttaaaaacaagtcccgctagctg

SEQ ID NO: 345306 - DNA, 201 bp, Homo sapiens
atgggcccttcctcatcatcgtgcctctctcgtgagtacccgctgccagcaacatcccacacgccgctcacacgctcctgtgtttgtttcctaagtttgcygcagtagaataccacaaacgaggtggcttaattacagaaatttgttttcctggaggccagaagtccagggtcaaggtgtagcaggttgcttcctcctgag

SEQ ID NO: 345307 - DNA, 201 bp, Homo sapiens
agatcaagcttggccggaaggagaaggcacaggaccggctgaagggcggccggcggcggccgagccgagggtcccgagccaagccggtcgtgagtgacgaygacagtgaggaggaacaagaggaggtgaggccgggcccccgagcaggcagagctggcatgtggcaggaggcatcccggggccctgatgggacagccctgt

SEQ ID NO: 345308 - DNA, 201 bp, Homo sapiens
cagggcttgattagggttgggtaggaggtgctaggattggggacccaccagacagtgccccgtctcctcagtggcatagagaatgggcagaaacgccaagmccacagtggatagtttttggggtgcagtggggagccggagaagatccacttgctggctttaaataatctcacctctgtctctggcccttcctggctgtgg

SEQ ID NO: 345309 - DNA, 201 bp, Homo sapiens
gcgcatgtgcaagaaatagctcctgagctgagttggaatttctcatccttaaacaatgtgggaacctgctgaggtggggtgggggctcccgggtgggcggrctcgggggtgatagccgccggttctgccttgcagcagcagtggacgtcagctcagcgaggtcttcatccagctgccctcgcgaaaggagctgcccgagta

SEQ ID NO: 345310 - DNA, 201 bp, Homo sapiens
ccgccaccacgcccggctaattttttgtattttttagtagagacggggtttcaccgtgttagccaggatggtctcgatctcctgacctcgtgatccgcccrccttggccttccaaagtgctgggattacgggcgtgagccaccgtgcccggcccacatcagtgttttcttgagcaagtttatttaaagtttggcaggtccc

SEQ ID NO: 345311 - DNA, 201 bp, Homo sapiens
ggcatttcacagctcggagttagaggtgggacagagggaaaagagcaggcgcgggcttgggagtcagtcctgggctcggatatttgctgatctctctgatsatcagaatgactgtgtgacctcaggccacttagccggctcctctgccttctctggaaaatggaggtggtgcccccttccctcgttctgtgagagccaggt

SEQ ID NO: 345312 - DNA, 201 bp, Homo sapiens
gctgtggggtgatgtgatctgatgtattcttagaaaggtggggggctgctgtaggaggtggtgggagggatgcaccttggacttggtggagagaaggcttygggtttggggtgtatttcgtggacagagtgggtaggactggctcatggcctctgtaaatggctgctggcgggactgtctgcctagcgggtgcccttggaa

SEQ ID NO: 345313 - DNA, 201 bp, Homo sapiens
acctcaatagcattctccagcatgccaaggatttcaaggaatatcacagatccgtcacaggcaaaatccagaagctgaccaaggcagtggccacgtaccaygccaacacggagcgggagcagaagaaagagaacgagcggatcgagaaggagcgcatgcggaggctcatggtatggtcctgccttcttgacgtgcgctctt

SEQ ID NO: 345314 - DNA, 201 bp, Homo sapiens
gaggggtaccgcaagctcatcgaccagaagaaggacaagcgcctggcctacctcttgcagcagacagacgagtacgtggctaacctcacggagctggtgcsgcagcacaaggctgcccaggtcgccaaggagaaaaagaagaaaaagaaaaagaaggtgtgctgggcctggcatggtgcccgccgcgggtgggatgggagc

SEQ ID NO: 345315 - DNA, 201 bp, Homo sapiens
gaatacttatttaaaacatgggccaggtatagtggctcgtgtaatcccagcactttgggaggctgaggtgggcggatcacttgaagttaggagtttgagaycagtctggccaacatggcaaaaccccatctctacaaaaaatacaaaaatagaaattaaactggcatggtgatgcgtgcttgagctcccagctcgggaggc

SEQ ID NO: 345316 - DNA, 201 bp, Homo sapiens
gactgcacctgcctgcggcgtaggggagctggggctggcctttccttttcatcttcccctggcactgggaaatgctctgggtggtgccatgtataacaccytttgtcacagtgctctcatttcgtcgtgtaaaaggccagtccccgcctcgcagtgttggggcagccagcacaggcacgtgagacaggagccacacctggg

SEQ ID NO: 345317 - DNA, 201 bp, Homo sapiens
ggcagctggaggcctggctcgagatgaacccggggtgagttgggccttgcattccagatgcagtggggatccaagtcctcggtgggccttgttccagggargtggcagccaggagcaattttacttctgtttgaattcccggcaggtttggtagggaaagtgaattctgctggctctgagcagatttgtatgaaagccctt

SEQ ID NO: 345318 - DNA, 201 bp, Homo sapiens
gctggttaccagaaagaccaagtgcttagagggtggcatgtacggaggggccattgaagctgtctgtattgcttccatctggttgaccccgagtcgtatcygttataataaaccattaatgggaagtgaagtgcctgccttagttctgggcgctgctttagcaaatcaatcaaatcgaggagggggttgtgggaattccca

SEQ ID NO: 345319 - DNA, 201 bp, Homo sapiens
ggtagagggggtgagggctgtaagaagatcacttgcttctgagactgttctccccatgggagtcccgtcccccctctctgggggatgaactgaggtgacaygggcttgtctcttggtaggaggaggaggaagagcagccgcaggcagcacagcctcccaccctgcccgtggaggagaagaagaagattccagatccagaca

SEQ ID NO: 345320 - DNA, 201 bp, Homo sapiens
cctcccaccctgcccgtggaggagaagaagaagattccagatccagacagcgatgacgtctctgaggtggacgcgcggcacatcattgagtaaggggtccygacacaggttgttctgtgccagcttcctgtgaggtggcgctggtgggagtggctagaatcccagccatccctagctgacattcagcactgtccagccagc

SEQ ID NO: 345321 - DNA, 201 bp, Homo sapiens
gacacagtagcagatcaataaatatttgctaagctaattaatggcacttgggaagttttgcagagaaggcggccacggtcgggccccgccttgcctccccwaataggcctcgccgccccaggtcagggatcaaagcggttcccaggcgcgcccttggcccgcgggaaaccactgcccggtcttggtccaggcggcccgtcc

SEQ ID NO: 345322 - DNA, 201 bp, Homo sapiens
ccccagcaacagaaccagggaagccaccatgttgtcgctgccattttccagcgtggtaaacagaagcaagacaaggcgcactcaggacacccaaacagacrgcggggccagccagtggcatgggcgggctgccctgccctctggaattttctgggaaagaacataaggaaagaagcggtgctgatgaggcagctggagtta

SEQ ID NO: 345323 - DNA, 201 bp, Homo sapiens
gcaccccctgagacaccctctgccgtgatcaggaatatggcaggagcccctgaaggcccctgtggggcagtgcttgtctgtgagcgtggcccaccccttcytgggtagactgactgatcttgtgtgcctgagatgtaggacttcctctgagagtgatcatggagaaacggtttgggtggctggtggggaaggtactggctt

SEQ ID NO: 345324 - DNA, 201 bp, Homo sapiens
gggaggccgaggcaggcagatcatgaggtcaggagttcgagaccagtctggccagtatggtgaaacccagtctctactaaaaatacaaacattagccaggygtggtggcaggcttctgtagtcccagctactgggaggctgaggcaggagaatcacttaaacccgggaggcggatcacaccactgcactccagcctgggcg

SEQ ID NO: 345325 - DNA, 201 bp, Homo sapiens
caggcgaggcggggtcctgaggtaagacctgctcctcccgtccactgcaggagcgcattcgcaaccacaagtaccgcagcctcaacgacctagagaaggaygtcatgctcctgtgccagaacgcacagaccttcaacctggagggctccctggtgagggcaccgctgggggttggggatgggccactcccacagctgggct

SEQ ID NO: 345326 - DNA, 201 bp, Homo sapiens
gtctactaaaaatacaaaattagctgggcgtggtggcgcgtgcctgtaatcccagctacttgagaggctgaggcaggagaatcacttgaacccaggaggcrgaggttgcagtgagctgagatcgcaccattgcactctagcctgggcaacaagagtgaaacttcatctcaaagaaaaaaaaaagaaacagagtgtgttttc

SEQ ID NO: 345327 - DNA, 201 bp, Homo sapiens
ggcccatatccataatcccagcactttgggaggctgaggcaggaagattgtgaagattgcttgaggccaggaatttgagaccatcctagacgacatagagrccccccatctcaacaacaaaaataaaaaaattagccaggcacagtggtacacatctgtagtcctagctacttgggaggctgaggcaggaggatcacttga

SEQ ID NO: 345328 - DNA, 201 bp, Homo sapiens
gacaaaagctaggggtggcgtgaaagaagagaccagacctcttctcttcctcaagcagtctccttccacatttgaacgtcaacagatgtttctattttagrtgataattttgatgaagttgaaaataatgagaacatggtagttctcacatcctttgatctttctcttttatttccacaaagacacttcctgggcatttct

SEQ ID NO: 345329 - DNA, 201 bp, Homo sapiens
agctactggctgtgctgacagcggtttgtgcatgttttctttggggtaatttctatgcatggattaacatgcatatatatatatatatatatatatatatwttttttttttttttttttttttttttttgagacagagtcttgctctattgcctgggctagagagctgtggtgcgatcttggctcaccgcaacctctggct

SEQ ID NO: 345330 - DNA, 201 bp, Homo sapiens
agttgagatgggaggatcacttgagcccagaagttcaaggctgtgagctgtgatggcgccactgcattccagcctgggagacagagcgagaccctgtctcaaaaaaaaaaaaaaaattgggccgggcgtggtgcctctcatctgtaatcctagcactttgggaggccgaggcaggcggattgcctgagctcaggagtttga

SEQ ID NO: 345331 - DNA, 201 bp, Homo sapiens
tcacttgagcccagaagttcaaggctgtgagctgtgatggcgccactgcattccagcctgggagacagagcgagaccctgtctcaaaaaaaaaaaaaaaaktgggccgggcgtggtgcctctcatctgtaatcctagcactttgggaggccgaggcaggcggattgcctgagctcaggagtttgagaccagcctgggcaac

SEQ ID NO: 345332 - DNA, 201 bp, Homo sapiens
ctgagcatgcctctagtccagttccagccagtggcccgtcttcggggccccagatgtcttccgggccaggaggtgccccgctggatggtgctgacccccaggccttggggcagcagaaccggggcccaaccccatttaaccagaaccagctgcaccagctcagagctcagatcatggcctacaagatgctggccagggggc

SEQ ID NO: 345333 - DNA, 201 bp, Homo sapiens
cctcctgcctgctgtgccctccatgctgcttctttgacccggttgccttccatcctcctgggcccctcaggctctcagcttcccatcttctctaagacatstctgctccatcattctggtgtctctctcttccctccttcctggcacctgacacgtttgttaccccacttgtggggtgttgctgtctgatcaccatcttcc

SEQ ID NO: 345334 - DNA, 201 bp, Homo sapiens
ggtggagcttgcagtgagccgataccgcaccactgcactccagcctgggcaacagagtgagactccatctcaaaaaaataaataaataaaaataaaaaataaaaatgggccgagcatagtggctcacgcctggaatcccagcactttgggaggccaaggcgggtggatcacatgaggccagaagtttgagaccagcccggc

SEQ ID NO: 345335 - DNA, 201 bp, Homo sapiens
tcaaggaatatcacagatccgtcacaggcaaaatccagaagctgaccaaggcagtggccacgtaccatgccaacacggagcgggagcagaagaaagagaaygagcggatcgagaaggagcgcatgcggaggctcatggtatggtcctgccttcttgacgtgcgctcttctacatgtgtagctggtactgcgggctccaggg

SEQ ID NO: 345336 - DNA, 201 bp, Homo sapiens
gcgacatgtgaccatttccattttaaattaaatcagtcacattacataaaatttaagactcattttctctttcacactggctgcatttcaggtgcttggcrtcccttatctgggaatggtctgcctcatttgcccattttttttttttttttttgaaacggagtctcactctgtcacccaggctggagtgcactggtgcaa

SEQ ID NO: 345337 - DNA, 201 bp, Homo sapiens
gagcgcgtttgccatgcgttctcattttcccagcctgcgggctgggttctgtcagagcaaggtcagctctcagagcttctgtccccacccaccctgtcctsctgagccaggctcaggtatgggtaagagctgggagcgctgtgcacgaggcctggcagcatctcatcactgccgctgtaccgagtgcacaagggcgcttcc

SEQ ID NO: 345338 - DNA, 201 bp, Homo sapiens
tgcttccagtctggtcctcagcgtgcagtgtcatactgcgtcacgttatattctcattttcgtagcctgtcctttggtgacaagcgtttaggttatatttstcatcttttgctcctgtaacacatcacagttaacacagtaatctcttcattgcttatggtaaggaattaatagatcctgttaaaaagcaagtgagggctg

SEQ ID NO: 345339 - DNA, 201 bp, Homo sapiens
gtcatgctggggactggggagatgcgcgtcatcttcgggtggctgttctcggtgccctcgagcttctctcgggcagcgcatagctgcgctgccacctcacrttccacatgctgaccctgccttgccatggtccctctcgcagcccatggagtccatgcatgagaagggcatgtcggacgacccgcgctacaaccagatgaa

SEQ ID NO: 345340 - DNA, 201 bp, Homo sapiens
tcatagctcactgcagtgtccagctcctgggctcatgtcatgctcccgagtagctgggactacaggtgtgcaccactgccaggcttagctaatttttaaawtttttgtagagacagggtgctatacttcctaggctggtttcaaactcttggcctcaagcagtcctcccactttggcctcccaaagcactgtgcttaggtg

SEQ ID NO: 345341 - DNA, 201 bp, Homo sapiens
tgtaaaaggccagtccccgcctcgcagtgttggggcagccagcacaggcacgtgagacaggagccacacctgggttctcatctggcatctgcctcttgccrtgctcaggttcttgcctccagatatagggcatcaaactaagtggtttccaaacttgggttcttggtggggagtgagatcagggtttcttaaaaactgcac

SEQ ID NO: 345342 - DNA, 201 bp, Homo sapiens
ccagtgtgtgttatgccccgagccagtcaagctgaagggagagcgggtgcgggggccctcctccgtgtcccagcccggcccctgggattgcgtcgcggccwctgcttgtcgacctgggtgctggctgtcctattttactactattgaccctgaaggccatcgaggagggcacgctggaggagatcgaagaggaggtccggc

SEQ ID NO: 345343 - DNA, 201 bp, Homo sapiens
agggaggtggcagccaggagcaattttacttctgtttgaattcccggcaggtttggtagggaaagtgaattctgctggctctgagcagatttgtatgaaakcccttacattttttctaggtatgaagtagctccgaggtctgatagtgaagaaagtggctcagaagaagaggaagaggtaagagtgcatttcctggctttc

SEQ ID NO: 345344 - DNA, 201 bp, Homo sapiens
tgagtatacagtttacgcattttcccaccactggccatgtttgcctgccattttctgtgcaaacagttgagtgggtgcttcccaccttggcctctgtaagygtttggtctggaggccctgcaacctcagtgtcacacgaatgactctttttcagcctctggacgagaccagccagatgagcgacctcccggtgaaggtgat

SEQ ID NO: 345345 - DNA, 201 bp, Homo sapiens
ctcacggagctggtgcggcagcacaaggctgcccaggtcgccaaggagaaaaagaagaaaaagaaaaagaaggtgtgctgggcctggcatggtgcccgccrcgggtgggatgggagcagccgtcttcacgtgtgtggcctcagccttgtgggtcagggcctgaccgtgtctctctctatttccagaaggcagaaaatgcag

SEQ ID NO: 345346 - DNA, 201 bp, Homo sapiens
atgcttttgtaggctgaagatgaggaggggtaccgcaagctcatcgaccagaagaaggacaagcgcctggcctacctcttgcagcagacagacgagtacgwggctaacctcacggagctggtgcggcagcacaaggctgcccaggtcgccaaggagaaaaagaagaaaaagaaaaagaaggtgtgctgggcctggcatggt

SEQ ID NO: 345347 - DNA, 201 bp, Homo sapiens
gcagaggccacagcaggcggagaggctctgccaaagttgtggcctggtggcctcaagggatgaggtgggatgaggggttatatggcagtaatgggtgctgyccgtgtggccaggaggttggggacaagaggctggcatgtctggagcagagaaagtggcagccctctcctgtccttgcaccctcccaggctacctgtgcca

SEQ ID NO: 345348 - DNA, 201 bp, Homo sapiens
cagtgcccactggcagtgacttccaccctgtgtgttgtgaccgtctcctgccctggctgggcatcttgtggggcagggaacagcagggcccaggcctgccygaagtcggtgctttagagctgtcctatccaatagggcagcttctggcgacatgtgaccatttccattttaaattaaatcagtcacattacataaaattta

SEQ ID NO: 345349 - DNA, 201 bp, Homo sapiens
gggcatctggccagccctggttatgatggctggtggcttgtgtcaggacacactgactcagctgccagtggcttctcctttgcctatgaaacactggctcsttctgcaattggcagcctgggcccagcactaaccccagcagggttagagtgttctagaatgccccccttctctgttattaagtgaaaggaagggagcggg

SEQ ID NO: 345350 - DNA, 201 bp, Homo sapiens
agctgtccaggggcaacacagggctggggctggggctggggccagggccgggcaggcagccctccagtcgggcccatccactcaagcccctggtgtctctgcccagatctatgaagactccatcgtcttgcagtcggtcttcaccagcgtgcggcagaaaatcgagaaggaggatgacagtgaaggcgaggagagtgagga

SEQ ID NO: 345351 - DNA, 201 bp, Homo sapiens
tttatagtgccttttttttttttgagacggagtctcgctctgtcacccaggctggagtgcagtggagcaatctcggctcactgcaatctctgcctcccggrttcaagtgattctcctgcctcagcctcccgggactacaggtgcatgccaccaaacccggctaatttttttttgtatttttagtagagacagggtttcacc

SEQ ID NO: 345352 - DNA, 201 bp, Homo sapiens
tgtcacactccttcaagcccccagggcagggcccctgagggaagggtgcaggtggagggtgggcaggagtgggagccattccttggggacaggggggctcmtcagggctgtctggcccttggcctgtggttccaggtctatggtctgcttggcacatagcctggaccctggtgctgtgcaggcactggctggatgagggca

SEQ ID NO: 345353 - DNA, 201 bp, Homo sapiens
ccatccagagctcattacaaggccccacaagacaaccagtacaactccaaccaaagaacagctctctctggttttcaatttggttgtttcttttcttttcttttttttttttgaaacggagcctctctgttgcccaggctggagtgcaatggcgcgatctcagctcactgcaacctctgcctcccgggttcaagtgattct

SEQ ID NO: 345354 - DNA, 201 bp, Homo sapiens
gtgcagccttgtgcagcttgtgtgtcctgagaattagggcaccaaggggttcccgcaggggcagcctgcagcaagcagtctccctctatctcagggcaggygggggtctcaaggcctccctgcccttgtcacagcccgggccacctatgcttgtctctcttctcccagatggacatgtggacggcgctgctcatcctgcaa

SEQ ID NO: 345355 - DNA, 201 bp, Homo sapiens
agactgtccctcaaatcttgctgtctaaccaggaaaacactccaaagccagaataatatcttcgaattgccaatttctttctttctttcttttttaagctyttttttttttttttttttggagacaaggtttcattgtttttcacccaggctggagtgcagtggtgcaatcggggcttactgcagcttcaatctcccgggc

SEQ ID NO: 345356 - DNA, 201 bp, Homo sapiens
cgtgtcctgctccagggaagtccagggctcacatgacccaaggggagggctcccgggacagccctcggagaaactgcatcatcctcactaatgatccactycctcctcagggaataaaggctcagggaccggcagttctactctagagcccaccagcctctcagagcctccggtgactggcctgtgtctccccctgggtga

SEQ ID NO: 345357 - DNA, 201 bp, Homo sapiens
acacacaggtaagcccttactcagagaaagaaggtgcaggagatgtgtcttgggtaatcacagccacagcctctcaagtgtgcacacacacacacactcayactgagatacacagacacacagagatacctggacgtgtcaagcctacagcacaaacaggcccctgcaggtccacccggaggctgtgtgggccgaggctgc

SEQ ID NO: 345358 - DNA, 201 bp, Homo sapiens
aattcccgacctcaggtgatccacccgcctaggcctcccaaagtgctgagattacaggcatgagctactgctccggcttatttgttactttgcgcgcgcgygtgtgtgtgtgtgtgtgtgtgtgtgtgtgtgtgtgtgtatcttggtataatttgctactttatagatgtcaatactgttgaatttgttacaaggtgtatg

SEQ ID NO: 345359 - DNA, 201 bp, Homo sapiens
cagattgcatactctaagatctccaagcgctggtgagccaccctcagccctgccttccgagatcctcacatagcagggacacaggggccctgtggcttgakctgaccctgggacttctgcgcccaagatgtgcacccacgacctctatcccctccacaggaacttccccagccctttctaccgcctgcacttcaagatccc

SEQ ID NO: 345360 - DNA, 201 bp, Homo sapiens
tccacacggcccgggaaatggccaatgccaaggagatcgctcggactgtgcagatcctgggtgcagacttcatcctgtctctaggggacaatttttacttyactggtgtgcaagacatcaatgacaagaggttccaggtctgtgcccaacagagtggggcaggaggtgggggcgggcagtggggagaagccgccttaccta

SEQ ID NO: 345361 - DNA, 201 bp, Homo sapiens
tcctgcctggttcctcctgcaggaatgggagtctggggggaggggagggtgtgggcaggacttcctggaaaagggaagcccgttggtgtttatgtgtgggrtggagagagggcagggggaggacggggacacacgcggagtcccccacccagatgttgtcaaacacagctcccacaccagacacgcaacccatcctagaga

SEQ ID NO: 345362 - DNA, 201 bp, Homo sapiens
cgtgtgcccagatcctcccacccccaccccaatcccgtgtcctgctccagggaagtccagggctcacatgacccaaggggagggctcccgggacagccctmggagaaactgcatcatcctcactaatgatccacttcctcctcagggaataaaggctcagggaccggcagttctactctagagcccaccagcctctcagag

SEQ ID NO: 345363 - DNA, 201 bp, Homo sapiens
cagtgtctcccttatcctgacttggtgggaggatcggcatagccactgaccccagggaagaggcctgccctatctgtttgctacaggagacctttgaggaygtattctctgaccgctcccttcgcaaagtgccctggtacgtgctagccggaaaccatgaccaccttggcaatgtctctgcccagattgcatactctaaga

SEQ ID NO: 345364 - DNA, 201 bp, Homo sapiens
gctcaagaaacagctggcggcggccagggaggactacgtgctggtggctggccactaccccgtgtggtccatagccgagcacgggcctacccactgcctgrtcaagcagctacggccactgctggccacatacggggtcactgcctacctgtgcggccacgatcacaatctgcaggtgagggccctgtgggtggggtggga

SEQ ID NO: 345365 - DNA, 201 bp, Homo sapiens
ggctacgtgctgagtggggctgggaatttcatggacccctcaaagcggcaccagcgcaaggtccccaacggctatctgcgcttccactatgggactgaagmctcactgggtggctttgcctatgtggagatcagctccaaagagatgactgtcacttacatcgaggcctcgggcaagtccctctttaagaccaggctgccg

SEQ ID NO: 345366 - DNA, 201 bp, Homo sapiens
cttcctcagccagcagcctgagaggccccgagacgtgaagctggcccgcacacagctgtcctggctcaagaaacagctggcggcggccagggaggactacrtgctggtggctggccactaccccgtgtggtccatagccgagcacgggcctacccactgcctggtcaagcagctacggccactgctggccacatacggggt

SEQ ID NO: 345367 - DNA, 201 bp, Homo sapiens
gacttctgcgcccaagatgtgcacccacgacctctatcccctccacaggaacttccccagccctttctaccgcctgcacttcaagatcccacagaccaatrtgtctgtggccatttttatgctggacacagtgacactatgtggcaactcagatgacttcctcagccagcagcctgagaggccccgagacgtgaagctggc

SEQ ID NO: 345368 - DNA, 201 bp, Homo sapiens
gcttacccttgtggaactgggggctgtagtggatggaggggtccctcctctgggccagcaccagcgtcaggttgccagtgacggccaggacaaaggccaaygtggcacagatccagaaggggcctgggggtagggggcacagtcagggtcccgggccctgcactcccaggacaagcagacatgtatcctgactgagctgtg

SEQ ID NO: 345369 - DNA, 201 bp, Homo sapiens
agccagctgtggcttttggagccctgggccccaaacacggccagacacccagctgcccactcgcccagacagggtacacaggatctcctggcacctctgcygtcccatgtcctgctcctgcgggacagcctctggctgggagtggggattgggacaggttctgtggtcagcagttccccaacaagccctgctctcctcaca

SEQ ID NO: 345370 - DNA, 201 bp, Homo sapiens
ctgctcctggtccttgtcctgtgtcaccgtgttggccatagcgacctcttccagagctcgccaaagccagggtcccgtctcccctggttcctgccgtgtgyctgatttctttgtggcatcagtagtgtctgcccccttcgcctgtgccacatctggaatcacatctggcgaagcagcctgcaggtcctggggcggaaggcg

SEQ ID NO: 345371 - DNA, 201 bp, Homo sapiens
ttccaggccactgtgggtgtctcctctgcaaagggcctcctgctggcctagtccccatagagagctgcagcccagctcctgccatgtgtcacaatgtgacrgaccctctttagcaccaggaagcaggcttgattgcctccttgtagtggtgaggctcaggggtcaactagcctggcctggcattgcccaggcccagagcac

SEQ ID NO: 345372 - DNA, 201 bp, Homo sapiens
gcttctgggtccccagctgagccacctggagactgtcatcgctctgttgcttggtttcccctcttaaaaataggactaaggtcgacctggagggtggtttsagcactaaccgaggccctgcacagccaacacctaagagtgcttcctggggctccataaatcacagcttcaaagtcttggcccgcgggagaagaaagactg

SEQ ID NO: 345373 - DNA, 201 bp, Homo sapiens
aggtggaccagaccggctccaagtccagtaacctcctggatctgaaaaaccccttctttaggtaggaggggccccttgcctgcacaggggggcgccccggscctgcaacccccttgcccctgcccatggctctgtctctgccatagatacacgggcacaacgccctcacccccacccggctcccactacacatctccctcg

SEQ ID NO: 345374 - DNA, 201 bp, Homo sapiens
tcttcttctttggggccctcaagatgaggcaggtggcccccgatgccagaaccctgcctgtggcaaatcttgagttctcctgggcggcttccaggtccagrcggcatcagctgttgccatcggctgcagtgatagtggcggtgtcctcctgggggctgccctccggcttcctgctccctctcctggagctgctagtggggc

SEQ ID NO: 345375 - DNA, 201 bp, Homo sapiens
catgcccaggactgcccaggggccgggaagggcctgtggtgaccagggtcggcctctgcttggtcctttcaccttttcctcttcctgggggctctcggccraggctctccgtcctctctgcctcgctctgcagcctgctgctgtgcatgggctgggtggctgggggcggtgacgccgtctcccttccttctttcctccctc

SEQ ID NO: 345376 - DNA, 201 bp, Homo sapiens
cattcaaattccacatgctgcattcagggctggtccacggcctggctttctggtttgacgttgctttcatcggctccatgtgagtgccgcagagcagcccrtgctgcctcctccccactcccagggcttcctgcagctgcaacctggctgggggggtggaacatggctccaggttccaccatcccttccaatgggagtgag

SEQ ID NO: 345377 - DNA, 201 bp, Homo sapiens
tagcacacagcacacatgcaatacatgtggaacattattaggtgaggctaaggcagagggggcatttaggctcaggagttcaagatcagcctgggcaacayagagacgccatcgctatttttaaaattaaaataaataaataataaaaataaaaaagaaccattactagatgaatttatccttggtgagctgatgtgattt

SEQ ID NO: 345378 - DNA, 201 bp, Homo sapiens
ctcttactggacattgcagtgtctgctgcccccacacagatgctgccctgagcttctgggtggacttgggcttatttgccagagctttgactcctgggccrgtgggcgtgtgcttgagagagcttcaccaagctgccctttggtgaggaatccccaggcccactcccaccagacagcagccccacatgcaggctacctgcc

SEQ ID NO: 345379 - DNA, 201 bp, Homo sapiens
tggcttctatgtccccacctccaagaggcccatcctgaccacctgggaccagtctttctggcagtggccagccctgggccagctgtgactgggccagcttrtggatggagtgaggcgaggtcctagaggcaggaagagtttgctcagggcgcagagaagccaccagaagggcttaaccaacccaccttgggggcacaggtg

SEQ ID NO: 345380 - DNA, 201 bp, Homo sapiens
gctggtcttgaactcctgggctcaagcagtcctcctgccttggcctcccaaagtgctaggattacagacgtgagccactgcgcccggccaataaatatttrtgtccatgttactgacagcagtgttcgttggtgtggcatgggaatgagctagcttttctaggaggagccccctatgctccagggctgccccgctgtcttg

SEQ ID NO: 345381 - DNA, 201 bp, Homo sapiens
gcttctatgtccccacctccaagaggcccatcctgaccacctgggaccagtctttctggcagtggccagccctgggccagctgtgactgggccagcttgtggatggagtgaggcgaggtcctagaggcaggaagagtttgctcagggcgcagagaagccaccagaagggcttaaccaacccaccttgggggcacaggtgga

SEQ ID NO: 345382 - DNA, 201 bp, Homo sapiens
ttccgaggctggcattgatctgttgctgatgatggtaacagcagctgctcttgtttatgaagtacttaacacctccagctccctccattacctaggaatcytcactgcagggaggggttttcatccccattttgtgcctattttatttatattattttattttttgaggcagggttttgctcttgttgcccaggctggagt

SEQ ID NO: 345383 - DNA, 201 bp, Homo sapiens
gttgcccaggctggtcttgaactcctggcctcaagtgagccacctgcctcagcctcccaaagtgctgggattacagatgtgagccaccgtgcccggccccttttttttttttttttttttttttgagaaagagtgtcactctgttgcccaggctggagttcagtggtgctatcttagctcactgcaacctccacctcccgg

SEQ ID NO: 345384 - DNA, 201 bp, Homo sapiens
ggcttctatgtccccacctccaagaggcccatcctgaccacctgggaccagtctttctggcagtggccagccctgggccagctgtgactgggccagcttgkggatggagtgaggcgaggtcctagaggcaggaagagtttgctcagggcgcagagaagccaccagaagggcttaaccaacccaccttgggggcacaggtgg

SEQ ID NO: 345385 - DNA, 201 bp, Homo sapiens
accgtgtcttttaatttttaaagagattgtcttttaaatattgttttgttttttacttgatataatttagtggctattattctatgttaataaatatagcwttattttattttattttattttattttattttattttattttattttattttattttattttgagacagagtctcactctgttgcccaggctggagtgca

SEQ ID NO: 345386 - DNA, 201 bp, Homo sapiens
gcttggcttctatgtccccacctccaagaggcccatcctgaccacctgggaccagtctttctggcagtggccagccctgggccagctgtgactgggccagyttgtggatggagtgaggcgaggtcctagaggcaggaagagtttgctcagggcgcagagaagccaccagaagggcttaaccaacccaccttgggggcacag

SEQ ID NO: 345387 - DNA, 201 bp, Homo sapiens
aggtgaatggcatgaacgcaggaggcagagcttgcagtgagctgagatcgcgccactgcactgcagcctgggcaacagagtgagactccatctcaaaaaamaaacaaacaaacaaaaaaaacaaaaagcaagaaaaacaaatgcatttgatatataaactcaacacagcatgtacattataggcttgagaggcctctatca

SEQ ID NO: 345388 - DNA, 201 bp, Homo sapiens
ttgccctcagccccggcatctttggcccaagcccagccctagccctggctgggcacagccaggcttcacttggccacaggtcctgtagttgcctgcctggygccaggtcagagagggacgcctcaggcaacatcgggttgccaggctgcttggtaaacaggcctccctgggcccacttgctgtcgcccaggtgtggctaac

SEQ ID NO: 345389 - DNA, 201 bp, Homo sapiens
cgcgcatgtgcccacctctctgcttctgtctcggttttttttttctttgctcattgattttatctttaattttctcagattagaaatgcatttatctcagytactgcagaggctgaggcaggaggatcgcttcagtccatgagtttgaggctgcagtaagctatgattctgccactgcactccagcctgggcgacagagcg

SEQ ID NO: 345390 - DNA, 201 bp, Homo sapiens
gcatttatctcagttactgcagaggctgaggcaggaggatcgcttcagtccatgagtttgaggctgcagtaagctatgattctgccactgcactccagccygggcgacagagcgagactcttgtctcttaaaaaaaaacaaataaacaaggccaggcgcggtggctcacgcctgtaatcccagcactttgggacgcccagg

SEQ ID NO: 345391 - DNA, 201 bp, Homo sapiens
taaagcttaaactttacaggtgggatgtaaatgttgaggcgggaggatcgcctaaggctgggagtttgagaccagcgtgggcaacatagcaagaccccatstctacagaaaaataaaaaattagccttccatggtggtgcatgcaagcctggggtcccaggtactcaggtggctgaggcaggtggattgcttgagcccagg

SEQ ID NO: 345392 - DNA, 201 bp, Homo sapiens
gaggtgccgcggtggatgagtatttccggcagcctgtggtggtgagtagggcctccagggtactgctgcagtgatcacttgccattgctgtgcagctgtgyagccctcaggaagctacagcccctctctgagccctctcctctgccctgcacagcgctctcacagagatttgggccaaaagtgtcaatgcatgtagacact

SEQ ID NO: 345393 - DNA, 201 bp, Homo sapiens
gcttgttctgggagattccaagctgaggaaagcagggctgtccgccagcctccagctgggtcacagaagaggctcagggcctgttcccactcccctccccmagccagcagggtccaaaaggatgttgggggggtggtccccagtccggcctgcccactctagggaggggcccagataacttgcgtagacgccggccctccc

SEQ ID NO: 345394 - DNA, 201 bp, Homo sapiens
gctcgatcatttaacatgtcagtgtgtaccgatggaaattgatctcttttaatttgccacatcttcatttattcattctttgattaattgatggatatttmggttttctgctttgggggcattcagatccaggtgtatctctgcaagtagagcttgtagcatacataaggccctgcaaagggatttctgggccggaagttt

SEQ ID NO: 345395 - DNA, 201 bp, Homo sapiens
tcagcctcctgagtagctgggactacaggcacccgctaccacgcccggctaattttttttatttttagtagagataggttttcaccgtgttagccaggatrgtctcgatctcctgaccttgtgacccgcctgccttggcctcccaaagggctgagattacaggcgtgagccaccgccccctgtcattgtgcccattttata

SEQ ID NO: 345396 - DNA, 201 bp, Homo sapiens
ggccgtggcaggtgagcagggcccaccccaatgcccagccaacccgggaggccgccctcgccgcaggcctggcccctctgcctccagccctgacgtctccytctctggacacagggatgccgaccgcctatgacttgagcagtgttattgccagtggctccagcgtgggccacaacaacctgattcctttaggtgagtgtc

SEQ ID NO: 345397 - DNA, 201 bp, Homo sapiens
gggcttctcctcccggaggactggcccatggctcatcttgagttctcgcttcattttgaccaagagcccataaagggcaaacattgagagtgaagacagaygcctcatgatgtgcacatcccttatgatcactgtcacctccccatcaccgtcgcctcctatgtctcgctctcacctcccactcctccctcagatcgttct

SEQ ID NO: 345398 - DNA, 201 bp, Homo sapiens
cctcctaaagtgctgggattacaggtgtgagccaccgccaacagcctcacatatggctaatttttaagtttcttctagcgatgcggtctcactattttgcycaggctggtcttgaactcctgggctcaagcagtcctcctgccttggcctcccaaagtgctaggattacagacgtgagccactgcgcccggccaataaata

SEQ ID NO: 345399 - DNA, 201 bp, Homo sapiens
gtgtttcccaggctggccccaaacccctggcctcaaaccatcctcctcctgcctgagcctcagaagtagctgggattatagtcacgaaccgctgggcccgktgtggcctatttttgtacagacaaagctaagaaaggcttttacagtttttgagagattgattagggaaaaaaactaaaacccaatccacaaacaacaata

SEQ ID NO: 345400 - DNA, 201 bp, Homo sapiens
agctattccagaggctgaggcgggaggattgcttgagcccagaagcttgaggctacattgagccataatcgtaccactgcactccatcccgggaaacaggrcaagaccttgtctctaaaaaaaaatgcttcttgcttgatgacttgtgatatatgaaaaggaagaaagaaaagaaaagctttgccctgtgtgcctggcccg

SEQ ID NO: 345401 - DNA, 201 bp, Homo sapiens
tcacttaaaacaagctgaggggctccaggatgctgggggaggggctctgcttagagggaggctgagggcagagtcgtgcttgtggtaagagctctagcagrggccagctggcaagtcctgatccactccttagcatcccggtgaccactttgtgcctcagtttccttggctgtcagttgtggatcttgacatcgtctaccc

SEQ ID NO: 345402 - DNA, 201 bp, Homo sapiens
tccagtgcactctgtctttttttttttttttttttttttttgagacagggtctcactctgtcgcccaggctggaatacagtggagcgatttctgctcattrcaacctccgcctcccaggttcaagtgattcttgtgcctcagcctcctgagtctctgggactataggcatgtgacaccatgcccggctaatttttgtgttt

SEQ ID NO: 345403 - DNA, 201 bp, Homo sapiens
ccatgggctacatgctcttcaacgagcgcatgctggagagctacctccacgccaagaagtacctgaagcccagcggtgagcactggggggtacacaggccrggcccctcggtggaggccctggctgccgctgagccaggccatcagtgcttcagctccctgcttactgtcggtggcccggggtgtagggaagcctgggctt

SEQ ID NO: 345404 - DNA, 201 bp, Homo sapiens
atcgtggtcatcccgggcaaggtggaggaggtgtcactccccgagcaggtggacatcatcatctcggagcccatgggctacatgctcttcaacgagcgcawgctggagagctacctccacgccaagaagtacctgaagcccagcggtgagcactggggggtacacaggccaggcccctcggtggaggccctggctgccgct

SEQ ID NO: 345405 - DNA, 201 bp, Homo sapiens
ttgatctcccccaaggtggggcccaacttcctcagtttggaggcatccggaggacatctgttcccttcctcctaaagtggaactgcaacttagggttgacsctgggatggggtcagggtctggggacgagaggctcgggtttgaggtctgagttcagggcgggggcggggttcgagtcagagatgggtctcactcctgggt

SEQ ID NO: 345406 - DNA, 201 bp, Homo sapiens
gcgggccattgcactccagcctgggtgacagagggagaccaaaactgagtcagtgttcccaagcagtgtgtgaagctgattctctgtcagccacgtgccaratgggttgggtcccaggggtggccacctgggggacagggccagacacttgttctgggcccaatatggccttgtgtccagaactctctcggtggctccttc

SEQ ID NO: 345407 - DNA, 201 bp, Homo sapiens
aaggtcacctctgccagggcagtggggcctggctcaggtgtcgcctcctcccgagtctgcctggaatctgaattgggcctggtccgcatgcatcagcttcygtgctttccctcctctcagcgcttactgccagttcctgttgtccgtctcctcactgccctgctgggtgctgtctgcctcccactgtggactcccagcatg

SEQ ID NO: 345408 - DNA, 201 bp, Homo sapiens
tactgccagttcctgttgtccgtctcctcactgccctgctgggtgctgtctgcctcccactgtggactcccagcatgggagggccgggggtggctctctgkttcaccgccaggtcctctgtgcctgcatgtggtccgggcagagcaggctgagcagagatgccagctgagtgggcttcagaaagcgtgtttttttttccgt

SEQ ID NO: 345409 - DNA, 201 bp, Homo sapiens
acctgaccccagcttcccctgcaggcactcaccatgcccagagcatttgtccttcaaaagctcatgcctgtcaccaccaggaatgtctgtccttggtctgmtcgtgtggaagcaatcccacaaatccagaacaggtggtgtgttctcccagaccctggcctggactctgccatgagtgaccaccacgggccagtagccctg

SEQ ID NO: 345410 - DNA, 201 bp, Homo sapiens
tatgacttgagcagtgttattgccagtggctccagcgtgggccacaacaacctgattcctttaggtgagtgtcccccagggccaggggcagcagggagccrtgcccaggactgcccaggggccgggaagggcctgtggtgaccagggtcggcctctgcttggtcctttcaccttttcctcttcctgggggctctcggccga

SEQ ID NO: 345411 - DNA, 201 bp, Homo sapiens
gatggaattttgcccaggctggagtgcaatggcgtgatctcggctcactgcaacctctgcctcccgggttcgagcgattcgcctgctttggcctcccaaartcctgggattacagggattagaggcatgtgccaccatgcccggttaattttttttgtatttttagtagagatggggtttctccgtgttggtcaggctggt

SEQ ID NO: 345412 - DNA, 201 bp, Homo sapiens
tagctcattgcagccttgaacacccaggctcaagggattctccctccctcagcctctctacaggctgggaccacaggcgcacatcaccatgcctggctaatttttttttttttttttttttgtagagacagggtctcactatgttgctcaggcggatgtggaactcctgggctcaagcgattctcctaccttggcccccaa

SEQ ID NO: 345413 - DNA, 201 bp, Homo sapiens
tcggctcactgcaacctccgcctccccagttcaaaggattcttctgcctcagcctcccaagtagctgggattacaggtgttcaccaccatgcccggctaatttttttttttttttttttgtatttttagtagagacggggtttctccaagttggccaggctggtctcgaactcctggcctcaggtgatccgcctgcctcag

SEQ ID NO: 345414 - DNA, 201 bp, Homo sapiens
agcaccttgcctgactcaccaggacaccgggggcctcctggtggctgagcccagtgctggctgtcagttcatccccctccccgaaacactcaggactgcamacccttggcctgtgtctcacctcattggtgccaattcctcaacccctgtcacctcctctttgactctctgaccccttcagccatggggagcagccaggcc

SEQ ID NO: 345415 - DNA, 201 bp, Homo sapiens
ctacgcggtggaggccagcaccatggcccagcacgctgaggtcagtggcccgctggtgcccacccagcctcgtcctcgcccatgagtgccatgccggcccyagcctagagaagcttgggaacccccaggggcctggggacattacttctgtgctttggtctctttattgtccccaagacagtcatttcagggaggggcttc

SEQ ID NO: 345416 - DNA, 201 bp, Homo sapiens
gttgagtgatccatcaaggaaccaaatgcacaacctcactcaccatacagatccggccgattccgcagatggtgccgcacaaagttgtggccaggccgggrcagcagtgagcctttgatccggtccaggacctgggggcaaggccaaggtcaaggatggaagtctgccaggagcttctcccttgtcctgagaggctccttc

SEQ ID NO: 345417 - DNA, 201 bp, Homo sapiens
cccgatgccagaaccctgcctgtggcaaatcttgagttctcctgggcggcttccaggtccaggcggcatcagctgttgccatcggctgcagtgatagtggmggtgtcctcctgggggctgccctccggcttcctgctccctctcctggagctgctagtggggcccaggcagagggtgcacgacctcccgagggaggtttgt

SEQ ID NO: 345418 - DNA, 201 bp, Homo sapiens
caggtggaattcgtgagctggtgcaggtcaggtacccgtggtggtgatgaaacactgatcagaataggcgctcggtgccactgtcacaggagtgcaggaaygaatggatgacaggctgggagcacccagggttgggggtcttggggtcctttggaagctctgccaggcagtgtgggatgtgtcacctgacgccagcacccc

SEQ ID NO: 345419 - DNA, 201 bp, Homo sapiens
cactgttagccttgaaatcctgggctcaagcaatcctcctgccttagcctcctgagtagctgggactacaggtatgcgccaccacggctggctaatttttwaaaaaaattggctgggagtggtggctcacgcctgtaatcccagcactttgggaggctgaggcaggtgaatcacttgaggtcaggagttcaagaccagcct

SEQ ID NO: 345420 - DNA, 201 bp, Homo sapiens
gtctgagcagagctattccgtgagcgtcctctcgcaccagtggaggctgcaccctccattccctgctctgcctctcccatggatctggggtcgccggggtygtggaggggccatctttgttctgtcttgccgccgcagagcacccctgtgcccagccgtgccgctgttgctttagctgcattgtgtccgcagcgacactca

SEQ ID NO: 345421 - DNA, 201 bp, Homo sapiens
tggaacacgggcagcacctacaacctcagcagcgggatggccgtggcaggtgagcagggcccaccccaatgcccagccaacccgggaggccgccctcgccrcaggcctggcccctctgcctccagccctgacgtctccctctctggacacagggatgccgaccgcctatgacttgagcagtgttattgccagtggctccag

SEQ ID NO: 345422 - DNA, 201 bp, Homo sapiens
agcaatttttgtgcttcagcctcctgagtagctgggattacaggtgtgcaccaccacgcccagctaagttttgtatttttagtagagatggggtttcaccrtgttggtcaggctggtcacgaactcctgacctcaggtgatctacccgcctcagcctcccaaagtgttgggattataggcatgagccactgtgcctggcct

SEQ ID NO: 345423 - DNA, 201 bp, Homo sapiens
gctacagcccctctctgagccctctcctctgccctgcacagcgctctcacagagatttgggccaaaagtgtcaatgcatgtagacacttagcacacagcamacatgcaatacatgtggaacattattaggtgaggctaaggcagagggggcatttaggctcaggagttcaagatcagcctgggcaacacagagacgccatc

SEQ ID NO: 345424 - DNA, 201 bp, Homo sapiens
tgcccgtctgcttacccttgtggaactgggggctgtagtggatggaggggtccctcctctgggccagcaccagcgtcaggttgccagtgacggccaggacraaggccaacgtggcacagatccagaaggggcctgggggtagggggcacagtcagggtcccgggccctgcactcccaggacaagcagacatgtatcctgac

SEQ ID NO: 345425 - DNA, 201 bp, Homo sapiens
gcggctttctgcttggtgtcttagcctctgatgccctgcctcgctcaaagctcaggagttggccaatttcacaagcgcactgagtgtgcaccgcccacctygccctcctgcacttatttccctttgctttgacatcacagccccttgaatccgagctgccttggtaaccctgagctcccattttgctttccccacccaagg

SEQ ID NO: 345426 - DNA, 201 bp, Homo sapiens
acaactggtttattcttttctttggattttattcggtttacatagttcatggcaggtgtgttagtcggatataaacattgctgggagtggacagcagcacyagtgttgttgttgtttttaagagacagggtctccctgtgtttcccaggcttgattcacactctcgggcttaagcgatcctcctgcctcagcctcctgagt

SEQ ID NO: 345427 - DNA, 201 bp, Homo sapiens
ttctccgtgttggtcaggctggtctcgaactcctgacctcaggtgatccgcccaccttggcctcctaaagtgctgggattacaggtgtgagccaccgccamcagcctcacatatggctaatttttaagtttcttctagcgatgcggtctcactattttgctcaggctggtcttgaactcctgggctcaagcagtcctcctg

SEQ ID NO: 345428 - DNA, 201 bp, Homo sapiens
tggcagggccatcccgagcctcctcctggccactgaggtctgggaaggacgtcctccgttggtgaagtcccttcctgctccccaaggatggagatccattycctggttcatctggagctctgatcagtaccctgaggccttcccacctgaccccagcttcccctgcaggcactcaccatgcccagagcatttgtccttcaa

SEQ ID NO: 345429 - DNA, 201 bp, Homo sapiens
ctctcgaccttcggctcctcaggaccaccagagaaggagatgtcaggaccccttcttgtcccccagctgggccataagacgtcccaggtctctgcacaccygtggaattcctcccttccccagtgggtttttgagcatagggtgcccttgggtgtgttgtgtgtctgcctgctggcttgcttaagttattaattataacac

SEQ ID NO: 345430 - DNA, 201 bp, Homo sapiens
gatataaacattgctgggagtggacagcagcactagtgttgttgttgtttttaagagacagggtctccctgtgtttcccaggcttgattcacactctcggrcttaagcgatcctcctgcctcagcctcctgagtagctggagttacaggcatacaattccacacccagctagcacctagttctttaacttgcttttttggt

SEQ ID NO: 345431 - DNA, 201 bp, Homo sapiens
ttgcttgagcccaggagtttgagaccagcctgggcaacatagggagaccctgtctctacaaaaaatataaaaattaggtggtttttttgttttttgttttktttgtttttttttttttttgagacagagtttcgctcttgttgtccaggctggagtgcagtggcgcgatcttggctcactgcaacctccgcctcccgggtt

SEQ ID NO: 345432 - DNA, 201 bp, Homo sapiens
atatatacacacacatatatacacatgaatatatagacacatatatacacatgcatatacacacacacatatacacacacacacatatatatatatatatwtatttttttttttttttttttttttttcttggtatagctctatccttcctgaagtcccagctccttaggaggcggaggtgggaggattgcttcttgagca

SEQ ID NO: 345433 - DNA, 201 bp, Homo sapiens
atatacacacacatatatacacatgaatatatagacacatatatacacatgcatatacacacacacatatacacacacacacatatatatatatatatatwtttttttttttttttttttttttttcttggtatagctctatccttcctgaagtcccagctccttaggaggcggaggtgggaggattgcttcttgagcaca

SEQ ID NO: 345434 - DNA, 201 bp, Homo sapiens
gggcaacagatcaagaatctgtctcaagaaaatatataggccgggcacagtggctcacctctgtaatcccagcactttgggacgccgaggcagacagagcrcttgagctcaggagctcaagaccagcctgaccaacatggtgaaactccatctctacgaaaactacaaaaataagctggacgtggtggtgcacacctgtag

SEQ ID NO: 345435 - DNA, 201 bp, Homo sapiens
ctcacctctgtaatcccagcactttgggacgccgaggcagacagagcgcttgagctcaggagctcaagaccagcctgaccaacatggtgaaactccatctytacgaaaactacaaaaataagctggacgtggtggtgcacacctgtagtcccccagctactcgggaggctgaggcaggagaatccctagaatctgggaggc

SEQ ID NO: 345436 - DNA, 201 bp, Homo sapiens
ctgtgttagccagcatggtcttgatctcctgacctcgtgatccacccatcttgccctcccaaagtgctgggattacaggcgtgagccactgtgcccagactttttttttttttttttgagacatgctcttattcttgtcacccaggctagagtgcagcgttgccatctctgctcactgcagtgtcaacttcctgggctcag

SEQ ID NO: 345437 - DNA, 201 bp, Homo sapiens
ttggggcttggcttctatgtccccacctccaagaggcccatcctgaccacctgggaccagtctttctggcagtggccagccctgggccagctgtgactgggccagcttgtggatggagtgaggcgaggtcctagaggcaggaagagtttgctcagggcgcagagaagccaccagaagggcttaaccaacccaccttggggg

SEQ ID NO: 345438 - DNA, 201 bp, Homo sapiens
tggggcttggcttctatgtccccacctccaagaggcccatcctgaccacctgggaccagtctttctggcagtggccagccctgggccagctgtgactgggccagcttgtggatggagtgaggcgaggtcctagaggcaggaagagtttgctcagggcgcagagaagccaccagaagggcttaaccaacccaccttgggggc

SEQ ID NO: 345439 - DNA, 201 bp, Homo sapiens
ggggcttggcttctatgtccccacctccaagaggcccatcctgaccacctgggaccagtctttctggcagtggccagccctgggccagctgtgactgggccagcttgtggatggagtgaggcgaggtcctagaggcaggaagagtttgctcagggcgcagagaagccaccagaagggcttaaccaacccaccttgggggca

SEQ ID NO: 345440 - DNA, 201 bp, Homo sapiens
ttggcttctatgtccccacctccaagaggcccatcctgaccacctgggaccagtctttctggcagtggccagccctgggccagctgtgactgggccagcttgtggatggagtgaggcgaggtcctagaggcaggaagagtttgctcagggcgcagagaagccaccagaagggcttaaccaacccaccttgggggcacaggt

SEQ ID NO: 345441 - DNA, 201 bp, Homo sapiens
tcggacgtgctggctggcttcctgacaggggcggccatcgccacctttttggtgagttgcctcctcaaccttcccagcatggaagaccctcaccagctctytgacccaagaggcaggaccacatgatggagaagggtgtggactctgtgtgaccttgggccaatcccttaacattacccttcctggatattctcatctgtg

SEQ ID NO: 345442 - DNA, 201 bp, Homo sapiens
tggggaagtggagggatcacccatctctgtggacataggtcctgggcggacagccccaaagaatgaaagggagcacccccgtcttcttcccagggggacayggttaatcatgagaactgtggttgtcttttccatggggctcttcacctgatgagctccttgtggctgtggccggtagggcccagggggccactagcccct

SEQ ID NO: 345443 - DNA, 201 bp, Homo sapiens
cccacggggctatgcaaatgagacgcccggaggccccgcccctccctccacctcggagtctgcgcggcgcggccaggcccggccgaccgcgtctcggtctycgcgtctgccagcctggctggcagtccgtctgtccatcccgccgcgccggggcagtctaggcggagcgggggctcaggcggcggcggcctcgacgcggtg

SEQ ID NO: 345444 - DNA, 201 bp, Homo sapiens
gacaccaacaccacagcccatggggacagagagaggggcccctgcagaggccatggaggaagcgactcaggggaagggtctggtagggatgggggcccctygggaaagaggatggtgtcccctaaaaactagtggggacccttctaagtgccatgggggaggggttcccatgaggctggggagtctcttctaaaggcccac

SEQ ID NO: 345445 - DNA, 201 bp, Homo sapiens
agggatgggggccccttgggaaagaggatggtgtcccctaaaaactagtggggacccttctaagtgccatgggggaggggttcccatgaggctggggagtstcttctaaaggcccacctcctaaagggcattgggtcagagcctcccatgtaggctgtaaaggaagggacccccgtagactcttggggagtggtgtcagag

SEQ ID NO: 345446 - DNA, 201 bp, Homo sapiens
ggaagggtctggtagggatgggggccccttgggaaagaggatggtgtcccctaaaaactagtggggacccttctaagtgccatgggggaggggttcccatsaggctggggagtctcttctaaaggcccacctcctaaagggcattgggtcagagcctcccatgtaggctgtaaaggaagggacccccgtagactcttgggg

SEQ ID NO: 345447 - DNA, 201 bp, Homo sapiens
gcactgtcccctcagcaagaagttcctgtgggaggagctggaactggtgcgggaggaggtgaccttcatctatcagaagctccgtgagttcctggagcccmcagccggtgtgtggggagggggtccttcttcagcctttgtccgcctgagccccctccctccacagaagcgcaggaggatgagatctcagagaacttggtg

SEQ ID NO: 345448 - DNA, 201 bp, Homo sapiens; identical to SEQ ID NO: 73051

SEQ ID NO: 345449 - DNA, 201 bp, Homo sapiens
aaaaaagaagaattccagggaaaagctgggcatggtggtacatgcctgtagccccagctacttgggaggctgaggcagagactcagctacttgggattacyagctacttgggagactgaacaagatcccacctctttaaaaaaaagggaattccaggggggaaggaagaggacctggaattgccatgatggggatgttagg

SEQ ID NO: 345450 - DNA, 201 bp, Homo sapiens
ctgggccccagaccttgtcctctgctcttgggagctctggccacacctagccctgcaggtggtgcccacgagactccaagacctcaatccctgaccccccyccctttgcctttttggtcacgctccctggaaaagcccactgggagcccatgactccaaccctggagcccctggccactccctccagccccaacgctctgg

SEQ ID NO: 345451 - DNA, 201 bp, Homo sapiens
ctgtgcccggccttcctggtgggcgtggtccgcgtggccgagtaccgaaaccactggtcggacgtgctggctggcttcctgacaggggcggccatcgccasctttttggtgagttgcctcctcaaccttcccagcatggaagaccctcaccagctctctgacccaagaggcaggaccacatgatggagaagggtgtggact

SEQ ID NO: 345452 - DNA, 201 bp, Homo sapiens
tcccctccttcctcccaccccaaggctgacctctttcccccaggctttcgagttcctgaaccactcagtgaccatgttggagaaggagagctgcttgcagmaaatcaagattcagcagcttgaaggtgaggactgaccagagatcaaggtcaggctaggccaggcgtggtggctcacgcctgtaatcccagcatttgggga

SEQ ID NO: 345453 - DNA, 201 bp, Homo sapiens
tgtctcaggccagggcacagagggcacaaggaatggggtgaggatacttgggggtcctgagagggatgggggatgctgaggggcactaagaacctccaagyggaacacctggctgtgtggatgagaacaggggtgctgagtatgagattacaccaagacccaacccccctgagaactcagcagatactggggatgttcaaa

SEQ ID NO: 345454 - DNA, 201 bp, Homo sapiens
ctagtctcacatggcagaaggtggagaagctctctggggcctcttttataagagcactaatcccattcatgaggactccacccttatgacctaatcacctytaaaaggcccccacctcctatcactgtgggttaggatttcaacatatgaaccgggggaaggggcacaaacattcagaccaaagcacaggtgctgtttagt

SEQ ID NO: 345455 - DNA, 201 bp, Homo sapiens
tgagggaaattgggagagtctgggttctgggtcaagattaggacaagctgggttcagggtgggatcagggctcagtcaaggtcccacactctctgcagagktgctgagccccacaggccgccagggagagaaggaggagcacaagtggggcatggagcagggccggcaggagctgtatggggccctgacccaaggccttca

SEQ ID NO: 345456 - DNA, 201 bp, Homo sapiens
tcagaccaaagcacaggtgctgtttagttaggcacagggtgggggttgtggcagggggaggttacagcagtaaacaacagacacaaacctctgctgtcacrgatgtgagcgttctaatatgtaagacaacaaacaaggtaaatggggcctggtctccacacctgtaatcccaatactttgggaggccaaggccagaggatt

SEQ ID NO: 345457 - DNA, 201 bp, Homo sapiens
tacttgagggtcacattcagggaacctgtccctcctgcaggccacaaggggcaccagtgcctgagccctccactcccctcctgggactctgactccgactstgaccaggacctctcccagccacctttcagcaagagcggccgctccttcccacccggtgcagatcctccccagtccccccctccacccatttccctcctg

SEQ ID NO: 345458 - DNA, 201 bp, Homo sapiens
atgctgtgactgccattggccccccgtgtggctgctgtctctgtgtgtgactgtcttggtgttcgtgtggttgtgtgcataggactgtcattgtgtggctsctgttgtgtgttcattctgatggtgtgtatgtgtgtgtggctgtggtcgtgcgctgtgcacctttcttgtgtggcattgtgagtctgtgtcatggtccat

SEQ ID NO: 345459 - DNA, 201 bp, Homo sapiens
ccctcttgtttactgcaaagtggcgcccagcacagcgcctggaagtcggcaggtgctcggtcttcactgtgggatgggtgaacgctatgccatggttgtgkgtgtgtgtgtgtgtgtgtgtgtgtgtgtgtggtgccaggatggaggctgcggctgggttgtgcttcctaagggtgacagcatgggtgactctgggtatct

SEQ ID NO: 345460 - DNA, 201 bp, Homo sapiens
ctcctgggctcaagcaattctcctacctcagcgtcccgagtagctgagactacaggtgtgtgccatcatgcccagctaatttttgtactttttggtagagrtgggatttcaacatgttggccaggatggtctggaactcctgacctcaagcaatcctcctgcctcagcctcccaaagtgctgggattacaggcgtgagcca

SEQ ID NO: 345461 - DNA, 201 bp, Homo sapiens
cacagtctagaccctcagaacaggcccagatcctgatctgggcatgcggtccctgacctgcagccccggagtcccctggacctggccaggccctgacccaycctctctctccacagcttgagcagccgggactgctctccctgaagacccctccagagagaaaataaactagcccagaccctcctctagccccgactgtta

SEQ ID NO: 345462 - DNA, 201 bp, Homo sapiens
cttggctcactgcaaactccgcctcccgggttcaagtgattctcctgcctcagcctcccgagtagttgggagtacaggcgtctgccaccatacccagctawtttttgtatttttagtagagacagggttttgtcatgttgtccaggctggtctcaaactcctgatctcaggtaatccacctgcctcagcctcccaaagtgc

SEQ ID NO: 345463 - DNA, 201 bp, Homo sapiens
aaaatggaaccaacagtgcctggcacatactatgcattagctgtttttgaaaaccggagcctcactttccttatctgaaaaatggggatggtatttacatrgctcctatgtgacttgccccaggcctcaacactctcctctccctctattccaggtcacctgcgttgtgcataactttcagagccggccaccctctggccg

SEQ ID NO: 345464 - DNA, 201 bp, Homo sapiens; identical to SEQ ID NO: 73057

SEQ ID NO: 345465 - DNA, 201 bp, Homo sapiens
gtctatgtttaataaaaattattttaaaatgatcctattcacagcagcaacaaaaaactacctagaaagaactcaaaccagaattgtataatacctctagyaaataaagtaagtcttaaatggaaagcaatatcatattcatggaataaaactctcaatattgtaaagctacaaacataccccagattaatctacaaatgc

SEQ ID NO: 345466 - DNA, 201 bp, Homo sapiens
tttactcaacttcattcttttacctctttttaatggtgttaaatgctcacaatttatatttatactctgtcgaatgtcaaaaaaaattttttagagagaggggttagtgcatcggggatatttatttggttattattttatataattttttctttttctattttggcttcagggaatctaaattgaaaaaaaaatactagg

SEQ ID NO: 345467 - DNA, 201 bp, Homo sapiens
atttactcaacttcattcttttacctctttttaatggtgttaaatgctcacaatttatatttatactctgtcgaatgtcaaaaaaaattttttagagagaggggttagtgcatcggggatatttatttggttattattttatataattttttctttttctattttggcttcagggaatctaaattgaaaaaaaaatactag

SEQ ID NO: 345468 - DNA, 201 bp, Homo sapiens
gagttacacagtgagaaaaaaaaatttagtgacctaatactgtgaagaagtttccagaaatagtaatctctttttgtggaatagaaggagaggctatactrcctccttaagtctcaggacctttttgaagattgagaggctgttttagcctctgcatctgcctgctagagaagagtaagaacatggcagagaatcccagaa

SEQ ID NO: 345469 - DNA, 201 bp, Homo sapiens
gatttactcaacttcattcttttacctctttttaatggtgttaaatgctcacaatttatatttatactctgtcgaatgtcaaaaaaaattttttagagagaggggttagtgcatcggggatatttatttggttattattttatataattttttctttttctattttggcttcagggaatctaaattgaaaaaaaaatacta

SEQ ID NO: 345470 - DNA, 201 bp, Homo sapiens
atgatttactcaacttcattcttttacctctttttaatggtgttaaatgctcacaatttatatttatactctgtcgaatgtcaaaaaaaattttttagagagaggggttagtgcatcggggatatttatttggttattattttatataattttttctttttctattttggcttcagggaatctaaattgaaaaaaaaatac

SEQ ID NO: 345471 - DNA, 201 bp, Homo sapiens
caatttgtggaaggagttacaaaggaaaaaaaatcatgttcttgctggagccaagaggagattaagaatattaaaggtttagaaggaaaaaggccattttsttaagaatccctgagatatgggattcttgccactagtctaggactgcttgaaagtagggaagagactattattagaaaatagaattccgaagaccttgta

SEQ ID NO: 345472 - DNA, 201 bp, Homo sapiens
tgaccagtgcacgtgagaaatggtgacaaaaaaatttcagaaggtttacttcccagcaagtctaaggaaaacaatgacagaaagattacacaattattatrtagctaaaatagagaaattagctgaaatcaaaacagccaaactgaaatcttaaaagatagttcatgtgtagtgatttgtatctttcccaagtgaaggtga

SEQ ID NO: 345473 - DNA, 201 bp, Homo sapiens
actttaaggacctgtcatagtctactctgttacttttatcctcagaataatttcagacctactgaattatatttatttcatatatttttctaatagaccawgtaatttagcagagaatgtaaagttctgtactcaatagcaagggcttagaaaacttatttacttaatttggacctacccaagcatttctggagtttatag

SEQ ID NO: 345474 - DNA, 201 bp, Homo sapiens
tgtcaaaatactaatgtgtaatgcataggaaattatttttctattccagaggtatactgtcttgttgcatgataattacatcttttttcatctctgttaayatcaaccatacagttaaacaagtattagttttaatataaatgatttgaatatttacattagagaaatgaaaatatcaactacgtgagactcaatgcatca

SEQ ID NO: 345475 - DNA, 201 bp, Homo sapiens
aattttttgtgccgtcagtcatcaacaagaaaagttgcttagaataatgtggaaaaagaaaatcaccaatatgcagagaatggaaaggagcatacagaaarcttcccatgatggggcctttgtgggagtctattcctaacaaggaaggataaccagtaacaaaaaggagagaattaccagctcaatgaaaacaaaaaaaac

SEQ ID NO: 345476 - DNA, 201 bp, Homo sapiens
taacttgtttttaaatttcttttgtttctgaagtctgtgtcagcatttgctccaatttgcaaccctgtactctgtccctggggcaaaaaagcctttagtgratatttgggaacagatcaaagtaaatggaaggtaggtactgaatggctgtcttaatactcattcttaagtttcaagtttgtttaaaaggttggacatata

SEQ ID NO: 345477 - DNA, 201 bp, Homo sapiens
tgtattcttttggtaattgagcaacatcttaatgacatgatagggacagaggtttcagaagattgcttgataatcctgttgtgttttttttttttttttttgcttttacataagtgttaatcataccactgttgaacatactttagacctgatttattccacaactgcttgagaaaggtcctcttttaaaaattttgttgt

SEQ ID NO: 345478 - DNA, 201 bp, Homo sapiens
ttgtattcttttggtaattgagcaacatcttaatgacatgatagggacagaggtttcagaagattgcttgataatcctgttgtgttttttttttttttttttgcttttacataagtgttaatcataccactgttgaacatactttagacctgatttattccacaactgcttgagaaaggtcctcttttaaaaattttgttg

SEQ ID NO: 345479 - DNA, 201 bp, Homo sapiens
tgggccatttacaaactctgccaagagtttgaatactttgcaaatgaactcatcatgatgtgtattgttaacaagcagaaaatacttgaatgggtaaaaaatgcaacttctttgtcttaaagtatttaaagtatagttctgtgttcagggttcattcctacatgaacccctattttatgtaaggatgattattgaaattcc

SEQ ID NO: 345480 - DNA, 201 bp, Homo sapiens
attgtattcttttggtaattgagcaacatcttaatgacatgatagggacagaggtttcagaagattgcttgataatcctgttgtgttttttttttttttttttgcttttacataagtgttaatcataccactgttgaacatactttagacctgatttattccacaactgcttgagaaaggtcctcttttaaaaattttgtt

SEQ ID NO: 345481 - DNA, 201 bp, Homo sapiens
aaacttcccatgatggggcctttgtgggagtctattcctaacaaggaaggataaccagtaacaaaaaggagagaattaccagctcaatgaaaacaaaaaamactgaaagaaaaaggaaagtaatgctaatatactacatggcttatctctgaatagcatttataacttcttaatattgattaaccaaaattatatgtgata

SEQ ID NO: 345482 - DNA, 201 bp, Homo sapiens; identical to SEQ ID NO: 73062

SEQ ID NO: 345483 - DNA, 201 bp, Homo sapiens
actttgggaggccaaggcaggcagatcacctgaggtcaggagttcgagaccaacctggccaacatggtgaaaccctgtctctactgaaaaaaaaaaaataatatatatatatatatgtacaaaaattagccaggcatggttatgcacacctgtagtcccagctacttaggaggctgaggcaggagaattgcttgaacctgg

SEQ ID NO: 345484 - DNA, 201 bp, Homo sapiens
acactttgggaggccaaggcaggcagatcacctgaggtcaggagttcgagaccaacctggccaacatggtgaaaccctgtctctactgaaaaaaaaaaaawaatatatatatatatatgtacaaaaattagccaggcatggttatgcacacctgtagtcccagctacttaggaggctgaggcaggagaattgcttgaacct

SEQ ID NO: 345485 - DNA, 201 bp, Homo sapiens
tgtaacaagattatgttctcttgattttacgtattgataacagatatccctgcattgaatatggatttgatatagtattataatgaaagtaaatgtttcarcttccctaacaaaagttgaaaacctaaaaacaaatgtcagaaattttttgtgccgtcagtcatcaacaagaaaagttgcttagaataatgtggaaaaaga

SEQ ID NO: 345486 - DNA, 201 bp, Homo sapiens
aggtaattaattggtaacttatgtattttctgcctcttttaaaaataatttggggcagtccaccacaacgaaaaaacttgttaataaattagtaatgatayaccaaagtatgaaagcttttaaaagtgagtaacaagtgtaaatgcatgtatgagcgttaatcagtttcttaatattatttactggagaaaaatgtgaaaa

SEQ ID NO: 345487 - DNA, 201 bp, Homo sapiens
ttaagaaaatctggtttccttgtggaataatggagcaaataaattttatttgttggtctcatatatatgtattaatatattaaaattagtatctctctctrtaagttcattatttaagataggattgttaacagtagctaaagttaatattcagtaactaataacatctcatgggagtttattgtttaagaattaatcttt

SEQ ID NO: 345488 - DNA, 201 bp, Homo sapiens
atccatgacaggaggccaaggaccttttcccgtgacccggagcctcgcctctaatcccttttccttctctgagcctccaacctagtgtaacccggggcgakcgcccgtttacctactgcccgctacatttgtacagctttttcctgttcagaaagactttcctagacccgcagccaccgcgcgaaaatgtgaagtagatgt

SEQ ID NO: 345489 - DNA, 201 bp, Homo sapiens
acaagggctaaaggtgcactgaagagtgcttagctttatctaagcagttcaaaaagtttccttggggaatgtgcatttgagctgggaactgaaaaacatgkaagtttgtaaggtaaattgtgcatggtgagaagtgtgttgtgggataggcaaaaggaacagcatgtgcaaaatcatgatggtataagagcatggggtgtt

SEQ ID NO: 345490 - DNA, 201 bp, Homo sapiens
ggggaagaaggataaaaatagaactcagatttctggaggtggatgacatttaactttaataagtaaagggccctgtctctacaaaaaattaaaaaaaaaaatattccagtgtggtacgcacctgtagtcctagctgctcaggaggctgaggtaggagaacacttgaagcttggagttctaggttacactgagtcatgatta

SEQ ID NO: 345491 - DNA, 201 bp, Homo sapiens; identical to SEQ ID NO: 73058

SEQ ID NO: 345492 - DNA, 201 bp, Homo sapiens
aaagataccatcacccgggtagtgaacatagtacctaactggtagtttttcagcccttgtccgtctccgtctccccctgctctaatagtccccagtattartggtgcacatcttcatgtccatgtgtgcccaataacaatattttttatcttcaggtttaacttgcacagagcaaaattttatatcaaaatctggttatca

SEQ ID NO: 345493 - DNA, 201 bp, Homo sapiens
ttatctaaacttctagtgataaatatttctcttgaataacataatattaggaaccttcaaagagtaaaattacaatattgttagtattggaactaaacttytctagtgttgagaactttggggtgtttgaagggtgggtatttaatttgaccatagagtgtatgctgcagaatcagacgcataggaattcagcaagagtgc

SEQ ID NO: 345494 - DNA, 201 bp, Homo sapiens
aacattttctttgaggatctctaagtgtaggaaaaacacctggactttttgagaaagatggcacactaaacacatgcatttgcttccgctgcctccaaaamtctgactaacatggcattaagtaaagagattaaacacacacgcacacatacatatacctataaaggcataaagaagcaggagacaggagctaagaataac

SEQ ID NO: 345495 - DNA, 201 bp, Homo sapiens
gttcattcctacatgaacccctattttatgtaaggatgattattgaaattccaacacattttatttaaggatgattactgaaattctaactaattaaaggkttcatcctttagtaactagattacagttttgtttaggcttgaatttttactatgtttgaagaatgctagaaatgatttaggattaggtcctttgagaact

SEQ ID NO: 345496 - DNA, 201 bp, Homo sapiens
catgacaggtaactattaagaagatataattttagatacctcattctgttggattattttgttctattttaaaaccaatctttatctagatattatagtamctcattttacttttaaacttgcttactctctttctgtggttatgtatttgacaattctaccagacttaattaactgtggatgtgattgtgtgaggtagag

SEQ ID NO: 345497 - DNA, 201 bp, Homo sapiens
agcatccctaatctaaaaattcaaaatgctacaatgggtatttccttggagcattacctttaagcgtcatgtgggtactcaaaacgtttcagattttggarcatttctgattttggatttttggattagggatgttcaacctgtgttactaaatttagacttgcctcttattaactatgtgctcagttgtgtaatagaagc

SEQ ID NO: 345498 - DNA, 201 bp, Homo sapiens
tttacttatgtaactgcatatccagcacatgtactcctgaacttaaaagttgaacaacaaaaaaagaaggaaaatgcgttaataccttattgtaattattwtttttttggaagactattttttatattcagaagaagtgtcagagtcagcagaaagggattatttctccatttacctacaacaatggttttaaatgactgg

SEQ ID NO: 345499 - DNA, 201 bp, Homo sapiens
gaatacttatggttttgtatatgtttttaccctaataaatattactgcattgattatatttgtgcataatgttttctccctaaggacttttccttagaatrtattccaaaaagtgaaattactaggtcaaaacttaaaagcattttaaaggttctttctgcatcaccttcctaaagtgttttctaagaagtctgtaccata

SEQ ID NO: 345500 - DNA, 201 bp, Homo sapiens
aaataaatgttgatcttaaagtttcatatcactttctcttaaaaattcatgggatgagtaattggatctggtttagtgtctagaaaaatgtgtatcacacygtaagtgttcagtaatgttacatattattattaccaaaatcattatcacatctttcttccattttaaaatcaactataatcagtcataccaattccttga

SEQ ID NO: 345501 - DNA, 201 bp, Homo sapiens
ttcacaggccatattatacaaaaacaatgcatatctggttagaaatataacaacagatttaattcaaaataatatcaaaaatataaaatacgaaaatagawatataaaagggaaactaaaattttgttatcataaacgaagactttaataaatgggaaaatgctgtgtttctagatggataaaatgaatcttacgacaagg

SEQ ID NO: 345502 - DNA, 201 bp, Homo sapiens
taagtgttcagtaatgttacatattattattaccaaaatcattatcacatctttcttccattttaaaatcaactataatcagtcataccaattccttgacwactttgttgcagttgataggcagactattaacaatttttaatcttctaaactaaggtaattaattggtaacttatgtattttctgcctcttttaaaaata

SEQ ID NO: 345503 - DNA, 201 bp, Homo sapiens
tttcacaggccatattatacaaaaacaatgcatatctggttagaaatataacaacagatttaattcaaaataatatcaaaaatataaaatacgaaaatagrtatataaaagggaaactaaaattttgttatcataaacgaagactttaataaatgggaaaatgctgtgtttctagatggataaaatgaatcttacgacaag

SEQ ID NO: 345504 - DNA, 201 bp, Homo sapiens
aaaatagggagtgagaccagaaaaataatctgggaccaaattatagaccatatttagagccatgtgaaggtgtttggcgtttatagatgctatattttttwtaaaaaattttccccagagtttaatagaaatccttacctaggcaagccatgtgaatttttatgaaggaaaagagacccagcctaggcagcatggcaaaac

SEQ ID NO: 345505 - DNA, 201 bp, Homo sapiens
agaatggcattgaagcagatttccagcaacaagtgctttgggggattgcagaaagtttttgaacatgacaggtaactattaagaagatataattttagatacctcattctgttggattattttgttctattttaaaaccaatctttatctagatattatagtacctcattttacttttaaacttgcttactctctttctgt

SEQ ID NO: 345506 - DNA, 201 bp, Homo sapiens
ctaccagataagtgacatgatatatactatgtaagtttccatatatatttttcttactgaatatcagtcacttcatcgttcataagcccacttttcttatwcatcctttctagtcaccctagtagtagtccttcagtcctcatctcttcccttctttctccccatgttacaagttcgacttacaactgagccagatagatc

SEQ ID NO: 345507 - DNA, 201 bp, Homo sapiens
tcttgataggtggctgcaatattaaaggtgaagatgagagctgggactttggcactggtgctggattttatgttgatgccactgaagatccttggaaaacyaactacagaatgtactcttatgtcacagaggaggtaatttaatttgtattgtaattattaattgatgactgccaagagtttgattttgaacacaaagtcc

SEQ ID NO: 345508 - DNA, 201 bp, Homo sapiens
aaatagggagtgagaccagaaaaataatctgggaccaaattatagaccatatttagagccatgtgaaggtgtttggcgtttatagatgctatatttttttwaaaaaattttccccagagtttaatagaaatccttacctaggcaagccatgtgaatttttatgaaggaaaagagacccagcctaggcagcatggcaaaacc

SEQ ID NO: 345509 - DNA, 201 bp, Homo sapiens
gtcattagggaaatgggattgagcgcacctggaaggagagggcattcaggttgcaggaaaaataatagctcatgtttgtgtgtgtggtagaagcagcattytaagcactacgtgaattaactcatttaattcccagagcaaccctatcaaattgatatatattactgtatacccattttgcagatgggcaaatgaggcata

SEQ ID NO: 345510 - DNA, 201 bp, Homo sapiens
gaggggagcacgtgtctttggagtttgacaaaatctgttcgggtcgtaaaatgctctcagagcgctgtgggggactggaagtcatttctgatggggtcatyagggaaatgggattgagcgcacctggaaggagagggcattcaggttgcaggaaaaataatagctcatgtttgtgtgtgtggtagaagcagcattttaagc

SEQ ID NO: 345511 - DNA, 201 bp, Homo sapiens
gtgagtgggaccggaggggcggggcatcatatgggcggggctgaggcgaggccccggcggccatcttgagccccgccttttacttcggcccgcttcttctrgtcactccgccaccgtaggtaagactgggttcgggtagaggcctggacgttgtcagccttcctgcggctgcggcacggctaggcgtgatcggggcggacg

SEQ ID NO: 345512 - DNA, 201 bp, Homo sapiens
tttttttgaatgtgtgatgaaaaagaaatatagcttttaggatttaagaattaaaaaaaaaaagtaaatggaattgaggccagatgcagctgggtgcaacrgctcatgcctataatcccagcactttgggaggctgaagtgggaggatcacttgagctcaagagttcaagaccagcctgggcaacatagcaagatcccatt

SEQ ID NO: 345513 - DNA, 201 bp, Homo sapiens; identical to SEQ ID NO: 73060

SEQ ID NO: 345514 - DNA, 201 bp, Homo sapiens
aggaatgagatcatgtcctttgcagggacatggatggagttggaagccattatcctcaacaaactaatgcaggaatagaaaaccaaacaccaggccaggckcagtggctcacgcctgtaatcccagcactttgggaggctaaggtggacggatcacaaggtcaggagatcgagaccatcctggctaacatggcgaaacccc

SEQ ID NO: 345515 - DNA, 201 bp, Homo sapiens
tagcacattgcatttttctctgtttcatgttagttttccaaaggattactgactttttacctaatttgctaagggatgtcaggccttaatgacatatttcycctcacataaagatacaacatgcttttactgtgtaggaggaattgttaacaggatttatgatggctgtgtttgacttcccaacaatgatagaacatttgg

SEQ ID NO: 345516 - DNA, 201 bp, Homo sapiens
attgcatttttctctgtttcatgttagttttccaaaggattactgactttttacctaatttgctaagggatgtcaggccttaatgacatatttcccctcamataaagatacaacatgcttttactgtgtaggaggaattgttaacaggatttatgatggctgtgtttgacttcccaacaatgatagaacatttgggcattt

SEQ ID NO: 345517 - DNA, 201 bp, Homo sapiens
agactattaacaatttttaatcttctaaactaaggtaattaattggtaacttatgtattttctgcctcttttaaaaataatttggggcagtccaccacaasgaaaaaacttgttaataaattagtaatgatataccaaagtatgaaagcttttaaaagtgagtaacaagtgtaaatgcatgtatgagcgttaatcagtttc

SEQ ID NO: 345518 - DNA, 201 bp, Homo sapiens
tgtgcccagagagcaacagctcccaggagctcactgcccctcccctctccccagctgctccctgcatgaggaggacacccagagacatgagacctaccacyagcaggggcagtgccaggtgctggtgcagcgctcgccctggctgatgatgcggatgggcatcctcggccgtgggctgcaggagtaccagctgccctacca

SEQ ID NO: 345519 - DNA, 201 bp, Homo sapiens
gcagggaaataaaaagaaggaaagggagacagaccaggcgcctaacagatggggaccaagaaacaagagatagctgagaggtgcaaacagaagagaaaaargagcaacatcccttaggagaggggcagaggagagagaggtggagagagggggcggagagtgctcagaattgagagctaaggtgggggatgcaggacagac

SEQ ID NO: 345520 - DNA, 201 bp, Homo sapiens; identical to SEQ ID NO: 73070

SEQ ID NO: 345521 - DNA, 201 bp, Homo sapiens; identical to SEQ ID NO: 73074

SEQ ID NO: 345522 - DNA, 201 bp, Homo sapiens; identical to SEQ ID NO: 73075

SEQ ID NO: 345523 - DNA, 201 bp, Homo sapiens
ctgcgagaggagtggggtcagagcccctacatccgcaggaccccaaatcggctgggccccaaggcccggactgcgctccccggtggccccggcggccctcsgcgaatgcgtcctgcccctcccctgcccaagccctctgccctcacccgggtccggcgccgcccccgaagtggcgggaacaacccgaacccgaaccttctg

SEQ ID NO: 345524 - DNA, 201 bp, Homo sapiens
gcatgtggctggcatgagacggtgtctgagtaatgtcaggcacctggaggcattgaccccaggaccttggaccccagacctctgaccggggggcagccagygtccaggtaccccaacccctgccctgggtccggcgtccccccattagtgagtcttggctctacttatagcatctgacaccagaggggccgaaaatagccc

SEQ ID NO: 345525 - DNA, 201 bp, Homo sapiens
tgggctgctggccatgaatctctgcctctcccaggctgtccccctcctcccagggcctcctgggggacctttgtattaagccaattaaaaacatgaatttaaaaaaaaaaaaaaattccagcccctcccactgccttgcctcttgagggaagagaaaggcaggcagcagcttggatgaagagggaagacccctcacacagc

SEQ ID NO: 345526 - DNA, 201 bp, Homo sapiens
ttccggtatagccaagctccctagttactcaattgctaagacaacagcccccaggggccttgcctcctcctccaaccggcaggtgttgacagcaccacccsgggcccaggggagccagtgacctcagcctctgggggcgggaatgaggtgggtggggtggaggggctcgagccagcttggggtgtgttccaagcagcaggg

SEQ ID NO: 345527 - DNA, 201 bp, Homo sapiens
aggctgagagggactgtgacttgggctccgctgtgcccgccctgggctgggcccttcctggctaggactgtggaggggagctgctggccatggctgctttrtagtttgcccagagttgggggctaggggaggggggagccagaggccaggatgcctgagccccctgagttcccaaagggagggtggcagagacagtgggca

SEQ ID NO: 345528 - DNA, 201 bp, Homo sapiens
cactggggcagactcgctccaaggtcttcagtccagcttgaacttgtcctctgattccttcagcaggtacaggctgtcatcttccagaaagctgtgggccraaggagtagcccattgaggcacacagctctgacagctcgcatggagacaagggtggggtgcatgcaggcaaggtgggagggggcggatgggcacacagag

SEQ ID NO: 345529 - DNA, 201 bp, Homo sapiens
ctcaaccagacagcagcacaggatccttgccctgggcttgctggagccctggccctgaaagggagtatggtgaggcctcctgggaacctggctagggcaayggtcagggtgaaactccttcccaatcccagcagcttggtccctcaagatcccatggggagaatcgccgtgaaccttggctggccaaagaacaagcatcca

SEQ ID NO: 345530 - DNA, 201 bp, Homo sapiens
gtcgctccctgtcccgctccatgtcccaggaagcacagagaggctgagagggactgtgacttgggctccgctgtgcccgccctgggctgggcccttcctgrctaggactgtggaggggagctgctggccatggctgctttgtagtttgcccagagttgggggctaggggaggggggagccagaggccaggatgcctgagcc

SEQ ID NO: 345531 - DNA, 201 bp, Homo sapiens
gcccctctgcccacttctgggctcctctgggaccaccctgtgcaggagggggagctggaggaatgctcacctctgtgaggtcagtgtccctggtgtggaaractgtggaccagaaccatgcattgagggacacctaaggagggaggggctggtgagcatgctgccccccaccctgacctcaaggcagggacccccatttgc

SEQ ID NO: 345532 - DNA, 201 bp, Homo sapiens
tcccgagcctgggaggagtagagggcaggactggaggggctgtggtgggccagggcccaggggaatgtttgaggccttcttcctggaaattagctgcgtgragagagcacaaaagttatctagcgaatgagcctaagagcttgtgggcgttggtgctggcactttcttcagggactgctgtgtccacagcaaaggcccaaa

SEQ ID NO: 345533 - DNA, 201 bp, Homo sapiens
gcacaaggctgggcatgtggctggcatgagacggtgtctgagtaatgtcaggcacctggaggcattgaccccaggaccttggaccccagacctctgaccgkggggcagccagcgtccaggtaccccaacccctgccctgggtccggcgtccccccattagtgagtcttggctctacttatagcatctgacaccagaggggc

SEQ ID NO: 345534 - DNA, 201 bp, Homo sapiens
gagcccaggcagaggagagcacagccagggcaggacctggcagccctggtacagagcccagagggggcatcagttcctgctggtcctgctctgtttacagrcaagctgctgtcctccctgcaaaggggagtgggtggggcagagggcaagtgccaggggggcacaaggctgggcatgtggctggcatgagacggtgtctga

SEQ ID NO: 345535 - DNA, 201 bp, Homo sapiens
tctgggacccttgttggggagtgggtggcaggtgggggtgggctgctggccatgaatctctgcctctcccaggctgtccccctcctcccagggcctcctgkgggacctttgtattaagccaattaaaaacatgaatttaaaaaaaaaaaaaaattccagcccctcccactgccttgcctcttgagggaagagaaaggcagg

SEQ ID NO: 345536 - DNA, 201 bp, Homo sapiens
cgctggagacagccctgggtggccagtgtgtggaccgccaggaggtggctgagatcacaaagcagctgccccctgtggtgcctgtcagcaagcccggtgcmcttcgtcgctccctgtcccgctccatgtcccaggaagcacagagaggctgagagggactgtgacttgggctccgctgtgcccgccctgggctgggccctt

SEQ ID NO: 345537 - DNA, 201 bp, Homo sapiens; identical to SEQ ID NO: 73071

SEQ ID NO: 345538 - DNA, 201 bp, Homo sapiens; identical to SEQ ID NO: 73072

SEQ ID NO: 345539 - DNA, 201 bp, Homo sapiens
ccaatgcgggcgcagcccctgactcggccccgggccaggcggcggtggcttcggcctaccagcgcttcgagccgcgcgcctacctccgcaacaactacgcrccccctcgcggggacctgtgcaacccgaacggcgtcgggccgtggaagctgcgctgcttggcgcagaccttcgccaccggtgagcgggggaaactgaggc

SEQ ID NO: 345540 - DNA, 201 bp, Homo sapiens
cagccagggtccctggggtggacttcctgccaccccaaacccccaaggccacggggggctgcagcctccacaggttccggcctggcctgggaaccagttcsggtatagccaagctccctagttactcaattgctaagacaacagcccccaggggccttgcctcctcctccaaccggcaggtgttgacagcaccacccgggg

SEQ ID NO: 345541 - DNA, 201 bp, Homo sapiens
tccggtatagccaagctccctagttactcaattgctaagacaacagcccccaggggccttgcctcctcctccaaccggcaggtgttgacagcaccacccgvggcccaggggagccagtgacctcagcctctgggggcgggaatgaggtgggtggggtggaggggctcgagccagcttggggtgtgttccaagcagcagggg

SEQ ID NO: 345542 - DNA, 201 bp, Homo sapiens; identical to SEQ ID NO: 73076

SEQ ID NO: 345543 - DNA, 201 bp, Homo sapiens
tctgcctgcgctctcgtcggtttttttaggattattgaaagagtctgggacccttgttggggagtgggtggcaggtgggggtgggctgctggccatgaatytctgcctctcccaggctgtccccctcctcccagggcctcctgggggacctttgtattaagccaattaaaaacatgaatttaaaaaaaaaaaaaaattcca

SEQ ID NO: 345544 - DNA, 201 bp, Homo sapiens
ggcggggcaggcgaggcggagggcgagggctgcgggagcaagtacggagccgggggtgtgggggacgattgccgctgcagccgccgccccactcacctccrgtgtgtctgcagcccggacactaagggagatggatgaatgggtggggaggatgcggcgcacatggccccgggcggctcggcggtcagctgccgcccccac

SEQ ID NO: 345545 - DNA, 201 bp, Homo sapiens; identical to SEQ ID NO: 73077

SEQ ID NO: 345546 - DNA, 201 bp, Homo sapiens
gattcccatttcacccaacacaggtgttggggtagaactgggggccctccacccctactagcctgactgtctcctgagacctgtctcctaagaccacttayctgaccactggccatggggaaggaaaacacctggccaaggctcatgccccaggttcccaggcatgaagttgactgtctccgcccctgctggtgtggtgag

SEQ ID NO: 345547 - DNA, 201 bp, Homo sapiens
agctctgcctctggggcctgccattccccatgccacgtgcccaggcagagacctcacctctgtttactgcctccagccagctctgggacctgcccctgccrccacaactgtcttctcctgccctccagcccaccctattcacacaaatgagctgaacaagggcaggtgaggcttggaattgatttattaagcacatccctt

SEQ ID NO: 345548 - DNA, 201 bp, Homo sapiens; identical to SEQ ID NO: 73079

SEQ ID NO: 345549 - DNA, 201 bp, Homo sapiens
aacagaggcctgagcgtagaacagccttgagccctgccttgtgcctcctgcacagggaatgctggcaggataaggagcgccagctgcgagccagggtgaarcgggtcctgcccatcgacgtgcaccagccccagcccctgggtgctgggagcccagctcccctgcctgctgacgccctggtctctgccttctgcttggagg

SEQ ID NO: 345550 - DNA, 201 bp, Homo sapiens
aaggttgggctgtgagggctgtacctggtgccctgtggcccccacccacctggattccctgttctttgaagtggcacctaataaagaaataataccctgcygctgcggtcagtgctgtgtgtggctctcctgggaagcagcaagggcccagagatctgagtgtccgggtaggggagacattcaccctaggctttttttcca

SEQ ID NO: 345551 - DNA, 201 bp, Homo sapiens
agcgtgtagaaaaagcagggctcccatgaggccttggacgggatactgccccctctcccccggggccctgattccccagtggcacgaggcgcacccccccacacacacacaaggacactgtgtagggtcactgttactgtcactccccgagcacgcacagtcaccgctcagccgcaacccggcgctccctctcgcgaagcc

SEQ ID NO: 345552 - DNA, 201 bp, Homo sapiens
tgagcgtgtagaaaaagcagggctcccatgaggccttggacgggatactgccccctctcccccggggccctgattccccagtggcacgaggcgcacccccycacacacacacaaggacactgtgtagggtcactgttactgtcactccccgagcacgcacagtcaccgctcagccgcaacccggcgctccctctcgcgaag

SEQ ID NO: 345553 - DNA, 201 bp, Homo sapiens; identical to SEQ ID NO: 73111

SEQ ID NO: 345554 - DNA, 201 bp, Homo sapiens
cctgacctcagatggtccacctgcctctgcctcccaaagtgctgggattacaggcatgagtgtccggccaattctcatacttttgagttcgtcagaatcayctggaggagtgactgatcaaacacaggttgctagccccatcccgagagtttctatttcagcaggtctggggtggggtctgacagagtgtgctcctcacgg

SEQ ID NO: 345555 - DNA, 201 bp, Homo sapiens
ttggattctggaatggaaacctaaacaaaaggtcttcagctgccttccccagtgaatgctcccattattgcagcccttggaaactctcccgtccctccccmaccccagcctgcaaggagcactgggtgtgatgtcagggctgtcgcccacagccaggaaaactgccctcccacccccaccctaggtcctggaattcagctc

SEQ ID NO: 345556 - DNA, 201 bp, Homo sapiens
atacctaagacttactgctttaaaagtcagtgccaagtgagtggaaaaattcattctgtaggttgttctgcctcaaaggtggcctgggcggagggatcttyggggtacccatgtcaccactgtcattcccaggggcgacgtcgtaaaccaggacgacctgtaccaggccttggccagtggtaagattgcagctgctggact

SEQ ID NO: 345557 - DNA, 201 bp, Homo sapiens
gagctgttgatttgtttttactgcatatccctcggccattcagggagaatgtgaggtggctgatgatagaatctgtccacatgtgcacaggtcagttacartaaaccccagcagtcagaaacagtgggtaacttctgtgtaggtggcaccctttcacattcattatcttttttgatccccacaacaataccttgaagtagc

SEQ ID NO: 345558 - DNA, 201 bp, Homo sapiens
caaaaggtcttcagctgccttccccagtgaatgctcccattattgcagcccttggaaactctcccgtccctccccaaccccagcctgcaaggagcactggrtgtgatgtcagggctgtcgcccacagccaggaaaactgccctcccacccccaccctaggtcctggaattcagctcacggcctggggactgcttcaaaagg

SEQ ID NO: 345559 - DNA, 201 bp, Homo sapiens
ctctccttgctctaggccaggccattgctcggcgtctgaaaccattcggtgtccagagatttctgtacacagggcgccagcccaggcctgaggaagcagcrgaattccaggcagagtttggtaagtgaagccttgatttccacaggagcctatctgtgcccagttgagaggctgtattttctctcaatggtggcattttca

SEQ ID NO: 345560 - DNA, 201 bp, Homo sapiens
tatggggggagcacggattgaggctgccaaatggagacattaactggaactgcctgtgccttgggggaagggccagcggcccctgtggggaacaattcaarctggacttttcctgcttccactatagtatggagaatgtcaaggggtcagactgtgtagaccaattggggccatgcaggaatgcatgcagaaatacccaga

SEQ ID NO: 345561 - DNA, 201 bp, Homo sapiens
agtaactccatggaaatgtcccagcagtagacattggtaaatatggttgaggctgatgttaccaccagatgtttgattcgtagtgggatccgagttggctrcaccccagatgtcctgacagataccaccgccgaactcgcagtctccctgctacttaccacctgccgccggttgccggaggccatcgaggaagtgaagaag

SEQ ID NO: 345562 - DNA, 201 bp, Homo sapiens
agcactttaggaggccaaggcgggaggatcacctaagaccaagagttcgaatctagcctgggcaacatagtgaaaccccatccctataaaaaataaaaaaytagccatgtgtaatggtatgtacctctagtcctagctgctcaggaggctgaagtgggaggatcacttgagcctaggaggttgaggctgtagtaagctgac

SEQ ID NO: 345563 - DNA, 201 bp, Homo sapiens
gggctcagatttaaccaccactctcatgtgctccttctcaccaaggccaacctcagggttttcacactgaaaactacttttctcaggtgcagcttcctgaycaaaactagtctcaacctgagttgcacgagaggccatggacaactgtgccatgttgccagcactgttatcagactggctgggcacctgggcatcttcttg

SEQ ID NO: 345564 - DNA, 201 bp, Homo sapiens
ccaaacagttttaaaatctagcctgaaggtttcagatcagggatttcggcctgtatatcaagagttagagttggccgggcacggtggctcacacctgtaaycccagcactttgggaggccgaggcgggcagattgtttgagcctcaggagttggagaacagcttgggcaatgtggcaaaagtctgtctctacaaaaaatac

SEQ ID NO: 345565 - DNA, 201 bp, Homo sapiens
ccctgctgccctgcaggaccagtgtttttgagggggtcccaaggggccgggtgtggagctagtgtgagcaggtgttgaacccaaagggacacaccagggaycgtaaatgtttatgttgtcagtgacatgggtgtatgacaggagcagtcctcttgcgcatgctctgctgggtctctgtccctaaaggaacagaatgtaggt

SEQ ID NO: 345566 - DNA, 201 bp, Homo sapiens
ccctcctgctgtgaaccccttggcgggggaccctaggagggcaaagaccgcggtgtggagactgtgggtgtggggaagtgcatccaaggccctgggttctscagccctgccacaaccttgctctgtgacctccagcaagaccctgccccttctgggcgtgtgcgtagtatgagggaggacctagctcagtgccaagcccca

SEQ ID NO: 345567 - DNA, 201 bp, Homo sapiens
cacagggcgccagcccaggcctgaggaagcagcggaattccaggcagagtttggtaagtgaagccttgatttccacaggagcctatctgtgcccagttgaraggctgtattttctctcaatggtggcattttcaggcagagggcaggagctccaggcatgtccaggggctgctgtctggtagatgtttaatctacctgccc

SEQ ID NO: 345568 - DNA, 201 bp, Homo sapiens
gtgcagcaaaggcctctgctgtcaccacctcgctatccagctggatcatgttcatggtctgatctccttctgccactgagaacagggctcggaaatgcgtrctgcatgctgccagcacggagcggtgggctttaaagtgtctattccccactacaatgacacaatcacagagctggccatgaagtctctggtagttcagct

SEQ ID NO: 345569 - DNA, 201 bp, Homo sapiens
tgtgggccaaccttgccaggtgcttcatatacataaacttttaatcctggtagcactgtgaagtcagtattataattcccattgcacagattaaaaactgraggctggacttagggttaagtttcttcccaaagccatgcagctcccaggtggaggagctggggcttgtactcagaagtgtctgactgctgtctgatcact

SEQ ID NO: 345570 - DNA, 201 bp, Homo sapiens
tgggaggccaaagtgagcggatcatgaggttaggagttcgagaccagtctggccaacatagtgaaaccccgtctctagtaaaaatacaaaaaaaattagcygggtgtggtggtgggtccctgtaatcccagctacttgggaggctgaggcaggagaatcatgtgaacccaggagacagaggttgcagtgagctgagatcac

SEQ ID NO: 345571 - DNA, 201 bp, Homo sapiens
ttctgagggcgtttcctgcgataccaggcccgagcgggcagatagcttgctctggcacaggcactgcccctccctcctgctgtgaaccccttggcgggggmccctaggagggcaaagaccgcggtgtggagactgtgggtgtggggaagtgcatccaaggccctgggttctccagccctgccacaaccttgctctgtgacc

SEQ ID NO: 345572 - DNA, 201 bp, Homo sapiens
tctgagggcgtttcctgcgataccaggcccgagcgggcagatagcttgctctggcacaggcactgcccctccctcctgctgtgaaccccttggcgggggamcctaggagggcaaagaccgcggtgtggagactgtgggtgtggggaagtgcatccaaggccctgggttctccagccctgccacaaccttgctctgtgacct

SEQ ID NO: 345573 - DNA, 201 bp, Homo sapiens
gtttggcagtgccaccaaaaagtcaaatggggtctgagactgcattcacagaagcagagggtccaggacaaaggaggggactgcttgaccaggtgtctccyttgtgaaaacctctccagttctcagaggttaggaaaaacctgagtggctttccagatggcttggaccatgtgaggacagcatcagccagtcacagtctca

SEQ ID NO: 345574 - DNA, 201 bp, Homo sapiens
tctctaatgagggatacagctttgtaaaacacaggcaaatacataaataaaccaaagcaggattccttaagaactcaccaggtgataaaagcaagttgccyaagggtcagggggcttcatgattccggctccataaagaacagatgaagactacaaatgtgttggggccgttaggagtggttaccgtgagagagcccattc

SEQ ID NO: 345575 - DNA, 201 bp, Homo sapiens; identical to SEQ ID NO: 73083

SEQ ID NO: 345576 - DNA, 201 bp, Homo sapiens
caaagacaaacacaagtcttttctgacttcctaacatggaactgtaacatctgtaatacaagttggttaaaatactgctcaaacagcacatagggaaacamtaccttgtcactctctacaagtacacactccatttacaatttggtttttaaaccagaaaaaactgttaaaacatctatccaacagtgatgtattcaaaag

SEQ ID NO: 345577 - DNA, 201 bp, Homo sapiens; identical to SEQ ID NO: 73084

SEQ ID NO: 345578 - DNA, 201 bp, Homo sapiens
tttggcagggggctttgatgactcttcttctttatatttacttatctttttttttttttttttgagacagtctcactctgctgcacaggctggagtgcagkggctcgatcgatcgtggcttactgcagcctcgacttcttgggcccaatcagttctcccacctgagcctcccgagtagctgggactacaggcgcaaacaat

SEQ ID NO: 345579 - DNA, 201 bp, Homo sapiens
tagtctctctttattcttcttaccggcaaacccaagccatgaaaacagcccagctgaaggctgctgaaccacccttcttatctccctctctctctctctcycctttccagtgattctgccccacattggcagtgccacccacagaacccgcaacaccatgtccttgttggcagctaacaacttgctggctggcctgagagg

SEQ ID NO: 345580 - DNA, 201 bp, Homo sapiens
caccaggcccagccaatttttgtatttttagtagagatggggtttgtccatgttggccaggctggtctcgaattcctgacctcagatggtccacctgcctytgcctcccaaagtgctgggattacaggcatgagtgtccggccaattctcatacttttgagttcgtcagaatcacctggaggagtgactgatcaaacacag

SEQ ID NO: 345581 - DNA, 201 bp, Homo sapiens
agtgggccaggcgtggtggctcatgcctgtaatcccagcactttgggaggctgaggtgggtggatcacgaggtcaggggttcgagaccaacctggccgatwtggtgaaaccccatctctactaaaaatacaaaaattagccaggtatggtggtgcatgcctatagtcccagctgtttgggaggctgaggcagaagaatcgc

SEQ ID NO: 345582 - DNA, 201 bp, Homo sapiens
gaatcatgtgaacccaggagacagaggttgcagtgagctgagatcacaccattgcactccagcccaggtgacggtgtgagactccgtctcaaaaaaaaaaagaaaaataagtgaacgcctggcaggaacgttggctctgctcagcactggatcctgatcactgtgccagtccagcccacgcatagtccctgaccccaggtg

SEQ ID NO: 345583 - DNA, 201 bp, Homo sapiens
gcagtcacagctgccgtgtactgggtgcctgcgtgtacccaggacagcccaggaccgtgtattactcattagtgcacaagtattacttagtgcacaatatmcagtctctagaagatgacttcttgccttcagtcgccgctccctttgatggctgtggttaggggtgtgctcgttcctctgccctggtttagacaggtacct

SEQ ID NO: 345584 - DNA, 201 bp, Homo sapiens; identical to SEQ ID NO: 73113

SEQ ID NO: 345585 - DNA, 201 bp, Homo sapiens; identical to SEQ ID NO: 73103

SEQ ID NO: 345586 - DNA, 201 bp, Homo sapiens
attgtcagacacacccaggcttgatttggatccacaggcagagccaagggaaggtgtgattctctgaggaaagagtgattctgatatatgtacttgtcacrttggtgttggacacatttgcgccaaaagtatggtaattctattattaaataattctctgagagaccgtcttggcctgtaaatggggaagctaacaagtgg

SEQ ID NO: 345587 - DNA, 201 bp, Homo sapiens
agggacatggcggtcactgaccaggcccttggacgtttggcagggggctttgatgactcttcttctttatatttacttatctttttttttttttttttgaracagtctcactctgctgcacaggctggagtgcagtggctcgatcgatcgtggcttactgcagcctcgacttcttgggcccaatcagttctcccacctgag

SEQ ID NO: 345588 - DNA, 201 bp, Homo sapiens
cctggcaggcagatcaaagagggagcaaagtaactccatggaaatgtcccagcagtagacattggtaaatatggttgaggctgatgttaccaccagatgtytgattcgtagtgggatccgagttggctacaccccagatgtcctgacagataccaccgccgaactcgcagtctccctgctacttaccacctgccgccggtt

SEQ ID NO: 345589 - DNA, 201 bp, Homo sapiens
accactgcacctggcccacccttgctaaatggaaccctttttgtgggccaaccttgccaggtgcttcatatacataaacttttaatcctggtagcactgtkaagtcagtattataattcccattgcacagattaaaaactggaggctggacttagggttaagtttcttcccaaagccatgcagctcccaggtggaggagct

SEQ ID NO: 345590 - DNA, 201 bp, Homo sapiens
gaagcaaaccgtgccctggtattgtcagacacacccaggcttgatttggatccacaggcagagccaagggaaggtgtgattctctgaggaaagagtgattytgatatatgtacttgtcacattggtgttggacacatttgcgccaaaagtatggtaattctattattaaataattctctgagagaccgtcttggcctgtaa

SEQ ID NO: 345591 - DNA, 201 bp, Homo sapiens
aaattgtaagtttggggtgagctggcagtttggcagtgccaccaaaaagtcaaatggggtctgagactgcattcacagaagcagagggtccaggacaaagraggggactgcttgaccaggtgtctcctttgtgaaaacctctccagttctcagaggttaggaaaaacctgagtggctttccagatggcttggaccatgtga

SEQ ID NO: 345592 - DNA, 201 bp, Homo sapiens
atgaagtcatttgcttaagtcacaccattaccaagaggccgagcttggattcacacccagcaccctggctccagacccaagctctcaaccacaatacaagyctgtggagtgggaggggtgaaatacatgagtgaggggtgacttctaggtattggcttggggtggctgtccctttgatggatatgtgggaggagcgcaggt

SEQ ID NO: 345593 - DNA, 201 bp, Homo sapiens
aggaaccctgggactggttttccagggaaccctggaattattttttaagtgctacagcatgtacaaggacactggcccacaagcttgcttctcacacgtakaaactgacagactaagaggtagatgagagattccaggttccatctagcagtggagaggcagggctccagcatgtatcagagataagccccaaaagcaaag

SEQ ID NO: 345594 - DNA, 201 bp, Homo sapiens
agagggtccaggacaaaggaggggactgcttgaccaggtgtctcctttgtgaaaacctctccagttctcagaggttaggaaaaacctgagtggctttccaratggcttggaccatgtgaggacagcatcagccagtcacagtctcaggggagctgaggtgctgtctccagatccctggggcagtgtgggctggctgggggc

SEQ ID NO: 345595 - DNA, 201 bp, Homo sapiens
actgttatcagactggctgggcacctgggcatcttcttgagtgccaaaagactgatcaaacatgatcgcactatcttcctggttatcagtcattccgtcarctttaggattatccacaattttcagagaatctggtgaaaagaactcctcccgagaatgaacccctgaaggcccattctccggtgtaacatctgaaatggc

SEQ ID NO: 345596 - DNA, 201 bp, Homo sapiens
gagggagcaaagtaactccatggaaatgtcccagcagtagacattggtaaatatggttgaggctgatgttaccaccagatgtttgattcgtagtgggatcygagttggctacaccccagatgtcctgacagataccaccgccgaactcgcagtctccctgctacttaccacctgccgccggttgccggaggccatcgagga

SEQ ID NO: 345597 - DNA, 201 bp, Homo sapiens
ggacaaaggaggggactgcttgaccaggtgtctcctttgtgaaaacctctccagttctcagaggttaggaaaaacctgagtggctttccagatggcttggmccatgtgaggacagcatcagccagtcacagtctcaggggagctgaggtgctgtctccagatccctggggcagtgtgggctggctgggggctagttacagt

SEQ ID NO: 345598 - DNA, 201 bp, Homo sapiens
tgaaaagggtctgccctgagggccgctgttccggaaatgctgggtggtgtccctaccctttgcgggactgggaacgagacatggactctccttgctctagrccaggccattgctcggcgtctgaaaccattcggtgtccagagatttctgtacacagggcgccagcccaggcctgaggaagcagcggaattccaggcagag

SEQ ID NO: 345599 - DNA, 201 bp, Homo sapiens
aaaccattcggtgtccagagatttctgtacacagggcgccagcccaggcctgaggaagcagcggaattccaggcagagtttggtaagtgaagccttgattyccacaggagcctatctgtgcccagttgagaggctgtattttctctcaatggtggcattttcaggcagagggcaggagctccaggcatgtccaggggctgc

SEQ ID NO: 345600 - DNA, 201 bp, Homo sapiens; identical to SEQ ID NO: 73090

SEQ ID NO: 345601 - DNA, 201 bp, Homo sapiens
gagtttggtaagtgaagccttgatttccacaggagcctatctgtgcccagttgagaggctgtattttctctcaatggtggcattttcaggcagagggcagragctccaggcatgtccaggggctgctgtctggtagatgtttaatctacctgcccctggacactggcccactcagggagcacagggacttacccaggtcct

SEQ ID NO: 345602 - DNA, 201 bp, Homo sapiens
cagcactgttatcagactggctgggcacctgggcatcttcttgagtgccaaaagactgatcaaacatgatcgcactatcttcctggttatcagtcattccrtcagctttaggattatccacaattttcagagaatctggtgaaaagaactcctcccgagaatgaacccctgaaggcccattctccggtgtaacatctgaaa

SEQ ID NO: 345603 - DNA, 201 bp, Homo sapiens
ctcctttgtgaaaacctctccagttctcagaggttaggaaaaacctgagtggctttccagatggcttggaccatgtgaggacagcatcagccagtcacagyctcaggggagctgaggtgctgtctccagatccctggggcagtgtgggctggctgggggctagttacagtggggcagccagccccccacccgctttggagg

SEQ ID NO: 345604 - DNA, 201 bp, Homo sapiens; identical to SEQ ID NO: 73085

SEQ ID NO: 345605 - DNA, 201 bp, Homo sapiens
tacagtggggcagccagccccccacccgctttggaggagacaggagcaggcaactcgggctgtgctgatgaaaagggtctgccctgagggccgctgttccrgaaatgctgggtggtgtccctaccctttgcgggactgggaacgagacatggactctccttgctctaggccaggccattgctcggcgtctgaaaccattcg

SEQ ID NO: 345606 - DNA, 201 bp, Homo sapiens; identical to SEQ ID NO: 73087

SEQ ID NO: 345607 - DNA, 201 bp, Homo sapiens
ccacacttcaggcaggcgtaaggcttttcacctgtgtgaacacggatgtgcttcttgcaatctgtcaaagtcagaaaagttttgcagcagattttgcaggmatacttgcgagctccctctacaaccaaaacattgtgctctgataaggccttcttgcactttgacagaacatctgcagatgccctggtcaactgtggaggg

SEQ ID NO: 345608 - DNA, 201 bp, Homo sapiens
  misc_feature (1)...(201): n = A,T,C or G
ctgagggccgctgttccggaaatgctgggtggtgtccctaccctttgcgggactgggaacgagacatggactctccttgctctaggccaggccattgctcngcgtctgaaaccattcggtgtccagagatttctgtacacagggcgccagcccaggcctgaggaagcagcggaattccaggcagagtttggtaagtgaagc

SEQ ID NO: 345609 - DNA, 201 bp, Homo sapiens
aaaacaggtgacctgggaatggaagagtgaaacatgcaggaccacagggctcgcactgctggctggcagcagtcacagctgccgtgtactgggtgcctgcrtgtacccaggacagcccaggaccgtgtattactcattagtgcacaagtattacttagtgcacaatatacagtctctagaagatgacttcttgccttcagt

SEQ ID NO: 345610 - DNA, 201 bp, Homo sapiens
tccccctgtgaggctgttgtgacagttttgagaaaaggttcagactcagaggctgccagatgggaagggacccttgtgagtcagtgctgagccgccccacrtcctggccttggcctggaagctttgtggtgtcctgcttgcaggagagggtagagagggtcacgtcccagccaccttcttggcactctcagaggtgtccat

SEQ ID NO: 345611 - DNA, 201 bp, Homo sapiens
caggtggaggagtctgctctggccagtgggtgagtcaagctctgagtagaatgggcccaagggaggctcagcagctctcattctggaggttttgaagtgakagcctggcttcttcctccccttccaagttcagaagcaagtgggagacagatgtgggagttgggcaggaggaggtcaggacttcagcctcaccgctggtgt

SEQ ID NO: 345612 - DNA, 201 bp, Homo sapiens
gccaaggtgggaggattgcttgagtccaggagtttgagaccagcctgggcaacatagcaagaacctatctctacaaaaaaataaaaattagctgagcatgstagtgtgtatctgtaggcctagctagctggaaggctgagataggaggatcgcttgagtcaaggagttcaaggctttagtgagctatgatcacgcaattgt

SEQ ID NO: 345613 - DNA, 201 bp, Homo sapiens
tttttaaattgtggtaaaatatacatcatagagaatttaccattttaaccattttgaagtatgcaattttaggctgagcatggtggctcatgcctataatyccagtactttgggaagccaaggtgggaggattgcttgagtccaggagtttgagaccagcctgggcaacatagcaagaacctatctctacaaaaaaataaa

SEQ ID NO: 345614 - DNA, 201 bp, Homo sapiens
ggtcagaatgtccatggatagaatcagagcatattaaagtcatgggactttttgttttaaagccctccgtggcccccagatctcccccatggtggtcacckgccagggctctgacacggctgcagacacctggaataagagaagcaggtctttctcagatgttcctccctcttattggaaggaagacaagaattcaccctt

SEQ ID NO: 345615 - DNA, 201 bp, Homo sapiens
ggacatttctttctctgcagctgatggattaatgcttttagaattcctcttcatcccaccctttggacatgggccagccgcctccttgctgcatgcctgtrgaagaggggattttccacctcggttgtctgttagaaatacctgggaaactttaaaaaatttatattttaatttttaattgttgtgggtaaatagtaggtg

SEQ ID NO: 345616 - DNA, 201 bp, Homo sapiens
actggggcccactttttgttcccttctgtctctttcctccccatgctctgcctcgtctctctgccctttctgtttctgcatcatagaagtcaggagctggrcttgccaaccagaagctccccaggtgggagaggaaggaagggatctttgcttggcctccccgctgtggagcaggcaaagggctggaggggcagggtctct

SEQ ID NO: 345617 - DNA, 201 bp, Homo sapiens
gctggagagatgggcggggccaagggaaggggtttggacttgaccctgagcaggtagaagccactgaagggatcggagcaggaagtgacctgagcatgtgstgcgtgccatgtggtgagggccctggggggaccgttgtaggcagggataccattaggaggctctgcagtcttccaggtcagaaacaatggttcaggagat

SEQ ID NO: 345618 - DNA, 201 bp, Homo sapiens
cccagccggggccaaagcctttattgggatccagggaaaccaagcagttttcccaatgggagttttaattgatgggtttggaacaagcaggcaggagttcygggaggtcacaggtgactgggaagtggttgctgtgcatatctacacaggtcatgtgaagtgtagggatcggtgggcaagtcaagtaggttgtatctagct

SEQ ID NO: 345619 - DNA, 201 bp, Homo sapiens
taactactgtttttataaaaattgcgattagatggttcacgtgttttttggtttttaaatgctcatgagtcaaaactgtaaagcattttttgtaacagctktattgaaatatattcacacaccattcaattcacccatttgaagtgtacaattcaacgtgcatgtgtttagatggggagcaaatggtggttctggaattcc

SEQ ID NO: 345620 - DNA, 201 bp, Homo sapiens
agagacgctgttggaaggaacttgtccaggccctgtggctgataggaggtagaactgggcttggggcctgtactctgcagcgcacctcttgctctgctctscagagcccatgggttctcagctggactcccactcagcccctctctggctctgggctccatggtcatttgcttctgcctcctccgtcttgcccagcaccat

SEQ ID NO: 345621 - DNA, 201 bp, Homo sapiens
ctaggtggggatccagggcacacgctggcagcaggaggaaggacaggtggctgctgccacctttgccgctgggcctcccgggctctcactttttcttcgargtgtcagggatcttccaagtccttttttgagccccttccttacagactttgaggaaaagaggactcagagagggggttcccattggagctggtggtggca

SEQ ID NO: 345622 - DNA, 201 bp, Homo sapiens
actgcatgtgcctgaggacaggcctggcttcttcgggatggtgagtgagggtggtgggcccacggcaggcagggacttccctggcctctgggtctgctctkcaaatcctgggcaagaaaggccacgtcatggggagcactggcttcctccactcccacccgcctgcccaccccccaccacctttttatccactgcccttct

SEQ ID NO: 345623 - DNA, 201 bp, Homo sapiens
ttgttttctcaggaaccttttggggatgtgacagagaggaagcagctccgggacaagctccagtgtaaagacttcaagtggttcttggagactgtgtatcyagaactgcatgtgcctgaggacaggcctggcttcttcgggatggtgagtgagggtggtgggcccacggcaggcagggacttccctggcctctgggtctgc

SEQ ID NO: 345624 - DNA, 201 bp, Homo sapiens
tctgttagtgtctataaatctggactgaaatgccacatttatgttttatttagctccagaacaaaggactaacagactactgctttgactataaccctccsgatgaaaaccagattgtgggacaccaggtcattctgtacctctgtcatgggatgggccagaatcaggtaggtatgagcctcaaaagaggagaaagctgtg

SEQ ID NO: 345625 - DNA, 201 bp, Homo sapiens; identical to SEQ ID NO: 73121

SEQ ID NO: 345626 - DNA, 201 bp, Homo sapiens
gtgtttcattgtgattaaacctcttgcacttctgagaaattgaaatcatagagcgtttggtcagaatgtccatggatagaatcagagcatattaaagtcaygggactttttgttttaaagccctccgtggcccccagatctcccccatggtggtcaccggccagggctctgacacggctgcagacacctggaataagagaa

SEQ ID NO: 345627 - DNA, 201 bp, Homo sapiens
ttttattccattgggtgtgtacccagtaatgggattgctgggtcaaatggcatttctgcctctaggtctttgaggaatcgccacactcttttccacaatgrttgaactaatttacactcccaacaacagtgtaaaagctttcctctttctccacaaccttgccagcatctgttgttttttgactttttaataatagccatt

SEQ ID NO: 345628 - DNA, 201 bp, Homo sapiens
gttctcataattcagttctcacttaaaagtgagaacatgtggtatttggttttctgttcctgcattagtttgctgaggatgatggcttctagctccatccrtgtccttgcaaaggacataatctcattcctttttatagctgcatagcattccgtggtctacatatataccacattttctttatccagtctatcattgatg

SEQ ID NO: 345629 - DNA, 201 bp, Homo sapiens
taggtctttgaggaatcgccacactcttttccacaatgattgaactaatttacactcccaacaacagtgtaaaagctttcctctttctccacaaccttgcyagcatctgttgttttttgactttttaataatagccattttgacgggtgtgggattgtatctcttcttattgattcattaaagaatgtcgtgtcttccaac

SEQ ID NO: 345630 - DNA, 201 bp, Homo sapiens
cacagtgcctttcaaactttgacagatgtaagaatttcttttttttttttttgagacggagtctcgctctgtcgcccaggctggagcacagtggcacgatstcagctcactgcaacctccgcctcctgtgttgaagtgattcttctgcctcagcctcccgagtagctgggattatgggcatgtgccatcatgcccggctaa

SEQ ID NO: 345631 - DNA, 201 bp, Homo sapiens
caagtgattctcctgcctcagcctcctgagtagctgggattatagctgtgggccaccacacccagctaatttttgcatttttttagtagagacaggttttygccatattaaccaggctggtcttgaactcctgacctcaggagatctgcccgcctcagcctcccaaagtgctgggattacaggtatgagccaccgtgccca

SEQ ID NO: 345632 - DNA, 201 bp, Homo sapiens
tgaaaacagagccattgttcttaggggaaatacagggttaggttcctgccagacttggggcacagttttgtcagcagatcaatacagaaccttgttttctrtgtgtttctgttcaaagacacctgtttaacatatatcgttgcatcattaacattgcactcatggctaacagcacggtaactcatgccagaatgaagctta

SEQ ID NO: 345633 - DNA, 201 bp, Homo sapiens
acggtaactcatgccagaatgaagcttacctagcacgtgttattttctcttcatcacaaccttcttgcatttaggaacactaggtagcacttcagcactaygactgggggacattctagaatagctggtgcagtcaccaatacaaagcaggaaaaaatgtggtgcccaacagatggtgaaaagaacactggtttacaggat

SEQ ID NO: 345634 - DNA, 201 bp, Homo sapiens
tcttacctttgcgtctagctcttgaagcaggctctcctctcatgccaggtaccctccccaagccttgtgtggcatctgttagtgtctataaatctggactraaatgccacatttatgttttatttagctccagaacaaaggactaacagactactgctttgactataaccctcccgatgaaaaccagattgtgggacacca

SEQ ID NO: 345635 - DNA, 201 bp, Homo sapiens
aggaaaagaggactcagagagggggttcccattggagctggtggtggcagcctgccgtgtgcaccaggcacctgccactcctctccccttcaagccattcytgctttacaggtgtggaaataggttcggaaaggataggtgacccacccaaggcccctcagctggaatgtggtaggactggtctggagggactatggccct

SEQ ID NO: 345636 - DNA, 201 bp, Homo sapiens
agggcattctcttggcagtttctgggactgttcatttcattggccagtggaggtgatgtaggaggtgaggttgcaggatgggcagggccagatctggaagrgccttggaggccaccataaggggttgaggcttaagtgcaagcttgatggggagctttgcagacagcaaggtccaggtccctctgaggagctcactgagcc

SEQ ID NO: 345637 - DNA, 201 bp, Homo sapiens
atattttccatatggtctctggtttttctcattcaatacttttataattaaattccttcccttcccttccttccttccttcctttttttgcttatttactrtggcatcttcagatcatttggaatttattttgatgtaaagtgtgatgttgggacttgatttgaattttttccaaatggttatcaagttgtcccaattatt

SEQ ID NO: 345638 - DNA, 201 bp, Homo sapiens
cggctttctccagaatggatgataccttccattgaggaaacaagaggaatcctcaatgttttatgatgtagtcttggaagtcacatactgtttctcctgcwtttcatgtgtggtggttttaaaatatatccacaaattctttgatagcctctgtctaagagatggagccgcattctcctccccttgaatgtggaccaggct

SEQ ID NO: 345639 - DNA, 201 bp, Homo sapiens
tgcccagaaaagccacacaccatggtgttacctattgaatacaggaaaataagaaggaaaaatacttctgcacaccccagacgtctctgatcttcttgaaygtcctcctcttcccatctttctcccaaccagaagccattgtaagccctcaaggaatggtagtggacactagaaacaataaaatcagtttgacatatcaaa

SEQ ID NO: 345640 - DNA, 201 bp, Homo sapiens
tctttagcctcactcagtcgggaacagttcctcagtctctcatggtctgttatgacgttgacatttttgaagagtaaagacccgttggtttataaaatgtytcagtttgggtctgtcagacactttctttgtgatttattttatggtatgtattactgcaaaatttagtggcttaaaatagcaataaacacttgttatttc

SEQ ID NO: 345641 - DNA, 201 bp, Homo sapiens
ttattctaaagatgattaaaagctggaatatgttttcctgcagaaaaatgttgtcactagcaatgacatttgcaggctgcccagaaaagccacacaccatrgtgttacctattgaatacaggaaaataagaaggaaaaatacttctgcacaccccagacgtctctgatcttcttgaatgtcctcctcttcccatctttctc

SEQ ID NO: 345642 - DNA, 201 bp, Homo sapiens
acattctctcatgataccatgatataatatcaagtccagaatatttatccaatatcggatgtctatagctgtcccaacttattatttttttttttttagaygaagtctcgctctgttgcccagtctggagtgcaatggtgctatcttggctgactgcaacctccgccccccgggttcaagccattctcctgcctcagcctc

SEQ ID NO: 345643 - DNA, 201 bp, Homo sapiens
ttcaaagaacaaagacattctctcatgataccatgatataatatcaagtccagaatatttatccaatatcggatgtctatagctgtcccaacttattattwttttttttttagacgaagtctcgctctgttgcccagtctggagtgcaatggtgctatcttggctgactgcaacctccgccccccgggttcaagccattct

SEQ ID NO: 345644 - DNA, 201 bp, Homo sapiens
tattatacagtagatttgtgttagatgattttgcccaactatagactaatggaagtgttctgagcacatttaagatagactaggctaggctgtggtgttcmgtaggttaggtgtattaaatgcattttctacttagaatgttttcaacttacgatgagtttattgggatgtaaccccaccgtaagtcaaggggcattggta

SEQ ID NO: 345645 - DNA, 201 bp, Homo sapiens
aaactttttatcaagattttttgggtgtatataccaggagtgtttccctagacatcttagtcttccatgttgccagaagtagaagtcctatattcactttktaaaaataattattttctacactagacaggattcttttggttaaaagtaactgaaagcccaatgcaaactgccttaaatataaaagaaaatatattgggt

SEQ ID NO: 345646 - DNA, 201 bp, Homo sapiens
ttttcactgttagtctttttgaataaaactttgttgggattgatagtagttcctccactcaccagcctaacgcatgtttagctcctcgaaaccccgagggygcccgctgaggcaaggtggaggggaagctttcaggttatacccagcttcagattaaatccagcccaggggagataaaatcctggttcttttgctcgtcac

SEQ ID NO: 345647 - DNA, 201 bp, Homo sapiens
agcctggatcactgggctcaagtgatcctcccacctcagcttcttaagtagctgggactacaggtgagcaccaccacacctggctaattttttatttttayttttagtaaagactaaggtctcgctatgttgcccaggctggtcttgaactcctgagctcaagcatttctcctgccaaggcctcccaaagtgctgggatta

SEQ ID NO: 345648 - DNA, 201 bp, Homo sapiens
gcctagcctcatgcttctgcctgaggcatttttcactgttagtctttttgaataaaactttgttgggattgatagtagttcctccactcaccagcctaacrcatgtttagctcctcgaaaccccgagggtgcccgctgaggcaaggtggaggggaagctttcaggttatacccagcttcagattaaatccagcccagggga

SEQ ID NO: 345649 - DNA, 201 bp, Homo sapiens
cttggccagagagaccatgaatgatggaatgaggatgccccacctctgccccactgtttccactgtcttccctgttttggggatctcctcatgcctagccycatgcttctgcctgaggcatttttcactgttagtctttttgaataaaactttgttgggattgatagtagttcctccactcaccagcctaacgcatgttta

SEQ ID NO: 345650 - DNA, 201 bp, Homo sapiens
tccttgagacatccccggatatcctgctagaagaagtgatccttgtagatgactacagtgatagaggtgagtcccggccagggctctgggaagagcctgtscttctgtagcagtgtctgggaggtgagagtgggatgcaggagggctaaagtaggcccagtaaggatgggcttcctgtatcctcctgtacccaaggaagac

SEQ ID NO: 345651 - DNA, 201 bp, Homo sapiens
atctttcctcttcccacatcagtggaaaatgttgtgttacatgttggctgccccatttttagtttttcgagtacacgtcccagaaagaaatacgctataayacccaccagcctgagggctgcattgctgtggaagcaggaatggatacccttatcatgcatctctgcgaagaaactgccccagagaatcagaagttcatct

SEQ ID NO: 345652 - DNA, 201 bp, Homo sapiens
tccccaggggaccatgacctatgtcccctttgtcactccatccccagtgccagcctgggctagatcctgagttcctgaagttccgctgtatttgcaggtgyaaagagaagaaatatgattatgataatttgcccaggacatctgttatcatagcattttataatgaagcctggtcaactctccttcggacagtttacagtg

SEQ ID NO: 345653 - DNA, 201 bp, Homo sapiens; identical to SEQ ID NO: 73127

SEQ ID NO: 345654 - DNA, 201 bp, Homo sapiens; identical to SEQ ID NO: 73122

SEQ ID NO: 345655 - DNA, 201 bp, Homo sapiens
caaatatatattgaacagaaacatatgtgaattctgaaggaaatgtccccacttatattcactagaccataatagaaagcttagttcttagggctggatcytttttttttttttttttttttgagacggagccttgctccaccaaggctggagtgcaggggtgcaatctcagctcactgcaacctctgcctcctgggttca

SEQ ID NO: 345656 - DNA, 201 bp, Homo sapiens
gctgcgatgggtccatttcccttcctcccatcccacaccaacacagcattcagcactgcaggcaggaggtgacatgcaccagccctgtctccctgtctagmaagctgggcaggcatgggaagggccatttcctccacgctcatgaagcactgcagtagcggttcactgagggctgtgggatgcggaggaacccatcacaca

SEQ ID NO: 345657 - DNA, 201 bp, Homo sapiens
cagttgacaggacccttggaggatgcaggaatggagagaagtgttggttctgggcctctgaagcttcaccgtaccaaggagttatcagacaccaggaaacraagggatagagattcagatgttgttttttccaatctggattcaccccaatgccacttgaatatgaggccttcttatggtcaagagtaaactttcttaatt

SEQ ID NO: 345658 - DNA, 201 bp, Homo sapiens
cctcagctgggggccaggtgtatctgtctgggtgaagggctgtaattcaggctgggcaggggagattcagtcctgggggagtctgaagaccagaaaaggayccccagccctggaaagcagttgacaggacccttggaggatgcaggaatggagagaagtgttggttctgggcctctgaagcttcaccgtaccaaggagtta

SEQ ID NO: 345659 - DNA, 201 bp, Homo sapiens; identical to SEQ ID NO: 73126

SEQ ID NO: 345660 - DNA, 201 bp, Homo sapiens
cctgcctccctgtctttgcaattataaataaccctgcctctaacaccttgggtcagacagaaggaaggataaagtaacagatctgcatttcagatgatttycttagaattaattgttaagtggaatgacaggtttaatgcatagggccaccttgcaaggtggtgtttagggacattgcctcagctgggggccaggtgtatc

SEQ ID NO: 345661 - DNA, 201 bp, Homo sapiens
aagtattgatttggaggttacaaatcaattttattatagcatgtagggaaattcagatacagaaccagtaaataatgaggatggactgtaccaacatagayagttggggatacctggtgtcacaggccaggcattgtccatgtgttttggttttcctctttgtagccagtagggtgagtccacaaacacagggtacaagtt

SEQ ID NO: 345662 - DNA, 201 bp, Homo sapiens
ttccagttaatgaagtcttacattttaagcatcaaaactttgtgtaaatgttggtgcttttcagtggaaaattaagatttttaataatattttatatggtrttctgccctcataaaaactgaataaacaagaatttggccttctaccgaggactcacgccctctgtaataagtaccagatgctgtgcttggttgtcccatc

SEQ ID NO: 345663 - DNA, 201 bp, Homo sapiens
aaatagccggtgtgcttcaatcaattcatcttttcttctttgtattgttttttgagacaggcttctattctgtcacccaggctggagcacagtggcaccaytgtagctcactgtagcctggatcactgggctcaagtgatcctcccacctcagcttcttaagtagctgggactacaggtgagcaccaccacacctggctaa

SEQ ID NO: 345664 - DNA, 201 bp, Homo sapiens
tcgccacactcttttccacaatgattgaactaatttacactcccaacaacagtgtaaaagctttcctctttctccacaaccttgccagcatctgttgtttyttgactttttaataatagccattttgacgggtgtgggattgtatctcttcttattgattcattaaagaatgtcgtgtcttccaacccagggctgcttaac

SEQ ID NO: 345665 - DNA, 201 bp, Homo sapiens
aagctttcctctttctccacaaccttgccagcatctgttgttttttgactttttaataatagccattttgacgggtgtgggattgtatctcttcttattgrttcattaaagaatgtcgtgtcttccaacccagggctgcttaactttgttgaaatactgtagactggagcacaaaggtaattttctaaggtatgacaaaaa

SEQ ID NO: 345666 - DNA, 201 bp, Homo sapiens
gcctaattgcatttctcttttctctgtatctgaacctctattgagaagcattccaatttggcaagcggatccaagacattatgaattgtaatccttgtctsttttctaatctgaccgcagatcttaaatgtgttgggtgtctgaacagaggccaaagggctcaggtccagacctacctaacacaaccgccttctggcatta

SEQ ID NO: 345667 - DNA, 201 bp, Homo sapiens
gaatggaattgtctgtgtgacagcctctcatactagaagctagaattaggtgcaaggatgttttctatcctctgtgctccacacagggcctggcatgcgasgaatgctccatcaaagctggctggtggttagtaagtgagcatcagtgaacacaggggctttgaaaggaagcactaggacccatggggtctcactgttttg

SEQ ID NO: 345668 - DNA, 201 bp, Homo sapiens
acaccatcgtggtgcactgcagcttcaaattcctgggctccagtgatctttctgcctcagcctcctgagtagctgggactataggtgtgtgccacggtacyaggctcagccagcatttactaaataccttctgtgtgctaggcattatgtgtgttgaatgatagaaacatggcctcatggctcccaggaaatcccacatga

SEQ ID NO: 345669 - DNA, 201 bp, Homo sapiens
agattttccagttaatgaagtcttacattttaagcatcaaaactttgtgtaaatgttggtgcttttcagtggaaaattaagatttttaataatattttatwtggtgttctgccctcataaaaactgaataaacaagaatttggccttctaccgaggactcacgccctctgtaataagtaccagatgctgtgcttggttgtc

SEQ ID NO: 345670 - DNA, 201 bp, Homo sapiens
cttcttgagtgtcattgtaaactaatgggtgtttaaatagccggtgtgcttcaatcaattcatcttttcttctttgtattgttttttgagacaggcttctrttctgtcacccaggctggagcacagtggcaccattgtagctcactgtagcctggatcactgggctcaagtgatcctcccacctcagcttcttaagtagct

SEQ ID NO: 345671 - DNA, 201 bp, Homo sapiens
cacaccaacacagcattcagcactgcaggcaggaggtgacatgcaccagccctgtctccctgtctagcaagctgggcaggcatgggaagggccatttcctccacgctcatgaagcactgcagtagcggttcactgagggctgtgggatgcggaggaacccatcacacaggctcgtgttggtggtgacgcaggtgcatgacc

SEQ ID NO: 345672 - DNA, 201 bp, Homo sapiens
gccttcttgtgatttagatggcacaaatgaagagcccacctagacattctagaatggtggccctaggctattggttttagtggaaacacattaaaaaaagaaaaaaaaaaaaaaagcagggctgacaagagaagaaataaattttcatccaaaatactaaggatgtgatttcagactaaaggattgttctctacattgaat

SEQ ID NO: 345673 - DNA, 201 bp, Homo sapiens
gtagagacggggtttcaccttgttagccaggatggtcttgatctcctgacctcgtgattcacccgcctcggcctcccgaagtgctgggattacaggcgtgrgccactgtgcccagcccagctaatttttgtatttttggtagagacaggtttttgccatgttgcccaggctgatctccaactcctgggctcaagcgatcct

SEQ ID NO: 345674 - DNA, 201 bp, Homo sapiens
cactccatctggcttcatctgaacaacagcagctaatcgtggcttccccaacatagtcgatctggttccagaaatagagaataaattgggtgctcagataygagtaaggggagaatttattcctccatttataataattatatgcagtcaaatcttcttatttacagctgttatagtgcataaagccaccacaaatgctga

SEQ ID NO: 345675 - DNA, 201 bp, Homo sapiens
cctaacctcagtgatccacccacctcagcctcccaaagtgctgggattacaggcgtgagccactgcacctggcccagtcatactcttagtaatttttttthtctatctatctatctatctatctatctatctatctatctatctatctatctgagacagagtctcgctctgttgcccaggctagagtacagtagggtgatc

SEQ ID NO: 345676 - DNA, 201 bp, Homo sapiens
cagcacggtaactcatgccagaatgaagcttacctagcacgtgttattttctcttcatcacaaccttcttgcatttaggaacactaggtagcacttcagcrctacgactgggggacattctagaatagctggtgcagtcaccaatacaaagcaggaaaaaatgtggtgcccaacagatggtgaaaagaacactggtttaca

SEQ ID NO: 345677 - DNA, 201 bp, Homo sapiens
gtaactcatgccagaatgaagcttacctagcacgtgttattttctcttcatcacaaccttcttgcatttaggaacactaggtagcacttcagcactacgaytgggggacattctagaatagctggtgcagtcaccaatacaaagcaggaaaaaatgtggtgcccaacagatggtgaaaagaacactggtttacaggatgag

SEQ ID NO: 345678 - DNA, 201 bp, Homo sapiens
gaaatctgaaatcttattcaaacatgtacttattattaccattttgttcaatatttaacttgtcagcttttaattgtttaacatgacagtgcaggtacggyaatatttctgcactcagcatttttcttgtggctgcacatttgcgatactaaatagaggcttgctgtatttaattattcaaaagctctcagtcattagttt

SEQ ID NO: 345679 - DNA, 201 bp, Homo sapiens
gccttattagttaggggtctgttacctccctctagagccttcttgttagcaccctggaagcttccttttctaaaacagggagtctgttctgcttccatttycagatggaaggactactggagagtggcccaggcccccgctgctactctttctcaccatatgtcatggtcatggaaacccccccaccgccagcctaacaga

SEQ ID NO: 345680 - DNA, 201 bp, Homo sapiens
atacaaagcaggaaaaaatgtggtgcccaacagatggtgaaaagaacactggtttacaggatgagagctgaaacaagaaggcggtgtgtgcccttgttatrtatcacctggaaatgggagttaagtgttgggcaactcaaattttttgtccatgaatgtgtgtgaaaattagaaaacaccacaagtattgatttggaggtt

SEQ ID NO: 345681 - DNA, 201 bp, Homo sapiens
aaacttgttagaaagacagattcacaagcacaatctagaattctagctagatttgatagctttagggtgggaccaagattctgctttttgtaacaagcctwcctactgatgctactctacatggcccgtgaaaaccgtattggaaaactcctagcatttcagtagattttccagttaatgaagtcttacattttaagcatc

SEQ ID NO: 345682 - DNA, 201 bp, Homo sapiens
caatacaaagcaggaaaaaatgtggtgcccaacagatggtgaaaagaacactggtttacaggatgagagctgaaacaagaaggcggtgtgtgcccttgttmtatatcacctggaaatgggagttaagtgttgggcaactcaaattttttgtccatgaatgtgtgtgaaaattagaaaacaccacaagtattgatttggagg

SEQ ID NO: 345683 - DNA, 201 bp, Homo sapiens; identical to SEQ ID NO: 73128

SEQ ID NO: 345684 - DNA, 201 bp, Homo sapiens
tcgatctggttccagaaatagagaataaattgggtgctcagatacgagtaaggggagaatttattcctccatttataataattatatgcagtcaaatcttsttatttacagctgttatagtgcataaagccaccacaaatgctgaattcatgaaaacagagccattgttcttaggggaaatacagggttaggttcctgcca

SEQ ID NO: 345685 - DNA, 201 bp, Homo sapiens
atctggcttcatctgaacaacagcagctaatcgtggcttccccaacatagtcgatctggttccagaaatagagaataaattgggtgctcagatacgagtawggggagaatttattcctccatttataataattatatgcagtcaaatcttcttatttacagctgttatagtgcataaagccaccacaaatgctgaattcat

SEQ ID NO: 345686 - DNA, 201 bp, Homo sapiens
cctctttatttagcacagtgcctttcaaactttgacagatgtaagaatttcttttttttttttttgagacggagtctcgctctgtcgcccaggctggagcrcagtggcacgatctcagctcactgcaacctccgcctcctgtgttgaagtgattcttctgcctcagcctcccgagtagctgggattatgggcatgtgccat

SEQ ID NO: 345687 - DNA, 201 bp, Homo sapiens
accttcagttcaaagtgacggcaaattgctaaacaaagagggagcttattggttctaatcactgccagtcaggcccactgctggagttgggtgggctcagycccaccccaccacatgactaccacatcttggggggcaggtggcagcggggatttgggggaggtaaccaatgtcctctgtagagtccttcctggagtgtct

SEQ ID NO: 345688 - DNA, 201 bp, Homo sapiens
tcctccacgctcatgaagcactgcagtagcggttcactgagggctgtgggatgcggaggaacccatcacacaggctcgtgttggtggtgacgcaggtgcawgaccccacccatgctctcgtgatcccaggttcttgtccagcgatctttcctcttcccacatcagtggaaaatgttgtgttacatgttggctgccccattt

SEQ ID NO: 345689 - DNA, 201 bp, Homo sapiens
gaagagcctgtccttctgtagcagtgtctgggaggtgagagtgggatgcaggagggctaaagtaggcccagtaaggatgggcttcctgtatcctcctgtayccaaggaagacctcagggatagtagcccagaaacagtaggcgtgggaaactggaaggagcagggcattctcttggcagtttctgggactgttcatttcat

SEQ ID NO: 345690 - DNA, 201 bp, Homo sapiens
tatgtccccttccccaggggaccatgacctatgtcccctttgtcactccatccccagtgccagcctgggctagatcctgagttcctgaagttccgctgtawttgcaggtgcaaagagaagaaatatgattatgataatttgcccaggacatctgttatcatagcattttataatgaagcctggtcaactctccttcggaca

SEQ ID NO: 345691 - DNA, 201 bp, Homo sapiens
aggtgggtgccatggttaggacctttcttggagtctgctggggctcctagtgccacaaggggagctctggaagatccttcagtggattatgtccccttccscaggggaccatgacctatgtcccctttgtcactccatccccagtgccagcctgggctagatcctgagttcctgaagttccgctgtatttgcaggtgcaaa

SEQ ID NO: 345692 - DNA, 201 bp, Homo sapiens
tacttctgcacaccccagacgtctctgatcttcttgaatgtcctcctcttcccatctttctcccaaccagaagccattgtaagccctcaaggaatggtagkggacactagaaacaataaaatcagtttgacatatcaaaaattttatcttaaatttcagtgaccatttaaggaaaaggaagtttgttcaggaggctgggaa

SEQ ID NO: 345693 - DNA, 201 bp, Homo sapiens
ccaggtcattctgtacctctgtcatgggatgggccagaatcaggtaggtatgagcctcaaaagaggagaaagctgtgtgttttgttaaaaaaattaaatakttgaatttttttcttgtaaaagtaatatttgggaaatataaaaagtagaagcctagggtggccagactcagagagaccactgttaaaattaaaatgtgtt

SEQ ID NO: 345694 - DNA, 201 bp, Homo sapiens
agatttttaataatattttatatggtgttctgccctcataaaaactgaataaacaagaatttggccttctaccgaggactcacgccctctgtaataagtamcagatgctgtgcttggttgtcccatctttgggaaaatgagatattcaaggctgtcagtcccagtgtgagatgggctcagatgccttcgcctgttgagtct

SEQ ID NO: 345695 - DNA, 201 bp, Homo sapiens
cacgatctcagctcactgcaacctccgcctcctgtgttgaagtgattcttctgcctcagcctcccgagtagctgggattatgggcatgtgccatcatgccyggctaatttttgtatttttagtatagacgaggtttcaccatgtcatccaggctgatctcaaactcctgacctcaggtgatccacccgccttggcctccca

SEQ ID NO: 345696 - DNA, 201 bp, Homo sapiens
aatacctggggaactccggggagccccagatcggcggtttcgactggaggctggtgttcacgtggcacacagttcctgagagggagaggatacggatgcartcccccgtcgatgtcatcaggtcaggagctgacttctgggtgacttgttttttaagcatgcctcattgaatctggctgacctgtgagcggaggccctcgg

SEQ ID NO: 345697 - DNA, 201 bp, Homo sapiens
ccaaccagaagccattgtaagccctcaaggaatggtagtggacactagaaacaataaaatcagtttgacatatcaaaaattttatcttaaatttcagtgamcatttaaggaaaaggaagtttgttcaggaggctgggaagaaggatactgaattggattttttacctttcttcaggacgcttaatactttgattcatatgt

SEQ ID NO: 345698 - DNA, 201 bp, Homo sapiens
acagtgttctgccgtgtaggctggaagccgtgggccgtttctggttagtgctggcttccagataaacctggtggtgggtggcgggaaacaaggctggctgmaaaagcagcctgaggctggctagctgggtcctagtggaggaaaccactcaagaggacctggccctcggggcactttcagatgccagagttgcctttaggg

SEQ ID NO: 345699 - DNA, 201 bp, Homo sapiens; identical to SEQ ID NO: 73150

SEQ ID NO: 345700 - DNA, 201 bp, Homo sapiens; identical to SEQ ID NO: 73151

SEQ ID NO: 345701 - DNA, 201 bp, Homo sapiens; identical to SEQ ID NO: 73153

SEQ ID NO: 345702 - DNA, 201 bp, Homo sapiens; identical to SEQ ID NO: 73154

SEQ ID NO: 345703 - DNA, 201 bp, Homo sapiens
agttcaagctttttaccttggtaaataatgtccacctggatctgccctgtagctattcttgactctttccttcgtgcatttttccccatcctaaaaaagawgactttaaaaagtaacatttactcgattaaaaatttagtagtatagaaggatgtaacctaaaagccccgtcctattctactccctgaagatagccaccgt

SEQ ID NO: 345704 - DNA, 201 bp, Homo sapiens; identical to SEQ ID NO: 73155

SEQ ID NO: 345705 - DNA, 201 bp, Homo sapiens
aactctgtccccaatagcctgagaaggtgtcaccctccagacaccagtgctctcatgcctgtcagctaaggggagaggagtcttcccaatgacccactttytaaactgtccttgataaagcatcagctcttgggaggtaggggaagggagaattttaccatcctgacccctgagccaaggggctgctggagccagcagctc

SEQ ID NO: 345706 - DNA, 201 bp, Homo sapiens
ttccatcccaaaaaaaaaaaaaggaaaaagaaaggttaggctgaaatgaccactaagagctttggtatccccccggttttttttttttgtttgtttgtttkttttagttcagcaacaagtaacagaaactacgcagaagagtaacagcagagcgaacgatggactggaaagcaaacagcctgaagaaaagggttaagtagc

SEQ ID NO: 345707 - DNA, 201 bp, Homo sapiens; identical to SEQ ID NO: 73152

SEQ ID NO: 345708 - DNA, 201 bp, Homo sapiens
aaagttcaagctttttaccttggtaaataatgtccacctggatctgccctgtagctattcttgactctttccttcgtgcatttttccccatcctaaaaaaratgactttaaaaagtaacatttactcgattaaaaatttagtagtatagaaggatgtaacctaaaagccccgtcctattctactccctgaagatagccacc

SEQ ID NO: 345709 - DNA, 201 bp, Homo sapiens
acctactattaggcatctttttcagcaaaaatttatttatttatttatttattttgaaacggagtcttgctctgtctcccaggctggagtgcagtggcgcratctcggctcactgcaacctccgcctccagagtagctgggagtacaggtgcgcgccccacgcccggctaattttttctatttttagtagagatggggttt

SEQ ID NO: 345710 - DNA, 201 bp, Homo sapiens
atcacgaggtcaggagatcaagaccatcctggccaacatggtaaaaccatgtctctactaaaatacaaaaaattagccgggcatggtggtgcatgcctgtrgtcccagctactcaggcggctgagacaggggaatcgcttgaatctgcaaggtggaggttgcagtgagctgagattgtgccactgcactccagcctggcaa

SEQ ID NO: 345711 - DNA, 201 bp, Homo sapiens
ccctttgcttccattttctcacttatttttaatttagctctttatcttatatgaagctttataggctaccctactaacaaataaaacattcttttttagayttccttcttatttttctaaccagatttgaaagacagttaacccaggagaatactgacttatgcctctcaccaccccttctcacctctctctcttctccgt

SEQ ID NO: 345712 - DNA, 201 bp, Homo sapiens
gtgagggagagttttcttttgcaccattgcttttgttgaattgtatccctcatgtatcttgctgtgtcaccttgtaacagatgtgagattatctgatgatrtctaattgcatagtcgtttatcagttggtagttagacttaaacccttacattccatctaaagagggccctcttgccctctagggcacctaccatgaatgg

SEQ ID NO: 345713 - DNA, 201 bp, Homo sapiens
tggatcctgtacaaccaggaaagaaattcttcaatttgaataaattggaggattcaagatatggtaggtacatggctgtgatagcaattggaatctcattkgcacaatgattaggctatgtaattaattacacttgaggagagtttgaagagggagtagcagagaatgggtgaatgttcttggattaagtgcacaagcact

SEQ ID NO: 345714 - DNA, 201 bp, Homo sapiens
actgacatcgtgctcaccattaccaaggtaacaatgtgcatcctcttctgtggtcttggaaagccacaatgatagctttccaatggagggaatacataatrgaatcttgtttggtttccaagtgctctagcaatgcaaggaaacaaggttgatgattttaaaaggagatgaggtaagggaagtgttctatgttaagtttag

SEQ ID NO: 345715 - DNA, 201 bp, Homo sapiens
aatgtccaggctgctgttgtcatatgaatgtcttgagtctgttcctaagagtcagactttatgattagattagttttaacttcaattcagttcatgttttytgcctaccatagttaaaggcattgtaggaatcacttgaaccaaacaataattactctctttactttcactagttacctctcctattctgcattgtaaata

SEQ ID NO: 345716 - DNA, 201 bp, Homo sapiens
ttttaaaatgtgtatatgtagttaaagaagaaaatctttcaaagatatcttctgaaaaacttaaacttcatatacatttcgcagtaaagatgttttagggrgaagagtgggtggatttttcttttaatctttttttatttgtttttacttcttgggtgggagcagcctgcatttgaatctgacttgaagtctaggtgaaaa

SEQ ID NO: 345717 - DNA, 201 bp, Homo sapiens
ctggtcacggtgttaattgtaaggtatgtttcctgacactgcaaagtttcctttcactgaggccccacagacaagatttcctctggtttggggaccagaartagctgttctgcctctttagcactgcctcgatttttctctcatgaaagttgtaagttatgttgccagctgtgtgtctttcctttgcattgagttcctgat

SEQ ID NO: 345718 - DNA, 201 bp, Homo sapiens
cagtcggaggtgagtaccgacgcggcccgacccacgtccccaggcgggagcgccgtccaccctgtatccctcgagagtcggtgcgggcctttaccgaggtrcccgaggcagtggcggcccgggggacacggaggcgagcttggggaggctgagaggagaatcggggacgtgtttctggcgactgacgtctccaccctgtcc

SEQ ID NO: 345719 - DNA, 201 bp, Homo sapiens
gacgcggcccgacccacgtccccaggcgggagcgccgtccaccctgtatccctcgagagtcggtgcgggcctttaccgaggtgcccgaggcagtggcggcmcgggggacacggaggcgagcttggggaggctgagaggagaatcggggacgtgtttctggcgactgacgtctccaccctgtccccagtctatgtcatgccg

SEQ ID NO: 345720 - DNA, 201 bp, Homo sapiens
ctgcaggactttacgtgagcctaatgtcacttcactctcctttgcctccctcattagcctttcaagaaagttttcttttaaacaaatgaaaacactctgcmatgactatatactttattaatttatgactatataatattatatacccatatccagacacttttgaaagctaagggtgtcattgcccccagcagcaagagg

SEQ ID NO: 345721 - DNA, 201 bp, Homo sapiens
tgtttatgtgatggattacatttattgaattgcatatgttgaaccagccttgcatcccagggatgaagcccacttgatcatggtggataagctttttgatrtgctgctggattcggttttccagtattttattgaggatttttgcatcgatgttcatcagggatattggcctcaaattttttttggttgtgtctctgcccg

SEQ ID NO: 345722 - DNA, 201 bp, Homo sapiens
agaggcagtaggccttgctgagctgcggtgggctccacccagtttaagactttgtttacactgtgagggtaaaaccacctactcaagcctcagcaatggcygatgcccctctgcccaccaagctcgagcatcccaggtcaacctcagactgctgtgctagcagcaagaatttcaagccagtggatcttagctttctgggct

SEQ ID NO: 345723 - DNA, 201 bp, Homo sapiens
ataatatacattttttcttcctttagcaaggatttaaaggattccaagttgctcctgaacatcataatgaccataagacctttatctatgataacactgarttcacccttgctcatggttctgtggtcattgctgccattactagctgcacaaacaccagtaatccgtctgtgatgttaggggcaggtaagtgcatttgac

SEQ ID NO: 345724 - DNA, 201 bp, Homo sapiens
accactgctcaccagattgcatgaagagggaggcagctgtaacacctcatcccgttgatctccagggaactcagatacttgtttccacgtccaggaaaccrcaaactaagctctttgaagcatcagcaaaccttgctaagtgacacgtgaatgccatttggatacatattctaatctttcaagtagaaaggacagtcagac

SEQ ID NO: 345725 - DNA, 201 bp, Homo sapiens
cagtgcagagtaagactcagatatcatgactgctttttgtaaagatttcaaacgagtaatttttctgtagcatttcagagtttacttgcagagatacttakgcttttgttaagaattggcctttaaaattatagttaccaaagtattccttcttctcaagtgagaactgttgactatatgtatgtattttcctctagccag

SEQ ID NO: 345726 - DNA, 201 bp, Homo sapiens
tgggagaagtagttcccaggaaagaggcgctgggcaaacagcctggctgtctcctcttcagtgtcttgcgcccgttaccggtacctgtggcgtgtcctgtygcctcctgcactagcaatccaggaagacacaggctgcttctcaatcaactgcttctccccaaaactacctcgtacctaccagactttggacagaggagtt

SEQ ID NO: 345727 - DNA, 201 bp, Homo sapiens
tggacagaattcaaaccaattttaatgcatagcagctgtcatttgctacccagtgtttgtgtgacccggaaggccacttcccaaaacactcagagagtaakttcccctttggtacaatctggattattatttcataagttattgataagcatatgcattagttatctattgctgtgatatagcaatagatatagtgagttg

SEQ ID NO: 345728 - DNA, 201 bp, Homo sapiens
ggtcacctactacctacaagaaagcggagtcatgccttatctgtctcagcttgggtgagggagagttttcttttgcaccattgcttttgttgaattgtatycctcatgtatcttgctgtgtcaccttgtaacagatgtgagattatctgatgatatctaattgcatagtcgtttatcagttggtagttagacttaaaccct

SEQ ID NO: 345729 - DNA, 201 bp, Homo sapiens
agtccaggcatggtggctcactcctgtaatcccaccactttcagaggccaaggcaggcagatctgacctgaggtcaggagttcgagaccagcctggccaayatggcgaaactcccaggaggtggaggttatggtgggccgatctcgcaccactgcgctccagcctagccaacagagagactgtctcaaaaaaaagaaaaaa

SEQ ID NO: 345730 - DNA, 201 bp, Homo sapiens
agcaaagaaagctgtggatgctggcctgaacgtgatgccttacatcaaaactagcctgtctcctgggagtggcgtggtcacctactacctacaagaaagcrgagtcatgccttatctgtctcagcttgggtgagggagagttttcttttgcaccattgcttttgttgaattgtatccctcatgtatcttgctgtgtcacct

SEQ ID NO: 345731 - DNA, 201 bp, Homo sapiens
acgcagcacaagaacatagaagtgccatttaagcctgctcgtgtcatcctgcaggactttacgtgagcctaatgtcacttcactctcctttgcctccctcrttagcctttcaagaaagttttcttttaaacaaatgaaaacactctgcaatgactatatactttattaatttatgactatataatattatatacccatatc

SEQ ID NO: 345732 - DNA, 201 bp, Homo sapiens
tagttcccaggaaagaggcgctgggcaaacagcctggctgtctcctcttcagtgtcttgcgcccgttaccggtacctgtggcgtgtcctgtcgcctcctgmactagcaatccaggaagacacaggctgcttctcaatcaactgcttctccccaaaactacctcgtacctaccagactttggacagaggagttgtgcaaatg

SEQ ID NO: 345733 - DNA, 201 bp, Homo sapiens
cagagctgtctcgccacctccctcaatgatgcttctgtttctttgtgccacagctggatactggcaagaccttccaggctgtcatgaggtttgacactgaygtggagctcacttatttcctcaacgggggcatcctcaactacatgatccgcaagatggccaagtaggagacgtgcacttggtgctgcgcccagggaggaa

SEQ ID NO: 345734 - DNA, 201 bp, Homo sapiens
ggaatggagttaatgaggccagcatttctcttttcacctggccctttggaatgagactctttggttgtgcactgaggcttaaccctggggtaaaaaccaaytgcattttctgtttgctgcttaacagcttccatgggagaaacgatcaacatgtgaatcctaacaaggggaaggggagagggaccttcatttgagcaagtg

SEQ ID NO: 345735 - DNA, 201 bp, Homo sapiens
aacgggagtataaactatataaagtaacatttatttcttcagatgactggggaggtggttctccgtcatttttctcctgtgactcgcatttttacaaaccycacctcccccagatgttcccagatttggacaagttggtgacagcctagagaagaaaggcctcctcaggttcagctctccaaaaccccacgcctttctcgg

SEQ ID NO: 345736 - DNA, 201 bp, Homo sapiens
tgacattagacatctgatttcactgaaatatagcacacaattactggaaatgagggcctataaaagtccacaaaaccaagtgacttttcaagatataacasaggtaaaaggttactgtcatcactgtctatgaatcatctcattatcgatattctagactttgaagtaaaataataaaaagtttacttaaagcaacagcat

SEQ ID NO: 345737 - DNA, 201 bp, Homo sapiens
aagaggaggactcaataaaaaaagactagaatagaactagaagagagagaagcccagggagagcttcaagaagagtgctcaacagggccaaatgcgcagargtcaaatagaaggttaagaagtgcccagtggatttggcaaccagagtcactggtaaccttcaaaagaacaatttcagtagattgttaagggcaaaagcca

SEQ ID NO: 345738 - DNA, 201 bp, Homo sapiens
cttgcttagagattctagaccgtggtttcactgagtctcttttcttaggaattgagctttgagtgacatttcatttaaagtattcgaaggggaaataccasgttaaattaaaggatatttatcaagaagtgctattgtatgactttattggcatgtaatttaattcatctaatccacatgaaaagaaggagtagagaggtg

SEQ ID NO: 345739 - DNA, 201 bp, Homo sapiens
gagcatggtgcaagagagttggttctgacatcaggagcctgagtttgacttccagtttggtcacttaccagccatgagaccatggcaagatacttagcccrtcagatcctgtcttctctcatgtgaaatgggatggtgatgcccttgtcacaaagttgccaagggtctgcattagaggaattggattagatgcctggcacc

SEQ ID NO: 345740 - DNA, 201 bp, Homo sapiens
atcctgtcttctctcatgtgaaatgggatggtgatgcccttgtcacaaagttgccaagggtctgcattagaggaattggattagatgcctggcaccccacrggcactcagcacatgtctccaggctgctgagcttctgggtgacctggcactcatgggataatgcctgaacattgctgctgttcttcccagcttctgtccc

SEQ ID NO: 345741 - DNA, 201 bp, Homo sapiens
ttcagatttgtagcttctaacatccttctatcctgctgcggggaaggaatgtgctgatcagaaataggagcatcaggtcctcctgacagttgcctttcttwggtagaatcagtaaatatatgggtttgcatattgagctctgagaattttattagcatgagtcataatccccgagttcagtcagccctgatgagaccaggt

SEQ ID NO: 345742 - DNA, 201 bp, Homo sapiens
atttgtagcttctaacatccttctatcctgctgcggggaaggaatgtgctgatcagaaataggagcatcaggtcctcctgacagttgcctttctttggtaraatcagtaaatatatgggtttgcatattgagctctgagaattttattagcatgagtcataatccccgagttcagtcagccctgatgagaccaggttggtg

SEQ ID NO: 345743 - DNA, 201 bp, Homo sapiens
caggattgttagcaaagaaagctgtggatgctggcctgaacgtgatgccttacatcaaaactagcctgtctcctgggagtggcgtggtcacctactacctrcaagaaagcggagtcatgccttatctgtctcagcttgggtgagggagagttttcttttgcaccattgcttttgttgaattgtatccctcatgtatcttgc

SEQ ID NO: 345744 - DNA, 201 bp, Homo sapiens
ttagctcctctgatgaggtagggccttgtcaatattatcaatggaggcaaaagctgaaaaatccagttacacacatttaaggcttattttctgcattattstctttcttctcttaggggtgtgcccgctgtggttgactttgctgcaatgcgtgatgctgtgaaaaagttaggaggagatccagagaaaataaaccctgtc

SEQ ID NO: 345745 - DNA, 201 bp, Homo sapiens
agtttcacagaagagaaaaggagcctggactttttcaggagttactttggcaagaatgggttctaagtctcctggaaaattgggagaatcactttttatawttgcacttcactgcctatgaatatctgcttatgggctctcgatgagagtgaaactcactctgcacatacccaggcagctctttagaaccttccgccatct

SEQ ID NO: 345746 - DNA, 201 bp, Homo sapiens
atgccttcctccaaaggctgagttaatggacctgtggacagaattcaaaccaattttaatgcatagcagctgtcatttgctacccagtgtttgtgtgaccyggaaggccacttcccaaaacactcagagagtaagttcccctttggtacaatctggattattatttcataagttattgataagcatatgcattagttatct

SEQ ID NO: 345747 - DNA, 201 bp, Homo sapiens
ctccagttaatattgctaacatccaaaccagataaattcaggataaagagaaatctactttgtcccctgaattgatggtacttggaacagaccatgtactygccaactcttccctttcctttggactctgaacctgtcctaaggcaatatgtcttccccaaccttccttttttcctaaatcacgtgaactcagtttaatgt

SEQ ID NO: 345748 - DNA, 201 bp, Homo sapiens
gtgcccggctccagatgtgttttctatgaggtaaataacacatgcttccggtcccttttttcccaaggagtgtctgcccatcttgctcgggctgactcacygtcatccttcagaccacattgataccatgtccttctggaaagcattccaatccccccaacccccacccccaggtgggttcatggcccattccaagtgctc

SEQ ID NO: 345749 - DNA, 201 bp, Homo sapiens
aggtgtgatgttcacacgctgcactcttcacaaggtgctccttgggagatggtgttagggagcttggcaggcattatgttaaatgccttcctccaaaggcygagttaatggacctgtggacagaattcaaaccaattttaatgcatagcagctgtcatttgctacccagtgtttgtgtgacccggaaggccacttcccaaa

SEQ ID NO: 345750 - DNA, 201 bp, Homo sapiens
agagtttaatttatgaagtctttaataacacttggaacatgatcacattgtagctcaacgagcgagatgctacattgcatatgtagagtgacataagctamatggaaaatgatgcaggaattaaaagattggaaagggtgccaagttgctaagcagttatctcagggattgcaactgtcttcattttcctaataagaagct

SEQ ID NO: 345751 - DNA, 201 bp, Homo sapiens
cttgaatctgcaaggtggaggttgcagtgagctgagattgtgccactgcactccagcctggcaacagaatgagactctatctcaaaaaaaaaaaaaaaaaaaatcttttagaagtgtttttattggtggtattttgtttttatttcttgagttgtggttttgcaatttaacctcatgatctctctcctcatttttgtaagg

SEQ ID NO: 345752 - DNA, 201 bp, Homo sapiens
ctgcatacagcatgtgagactaggtgggagaagtagttcccaggaaagaggcgctgggcaaacagcctggctgtctcctcttcagtgtcttgcgcccgttwccggtacctgtggcgtgtcctgtcgcctcctgcactagcaatccaggaagacacaggctgcttctcaatcaactgcttctccccaaaactacctcgtacc

SEQ ID NO: 345753 - DNA, 201 bp, Homo sapiens
agtcagaagaaactctaccatttgtccttttctccaaaaggcagaatttgtaccagccaaaaccgtgaagatttcaatgtagagatgggtgtaaaaaaaaatcagctattgctgtataacagtcccagaatctcaacagcagtcaacagtaagaatttatttcttacacatcttctagttgtttgggaggtcagccgacct

SEQ ID NO: 345754 - DNA, 201 bp, Homo sapiens
ttcagtttcagaactcccagagaaggaagttgattgggccagattgggtcagacacctttcctctctcccaacaaatggcagctgctgcatacagcatgtragactaggtgggagaagtagttcccaggaaagaggcgctgggcaaacagcctggctgtctcctcttcagtgtcttgcgcccgttaccggtacctgtggcg

SEQ ID NO: 345755 - DNA, 201 bp, Homo sapiens; identical to SEQ ID NO: 73173

SEQ ID NO: 345756 - DNA, 201 bp, Homo sapiens
gcatacagcatgtgagactaggtgggagaagtagttcccaggaaagaggcgctgggcaaacagcctggctgtctcctcttcagtgtcttgcgcccgttacyggtacctgtggcgtgtcctgtcgcctcctgcactagcaatccaggaagacacaggctgcttctcaatcaactgcttctccccaaaactacctcgtaccta

SEQ ID NO: 345757 - DNA, 201 bp, Homo sapiens
tggatgtatgccgttacgcaaggtttttcatccctctgagctgcggtatgcttatctgtacaatggaaataatgatagatttcatttacggagatgttgcyaggtaaagaagatggtgtaaagcacttggcatgtgctggtataactaactggttcttctcttcccttctgcagatagaatttacttccttcatatagtga

SEQ ID NO: 345758 - DNA, 201 bp, Homo sapiens
catctggggctgcagtctctggaggagggtccacttaggctcactcatgtggctattggcaggatcaagttcctcaagggctgttgcactgaggtcctccrtttctcactggctgttcgctagaagcctccctcagcaccttgctatgagggtctcttcatgactcacacatggtagctggcttccatcagagcaagagag

SEQ ID NO: 345759 - DNA, 201 bp, Homo sapiens
ccatgttaactttatgtctttcttttttgtgcatttgcatatgcaatggtgtgtgtgtatgaatgaatatacactaatggtcttgaagtttttttttttttcacttaaatcagatcctagtatatacatatatatattattttgcaactttaaaattctcatatcatttaacgtgagcctttactaacattttgtatcttg

SEQ ID NO: 345760 - DNA, 201 bp, Homo sapiens; identical to SEQ ID NO: 73174

SEQ ID NO: 345761 - DNA, 201 bp, Homo sapiens
gaacactagccggggcggtggctcgcccctgtaatcttagcactttgggaggccaaggcaggtggatcacgaggtcaggagatcaagaccatcctggccarcatggtaaaaccatgtctctactaaaatacaaaaaattagccgggcatggtggtgcatgcctgtagtcccagctactcaggcggctgagacaggggaatc

SEQ ID NO: 345762 - DNA, 201 bp, Homo sapiens
tgtcattttttcacaaatatatctggagcctgtgggtcttctctaatcatacaatgcatcccctcacctccccccaccaggcgaaagacctgaaaaaatamaactgaataatattgggtcacttgtattggataagagtgattcttgactatattttaaatacttgttttagaatgtatatttaaatcttcagtaaaagaa

SEQ ID NO: 345763 - DNA, 201 bp, Homo sapiens
tcaacacacacgttctatgctgagatctgataaggcgtcactctgacttcttgtttcagctctcctgcgatatataaggatccttttcttggtctacgtartgccatgctttttgcatttttgtgctttttgtggtgattttgctgttcaaaatggtccttgagcatagtcctgaagtgcttctggtgttcttgagcacaa

SEQ ID NO: 345764 - DNA, 201 bp, Homo sapiens
agaaggaagttgattgggccagattgggtcagacacctttcctctctcccaacaaatggcagctgctgcatacagcatgtgagactaggtgggagaagtakttcccaggaaagaggcgctgggcaaacagcctggctgtctcctcttcagtgtcttgcgcccgttaccggtacctgtggcgtgtcctgtcgcctcctgcac

SEQ ID NO: 345765 - DNA, 201 bp, Homo sapiens
catgtatgatttctgttgctagactgtacgtgtgagaataggatttgtgtctgaatcaccttgggagcccgcaaggtacctagcacagtatcttacatgcrgtagattttcaatgaacatttcccaaaagaatgattaagatgtatgatggattttatctgtgagacaccagtattatgccaaatattcagctgtactttg

SEQ ID NO: 345766 - DNA, 201 bp, Homo sapiens
tctataactgctattgtggaattacatggcaagttgcaagttgtggcatagttcatgaagaagaggtgtcagtctaggaaagtatcctcctacatgattascaggtttgaatttttggttcagaacagataagataaataagccattgccaagaatctgcgatgtacaagagctatgatgggtggacatttgaaaggtaca

SEQ ID NO: 345767 - DNA, 201 bp, Homo sapiens
acacctgtagcatgggctgcatgatgttctgatttctcctacacagtctccattctcagtctgagcatctgaaggaggatggggactttatcccttcatcycaggtctgtaaatgtcgtgtgtatgaatgaatccacaccagtcccttcccatagacaacatagaaaggcccaggtcccagaagtatcaaggtctaatgct

SEQ ID NO: 345768 - DNA, 201 bp, Homo sapiens
gatttgaaaacagtagtgccttgctgtagtggacccaaaaggcctcaggacaaagttgctgtgtccgacatgaaaaaggactttgagagctgccttggagmcaaggtaggggcctgcgggaagaggttgaatcctctcaactctacctcttgcctggttactcagcgtccaggctttcatcccacttgacatgaatcttcc

SEQ ID NO: 345769 - DNA, 201 bp, Homo sapiens
gatgggcgagtggaggacactgagcatctgcagcacccaccctgttctttctgagaggtggcaaggctgcctgcctgtctcctgctacttaagtgcccatsatgatcttaggaaattaatcacttaagattaattaagaggattaagagaaacactggcttccttgttttggaatgtggtagtttatttgcttatttttat

SEQ ID NO: 345770 - DNA, 201 bp, Homo sapiens
cacttgtcttggagaatattcatatcaagagaaaaaaaatctgtgtggtaaccaaatatgttttctttttttttttttttgagatggcgtcttgctttgtygcccaagttggagtgcagtggcgcgatcttggctcactgcaacctccacctcccaggttcaagtgattctcctgcctcagcctctcgagtagctgggatt

SEQ ID NO: 345771 - DNA, 201 bp, Homo sapiens
cacttggcgaattcacagaggtaaagatggccctataagacctctgacagccagacacccaatctcttgtggtgatggcctttctttctaattcctaattyctaaagtttgagttagaaaagttcattgccacaatctgcgaaatgagttcaggagcctgaggaaatcatgctgctttcttaaagattggatctcaactgg

SEQ ID NO: 345772 - DNA, 201 bp, Homo sapiens
gtgaccttgaaattattcttcgattaagtgagaatcttggtaagcctgaatatagacacctaatggtctataacacctttaggtggggaaaaactaaacarctctgaggataggttttttgttgctgtttttgtttttttaaatccatccccacatccttagcatccaaaggtgtgcatattaaaatgtcttcgttggccc

SEQ ID NO: 345773 - DNA, 201 bp, Homo sapiens
tgacattaccaaaatcaacccctacagtatgtttacacctggtatgttgaggacagttcttccatctttcttaggctgtcttaccaccagcttacctggtrgcagactccagctactgtctcccagtgagaaatgtgaggagtgtgaggcatggcgaaccgaaaaacaggcacacttaccatgtagtcacattgtgctgtg

SEQ ID NO: 345774 - DNA, 201 bp, Homo sapiens
gtggaggacactgagcatctgcagcacccaccctgttctttctgagaggtggcaaggctgcctgcctgtctcctgctacttaagtgcccatcatgatcttrggaaattaatcacttaagattaattaagaggattaagagaaacactggcttccttgttttggaatgtggtagtttatttgcttatttttatggttgtcat

SEQ ID NO: 345775 - DNA, 201 bp, Homo sapiens
gctctgaggataggttttttgttgctgtttttgtttttttaaatccatccccacatccttagcatccaaaggtgtgcatattaaaatgtcttcgttggccmcgtgcagtggctcatgcctgtaatcccagcactttggaaggctgaggcaggaggatcgcttgagcccaggagtttgataccagcctgggcaacacaggaa

SEQ ID NO: 345776 - DNA, 201 bp, Homo sapiens
cttttgaaaatcactgataaaaacttgctggttttactgctcagggggcatcacagaacctgccgacatgtgatgtctccagctttaaaatttctcttttrtactctttccctttatttctcagaccggccgacacttagggaaaatagaaaagaacctacgtgaaatatcaggggtgaatttcacccaatacataactct

SEQ ID NO: 345777 - DNA, 201 bp, Homo sapiens
ttactgctcagggggcatcacagaacctgccgacatgtgatgtctccagctttaaaatttctcttttgtactctttccctttatttctcagaccggccgayacttagggaaaatagaaaagaacctacgtgaaatatcaggggtgaatttcacccaatacataactctgcctggatttgttccctcctgtacctcctcatt

SEQ ID NO: 345778 - DNA, 201 bp, Homo sapiens
aggacaggaattggtttactgaccttgatgttgggatgactcttcatttcagggtgaaaatatcacagcatcagcacaggccaggaccacagagataacaaggtggtagttgtgtaacaggttgtgtctgaaccacaggagcttcaaaacatacacggctggacaccctgccaggatgctctaatggggctgggcatgtgt

SEQ ID NO: 345779 - DNA, 201 bp, Homo sapiens
gtgaaatatcaggggtgaatttcacccaatacataactctgcctggatttgttccctcctgtacctcctcattgccttgtcttattgactgtaataacacygtaacctgcctcccagacaccagtctggcagcctttccctgagttagtctatacccctaccggaatgatctctgaaaatcaaatctcatcttaaagattg

SEQ ID NO: 345780 - DNA, 201 bp, Homo sapiens
gcgatttgaatttttaaaggtatgggcagggtctggttccattgtttggttttctttgtatgcagggtacgagggagagatgccaaggagatgggctgagyagaagtacttcacgcgttcatagtgttctttccatttgtcaatcccagtggggttcccaggcttttcacaacatgcggattattccccctggctcaggaa

SEQ ID NO: 345781 - DNA, 201 bp, Homo sapiens
agcttgtcaacacaagtatatgtcagtgcaagtatatgtttgagctttttcatccactggaagcttactcctttttttgatcccaagtaactgttgcatawctagcgatctctgcctcttcacgtgggtttccataatgcctatccctttctttccctgtgtttcttcttttgtttgggacatcctctcctctgttcctgc

SEQ ID NO: 345782 - DNA, 201 bp, Homo sapiens
ctgccctgagaagctatttctagttcttagatggctctcacccccatcatttacagtctgcagtgattctcaaactgtaatgggcaaagcagcctcccagrgatcttgctgaaatgcatcttctgatttagtgggtctgggctggggccagcagccttgcatgtcctcatgtgctgctggtgttactgaagtgtggaccac

SEQ ID NO: 345783 - DNA, 201 bp, Homo sapiens
ataacagtcccagaatctcaacagcagtcaacagtaagaatttatttcttacacatcttctagttgtttgggaggtcagccgacctaggtgagcacagtcrggaagctctgctttgcactgcagtagccaggttgggagcttacactgaaccatacatctgcagggcagccgggacaactctgttccatgtgtgtttcttt

SEQ ID NO: 345784 - DNA, 201 bp, Homo sapiens
atatattcctatataatatacattttttcttcctttagcaaggatttaaaggattccaagttgctcctgaacatcataatgaccataagacctttatctaygataacactgagttcacccttgctcatggttctgtggtcattgctgccattactagctgcacaaacaccagtaatccgtctgtgatgttaggggcaggta

SEQ ID NO: 345785 - DNA, 201 bp, Homo sapiens
tgcgattttagtggtggtttttcttgggggaatgcgctagtaggaaattagtcactgccaaggcattacaagagaacggagttttagaaggttgaaaaacsaaaaggataaggcaattgtaaacataacagaataatataacttcttacattcctactggcttaataattgtaggttaagtgtgcttccctatttgaacta

SEQ ID NO: 345786 - DNA, 201 bp, Homo sapiens
tgtgaagatttcagggacacttatcacttccccaatgaatacccttgtgatttcctatgcctgtctttactttaatctcttaatcccatcatcttcataarctgaggaggatgtatgtcacctcaggaccctgtgatgattgtgttaactgcacaaattgtttgtagagcatgtgtgtttgaacaatatgaaatctgggct

SEQ ID NO: 345787 - DNA, 201 bp, Homo sapiens
gtgtaagtgcagcgtatgttgcgtacttacataattgctaatggaagtatcagtttataaacttcaaccaggaaatactaacctatgttacttgttactcyttaaaatgccttttaggtcgtgatgaagaaaaattaaagtatattaaaaaatatcttcaggctgtaggaatgtttcgagatttcaatgacccttctcaag

SEQ ID NO: 345788 - DNA, 201 bp, Homo sapiens
cttgctttttagattttcttcattttagcttatcggggttttcaagcatgaataaatattacatttgacattaccaaaatcaacccctacagtatgtttayacctggtatgttgaggacagttcttccatctttcttaggctgtcttaccaccagcttacctggtggcagactccagctactgtctcccagtgagaaatgt

SEQ ID NO: 345789 - DNA, 201 bp, Homo sapiens
cactaatggtcttgaagtttttttttttttcacttaaatcagatcctagtatatacatatatatattattttgcaactttaaaattctcatatcatttaaygtgagcctttactaacattttgtatcttgaatctgagtaagggattgtatacgcaatattatatcaggaaaattgatttgcccttactgtggcttttgga

SEQ ID NO: 345790 - DNA, 201 bp, Homo sapiens
gcagtgattccgtatccagtcattcagtgttcacacgggctttatagaacataactaccgaggagaacgaggcttgactctgtataatcatgaaaattgcrtattagaaagttttctcattaataaacattttttccccaggagtaaatgcaaagggacagcaggtatttctgaaagatatctggccgactagagacgaga

SEQ ID NO: 345791 - DNA, 201 bp, Homo sapiens
gtcaccttgtaacagatgtgagattatctgatgatatctaattgcatagtcgtttatcagttggtagttagacttaaacccttacattccatctaaagagrgccctcttgccctctagggcacctaccatgaatggagtttgcaggactggaagttgctttggttgagtcagtgaatgagtggagagtgaatgtgaaggcc

SEQ ID NO: 345792 - DNA, 201 bp, Homo sapiens
gcttgagcccaggagtttgataccagcctgggcaacacaggaagaccatatctctacaaataactttttaaaaattagccatgtgtggtggtgtgtgcctrtggtcccagctacttaggaggctgaggcaggaggatcacctgagcccagaaggttaggccatgcataccagttgggtgacagagcgagaccttgtcttta

SEQ ID NO: 345793 - DNA, 201 bp, Homo sapiens
agtttctttcttcaataatgtaaaccgtagcttacttttattttacaaacttttaagtttattgaaactcttgactcttaaaacacttagcttaaaacaamcatattgtatagctgttccaaaatattttctttatatctttatttcataagttttttcctatttttgaagtttttatttttttactttttaaactttttt

SEQ ID NO: 345794 - DNA, 201 bp, Homo sapiens
attttgtttgtgcagccataatttttttccagtgaattcagaaatattactagaagaaactgctttccttaataagaaatgaagcatagagcctccagggrtaagacaaagaagagaataatttctttattccccaatatacagctaagacttaactgcagtagttaaaacaagaatctactgagggtaaaggataacgaa

SEQ ID NO: 345795 - DNA, 201 bp, Homo sapiens
agaaaatagaggtgaggtcccacactgccctccccgccccagaggatctaagggaaagctgctccctttgtgtcctgtctgcagacctcaaggctaacggragtataaactatataaagtaacatttatttcttcagatgactggggaggtggttctccgtcatttttctcctgtgactcgcatttttacaaaccccacct

SEQ ID NO: 345796 - DNA, 201 bp, Homo sapiens
tacagaagaatcaagacctggaatttgaaagaaatagagagcgatttgaatttttaaaggtatgggcagggtctggttccattgtttggttttctttgtakgcagggtacgagggagagatgccaaggagatgggctgagtagaagtacttcacgcgttcatagtgttctttccatttgtcaatcccagtggggttcccag

SEQ ID NO: 345797 - DNA, 201 bp, Homo sapiens
tttcaccgtgttagccaggatggtctcgatctcctgacctcgtgattcacctgcctcggcctcccaatgtgctgggattacaggcgtgagccactgcgccyggcctaagatctttttaaagtcaaagttactcctctcaagaaagaggacagaattccttcataaactgcactgatcagcttctgccccccttgagctccc

SEQ ID NO: 345798 - DNA, 201 bp, Homo sapiens
cactgcagaacatccacttaagctccaggcatcacatctccctactgtcatcagcatctgacctggagagtgtcatccgcctgttgctgtggaagagctgraggtgccccaagcaggggcctgtgctggggccccatcccttcctgcgtactcagagacactgctgtagcaattttcctcctcttcctgcagcatccactt

SEQ ID NO: 345799 - DNA, 201 bp, Homo sapiens
acaggtgcaattagcatgcccatctgctaatccctgattaatggtgtttacaaacatggggctccactgcagagccgctcagccactccctcctggggttktgaggcaggggtcttccctgcaacctctccccacttcttcaggcctcctccccagccagaacccctctgcctccccttccccaggcagtgaacagagcta

SEQ ID NO: 345800 - DNA, 201 bp, Homo sapiens
ttttgtatttagatggggtttcactatgttggtccggctgttcttgaactcgtgaccttaagcgatccactcgcctcggcctcccaaagtgctgggattakaggcatgagccaccgcacctggcctttaaaaaatattattaatgaaatattttacattcctttaaaaaatgttttacatacaacacacctcgatttgaat

SEQ ID NO: 345801 - DNA, 201 bp, Homo sapiens
cattttaaataaattgtgtccagtatatccaaaataatatcaatttaacatgtaatcattttaattattattaatattattaattttttgagagagtttcrttcttattgcccaagctggagtgcagtggtgcaatattggctcactgcaacctctgcctcctgggttcaagtgattctcctgcttcagccttccaagtaa

SEQ ID NO: 345802 - DNA, 201 bp, Homo sapiens
ggagcattagctgaattcttcctagcgttataccctttcctgcaccccttccccaggtatgcaccactttgcctcttctgtaagtcagcctcagtgtctayttgcctactaggtcgggcttcagtaaatgcattttgttcagctgtggggagctgcgtacaggagacctgagttcctcgaatagggcacagcttgaaagga

SEQ ID NO: 345803 - DNA, 201 bp, Homo sapiens
gaggtgctccagaaagttctaacggcctcctacccagcccagagctcagtgcctctcacttctgggcctgtgcgccaggtgacatagaggcagttttatgytggccgctgaccagaggttgtcactgtccccctctcctgagggtcctggaaacctggtcaggggacgaagcacctggagcggatccttccttttatcctc

SEQ ID NO: 345804 - DNA, 201 bp, Homo sapiens; identical to SEQ ID NO: 73184

SEQ ID NO: 345805 - DNA, 201 bp, Homo sapiens
gtcagctgggcacaatggctcacgcatgtaatcccagcactttgggaggctgaggcaggcagatcatgaggtcaggagatcaagaccatcctggctaacayggtgaaacaccatctctactaaaaatacaaaaaattagctgggtgtggtggttcgtgcctgtagtcccagctactcgggaggcggaggtaggagaatcgc

SEQ ID NO: 345806 - DNA, 201 bp, Homo sapiens
tttgtatttttagtagagatggggtttctccatgttggccaggctggtctcaaattccctgacctcaggtgatctgcccgccttggcctcccacagtgctrggattacaggcgtgcactaccatgcccagccgatatttcttaaagctactagttgatctcattgtgtgaccaggttcaagaatcagtggcctttgagcca

SEQ ID NO: 345807 - DNA, 201 bp, Homo sapiens
ggggccctgatgtggagtagacagtgcgcacctcaggcccacacacggccccgccctggggccttgagcgcaggcctcatctttctgtgccgcgggactcygcacctacctcacagggttgttgtgaggctcaaataaaacatcactcagcacgtgggagattctggccaattcctccgttaggtggcagcctcgctcttc

SEQ ID NO: 345808 - DNA, 201 bp, Homo sapiens
tagctagtggctactatattgaacagcacatatctagaagcattttttggcttcacttttttgtagagagcccctttctccaagcctgataggagatgagkttcccactcatcacttccagcccctgaacaggtagcttctgaaaacacagaaacactgcagaacatccacttaagctccaggcatcacatctccctactg

SEQ ID NO: 345809 - DNA, 201 bp, Homo sapiens
ggtctcaagagatcctcgtgtctcctgagtagctgggattacaggctgatttttgtatttttagtagagacagagtttcaccatgatgctcaggctagtcttttttttttttttgagacagagtggagtctcgctttgttgcccaggctggaggcagtggtgtgctctcagctcactgcaacctccgcctcccgggttcaa

SEQ ID NO: 345810 - DNA, 201 bp, Homo sapiens
atgagttgcttggagttcctctgggaacggcctactctccttgtgctgggtaggtggatgtccctgcgtttgtgcccagattacatttcccgagcaactgrgtgtccagctgggcaaccctaaccctcagccccacgccctgcagggaatgagggctcaggtctatcccaggaggtgcaggcctcctgccagcttctcctc

SEQ ID NO: 345811 - DNA, 201 bp, Homo sapiens
agtttcaccatgttagccagggtggtctcaaactcctgacctcaggtgatccgcccgcctcggcctcccaaagtgctgggattacaggcgtgagctactgmgcctggttttttgtttttttttttaatttgagatggagtttcactcttgctgcccaggctggagtacaatggcgcaatctcggttgactgcagcctctgc

SEQ ID NO: 345812 - DNA, 201 bp, Homo sapiens
ccatgttagccagggtggtctcaaactcctgacctcaggtgatccgcccgcctcggcctcccaaagtgctgggattacaggcgtgagctactgcgcctggttttttgtttttttttttaatttgagatggagtttcactcttgctgcccaggctggagtacaatggcgcaatctcggttgactgcagcctctgcctcccga

SEQ ID NO: 345813 - DNA, 201 bp, Homo sapiens
tagccagggtggtctcaaactcctgacctcaggtgatccgcccgcctcggcctcccaaagtgctgggattacaggcgtgagctactgcgcctggttttttktttttttttttaatttgagatggagtttcactcttgctgcccaggctggagtacaatggcgcaatctcggttgactgcagcctctgcctcccgagttcaa

SEQ ID NO: 345814 - DNA, 201 bp, Homo sapiens; identical to SEQ ID NO: 73183

SEQ ID NO: 345815 - DNA, 201 bp, Homo sapiens
atattggctcactgcaacctctgcctcctgggttcaagtgattctcctgcttcagccttccaagtaactgggattataggcacacaccatgcccagctaattttttttttttgtatttagatggggtttcactatgttggtccggctgttcttgaactcgtgaccttaagcgatccactcgcctcggcctcccaaagtgct

SEQ ID NO: 345816 - DNA, 201 bp, Homo sapiens
gatccccatcatgagttgcttggagttcctctgggaacggcctactctccttgtgctgggtaggtggatgtccctgcgtttgtgcccagattacatttccygagcaactgggtgtccagctgggcaaccctaaccctcagccccacgccctgcagggaatgagggctcaggtctatcccaggaggtgcaggcctcctgcca

SEQ ID NO: 345817 - DNA, 201 bp, Homo sapiens
ttcctgggctcaagccatcctcccacctcagcctcctgagtagttggagatacaggtgcacaccatctcacctaatttttttctttcttttttctttttctttttttttttgtagagatgaggtctcactttgttgcccaggctggtctcaaactcctggcttcaagaagtcctcctgccttagcctcccaaaatgctggg

SEQ ID NO: 345818 - DNA, 201 bp, Homo sapiens
gctaggtgcttaataactattgactaattgactggatcagcagataaatgaatgtatgggcaaggctgggctcttccttggccagggctctgatggataattttttttttttttttttgagatgggggtctcactctgtcacccaagcaggagtgcagtggcgcaatcttagctcgctgcaatgtctgcctcctggtctca

SEQ ID NO: 345819 - DNA, 201 bp, Homo sapiens
tgcaaatgaatgaagtaatgatcattttattgtaaactaaagctctgcagtagactcagggcatctgaactgcaaggaggtggtgggggagatgccagtaraaatacgtggttcagatgtgttttacagttcttgatttggattttcctgcagaaatatagtcatgcaaagagaccaccactggtcacagccagtcaaatt

SEQ ID NO: 345820 - DNA, 201 bp, Homo sapiens
tattgaacctctcagtgacctgctgagggtattcagatcctaccgtgtcactgtttgtttgtttgtgacactgctttcactctctctgcccctcacacacwctggtgttacttcctgacgcgttctccttggtgccgagtacctggggctgtcaaagcagctttccctagtctttctttctacttcagagttgtaaaaggc

SEQ ID NO: 345821 - DNA, 201 bp, Homo sapiens
tggtttatgagatgaaaaccactggggtggttctttttgccttatatctaccttctttccaaaagtgggaggggaaacaggaaggcctttagtccctgttrtttaaaactttctcttaaaactttgagacatatctattatttcttactcagaatccccttggccccttttagtggtctctaatgattccttctgcgtgtt

SEQ ID NO: 345822 - DNA, 201 bp, Homo sapiens
actaactgggagctctgacatgttccaaggaaacaaggctttccagagtttccatcagatatagctttgactagcaaggggcacccccaaagggcaggcartatcttgacactgttttcatttctatttcatttggggatgggtgactgccaactcagatattagatggttctttatgaattaatgggaggaatgatgaga

SEQ ID NO: 345823 - DNA, 201 bp, Homo sapiens; identical to SEQ ID NO: 73193

SEQ ID NO: 345824 - DNA, 201 bp, Homo sapiens
ctagccaattgctgaacttgctgcccaagtgacacagttagagtccccaggtagtaatgaaagataagagtattatttgcctgcccagtgccacatggtcrcaatgtttacattagcacacaaatgctgaagtagattcttcagggcttgtatctaagctgcttctggcctatgtgcctagggttaatatatcataaaatt

SEQ ID NO: 345825 - DNA, 201 bp, Homo sapiens; identical to SEQ ID NO: 73194

SEQ ID NO: 345826 - DNA, 201 bp, Homo sapiens
cttcctttccagcttggtccaggccaatccagaggttgccatggattccatcatccatatgacgcagcacatatcacccactcagcgagcagaagtcatamggatcctctccacaatggattccccttccacgtaggaagagcttcctgcctgtccctgccctgtctctggagaaaagggctagagctgccttttacaact

SEQ ID NO: 345827 - DNA, 201 bp, Homo sapiens
ctacaagaattcaaaggagagagagatcagtgaaagctggagaagtaagagaaatcttggagaaaatgggacttccaaggactagaaagattcagaaaaayaggagaaaagttggacaagtctgccaccataaacaaaggtataaggataagaataagcatggcaagtgccagaagccagattaaagtatgactattggtg

SEQ ID NO: 345828 - DNA, 201 bp, Homo sapiens
tacctcatgatctgcctgcctaggcctcccaaagtgctgggattacaggtgtgagccactgtgcctggcctaaatggtttttttttaatgtttgacaaatrccaagtgttgatgaggatgcaggacagctggaactctcatagattgttggtgggaatgcaaaatggcacagccactttgaaaaaggttgggcttttctta

SEQ ID NO: 345829 - DNA, 201 bp, Homo sapiens
gaggcaggagaatcacttgaacccgggaggcggaggttgcagtgatctgacagcacgctactgaactacagcctgggagacagagcgagactctgtctcaraaaaaaaattctgaactgtgtggtatgaccatattgctacaagaattcaaaggagagagagatcagtgaaagctggagaagtaagagaaatcttggagaa

SEQ ID NO: 345830 - DNA, 201 bp, Homo sapiens
gggtggatcacttgaggtcaggagtttgggaccagcctggtcaacatgatgaaaccccatctctactaaaaatacaaaaattagctgggcatggtgctggkgcccgtaaatccagctactcggaagctgaggcaggagaatcgcatgaacccaggaggaggaggttgtggtgagctgagatcgtgccactgcattccagcc

SEQ ID NO: 345831 - DNA, 201 bp, Homo sapiens
cgggtggatcacttgaggtcaggagtttgggaccagcctggtcaacatgatgaaaccccatctctactaaaaatacaaaaattagctgggcatggtgctgrtgcccgtaaatccagctactcggaagctgaggcaggagaatcgcatgaacccaggaggaggaggttgtggtgagctgagatcgtgccactgcattccagc

SEQ ID NO: 345832 - DNA, 201 bp, Homo sapiens
tacaggtgtaagccactgcgcccggtccggtttctttttcctcattcatttctacctggtactccaattaattcatttattcattcacttaacatggagaytgacagttgaataagatgtgatcttgttctaggaaacaaatgatttcaatacaatgaggtaagtgctataaaagaaacatgcacagggtccggtgagaac

SEQ ID NO: 345833 - DNA, 201 bp, Homo sapiens
agggacatacattcaaactatatcatgttattatatgaaatcatttagatgcacactttcacatctctgagccacaagtttcatacttataaaaggaagawcctaatgtctaattcactggataattgtaaagatgagatcatctataataaatacagattaacttgcgtggtttttttcttttttcttttgagagggagt

SEQ ID NO: 345834 - DNA, 201 bp, Homo sapiens
tatgctattactccttacttatctctttgtggggggcccactgagaatgtactcttcctgacattacttcagagtgtcaccctggatattttatcctaackggagttcagagttcaaaagtttccaatgtgccacttctaggaaaagcttcaattctgctacatattttggctcaggcccagattggctgccgcgctgtaa

SEQ ID NO: 345835 - DNA, 201 bp, Homo sapiens
ggttgatattctgactgccaaagagccacaacccactgctgctggtacctctatggcttttcaccagactgttgaaagaagctagagactggaattaagtytctgttacagctggagcaatactgataacagctgggaaataggaaggaaggcccttttcttacctttctgccttccggtttggtgaacagaacaggaagg

SEQ ID NO: 345836 - DNA, 201 bp, Homo sapiens
cctcccaaagtgctgggattacaggtgtgagccaccatgcctggccttgtcccttcttgttatactcccgtaggtggtggttttgcaagttaagagccacmctaagtcatgtgaagtatagggaaaatgcccactcattgagttttatgcatagagacactcagagaagaaagaaagactggtcttatttatgtatgtata

SEQ ID NO: 345837 - DNA, 201 bp, Homo sapiens
atatttgtctctgctaaatattttgagatgtcaatgtttggcatagaaggttataaaactactaacttagcccatacaaaatgatcttggtttgtgtgccyttttttttttcaacgaatgagagtaacttaatgttgttaactaagtcttctgagttattggcaaaaaaaaataccagtgtatttacctttaaggctgtta

SEQ ID NO: 345838 - DNA, 201 bp, Homo sapiens
tatttttttccttttgatggctatggccagagaaaaaaaactactgccttttataattatgggatgaatggggcttgagctgtggattaacagtttctcayatctacctttgtccttggtctgaaggaacctgctttagtgagaaaatgactcttctggccattatgcatatactcattcacaggaacttatacctcctaa

SEQ ID NO: 345839 - DNA, 201 bp, Homo sapiens
gtaactacaatatagctgagtgcagtggcatgagcctgtagtaccagctactctgtaggctgaggccagaggattgcttgagcccagcagtttgaggttgyagggagatatattcctgccactgcactgcagcctggtcaacagtgagaacccatctctaaaaattttttttccaaagtaactgagatatatataatctat

SEQ ID NO: 345840 - DNA, 201 bp, Homo sapiens
ctatagggtggccaaacaggaggcatagtataaggaggctcttcgtggccagaggtcctgaacagtgtttaaaagtactgctttgaggaagagaaatttcwtgatttctaatttgtctcattctccatagatatgtacgaccaagtgctgaagtttggtgcttacattgtggatggcttgagggagtgctgccagcctgtg

SEQ ID NO: 345841 - DNA, 201 bp, Homo sapiens
ggagagaaaggtgtaccagacagaaagaacagcattgcaaatgcataaaggtatgacacaagtggttttctagaaattacggatggctacaagatgtgatrtagtatttgccaagggggaccttgttttccatcctcaaaagcacagactttgtcttttaaggagagtatgtgtgtgtgttggacatctaaggatttgcat

SEQ ID NO: 345842 - DNA, 201 bp, Homo sapiens
cccaaacataggacttccaagtaaaatccttttaaaataatttctgtttaaaatgtgtcagtaatagacatataaaaatgattgcactatagtcaacctcratacagattcctgtgtcctagggataagtaggaagaaatttaacaaaagtgttgatttgggctttcaagtgtatgcctttttcagtgttaaatatttgct

SEQ ID NO: 345843 - DNA, 201 bp, Homo sapiens
gcccagccaaggcaattatttaaaactccaagtagaggtagtgatatctaaatggatatattttatatggtgtggtgttaataattactactaccagtagstctgtaaagttcaaaaaggacagacatttataaaaactgcatttacatttttttcagcttagatggaaattgcatggataatggatgaatttagggaata

SEQ ID NO: 345844 - DNA, 201 bp, Homo sapiens
cataacctgcccagtggtaacttgcctcatggactctcaagcagatttctggtaatctttcactctgtctggaaagcaaagtatcaggtaaaaggctaaartcctatcaggtttcctccatttaaagggacattgtaacacaatttaacacaaagtctggaagaccaatagtacatttattttttgaaagctcttcttatt

SEQ ID NO: 345845 - DNA, 201 bp, Homo sapiens
aggtaccccagagttaataactagaggaagtagctatcacctctaagtctgggagaacaaaaggggaggtagtgttaccagaactaggagcttggtggagrtctcctggagggctggtgcctggacctctgggcataagctttgggtagctggtactcagatccttggcctgacaggtgattgataggcccaggcagtgag

SEQ ID NO: 345846 - DNA, 201 bp, Homo sapiens
caagatcattttcttttctctcttttatttgaaaagtacgtgacctgccagcatgcagtcttcacaggatgcagttgtgaaagtactgttatgggtatggkagtgaaaagcaggtctccagaaaatataggtggtgtttttatggcttctgtatttttataggtccagcatgtctggcttgcacctagtaaagcagggccg

SEQ ID NO: 345847 - DNA, 201 bp, Homo sapiens
cgtctgaagaaataggtcactgccgtctcttatcaatggagagaacagttgaccacgtgtgtacaagctcctggctggaattgaagcacagaagagaaccyccaccccgtagctcagtaggaggctgcctaggcactgggggcagccatgctgagcactgaggccatttcccttgtgcccatctacaaaaggcagcattct

SEQ ID NO: 345848 - DNA, 201 bp, Homo sapiens
gggcttaggaggaatgttcctgcagaaggaacagcatcatcctaagccatgagagtaagagtaacatgcatcaaaggaacatcctgcaactgtttcagggsagctcagagactgggtgcctggtaggaagaaggggcaggggcatgatcacacagggccatgtaagctgtcaaggagtttggactttgtcctgaggcctgt

SEQ ID NO: 345849 - DNA, 201 bp, Homo sapiens
aagtctcctgtctgttgagtcagggtaccgtgcgcagtgatccaaatgaggtttgccaactgcctttctctttttacatcctccttctcctttagcctaaraagtagaatgtctttgtctggtcagggactggctctggcagtagcagcccaggcgggagagcacaggctaacccactgagctgacacaagatgtgaggat

SEQ ID NO: 345850 - DNA, 201 bp, Homo sapiens
gaaataagaatatgcagtttatggttgtcctgtggacattaactgactgtgaaggtaaggtatatgccaaaggcagtgatatgcaggtgatagattcaccrggagatgatatgtgacttttcttgtattttaaagctctgcttcttttttagaaaaaaaaaaatcctatactctcatcccccttagcgagatcaggcccct

SEQ ID NO: 345851 - DNA, 201 bp, Homo sapiens
ctagcactttcggaggccaaggccggcagattgcttgagcccaggagttcgagaccagcctgggcaacatagcaagaccccgtctctaaaaaaatacaaamattagccaggtgtagtgttatgtgcctgtagtcctagcttcttgggaggctcaggttggaggattgcctgagcctggggaggtcgaggctgtagtgagct

SEQ ID NO: 345852 - DNA, 201 bp, Homo sapiens
ttgggctcaagtgatcctcccacctcagcctcctgggtagctgggactacaggcatgcaccatcatgcctggctaatttttttttcaagttttttgtagaratggggtctcactgtgttgcccaggctagtctcaaactcctatactcaagcaattctgccactttggcctccagaagtgttggtattacaggccactgtg

SEQ ID NO: 345853 - DNA, 201 bp, Homo sapiens
ctcagcgtggttggcatcagattgttaactatttctatccagcattttgatgggaataaattttttatggttcatgattcaggttagatttggtgtacagkcctgaggacttgcctcaggaagttgtctttctatagattctaagcctttagggtcttttgccattgatttttctcctaatacacagaatatcatgagcat

SEQ ID NO: 345854 - DNA, 201 bp, Homo sapiens
tcccaaatctctggaattacaggtgtgagccactgtgccccatcttaaatactattttttttttttttgagacagagtttcgctcttgttgcccaggctgkagtgcaatggcacgatcttggtcaccgcaacctctgcctcccgggttcaagcaattctcctgcctcagcctcccgagtagctggtacaggcgtgcaccac

SEQ ID NO: 345855 - DNA, 201 bp, Homo sapiens
tgaccttcttgccttggcctcccaaatctctggaattacaggtgtgagccactgtgccccatcttaaatactattttttttttttttgagacagagtttcrctcttgttgcccaggctggagtgcaatggcacgatcttggtcaccgcaacctctgcctcccgggttcaagcaattctcctgcctcagcctcccgagtagc

SEQ ID NO: 345856 - DNA, 201 bp, Homo sapiens
agaagattcagatagtccctcagaacaaccaacccatggagactgaaatctctgttttgtggagaaaagaacccattttagtgcgacttgtgaaatcgacyatgcctttatttctatagagacaaatgtcttttctcttgctcttttctctaggtcctcgggcgggaagtgtacacctccaataaccagctggggggcatc

SEQ ID NO: 345857 - DNA, 201 bp, Homo sapiens
ctcctgcttcagtctcccaggtagctgggattacaggcgcccaccatcatgcctggctaattttttgtatttttagtagagacagggtttcaccatgttgkccaggctggtcttggactcctgacctcaggtgatccacctgcctctgcctcccaaagtgctgggattacaggtgtgagccactgtacccagccacatttt

SEQ ID NO: 345858 - DNA, 201 bp, Homo sapiens
aatcaagaactgtaaacattgatactactgtctaatccatgattcatattaaaattttaccaattgtctcaatgtcctttttagtttttttttttttttttgaggggcggtctgagatctgatctaatgagcatacattgaaattcattgtcaagtatttttggtctcttttaatctggactgattctttgacctttgttt

SEQ ID NO: 345859 - DNA, 201 bp, Homo sapiens
ctcagggggcagaggttgcagtgagccgagatcgtgccactgcactccagcctgggcgacagagcaagactccgtctcaaaaaaaaaaaaaaaaaaaaaaagagctggatgccattggggaagtccctttacatttcagagctgtggttttcttacctgtaaaatagacaccctggcataaagttgagttgtcctaaggat

SEQ ID NO: 345860 - DNA, 201 bp, Homo sapiens
aacatgtgaaccaggaagccagatttgtccctttctttattttggtgtcattacatttttctttaaaaaaaaaacaaaaacaaaatgagacccagtaaacrtaagaggatctctaagctttcatgtcattaatttcttttcaaatatcagttgttttcatttcatcttagagatttggaaatcaagaagttaatgatatga

SEQ ID NO: 345861 - DNA, 201 bp, Homo sapiens
atttttttccttttgatggctatggccagagaaaaaaaactactgccttttataattatgggatgaatggggcttgagctgtggattaacagtttctcacrtctacctttgtccttggtctgaaggaacctgctttagtgagaaaatgactcttctggccattatgcatatactcattcacaggaacttatacctcctaac

SEQ ID NO: 345862 - DNA, 201 bp, Homo sapiens
gtagcatgactatgacttactgcagcctcaaccacacgtgcccaagcaatttatctgcctcagctgcgccccccaccccccaccccaagtaactggggctrcaggaacacacgactgtgccagctaatttttgtattttttttatagacagggttttgccatgttgcctaggctggtctcgaattcctggtctcaagccat

SEQ ID NO: 345863 - DNA, 201 bp, Homo sapiens
atgcctggatatttggtttttttttttttttttttttagtagagacgtggtttcgccatgttggccaagctggtctagaactcctggcctcaagtgatccrcctgccttggcctcccaaagtgctgggattacaggtgtgagccaccatgcctggccttgtcccttcttgttatactcccgtaggtggtggttttgcaagt

SEQ ID NO: 345864 - DNA, 201 bp, Homo sapiens
agatggggtttcaccctgttggccagcctggtctcaaatgtctgacctcaagtgatccacccgccttggctgcccaaagtgctgggattacaagggtgagscaccgcacccagccaattaagtgtttttaaaaaagagtgtcttggtatgcaggatcttcaaagtaaaaaaaaaaaaaacaagaaagtatcattgctttct

SEQ ID NO: 345865 - DNA, 201 bp, Homo sapiens
aaagctgtttggcctagaactctttcaccttcagttgtgggacttgaggtctttaaatccatgtttcttatccttgtcatggacttcacatttaattgtgrttactcctttttttttttcctcgagacggagtcttgctctgttgcccaggctggagtgcaatggcacaaactcagctgactgcaacctccacctcctggg

SEQ ID NO: 345866 - DNA, 201 bp, Homo sapiens
agaaagctagatattgtgctgcatgtgggaagattttaatcataccttcttattttgaaaagacaccttactgccccatcaagtttaaattgtaggggaarggaagaaaaggtgggaataggaaaagaaaacagctgtctatcaaacggtgtacaaaggagcttatgtccactatcttatttaatcctctgaacactcttt

SEQ ID NO: 345867 - DNA, 201 bp, Homo sapiens
ctctatatcccccatactccagacccataaacagaggataaaagcctttctagctttaagtatatgagcataaactctatctaatcattggctacacagayataggggtgactcctcaaaagccacatttaaacataaaaccaagaaataaaaagaaaatgagctgagacatcagtggctgcacactgttagggaaacaga

SEQ ID NO: 345868 - DNA, 201 bp, Homo sapiens
ccagaaacatggtggtggctttgaaggagctgtctattcggggtgactttcgaactacagttgaatacctgatcaaattgttagagactgaaagctttcaratgaacagaattgatactggctggctggacagactgatagcagaaaaagtacaggtgtgtatttctccacaaacagatgctgggattgggtttttataga

SEQ ID NO: 345869 - DNA, 201 bp, Homo sapiens
gcaacacctctactgggacactattgattgggggaggggtccctccttggtataaggggttccaaagtctcctgtctgttgagtcagggtaccgtgcgcastgatccaaatgaggtttgccaactgcctttctctttttacatcctccttctcctttagcctaagaagtagaatgtctttgtctggtcagggactggctct

SEQ ID NO: 345870 - DNA, 201 bp, Homo sapiens
accatagcaacacctctactgggacactattgattgggggaggggtccctccttggtataaggggttccaaagtctcctgtctgttgagtcagggtaccgygcgcagtgatccaaatgaggtttgccaactgcctttctctttttacatcctccttctcctttagcctaagaagtagaatgtctttgtctggtcagggact

SEQ ID NO: 345871 - DNA, 201 bp, Homo sapiens
gatcctgtaatcccagctactcaggtggttgaggcacgagaattgcttgaacctgggagatggaggttgcagtgacctgacattgtgctactgtactccarcctgggctacagagcgagactctgcctcacacacacacaaaatgtatatgttgaaatctaattaccactatgtcaagaagtggggcctttgggagttgag

SEQ ID NO: 345872 - DNA, 201 bp, Homo sapiens
caccatagcaacacctctactgggacactattgattgggggaggggtccctccttggtataaggggttccaaagtctcctgtctgttgagtcagggtaccstgcgcagtgatccaaatgaggtttgccaactgcctttctctttttacatcctccttctcctttagcctaagaagtagaatgtctttgtctggtcagggac

SEQ ID NO: 345873 - DNA, 201 bp, Homo sapiens
aggtaaggtatatgccaaaggcagtgatatgcaggtgatagattcaccaggagatgatatgtgacttttcttgtattttaaagctctgcttcttttttagaaaaaaaaaaatcctatactctcatcccccttagcgagatcaggcccctatttccactgaatctgccaggaaaaaagaagttatgtgatgggtatgactag

SEQ ID NO: 345874 - DNA, 201 bp, Homo sapiens
agaggatgaggaggaggaagatgaagaagatgatgatgatgaataagttggttctagcacagatttttttcttgtctataaagcatttaacccccctgtayacaactcactccttttaaagaaaaaaattgaaatgtaaggctgtgtaagaatttttttaaactgtatggtgtcttcttttgtatagttaacacactacca

SEQ ID NO: 345875 - DNA, 201 bp, Homo sapiens
actgaataccactctgtaattgcaaaaaaaaaaaaaaagttgcagctgttttgttggcattctgaatgcttctaagtaaattacaatttttttattagttaaaaaaaaaaaaaagatgttatgagcatggagaggctagagccaggctgcccaggtttaattcttggctctaccacctacttagttgtgtgacctcgggca

SEQ ID NO: 345876 - DNA, 201 bp, Homo sapiens
gcaggagaatcacttgaacctgggaggcagaggtggcagcgagccaagattgcaccattgcactccagcctgggcaaaaacagcaaaactccatctcagaraaaaaaaaacaaaaaacttttgattgttcttctccctgacatttactaggtaagcaactttgggctttaatctatttagatgttagtttcctctttgtga

SEQ ID NO: 345877 - DNA, 201 bp, Homo sapiens
gcctgccatgatgcccggctaattttttgtatttttaatagagacggggtttcaccgtgttagccaggatggtctcgatctcattaccttgtgatccgtcyacctcggcctcccaaagtgctgggattacaggcatgagccacagtattttgtttaaccaattttttgtgttttctttccttgcacttggtcttcacattc

SEQ ID NO: 345878 - DNA, 201 bp, Homo sapiens
cgagccccttctctaccccaaccctagcctagcacctgccagccagcactccagtttgccagtgacagtagtggcaataaagtggggaaaaaattataacsctttgcctatgcattaagaaactgtattttggaacccccaaataatcttgttggtcacataggtcctggttccatctccctagagatttaattccattca

SEQ ID NO: 345879 - DNA, 201 bp, Homo sapiens
aaggggttggtattcagagactggaattcttggtataaaagtttttctgggaggaaagtatattgaaaattgaatgcaactggggccaggcgtggtggctyatacctgtaatcccagcactttgggaggctgaggcgggcagatcatgaggtcaagagatcgagaccatcctggcccacatggtgaaaccctgtctctact

SEQ ID NO: 345880 - DNA, 201 bp, Homo sapiens
cctgaaaattctggttccttcatgcaagtatccaatccacaaattgtgtattatgttctttaaatttcttaatctgtcacattctatcacattaccacccyccacctttttttatgacagtgactagtgactcgtttaagaggaagttagcaaatcatgaaagtatatgattgctagtgaaaatttggtagcatatagaga

SEQ ID NO: 345881 - DNA, 201 bp, Homo sapiens
tattgactaggaagggacacaagtaagccttctgggactctggaaatattctgtatcttaatgaggtgattggttatatggctatatatatattaattttrcatatatatgttttatacttaagatttttccacttcattgtatgaagttatatcggtcattaaaaagtaaataaaacagggaggacttccaggtatagct

SEQ ID NO: 345882 - DNA, 201 bp, Homo sapiens
ggctggtttcgaactcctggcctcaagtgaccttcttgccttggcctcccaaatctctggaattacaggtgtgagccactgtgccccatcttaaatactattttttttttttttgagacagagtttcgctcttgttgcccaggctggagtgcaatggcacgatcttggtcaccgcaacctctgcctcccgggttcaagcaa

SEQ ID NO: 345883 - DNA, 201 bp, Homo sapiens
caccacgcccagctaattttgtatttttagtagagatggggtttctccacgttggtcaggctggtctcgaactcctgacctcaggttattgcccgcctctrccttccaaagtgctgggattataggcatgagccaccgcgcctggccccttaaatactgtttttttaagcatgacaacaatgaatcaataaatagaacttc

SEQ ID NO: 345884 - DNA, 201 bp, Homo sapiens
gacgtccctcctctctttctctgccttgtcgttccaccattgcaagtctgctggcctgctggtgtctgctggtctgttcctctgctcctcttgatgttcartcacttgtgtctgtgcctgctgtggtctcgggtttatttgggcacaggattgggggtgttgcaggccagagtggtcttggaaaatgaagcatttggatgc

SEQ ID NO: 345885 - DNA, 201 bp, Homo sapiens
atctggagcctgctctggctttccagttagagctgaaccggatgagaaattttgacctcactgccattccatgtgctaatcacaagatgcacctgtatctyggggcagccaaggtggaagtgggcacagaagtgacagactacaggttctttgttcgtgcaatcatcaggcattctgatctggtcaccaaggtgggtgctg

SEQ ID NO: 345886 - DNA, 201 bp, Homo sapiens
gctaattttgtatttttagtagagatggggtttctccacgttggtcaggctggtctcgaactcctgacctcaggttattgcccgcctctaccttccaaagkgctgggattataggcatgagccaccgcgcctggccccttaaatactgtttttttaagcatgacaacaatgaatcaataaatagaacttctcagctgagtg

SEQ ID NO: 345887 - DNA, 201 bp, Homo sapiens
ttaaatagagacagaggtcttgctatgttgcccaggctggtcttgaactcctggcctcaagcgatcctcctatcatggcctgccaaagtgctgggattacrggcatgagccaccacacctggccacaaaatactttttgatagttgggaaaactaaggcccaatgaggagaaataacttgcctaagtttgaatagccagag

SEQ ID NO: 345888 - DNA, 201 bp, Homo sapiens
gtagagatggggtttctccacgttggtcaggctggtctcgaactcctgacctcaggttattgcccgcctctaccttccaaagtgctgggattataggcatkagccaccgcgcctggccccttaaatactgtttttttaagcatgacaacaatgaatcaataaatagaacttctcagctgagtgcagtggctcatgcttgta

SEQ ID NO: 345889 - DNA, 201 bp, Homo sapiens
cgttagtggtcaccctcatttagctatgtagaggtcaaaagaaaagtgtaaagcaagttaattatgttttacttcacaggttcctagaattgtaataaacyagagagataatttagcctaacactttttattttattttattttaaaaaattaatttaaaacattatttaaatagagacagaggtcttgctatgttgccca

SEQ ID NO: 345890 - DNA, 201 bp, Homo sapiens
gtggcaatttaaagctagctgtggaacaagcttcattatgtatgctttgctgtatcttctgattatatgacaatggcaaataatgagttaaaaactatttrtgcttcacagggatacaggtatttatatctgactcctcaagattataagagagtcagtgctctcaactctgtccattgtgaacacgtggaagatgaagga

SEQ ID NO: 345891 - DNA, 201 bp, Homo sapiens
gaaaatataaaaactagctgggcatggtggtgtgtgcctgtaatcccagctactggggggctgaggctggagaattgcttgaacctgggaagaggaggttmcagtgagttgagattacaccactacactccagcctgggggacagagcaagactctgtcacaaaaaaaaaaaaaaaaaaaaagtcctaaaattatttttga

SEQ ID NO: 345892 - DNA, 201 bp, Homo sapiens
tgggttatttccagattggaaagaggacctactaaaacagaagtggtgtttatttctgtgctgaagttgttccattgttcaggtatagggattgaaatgtrtggcctaaagtgcagggggaggcacatccaacagttagtagggttttgggccgagacctcatggagcccagtcagggtggtattaaataggcttaccagg

SEQ ID NO: 345893 - DNA, 201 bp, Homo sapiens
ttcagctaggcttactcctccttactaggcaggcagctaaattttcagtattgattgcagatcccattctgagagtaattaggaagaaaggcacaccatakcaacacctctactgggacactattgattgggggaggggtccctccttggtataaggggttccaaagtctcctgtctgttgagtcagggtaccgtgcgcag

SEQ ID NO: 345894 - DNA, 201 bp, Homo sapiens
ccaatctatgtaaccgtttagtgaaagctgccttcatggtcttcttagctaggaacttgaagttggccttattgagactctcacttattagcccaggaacygtgttttattaactctctttttcttctcccatggagtcaaagaattgtgccttgtggattttctcttttgtgtgtggtcatctaacttcagtcagactgc

SEQ ID NO: 345895 - DNA, 201 bp, Homo sapiens
agtcagcagcccaaggctgtttttatggcatatgattcattgtggtgtaaaaaacaaggcctgttcccagacaggcatgcttgaaatagaccttcctcttstgcatcctatcacctgtgctcatgtatttatttgtcagctttggtgacaaagcacttcagggtgtccctaacaccaggggctgtcacctattgctccttc

SEQ ID NO: 345896 - DNA, 201 bp, Homo sapiens
tattcagtacagttgctggacaggctttttagctgttcacactgagttgcctccaatctatgtaaccgtttagtgaaagctgccttcatggtcttcttagytaggaacttgaagttggccttattgagactctcacttattagcccaggaaccgtgttttattaactctctttttcttctcccatggagtcaaagaattgt

SEQ ID NO: 345897 - DNA, 201 bp, Homo sapiens
tccctcctctgttaacctgtgtttatgtataatacggctcagtcagcagcccaaggctgtttttatggcatatgattcattgtggtgtaaaaaacaaggcstgttcccagacaggcatgcttgaaatagaccttcctcttctgcatcctatcacctgtgctcatgtatttatttgtcagctttggtgacaaagcacttcag

SEQ ID NO: 345898 - DNA, 201 bp, Homo sapiens
tgatcgagcaaacccaggaggcagaatttgcagtgagcagagatcacgccatcacactccagtctgggtgacaagagcgaaactccatctcaaaaaaaaaktgtatatatatatatatacacacacatatacatacacaaacacacgcacatatatacatatatatgtacacacacgcatgtgtgtgtggttttttttttt

SEQ ID NO: 345899 - DNA, 201 bp, Homo sapiens
gagctcttttgtaattataaataatttgtaaagtttctcccatgatactagtcatagtatgttaatgagtttggaataagctcctagataccacatttcatttttttttttttttttgagatggagtcttgctctgtcgcccaggctgggtgcagtggcacgatctcggcttactgcaacctccgcctcctgggttcaagt

SEQ ID NO: 345900 - DNA, 201 bp, Homo sapiens
gctcactgcaacctccgccccctgggttcaagtgattctcccacctcagcctcctgagtagctgggattacagacgtgcaccaccatgcctggatatttgktttttttttttttttttttttagtagagacgtggtttcgccatgttggccaagctggtctagaactcctggcctcaagtgatccgcctgccttggcctcc

SEQ ID NO: 345901 - DNA, 201 bp, Homo sapiens
tattcagagactggaattcttggtataaaagtttttctgggaggaaagtatattgaaaattgaatgcaactggggccaggcgtggtggcttatacctgtartcccagcactttgggaggctgaggcgggcagatcatgaggtcaagagatcgagaccatcctggcccacatggtgaaaccctgtctctactaaaaatacaa

SEQ ID NO: 345902 - DNA, 201 bp, Homo sapiens
ccgcctcctgggttcatgcaattcttctgtctcagcctcccaagtagctgggactacaggtgtgtgccaccatgcccagctaatttttgtatttttagtasagacagggtttcaccatgttggccaggatggtctcggtatcttgaccttgtgatccacctgcctcggcctcccaaagtactaggattacaggtgtaagcc

SEQ ID NO: 345903 - DNA, 201 bp, Homo sapiens
tgttgagtggtgattcccaaacattttaaagtattgacggtttctcatctgatgtcaaggaacactgttgtccacttactttcatactttacagtgagttrtagcatacagagttattaataatacatttattatctattaatgtaccatatcttagagcacttcaaaatcacaattgggaattattatttttctattttt

SEQ ID NO: 345904 - DNA, 201 bp, Homo sapiens
ttctttagttttgttttagcagtcttgccaatttgttaattactgttttattcttgtaccacagtgattctcaacctttagggcttgtgaaagcatagatkaatggatgctggcctgtaggttctgatatggttagttggtctggggaagggcccaagaaatttgcacttctaacaagttcccaggtgatgccaatggtcc

SEQ ID NO: 345905 - DNA, 201 bp, Homo sapiens
cactttgggatgctcaagcgggtggatcacttgaggtcaggagtttgggaccagcctggtcaacatgatgaaaccccatctctactaaaaatacaaaaatkagctgggcatggtgctggtgcccgtaaatccagctactcggaagctgaggcaggagaatcgcatgaacccaggaggaggaggttgtggtgagctgagatc

SEQ ID NO: 345906 - DNA, 201 bp, Homo sapiens
gcaggagaatcgcatgaacccaggaggaggaggttgtggtgagctgagatcgtgccactgcattccagcctgggccacaaagcgagactcagtctcaatgaaaaaaaaaaaaaaaagagagaaagacagctttctgaaagagattatgtctaaccaagaatgagtaagagttagtgaagcaattggggggagagaaaggtg

SEQ ID NO: 345907 - DNA, 201 bp, Homo sapiens
tcggctcactgcaacctctgcctcctgggttcaagcgactctcatgcctcagcctcccgagtggctgggattacaggtgcccaccaccaggcccagctaatttttttttttttttttagacggagtcttgctctgtcacccaggttggtgcagtggcgtgatctcagcttactgcaacctctgcctcccaggttcaagcga

SEQ ID NO: 345908 - DNA, 201 bp, Homo sapiens
ttaatttatttatttttgagatgggggtcttgctatgttgcccaggctggagtgcattggcttttcacaggtgtggtcatagcacattgcagcctccagcycctggactctagcacacctctgcctcagcctcccaagtagctgggactgtaggtgcacactactgcccagaagactttcttttttatttttacagatgag

SEQ ID NO: 345909 - DNA, 201 bp, Homo sapiens
agtagagacggggtttctccatgttggtcaggctggtcttgaactcccgacctcaggtgatccgcccgccttggcctcccaaagtgctgtgattacaggcrttagccactgtgcccggacccattcttttctaaatcattgctggtatgtactctggacttcacttctttgcacttacatgtgtgggtgtatgaatgcata

SEQ ID NO: 345910 - DNA, 201 bp, Homo sapiens
gttgtggctttaaggcttttttttttttttttgagacagagtcttgctctgctgcccaggctacagtgcagtggggtgatcttggctcactgcaacctccrcctctcgggttcaagcgattctcctgcctcagcctcctgagtagctgggattacaggcacacaccaccacacctggctaatttttgtatgtttagtaaag

SEQ ID NO: 345911 - DNA, 201 bp, Homo sapiens
gctcttttcactctcctagcttccctctttttcatagtttcctcatcatcttctactttgcacttcttttactagtgtgccatgctaccttttatttcgcttttttttttttttcccttaaaacacttagcagcaaactccttgcttcactgttaagagttaaaaggaaagtcttatgagctgggtcttccatgatttcat

SEQ ID NO: 345912 - DNA, 201 bp, Homo sapiens
gcatgtgctaccacatccagcttttttttttttggtagagatggggtttcgtcatattgcccaggctggccttgaactcctggactcaagggattctcccrcctcagcctcccaaatggctgagattacaggcatgagccaccactcctggcccaggctgactcttaaatacattagctgtaattagctttaccacatttt

SEQ ID NO: 345913 - DNA, 201 bp, Homo sapiens
tatctctacaaaaaattgtaaaataaataaatcaataaataaggtattgttttgctacattatcctattttaagtgtcagaaattgaatattaccttgggtttttttttttttttttacatttttttcattgaattctaatttcataggtagatcagtgactcagagagtctagagaaaaaagactgctcttagaagcaaa

SEQ ID NO: 345914 - DNA, 201 bp, Homo sapiens
ggtgacagattgagactccgtctcaataaaaagaaaaaaaaaatttctgaatgaaatgcaggctgactttttttgtttttgtttttgtttttgagacaaartctcattctgttggccaggctggagtacagtggcacttcagcctcaaccttctgggctcaagtgatcctcccacttcagcctcccaagtagctgggacca

SEQ ID NO: 345915 - DNA, 201 bp, Homo sapiens
catgcccggcccaacccactgtcttcagacagttttcgccatggtgtccaggctggtctcaaactcctgggctcaagccatcctcttgcctcagcctcccrgaatgctgggattacaggtgtgaaccaccacacctggcctagaggtttttttttctttttaaaaaaatttttaaatttcttttttattttttatcttttt

SEQ ID NO: 345916 - DNA, 201 bp, Homo sapiens
aagctaattatggtgagtttttctttttattgtgattacgtttttaagaacttaacagttttctgcactaaaaatagaccaaagcctagaatccttggagyagcggaagagtaatgattgtccaagactgtcgctgggtttcttaaattctaatttgtaagatataggggctcagctcgctccttttgcggagtgattgta

SEQ ID NO: 345917 - DNA, 201 bp, Homo sapiens
ttttatttatttttttgagaaggagtctcgctctgtcacccaggctggaatgcaatggcatgatctcagctcattgcagcctctgcctcctgggttcaagygattctcctgcctcagcctcccaggtagctgggattataggtgcacaccaccacgccccgctaatttttgtgtttttagtagagactgggtttcaccatg

SEQ ID NO: 345918 - DNA, 201 bp, Homo sapiens; identical to SEQ ID NO: 73202

SEQ ID NO: 345919 - DNA, 201 bp, Homo sapiens
acttccaaagaaatacaaggtgaaaagatttgcctaatcagatatcaagatttaatataaagccatattaattaagaaattgtgagataggtgtagagatrgatttatagatcagtggaacttaatgacccagaaacagatccagccatatatgaaaacttattttatgatagaggaggcattgtagatcatggggaaagg

SEQ ID NO: 345920 - DNA, 201 bp, Homo sapiens
ttgtattttttgtagataagaggttttgccatattgcctaggctggtctggagctcctagactcaagtgatcctcctgccttggcctcccaaagttctggsattgcagatgtgagctaaggcaaccggcctcacagaacacttttaactttaagatacttataaatttttcagatatctcagccatttcaagagtatggta

SEQ ID NO: 345921 - DNA, 201 bp, Homo sapiens
taaagatattaaagatgacagcatggactgtattttattcagttttgtatttctgctgattaacatggttcctgacacttctggacatctgcttgttgaartcaaagtagcttatcaagatagataaaaagtttaaaatttaagaattggttttttttttcccccttttctaatacaggttcaagctgaagttcctggatc

SEQ ID NO: 345922 - DNA, 201 bp, Homo sapiens
aacttaagtactatagttacatccctcctctgttaacctgtgtttatgtataatacggctcagtcagcagcccaaggctgtttttatggcatatgattcaktgtggtgtaaaaaacaaggcctgttcccagacaggcatgcttgaaatagaccttcctcttctgcatcctatcacctgtgctcatgtatttatttgtcagc

SEQ ID NO: 345923 - DNA, 201 bp, Homo sapiens
tgcctcccgagttcaagcgattctcctgcctcagcctcccaagtagctgagattacaggtgcctgccaccaagtataacttttttaaaagttgagaatgtktttaaaaacactttaatatcacattcttttataaaacattttccctgtttgccagactgggattgttgttacataaatgaggaactcaactcagaaaagg

SEQ ID NO: 345924 - DNA, 201 bp, Homo sapiens
ctttaagttaaataatagatttgaccagtaaaatagatacttcatatattattacctttgtattatgctgagcaaaacaggaattgacaaaagtttgtttyttaaaaaaaaaaaccttaaaatctttctctctttttctctctaggtctttctggaagtggatatctactcagacagtaagaattataagaggtcagttac

SEQ ID NO: 345925 - DNA, 201 bp, Homo sapiens
tcagagcttaagtgaattgtagagaatctagtggttctcttctccccactgcctcttttttgatgaaatattagaaatgaaaattttgaaatgtattcatsgagtatacaattggaaaagccaccttgtgaaatggtaagcttgttctattgtttaatattttcttaaacaatagtctttatgtaatgtgtttgatttaca

SEQ ID NO: 345926 - DNA, 201 bp, Homo sapiens
tctcaagcgtgtatttccatcagtgtcaattaactgtggaacttaaagttgatatccctgggtctccagctgcaattctgattcagcagatctagggtggwgtttagactttgtaaaatttttaaaagctccgcaggtgattcttaaacataatcagagttgagaatttctaccctagatagatttaaattgtcaggctta

SEQ ID NO: 345927 - DNA, 201 bp, Homo sapiens
ttcaccacgttggccagactggtcttgaactcctgactttgtgatctgcccgcctcggcctcccaaagtgctgggattataggcgtgagccactgtgcccrcccgtgattagtcctttttaaactggagaataggggcaatgttagatgcttacgttgcaatttcaaagtactctatgatagttggctcacgcctgtaatc

SEQ ID NO: 345928 - DNA, 201 bp, Homo sapiens
gaagagttggcaagagaggaagatttttgagaaaggtttagaagatatgtctggctgggttggtaattggtaggtaagggagaaagaggagtgaagaatgwtccttaggttttggcctggttgtcttagattggattcactggtatgaggatattaaattgttccttactttctaagtacaaaacaaatataatcacaaat

SEQ ID NO: 345929 - DNA, 201 bp, Homo sapiens
ttttcgtgaccttgagggaggtatgtagcaagtagggagatctcttagggggtctttgaagtactttgggccagaaatgaagaaggcgtaaaccgaagagwtggcaagagaggaagatttttgagaaaggtttagaagatatgtctggctgggttggtaattggtaggtaagggagaaagaggagtgaagaatgatcctta

SEQ ID NO: 345930 - DNA, 201 bp, Homo sapiens
atttttgtcagtgtcctgaagcagcgtttgttgttctatgaaaatcttttttgttgttcttcaacttcacatacactgccaagagataaaggagagacagrgaacaaccacagttggggaaaatcaactaaggttgccctctttgcttacagcaggactgagccatgtccacagacactgatgcaaatagcatcagtgcca

SEQ ID NO: 345931 - DNA, 201 bp, Homo sapiens
cgagaggcggaggttacagtgagccgagattgcgccactgtgctccatcctgggtgggtgacaaagcgagactccatctccaaaaaaaaaaaaaaaaaaawaatatatatatatatatatatatatatatatatatatatgacttgggagttatgcatatcacttaccaatgctggtgtcctgtttgtcaaaacttagcca

SEQ ID NO: 345932 - DNA, 201 bp, Homo sapiens
gctgaagaaccttgggttattgattgaagtttttaaatttataatacttaattcattttagaaaaactgaaacatgtaaacaattataaagaaaaaaaaaytagccacaatcccaccttcaggccacgattatgaatttatgttatacacttgctgtcttttctatagacatatcttttttctatgtgattgagattataa

SEQ ID NO: 345933 - DNA, 201 bp, Homo sapiens
ggcaaattatttggggagtcaaactgcagattctagacattaacttataccacagttagaacaggttgcttctttaaaaactggaatccatctgcagtagwtattctgtcctgtataagtatcaaatctctccaaaccctggtgataaaaatctggtatttctccctagcactgaaccctaaatatttcatgtattacttg

SEQ ID NO: 345934 - DNA, 201 bp, Homo sapiens
acctctttaagtcttttgcatgttagtgcttaaaacttggaaatttaggtctgaaagccttttgatgatggcaaatatatactatcaatattataattcamacgttgagaataaccactattgaaaatgcaggaggccaggcgcggtggctcacgcctgtaatcccagcactttgggaggccaaggcaggtggatctcctg

SEQ ID NO: 345935 - DNA, 201 bp, Homo sapiens
tgagtacagggactgaagctcaaagacccatttattcttctgtccattcctggcagcttatgagtgctacttgttattcatggaccatggtggcaagaaaraggggatgttgacatttatggcaaattatttggggagtcaaactgcagattctagacattaacttataccacagttagaacaggttgcttctttaaaaac

SEQ ID NO: 345936 - DNA, 201 bp, Homo sapiens
cacgtggcagatgtgagcctgcggaatagcgtctctaacttccttcactccttagaaaggtaggctttgtttcttgtaggctacacaaactaatcaatggycctgagtacagggactgaagctcaaagacccatttattcttctgtccattcctggcagcttatgagtgctacttgttattcatggaccatggtggcaaga

SEQ ID NO: 345937 - DNA, 201 bp, Homo sapiens
ttgctctgtcaccaggctggagtgcagtggcgtgatctctgctcactgtaaccttcgcctcctgggttcaagggattctcctgcctcagccacatgagtarctgggactacaggcacgcaccaccacgcccagctcatttttgtatttttagtagagacggagtttcaacatgttggccaggatggtctcgatctcttgac

SEQ ID NO: 345938 - DNA, 201 bp, Homo sapiens
aagaaactgtctacattgctaatacaagagaccttagcatgctgtatataacagcttatgcaaatataactgctatatcataaatgttagataatattctrttaatcataaacaatgaatattaaattaacagcacttttgcttgcctaaaacatagggctgaaggaggtaattttaacagcttagatcttttggaatatc

SEQ ID NO: 345939 - DNA, 201 bp, Homo sapiens
tgtttgaggtccatttgctggtcatcctgttagccttttctcttattagctactagctcttgggattttcccaggcttttcttggtactcatttgtagttaaaaaaaaaaaaaatagtacatgcacttaacaaaaatatcaagagtattaaagtgtttataattaaaaacatgtctccctaccactccagtgtatgtggac

SEQ ID NO: 345940 - DNA, 201 bp, Homo sapiens
gctgaggctggagaattgcttgaacctgggaagaggaggttacagtgagttgagattacaccactacactccagcctgggggacagagcaagactctgtcmcaaaaaaaaaaaaaaaaaaaaagtcctaaaattatttttgatgctcattgaatatctgggtcagttccaattaagaaaaggttgtgacatggggaaatat

SEQ ID NO: 345941 - DNA, 201 bp, Homo sapiens
acgggtttcaccatgttggccaggatggtctcgatctcctgacctcgtgatccgcccacctcggcctcccaaagtgctgggattacaggcgtgagccaccrtgcccagctgtttatttatttatttatttatttttgagacagggtcttgctctgtcgccaaggctggagtgcagtggtgcggtcatggctcgctgtagcc

SEQ ID NO: 345942 - DNA, 201 bp, Homo sapiens
tcctttttaaaaaaatctatgaatataggatttttccaagtctcctagtcaatactaccagtattaccacatttgaattttagtaaagtaatatatgtagycgtagtaaatagtctgtgtagaattcctgtgttattcacaaatacaagagattacctttatgcaaccatttgtttacaagttctgtctcctgaaagatac

SEQ ID NO: 345943 - DNA, 201 bp, Homo sapiens
taattttttgtatttttagtagagacggggtttcaccgtggtctcaatctcctgatctcgtgatccgcccgtctctgcctcccaaagtgctggaattaccrcgcccgtatagcattggtgtttgtaaaatgaattatgttttctaattgcatcattatcggaggtaattattttgagattttgctgtctgaaaatatgtcc

SEQ ID NO: 345944 - DNA, 201 bp, Homo sapiens
ttatttaaaatctaacatgattgctaaatacaaaagtcaacatacaaaattcaacagtatttgtttacagtagagcaattgtttagaaaagcagttcaggaaaaaaaaaattaaaatagcaggctagatgtagtggctcatgcttgtcatcttagcactttgggaggccaggacaggaggattgcttgaggccaggagttt

SEQ ID NO: 345945 - DNA, 201 bp, Homo sapiens
ggtgggctcaatgagttctgttaagggtccaataaggtcttggagatgtttgaactagaatttgaaggatgaacagaaaaaaggctagcaaagttaggggkgtgtgtgtgtgtgtgtgtgtgtgtgtgtgtgtgtgtgtgtatgtaagggtagagctggtagggtagacaatgtgcagaagtatcagtgaaacgtctagca

SEQ ID NO: 345946 - DNA, 201 bp, Homo sapiens
ggctcaatgagttctgttaagggtccaataaggtcttggagatgtttgaactagaatttgaaggatgaacagaaaaaaggctagcaaagttaggggtgtgtgtgtgtgtgtgtgtgtgtgtgtgtgtgtgtgtgtgtatgtaagggtagagctggtagggtagacaatgtgcagaagtatcagtgaaacgtctagcatttt

SEQ ID NO: 345947 - DNA, 201 bp, Homo sapiens
tggagtgcagtggcacgatctcggctcactgcaacctccacctctcaggttctagcaatcctgcctcacccccctgagtagctgagactacaaggtgtgcrccaccatgcccggctaattttttgtatttttagtagagatggggtttcgtcatgtcggccaggctggtcataaactcctgacctcaggtggtccgccctc

SEQ ID NO: 345948 - DNA, 201 bp, Homo sapiens
ctcaatgagttctgttaagggtccaataaggtcttggagatgtttgaactagaatttgaaggatgaacagaaaaaaggctagcaaagttaggggtgtgtgtgtgtgtgtgtgtgtgtgtgtgtgtgtgtgtgtgtatgtaagggtagagctggtagggtagacaatgtgcagaagtatcagtgaaacgtctagcattttca

SEQ ID NO: 345949 - DNA, 201 bp, Homo sapiens
cgcaatgtttgtattgtgttgggaccccttccagttattattaattttcaacacacagctaccatgaaagtcttgctatgaagtaactggcaaaactagaracaccgactggcttcctctcaaaggctcggcgtgcccacagtggaggacgggaagcattctccaatccgaaaagtctggaacgctgtggcaactattttg

SEQ ID NO: 345950 - DNA, 201 bp, Homo sapiens
tgagttcaccctgttcttctcaagtgcaattttctccaagtttcttccctacgcaatgtttgtattgtgttgggaccccttccagttattattaattttcracacacagctaccatgaaagtcttgctatgaagtaactggcaaaactagagacaccgactggcttcctctcaaaggctcggcgtgcccacagtggaggac

SEQ ID NO: 345951 - DNA, 201 bp, Homo sapiens
actagacatgggattttgccacgttggccagcctggtctcgaactcctgacctcaggtgatccgcccgtcttggcctcccaaagttttgggattacaggcrtgagccaccatggctggactcttttcttttttttgagatggagtcttgctttgttgctcaggctggagtacagtggtgcaatctcggctcactgcaacct

SEQ ID NO: 345952 - DNA, 201 bp, Homo sapiens
tatctgaccactttttgtaaggtgtgcatctccacaaaccaacctctttttttttttaccccttctttctcaaatatgagcagacctgaaacaggtcttarttagaagatatttaagttttgtgcttggtgatgtgtctgtgtcagattgaggaatccgtgcggagcatggtaatgcggtatggaagtcgcctgtggaaat

SEQ ID NO: 345953 - DNA, 201 bp, Homo sapiens
cttttttttttttttctgacatggagtgcccgccaccacacccagctagtttttgtatttgtagtagagacgggtttcaccatgtcggccaggctggtctygaattcctgacctcgagtgatctgcccaactcggcctcccaaagtgctgggataacaggtgtgagccactgtgccaggcccattcattcattgtattcaa

SEQ ID NO: 345954 - DNA, 201 bp, Homo sapiens
ttccaggggtggcatctattttccctaccccttgaatcttagctggctttgtggcttgcttagaccattagaatgtggccaaagtgatgtataaattcgaragcctagacctcaagaggccttacagcttcttcccctcttggaacacatcactgaagaagcctagtctagcctgctgcaggatgagaagccacctgcatt

SEQ ID NO: 345955 - DNA, 201 bp, Homo sapiens
ggagaaagggtgaactggaaatagactagccctcacagggactaaatcttggcttcaaaacattcaacctctgatttaagcaagatgttttaggattgctrgtgcttctagacacctgcaggaagcaaatgtaaatcctttccagagaaagataacatccagaacttaaaattatttctattaatttttcttacagcttat

SEQ ID NO: 345956 - DNA, 201 bp, Homo sapiens
gcagcaaggtatgtatcacgtctcctggggaagggatgtacaaatgggatacctattctccaaaatagttccaagtctcataatgattgtttaagagggargaaaagaaagctgtttggcctagaactctttcaccttcagttgtgggacttgaggtctttaaatccatgtttcttatccttgtcatggacttcacattta

SEQ ID NO: 345957 - DNA, 201 bp, Homo sapiens
gaaatggagccgcagccctccaagtcctttttgtctctctctgacatccttctactgcctcacaaggccaggagcagggagagtggctgtggagcgggacrgccttgctagcctggcctcttgagtgctgtgacctgaggtcctctcctggatccttcccctcctcttgtgttcagagagaaatgacaaatcaatttagat

SEQ ID NO: 345958 - DNA, 201 bp, Homo sapiens
cctgttaaccccaaggactgatcagggttttatggcatccttctttctcccatccactctcagttttgggtaaatatgatagcatttcaaagaatgcagarcagaaaattgacaagagcagaagatcttgtaattgccctaagttgctattgtctgttgcaggtcttcgtgtggactggcaggaaaatgatttttcaaaac

SEQ ID NO: 345959 - DNA, 201 bp, Homo sapiens
taaggaaattaaatttcttctctggaaatggagccgcagccctccaagtcctttttgtctctctctgacatccttctactgcctcacaaggccaggagcasggagagtggctgtggagcgggacggccttgctagcctggcctcttgagtgctgtgacctgaggtcctctcctggatccttcccctcctcttgtgttcaga

SEQ ID NO: 345960 - DNA, 201 bp, Homo sapiens
ggcttaaggcatcacggggcaactgatttttgggagttcttcataattttcaacttaaaactgcctccctaaaactgcataggatgttgtagctacaaagraattaggaatttttgctttaacctgtaaatgtctccagcatagatctctgttaggtaatataaagtataatgccttaacacatccgtaggacttgaaggc

SEQ ID NO: 345961 - DNA, 201 bp, Homo sapiens
caatgagttctgttaagggtccaataaggtcttggagatgtttgaactagaatttgaaggatgaacagaaaaaaggctagcaaagttaggggtgtgtgtgtgtgtgtgtgtgtgtgtgtgtgtgtgtgtgtgtatgtaagggtagagctggtagggtagacaatgtgcagaagtatcagtgaaacgtctagcattttcagg

SEQ ID NO: 345962 - DNA, 201 bp, Homo sapiens
gtctcccaggctggagtgcagtggcctgttggctcactacaacctctgcctctcgggttcaagcgattctcctgcctcagcctcgtaagtagctgggattwtaggtgcccgccaccatgccaggctgatttttgtacttttactagacatgggattttgccacgttggccagcctggtctcgaactcctgacctcaggtga

SEQ ID NO: 345963 - DNA, 201 bp, Homo sapiens
tgagcactaactatgttcaggcactgggcagggatatcgggataccaagatgaaaaatagtttttgaagataaaatttttaaaggatcaatttccattagstgcacatttgaagagctcatcctatgctaagcatcatgagaataactgaaaagaggtagaatagttccttcctttagtaaacttactgtagtgggagagc

SEQ ID NO: 345964 - DNA, 201 bp, Homo sapiens
gtccttaagtttcaatactagttggctgaataaactaatcctcccattgggaacaaactagaaaagctgaaccagatatatatatatatatatatatatakatagatagatagatagatagatagatagatagatatagatatagatatattacattttacggcattagagaccattcaagacagtgaagaattatggggc

SEQ ID NO: 345965 - DNA, 201 bp, Homo sapiens
ttggtggcttatgcctataatcctagcactttgggagtctaaagcgggagcattgcctgaagccagaaatttgagatcagtctggaagataaagtgagackctatctctacaaaaaattgtaaaataaataaatcaataaataaggtattgttttgctacattatcctattttaagtgtcagaaattgaatattaccttgg

SEQ ID NO: 345966 - DNA, 201 bp, Homo sapiens
aaaaaaacagactcagttttggggagtctttctcaagaaatataaggcctcatttatgaatatttggttatcccctttgatagaaatagagtataatactyttaatgaagttcctgtaaaattatctttttttttttttttttttttttttttagacggagtcttgctctgtcgcctaggctggagtacagtgacgtgatc

SEQ ID NO: 345967 - DNA, 201 bp, Homo sapiens
aagtgttgggattacaggcacgagccactacgcccaaccccacttcagcttattttaagtgaactccttatgtcttttttttttttaattgtaatacatgkatgcctgcatactataagcaagaaattccaataatgcagaaatacatacagtgaaaaaggaaagttttatatccacgcatctttctttgttttttgtttt

SEQ ID NO: 345968 - DNA, 201 bp, Homo sapiens
ttgccttaaggaaattaaatttcttctctggaaatggagccgcagccctccaagtcctttttgtctctctctgacatccttctactgcctcacaaggccasgagcagggagagtggctgtggagcgggacggccttgctagcctggcctcttgagtgctgtgacctgaggtcctctcctggatccttcccctcctcttgtg

SEQ ID NO: 345969 - DNA, 201 bp, Homo sapiens
gtctgtgattataacagaaaatatgtaaatagtgcctacactgattcctaatagaagtaaagggaagaattacctcagaaagaaaagtgagcaaagcccasgccccagagtcttgcattgctgaatcagttctgaccctgattcacagaaccagggcttggtagagtcattgcaaggaggagaattacttcctaccatttg

SEQ ID NO: 345970 - DNA, 201 bp, Homo sapiens
gagatattcaggagctttctggggagggtggtcttgttcttatctctagcatcataagtattgaaccattcaaagcaaattgctttctttctttctttcttttttttttttttttgagacagagtttcgctcttgttgcccaggctggagtgcaatggcacgatcacggctcactgcaacctctgcctcccgggttcaagc

SEQ ID NO: 345971 - DNA, 201 bp, Homo sapiens
gcttcagccactgataagcatctcacttagatggctcataattgctcccagcatcccccaattgttgccgctgtgtttaccactaattccatacaaaggcrgcaatgccgcaattgcaggacacagcaaattgcatcattttcctttttcctttttttcttcctttttcttttcccttttttttttctttttgctggtttt

SEQ ID NO: 345972 - DNA, 201 bp, Homo sapiens
tgagatattcaggagctttctggggagggtggtcttgttcttatctctagcatcataagtattgaaccattcaaagcaaattgctttctttctttctttcttttttttttttttttgagacagagtttcgctcttgttgcccaggctggagtgcaatggcacgatcacggctcactgcaacctctgcctcccgggttcaag

SEQ ID NO: 345973 - DNA, 201 bp, Homo sapiens
attccagaatcagaatgtagccaaagaaatatgttctgccttagaacttgtataagggaaacaaatatttatttctgcttatccttagcttattcactgtrgctcttttcatcctcttccctttttcactttaagataatcagcttaggttgataaccctaaacctaataaacctgctcgttggaatgttctgttatgaaa

SEQ ID NO: 345974 - DNA, 201 bp, Homo sapiens
ccttcccctcctcttgtgttcagagagaaatgacaaatcaatttagatggagagagaactgtccagcccaagtgtgaagcaattgtaagttccccactgtscctctctctcaaaatgaagagcacctgggcaaaggagccgcttaggggaacttgttcttagttgtggccctgttcccaggcagctgggcagcctgccatg

SEQ ID NO: 345975 - DNA, 201 bp, Homo sapiens
ttggcctggcttagtgtgtctgatcagtgtcctacaagcagactgacagctgtggtataggtgaggtagatagatagatagatagatagatagatagatagtattgatgaagtattgcccttcattattgtacatcctacgtgatggaggtggttcccctgtcactgtgcctacagcatttttttcccctggaaaataatg

SEQ ID NO: 345976 - DNA, 201 bp, Homo sapiens
cttggcctggcttagtgtgtctgatcagtgtcctacaagcagactgacagctgtggtataggtgaggtagatagatagatagatagatagatagatagatagtattgatgaagtattgcccttcattattgtacatcctacgtgatggaggtggttcccctgtcactgtgcctacagcatttttttcccctggaaaataat

SEQ ID NO: 345977 - DNA, 201 bp, Homo sapiens
acttggcctggcttagtgtgtctgatcagtgtcctacaagcagactgacagctgtggtataggtgaggtagatagatagatagatagatagatagatagatagtattgatgaagtattgcccttcattattgtacatcctacgtgatggaggtggttcccctgtcactgtgcctacagcatttttttcccctggaaaataa

SEQ ID NO: 345978 - DNA, 201 bp, Homo sapiens
agaaatgagagttgtttctaaaatctattgccacccagaattgaggtgggttttttctctttcttttccaaacagaataattacttctgaccaaccctgtmcactttaattaaagtaactgcagctcaagagcaagttacttacaactgttcatagagagagctctaaaagcttcagccactgataagcatctcacttaga

SEQ ID NO: 345979 - DNA, 201 bp, Homo sapiens
gcagtgagaagtctctctcttacctctgttccttggccatccagtttccgtcccctatagtaaattcatattaccaatttcttttctaaccttccaaagawaccctaaacttacatgaacatatatatgtgtattagtctgttctcacactgctaataaagacattcccaagactggctaatttataaaggaaagaagttt

SEQ ID NO: 345980 - DNA, 201 bp, Homo sapiens
ccacttctttgatctaaagagaaaaattatggtctaagtaagatgaaagtttaggattactccattcattcttgcttgtattatgtcactgaggaaatagtttctttcttttttaaaaaattagaaagaatttactagcattttacttgctagaactttgccagaaaaatcactctttttaacaatttaaatcagcaatta

SEQ ID NO: 345981 - DNA, 201 bp, Homo sapiens
cacttctttgatctaaagagaaaaattatggtctaagtaagatgaaagtttaggattactccattcattcttgcttgtattatgtcactgaggaaatagtttctttcttttttaaaaaattagaaagaatttactagcattttacttgctagaactttgccagaaaaatcactctttttaacaatttaaatcagcaattag

SEQ ID NO: 345982 - DNA, 201 bp, Homo sapiens
acttctttgatctaaagagaaaaattatggtctaagtaagatgaaagtttaggattactccattcattcttgcttgtattatgtcactgaggaaatagtttctttcttttttaaaaaattagaaagaatttactagcattttacttgctagaactttgccagaaaaatcactctttttaacaatttaaatcagcaattaga

SEQ ID NO: 345983 - DNA, 201 bp, Homo sapiens
cttctttgatctaaagagaaaaattatggtctaagtaagatgaaagtttaggattactccattcattcttgcttgtattatgtcactgaggaaatagtttctttcttttttaaaaaattagaaagaatttactagcattttacttgctagaactttgccagaaaaatcactctttttaacaatttaaatcagcaattagac

SEQ ID NO: 345984 - DNA, 201 bp, Homo sapiens
caacagactttattaaaaatatggattccagctgggtacggtggctcacgcctgtaatcccagcactttgggaggcagaggcgggtggatcacctaaggtsgggagttcgagaccagcctgaccaacatggagaaaccccatctctactaaaaatacaaaattagttgggcgtggtggcacattcttgtaatcccagctac

SEQ ID NO: 345985 - DNA, 201 bp, Homo sapiens
cacggaaacaggagctactagtttgtgctcggagtttaggggtgctctcaccacatcccacgtgtggaatagcccagctgctttgatgctggtcagcaggratgggcatggtgtcagtgtacaagtactggcctcaggggaaggaggagcctgggtggtgtcagcaatatgcagcaggcctctaggtcgctacttgcacct

SEQ ID NO: 345986 - DNA, 201 bp, Homo sapiens
tgtgctcggagtttaggggtgctctcaccacatcccacgtgtggaatagcccagctgctttgatgctggtcagcagggatgggcatggtgtcagtgtacamgtactggcctcaggggaaggaggagcctgggtggtgtcagcaatatgcagcaggcctctaggtcgctacttgcaccttctcagggagaggcatgggagag

SEQ ID NO: 345987 - DNA, 201 bp, Homo sapiens
ttcttctcactgctcgtctcataaattatagacagtacaaaacaaatagcatgtaaatgtgaacatttatacatgggtgagaaccagttcttttcatggtrtgcaggtcactatgacaaatgtgtattcgccctccgagaagagaataaaagtgacatgaacactgtactgaactacatcttctctcacgctcaagtcacc

SEQ ID NO: 345988 - DNA, 201 bp, Homo sapiens
aagatcagaaaatgaccctttaaccctgttgaaaatgaaatgaggccgggagcagtggctcacgcctttaatcccagcactttgggaggccgaggcgggcrgatcacgaggtcaggagattgagaccatcctggctaacacggtgaaaccctgtcgctactaaaaatacaaaaaattagccaggcgaggtggtgggtgcct

SEQ ID NO: 345989 - DNA, 201 bp, Homo sapiens
tgaccttttttatatggatatgtctgcgtggaaacacagggacgggactgatgggggagcagtatttttttttattcctgtttggaaatctctgggttttmtattaatataatgatttttaaaaatatgaacagtagagcactaacactgttgcagggaactttagggttaaacatcccctgagaggattgctgttaaaat

SEQ ID NO: 345990 - DNA, 201 bp, Homo sapiens
atgatgggctacaggtaggttactaactccagggagtgatacctttcagctgaccagttatagtcacaaatgtggagattgggagcctggctcgtgatatrtacccaaggtggtgttagggatgtaagaccaggaggtgtagtttgaaagtatagaatacgctggtttctctttagattgcataagtcttttgcctttaaa

SEQ ID NO: 345991 - DNA, 201 bp, Homo sapiens
tcagtgtcttagtatatatggcagtaaaatgagatatctagatttaatcaacagtgccatggcattcttccacatgtatcctgagtgcatttagattttgrcttttctgtcttctttgagcaggcccaaagaaggaattgagacagttttgaaatacacagtagaccagctgttctcagcataatctagcagtatactaga

SEQ ID NO: 345992 - DNA, 201 bp, Homo sapiens
ttatgatctccttgatatgtgaggggtggggggaggacaagacaaatacataaatagctataatacaaggcaactacatgtgccagaaatgaggccaaggkgttacagtcaggattcttttcctgtttcgtttttaggtcctccaagccaggccatgtgggctttaggggataagattgcatcttccatagtggctcaaac

SEQ ID NO: 345993 - DNA, 201 bp, Homo sapiens
catggtgttgctcacaacaatacctccagaaaggtgctgtcatccccattttataattggaaaagtgaaactgtaaaaggttaagtgtccaaggttatacrgctagcataaaactgagatttgaaccaagacagcttgactttgcagcttaagctcttaaccactatcagtagttgtcaacttttagaacagtacagcaga

SEQ ID NO: 345994 - DNA, 201 bp, Homo sapiens
acctttcttgtttagccagtttgcaagccattcaggctctcctatctttctccattctgtcaagctctgtaccaggaaaagggctttctctaggtccagtrccagttaaagacaaaggatgtcaggactagaactttttctcggaatagagtaattgcacttgggcccctaactgacagacacatcagccttgatatagaa

SEQ ID NO: 345995 - DNA, 201 bp, Homo sapiens
ccagccaggattttctataatgaaaacatttaaagtattgttttgcttaatgttttttcttatttggattcatattaataaatgcatttttcagtgtcttytccatgctcaattcatttgatctggtgctgttgtgagcatgataaatgtgttcttgaaggggctcaatcagaattaggggttcaaacataaaaaatgtag

SEQ ID NO: 345996 - DNA, 201 bp, Homo sapiens
tacttggcctggcttagtgtgtctgatcagtgtcctacaagcagactgacagctgtggtataggtgaggtagatagatagatagatagatagatagatagatagtattgatgaagtattgcccttcattattgtacatcctacgtgatggaggtggttcccctgtcactgtgcctacagcatttttttcccctggaaaata

SEQ ID NO: 345997 - DNA, 201 bp, Homo sapiens
ggcataggattgttgtaaggatttatatgtaagttattagaacagtgccatgtacatagtaaacattatctataatttttttaaactagaaagctgtgggkttttttttaaacatgtttggggtaaagtttctggggactgaacatcattagtatgcactaaaagtaaccctgagacctttgactctgctcatttccatag

SEQ ID NO: 345998 - DNA, 201 bp, Homo sapiens
aataaagtaccatttgtggactgtatatccccaccatccagagacagaaaaatcccgtttgcctacactgtggagactgtacatccaggcatttggagccmtgagccaggttgcctgccaaacacggtgacttgggttacaagaaaccctgtttgtgtcccattgtttgccactgggtaacagccaccaataactctaact

SEQ ID NO: 345999 - DNA, 201 bp, Homo sapiens
agggactcactttatgtgtacatcatgggtccttttcttcaggctgctcctggctttggagggattacaaaatgtactcttttttttttttttttttttttaaaggcagggccttgctgtgttacccacactggagtacagcagcatgatcacagctcactgcaggtctcagcctcctaggctcagatcctcccacctcac

SEQ ID NO: 346000 - DNA, 201 bp, Homo sapiens
tatgttccaagtggtaatttaattaataaagtaccatttgtggactgtatatccccaccatccagagacagaaaaatcccgtttgcctacactgtggagastgtacatccaggcatttggagccctgagccaggttgcctgccaaacacggtgacttgggttacaagaaaccctgtttgtgtcccattgtttgccactggg

SEQ ID NO: 346001 - DNA, 201 bp, Homo sapiens
cagggactcactttatgtgtacatcatgggtccttttcttcaggctgctcctggctttggagggattacaaaatgtactcttttttttttttttttttttttaaaggcagggccttgctgtgttacccacactggagtacagcagcatgatcacagctcactgcaggtctcagcctcctaggctcagatcctcccacctca

SEQ ID NO: 346002 - DNA, 201 bp, Homo sapiens
tgatgtagctccctgtaacacagttagagcctaaaaccagaactagatctactagaatatccctataacagaatgtcaaggttcctgaaaaagttattatmcacctacttcccctctactttggggatgtccttggttattgtgaaaagaaatttcaagagctcagaaatgagttcattttttattgtggtaaaatataca

SEQ ID NO: 346003 - DNA, 201 bp, Homo sapiens
attttctgtcacatattgggttgatgagagaattaaatgagataatatatatacaaagtgctagttacagtccctacacgtggtagctcttctgttacagktgtcattgccagaataggaaaatagagatgttaggtgacaaatttgaaagggaatactgtacaacaaatatatatgagaaagtggttatctttctaaagt

SEQ ID NO: 346004 - DNA, 201 bp, Homo sapiens
cacttgaacccaggaggcagaggttgcagtgagccgagattgcaccactgcactccagcctgggcgacagagcaagactccatctcaaaaaaaaaaaaaaagaaagaaagaaaaagaaaagaaaatacttaagacatacaaaatgtgaaacaatgaactctcaatagggcacttaaaaatagcttagggcagaagcacccc

SEQ ID NO: 346005 - DNA, 201 bp, Homo sapiens
ttgcctttaaaaggtagtgaaactcagtgaatggagaagagagatgctagctcatttatgttccaagtggtaatttaattaataaagtaccatttgtggastgtatatccccaccatccagagacagaaaaatcccgtttgcctacactgtggagactgtacatccaggcatttggagccctgagccaggttgcctgccaa

SEQ ID NO: 346006 - DNA, 201 bp, Homo sapiens
aatatgctagatttaaatatgtcctgtttctgcttgtttctttggacagctcacttcatttctgagagatgggatagaaaagcaggagtctttacccaggyggtgttccggggtcttcctgagctagagaaatagaagtaaagattgcgcactgtgtgcttccaaacagtagctgcagccagaatagccctgagagcaggc

SEQ ID NO: 346007 - DNA, 201 bp, Homo sapiens
ccccctggagctgtgttgttaattgtgtcttctttgacttttcctaatagataatccagcaggctggccaggtttggttcccagattctgcgtttaagacrtatcaggccatcaaggacttcaaccgggaagggctgcctctgatggtctttgccaactggagaggcttctctggtggaatgaaaggtgactgggctgcct

SEQ ID NO: 346008 - DNA, 201 bp, Homo sapiens
cgcctgtaatcccagcactttgggaggcagaggcgggtggatcacctaaggtggggagttcgagaccagcctgaccaacatggagaaaccccatctctacyaaaaatacaaaattagttgggcgtggtggcacattcttgtaatcccagctactcgggaggctgaggcaggagaatggcttgaacccgggaggtggaggtt

SEQ ID NO: 346009 - DNA, 201 bp, Homo sapiens
agctgcatgtggctaatggctgctatattagacagttcaacttagaccaaaaattaattaggacagtcacactgagccctctttttttttttttttttttktgttactggtagtgcccgtggagagaggaaaaattattattcttatgttgcttattcttagtagttacaggaattattcacagttgatattatagatgtt

SEQ ID NO: 346010 - DNA, 201 bp, Homo sapiens
agcagtatactagaatgtcttttgtagtttcccacagggagtttggctctttagcaatgtgtatctttacataatggctgtgcctaggtatactctgataycttcaatgaacctgaaaaaaattctgcctgtaagaaacttctgttcatttgtttgtttatgcctttccagattggcatggtagcttggaaaatgaccttt

SEQ ID NO: 346011 - DNA, 201 bp, Homo sapiens
ggatttaccctttacttctaaaatttccttcacttgaacagcagctaaagagatttttctgatttaagcatagttagaaacatatatatatatatatatayacacacacacacacacacacacatgtgtgtgtatgtatatgtaacgtgtatggggtgtgtgtgtgtgtgtgtgtgtgtgtgtgtttccttttttaccttc

SEQ ID NO: 346012 - DNA, 201 bp, Homo sapiens
ctgtgaagaattatatttcttattgaagcttgagttaatataccatatcatatagcttaaattaattttcatcagcctgtgttttaccactactctaaattttttttttttttttttttttttttggtaatagagctatttttaaaatccatggtaaatacattttgaccctttccatcaacagctggtgtggtgaggtag

SEQ ID NO: 346013 - DNA, 201 bp, Homo sapiens
tgacaacagtaaggccagaaatccagtttggaatcaatatgttgttttcaaaatgactgattataatcaaaatatttcataaaaattgattctaatgtagctaactaagattctagaggatgttaagaagtcttttttttcttttctttcttttttttttttttgagagagtgtcttgcttagtcgcccaggctggagtgc

SEQ ID NO: 346014 - DNA, 201 bp, Homo sapiens
gacaacagtaaggccagaaatccagtttggaatcaatatgttgttttcaaaatgactgattataatcaaaatatttcataaaaattgattctaatgtagctaactaagattctagaggatgttaagaagtcttttttttcttttctttcttttttttttttttgagagagtgtcttgcttagtcgcccaggctggagtgca

SEQ ID NO: 346015 - DNA, 201 bp, Homo sapiens
acaacagtaaggccagaaatccagtttggaatcaatatgttgttttcaaaatgactgattataatcaaaatatttcataaaaattgattctaatgtagctaactaagattctagaggatgttaagaagtcttttttttcttttctttcttttttttttttttgagagagtgtcttgcttagtcgcccaggctggagtgcag

SEQ ID NO: 346016 - DNA, 201 bp, Homo sapiens
caacagtaaggccagaaatccagtttggaatcaatatgttgttttcaaaatgactgattataatcaaaatatttcataaaaattgattctaatgtagctaactaagattctagaggatgttaagaagtcttttttttcttttctttcttttttttttttttgagagagtgtcttgcttagtcgcccaggctggagtgcagt

SEQ ID NO: 346017 - DNA, 201 bp, Homo sapiens
atttctggatctaggtttaatagggacatgtataggcaaaatcggctagaaaatgaggccagcagggggtcttccgtgacaatcattgtctgattcctatwtatagtggcatcaagtgggaaatcacttaaattatcaagtgacttgatttgtcatgagtgtaggaaaagctgctttagagcatagagaacattaaggttt

SEQ ID NO: 346018 - DNA, 201 bp, Homo sapiens
ggaaagattttgtcattcttccttttttgacatttgttactttttaggtaatgctctgaaagctgtacctcactagaataaaaccaaaactaggttatataaaaccatgagcatgatatttatcgacacctcagctgaatgcatcttacttaaccttgaagtcagtcctatgtgcttcactctcataacgggtgggggggg

SEQ ID NO: 346019 - DNA, 201 bp, Homo sapiens
cctctgagctaaggggctaaggatttacagatgaactgtacccacgatttaggaaggtacttaattctattcctgtgcatatatatcaggtccacaatctrttcattaatggtagacttgtgcttattttgtaggtctgaatagatatgtaggtatacacatacccttacatcccaatctccatttgtattcactgcactg

SEQ ID NO: 346020 - DNA, 201 bp, Homo sapiens
taactcatactataatttggatgcccagaaaatatttaatttttaattttgtctatagctaactgtctttctctctagtttctacctgcatattagcagaraaaaaaggttaatgaaatgtccaactcaattttaagttttatttaattaggtaattcaaacagtagagttattctgtcttatataaacgtgctcagtttg

SEQ ID NO: 346021 - DNA, 201 bp, Homo sapiens
tgtgggggttttgtatgaattttaagaatgaattatattgtattcccttgcaggcagtgtgggctggctggggtcatgcttctgagaatcccaaactaccsgaacttctcttgaaaaatggcattgccttcatgggtaagctgttctgacatattgtccgtctttctgtttctttctgtcaattttgcccacattttactc

SEQ ID NO: 346022 - DNA, 201 bp, Homo sapiens
ccttttttttgtatttttagtagagacggggtttcaccgtgttagccaggatggtctcgatctcctgacctcgtgatctgcctgctttggcctcccaaagygctgggattgcaggcgtgagccactgcgcccggccctctagttctcattgtctaattttccaagataacctgttgatggacatttggggttttatttcct

SEQ ID NO: 346023 - DNA, 201 bp, Homo sapiens
gttcagtattttgacctttgcttcatcctaccttagaagaggatttttgacttgagaaactaagctgagcattctcactaccgctctgtttggatattctyttcctacgtaaaattgtctaaaattgttgatatgatgccttttgctcattatagagatatacattgaccttgcttttaagaaacttgttctagaaaataa

SEQ ID NO: 346024 - DNA, 201 bp, Homo sapiens
ttttttttttttccttttgagatggagtctcactctgacgcccaggctggagtgcagtagcacgatctcggctcactgcaacactgcaagttctacctccygggttcacaccattctcctgcctcagccttttttttgtatttttagtagagacggggtttcaccgtgttagccaggatggtctcgatctcctgacctcgt

SEQ ID NO: 346025 - DNA, 201 bp, Homo sapiens
gggacagtgtcaaaaatttgatatagccattgaaaaaacagttctcaaaactgaaggttttggtgttagcttgctggtcacttataagcagtacaaaaacrtgaaaacattttcttttgttggtacctattttatatttgccataatagtggtcctgttttgtattattccctactatttctcatctggaattattaattt

SEQ ID NO: 346026 - DNA, 201 bp, Homo sapiens
agggtatcagcgacccattccatgtcaccatttagttcttgagacagtttgtagtagaactgagtagaggttgtgataccgccaatgccagtagctactcygcctagcactcctgctccaataacaaaaggaagaatgggtactcttttgttgcggggcttaggtatgacatgattgtataaatcttgttcagtgtagatg

SEQ ID NO: 346027 - DNA, 201 bp, Homo sapiens
ataaaaccatgagcatgatatttatcgacacctcagctgaatgcatcttacttaaccttgaagtcagtcctatgtgcttcactctcataacgggtgggggsggtgtcagagaattatttagaacaaaacttgaggagaagttcagtcctgtgtaaaatccactttaaaaaggcttttaaaaaaggatttccctgaggttgg

SEQ ID NO: 346028 - DNA, 201 bp, Homo sapiens
ggctgctgtggaactactgtacctcaagaaacagggccagcctggatagagactcttgcagtttgtgggggttttgtatgaattttaagaatgaattataytgtattcccttgcaggcagtgtgggctggctggggtcatgcttctgagaatcccaaactaccggaacttctcttgaaaaatggcattgccttcatgggta

SEQ ID NO: 346029 - DNA, 201 bp, Homo sapiens
gtttctcacatctacctttgtccttggtctgaaggaacctgctttagtgagaaaatgactcttctggccattatgcatatactcattcacaggaacttatrcctcctaactctgtttagaaatgcctcgtgcttcaccattcctgtggtcatcatgacagcagctttaaaatttcatcttatttagccaatatattctaat

SEQ ID NO: 346030 - DNA, 201 bp, Homo sapiens
tgctggtttacattcctccccaggctgagctgcggggtggctcctgggtggtgattgactcctccatcaacccccggcacatggagatgtatgctgaccgmgaaagcaggtagcgtgccttccacatttccattcactgcctttagggaccctgtagctgttggtttcctcctggagaatgttacagccatggcactacag

SEQ ID NO: 346031 - DNA, 201 bp, Homo sapiens
tgggaggccgaggcagagaattgcttgaacccgggaggcggaggttgcagtgagctgagatcgtgccattgcactccagcctgggcgacagagtgagactmcgtctcaaaaaagaaaaaaaaaataggccgggtgcggtggctcacacctggaatcccagcactttgggaggctgaggcggaaggtcaggagatcgagacc

SEQ ID NO: 346032 - DNA, 201 bp, Homo sapiens
aacctggtgaagttggacctactggaggagaaggagggctccttgtcacctgcttctgttggctcagatacactctctgatttggggatctctagcctacwggatggcttggccttgcacataaggtaagagagagttcaatggtctacttatttaatctgtcttgttagttttgctgattatgttctgaaaagagcaagg

SEQ ID NO: 346033 - DNA, 201 bp, Homo sapiens
gctccctgtggttactggactgactctagggagaaagataaacaatctcttcaccaagtgccttatgattcatgatatactgctgcttaagtgattataayagccatttctttattgcctcttttaaactacattaatgttgattattttcttcctgtataggaagcttcttttgaatatctgcaaaatgaaggggagcgg

SEQ ID NO: 346034 - DNA, 201 bp, Homo sapiens
ccctgtttgccagactgggattgttgttacataaatgaggaactcaactcagaaaaggaaaaagatttctacaaggtcgcctagagcctttggctgagcasagaatttttagtctaccagtctgatttttattccaagctttgaagatgtcacctcccccaaatcctacttttaggatgtagtttgttcatacacagacta

SEQ ID NO: 346035 - DNA, 201 bp, Homo sapiens
tcccctttctactggctgtgtatcatagctatccttttatcagttgctagtttatggctatgtcttttatcataactctcagaactatggctagttctgcvtttagggataaaatcccaaagtgacttaataatatataatgaatatctttgtgtgtcaacagataatagacctcaaatatttaaaatgtttttaagggaa

SEQ ID NO: 346036 - DNA, 201 bp, Homo sapiens
aagagcggcttatctttgccatacgttcttcttgccattcttttttctcttattgaacttgtgcttcctgttgccttacatgtgtcttagaactaaagccrattcctttctgaaagggtttggtttgggaaacaaccaaatgtattgagctactcaacgaaggtgatacctttccaaatcatccttgtcctgtagaatgat

SEQ ID NO: 346037 - DNA, 201 bp, Homo sapiens
tagcttattttactcagcataatgtttttgaggttcagccatgttgcatagattatgtgtatgttccttttcatttttggatagtattccgtttcatggattttttttttttttttttgagacagggtctcactatcttgcccaagctagagtgcaatattgtaatcatagctgaccacagcctcgacctccttggctcaa

SEQ ID NO: 346038 - DNA, 201 bp, Homo sapiens
tctagtaattcttctaacacctcatttcaaacttacttttatctgtattctccttctcattttttcttcatgcatatgtatgtatgtgtgtgtgtgtatttgtgtgtgtgtgtgttttgtaacccagaacaatgctgacaacatttttccttctttcctgagaagtgttccaagtgcttggaacagaggatgaccaaagga

SEQ ID NO: 346039 - DNA, 201 bp, Homo sapiens
gaggagaagtaaatacatgtatatatatatatatgttttttaatatacataatttaatataatatggttattttactatatgtaaaatatgaggctgtgtstcatgggctagtgagaattaactatctagatggatggatgaaatccacttctggcagaaatctttgaagcctttgcatagctagtaatacttatgaagta

SEQ ID NO: 346040 - DNA, 201 bp, Homo sapiens
ctagtaattcttctaacacctcatttcaaacttacttttatctgtattctccttctcattttttcttcatgcatatgtatgtatgtgtgtgtgtgtatttgtgtgtgtgtgtgttttgtaacccagaacaatgctgacaacatttttccttctttcctgagaagtgttccaagtgcttggaacagaggatgaccaaaggag

SEQ ID NO: 346041 - DNA, 201 bp, Homo sapiens
atttttgttgctcattagcacatcatagcttatgtttctattttcaggcatctcttttacattcacattcatagtataattttgtaactgcctcttgtgarctgttttttctctgattcttgtactcagtttgaggaggatcgtatctatcgtcatctggagcctgctctggctttccagttagagctgaaccggatgaga

SEQ ID NO: 346042 - DNA, 201 bp, Homo sapiens
ccctcttcaagatgaaaggttctgtataaataaaagctttcgattttagtacatgtttgtaatacatgtggtacagtcctaaatatgtatttagctgatasgcactgttcttgtctattgtacaaatattgactttaaaaatataaatatgtatttaaccatcagaccagaaaaacactgaagcagttacttctgaggtag

SEQ ID NO: 346043 - DNA, 201 bp, Homo sapiens
gcggaggatcattcatatatatttcctggactaagcttaggtaagaagcatgtttttctagaaaactgtcttctaaatgcttaactgtttctatactgttygttctcaaagagccatgtctatgaactactgacacatttttcccccttctttaatacagagagaattccctaaattttttacattccgagcaagggataa

SEQ ID NO: 346044 - DNA, 201 bp, Homo sapiens
tcacttgagtccaggagttcaagaccagcctgggcaagatggtgagaccccatctctacaaaaaataaaaaaaattagctgggcatggtggtaacacacaygcctgtggtcccagctacacaggaggctgaatgggagaatcacttaagcccaggaggccaaggcttcagtgagctgtatttgtgccactgcactccagcc

SEQ ID NO: 346045 - DNA, 201 bp, Homo sapiens
aaatttggaaatggggtcaaagtgatggttatgcggaggatcattcatatatatttcctggactaagcttaggtaagaagcatgtttttctagaaaactgkcttctaaatgcttaactgtttctatactgtttgttctcaaagagccatgtctatgaactactgacacatttttcccccttctttaatacagagagaattc

SEQ ID NO: 346046 - DNA, 201 bp, Homo sapiens
ctgttatcccttgcttatatttattttgatgatcctgtggatttgagagagtgaaaaatagtaattcacacaattctttaattacatgttgatatctttaatagagatgtcactaaagatcagaaaatgaccctttaaccctgttgaaaatgaaatgaggccgggagcagtggctcacgcctttaatcccagcactttggg

SEQ ID NO: 346047 - DNA, 201 bp, Homo sapiens
tgttatcccttgcttatatttattttgatgatcctgtggatttgagagagtgaaaaatagtaattcacacaattctttaattacatgttgatatctttaatagagatgtcactaaagatcagaaaatgaccctttaaccctgttgaaaatgaaatgaggccgggagcagtggctcacgcctttaatcccagcactttggga

SEQ ID NO: 346048 - DNA, 201 bp, Homo sapiens
agtttcataaacacttgcaatgaatgtatatgttgcagttggtgattataggttctatgtatgttcagtttttcagtttgttgttcttctgtgtctttgattttttttttctacttgttatatcagttgctgaagaagaatattaaaatatcctactataaggatcttatgactgggcacagtggctcacacctataatct

SEQ ID NO: 346049 - DNA, 201 bp, Homo sapiens
ccttcatataaaataaatattttctggtgttttcctgtttttttacttttggtggtttttctgtatacttacatgttttattcatggacgccatcctttgycactgtgtcttttattccaaaaccaggaagtgcttcccaccttcgtatttttatccttttccccctgtgaactcaccatttgtgtatcttctttccatgt

SEQ ID NO: 346050 - DNA, 201 bp, Homo sapiens
ctttggtggtttatgggcacgtgaaagctgtgtataaagctttcgaaagcagccaattgaatgaaaagagcacagtcttgagtgccaagaaaactgggtcyaagctcagcttaatcgtgtgcagtccccaagctggaggggcacccaggatagtatgcccgggccacccacaggagtggggaacaatcggctatttccagt

SEQ ID NO: 346051 - DNA, 201 bp, Homo sapiens
tgtcctttggtggtttatgggcacgtgaaagctgtgtataaagctttcgaaagcagccaattgaatgaaaagagcacagtcttgagtgccaagaaaactgkgtccaagctcagcttaatcgtgtgcagtccccaagctggaggggcacccaggatagtatgcccgggccacccacaggagtggggaacaatcggctatttc

SEQ ID NO: 346052 - DNA, 201 bp, Homo sapiens
ccttcagtgagcggcgaagtactcatggcacacataggcacagcactcagtcttctttcttttcctgcattccttgaataattgtagagaactacacgctrtacttaatgctctttgtaattctcagggcagttctccttttcttcctgctttttcctgcttccctttgggcagtgatttgtagtcaggctgcagggctgc

SEQ ID NO: 346053 - DNA, 201 bp, Homo sapiens
cagtctttacgatgagcttgcaaaatgataactttccaactccagcacaccctccacaattaccagtcaccactcagtcctcactcctgccgattcttttrtatatacattattggtacagactcatgaagttctattttttactgatttataattcattgctgggctgcttttgatgccccaattgctgtctttgtgaca

SEQ ID NO: 346054 - DNA, 201 bp, Homo sapiens
tttctcacatctacctttgtccttggtctgaaggaacctgctttagtgagaaaatgactcttctggccattatgcatatactcattcacaggaacttatayctcctaactctgtttagaaatgcctcgtgcttcaccattcctgtggtcatcatgacagcagctttaaaatttcatcttatttagccaatatattctaatt

SEQ ID NO: 346055 - DNA, 201 bp, Homo sapiens
atcttgctttcatcaaaatttccctctggtgcagtctttacgatgagcttgcaaaatgataactttccaactccagcacaccctccacaattaccagtcaycactcagtcctcactcctgccgattcttttatatatacattattggtacagactcatgaagttctattttttactgatttataattcattgctgggctgc

SEQ ID NO: 346056 - DNA, 201 bp, Homo sapiens
gcattactttcaagtattccattatcactgaccactgcataccccacttttcaaagtcctttttctacaaaggaacttccatcagtatacaagttgaggtsgggatcagtcaagggaacctctaaaaggtccacaattgggaattattaatcttttttttttttttttttctagacagagtctcactctgtcacccaggct

SEQ ID NO: 346057 - DNA, 201 bp, Homo sapiens
aactaaaagagacatactgctgatccttagtccccggaagccttcatctttccaatgtaaaggagttaatttttagaaacagagacgtcgatgaaatgacrtacattaaataaccagtcacaactaagtcggcagctaagttagagacaggaagtgacagtctgaaaagaaaccattatatttgaaggcacgagatagtta

SEQ ID NO: 346058 - DNA, 201 bp, Homo sapiens
cttggaagttaggaattccctttctctccatattgctgcatgggcatggaggactaggtaagcatacttagagtctgtatatatatttatcctttttcctkctcctaattctagtgcctgagtgagggctatgagttctgccagctgagcagtagttgctggagtgagggcattactttcaagtattccattatcactgac

SEQ ID NO: 346059 - DNA, 201 bp, Homo sapiens
ttagccttgaatgtagctcatttttgttgctcattagcacatcatagcttatgtttctattttcaggcatctcttttacattcacattcatagtataattytgtaactgcctcttgtgagctgttttttctctgattcttgtactcagtttgaggaggatcgtatctatcgtcatctggagcctgctctggctttccagtt

SEQ ID NO: 346060 - DNA, 201 bp, Homo sapiens
gagggtttcatgtagttttgagagatctagtcctttgtaggggccaggggtgctatgtacccaggtcagttgggagattacttcctttatgtgtttttctrttgcctgatcttgaactccacccccatcagacatactggtatgagtgaagtgagtcctccaagtcctccaggacaactgggattaatcgtttttcctgtc

SEQ ID NO: 346061 - DNA, 201 bp, Homo sapiens
aaacaatgataggctgaggtaccacagacaaaaaatattcctgagggtaggcagactattcgtgtgggaggagttacccacctgatgcattgggagttggytgtgtctatagtattgctaaattttacacaggtgaggtttgaggtatgggttatttccagattggaaagaggacctactaaaacagaagtggtgtttatt

SEQ ID NO: 346062 - DNA, 201 bp, Homo sapiens
tgtgttggtacagtgatgggcactgtatgtaaatacacagctagatgaatgtgtgctgttgagcctggatacagaagaaatgcagctatccaacagttctrctttaccacttctcaattttggaggaattgttttcattttcctgccagtttactaacctgttttgatcttttggtggaagctataattgcaggtggggac

SEQ ID NO: 346063 - DNA, 201 bp, Homo sapiens
acaggaaaatagctgccagcatttttcagtagtttctattttccaggtatttgaattctcccatttcataatgaattaggattccttgtaacacaaaaagygaaaatatatggctgatcagagcatgtgtcatcttaccattgtgtgatttgggccaaattaaaattgattttagttatgtttggattgtcaagcagctct

SEQ ID NO: 346064 - DNA, 201 bp, Homo sapiens
taaccccccaatggctgttatcatcccttcagagtaactgggtggtagggagagggatcctttctccttttgcagaaggactggatggtgaggggtgtggrgataaagcttctttctcttcaaggaaagtgatgtcgctcccaccttcaaccagcaccttttaacttttgaagcacatgaaggggagagggaggagactcc

SEQ ID NO: 346065 - DNA, 201 bp, Homo sapiens
ctttcctggttgcacaaaaggtactgacatgtgaattgtacctctttaatatttcttatgctgctgctacaacttaataaaaatgggattgtaatcttatrcttactaataggatttatgcagagaaataaccacttttctgtaagtttcatttttaaaaaacattagtttaactcatcatcttttactcaatttcttttt

SEQ ID NO: 346066 - DNA, 201 bp, Homo sapiens
atacatgttccttggggcctggcacatacgtaggattcttccagctgaagattgggactattgggtgcaattccatacgtgggccctgctgtctttgtctrtaactattgttgctgagttggagtctagggctgtcgttcactgattgctgtgctctcttccaatctccttttagagcgtgcacagttcagttcctcttct

SEQ ID NO: 346067 - DNA, 201 bp, Homo sapiens
cttaagtgcagtggtgtgtttgtaccttagatcaaaagtagtagatgacttgatctcttgttggggttgacaggctgaacttcacacaggtagtctgccayggatccagagcacggcactcagaggcgagaaactccatcgagtgttccattatgtcctggataatctggtcaatgtaatgaatggatactgccttccaga

SEQ ID NO: 346068 - DNA, 201 bp, Homo sapiens
tattgacctatacatgttccttggggcctggcacatacgtaggattcttccagctgaagattgggactattgggtgcaattccatacgtgggccctgctgyctttgtctgtaactattgttgctgagttggagtctagggctgtcgttcactgattgctgtgctctcttccaatctccttttagagcgtgcacagttcagt

SEQ ID NO: 346069 - DNA, 201 bp, Homo sapiens
cccccaatcttccacatctcactaaatagcacctccagccactctgctcaaaccaaaaaacctgggaattgtacttcagtttggttgattctatctccagrattgaccccagtaccttcacttgcaatcaccttagtccaagccttagcacgtcagctcttgcttggactattagaatgatcacctaactagatttcctgt

SEQ ID NO: 346070 - DNA, 201 bp, Homo sapiens
agtgaattatctgggtgaaatgggtgaaaacagtacttgcacttccttaattataactcccatcatatgttttatgactctggacagtcagagcagacctytgattggtggattagggaaccagaatctcattatatcattttctcaaaaaaaaaaaaaaaaaaaaaagggtttgagaaaccttcccagcataatggcatt

SEQ ID NO: 346071 - DNA, 201 bp, Homo sapiens; identical to SEQ ID NO: 73199

SEQ ID NO: 346072 - DNA, 201 bp, Homo sapiens
gccactgtgctgcggatactttcaagtcaatttgaactgctttgtttaaggagcatgggctcttaaaccagattacctagtccaaaatcacaactccactrttgcctagctttgtggccttgggtgagttacttttttgtgcctcagtttcctcatcttttaggattgttgtaaggattaaatgagataaaaagtacttta

SEQ ID NO: 346073 - DNA, 201 bp, Homo sapiens
atacagaactgggcacatttgagtcagaaaaagaaatggacaaagaactaaaagagacatactgctgatccttagtccccggaagccttcatctttccaaygtaaaggagttaatttttagaaacagagacgtcgatgaaatgacgtacattaaataaccagtcacaactaagtcggcagctaagttagagacaggaagtg

SEQ ID NO: 346074 - DNA, 201 bp, Homo sapiens
atttcctaatgtagaattctagaaaagaatgacttttctctctgtagcatattcttaaacacactcacacacgtgtacacaccaacttgctttcctaaaawccctgaggccctgcaatctggctagaaaagaaagaaaaccatttcaagatatttaattgtacagggagcttacagcattgatcgagagcttagcttttta

SEQ ID NO: 346075 - DNA, 201 bp, Homo sapiens
ttaattaaaagcaaacggattaaaaatgattaataagagtattaaatattctcctaaactaaaggctttgggattcttgggtaaatctaaaaatcttgggkttttttttttttccattctgaaatccaagaagcatttattgttttatttttcctcccctccaccccaatcttcataagtaggggtatgtgtagaagtcct

SEQ ID NO: 346076 - DNA, 201 bp, Homo sapiens
gggtttggcggtcattgtcatccagttgtactttgcgtaaacagcagatctttttataggacccatattttcaagcaactgtaaaacttggaatgcgttgmcctaatcctgtctgggaacttttcaaaatgtttaaacacctagcatactctgtggctgcaggaggggaaggcagaagagttttctctagagggtagctgg

SEQ ID NO: 346077 - DNA, 201 bp, Homo sapiens
tcaagtgcaaagactggctgagtctagaccctggctttgcaccaggaagtgaccctctaatccttattgtggttggttactggtaagaaaagacatttcgwgataggcatctattagctatgccttgtgttctttttgttcccagagaatttgttttcttaatcttaatcctgaaaacagaaattctgggacagaaaattg

SEQ ID NO: 346078 - DNA, 201 bp, Homo sapiens
aggattcacctttgtattaagtctgcccattttttttatgactgaaaagcttctttggataaatatttcaaatgtgcagttggggagcacagccttctccracatttggttcaggttaaggtcagtctgtggcatcataattgagtgagacaattttgtcagtggctactggcagcttctagtggaagttggcattgaaag

SEQ ID NO: 346079 - DNA, 201 bp, Homo sapiens
atcagcctatacaaggaagtgactgactccaggacagcacaggtacaatactcaaacaggctcctcagagttttgatttggtcctacagataagacactcrtccttgttatagaagacccacactcacaaatcccattggttcacctggtgggattatcctctataagattaaatgattgtatgaatttgaaaaacttcat

SEQ ID NO: 346080 - DNA, 201 bp, Homo sapiens
ttaaaggagggatggctttcatagatcaggcagtcctagacacaatgaacttttgcttaatcactttacaaagaacatgttattttctatatatgtgtcaygttttcctcagaacaaatgttttcatgtggtatgtttttttaaagagaaaggaaaagattagtgctgcgtctctttaaaatagaagccctttccccatta

SEQ ID NO: 346081 - DNA, 201 bp, Homo sapiens
tggaaacaaattcttcagtcaactagtatttgatcttttaaaatatagttatatttatacaaacatatgtaaagtatattatcccataaattgtgcctatrcatatgactctgtataatataatatgacagtctgggagtacacaatttaaaactccaaatgatttttataattaatatacgctagtgaacatgagtaatc

SEQ ID NO: 346082 - DNA, 201 bp, Homo sapiens
gaaaaaatatatatggtttattaaagtttaaacaatccatcctcctaatttctgccacttggtgaaattttgcatgtcacctctagccactggtgattctrttcaattaactattgagcccaggctaagatagattattcttttagactcagctgccaatggcagtgttagtttcatgccacttgagttttcatggtgggt

SEQ ID NO: 346083 - DNA, 201 bp, Homo sapiens
tcagaaatgtgctctcatgtggctaaaagcttttgatggctcttatacacactgaacagttgagtcagtgagaggctgtagtggtctagcagttggataargtgagatacttatgtttgcttatctctcttctttgagtgtgcggtgaaacttgccaaaatggtgggttatgtgagtgctgggactgtggaatacctgtac

SEQ ID NO: 346084 - DNA, 201 bp, Homo sapiens
caaacaacagtcagtcctgtaaaataggcgttaattatctccattttccagaagaggaggatacaggctcagagagattatgtaattttcctacctaatawgtggtggaggcattcagtcatggtattcagattcttccacaattaggccatagctgatttttccagtcttgtttctacccagtgttttttccctctttgc

SEQ ID NO: 346085 - DNA, 201 bp, Homo sapiens
ctttcacctctcacctgttgaacttggagtgtcctcactgacactatggccactgtgtcctttgcggtaaggaggctgatgagaaataacacgaggctttytatcacgaaggtagatatgggatcttgcctcctctcttttgttagcagtagctgaaaacctacccctcacactgattcagaagctatttggctcggtgaa

SEQ ID NO: 346086 - DNA, 201 bp, Homo sapiens
gttgattgattgattcattcattcactcattgatttagagatggagtctagctctgtcaccaggctggagtgcagtggctgatctcggctcactgcaaccyctgcctcccgagttcaagcaattctcctgcctcagcctcctgagtagctgggattacattcacacgctgccatgccagctaatttttgcatttttagtag

SEQ ID NO: 346087 - DNA, 201 bp, Homo sapiens
tatttaagtgatatggctgggcaaaaaattgcctcctgctgcagaaatcagccgtttcctctgggagtttctctttagcttttttttttttttttttttttcggtcagagacagattctcactctgtctgccagcctggagtgcagtgtcatgatcacagctcaccacacctcgacctgtcaggctcaagcaattctccca

SEQ ID NO: 346088 - DNA, 201 bp, Homo sapiens
caatggttgccacttcttgtcagaggcccacatgtgggcaagtgtgtgtgtgtgttgcacacaggctcataagcagggagctatgagggccaaattaaaasaacttctgcagatcaaaacattttcaatattttttagattttcactgtttctgtaactgttatcatcttaaaacaatgtataatttaggtttccattaat

SEQ ID NO: 346089 - DNA, 201 bp, Homo sapiens
aatgaggaactcaactcagaaaaggaaaaagatttctacaaggtcgcctagagcctttggctgagcagagaatttttagtctaccagtctgatttttattmcaagctttgaagatgtcacctcccccaaatcctacttttaggatgtagtttgttcatacacagactagggctgaccttctcctggcctatttaagtgata

SEQ ID NO: 346090 - DNA, 201 bp, Homo sapiens
gctggctggacagactgatagcagaaaaagtacaggtgtgtatttctccacaaacagatgctgggattgggtttttatagacttgtgtactcaatccctgycactacatgaaatttatttgattctaatgtaaatggttcttgatctacctggaaaaatctaggagtcagtgtaattttagcactctgatggttcctgtgc

SEQ ID NO: 346091 - DNA, 201 bp, Homo sapiens
caggtagcgtgccttccacatttccattcactgcctttagggaccctgtagctgttggtttcctcctggagaatgttacagccatggcactacagcacccrcatcctgtgattccaaaccaaagctttttccttccattacagtccaggtcctcactctagcatttcaggaagctgaagaccatggtgtttgtagcaccca

SEQ ID NO: 346092 - DNA, 201 bp, Homo sapiens
caggcctgtcatgatgttagcagcctagcatatcacacctgtttaaagtccacgctggaatactaggaatgactggccacattttctttttttttttttttgtctcactctattgcccaggctgctggagtaggtatgatgactcactttcagcctcaacctcctgggctcatgtgatcctcccctcccacctcagcctcc

SEQ ID NO: 346093 - DNA, 201 bp, Homo sapiens
aattctcgtgcctcagcctcccatgtagctggaattacaggcgtgtgccaccatgcccagctaattttttgtatttttagtagagatggggttttaccatrttggccaggctggtcttgaacccctgacatcaggtgatcctccggtcttggcctcccaaagtgctgggattacaggcgtgagccaccgcacccagcctgt

SEQ ID NO: 346094 - DNA, 201 bp, Homo sapiens
cttagatgcaggaggaattttgtattccctgcttccttaaatagatgtcctgacccaccgagcattgtttaaagagggggaaaagactgaataaagaggargagaaggaatagatttcattttttattccatcattgatatgcatgataatttttcacatcttcagcacatgattgcaaatatttgcctataagtctaagg

SEQ ID NO: 346095 - DNA, 201 bp, Homo sapiens
aagtttatttccttggattttctctctctttccattcattttttccctcccaattcggtagtatagattgagaagcatgctttctttggttacatggtctyttctcactcagcagggaagaatactcatatttgtcccttcttgagggggatgccctggatgtctgtgatgagaaggatttctgtggtgcttatttgacag

SEQ ID NO: 346096 - DNA, 201 bp, Homo sapiens
tttctgctgattaacatggttcctgacacttctggacatctgcttgttgaaatcaaagtagcttatcaagatagataaaaagtttaaaatttaagaattgrttttttttttcccccttttctaatacaggttcaagctgaagttcctggatctcccatatttgtgatgagactagccaaacaatctcgtcatctggaggtg

SEQ ID NO: 346097 - DNA, 201 bp, Homo sapiens
ccagcagctcccaaggtgagttattagtagggtatagtaatcagggctcacatccatcaggttgtgccctggtcactccttggccctgctgaaccattgtmtaaggaggacttaacagctatccagtatgttagaaatgaaactttccaaacaggtcatttagatgttgtgagatagactaattactacataaaattagtg

SEQ ID NO: 346098 - DNA, 201 bp, Homo sapiens
acctctcacctgttgaacttggagtgtcctcactgacactatggccactgtgtcctttgcggtaaggaggctgatgagaaataacacgaggctttctatcwcgaaggtagatatgggatcttgcctcctctcttttgttagcagtagctgaaaacctacccctcacactgattcagaagctatttggctcggtgaagttta

SEQ ID NO: 346099 - DNA, 201 bp, Homo sapiens
gactttgctggcccttagttagttagattctccccagagactgaaaatgaatacacgtacggaagaaattttgtattgtcgttattttttaaaggaggagrggaaaggaaaaagaaaaggtaaaatacagtaagcgctctacaactgtttagagctctccggggctaccttagatgactgacaattactatacactcagca

SEQ ID NO: 346100 - DNA, 201 bp, Homo sapiens
tctctgaactcaagctaagggcccacttagctctgtacacacggttccttaggaagattggtttcttcgtcttcttcattttatattcagttgtgtgttayaccttcatatgttgaattttcttcacctgtctctctttctacatatattcatagctctgtctttgcagatcagtgctcacttgaagctttgctactctgt

SEQ ID NO: 346101 - DNA, 201 bp, Homo sapiens
gtgattattgtatttatgttctttcttccttacaatcatagtatgtgtcttattagtatgaggtacataattagtatttgtggaagtaagtacctgtcccrtgcaggatagacactgggcataaatatacagaaaagccccatagtatttgaaattctgctaaaattggatcactttgcacttaactgggaagtaataaaa

SEQ ID NO: 346102 - DNA, 201 bp, Homo sapiens
tgtttgccagaatgccccaactcatatattccagtatattccagtataatttcccatgggtcataatctaaataccatgagaacaggactgtgtcttgttrctgctatatcccctgaacatagtaagcattcagtaaacgttggttgaatggattagccactcattcctatccttatacctctgcttcaatcataccattc

SEQ ID NO: 346103 - DNA, 201 bp, Homo sapiens
gagattgtgccactggactccagcccaggagacagagtgagactctgtctcaaaaaaaaaaaaaaaaatctagtctctaactagttagctatgtttctagraagaagaggagcatattggaaatactggaaactggacaagagtctgtccccatgtttttttgtctgcatgcatttatgtctggtggggtgaggttgcttt

SEQ ID NO: 346104 - DNA, 201 bp, Homo sapiens
cctcgggaggggtgcctttgatgtcattaacatcagagcatgggctagcaggccggtccaggggtccgtggtagattttactcatggactgcatctggggmtccatttgaagaacgatttgtagttttactgcttcgattctggaaaagacaaacttaacaaggaggttaaagatacagggtccaaagaggagtaacaata

SEQ ID NO: 346105 - DNA, 201 bp, Homo sapiens
ctgtctctcagtcccccctctcaacaggaaaacccaactgctgttggggaggttggccaacaaccactctaactgcttcctgctgaattggggcgtagtaraggttgtgcagttgagatttcctcgggaggggtgcctttgatgtcattaacatcagagcatgggctagcaggccggtccaggggtccgtggtagatttta

SEQ ID NO: 346106 - DNA, 201 bp, Homo sapiens
acttttggtgttcttcagtgtggtcagtctgttggaactttcccttccctccccctttctttctttttccctcccttttaccccttttccctccctttccctttttctctgccttttttcttcctttttttttttcttttgagacggagggagtctctgtcacccaggctagagtgcagtggcgcaatctcggcacactgc

SEQ ID NO: 346107 - DNA, 201 bp, Homo sapiens
aacttttggtgttcttcagtgtggtcagtctgttggaactttcccttccctccccctttctttctttttccctcccttttaccccttttccctccctttccctttttctctgccttttttcttcctttttttttttcttttgagacggagggagtctctgtcacccaggctagagtgcagtggcgcaatctcggcacactg

SEQ ID NO: 346108 - DNA, 201 bp, Homo sapiens; identical to SEQ ID NO: 73203

SEQ ID NO: 346109 - DNA, 201 bp, Homo sapiens
taacttttggtgttcttcagtgtggtcagtctgttggaactttcccttccctccccctttctttctttttccctcccttttaccccttttccctccctttccctttttctctgccttttttcttcctttttttttttcttttgagacggagggagtctctgtcacccaggctagagtgcagtggcgcaatctcggcacact

SEQ ID NO: 346110 - DNA, 201 bp, Homo sapiens
tgtcaaacttgaaaaaaaataaatagaaatccagcactccccctctctgaccagagaaatttaaatgtattctgcatcttcattggtccctttttatttayattgaaaatctaagctcggattattgtattggtagtaaatgtatgatttttttccctataacttagtaaaataagaattagtaggaagtaggaataggga

SEQ ID NO: 346111 - DNA, 201 bp, Homo sapiens
gtaacttttggtgttcttcagtgtggtcagtctgttggaactttcccttccctccccctttctttctttttccctcccttttaccccttttccctccctttccctttttctctgccttttttcttcctttttttttttcttttgagacggagggagtctctgtcacccaggctagagtgcagtggcgcaatctcggcacac

SEQ ID NO: 346112 - DNA, 201 bp, Homo sapiens
tgtaacttttggtgttcttcagtgtggtcagtctgttggaactttcccttccctccccctttctttctttttccctcccttttaccccttttccctccctttccctttttctctgccttttttcttcctttttttttttcttttgagacggagggagtctctgtcacccaggctagagtgcagtggcgcaatctcggcaca

SEQ ID NO: 346113 - DNA, 201 bp, Homo sapiens
ggttgtcctgtggacattaactgactgtgaaggtaaggtatatgccaaaggcagtgatatgcaggtgatagattcaccaggagatgatatgtgacttttcktgtattttaaagctctgcttcttttttagaaaaaaaaaaatcctatactctcatcccccttagcgagatcaggcccctatttccactgaatctgccagga

SEQ ID NO: 346114 - DNA, 201 bp, Homo sapiens
gtaaaggaacactgatgtgtactggagcctactagctctcaatccattgccccagacttggggagagagagcacattctctatccagagaaataagaataygcagtttatggttgtcctgtggacattaactgactgtgaaggtaaggtatatgccaaaggcagtgatatgcaggtgatagattcaccaggagatgatatg

SEQ ID NO: 346115 - DNA, 201 bp, Homo sapiens
ctattttaagtgtcagaaattgaatattaccttgggtttttttttttttttttacatttttttcattgaattctaatttcataggtagatcagtgactcaragagtctagagaaaaaagactgctcttagaagcaaaaagaaaaaaaaggcatgttaattaatgttaactcttacagacatttcaaaactactcattactt

SEQ ID NO: 346116 - DNA, 201 bp, Homo sapiens
atctctttgatcatctatcactcagcaattgagttcatcatactaattctgtttatatgagcatagaaaagaataaagaaacattagaaaaggtgagactrtgcataaaagattttcattcattaagtaatcgattgacatagattaaaaattgaaatgttctttttctgggtgatacttattttattttatttttttggg

SEQ ID NO: 346117 - DNA, 201 bp, Homo sapiens
gggctcaagccatcctcccaccttggcttcccaaagttctgagattacaggtgtgagctaccacacttggcattttgtgtgtgtgtgtgtgtgtgtgtgtktttgtgtgtttgtagagacagggtcttgctttgttgtccaggctgatcttgaaatcctggcttcaggcagtcctcccaacttgcatagggactttttatt

SEQ ID NO: 346118 - DNA, 201 bp, Homo sapiens
ccactcttcctctcagtttcctttttactttatttttttctccctttcctggtaaaagtattagtatgtttaacatagtgttaggtggcagataggctggraagagctagtattgtaaaggaacactgatgtgtactggagcctactagctctcaatccattgccccagacttggggagagagagcacattctctatccag

SEQ ID NO: 346119 - DNA, 201 bp, Homo sapiens
aaacaggatctgatttacgcagtttttcaagaatgcttttgtgtaaagaaaggcacacctgttatggatatagaaatagttttgcaggattttttttttttacctatcttactatgtttatagaaaaatttctttcaacatagaaaatgtgattacatagatcttttaaacaactgcttgtgtttgtacttctgaatctta

SEQ ID NO: 346120 - DNA, 201 bp, Homo sapiens
agattcgttgtcatggtcacacctgaagaccttaaagccaatgcaggtgagttattagcattatgaaagcatcactctcaaaactaaaacatggaacagcrcagcctttaagtaggagaatgttaacttagggggattcccaaacataggacttccaagtaaaatccttttaaaataatttctgtttaaaatgtgtcagta

SEQ ID NO: 346121 - DNA, 201 bp, Homo sapiens
atctctactgaaaatataaaaactagctgggcatggtggtgtgtgcctgtaatcccagctactggggggctgaggctggagaattgcttgaacctgggaaraggaggttacagtgagttgagattacaccactacactccagcctgggggacagagcaagactctgtcacaaaaaaaaaaaaaaaaaaaaagtcctaaaat

SEQ ID NO: 346122 - DNA, 201 bp, Homo sapiens
aactcctgggctcaagcggtcctcccacctcagcctcccaaggagctgtgattataggtgtgagctaccattcccagtctacaaagtgtagtctttagcaraatgaagaggtggttcctctcttgttttttgtttattttgttttatgttgtttttgagacagggtcttgttctgtcacccaggctagagtgcagtggcaa

SEQ ID NO: 346123 - DNA, 201 bp, Homo sapiens
aaaagaataaaataggaataaattgagcaaaaaaggtataagacttatacactaaaacttgtggaacattgctgacagaaattaaataaaatcagccaggkgtggtggctcacgcctgtaatcccaaacccagaggctgaggcggatggatcacctgaggtcaagagttccagaccggccgggtgtggtggctcacgcctg

SEQ ID NO: 346124 - DNA, 201 bp, Homo sapiens
atatatgatatcccagagatgtttcggcaggtaagatgcctaactggagggtctgacatgttctaaggaggcaaggtttccctgaatttccatcagatgckgttttggctagaagggggcactccaaagggcaagaaatatcttgacactgttttcatttctatttcatttgaggattggtgactgccaactcagatattg

SEQ ID NO: 346125 - DNA, 201 bp, Homo sapiens
atccatagtgggtaaaaaaaccaaatctgctctgcaacctgaccctacttcagagttttctcctagttccttttccctactgttactttcccagtccttgmtcctaccctccttgtctaatgaacgtgattgaattaccatttagaatgtccttctcctccaacctcaaccactatggcatgacccatgtagctagtgtca

SEQ ID NO: 346126 - DNA, 201 bp, Homo sapiens
ttacctttgtattatgctgagcaaaacaggaattgacaaaagtttgtttcttaaaaaaaaaaaccttaaaatctttctctctttttctctctaggtctttytggaagtggatatctactcagacagtaagaattataagaggtcagttacaaataatactccttgtttacaatgtgataaaaattttgttcatgttgtaaa

SEQ ID NO: 346127 - DNA, 201 bp, Homo sapiens
ttcctgggttcaagctattctccttcctcagcctccccagtagctgggattacaggtgtctgccaccatgcctggctaatttttgtagttttagtagaggsggggtttcaccatgttggccagctgttctcgaactccgaaccttaagtgatctgcccgtcttcatctcccaaagtgctgggattacaggtgtgagccact

SEQ ID NO: 346128 - DNA, 201 bp, Homo sapiens
gggtttcaccgtgttagccaggatggtctcgatctcctgacctcgtgatttacctgccttggcctcccaaagtgctgggattacaggagtgagccaccacrcctggtctcaatagatattttttcttatcgtttccctcctcccatctgctaccctcaagtaggcaattgttaatatcttacatagccataatactttttt

SEQ ID NO: 346129 - DNA, 201 bp, Homo sapiens
tccaaatgggagaaattgtccaaaacaaaggggctacaggctccatgcaattccataatctagcagggcaatcaaatcttttttttttttttttttttttkagatggagtcttgctctgtcgcctaggctggagtgcagtggtgtgatctcggctcactgcaagctccacctttcaggttcacgccattctcctgcctcag

SEQ ID NO: 346130 - DNA, 201 bp, Homo sapiens
ctccactgagccctgtacctcagtaaagagatgtcttccagtgttatttctggcctatattcagcctctttttggctgtttcttttccttccactgacagyaccacccctttgccccagtttatccttcagcatacctgatcacttcatgatttgctgcttatagagagatttttggtcttatagcaaatggtcttgaatc

SEQ ID NO: 346131 - DNA, 201 bp, Homo sapiens
ttccaaatgggagaaattgtccaaaacaaaggggctacaggctccatgcaattccataatctagcagggcaatcaaatcttttttttttttttttttttttgagatggagtcttgctctgtcgcctaggctggagtgcagtggtgtgatctcggctcactgcaagctccacctttcaggttcacgccattctcctgcctca

SEQ ID NO: 346132 - DNA, 201 bp, Homo sapiens
ataggctgggaagagctagtattgtaaaggaacactgatgtgtactggagcctactagctctcaatccattgccccagacttggggagagagagcacattmtctatccagagaaataagaatatgcagtttatggttgtcctgtggacattaactgactgtgaaggtaaggtatatgccaaaggcagtgatatgcaggtga

SEQ ID NO: 346133 - DNA, 201 bp, Homo sapiens
agcttttctttaaccttatcttctgagttgtttcattgctgtgatcatatttttagcttttaaaaattctttcttgttaaaaaattttttttctttctttyttttttttttttttacgtaagtagggatggcgttatgctttgttgctcaggctggtctggaactcctggactcaagcgaccctcctgcctcagccttcca

SEQ ID NO: 346134 - DNA, 201 bp, Homo sapiens
gttttgttcttgcttttgggagcttctgttacttagatatggaccttctgaacaggttctctcatcttctttttctctcctgttgttcatcactttaaatwttttttttttttttgagagacagagtctcactcagtcacccaggttgggtactgcaacctctgcctcccgggttcaagcagttctgctgcctcagcctcc

SEQ ID NO: 346135 - DNA, 201 bp, Homo sapiens
gttgcagtgagctgagatctggccattgcactccagcctgggcaacagagcgagactctgtctcaaaaaaaaaaaaagctatatatatatacacacacacrcgcgcgcacacacacacacatatgtaagatatatatatgtaagatatatcttatatacgtatatatgtaaaatatatatgtaagatatatcttatctata

SEQ ID NO: 346136 - DNA, 201 bp, Homo sapiens
gttcattgttttgttttcgagacagggtctcgctcttttgcccatgctggaatgcagtgatacagtcacggctcactgcagcctcaacctcctgggcttargtgatcttcccacctaagggtcccaagtagctgggactacaggcatgtgccaccacacccagctaattttttctgggtttttttttttggtttttttttt

SEQ ID NO: 346137 - DNA, 201 bp, Homo sapiens
taattacctctataaagactttgtctccaaatatactcacattctgaggtattaggggttaggacttcaacaaatgaattttgggatacaattcagcccayaacagacctctagtatcagcttctagaaatgtaccactcatccttctcttccatttgttagtctcatatagtaagttctctccaccctttggttctcctc

SEQ ID NO: 346138 - DNA, 201 bp, Homo sapiens
agttgactctgtttccataaccatctaattaaatcaagtgcccataatggaatttgaataactgcctaactttgatatttaaacagaaactttgaggaaaracaagtctctttttgtaaatatattctacttgttaagaaaaaataaagtagatcatgatgttcatctgaaaataaaaaataaaagaaaaaaatggacaag

SEQ ID NO: 346139 - DNA, 201 bp, Homo sapiens
ttttatttgggggattgtgttaacttgggtcctattttaccaatgctttctttctaggtaaaagactgggtagagcgattgatgaaaaccctcagagatcyctccctgcctctcctagaattgcaagatattatgaccagtgtgtctggccgcattccccccaatgtggagaagtctatcaagaaggaaatggctcagtat

SEQ ID NO: 346140 - DNA, 201 bp, Homo sapiens
gctttaaagagtagcacaatggagccattttaagtagcttttgagaaacctagaacaagggttcttaggactgcattcttcccttttgactacagagttaytataatcaggacttaaaaagaatagtatttgacaaggtcaaagatcgaggatcctttcttcttttttactccaaacatgatgatcttgatgaacaatagt

SEQ ID NO: 346141 - DNA, 201 bp, Homo sapiens
ttgcccacattttactctatagtctgattttctgtttaacatgtgctgggctctctctctctttttttttccctcaatctattactaactctcagagtaamcctcttcatttctttcttttttttcattttttgcttatctcacttcatcttgattttgttttctgtccctgggtcagatatggagatatggagaaggctt

SEQ ID NO: 346142 - DNA, 201 bp, Homo sapiens
taaattgggtttttttttgtataatgccctacaaaaaagcaggaagacctaatgattacaagttcactagttctaaccttattctttcctatacatatagkggtagtgaccaaggtagaatcttatatttttcttcatcttcaaatgttatcatttaaacccttgacattattgacttgagaataaatgtgaaaatcatgg

SEQ ID NO: 346143 - DNA, 201 bp, Homo sapiens
gcaaagtttggctaaggacatcggaatacaaattttcaggacttcttcttatcccccattaagtcctaaaaccatgataagattctaaatcaaacagtttyacatctgttaataaaatgttaccttttgttcttgtaaaatttcatgagatttaaaaaaaaggtctacatatctcccgagagagagttgttgttttatgac

SEQ ID NO: 346144 - DNA, 201 bp, Homo sapiens
gatggatgctggaccattctgatggtgctggggaaatatgattgtgactctgtccctcttttctgggcatatactttgttggtgttactcctaatgttctrcagtgaccaagacagatactgaaattagcatttactggaagaaaatgaacaaattcagtaccagaggctgttcagtaccagtggcaatttgtgctatgtt

SEQ ID NO: 346145 - DNA, 201 bp, Homo sapiens
tagattctagccttgaaaataattctaggctctgtggttctctcagtacagcaggtcagcacgcctccatgctgcctgtgacaagaagccatcagagggcraatcccacagacagggtcttcctctgtgactctgaataggattctggcctggagtcagctcagactgaatgtcccagagcctacctgtctgttttcttta

SEQ ID NO: 346146 - DNA, 201 bp, Homo sapiens
ttttcctctgaaacagtatgtgcttactcagatactttactcaagtgtttcatctgaactcatcaccagcttctaggttccaatcacaggaaaatagctgycagcatttttcagtagtttctattttccaggtatttgaattctcccatttcataatgaattaggattccttgtaacacaaaaagcgaaaatatatggctg

SEQ ID NO: 346147 - DNA, 201 bp, Homo sapiens
cccagtggtaacttgcctcatggactctcaagcagatttctggtaatctttcactctgtctggaaagcaaagtatcaggtaaaaggctaaagtcctatcargtttcctccatttaaagggacattgtaacacaatttaacacaaagtctggaagaccaatagtacatttattttttgaaagctcttcttatttcttaaatt

SEQ ID NO: 346148 - DNA, 201 bp, Homo sapiens
ttagattctagccttgaaaataattctaggctctgtggttctctcagtacagcaggtcagcacgcctccatgctgcctgtgacaagaagccatcagagggyaaatcccacagacagggtcttcctctgtgactctgaataggattctggcctggagtcagctcagactgaatgtcccagagcctacctgtctgttttcttt

SEQ ID NO: 346149 - DNA, 201 bp, Homo sapiens
aatcttatgattgatttttttaagaggctcataatcaggtagttttatttgctgggttgagtatcatcaagtcttcagctgaatttaatcaactctattaycgtttttggaaagtcctctaaatatcttcagagttcacacattctatctttttgtatagaaagtagtttctcaaagtcatgagcgatgccttcggaataa

SEQ ID NO: 346150 - DNA, 201 bp, Homo sapiens
tgtgcaaaataatctgtagtgcttgctataacgagctataacgagcacctgccacgactgatcttaatctacttctgcactgcagagacatgctgctgagkgaccgcatctggagctcaccttcctctgggggcaatcagttttccttatcttggtgaaaagtggcacctgctcaagattctcaaacatgccacattgggt

SEQ ID NO: 346151 - DNA, 201 bp, Homo sapiens
cttgaactcctgaccttgtgatccgcccacctcagctttccaaaatgctgggattagaggtgtgagctaccccgcccagcctattttttttttttttttttgagatagagtctcactctgtcgcccaaatgggagtgcagtggtacaatctcagctcactgcaacctctgcctcccaggttcaagagattctcctgcctca

SEQ ID NO: 346152 - DNA, 201 bp, Homo sapiens
ttgaggctgcagtgagtagttgtgattaaaaaaaaaaaaaagggctgggaatctgcatttttaacaagcaccctggtggttttgtttttttttttttttttgagacggagtctcgctctgtcgccaggctggagtgcagtggcgcgatctcagcttactgcaagctccgcctcccgggttcgcgccattttcctgcctcag

SEQ ID NO: 346153 - DNA, 201 bp, Homo sapiens
aaaattagccacaatcccaccttcaggccacgattatgaatttatgttatacacttgctgtcttttctatagacatatcttttttctatgtgattgagatkataacaagaatttcttttataatttatccttttcactaaaaactatttttggggaaatttcgtgtattcttaaaacattatttaagaatatgatgcttaa

SEQ ID NO: 346154 - DNA, 201 bp, Homo sapiens
taaaaattgatcactgaccttgttatctacgaatttggattcatggtcagacagccccaggacagggggctcttcatggttctattttcttttctttttcytttttttttttttttgagacggagtctctctctgtctcccaggctggagtgcagtggcctgttggctcactacaacctctgcctctcgggttcaagcgat

SEQ ID NO: 346155 - DNA, 201 bp, Homo sapiens
caaaaatgttttcaaagagataatatttgtgcaaaaaaagcccctctaggcagctctctgatttttttctgtctcttaactccccatgccatttttttttsctgcagatcatgtttcaggcatatggagacaaacagggaccactgcatggaatgttaatcaatactccatatgtgaccaaagacctgctgcaatcaaaga

SEQ ID NO: 346156 - DNA, 201 bp, Homo sapiens
ctttcctgcatgattttcagttcttttaagctcctagaatacagtaccttcccccctgctctccttcatgggaggaagagtatggttaaaaagacttagarcaggtagctgggaacccagattcctggatacttttctttggtggagaatttgtaggtctgtcacatatcctggataagcgattaaagtaggaggagctgt

SEQ ID NO: 346157 - DNA, 201 bp, Homo sapiens
ataagagatggtctctgccttcaggatttaactggagagctaaaaccagtatgcagacaaaaaaatatatcctaattaaattctgaactgtgggccaggcatggtggctcacacctgtaatcccagcattttgggaggcagaggtgggaggatcatttgaggtcaggtgtttgagaccagcctggccaatatagtgagact

SEQ ID NO: 346158 - DNA, 201 bp, Homo sapiens
tttatatgataaaagatttatataaggccagctagaatcaagccaaatgaaattcagctggaagggatggtaaaaaggctcacagaacttgtggctgccaragaagtcagtgttctttaaattaaagagggttcagctagcagcggcaactctgactttgcattcatattgaagcaagctctccagccattctgggcaggc

SEQ ID NO: 346159 - DNA, 201 bp, Homo sapiens
tgatgtatttttcagaaatcatgtatgttcccatcaaatttttcatgtcctactaggttttttttgtttttgtttttgttttttgagacggagtcttgctytgttgcccaagctggagtgcagtggtgcggtctcagctcactgcaacctccgcctcctgggttcaagcaattcttctgcctcagcctcccaagtagctgg

SEQ ID NO: 346160 - DNA, 201 bp, Homo sapiens
tgctcccccttccttcttcctctccctcctcctctcccacatctgcattaatggtagtagctggtaagagccattttggttgtttggattattctttcctyggatcttagtatcttttacagatgtcacctgcacatggtagcactttgactcccccagcttgtgttctctgctggttcccctttctttgcatatcttggc

SEQ ID NO: 346161 - DNA, 201 bp, Homo sapiens
gtgatactcctacaagtgagagatacttcttctgacttttctgctgtcattataccagagagaaaaacagaggttatatagctcaaagtatttttctctckgtctcagagaccttaaacaatgaagattatgttttgtaaacctttttaaagatgtctcctttttgggttcccctaagaccaaagagcgtatactatttca

SEQ ID NO: 346162 - DNA, 201 bp, Homo sapiens
tggaacatgggtaaaagctcaagacggtgctcttttctgatctgatgttactgaatgccagacatgtcttcctcttttcctctttgacaacgcttagctgytcccccttccttcttcctctccctcctcctctcccacatctgcattaatggtagtagctggtaagagccattttggttgtttggattattctttcctcgg

SEQ ID NO: 346163 - DNA, 201 bp, Homo sapiens
aaagagatttttctgatttaagcatagttagaaacatatatatatatatatatacacacacacacacacacacacacatgtgtgtgtatgtatatgtaacrtgtatggggtgtgtgtgtgtgtgtgtgtgtgtgtgtgtttccttttttaccttcttagcattaaaggctgtgtgattctttttgaggggaggggattttt

SEQ ID NO: 346164 - DNA, 201 bp, Homo sapiens
aaaaataaatagaaatccagcactccccctctctgaccagagaaatttaaatgtattctgcatcttcattggtccctttttatttatattgaaaatctaarctcggattattgtattggtagtaaatgtatgatttttttccctataacttagtaaaataagaattagtaggaagtaggaatagggagtgagcctggtaag

SEQ ID NO: 346165 - DNA, 201 bp, Homo sapiens
gaacctcattttcttctggacatgactcatgagaaaatggacgtcaagcccaatgccatgattggatgagactttgggggtcttgggagggggtgagtctrttttgcatgtgggaggtatgtgaattattgtggccatagggtagagcatagtaagttgtttgcaagagatggcgacaataactcctcccattcctgtatg

SEQ ID NO: 346166 - DNA, 201 bp, Homo sapiens
tcttctctcacgctcaagtcaccaagaagaatcttctggtcacaatgcttattgtgagtaccatttttcagaacttgtaaagaccgtcaatgatatgcaaraagtatttttttccttttgatggctatggccagagaaaaaaaactactgccttttataattatgggatgaatggggcttgagctgtggattaacagtttc

SEQ ID NO: 346167 - DNA, 201 bp, Homo sapiens
attactttttcttaaaagcccaagagcggcttatctttgccatacgttcttcttgccattcttttttctcttattgaacttgtgcttcctgttgccttacrtgtgtcttagaactaaagccgattcctttctgaaagggtttggtttgggaaacaaccaaatgtattgagctactcaacgaaggtgatacctttccaaatc

SEQ ID NO: 346168 - DNA, 201 bp, Homo sapiens
tcagtaaatgtgtactgactgacatactaatgacactcagtgctgtcaggcattctcaacacaaatcatgcaagaccaatcgcagatttatgtcttttccrtgttgtgctcactgtgggacatacatttattgagttaaatggtgggcataatttctcatagtatttaaaatgcttccctgtgtttacttatttttttgac

SEQ ID NO: 346169 - DNA, 201 bp, Homo sapiens
taattcaaacagtagagttattctgtcttatataaacgtgctcagtttgtcagatagctctttcctacatggtgcgtatggcttataggacctcataatgrcaaagaaaaatcaatacctttctgtatttttgtgcccctgttctgctgactttgtaggtcatatgtgatatggtggtatgatactgatatggttgctctt

SEQ ID NO: 346170 - DNA, 201 bp, Homo sapiens
gggttccttctcattgcaatttcttatcctggttctggaaaggaaatacgaacacattattctctatactttctgattctttgaaggcaaaaatttcttcmagaaaatgttagatgacagtcctcactgtggcagtacattcatgtattgactttcccaatagatgtatctagcaacaatcaacgcactttggaaagccat

SEQ ID NO: 346171 - DNA, 201 bp, Homo sapiens
ctcacgctcaagtcaccaagaagaatcttctggtcacaatgcttattgtgagtaccatttttcagaacttgtaaagaccgtcaatgatatgcaaaaagtayttttttccttttgatggctatggccagagaaaaaaaactactgccttttataattatgggatgaatggggcttgagctgtggattaacagtttctcacat

SEQ ID NO: 346172 - DNA, 201 bp, Homo sapiens
tccaactcaattttaagttttatttaattaggtaattcaaacagtagagttattctgtcttatataaacgtgctcagtttgtcagatagctctttcctacmtggtgcgtatggcttataggacctcataatggcaaagaaaaatcaatacctttctgtatttttgtgcccctgttctgctgactttgtaggtcatatgtga

SEQ ID NO: 346173 - DNA, 201 bp, Homo sapiens
ttttctaatttagtattacatcatgggtatttttaaatgctattcatagtcttcatagtcatcatcttataaggctgtacagaacactaacagtgatcttrctatccaatttacttccctccaaaataattttagattttcaggaaagttacaaagatcatattagagagttctggtataccctttcccagcttctcttaa

SEQ ID NO: 346174 - DNA, 201 bp, Homo sapiens
atatatcttgttgcttttgtagcggagaaactgagttcctatttttccctccaaatttggatccttatctgatcattaatacttattgtttggttgttttyagccttcagttaaaagaaagtcagtggaatcaaacaaaattgtaaggcaagttttaaaatagaaatagacattttgaaaatatctttaatgacttggcag

SEQ ID NO: 346175 - DNA, 201 bp, Homo sapiens
gattcttttagtaatataaatttagttccaggtacacagatgctaaattgtgatctggagtgatcttgtgagttaacttagaaaaactctgggaaaacatrtatatggttttgtgggtttagatgtactctgggtaggctagaatcttcctcagaggtgggcttcccagggggaattgggtcttcagacctgcctgggagt

SEQ ID NO: 346176 - DNA, 201 bp, Homo sapiens
ctgtcacattgtgttagtaagtttagggtaggtaccttaaagcccaaagaggaaaaaactctaaacttagatggcagtgtaatcaataatgatgtaatggmgtggccatagtaattgaatatgtgaaacatagccagtttttctagaaaacgccctttacagcctaggctatgaattgagtttcctaaagagcaacaagta

SEQ ID NO: 346177 - DNA, 201 bp, Homo sapiens
ctccaaaagtgaaaacaacccaaatgtacaccaacaggcaaacgggttaccaagttgtggtacttccataaaatggaatattactcaggaataaaaataarctactgatacctgcatcagcatgaatgaggcttagatgcaatatgctaactgaaagaagctagattcaaaaggctatgtactgtatgactccatttatgt

SEQ ID NO: 346178 - DNA, 201 bp, Homo sapiens
aggaaaatagagatgttaggtgacaaatttgaaagggaatactgtacaacaaatatatatgagaaagtggttatctttctaaagtttcttacaaatacctsttaccctcagtattccagataaactctttccagacactcctgtaactaacctttcttgtttagccagtttgcaagccattcaggctctcctatctttctc

SEQ ID NO: 346179 - DNA, 201 bp, Homo sapiens
ccagtaatctctaaagtgggcaatgctgaaagatatgttagagagtcaactaccatagtaactttagtgctagtagaaattaggaccctgtttttcttacyatatcagaacatgggcagctttttaacattctgtctcatcatgcctgtcataatgagaaactgagatgagaagacgatgttgcgatgttgtatttggaag

SEQ ID NO: 346180 - DNA, 201 bp, Homo sapiens
agaccttttgacttaatgcaaggttctccttgatctataccttgggttggatttggcgttcctaggcattgcttagctgtttcaaggactaacagaagaawatgttgattccaggggtagcagtcacacttctcatggatattgctaagtttggtgtggttttattttttgagctaaaactgttcctactgattagggtca

SEQ ID NO: 346181 - DNA, 201 bp, Homo sapiens
atcagatttactccctggatttggctagtatttccagtgaagtctcttcaactgctgtaaaggaaagatattgtatagttttgcagaaaacttttttagawtgtgtgtctggggctaggaaaggtgcctgctgtaattgtggtatgtagtcagacagagttgttcaggatgccgaactccttcactttgggacctttctta

SEQ ID NO: 346182 - DNA, 201 bp, Homo sapiens
taatggtaccttgtagctcctagcttaattaatacacctgtgattcttttagtaatataaatttagttccaggtacacagatgctaaattgtgatctggaktgatcttgtgagttaacttagaaaaactctgggaaaacatatatatggttttgtgggtttagatgtactctgggtaggctagaatcttcctcagaggtgg

SEQ ID NO: 346183 - DNA, 201 bp, Homo sapiens; identical to SEQ ID NO: 73264

SEQ ID NO: 346184 - DNA, 201 bp, Homo sapiens
agctggccagcgggtgccactgcctgcggggcccagaggcgttgagtacatctgcagtgctccagaagcacaagactgtgaagctgcgggccctgtgcagcccgaggaagtttggcatggcgggcaggagctgccgggagatgctgcgcaagggctacctctgcttctagctccctcgtacgaggatggcatggagctgac

SEQ ID NO: 346185 - DNA, 201 bp, Homo sapiens
ttcagtatgtaagccaatcagaaaactggtgattgcgtaacacattcagttgctgggggtacattacctccttatctggaactgcagatgtttccttgcarcttctttctggggcctccatttattggggtcatacaaaataaaagattatccctttatcacttagagaacacaattttcgtgccctttttgattattttg

SEQ ID NO: 346186 - DNA, 201 bp, Homo sapiens
aaaacagaggtttatttcttgttgacatcacagactactgtgaatcaggtgatcttcctcaatcttacagctgtgcctatcgaatatgaggttccaagatygtgatacaaagatacggcaggatgtctcaggggatgatttttaggatctaagcttagaagtagcttacatcacttctgctcaaattctgttagctaaaac

SEQ ID NO: 346187 - DNA, 201 bp, Homo sapiens
tggcaacagcctagtataggatattggtacctgagcagagggaggaggacatctggaagaaggatggtatgaggcagtgaggcaagtggtaactcagagcragatgtcagaacctgaatgaggtgaggcaggtattaatgctgggatgtggttgtggtgacaggagatgggttatatatagggagattggccaaatacagg

SEQ ID NO: 346188 - DNA, 201 bp, Homo sapiens
ttccaaatctcaatggcttaacaaaacagaggtttatttcttgttgacatcacagactactgtgaatcaggtgatcttcctcaatcttacagctgtgcctrtcgaatatgaggttccaagattgtgatacaaagatacggcaggatgtctcaggggatgatttttaggatctaagcttagaagtagcttacatcacttctg

SEQ ID NO: 346189 - DNA, 201 bp, Homo sapiens
atattgtcactagtttacaacttgaaatggatttcctcatagaaattagtatttaagtgataagaatgtagtgacctaataatactagggtaaatttggagtcatgaataggaagggagaaaacaattctgctcctttttaaaaacctgtatctcgtataaggtaaaaattcaaaatagacaaagcatatctttgtcatca

SEQ ID NO: 346190 - DNA, 201 bp, Homo sapiens
tacagctgtgaaagccggatccggagttacctgagagaggtgagctcctgctcctccatggtgggtgcagaggctcaggaggaattcctgcgggtcctccrctccatgtgccagaagctccagtctgtgcagtacgacggcagctatacaacagaggagccaagggtggcagccgtctctgcacaccggaaggctagttct

SEQ ID NO: 346191 - DNA, 201 bp, Homo sapiens
aaaatacaaaaattagctgggcatggtggtgcacgcctgtaatcctagctaccggggaggctgaggcacaagaattgcctgaacctgggaggcagaggttkcagtgagccaagattgcgccactgcactccagccttagcgacagagcaccctgcctcaaaaaaaaaaaaaaaaaaaaaaaaaaagtaggggatttctcct

SEQ ID NO: 346192 - DNA, 201 bp, Homo sapiens
atctgacactcaagactgtcagatttaggttgctgttaattttgtcatgagaatgtaaaatactaaaatctctaagtgaaaaatttgcatactagtgcttrttataaaggataatgcaaaaataaacttgggaactttgcattatgaattttatttttatatctacataagcatgagggaaagaactgtattttcagataa

SEQ ID NO: 346193 - DNA, 201 bp, Homo sapiens
atcttcaccaggagcagattccatctcaagaaaccactttgtttgctcatccaaaaggagcaccttctcatctatcaagctttatcatgtgatggaggcasttcagtcacatggtcaggctccacttctaattctagttcttttgctatatccactacatcgagttccttcctgcaccgaattcctgaacccctcaaagtc

SEQ ID NO: 346194 - DNA, 201 bp, Homo sapiens
acacctgtaatgccagcactttgggaggcagaggcaggtggatcacctgaggtcaggattttgagaccagcctggccaacatggtgaaactccatctctastattaataaaaatacaaaaattagctgggcatggtggtgcacgcctgtaatcctagctaccggggaggctgaggcacaagaattgcctgaacctgggagg

SEQ ID NO: 346195 - DNA, 201 bp, Homo sapiens
gttaaatacattaaaattattctttcattattttgctatattttatctttaacaaacttataataaggatatttttggaagtctttaaaaaatctataaawgccttgttatagtcttgcaaaatactgcttaagcattttggtctggactttgtaggtatcttctagcagactctgcatttactaagaatatttgagtaga

SEQ ID NO: 346196 - DNA, 201 bp, Homo sapiens
gcactccagcctgggtcacagagtgagactctgtctcgggaaaaaaaaaaaaaaaagtgggggccaggcgcggtggctaacacctgtaatgccagcacttygggaggcagaggcaggtggatcacctgaggtcaggattttgagaccagcctggccaacatggtgaaactccatctctactattaataaaaatacaaaaat

SEQ ID NO: 346197 - DNA, 201 bp, Homo sapiens
aagggagatgactatacctgaaaaattctgtaggtttgattactctggttaaatacattaaaattattctttcattattttgctatattttatctttaacmaacttataataaggatatttttggaagtctttaaaaaatctataaatgccttgttatagtcttgcaaaatactgcttaagcattttggtctggactttgt

SEQ ID NO: 346198 - DNA, 201 bp, Homo sapiens; identical to SEQ ID NO: 73259

SEQ ID NO: 346199 - DNA, 201 bp, Homo sapiens
gggagttacctatgtgaaaaggaagaaaagtttgtggtggtagaatggaattggaggtactggtgtgaactcatggtttttaaaatgtattgatagacctmgaaatagatatagatgtaaatgtggatgtgtgcatgcgtgtttgtgtgtacatattctctagctatgtccactgagaggacctggaaacattgccactcc

SEQ ID NO: 346200 - DNA, 201 bp, Homo sapiens
  misc_feature (1)...(201): n = A,T,C or G
acagaggactcattttctaaatcatgtattttatgatacttgaatttttttgaaatgggcatttatttaatgacatgttataatgtactttttttttaaanaagtgtaatatttgaatttttacatttgttgtgtaatcagcagaagcaataaagatttttcagaaaaaagaaaaatggcactgatagagttgcttgtctc

SEQ ID NO: 346201 - DNA, 201 bp, Homo sapiens
gtatttttagtagagacggggtttcactgtgttagctaggaaggtctcgatctcctgaccttgtgatccacccgccttggcctcccaaagtgctgggattwcaggcgtgagccaccacgcctggccaagattttttttaagttgttttttttttgtttgtttttgcgggttgtctctcagtggatttacaataattcaatg

SEQ ID NO: 346202 - DNA, 201 bp, Homo sapiens
aacacttctgatttttcttttgtttattgtttttctctttccttttcctccctttccaagcaattattagattaaaatgttctttccttctcactttcggwttaagtccctgttttgtgtattcttgtaaaaaacaaaacaaaacaaaaaaaaacaggaagaaataccgtgaggtaacaattacagttcaaatgggaagtg

SEQ ID NO: 346203 - DNA, 201 bp, Homo sapiens
caaaaggatgttgtagtttcaagcttttatgaagaaagtgtttctgtgtagaaactggaagctgttcagtgcactggcagctgaaccctgctcctgctccrtttatcagagttactatcatctcagataatatggagctcatgtcagcagtgcaggtggtgagtgcgcagagacaatctggaaggaaacgctgatctgaac

SEQ ID NO: 346204 - DNA, 201 bp, Homo sapiens
tgaggcaggagaatcgcttgaacccgggaggcggaggttgcagtgagctgagattgcaccactgcactccatcctgggcaacagagcaagactccatctcaaaaaaaaaaaaaaaaaaatatatatatatatatatatatgcacacacacacacatatacatacacatatatatacatacgtatatacatatataagtata

SEQ ID NO: 346205 - DNA, 201 bp, Homo sapiens
aaaaatatatatatatatatatatatgcacacacacacacatatacatacacatatatatacatacgtatatacatatataagtatatgtacatatatacatatatatatatgtatatgagacaacactgaggtttgccacatcgattgacttttattttcacgaaagatatctctgtagcatgagatgctgtttgatagc

SEQ ID NO: 346206 - DNA, 201 bp, Homo sapiens
aaaatatatatatatatatatatatgcacacacacacacatatacatacacatatatatacatacgtatatacatatataagtatatgtacatatatacatatatatatatgtatatgagacaacactgaggtttgccacatcgattgacttttattttcacgaaagatatctctgtagcatgagatgctgtttgatagca

SEQ ID NO: 346207 - DNA, 201 bp, Homo sapiens
gcttggagtcccgattttggaataagtctggctatctgagatacagctgtgaaagccggatccggagttacctgagagaggtgagctcctgctcctccatrgtgggtgcagaggctcaggaggaattcctgcgggtcctccgctccatgtgccagaagctccagtctgtgcagtacgacggcagctatacaacagaggagc

SEQ ID NO: 346208 - DNA, 201 bp, Homo sapiens
gctgtgaaagccggatccggagttacctgagagaggtgagctcctgctcctccatggtgggtgcagaggctcaggaggaattcctgcgggtcctccgctcyatgtgccagaagctccagtctgtgcagtacgacggcagctatacaacagaggagccaagggtggcagccgtctctgcacaccggaaggctagttctcctg

SEQ ID NO: 346209 - DNA, 201 bp, Homo sapiens
tgtagtagtgtgatcctggctcactgcaacctccgcctcccgggttcaagtgattctcctgcctcaacctcccaagtagctaggattacaggtatgtgccmccatgcctggctaatttttgtatttttagtagagacagggtttcgccatgttggtcgggctggtctcgaactcctgacctcaggtgatccacctgcctcg

SEQ ID NO: 346210 - DNA, 201 bp, Homo sapiens
gatgggttatatatagggagattggccaaatacaggcatacctcagagatatttcagaattggttgtagaacaatgcagttccaaaagtattctttggttytagaccaccaaaacgagttacacaaattttttggcttcctagtgcatataaaagttatgtttacactgtgctgtggtataagtgtgtaatagcagtatgt

SEQ ID NO: 346211 - DNA, 201 bp, Homo sapiens
ggaaggctagttctcctgccagggtcccttcgacatggacggctgcttgtcaagatactccatcaacccctacagtaacagggagagcaggctcctcttcwggacctggaacctggatcacatagtggaaacaaaaacgcaccatcattcctacactggtggaagcagttaaagaacaagatggaagagaagtggactggg

SEQ ID NO: 346212 - DNA, 201 bp, Homo sapiens
tgttgcagagggcattttggagtgagtttgggacaccccatcttagtatgtaaaacgtcctttttccagcattggcgttgtcaaggttgtctgccttatayctaaaatgatgtgagtgtcattgatcaataaataagggagatgactatacctgaaaaattctgtaggtttgattactctggttaaatacattaaaattat

SEQ ID NO: 346213 - DNA, 201 bp, Homo sapiens
tcttctcccaccctttgtatccctgacattatcggaatattggcagtcactgatttaaagttgacatcccatccatcagcaagtgatataaggaagtaaataaataataatgtgtcgaagttcaccttaccttactttaatttattcttttataatcatatctgttataattcttagattctggattgtcccttccttgaa

SEQ ID NO: 346214 - DNA, 201 bp, Homo sapiens
cttctcccaccctttgtatccctgacattatcggaatattggcagtcactgatttaaagttgacatcccatccatcagcaagtgatataaggaagtaaataaataataatgtgtcgaagttcaccttaccttactttaatttattcttttataatcatatctgttataattcttagattctggattgtcccttccttgaat

SEQ ID NO: 346215 - DNA, 201 bp, Homo sapiens; identical to SEQ ID NO: 73258

SEQ ID NO: 346216 - DNA, 201 bp, Homo sapiens
ttctcccaccctttgtatccctgacattatcggaatattggcagtcactgatttaaagttgacatcccatccatcagcaagtgatataaggaagtaaataaataataatgtgtcgaagttcaccttaccttactttaatttattcttttataatcatatctgttataattcttagattctggattgtcccttccttgaatg

SEQ ID NO: 346217 - DNA, 201 bp, Homo sapiens
ccatcctgggtgacatagtgagactcccatctgaatcaaaaaaagaaaattaaaaaaaaaagaggatgctaatactaattttaaaatacttatcctcaaartatttaatttgttacaaagagagaaagagtatctttgtagtagagaaatctggcagacgccaccttagtcaaggggtctaaattaacattattgataatg

SEQ ID NO: 346218 - DNA, 201 bp, Homo sapiens
ctcccaccctttgtatccctgacattatcggaatattggcagtcactgatttaaagttgacatcccatccatcagcaagtgatataaggaagtaaataaataataatgtgtcgaagttcaccttaccttactttaatttattcttttataatcatatctgttataattcttagattctggattgtcccttccttgaatgga

SEQ ID NO: 346219 - DNA, 201 bp, Homo sapiens
tttctgggtgctgaagaaatagggcctttccgcctgcgggcccagtgagtcgacacggtgggggcccgcgatccccgggacttaccactgaataaatccastccagcgtgcgacgacttactggcttcatggtaaggaggcggcagcagtccgcgggagctggcgggagctgcgggccttacagtaacctcccaggcggtg

SEQ ID NO: 346220 - DNA, 201 bp, Homo sapiens
aggggaattttaggaagggccaccaaaactggccagcggtcccagttggaacgctggtttaagaaatagttgggggaggggccaggcgcggtggctcacgygtgtaatcccagcactttgggaggccaaggtgggtggatcacaaggtcagaacttcgagaccagcctggccaacatggtgaaaccccgtctctactaaaa

SEQ ID NO: 346221 - DNA, 201 bp, Homo sapiens
gcagtgagtcgagattgggccaccgcactctccagcctgagcgatataacgagactctgtctcaaaaaaaaaaaaagaaaatagtgaattttttaggagcrtgtgctgccatggcagttttggagatgtccaagtggacatggcctgtcttatgtgttagaaacatgagattgttagttctaagaggaattagagttgggt

SEQ ID NO: 346222 - DNA, 201 bp, Homo sapiens
ttagctgggcttggtggcatgtgcctgtaatcccagctactcagaaggctgaggcagaagaattgctggaaaccaggaggcagaagttgcagtgagtcgasattgggccaccgcactctccagcctgagcgatataacgagactctgtctcaaaaaaaaaaaaagaaaatagtgaattttttaggagcgtgtgctgccatg

SEQ ID NO: 346223 - DNA, 201 bp, Homo sapiens
tttcctccctttccaagcaattattagattaaaatgttctttccttctcactttcggtttaagtccctgttttgtgtattcttgtaaaaaacaaaacaaamcaaaaaaaaacaggaagaaataccgtgaggtaacaattacagttcaaatgggaagtgagcacatttattttcaacctggctgtaaaacgtgttttgtgac

SEQ ID NO: 346224 - DNA, 201 bp, Homo sapiens
tttatgactgcaaaatctctagccttggaaattacaagtagggtattggaagggagggctttctgatgatgggatagaagtgaatattttagactgggtgyggtggctcatgcttgtaatcctggcactttgggaggctgaggcgggtggattgcttgagctcagaggttcgagaccagcctgggcaacatggtgaaaccc

SEQ ID NO: 346225 - DNA, 201 bp, Homo sapiens
tttacttattaaattcactatcttatatgggtgtgatttgtgttgcccctaaaatttgtagtagtaacatcaaaaatcactgagtgcagattaccataacmaatattaatataacaatagtgacaaagtttgaggccaggcatggtggctcacacctgtaatcccagcactttgggaggctgaggtgggcaaatcagctga

SEQ ID NO: 346226 - DNA, 201 bp, Homo sapiens
aaaatattgtcactagtttacaacttgaaatggatttcctcatagaaattagtatttaagtgataagaatgtagtgacctaataatactagggtaaatttggagtcatgaataggaagggagaaaacaattctgctcctttttaaaaacctgtatctcgtataaggtaaaaattcaaaatagacaaagcatatctttgtca

SEQ ID NO: 346227 - DNA, 201 bp, Homo sapiens
actccgtctcaaaaaagaaaaagaaaaaaacaaaaacttcattgctaaaaaatgctaatgatcatttgagccttagtgactatgtatgatctttttgctartggaaggtcttgcttccatgttgataactgctgactgatcagggtgatggttgttgcaggctggagtggctgtggcaatttcttaatataagatagcagg

SEQ ID NO: 346228 - DNA, 201 bp, Homo sapiens
tgcctcaacctcccaagtagctaggattacaggtatgtgccaccatgcctggctaatttttgtatttttagtagagacagggtttcgccatgttggtcggsctggtctcgaactcctgacctcaggtgatccacctgcctcggcctaccaaagtgctgggattacaggcgtgggcctccgtgcctggcctgaatcattttt

SEQ ID NO: 346229 - DNA, 201 bp, Homo sapiens
tgggactggattacagaggactcattttctaaatcatgtattttatgatacttgaatttttttgaaatgggcatttatttaatgacatgttataatgtactttttttttaaaaaagtgtaatatttgaatttttacatttgttgtgtaatcagcagaagcaataaagatttttcagaaaaaagaaaaatggcactgataga

SEQ ID NO: 346230 - DNA, 201 bp, Homo sapiens
actttgggaggctgaggcgggtggattgcttgagctcagaggttcgagaccagcctgggcaacatggtgaaaccccatctctactaaaatacaaaaaaatyagctgggcttggtggcatgtgcctgtaatcccagctactcagaaggctgaggcagaagaattgctggaaaccaggaggcagaagttgcagtgagtcgaga

SEQ ID NO: 346231 - DNA, 201 bp, Homo sapiens
gcacaagaattgcttgaacctggaaggcagaagttgcagtgtgcggagtttgcgccactgcactccagcctgggtcacagagtgagactctgtctcgggaaaaaaaaaaaaaaaagtgggggccaggcgcggtggctaacacctgtaatgccagcactttgggaggcagaggcaggtggatcacctgaggtcaggattttg

SEQ ID NO: 346232 - DNA, 201 bp, Homo sapiens
ggctgaggcacaagaattgcctgaacctgggaggcagaggttgcagtgagccaagattgcgccactgcactccagccttagcgacagagcaccctgcctcaaaaaaaaaaaaaaaaaaaaaaaaaaagtaggggatttctccttttgttttattgtgtaacattgatgtgtgttacagcctaggtagtctcaaaataggaa

SEQ ID NO: 346233 - DNA, 201 bp, Homo sapiens
aaaataaagccagagacacttctaaaggaagaaacacctgaagttggtggttgattaagttggggataaaaccaaagttcacagtcatttatgactgcaawatctctagccttggaaattacaagtagggtattggaagggagggctttctgatgatgggatagaagtgaatattttagactgggtgcggtggctcatgct

SEQ ID NO: 346234 - DNA, 201 bp, Homo sapiens
acagactactgtgaatcaggtgatcttcctcaatcttacagctgtgcctatcgaatatgaggttccaagattgtgatacaaagatacggcaggatgtctcrggggatgatttttaggatctaagcttagaagtagcttacatcacttctgctcaaattctgttagctaaaactcactgtcatcttcccaaatattatctgt

SEQ ID NO: 346235 - DNA, 201 bp, Homo sapiens
cagctttctggctttagcaacaggatggttggagatccccttcctggggtagggagcccagaaggaggaagaagccagggtaggagcaaaattgggtgaargaaaaggtgagtccaggtttgaatgagtacaactacagctatacttttttctttagtttacaaagaaaaggagtcggagccagggcggttatgtgggacg

SEQ ID NO: 346236 - DNA, 201 bp, Homo sapiens
agtcagtgaacttctgtcccttcgttcaggctgccaacgtcctttgcactgcatcagtaaactgctaactgctttccacttttctgcttttgccttccccrctagtccattcttgctcacagcagccacaatgaccttcataaaatgaacatcaaatatgtcacttcctaactaactcttcaggggtttttcaatgaatga

SEQ ID NO: 346237 - DNA, 201 bp, Homo sapiens
gagcgatgagatcagaaatgatgaggcctaaatagaagaaatggagagggagaaaaataaacacaaatataaaaacatgtaaagtcttcaggtagagtcaygatgacttgatgcagaggtagggaggaggaatgacttccagctttctggctttagcaacaggatggttggagatccccttcctggggtagggagcccaga

SEQ ID NO: 346238 - DNA, 201 bp, Homo sapiens
agaagccagggtaggagcaaaattgggtgaaggaaaaggtgagtccaggtttgaatgagtacaactacagctatacttttttctttagtttacaaagaaarggagtcggagccagggcggttatgtgggacgtggatgcagacgcaggcggaggcgccaactgcggggatggctagggtgatcacagctgccccgggggcg

SEQ ID NO: 346239 - DNA, 201 bp, Homo sapiens
tcacacctgtaatcccagcactttgggaggccgaggtgggtggatcacaaggtcaggagtttgagatcagcctggccaatatggtgaaaccccatctcttytaaaaaaaaaaaaaatacaaaaattacccgggtgtggtggcaggcacctgtagtcccagctactcaggaggctgaggcaggagaatcgccttaagccgcg

SEQ ID NO: 346240 - DNA, 201 bp, Homo sapiens
gtttgaatgagtacaactacagctatacttttttctttagtttacaaagaaaaggagtcggagccagggcggttatgtgggacgtggatgcagacgcaggyggaggcgccaactgcggggatggctagggtgatcacagctgccccgggggcgcggacaccccggcagctccggccagcggagctcccccaccgcacgtgt

SEQ ID NO: 346241 - DNA, 201 bp, Homo sapiens
cgcatcttatccctgcatcttgctttttttctcccggattgcccctcagttcatttagtgtacacagcactacaaaaaacaggtttccctgcctcttaccsctccattctttcctccctgcacaaaggagaaagcggactgtagtttaaaaagcaagtagcagtgctacagcaggttgtctgcagcaggagagatggcctt

SEQ ID NO: 346242 - DNA, 201 bp, Homo sapiens
agtttacaaagaaaaggagtcggagccagggcggttatgtgggacgtggatgcagacgcaggcggaggcgccaactgcggggatggctagggtgatcacarctgccccgggggcgcggacaccccggcagctccggccagcggagctcccccaccgcacgtgtcaggtcctagcagaaacgcagcgtctgtggccaagggc

SEQ ID NO: 346243 - DNA, 201 bp, Homo sapiens
ggcgagtggccctcaggcagagagatgctgagagagctggtccccacaggcataacttccaggatcctcagttggaccacggcccagagagaacccaattrgggcggacgctttttgatctgggaagtgggcaagattctttcagccaatccgttagagaggtgctggtgacgtcactggtcgcgatacagccggcctctg

SEQ ID NO: 346244 - DNA, 201 bp, Homo sapiens
gtccctggctccagatgccgaaccccaccaaagggtggttgggaaggatctcacagtgagcggcaggatcctggccgtccgctggaaagctgaagactgtygcctgctccgaatttcccttatcaactttctcgaccatctttctctggtggtgcggaccctgcagcactttgggcccccagtttcccgctaagcctggcc

SEQ ID NO: 346245 - DNA, 201 bp, Homo sapiens
gcgatgagatcagaaatgatgaggcctaaatagaagaaatggagagggagaaaaataaacacaaatataaaaacatgtaaagtcttcaggtagagtcatgrtgacttgatgcagaggtagggaggaggaatgacttccagctttctggctttagcaacaggatggttggagatccccttcctggggtagggagcccagaag

SEQ ID NO: 346246 - DNA, 201 bp, Homo sapiens
accctggacttgctattggtatcttaaattggaggtagtcttgtgagactgagcccttaacctgtgggatgtgcaataatgttggataattagtgtccacrctgaattaaattgtaggatacccagttggtatctgcagagaattagagaattgtttggtttgaagcccctccacccccaacatttggttcaaagtattat

SEQ ID NO: 346247 - DNA, 201 bp, Homo sapiens
ctgcctcccgggttcaagcgattctcctgcctcagcctcctgagtagctggggttacaggcgcctgccaccagcctggctaatttttgtatatttagtagrgacggggtttcaccatgttgaccaggctggtcttgaacttctgacctcaagtgatccacccgcctcagcctcccaaagtgctgggattacaggtgtgagc

SEQ ID NO: 346248 - DNA, 201 bp, Homo sapiens
ccctggacttgctattggtatcttaaattggaggtagtcttgtgagactgagcccttaacctgtgggatgtgcaataatgttggataattagtgtccacaytgaattaaattgtaggatacccagttggtatctgcagagaattagagaattgtttggtttgaagcccctccacccccaacatttggttcaaagtattatg

SEQ ID NO: 346249 - DNA, 201 bp, Homo sapiens
ggtttcaccatgttgaccaggctggtcttgaacttctgacctcaagtgatccacccgcctcagcctcccaaagtgctgggattacaggtgtgagccaccaygcctggcgaacgcaggaactttgttttgttcactgtggtagccccagctcctagagtgattcctgacatgtagaagttgctcagagttgaatgaatgaat

SEQ ID NO: 346250 - DNA, 201 bp, Homo sapiens
ttctactgttgggttaaactgccattttctaccacctaccatgatttctaataaactgccctttagatatttttgtgttaaatttcccacatctccaaatwtgggagtgaggccaggggtgtttgttcatacacacttgctggtggtggtagtggtggttcatcaagaaagtcctgtacttaccagactgagaggtcagtc

SEQ ID NO: 346251 - DNA, 201 bp, Homo sapiens
atacagctcaggaactgagctcttttagccaacaccagggccctatttattcctgattctgccctcccaatgtgataatgttcaaggcagggtgggtgaargttgggagcagtcaagttcatactgttaccatgggatggtggaattgagtcctgccctcctttccccagggacattgctcaatgggcagcaagatgtaaa

SEQ ID NO: 346252 - DNA, 201 bp, Homo sapiens
atcaagaaagtcctgtacttaccagactgagaggtcagtcctcaggtaaccttatgagtgctattggcttagactcctacatccaggttgtccctcagagyagaggcagggctggtaatggtgccagagtaggcctttgccatcagtttctgtgctgagcattgggaagacctaggcacaagccacagtggtatcagcatt

SEQ ID NO: 346253 - DNA, 201 bp, Homo sapiens
cagccacctgcaataacaggtgattgctaataggcctttaaggaaacaccacctgttcagctgccgcctgtagtgaagcttgttttctttagggaagatargagcaagtgcctggttctttgttgcatttgtgtttaactttttccaatctctttcagtacagttgaaagcagagtgtaacaagggatatgtcaaggtaaa

SEQ ID NO: 346254 - DNA, 201 bp, Homo sapiens
aagggactctgcactgaattagcagctactgactagggtctctttacactcctgttgggatattgcagttgggttgagtgcataggttggagttcagttayttttagctgccagatttagagccctaggggtgaggcctgatgtaaaagtctttcttcctggtggttgcccccacctgtcatttctttcatctccctgtta

SEQ ID NO: 346255 - DNA, 201 bp, Homo sapiens
ccagtcatttctgctatgggtagtcattttcctccttccctaaaatgttgggtgtttctgttgtttgtgactttggcatataaacaatgaaaaactgttcttttttttttttttagcttgaccaattttttttttatactttaagttctgggatacatgtgcagaacgtgcatgtttgttacataggtgtatactaagtgc

SEQ ID NO: 346256 - DNA, 201 bp, Homo sapiens
tgctgcacagatatgagactgaacaaaatgacttttaatagcccttcaaaatctcagactcttggtctagataatacgaactcctagataccatttggcawcgtttatttaaaaaaattcagttgataacattttgtgtatatacatcttctagataattattttaattcttcacctcaccttgtcaaatgtattctaact

SEQ ID NO: 346257 - DNA, 201 bp, Homo sapiens
gtttgatatttcatctgaatttccttccctgcacaaaaattcagatgcggatatgaattgttttgccccataatcttgttgtcagaaaaaaattgatgaarggaaactctcatggaaatagctttgattagttataaacaacttcagtgtgtcctataagcccatgatatgacatcaagatctactctgtaagattaaaaa

SEQ ID NO: 346258 - DNA, 201 bp, Homo sapiens
tatcaaaaaggtgagggtagtgtgattggtagatgatgtggagaagaaatgaaatataatgactgcttaattgttttgtacactttaaagttcagaaatgygtgaggggttattaaccatgatgaaagagtcacttgtttgtggcgtgaaaatcatttggatgaatgttcctttatgtgcttttttcttaaattcctgagg

SEQ ID NO: 346259 - DNA, 201 bp, Homo sapiens
agtcagtactgattcttttaagttgaggcataacttacatacaataaagtgcataataagatgcatagtttgatcagttttcataagcgtgtataatcttktcactatcattctgattaagatacagaagatgtctatcctttcatcccagaaagttcccttgtgcccctttccagttaatcctccctcaagcattgcttt

SEQ ID NO: 346260 - DNA, 201 bp, Homo sapiens
gaaaatttaggagggaaagtcacccataatcctgtttccctaatgcagagcccctgactaacagagcccttggccactgagcccttttcacgtagtgatcrtgatgcccatacctttttcctacagtgaatgttgtcgtgctaaggagaatgctcacagcaagagctgtggtaggtatatatgggaggcaaaatgagccaa

SEQ ID NO: 346261 - DNA, 201 bp, Homo sapiens
tcctgacacctccttcctcccaatctcggttgggtactctagcattgtgcttccaccctttgcacagagcaatcatcatgtttaccacatctactattaayataattgtttctgtgtttttctcctccacaagatttattttttttagatgaggtgttgctgtgttgcccaagctggacttgaacccctaggctcaagcaa

SEQ ID NO: 346262 - DNA, 201 bp, Homo sapiens
ccctgactaacagagcccttggccactgagcccttttcacgtagtgatcgtgatgcccatacctttttcctacagtgaatgttgtcgtgctaaggagaatrctcacagcaagagctgtggtaggtatatatgggaggcaaaatgagccaataagcaaagttgctatttatatacccttttatattactctgtatgatgtag

SEQ ID NO: 346263 - DNA, 201 bp, Homo sapiens
ttccattcccaggtatgcgcaggagacagaagccttcctcttatcccaactgcaaagaggcctccctctttcactactcctcctcagcacagacccttcarggatgtcgggctgggggatggtaaggtctttcccacaaggccatatctcaggctgtctcggttgggggaaaccttggacaatacccaggctttcttgggc

SEQ ID NO: 346264 - DNA, 201 bp, Homo sapiens
gggactacaggtacgtgccaccatgcctggctaaggctgagttttttgaaggctgggctcatatattatctctttattcccagtactagaatggcacaagwtacacaggagtgtagtaattttgactgaacgatcaaatgagtgaagccaaaagttatatgatgcagtggttaagaacccattctttggaattcaaattgt

SEQ ID NO: 346265 - DNA, 201 bp, Homo sapiens
aaacaagtaaaattatttttcctattgtaaaagtaatgttttcaattaagaaaatataaaaaattaagtatgaaaaagaacaaagacctttcataatactractgtagataactaaactatagaccttattttagataacttactaaactgtagaccttatttgaatttcacccatttttcctgtattgttctttttctac

SEQ ID NO: 346266 - DNA, 201 bp, Homo sapiens
acatggtgaaaccccgtctctattaaaaatacaaaaagtagtcaggtgtggtaatgcacccctgtaatcccagctgctcaggaggctgaggcaggagaatygcttgaacccatgaggtggagtttgcagtgagctgagattgcgccactgcattccagcctgggcaacagcaaaactctgtctcaaaaaaaaaaaaaaaaa

SEQ ID NO: 346267 - DNA, 201 bp, Homo sapiens
cttgtgtatttttcatttttgttaatgggcatcttccaaatttgaagtctttggtgagtgtctcgccttttttttttttcttgagatggagccttgccctrtcgcccaggctggaatacaatggtgcgatctctgctcactgcaacctccgcctcctgggttcaagcaattttcctgcctcagcctcccgagtaggtggga

SEQ ID NO: 346268 - DNA, 201 bp, Homo sapiens
gactgctgcgctagcagtgagcaaggctccgtgggcgtgggacccgccaagccaggcgcgggatataatctcctggtgtgccatttgctaagaccattggmaaagtgtagtatttaggcgggagtgtcccatttttccaggcacagtctgtcatggctgcccttggctaggaaagggaaatcccctgaccccttgggcttc

SEQ ID NO: 346269 - DNA, 201 bp, Homo sapiens
agtcccgcccttctcggccgctgccaccgccccgccgttacctgggcaacggcgcgggggcgcacgggtcgggaggagctgcgccgaaaggccttgtgggkgttggtgctagcgcggcttcccggcgctcgtggaatcttctggagcccttttctccactcagcgagcctgagagtgcggaagtctccggctggtggggca

SEQ ID NO: 346270 - DNA, 201 bp, Homo sapiens
tataggaaggctggctgggtgcagtggttcacgcctgtaatctcagcgctttgggaggccgaggtgggcagatcacttgagggtcaggagtttgagacctkcctggcaaacattgtgaaactccatgtctactaaaaatacaaaaattagctgggcctggtggtacacacatgcttgtaatcccagctactcgggaggctg

SEQ ID NO: 346271 - DNA, 201 bp, Homo sapiens
atattaccagcattcagaatgaaaactgttcttttcattctgtacacattgcctgagtgaacccatcagctggcttggttttaactacctcctacatgccsccaaattgaaattgtcagcttagacctctctgagctttaccctcacatctgactatcctcctggacagctctgcctgcaagtcccacagacacttcaaat

SEQ ID NO: 346272 - DNA, 201 bp, Homo sapiens
cttgtgccttttaaacttctgggtactttaagggaagttgcattaaccttagtatggttcctttcaggggagcatcagagataatacactgtgacagtagkactgtgctgccctggcattaacagtcagacatccctgtaatcccagcactttgggaggccgagacgggaggatcacctgaggtcaggagttcgagatcag

SEQ ID NO: 346273 - DNA, 201 bp, Homo sapiens
gcaacaagagcgaaactccatctcaaaaaaaaaaaaaaaaaaaaaaaaacaggcatcatccttgaggagcctttgagtcccacttcaattatattccttgytgacaaggggcaggtctaatagggctcactggaacccacgtgtacgtgtcacacagtctgccatgttggagtggagaaggatgcttttgaatttatgtct

SEQ ID NO: 346274 - DNA, 201 bp, Homo sapiens
agttcaggtttagaacatttccgtcattgcagaaaattctattggacagcactatttgaggttacctgatttctggccttgtgtggtctatcagatcactkgagttctttaaggaataatcagaatttctttctgacggatcccctcaactctagaatgaaagatatagagctgggccgggcgcggtggctcacgcctgta

SEQ ID NO: 346275 - DNA, 201 bp, Homo sapiens
aagcttccacctctctgcctgacttgcatgcaagctttgagttcccacttctgcctataattcagtcatatttggttctttgttcctctcaaaatataaaycttcgagagcctaatatatgaactagatgaagcagcttcattatcctcagataaagaattgtggtcagtggcttttatcagattcttcaaaagcgtctat

SEQ ID NO: 346276 - DNA, 201 bp, Homo sapiens
tgttgaaatagtattattttcacatagacagctggagctttgcttgtgaaaagaatgacaaagtaggagtgtctcggggttgtctgaatggtgtaaatgtrtagacattcaaatttgttgtcaagagggaccaaaccatgctcaggaaaatgccactggacgtccagtctgaagtgcagtaagaaagacaagtgggagaaa

SEQ ID NO: 346277 - DNA, 201 bp, Homo sapiens
tcaggccataatagaaatactatacgtctggcaaagaactattcagatatgtttaagagtagatactattcaccttctctccttcatttgggttcttatcwggatggtacttcaaggccagtttcctataagcctttttcaattcttcctgagtagcattgggtttgacccccaaaacatcgtagtaagttgtttctttca

SEQ ID NO: 346278 - DNA, 201 bp, Homo sapiens
atagggtgtgatgacttttctattaaaaacaagtctaagtaacaatacaaggaaactacttatctaggataaggactgtatctctaaacccaatagcaaayattgttctaaatagcaaaactctgaaatcatttcattgaaatcagaaattagaaaaggatgtccatgtgctattattatgttacattgtcaaagtaaggt

SEQ ID NO: 346279 - DNA, 201 bp, Homo sapiens
tctcccaagtagctgggactacaggcatgtgccaccacacctggctaatttttgtatttttttgtagagacggggtattgccatgctgcccaggctgggaraaacaggtcttcttttctggcggcagagtctgtgatcatgagcaggccaggggttctggaatagggaaacttgtggggattaattgaagctgcctcatag

SEQ ID NO: 346280 - DNA, 201 bp, Homo sapiens
atcctattcaaacagaggaaatagtagagctagtaaatcaacattacattgatttactaaaatattgattgagtacctactatatgtcagggtgttttctmggtcagtaaaacaatgttgactgtgacagacacaatcccttttctcatggagcttacgaatgagtggggcacagacattaacatttacacaagtatataa

SEQ ID NO: 346281 - DNA, 201 bp, Homo sapiens
tagctggtgtccactggagaatcatctgcagaactgtcttggtgtgtggggaaaaacccacacatccggtgtcacaaatgttgagtgactctgcgggagtmgagagtagaaaaaacacttaggttatttatgtaaccttacacttattaatacagatgcaaaaattctaaataaagtattaataaaaatcaagttatataa

SEQ ID NO: 346282 - DNA, 201 bp, Homo sapiens
gaccacggcccagagagaacccaattggggcggacgctttttgatctgggaagtgggcaagattctttcagccaatccgttagagaggtgctggtgacgtyactggtcgcgatacagccggcctctgacgtcatcccgcagcgccggaagcggtgaggcacagatgagtaacgtgaatttgtccgtctccgacttctggag

SEQ ID NO: 346283 - DNA, 201 bp, Homo sapiens
cttctgctggctgggctcaatgccgcgggtgagcgttcggccgaggctgctcctacccttgagtgatgtgccttgaatgacgctgctttcattcgctgctytcacggctgctttctccgtcctcccctgttactaccttgggctgtttcagcgggcgctcgcgttggtcttcgacccactttgcgtttgttcacgtgtgct

SEQ ID NO: 346284 - DNA, 201 bp, Homo sapiens
ccagtttcctataagcctttttcaattcttcctgagtagcattgggtttgacccccaaaacatcgtagtaagttgtttctttcaccatcttctactgcctraaataagaaaatgcaactttaaccggctttcaactggtagcttttaataaaaaagagagctaaggccgagcaatctctttgcaaaatccgattataagaa

SEQ ID NO: 346285 - DNA, 201 bp, Homo sapiens
acacacaggaagagaaagagatcaggcaacagtgattctatagaaagggatgctgctcaggaagctgaggctgggacagggctggaacctgggagcaactmtggccaatgctctgtgcccctaaagaagggaaaagatgcacctatcaaaaaggtgagggtagtgtgattggtagatgatgtggagaagaaatgaaatata

SEQ ID NO: 346286 - DNA, 201 bp, Homo sapiens
atgttccaccacgcctggctaattttgtattttttagtagagacagggtttctccatgttggccaggctgtcttgaactcccaacctcaggtgatctgccygcctcggcctcccaaagtgctgggattacaggcgtgagccaccacgcctggccaataactcaataaccacatggccgtaagtgttcatagaggtagctgg

SEQ ID NO: 346287 - DNA, 201 bp, Homo sapiens
caggtgatctgcccgcctcggcctcccaaagtgctgggattacaggcgtgagccaccacgcctggccaataactcaataaccacatggccgtaagtgttcrtagaggtagctggagatggctggaggcctggcaggagcaaagtaataagggcttgggcattatgctaaaaagtttgaattttgttttgaaggctcttgag

SEQ ID NO: 346288 - DNA, 201 bp, Homo sapiens
acacattttgtatatgttatcagggaatttatggagccactgacgtgcttccatagggtctgtggaccccagtttaagaatctcaagagaaaagggtcatyaccatgcatctgggatatacaggaggggtctcaggtcactgtggaggactggcgcccaccaccatgcctggctaatttttatatttttaatagagatgag

SEQ ID NO: 346289 - DNA, 201 bp, Homo sapiens
gtaaccagtactgattttccttagcgtctcctgttatccaaagcgaccacaacctacatgacagccccactagaagctttgaggtgacattctctggaatmtcgatttagctgtgcaacacttggcaaattgacttcctgttcctcggatttctcacttgtaaaacagacactgtaataccatctactttgtagggtgaat

SEQ ID NO: 346290 - DNA, 201 bp, Homo sapiens
taaaaatacaaacattatccaaggtgtagtggcacgtgcctgtagtcccagctactcgggaggctgaggcaggagaatcacttgaacccagcaggcagagkttgcagtaagctgagatcgtgccaccgcgctccagcctgggtgacagagtgagtcgtctcaaaaaaaaaaaaattaaataaaaaataaaattttggtttt

SEQ ID NO: 346291 - DNA, 201 bp, Homo sapiens
ccactcagcgagcctgagagtgcggaagtctccggctggtggggcatggcccaggagcactgcaagtcctagggttcccaaacctgtggggtggccgcctsggcccgcgagggcgggaagggctcgagtacagtgacccagtgggagctgtgtgtgaacgggaaagctcttggaacagtcttgccccccccccaccctctt

SEQ ID NO: 346292 - DNA, 201 bp, Homo sapiens
ttttcttgataatatttgctagatgtctgcttataaaacgctgttttttagaaaagtaggttttctttataactcttatttttgccttttcttttgctttwaaaaaaaacttttgagtcaaagttcatatactttaatattaagaattttcttttggctgggtatggtgacttacacctgtaatcccagcactttgggagg

SEQ ID NO: 346293 - DNA, 201 bp, Homo sapiens
cttcttaaatgtgttactaggcattttttgttgttgctgtcatggatggcctcttttcttaccattatattttatttcagtgggatatttcatactttctttttttttttttttttgagacagagtttctctctttttgcccaggctggagtgcaatggagccatctcggctcactgcagcctccgcctcccaggttcaag

SEQ ID NO: 346294 - DNA, 201 bp, Homo sapiens
tagtggcacgtgcctgtagtcccagctactcgggaggctgaggcaggagaatcacttgaacccagcaggcagaggttgcagtaagctgagatcgtgccacmgcgctccagcctgggtgacagagtgagtcgtctcaaaaaaaaaaaaattaaataaaaaataaaattttggttttcatttctgactcctggccagaggtcc

SEQ ID NO: 346295 - DNA, 201 bp, Homo sapiens
tggcactgaaagacttgcttgacacagatttgccacaaactgtcaatttgtaaaaaatgcaatatctttcaaatgtaatagagcagagcacaaagcaggtmtgccagtatgtatgtgtttcttggggaagagaggagagagagggatgggcaagtgggactagttctgtgaagaggaacgggaggtgaaatacataagcac

SEQ ID NO: 346296 - DNA, 201 bp, Homo sapiens
gtcagtactgattcttttaagttgaggcataacttacatacaataaagtgcataataagatgcatagtttgatcagttttcataagcgtgtataatctttycactatcattctgattaagatacagaagatgtctatcctttcatcccagaaagttcccttgtgcccctttccagttaatcctccctcaagcattgctttt

SEQ ID NO: 346297 - DNA, 201 bp, Homo sapiens
ggtattgccatgctgcccaggctgggagaaacaggtcttcttttctggcggcagagtctgtgatcatgagcaggccaggggttctggaatagggaaacttrtggggattaattgaagctgcctcatagggatcttggcaatagctaagggagtatgtacgctgttggacattttatggaaggatttaaacctttagaaatt

SEQ ID NO: 346298 - DNA, 201 bp, Homo sapiens
cctttcccgacccccttagaggtggaaattgcccatgggtccctggctccagatgccgaaccccaccaaagggtggttgggaaggatctcacagtgagcgkcaggatcctggccgtccgctggaaagctgaagactgttgcctgctccgaatttcccttatcaactttctcgaccatctttctctggtggtgcggaccctg

SEQ ID NO: 346299 - DNA, 201 bp, Homo sapiens; identical to SEQ ID NO: 73268

SEQ ID NO: 346300 - DNA, 201 bp, Homo sapiens
ttttatttgctgtcatcaggtaccaggcacagaaactcttgaaaattgtctgggcacggtggctcacgcctgtaatctcagcactttgggaggccgaggcrggcagatcacaaggtcaggagatcgagaccatcctggctaacatggtgaaacaccgcctctactaaaaatacaaaaaaaaaattagccgggcatggtggc

SEQ ID NO: 346301 - DNA, 201 bp, Homo sapiens
cagtgagaacagaagtctttggggacaaaagtcctgtgctagatttgccaagagaaatatcaactgatctctttaaaatgagatccctcccaccccctacwtggggcctggaaaatgtggtctgctaggtatggagacaccaaataaacagtactgaggctccctgtgtgtcagtcaccacccctggcaaatgccaaaatg

SEQ ID NO: 346302 - DNA, 201 bp, Homo sapiens
catgtaaagtcttcaggtagagtcatgatgacttgatgcagaggtagggaggaggaatgacttccagctttctggctttagcaacaggatggttggagatscccttcctggggtagggagcccagaaggaggaagaagccagggtaggagcaaaattgggtgaaggaaaaggtgagtccaggtttgaatgagtacaactac

SEQ ID NO: 346303 - DNA, 201 bp, Homo sapiens
tttcctgtggcttatgcccagaaggattcagaaaggaatgactgatttctttcaaagaatacaagcaaggtggatctccgtgatttctttgatttaagcartaagatgataagtctagattttagagtttttattttgtttttaaaaaactgtgatataatatacataacaaaatttacattttagtcatctttaagtgta

SEQ ID NO: 346304 - DNA, 201 bp, Homo sapiens
gaggcctaaatagaagaaatggagagggagaaaaataaacacaaatataaaaacatgtaaagtcttcaggtagagtcatgatgacttgatgcagaggtagrgaggaggaatgacttccagctttctggctttagcaacaggatggttggagatccccttcctggggtagggagcccagaaggaggaagaagccagggtagg

SEQ ID NO: 346305 - DNA, 201 bp, Homo sapiens
gctgagagagctggtccccacaggcataacttccaggatcctcagttggaccacggcccagagagaacccaattggggcggacgctttttgatctgggaastgggcaagattctttcagccaatccgttagagaggtgctggtgacgtcactggtcgcgatacagccggcctctgacgtcatcccgcagcgccggaagcgg

SEQ ID NO: 346306 - DNA, 201 bp, Homo sapiens
atcagttttcataagcgtgtataatcttttcactatcattctgattaagatacagaagatgtctatcctttcatcccagaaagttcccttgtgcccctttscagttaatcctccctcaagcattgcttttatttccttcagcatagatagtttttgtctcttctagagctaccatgtataaatggaatcatacattgcata

SEQ ID NO: 346307 - DNA, 201 bp, Homo sapiens
gaaggtgggaggatacataccataaatgtttatgggacaggtgatacctcatttaaaatctgctgtctattatttatcagaaattgcacttgagctttatktctttcatttcatcatcttagcaaccctgtaaagtaggtatcttcacttccatttcacagatagtgttgctggggcttagaaaatgataaccccaaataa

SEQ ID NO: 346308 - DNA, 201 bp, Homo sapiens
ataaatcagatagtagcactcttcggctgaaaatccttcaatggcttcccagtagattcagaatagaatgcaaaccctttgtcacctttaagaggctttaygacctggctcctgcctcgtttctgctgcttggctccaacaattcaggccatacatttgggccatattaccttctttctctttcttggttgcactgagctt

SEQ ID NO: 346309 - DNA, 201 bp, Homo sapiens
gagtgtgtcctgaaggagtgtattatttcaaaggtgggttgctcatatttataatctgattaagctcattttgcctgagggaagtctaaactaagcttacrgagctgtagaatacctggcctggcatactgattggagtcacgtttttgatttttttttttttttttggtatctcatattggttttccagagtagctggga

SEQ ID NO: 346310 - DNA, 201 bp, Homo sapiens
tttttttttaggaatccctgggccactggagtcaaggcttgaagatttctatgcaggaccccaaaatgcaggtcagaatacaattttggaatttcagtacmtttcatgttgtaaatgaccactccacagaggtcttaattacaaatgaaatcaaaggatatcagtctttctgaatgagattcattttattgggctgttctg

SEQ ID NO: 346311 - DNA, 201 bp, Homo sapiens
ataatctgattaagctcattttgcctgagggaagtctaaactaagcttacggagctgtagaatacctggcctggcatactgattggagtcacgtttttgatttttttttttttttttggtatctcatattggttttccagagtagctgggatttgacttttcttccttgcctgcagctgtgatcgagatggtacaagaggc

SEQ ID NO: 346312 - DNA, 201 bp, Homo sapiens
ttgggcccccagtttcccgctaagcctggcctgggaaaatggggcgaggtctaaccttgcgtctcctcctaggcagtgcatccatcctccctagggcaggkaattcccacagttgctactttcccgggagggcctcatggtcggcctgtactgcctttgtgtgctcaggggtcccttgttttctctggttcttaaatgttt

SEQ ID NO: 346313 - DNA, 201 bp, Homo sapiens
caaagcaagagggtcaataggtcaaatactaaaatgtgttccctccagctggccaggcattaggaaagagacccaagatgtgggagggaggccccaatagrtatctgaatcccccacatccccgcagtagctcaaagcctctatgtcccctttatgtgaatgagaaaaggcatgccctgcaagcagaagcttttagctcac

SEQ ID NO: 346314 - DNA, 201 bp, Homo sapiens
cctttctaactccaaggaaaccatcagcagaggccccctacttcctgcctgtgtctgtctgccagtatgcagacaccatgagataggagcagtgctcaaaraactatgcatttgctttggtatcttaatcccaaatccacttcaagatttgggggaaaatgagcaacctccagtgttaagtgtgaaaagtcagttctttgt

SEQ ID NO: 346315 - DNA, 201 bp, Homo sapiens
gaaaatacaggccgggcgtggtggctcacacctgtaatcccagcactttgggagactgaggcaggcagatcatgagatcaggagttcaaggccagcctggccaacatggtgaaaccctgtctctactaaaaatacaaaaattagcagggcatgatggtgtgcggctgtaatcccagctactcgggaggctgaggcaggaga

SEQ ID NO: 346316 - DNA, 201 bp, Homo sapiens
ttatgtttcactttacacaaacatctcagtgtagcaaagagtaacagagcagtattgctgccagcatatctcgcctccagccacagggtggttttctcctwtctcagaatagaacgaatgggaatggtcggctttaaaccgagacattccattcccaggtatgcgcaggagacagaagccttcctcttatcccaactgcaa

SEQ ID NO: 346317 - DNA, 201 bp, Homo sapiens
ctttgggagactgaggcaggcagatcatgagatcaggagttcaaggccagcctggccaacatggtgaaaccctgtctctactaaaaatacaaaaattagcrgggcatgatggtgtgcggctgtaatcccagctactcgggaggctgaggcaggagaatcacttgaacccgggaggtggaggttcagtgagctgagatcgcg

SEQ ID NO: 346318 - DNA, 201 bp, Homo sapiens
aggtggaggttgcagtgagccaagatcgtgccactgcactccagcctgggtgacagagtgagactccatctcaaaaaaaaaaaaaaaaaaatcttaatcaraagctgtgtgtggtggttcacacctgtaattccagcactttgggaggccgagtttggaggactgcttgaggccaacagtttgagaccagcctgggtaaca

SEQ ID NO: 346319 - DNA, 201 bp, Homo sapiens
cttcccctcagttgctcccgttccctcttcatgcccagagatcagtccagtggcttggtctgggacctgtaatgaacgctgccagccttaggctcagagcrtaagtatttttccttctctgggcctgtctctgagatacccaggtacaaatggtccttgtagggactagatcatacttgagatggtagttaaggatgtctt

SEQ ID NO: 346320 - DNA, 201 bp, Homo sapiens
ggaattaccatataatccagcagtttcacttctgtgtatatattcaaaataattgaaagaagaatttttaaaaattgtttcacattaaaaacaaatttcartggctttaggggtacaaatggtttttggtttcatggatgaattgtataatggtgaagtctgaaattttagtgtacctgtcacccgagtaatagttacacc

SEQ ID NO: 346321 - DNA, 201 bp, Homo sapiens
atactaagtgccatagtggtttgctgcacccatcaacctgtcatctacattaggtatttctcctaatgctatccctcccctagcccctcaccccctgacasgccccagtgtgtgatgttcccctccctctgcccatgtgttctcattgttcaactcccacttatgagtgagaacatgtggtgtttggttttctgttcctgt

SEQ ID NO: 346322 - DNA, 201 bp, Homo sapiens
agagaccgttttctttgcacatccataagaagcaactcctcatccattaaagtatgatcatgagattgcagcatttcagtcacatcttcaggttctacttrtaattttagttctctttatttctgctatattgggagtgacttcctccattgaagtcttgaacccctgaaagtcatccataagggttggaatcaacttttt

SEQ ID NO: 346323 - DNA, 201 bp, Homo sapiens
acctcctggggctcaagtgattctcccacctcagtctcccaagtagctgggactacaggcatgtgccaccacacctggctaatttttgtatttttttgtaragacggggtattgccatgctgcccaggctgggagaaacaggtcttcttttctggcggcagagtctgtgatcatgagcaggccaggggttctggaataggg

SEQ ID NO: 346324 - DNA, 201 bp, Homo sapiens
aaccattactaccatctatctccagaactgttttctcttcccaaattgaaactctgtaccttaaataataactctccatttccccctcccactcctggcamccaccattgtactttccttccctgtgaatttgactactctaggtacctcatattagaggaatcatacaaggacatatttgtccttttgtgactggcttat

SEQ ID NO: 346325 - DNA, 201 bp, Homo sapiens
ggtggtgggcacctgtaatcccagctacttgggaggctgaggcaggagaatcacttcggaggttgcagtgatcacgccgctgcactccagcttgggtgagrcagagtgagactttgtctcaaaaaaaaagagaatataggaaggcaatggagtgaagcagagtcaagtgaatcttgtttaattctcaaaaactaagcttat

SEQ ID NO: 346326 - DNA, 201 bp, Homo sapiens
caagtttagttgtgctatcacacagtattaactgttgccaaatttaattattggcatttgtaatttacattgcttgtttttttttttttttgttttttttktttttttttaggaatccctgggccactggagtcaaggcttgaagatttctatgcaggaccccaaaatgcaggtcagaatacaattttggaatttcagtac

SEQ ID NO: 346327 - DNA, 201 bp, Homo sapiens
caacagtgattctatagaaagggatgctgctcaggaagctgaggctgggacagggctggaacctgggagcaactctggccaatgctctgtgcccctaaagragggaaaagatgcacctatcaaaaaggtgagggtagtgtgattggtagatgatgtggagaagaaatgaaatataatgactgcttaattgttttgtacact

SEQ ID NO: 346328 - DNA, 201 bp, Homo sapiens
catgttggccaagctggtctcaaactcctgagctcaagtgatcttcccacctcagcctctcaaagtgctgggattacaggcgtgagccactgcgccaggcttttttttttttttttttaaatattttaccaaccaagaagaagcattgtagttctggcagccacaagttgaaagctgacacaacccactgcccccaccccc

SEQ ID NO: 346329 - DNA, 201 bp, Homo sapiens
gaggcaggagaatcacttgaatccgggaggtggaggttgcggtgagctgagattgcgccattgtactccagcctgggcaacaagagcgaaactccatctcaaaaaaaaaaaaaaaaaaaaaaaaacaggcatcatccttgaggagcctttgagtcccacttcaattatattccttgttgacaaggggcaggtctaataggg

SEQ ID NO: 346330 - DNA, 201 bp, Homo sapiens
gggcacatttcacaataatccaaacattcatttctgtcacaatatattttttgaagctttcacttcgtaccgtattgagcaacatggccaattacttcatscaaaaattctgtagcacagtaaattctcattaatcaagattggccagggaagctgatgtatttattgagtcaccacagaagagtatcaatttctacttct

SEQ ID NO: 346331 - DNA, 201 bp, Homo sapiens
cacccctggcaaatgccaaaatgcctcactttgctcgaggaatttacaactcaaggtgtttgtgtcacaggccaagacgggagtggaggatctgtccatcrgaggacagaatgcttcccctatgccaaggcgcctcctcttgtattcacgcacagcattttcctgaaactggttactgagcctggaatttctgttaacgtt

SEQ ID NO: 346332 - DNA, 201 bp, Homo sapiens
tctcccgcctcagcctcctgagtagctaggactataggtgcatggcaccatgtccagctaatttcaatttttaaattttttgtcgagatgaggtctcactrtgttacccaagctggtctcaaactcctaccctaaagtgattctgatccttccccaccccaccagcctcccaaagtgttgggattacaggtttgagccacc

SEQ ID NO: 346333 - DNA, 201 bp, Homo sapiens
aatactatacgtctggcaaagaactattcagatatgtttaagagtagatactattcaccttctctccttcatttgggttcttatcaggatggtacttcaargccagtttcctataagcctttttcaattcttcctgagtagcattgggtttgacccccaaaacatcgtagtaagttgtttctttcaccatcttctactgcc

SEQ ID NO: 346334 - DNA, 201 bp, Homo sapiens
caccattgcactccagcctgggcgacagagcgagactccatctgaaaaaacaaacaaacaaacaaaacaacaacaacaacaacaacaacccataaaacagsatggaaagctcctttaataaagccagcacagctttcatagttcaatcaggtacagaggatgcaaagaaaagggtatcatagactaatttcacttgcacat

SEQ ID NO: 346335 - DNA, 201 bp, Homo sapiens
gcgggaaggagcgccgagctgtgcgcagccggggtagttaccgctcctccgcctctcaccgagcgttctggaaagttccgcccggcgcgccgcagccgtcstcttttgtagccgaacccgggcgcgtcacccgccggaagtcccgcccttctcggccgctgccaccgccccgccgttacctgggcaacggcgcgggggcgc

SEQ ID NO: 346336 - DNA, 201 bp, Homo sapiens
taggaaattgcaactaattggatatagccatagctaagggagctagaatagccggaggtgaggcttcaaagctagttagggcatgcctttgtctgttggtrtatatgctacgctaagaattttgaactttatccttggaagcatcctcatgctgcctcttcagccttttctctttcattaattttaactgtgcattccagt

SEQ ID NO: 346337 - DNA, 201 bp, Homo sapiens
attgtgactcttcctttttggcctttttcttctctccaccttccccttcatcagtccagcattataaatataaatctgttgtcccaggtttacaggttacrtctagtactttcattgtttcccctttttttttttttttttaaattaacagccttgatgtgttgcccaggctggcctcgaactcctaggctcaagtgattc

SEQ ID NO: 346338 - DNA, 201 bp, Homo sapiens
aacttgtggggattaattgaagctgcctcatagggatcttggcaatagctaagggagtatgtacgctgttggacattttatggaaggatttaaacctttaraaattggtaggatttggagctccagccacctgcaataacaggtgattgctaataggcctttaaggaaacaccacctgttcagctgccgcctgtagtgaag

SEQ ID NO: 346339 - DNA, 201 bp, Homo sapiens; identical to SEQ ID NO: 73266

SEQ ID NO: 346340 - DNA, 201 bp, Homo sapiens
gatcatagttactatattagatactcgatttcaggccataatagaaatactatacgtctggcaaagaactattcagatatgtttaagagtagatactattmaccttctctccttcatttgggttcttatcaggatggtacttcaaggccagtttcctataagcctttttcaattcttcctgagtagcattgggtttgaccc

SEQ ID NO: 346341 - DNA, 201 bp, Homo sapiens
tgaggtactcacacactagaatgtcgaggatagttttatttaaatcagtattacacattttgtcatgctgtctgctcaccctcatgtagactcagcttagyttagtctttatatacataagaccccctacataagaaaaacttaaagcaaagatggtgcgttcctctgcttgccttctgagggtgctgtactctggaaggg

SEQ ID NO: 346342 - DNA, 201 bp, Homo sapiens
cctatctcttctgctggctgggctcaatgccgcgggtgagcgttcggccgaggctgctcctacccttgagtgatgtgccttgaatgacgctgctttcattsgctgctctcacggctgctttctccgtcctcccctgttactaccttgggctgtttcagcgggcgctcgcgttggtcttcgacccactttgcgtttgttcac

SEQ ID NO: 346343 - DNA, 201 bp, Homo sapiens
tggtgggggcagtcttgtgggactgagccctcacctgtgggatgcaatctccaggtggatagtgtcagagttaaattgaattggcagccatctagctggtrtccactggagaatcatctgcagaactgtcttggtgtgtggggaaaaacccacacatccggtgtcacaaatgttgagtgactctgcgggagtagagagtag

SEQ ID NO: 346344 - DNA, 201 bp, Homo sapiens
gttatataataataatatactgctatagagtattttaattatgccctattctatatatttcaggtgtacaggctggttcactatcaagacatctattaccrttagtaatgaattatgataatactataaaggaaaaaccatatgatcctgtcaatatacactggaggaacattttataaaatttaatagccattcctaata

SEQ ID NO: 346345 - DNA, 201 bp, Homo sapiens; identical to SEQ ID NO: 73265

SEQ ID NO: 346346 - DNA, 201 bp, Homo sapiens
ttatgtgggacgtggatgcagacgcaggcggaggcgccaactgcggggatggctagggtgatcacagctgccccgggggcgcggacaccccggcagctccrgccagcggagctcccccaccgcacgtgtcaggtcctagcagaaacgcagcgtctgtggccaagggccaggaatgcggccgcacatattcaccctcagcgt

SEQ ID NO: 346347 - DNA, 201 bp, Homo sapiens
ttcaaaataattgaaagaagaatttttaaaaattgtttcacattaaaaacaaatttcaatggctttaggggtacaaatggtttttggtttcatggatgaaktgtataatggtgaagtctgaaattttagtgtacctgtcacccgagtaatagttacacccaatatgtagttttttaaaatctctcatcttcctcccactct

SEQ ID NO: 346348 - DNA, 201 bp, Homo sapiens
ttcacattaaaaacaaatttcaatggctttaggggtacaaatggtttttggtttcatggatgaattgtataatggtgaagtctgaaattttagtgtacctrtcacccgagtaatagttacacccaatatgtagttttttaaaatctctcatcttcctcccactctctccacttctgaatctccaatgaacattataccact

SEQ ID NO: 346349 - DNA, 201 bp, Homo sapiens
ctcaaactcctgagctcaagtgatcttcccacctcagcctctcaaagtgctgggattacaggcgtgagccactgcgccaggcttttttttttttttttttwaatattttaccaaccaagaagaagcattgtagttctggcagccacaagttgaaagctgacacaacccactgcccccacccccaactagtactgtttgaca

SEQ ID NO: 346350 - DNA, 201 bp, Homo sapiens
gcctatctcttctgctggctgggctcaatgccgcgggtgagcgttcggccgaggctgctcctacccttgagtgatgtgccttgaatgacgctgctttcatkcgctgctctcacggctgctttctccgtcctcccctgttactaccttgggctgtttcagcgggcgctcgcgttggtcttcgacccactttgcgtttgttca

SEQ ID NO: 346351 - DNA, 201 bp, Homo sapiens
tcaagcaattctcctgcctcagccccgcgagtagctgggattacaggcatctgccaccatgcctggctaattttcgtgtgtgtatatatatatatatatayacacacacacacatatatgtatatacacacacacatgcatatatatatacacatatatatacacacacatgtatctacacatacatacacatatatatat

SEQ ID NO: 346352 - DNA, 201 bp, Homo sapiens
caatggttgaactagtttacactcccaccaacagtgtaaaagcattcctatttctccatatcctctccagcatctgttgtttcctgactttttaatgatcrccattctaactggtgtgagatggtatctcattgtggttttgatttgcatttctctgatgaccagtgatgatgagcattttttcatgtgtctattggctgc

SEQ ID NO: 346353 - DNA, 201 bp, Homo sapiens
tagattttctagtttatttgcgtagaggtgtttatagtattctctgatggtagtttgtatttctgtgggatcagtggtgatatcccctttatcattttctrttgtgtctgtttgattcttctctcttttcttctttattagtcttgctagtggtctatcagttttgttgatcttttcaaaaaaccagctcctggattcatt

SEQ ID NO: 346354 - DNA, 201 bp, Homo sapiens
tttcacatagtcccatatttcttggaggctttgtttgtttctttttactcttttttctctaaacttctcttctcgcttcatttcattcatttgatcttcartcactgataccctttcttccacttgattgaattggctactgaagcttgtgcatgcgtcacgtagttctcgtgccatggttttcagctccatcaggtcatt

SEQ ID NO: 346355 - DNA, 201 bp, Homo sapiens
catccttctgcacttgccatattgtaaaacactccatttctaaaagttggaattggaggctgaaacgggtgaagttactatttaaggttggttacataacygttgtgcagtcactacttcagcttctcaggaagtagtaaaaaggaacaccataacttgagaactttgggggaataaagtatctgtattgatggagggcag

SEQ ID NO: 346356 - DNA, 201 bp, Homo sapiens
aggcagatcatgagatcaggagttcaaggccagcctggccaacatggtgaaaccctgtctctactaaaaatacaaaaattagcagggcatgatggtgtgcrgctgtaatcccagctactcgggaggctgaggcaggagaatcacttgaacccgggaggtggaggttcagtgagctgagatcgcgccattgcactccagcct

SEQ ID NO: 346357 - DNA, 201 bp, Homo sapiens
attttttttcccttttcttttctttattattattttttttagagacagagtatcgccctgttacctgggctggagggctggagtgcagtggcataatcatratttactgcagccttggacttctgggctcaagcagtcctctttcctcagtctctcaagtagctgggatcacgggcacataccaccgtgcccggctaagtt

SEQ ID NO: 346358 - DNA, 201 bp, Homo sapiens
tattttatgctgtcacttatgagaccttgttttcatttgtcatttctgtttccagtcgtgtataaacaaggccaggtttctcagatctctgacacttcccsttgccgaagaaagaaaaactccttggtggtccattataactttagctgtcatccaataactttctttctctttatatccaaactgttttagtgagtattc

SEQ ID NO: 346359 - DNA, 201 bp, Homo sapiens
ttttttttcccttttcttttctttattattattttttttagagacagagtatcgccctgttacctgggctggagggctggagtgcagtggcataatcatartttactgcagccttggacttctgggctcaagcagtcctctttcctcagtctctcaagtagctgggatcacgggcacataccaccgtgcccggctaagtta

SEQ ID NO: 346360 - DNA, 201 bp, Homo sapiens; identical to SEQ ID NO: 73270

SEQ ID NO: 346361 - DNA, 201 bp, Homo sapiens; identical to SEQ ID NO: 73271

SEQ ID NO: 346362 - DNA, 201 bp, Homo sapiens; identical to SEQ ID NO: 73272

SEQ ID NO: 346363 - DNA, 201 bp, Homo sapiens
agccataaagaggcaaagcccattttagctttactcaaaagctaaaaagtacactgcttggccacacaagatgtccctggacagggtatgtgggaaaaccrtgccccggacaagtccatggaagggactcctttctcctgctcgtcaaagttgccccagaggatttaaccctgacttctttacccagaagtaggggagaag

SEQ ID NO: 346364 - DNA, 201 bp, Homo sapiens; identical to SEQ ID NO: 73275

SEQ ID NO: 346365 - DNA, 201 bp, Homo sapiens
cgcaaggtgttattgttgtgggaaactggataaaggatacacggagtctgcattttcttttttttatttttattttttgagacggggtctcactctgtcawccaggctggagtgcagtggcccaagtatggctcactgcagcctcgacctcaacctcaagtgaacctcccacctcagcctcccaagtagctaagaccacag

SEQ ID NO: 346366 - DNA, 201 bp, Homo sapiens; identical to SEQ ID NO: 73276

SEQ ID NO: 346367 - DNA, 201 bp, Homo sapiens; identical to SEQ ID NO: 73277

SEQ ID NO: 346368 - DNA, 201 bp, Homo sapiens; identical to SEQ ID NO: 73278

SEQ ID NO: 346369 - DNA, 201 bp, Homo sapiens
cttgggcccagcaggctcactgtctgaatgatttccagtaaacagaattttctagaccactggacagtgaacgctcagggctcagagagaagctttactgyggagtatctgcagactttgctgacaggcccctcatggtccttcctggtcactgtcaccccccaaccctgctcacctcctccactccagctgtactgagtt

SEQ ID NO: 346370 - DNA, 201 bp, Homo sapiens; identical to SEQ ID NO: 73279

SEQ ID NO: 346371 - DNA, 201 bp, Homo sapiens; identical to SEQ ID NO: 73280

SEQ ID NO: 346372 - DNA, 201 bp, Homo sapiens; identical to SEQ ID NO: 73281

SEQ ID NO: 346373 - DNA, 201 bp, Homo sapiens; identical to SEQ ID NO: 73282

SEQ ID NO: 346374 - DNA, 201 bp, Homo sapiens
gaacatgttactgatatgtacaacttggataatggaaataatgctgagtgaaaaaaaaatccccaaaggctacatactaattgattccatttatataaccttttttttttttttttgagacagtctcactctgtcacccaggctggagcacagtggcgcgatctcagctcactgcaacttccgcctcctgagttcaagcga

SEQ ID NO: 346375 - DNA, 201 bp, Homo sapiens
ccatgttggccaggctggtctcgaactcctgacctcaagtgatctgcctgccttggcttcccaaagtgctgggattacatgagtgagccaccgcacctggycgcatttatgtaacaattttgaagtgaaaaaaaaaatgacagaaatggagattagatgagtagttgccaggggttagttgtgggagggagggaaaaggag

SEQ ID NO: 346376 - DNA, 201 bp, Homo sapiens; identical to SEQ ID NO: 73283

SEQ ID NO: 346377 - DNA, 201 bp, Homo sapiens; identical to SEQ ID NO: 73284

SEQ ID NO: 346378 - DNA, 201 bp, Homo sapiens
gttcatagcaaccctgctggaaataggaaaaaaaattggaaataacctaaactactcacaataggaatcagctaaaaccctgggggtttaattccagggartactgtgaacaatgacaagtttgtggactgagtaaaaataaacagctgtcaatgacttaacattaaatgaaacagcagaagatgtcacagcaggttctcg

SEQ ID NO: 346379 - DNA, 201 bp, Homo sapiens
ccctggtggaagatacattttgttattggtgctaatgccctcttccccaaactcagcagataaggccatatcatcccaaagctgtgacctggtctggtttmctgttgatctctttatggggtaccattccaaaatccctaatagcagtgtccagcccaaactgcccacatacctatttgtattctattcttgtgagatacg

SEQ ID NO: 346380 - DNA, 201 bp, Homo sapiens
aaactgcccacatacctatttgtattctattcttgtgagatacgtagtggccaaagtccagtttctttctgaaggttgtgctttgcctgtgattagagacrataacagggtaggccagataatccagggaattgttcatcttctcttcctagtctcacttcagaaatgaggtacccagactcctctgtgaggtgcctagct

SEQ ID NO: 346381 - DNA, 201 bp, Homo sapiens
accaccacacccggctcacttttgtatttttagtagagacggggtttcaccatgttggccaggctggtcccgaactcctgacaggtgatccacctgcctcrgcttcccagagtgctgggattacaggtgtgagccactgcacccgaccttagataaattattttgtaacctcccatagttctgttggggccacttactccc

SEQ ID NO: 346382 - DNA, 201 bp, Homo sapiens
ctcaaggagaaggcactgttatccccattttacagagagggaaactgaggcacagaaaggttaaatggcttgcttaaggttgcctggctagtacctgggcwggatgcagacccagttagtctggttccagagcccatctgtaaccagttggctatgtacacccccaccacagcttagggagcatggggccaaatggaatgg

SEQ ID NO: 346383 - DNA, 201 bp, Homo sapiens
gctcaaaagaatggtaagggacctcccaccaggaaaagatgggaggcagctctgactggactgtccctctggaaaacaggcccacaacaggtctcttcttrgaaactcccttgtttcccatcttctggggtgaacgacagagctgtaggtctctctctgctcacctggctggctgtcaagtggccccgtgtgtcacaggat

SEQ ID NO: 346384 - DNA, 201 bp, Homo sapiens
ttgtcctcaaacaatctgtcttcaatgaaagattcctctggccttcctttctcttcttgcacctcaggtgtgaatccttctcccccacgcctctacctgcscccccgccccccgccccggccctgtgtggctcattatatgcagggccaaggcagcattttctcttagcttctttgtgaccacttggtcctgggatggctt

SEQ ID NO: 346385 - DNA, 201 bp, Homo sapiens
caggtctcttcttagaaactcccttgtttcccatcttctggggtgaacgacagagctgtaggtctctctctgctcacctggctggctgtcaagtggccccrtgtgtcacaggatgtgcaactcattcacaccatggcagccccagggtcctcgcgtttgactgcactttggctggaggttggtttccagttgcttacacgt

SEQ ID NO: 346386 - DNA, 201 bp, Homo sapiens
cctcagcgcttactttgaaagggctgccgacttcattgaccaggctttggctcaaaagaatggtaagggacctcccaccaggaaaagatgggaggcagctytgactggactgtccctctggaaaacaggcccacaacaggtctcttcttagaaactcccttgtttcccatcttctggggtgaacgacagagctgtaggtct

SEQ ID NO: 346387 - DNA, 201 bp, Homo sapiens
gctgtcatcacttcccaagtggaaaccaaggttgtacacgtctggtgtagccagagtggcaattgctgatggccactgtagaaaatacatcccttgccctstaagcacctctgaccttgacttggccaggggtgtgggggttcctcaacagggaggatcagtgagcaccaagcaccaagaggatttgggctccattccctt

SEQ ID NO: 346388 - DNA, 201 bp, Homo sapiens
agggaaaaggaggctggagggtcatagacaaggggaggtggtgcggagggccagcttctcacaacactaccggctctgctgggagagatagatcacccccracaatggccacagctgttttcatctgccctgaaggaaactgacttaggaagcaggtatcagagagggcccttcctgagggggcttctgtctggcttgtaa

SEQ ID NO: 346389 - DNA, 201 bp, Homo sapiens
tgcaaatgaacagtccctaaacatatccccttcccccagatgccttaaattccactattggtgctatgttcctttgaataaaaaaccttagagaaagtagktgccttttcctcccagacagaagtctgggcagagaaagcctctcgaggttcccattccctctatcacatgaagcaattggactcgcttcctatttgtcaa

SEQ ID NO: 346390 - DNA, 201 bp, Homo sapiens; identical to SEQ ID NO: 73286

SEQ ID NO: 346391 - DNA, 201 bp, Homo sapiens
gaaggccacaaagcagacatcagctgagcaggctgggccacttgccctttctccctttctgcttttagctgtttctctcagctcctccctttacctcttcstctctccccaccccaaaccctcccagcggaggggacccccatgaggtgtgaacagccttggctgtactacactgatgactcttgggcccagcaggctcac

SEQ ID NO: 346392 - DNA, 201 bp, Homo sapiens
atgaaggtgatggtattagggggtgggcctttgagagctgattaggtcaccctaatggaattagtgtccttatgaaagaagcctctttctccttctgcccygtgaggttacagtgaaaagatggttgtctatgaagcaggccctcctcagatgccgaatttactggcaccttgatctttggacttccttgcctctagaact

SEQ ID NO: 346393 - DNA, 201 bp, Homo sapiens
aaccccgtctctactaaaattacaaaaaattagccaggcgtggtggtgcatgcctgtagtcccagctactcgggaggctgaggcaggagaatggtgtgaayccgggagacggaggttgcagtgagccgagattgcgccactgcactccagcctgggcaacagagtgagactctgtctcaaaaaaaaaaaaaaaaaaaaaaa

SEQ ID NO: 346394 - DNA, 201 bp, Homo sapiens
cattgaccctgggaaagttattctacctccctaatttcctcatcctgggcttcagggtcttcaaggccccacccaaccatgatgtctggtggaagaagccrtctttgaacgccaatgcatatagggtcctgggagctggggacaatttggtaacttctaatgaccctctgtggcaaggggatggaaaggaaggtttgtcct

SEQ ID NO: 346395 - DNA, 201 bp, Homo sapiens
tccacccccaggcccatgagaggctggaggagacgaagctggaggccgtgagagacaacaacctggagctggtgcaggagatcctgcgggacctggcgcasctggctgagcagagcagcacagccgccgagctggcccacatcctccaggagccccacttccaggttcctggctgctagggctggggtgagggagcaggag

SEQ ID NO: 346396 - DNA, 201 bp, Homo sapiens
ctaccacagaaattcaaatcactcttctagttctgggccatgtgtcacttaacatgaaaaagaagaataagtcttagcaaaataatagtgagtaaaaaagyagtaagggaaataattgttcacttaatgttaagtgaaaaaaaatcagaccccagggatggataaaatcatgattcccccctttttttatgtcatagaaaa

SEQ ID NO: 346397 - DNA, 201 bp, Homo sapiens
ccacccccaggcccatgagaggctggaggagacgaagctggaggccgtgagagacaacaacctggagctggtgcaggagatcctgcgggacctggcgcagstggctgagcagagcagcacagccgccgagctggcccacatcctccaggagccccacttccaggttcctggctgctagggctggggtgagggagcaggagg

SEQ ID NO: 346398 - DNA, 201 bp, Homo sapiens
ctggtgagggtggggggattgagaataaccaatgaacggacaaaaaaggccaagtgtggtctgaagatgaagatggggccagctttgtgcagggaaggatygatgcagcaaagggtcgggggaagacccaggagaccatagacactgcacacacacctgtgtccgcacctctccagtctgcccacctctcccctcattagt

SEQ ID NO: 346399 - DNA, 201 bp, Homo sapiens
cctcatcttacactccctctgacctccagggtgtaacgttccgcgtggagggcggcgagctggtgatcgcgcgcattctgcatgggggcatggtggctcarcaaggcctgctgcatgtgggtgacatcatcaaggaggtgaacgggcagccagtgggcagtgacccccgcgcactgcaggagctcctgcgcaatgccagtg

SEQ ID NO: 346400 - DNA, 201 bp, Homo sapiens; identical to SEQ ID NO: 73292

SEQ ID NO: 346401 - DNA, 201 bp, Homo sapiens; identical to SEQ ID NO: 73293

SEQ ID NO: 346402 - DNA, 201 bp, Homo sapiens
gcctagagattgatgtcatttcattgaatgttggcttatcttgcctacatatgtgtttagctgtaaacaatatacctttgtgggatttttttttagacagrgtcttattccatctcccaggttggagtacagtggaacaattatagctcactgcagcctggaactcctgggctcaaatgatcctcctgccctcctgcctta

SEQ ID NO: 346403 - DNA, 201 bp, Homo sapiens
agtctcaaactcctggcctcaagtaatcctctcagcctcccaaagcactgggattataggcatgagccaccatgactggctctacctttgttatgtgtgctttttttttttttttttttttcctctggagtctcactctgttgcccaggctagagtgcagtggcgcaatctcggctcactgcaacctccacctcccaagtt

SEQ ID NO: 346404 - DNA, 201 bp, Homo sapiens
ctcccaagttgaagcgattcttctgcctcagcctcccgagtagctgggactacaggcatgcaccaccatgcccggctaatttttgtgtgtgtgtgtgtgtrtatatatatatatatatatatatatattttgagatggaatctcactctgtcactgggctggagtgcagtggcacaatctcagctcactgcaacctccgcc

SEQ ID NO: 346405 - DNA, 201 bp, Homo sapiens
aattaatatttctttatgtatttattttaaaagaaaggtgaggtctcaccgtgttgcccaggctggtcttgaactcctgagctcaagtgatcctcccaccytggcttcctaaagtgctaggattacaggtgtgagccaccatgcccagcccagttatttcttttgagaagtggggagaatgatacctatccctcagagtcg

SEQ ID NO: 346406 - DNA, 201 bp, Homo sapiens
tattctactctaggggatcatggattcccgtagtgcacgcaggaccccagaaggttaagttccctgtgctagaggccctctgaggcccgggcagctgggarctgctatggttctgctctgagttgtctgaacttccccctgcctggatgcctccctcccatgcagctccttcccttgctctaggccccactactgcctctg

SEQ ID NO: 346407 - DNA, 201 bp, Homo sapiens
tggcctgggcttgcttagctggggctgggtggtccgggatggcctcactcacatgtctggtgtcttagctgggaaaactgcaatgtctgggatggccagacccctttccatgtggtctctcatcctctaggagggtctctcatcctcagccaccttcacatggtagtctcacaagcaaggaaggacaagcctccagtcaca

SEQ ID NO: 346408 - DNA, 201 bp, Homo sapiens
tcctctctcccctctccaggagagacgtttcagagcccttgcctccttcaccatgccggttgccgccaccaactctgaaactggtaagaagggggtgaggrtgttagcttatttcagtggttcagagggtgccaggcgaggacttaggggtgggcacttgcacagctccagataagaaccaactggctccactgctgtcca

SEQ ID NO: 346409 - DNA, 201 bp, Homo sapiens
gcactttgggaggccgaggtgggtggatcaccagttcaggagatcgagaccatcctggctaacatggtgaaaccccgtctctactaaaattacaaaaaatwagccaggcgtggtggtgcatgcctgtagtcccagctactcgggaggctgaggcaggagaatggtgtgaacccgggagacggaggttgcagtgagccgaga

SEQ ID NO: 346410 - DNA, 201 bp, Homo sapiens
tcctggctaacatggtgaaaccccgtctctactaaaattacaaaaaattagccaggcgtggtggtgcatgcctgtagtcccagctactcgggaggctgagrcaggagaatggtgtgaacccgggagacggaggttgcagtgagccgagattgcgccactgcactccagcctgggcaacagagtgagactctgtctcaaaaa

SEQ ID NO: 346411 - DNA, 201 bp, Homo sapiens
ctccgcacctctttgtatgtgtatggatggagggatgggtgggaggttggaagaaacctctccctttcactgctggtccgctcgcctgcggacactatggstgatgtggatatctcggaggcagagctgagagggcatctgggcccaggcttttggaagccgaggtgcaggttcccagatgtctgggtgcaggaccttggc

SEQ ID NO: 346412 - DNA, 201 bp, Homo sapiens
tgtaattccagcactttgggaggccgaggcaggcagatcacctgagctcaggagtttgtgactagcctgggcaacatggtgaaacctcatctcaactgaartataaaaaattagccaggggtggtggcgcgtgcctgtagtcccagctgttcgggaggttgaagcacaagaatttttgagcccaggaagtggaggttgcag

SEQ ID NO: 346413 - DNA, 201 bp, Homo sapiens
atcgtaaaccaggatgatgccaactggtggcaggtgagctgcgggcacccccgcatctctccaggtatggtgcatgggagggcgagggcacagggaggggwcctcttgctcaggcagatcttggtctcatgtccgttttaggcatgccatgtcgaagggggcagtgctgggctcattcccagccagctgctggaggagaag

SEQ ID NO: 346414 - DNA, 201 bp, Homo sapiens
acagggggtactggggaccaggaagctgtgagtgaaggaacaagaataccaggttaggatacctggacgtggctctgtaggaggcattaggacaagggagygggccactcagacaaactagcaaagcctcagtggcaaactgcttaacctcttggagctcgcatttcttcttctgtaaagaggctgctgtgagacgcaaag

SEQ ID NO: 346415 - DNA, 201 bp, Homo sapiens
attacaggcatgagccaccacacctggcctgttcttaattttattggtcctgagtcacttagaatctggtgacagcagtgagccctcatcgtagacatatrcatccatgcacaaaaggtatattctactctaggggatcatggattcccgtagtgcacgcaggaccccagaaggttaagttccctgtgctagaggccctct

SEQ ID NO: 346416 - DNA, 201 bp, Homo sapiens
gtcacttagaatctggtgacagcagtgagccctcatcgtagacatatacatccatgcacaaaaggtatattctactctaggggatcatggattcccgtagygcacgcaggaccccagaaggttaagttccctgtgctagaggccctctgaggcccgggcagctgggaactgctatggttctgctctgagttgtctgaactt

SEQ ID NO: 346417 - DNA, 201 bp, Homo sapiens
ctggggcgtaggaggaggagcaagcccagcaatttggcttcgttgttgcagaccacttgatgggggcgtggtgggggaggatgggggacagggagtggagmcttggggtgtggcggtgggttctgcttcctcaaaggactcctggggctcctgctccccttcatgttgttcgaggggctgctcctggcttctcatattcaa

SEQ ID NO: 346418 - DNA, 201 bp, Homo sapiens
tttctcccttctctccacctcagagtctcttccagctgcctggagcctcccacctgctcaggctggcattacctagggtggagagaacaggccaaggaaaytgtccccttcctccaggatccctgtcccaggcattcaagggcctggggtgcctgtgctgggcagggaggggaatgttgctggggaggggaatgttgccgg

SEQ ID NO: 346419 - DNA, 201 bp, Homo sapiens
ctctgtcacaggctggctatggctggccctggcatgggatgtggaggaccacgtcccactggagtggggattgctgctgcaggggacaccatgtccttggrttgtagcctattcacattatctgtggaatggttgaagacttgggaagattgttaacagcgaaagatgaaaagttgcagaggtttaatagtgggaagttct

SEQ ID NO: 346420 - DNA, 201 bp, Homo sapiens
agttgcttgagctgggtaggtcgaggctacaatgagccatgatcatgccactacagtccagcctgggtgaccgagtgagacactgtctcaaaaaaaaaaawaaataaataaataaaaagtttggcacagttaatgcctctccccttcctcattttcactgcattcccttcccacaggtaaccactgcctagagattgatgt

SEQ ID NO: 346421 - DNA, 201 bp, Homo sapiens
tgggttcctgtgctggaacggagaagagaaagaataagacccatacctgctccagtgtagggctggagcacaactcacctccgtggagggcaggggatgcrtgctccagaggtgacccgtactattgctggagggcagtggcataggaccaggccttcaggaggtggccccggagctgggccttggagaatggcttggggg

SEQ ID NO: 346422 - DNA, 201 bp, Homo sapiens; identical to SEQ ID NO: 73313

SEQ ID NO: 346423 - DNA, 201 bp, Homo sapiens
cagctaccaggagccccatctgccccgccaggtgggcccctcacccagcacaaggcccaagggatggctgagcctcctggctgtcaaggttgcaggtctcrcggaggccctcctctcctactggtttcctccagggaagatgggggtgggacctgcagcccagggcagctgaccgcagccgccgacaggcctctgccgctg

SEQ ID NO: 346424 - DNA, 201 bp, Homo sapiens
cagctcaggcctgagaagggaatgggagcagagagggttttattgaaatcaggtactagtcctctgggaagaatcctcttttggggggaggtggagttgcygtggttcccccacccccaggactcagcaggcattcagtcctaaagtgggcactgccagatgcttccccccactccccacccctgctgtgagccactgcct

SEQ ID NO: 346425 - DNA, 201 bp, Homo sapiens; identical to SEQ ID NO: 73299

SEQ ID NO: 346426 - DNA, 201 bp, Homo sapiens
ttttttgtagcgatggggtttcactatgttgcttgggctagtctcgaactcctaggctcaaccgatgctcccgcctccgactcccaaagtgttgggattaygggagtgagccaccgcgcccggccaaagatgcagtccatttatgatcttaggaatccagttagcaaggaaaagggatgactctcacattttgttcagggc

SEQ ID NO: 346427 - DNA, 201 bp, Homo sapiens
ctgcggtaggggctccaaagtggcttcaggcaccaaggtggtgagctgtgaggggccccggtatctgcgcggcctccccgggggctgtgcgggttgggggkacttagaagcccggcattacgtaagaaccgtgctgttagcgcttccgggggttggggagcgagacagaggttgcgctgggtcccggtggccccctggtcc

SEQ ID NO: 346428 - DNA, 201 bp, Homo sapiens
gtatttgaggggtgatggtagggatatagatggaagagaaaaagaccaaggtcagaggaagggaggtaggaggtgaaagttttccaaggaggacagttctrgggatgccatgataatgtagggtggggctgcagtggacaggtaggtcatcagtgttgaagacacccagaaatggaaggctcaggagtgggatgggcttgt

SEQ ID NO: 346429 - DNA, 201 bp, Homo sapiens
tagttccagacacctgtcacctgaacacgcccatgtaccccctttgccctcaactactgctagaaacccagcccacctggaacctttctcagccttccagrgtccccactcctcctctagtctcctccagtcaccccagccacctgccagctgtttgtcatttgtcccaggactcatgtcccagacccccgggcacccttt

SEQ ID NO: 346430 - DNA, 201 bp, Homo sapiens; identical to SEQ ID NO: 73301

SEQ ID NO: 346431 - DNA, 201 bp, Homo sapiens
aatggaggagctattaggagactatttgaagattctgacttggagcaattggggcctcatcttacactccctctgacctccagggtgtaacgttccgcgtrgagggcggcgagctggtgatcgcgcgcattctgcatgggggcatggtggctcagcaaggcctgctgcatgtgggtgacatcatcaaggaggtgaacgggc

SEQ ID NO: 346432 - DNA, 201 bp, Homo sapiens
catctgggcccaggcttttggaagccgaggtgcaggttcccagatgtctgggtgcaggaccttggcacggagccaggctagcttgcctggcactgccgttytcctgtggacacagccaggccccgccctctcagaggcttggacgggcgtgggggagcaaagccagccgatgctctgggaaccgactccccgggagaaaac

SEQ ID NO: 346433 - DNA, 201 bp, Homo sapiens
gtacatctcagccataatagattgtatctgcaagtgtttcattgtgtatataaactcctgggctcaactgaaaaggattctttaaagctacactactattstcacacctaaaaaaaaatcaaacaatagttttcttttgaatttttttaattaaaaaaattttaaaaaatagagatggggtcttgctgtcttgaactcctg

SEQ ID NO: 346434 - DNA, 201 bp, Homo sapiens
tgtagtcccagctgttcgggaggttgaagcacaagaatttttgagcccaggaagtggaggttgcagtgagccaagattgtgccactgcactccaatttggrctacagagtgagactccgtctaaaaaaaaaaaaaattatttgttcagcctactgaattgttggttttgtatttgaatgattaaatgtttaaagtttcctc

SEQ ID NO: 346435 - DNA, 201 bp, Homo sapiens
ctggttgaataaattacaggaatccagtcatgcaatggagtcaaatgcagtaattaaaataataagatgggcatggtggttcatgcctgtaatcccaaccygggaggcagaggttgcagtgagctgagatcgcgccactgcactccatcctgggtgacagagcaagactctgtctcaaacaaactaacaataataattaat

SEQ ID NO: 346436 - DNA, 201 bp, Homo sapiens
agggcaatatatttatttaatttttttttttggaaacagagtcttgctctgttgcccaggctggagggcagtggcgcgatctcagctccttgcaacctctscctcccgggtccaagtgattctcatgactcagcctcctgagtagctgggattacaggcatgtgccacatgcccggctaattttgtatttttggtagagat

SEQ ID NO: 346437 - DNA, 201 bp, Homo sapiens
gtgtttcaccatgttggtcaggctcgtctcaaactcctgacctcaggtgatcctcctgccttggcttcccaaagtgcgggattacaggcatgagccactgygcctggcctttagtggtgatttctgagattttgatgcacccatcacccaagcagtatacactgtacccagtgtgtagtcttttatcccttacgcccctac

SEQ ID NO: 346438 - DNA, 201 bp, Homo sapiens
ggagtgggggcagctgtagctccttctgacagtgggggtgagttgtgggcactgactgtagggaggtccccttgtgcctgggcaggaggcggacctgagayggacagtggaggagagcagccgcatccagcggggctacgggcactactttgacctctgcctggtcaatagcaacctggagaggaccttccgcgagctcca

SEQ ID NO: 346439 - DNA, 201 bp, Homo sapiens
agggttggtgcccctgtgagaatctaatgccaccactgatctgacaggaggtggagctcaggcagtaatgcttgctcacctcctgctgttcacctacttcytaacaggccacggatcactactggtccatggcttgggggttggggacccctgttctaatatatgaatagagctgtttgtttattggttcccttcctgaga

SEQ ID NO: 346440 - DNA, 201 bp, Homo sapiens
gatgggattataggtgtgagccaccgcacctggccatttttgtatttttttttttttttttagtagagacagggtttcaccatattggccaggctggtctygaactcctgacctcatgattcgcctgcctcagcctcccaaagtgctgggattacaggcgtgagccaccatgcctggccattacgtgtgcttttaaatttt

SEQ ID NO: 346441 - DNA, 201 bp, Homo sapiens
agaatctaatgccaccactgatctgacaggaggtggagctcaggcagtaatgcttgctcacctcctgctgttcacctacttcctaacaggccacggatcastactggtccatggcttgggggttggggacccctgttctaatatatgaatagagctgtttgtttattggttcccttcctgagagatgtgtatgtcactgct

SEQ ID NO: 346442 - DNA, 201 bp, Homo sapiens
tccatccatccatccatcaaatacctattttgcactcgccacataccaggcacagtgctggggttatggcagtgaactgccagatagtttgttttcctgawgaagcccaagtctgtcttcctttcactggacaccacaatgccccagtcctgggacctcacagtaaagcctaattgagaatgaaccaatgtgctgtgtcac

SEQ ID NO: 346443 - DNA, 201 bp, Homo sapiens
tgccagatagtttgttttcctgaagaagcccaagtctgtcttcctttcactggacaccacaatgccccagtcctgggacctcacagtaaagcctaattgaraatgaaccaatgtgctgtgtcacattgtaagtaaactcccttctctggaaacgtttttggcgagaagctggtcaggattttttccaagaaattcctggta

SEQ ID NO: 346444 - DNA, 201 bp, Homo sapiens
cctggcactgccgttctcctgtggacacagccaggccccgccctctcagaggcttggacgggcgtgggggagcaaagccagccgatgctctgggaaccgaytccccgggagaaaacccaggcaggctgggcaagacttccgagcgcagggatttcatacaggatcctccctgccttttcccgccctccacgctctagggaa

SEQ ID NO: 346445 - DNA, 201 bp, Homo sapiens
ggaggacttctggagtcccttctctgaccctgtgagggagagcagcgccagccaggagaaggctccaggtcatcaaggcctgggagggggagggaagggayccctcctccctgctctctaggagtagagattggcaccaggggcacgggccagcacagtggatcctgggcatttcttccagcctgggtgtagcctgaatag

SEQ ID NO: 346446 - DNA, 201 bp, Homo sapiens
caaataaaatcaatgtggttctgactctcagggaacctgcagtctaggagtactcatgttttctactttggctcaaattctggactcttttattatttttwaaatgacttttttttttttaagacaggttcttgctctgttgcccaggctggagtgcagtggcgcaatcatggcttaccgtagcctcgacctcctgggctc

SEQ ID NO: 346447 - DNA, 201 bp, Homo sapiens
ttcagaatttcagaagtatgtagaatacatacagacacattacaactctttaactgggaagccagggaatgacaaacacactaaatcaagatggtgctttyagctgggcatggtggctcatgcctgtaatcccagcactttgggaggctgagccgggcggatcacctgaggtctggagttcaaggccagcctcaccaacat

SEQ ID NO: 346448 - DNA, 201 bp, Homo sapiens
attgctggagggcagtggcataggaccaggccttcaggaggtggccccggagctgggccttggagaatggcttgggggtggagggattacagcagcacagyctggggctgagaagtccataatcgctgcccactaggccagcatgtgccagaggtggacagggggtactggggaccaggaagctgtgagtgaaggaacaag

SEQ ID NO: 346449 - DNA, 201 bp, Homo sapiens
gctgacatggatccagtagcaggtgttccagctacagacaaggccaaggtgaggaatccaaggcaggggacattcagaaattcagaaaaattgttactaakggggacagctgagaggcatgtgaaggctgttgtgaactaattcacatgagatgaagaagaaagaacacagggcttggagtcagaagattccactgaccag

SEQ ID NO: 346450 - DNA, 201 bp, Homo sapiens
gggctgagaagtccataatcgctgcccactaggccagcatgtgccagaggtggacagggggtactggggaccaggaagctgtgagtgaaggaacaagaatrccaggttaggatacctggacgtggctctgtaggaggcattaggacaagggagtgggccactcagacaaactagcaaagcctcagtggcaaactgcttaac

SEQ ID NO: 346451 - DNA, 201 bp, Homo sapiens
tgtaatgggagagcacattacttttaggaatagtcataattattatgctgctgttgctgccgctgccaccaagttgttgttgttgtttttgagacaagttstggctctttagcctaggctggagtgcagtggcgcaagcttggctcactgcaacctctgcctaccagcctcaagtcattctcccacctcagcctcccaagt

SEQ ID NO: 346452 - DNA, 201 bp, Homo sapiens; identical to SEQ ID NO: 73300

SEQ ID NO: 346453 - DNA, 201 bp, Homo sapiens
gcccgggcagctgggaactgctatggttctgctctgagttgtctgaacttccccctgcctggatgcctccctcccatgcagctccttcccttgctctaggycccactactgcctctgccagaggttccagggctgccactttgggtagaatgattcctctgtgcctcctctccgagaaagtgaagggagtgagccagggcc

SEQ ID NO: 346454 - DNA, 201 bp, Homo sapiens
ggggtctccctgcctctttcagcctgcctaggccccactgtaagctgcttaggcattaattaaacccacccctgagcctgtgcttaatggcctctccagcygggactgcccagtaaacccaccaatagtgcctgactggggcgtaggaggaggagcaagcccagcaatttggcttcgttgttgcagaccacttgatggggg

SEQ ID NO: 346455 - DNA, 201 bp, Homo sapiens
tctcagaggaatggggtcaccggagcggagctgagtccttcccttctgcccacacttttccctgtgtgcaaatgtgccctcatttttcctttctggggaamtgagttccaagatgcctgacttgcttcctgggcatcatccccttcattaagaggaagaactcatgggagatgggggaggggaagaagctgctgtgaggcg

SEQ ID NO: 346456 - DNA, 201 bp, Homo sapiens
ttcgggctgagagtttgcttatccctgtgatgacttggtgtgacctcagcctttgggtcacaccaaggcctccagtgcctgtttccctagctcctgccagsgttccaggcctcagctttgacttcctatcatccatgttaatttctcagtgattatagatcattgtcactcagagctgaaggcctgtaaacatcatctagc

SEQ ID NO: 346457 - DNA, 201 bp, Homo sapiens
agtgtgtgtatgagggtgtgtgtatgagtgtctgtgtttgagtgtatgtgtatgtgtgtgtccaagagtgtgtatccaagagtgtctgtgagtgtatgtgtatgtgtatgtcagtgtatgcatgtatgtatgtgtgtacatataagtgtgtatgtatctgtgtgtgagtgtgtgtactcaaatgggtaaatgtgtgtatga

SEQ ID NO: 346458 - DNA, 201 bp, Homo sapiens
gtgtgtgtatgagggtgtgtgtatgagtgtctgtgtttgagtgtatgtgtatgtgtgtgtccaagagtgtgtatccaagagtgtctgtgagtgtatgtgtatgtgtatgtcagtgtatgcatgtatgtatgtgtgtacatataagtgtgtatgtatctgtgtgtgagtgtgtgtactcaaatgggtaaatgtgtgtatgag

SEQ ID NO: 346459 - DNA, 201 bp, Homo sapiens
ggagccaggctagcttgcctggcactgccgttctcctgtggacacagccaggccccgccctctcagaggcttggacgggcgtgggggagcaaagccagcckatgctctgggaaccgactccccgggagaaaacccaggcaggctgggcaagacttccgagcgcagggatttcatacaggatcctccctgccttttcccgcc

SEQ ID NO: 346460 - DNA, 201 bp, Homo sapiens
atcccctgcaaggaagcaggcctgcgcttcaacgccggggacttgctccagatcgtaaaccaggatgatgccaactggtggcaggtgagctgcgggcaccyccgcatctctccaggtatggtgcatgggagggcgagggcacagggaggggtcctcttgctcaggcagatcttggtctcatgtccgttttaggcatgccat

SEQ ID NO: 346461 - DNA, 201 bp, Homo sapiens
cacccttttctcatccactcccaagtgctcaccccaaccccagttaccctcacagcctttctctggttcctaggacagacatggggatatactccctaccytgccttctccttctgcaggcggtgaaggtgctacgaacggccgagtttgtcccttacgtggtgttcatcgaggccccagacttcgagaccctgcgggcca

SEQ ID NO: 346462 - DNA, 201 bp, Homo sapiens
ggttgccatggtgagattgttgctgcctgagtgccattgtttattcttgacactcagttatttgggctttgattccaacattgtcctaggcacagggtaayagagccagagctgggacgcctccctcactctggggctccataggctgggccaagctaaatgactgaaagtcacataggggtctgtggaagaccagccctc

SEQ ID NO: 346463 - DNA, 201 bp, Homo sapiens
atgccaccatgcattaaaatgaggattaaaaatgctcaggtgaatttttaaaatattttgtagcaacaggggcttcccatcttacccaggctggtcttgarctcctgggctcaagcagtccttcctccttgacctcccaaagtgttgggattgcaggtgtgaaccactgcacctgacctaaattttttttttttttttgca

SEQ ID NO: 346464 - DNA, 201 bp, Homo sapiens
cataataagcaaaatgcaaagtaagccccaatgagagatcatttctcctccatgtgattggcagacatgcaaatgtttgatcaacactctggtggtgagcytcaagaaaatccctcatacagtgctagcaggagagcaaactggccaaagtcccatggaggggaatttgtcaatatctaagaaaattacgtatgtatttgc

SEQ ID NO: 346465 - DNA, 201 bp, Homo sapiens
tgggaattaggtaatcactattttgcaacctccagtataataactcatttaggcaagggtcataaattgacactaaatccattggtgaaggattttggggkaacagaatagtcacatagtctcaaagtatgggaaagacacaaagacacaagatcacctacgtagaactcttgtcaaaaggattaacgtaagtctaatcat

SEQ ID NO: 346466 - DNA, 201 bp, Homo sapiens
ctaggctgggtgcagtggctcatgcctgtaatctcaggctttgggagcctgaagcaggaggatcacttgaagccaagagtttgagactagcctaggcaacrtagtgagaccctgtccctacaaaacaaaaacagaaacaaaaaaaacaaaacaacaaatgttctgaaagtctaaaagttattgggatctgttctagattag

SEQ ID NO: 346467 - DNA, 201 bp, Homo sapiens
tccagtgcctgtttccctagctcctgccagcgttccaggcctcagctttgacttcctatcatccatgttaatttctcagtgattatagatcattgtcactsagagctgaaggcctgtaaacatcatctagcccaatccatccattttacaggcaggaaagactgaggccagtgagggacagtgacttgtacaatgtcacac

SEQ ID NO: 346468 - DNA, 201 bp, Homo sapiens
taatgaatcgatgttaaatttcttgcaggtgataatggtattgtggtttatgcagcagaatgtctttgttcctatgaaatacatgctgaaatactttgggrtaaagtggcttgtgttgtctgcaatgatctttcaaagattcagaggggaaaaatggtcttcatatatattattgaaatggaattcttttcttcctgaccc

SEQ ID NO: 346469 - DNA, 201 bp, Homo sapiens
gtgacttgtacaatgtcacactgaattagtggtgcttagactggaggctgcaggccctggctcctgtgtggctgcctgcttgactctgggcctgtactcasggacttgctccgagtactgtctgtctcatccttgagcctgccaggtacaggtggctgagccctgggcttcagcccatctagaggttgagtgaggagcttg

SEQ ID NO: 346470 - DNA, 201 bp, Homo sapiens
tgtctttgttcctatgaaatacatgctgaaatactttggggtaaagtggcttgtgttgtctgcaatgatctttcaaagattcagaggggaaaaatggtctycatatatattattgaaatggaattcttttcttcctgacccatctaacctaacactccccactgggctggtcactggcgaaggattccttttctgttttca

SEQ ID NO: 346471 - DNA, 201 bp, Homo sapiens
tacaatgtcacactgaattagtggtgcttagactggaggctgcaggccctggctcctgtgtggctgcctgcttgactctgggcctgtactcacggacttgytccgagtactgtctgtctcatccttgagcctgccaggtacaggtggctgagccctgggcttcagcccatctagaggttgagtgaggagcttgtggttttc

SEQ ID NO: 346472 - DNA, 201 bp, Homo sapiens
cttctcttcccaccaccccccagtccctcctggagacgcacgactctgtggcctcaaagacctatgagacaccaccccccagccctggcctggaccctacrttcagcaaccagcctgtacctcccgatgctgtgcgcatggtgggcatccgcaagacagccggagaacatctggtgaggactgggcagggccagaggtggt

SEQ ID NO: 346473 - DNA, 201 bp, Homo sapiens
atgtcacactgaattagtggtgcttagactggaggctgcaggccctggctcctgtgtggctgcctgcttgactctgggcctgtactcacggacttgctccragtactgtctgtctcatccttgagcctgccaggtacaggtggctgagccctgggcttcagcccatctagaggttgagtgaggagcttgtggttttctttt

SEQ ID NO: 346474 - DNA, 201 bp, Homo sapiens
agaatctctagaattcatcttgcctgtccttctgcctttgggcgttttgtgtgtatgtctttctaaggtcacctgccatgtatcaggttggggagagattsactaaaagagaaaattataggacaatttggtaatgacagtgatagaggtggatacactatgcattttgggagcataaaggacaggtgtctaacccagcct

SEQ ID NO: 346475 - DNA, 201 bp, Homo sapiens
gtctccttgtgccagctctgagctaagaaagggagagaggagagagagccagccagaggggccgtggagaggtagatatcactctgtcagccccccagataaatgtggaacatcggcgctttggtaggcctaggttccagaagcaaataaaatcaatgtggttctgactctcagggaacctgcagtctaggagtactcatg

SEQ ID NO: 346476 - DNA, 201 bp, Homo sapiens
gtggggagaagactgaggcagtccccagggttttcagtgcatggtggtggaggtgaccaggaagtcggcaatgacagcaagggtagggagaaagaaggtayagccaggtggtgggttttctgtagagcggggactctgtcacaggctggctatggctggccctggcatgggatgtggaggaccacgtcccactggagtggg

SEQ ID NO: 346477 - DNA, 201 bp, Homo sapiens
atcaatgtggttctgactctcagggaacctgcagtctaggagtactcatgttttctactttggctcaaattctggactcttttattattttttaaatgacttttttttttttaagacaggttcttgctctgttgcccaggctggagtgcagtggcgcaatcatggcttaccgtagcctcgacctcctgggctcaagagatc

SEQ ID NO: 346478 - DNA, 201 bp, Homo sapiens
cagccccacaagtagctgggatcataggcatgcaccaccacacctggataatttttaatttttttgtagagatgggggtctcgccatgttgcccaggtggstctcaaactcctgggctcaggtgattctcctgcctcagcctcctaaagtgctgggattataggcgtgagccaccttgctcagccaaattatagtcttacc

SEQ ID NO: 346479 - DNA, 201 bp, Homo sapiens
caggtgggtctcaaactcctgggctcaggtgattctcctgcctcagcctcctaaagtgctgggattataggcgtgagccaccttgctcagccaaattataktcttaccctctaaaaattctacttgtttcctcttcaaaaaacaaacaaacaaaaaatacaacaggaagaaacactttatttatatacttatttttgagtc

SEQ ID NO: 346480 - DNA, 201 bp, Homo sapiens
accctgtgtccttgaaacagtcacctccttttgaagacctgagatttccctaagatgagatgatgggacaagatcagtgttcttaacttttttctttttcttttttttttttttgagatggagtctccctctgttgcccaggctggagggcagtggtgggatctcggctcactgcaaccttcacctcccaggttcaagtga

SEQ ID NO: 346481 - DNA, 201 bp, Homo sapiens
aggtgcaggttcccagatgtctgggtgcaggaccttggcacggagccaggctagcttgcctggcactgccgttctcctgtggacacagccaggccccgccytctcagaggcttggacgggcgtgggggagcaaagccagccgatgctctgggaaccgactccccgggagaaaacccaggcaggctgggcaagacttccgag

SEQ ID NO: 346482 - DNA, 201 bp, Homo sapiens
tccatccatccatccatccatccatccatccatccatcaaatacctattttgcactcgccacataccaggcacagtgctggggttatggcagtgaactgcmagatagtttgttttcctgaagaagcccaagtctgtcttcctttcactggacaccacaatgccccagtcctgggacctcacagtaaagcctaattgagaat

SEQ ID NO: 346483 - DNA, 201 bp, Homo sapiens
ctgggcttcagcccatctagaggttgagtgaggagcttgtggttttcttttctttttcttttttttttttttgagacggagtcttgctctgtcgcccaggmtggagggcaatggcaggatctcagcttactgcaacctccgcctcctgggttcaagcgattttcctgcctcagcctcccgagtagctgggattacaggcgc

SEQ ID NO: 346484 - DNA, 201 bp, Homo sapiens; identical to SEQ ID NO: 73297

SEQ ID NO: 346485 - DNA, 201 bp, Homo sapiens
ggagaggccttgccgctttaagagccgggctagcgattgacaagcaataaacgctgagcgcccggctgcgctggagccgcccggagctaggggcttcccgsggcgcaggtaggcgtcccccggcccccgggccagctcctatcccaagacctccgccttcttttcgtcctgacacggcacttaggaccctattcactgggt

SEQ ID NO: 346486 - DNA, 201 bp, Homo sapiens
ggtaggggctccaaagtggcttcaggcaccaaggtggtgagctgtgaggggccccggtatctgcgcggcctccccgggggctgtgcgggttggggggactkagaagcccggcattacgtaagaaccgtgctgttagcgcttccgggggttggggagcgagacagaggttgcgctgggtcccggtggccccctggtccccct

SEQ ID NO: 346487 - DNA, 201 bp, Homo sapiens
aggctagcttgcctggcactgccgttctcctgtggacacagccaggccccgccctctcagaggcttggacgggcgtgggggagcaaagccagccgatgctstgggaaccgactccccgggagaaaacccaggcaggctgggcaagacttccgagcgcagggatttcatacaggatcctccctgccttttcccgccctccac

SEQ ID NO: 346488 - DNA, 201 bp, Homo sapiens
aggcaggctgggcaagacttccgagcgcagggatttcatacaggatcctccctgccttttcccgccctccacgctctagggaaggaggacttctggagtcycttctctgaccctgtgagggagagcagcgccagccaggagaaggctccaggtcatcaaggcctgggagggggagggaagggatccctcctccctgctctc

SEQ ID NO: 346489 - DNA, 201 bp, Homo sapiens
tgccattgtggactcttgtatttgagggacctcaagagagtgaggaccctaccatccactgtccatattcagtcccagccccagtgcgcttcctctgttcyctccctcagccatccaattcttgagttttctcactgattggttttctttctttttccttggattaaatgtgaaagcaaaggcttctggctctgcttttct

SEQ ID NO: 346490 - DNA, 201 bp, Homo sapiens
ggcaagacttccgagcgcagggatttcatacaggatcctccctgccttttcccgccctccacgctctagggaaggaggacttctggagtcccttctctgamcctgtgagggagagcagcgccagccaggagaaggctccaggtcatcaaggcctgggagggggagggaagggatccctcctccctgctctctaggagtaga

SEQ ID NO: 346491 - DNA, 201 bp, Homo sapiens
acacacctgtgtccgcacctctccagtctgcccacctctcccctcattagtacctgctgtaagtgaagaatttaggcagaaggatggaggaggactttgtragggtgggggtgggtgggtagggacaggaatggaggagctattaggagactatttgaagattctgacttggagcaattggggcctcatcttacactccct

SEQ ID NO: 346492 - DNA, 201 bp, Homo sapiens
cagcctcatcccctgcaaggaagcaggcctgcgcttcaacgccggggacttgctccagatcgtaaaccaggatgatgccaactggtggcaggtgagctgcrggcacccccgcatctctccaggtatggtgcatgggagggcgagggcacagggaggggtcctcttgctcaggcagatcttggtctcatgtccgttttaggc

SEQ ID NO: 346493 - DNA, 201 bp, Homo sapiens
tgtgaacttgggcaaatcagttaacctcccttatcctccctggtctcctcctcctcagagaaataggcgagtaatacctgctcttcctgcttcccaggacygttggaatcattgttgttctccaacccccactttctgggcagcaccttctcccctacctttctggctcgtcctgaaggggaggctcttcctattcccttc

SEQ ID NO: 346494 - DNA, 201 bp, Homo sapiens
ctgagcgcaggggtccctctgctggccatgcctggtgctgcagcattccggccccaggtcagagcgtgcctggggcccaggagaggctgtctaggctggcmcccttctgccaatgacccccttaaggagctctggacctttgcctgatccccattctgggcacctcctccttggcaacaggtgtggccaactggagctgtt

SEQ ID NO: 346495 - DNA, 201 bp, Homo sapiens
tataccttcattttctctgctataaatgggaaagaattaatcctatcttgcagagctgtagtgaagattatgtggcatgcaaagcatttaggggtgtgatyggcagttattaaagcttatttcctccctttcactcaccatctgtggttgatggtgagccactttgaggcacgcagagaggggcccctgcctccctagcca

SEQ ID NO: 346496 - DNA, 201 bp, Homo sapiens; identical to SEQ ID NO: 73294

SEQ ID NO: 346497 - DNA, 201 bp, Homo sapiens
tcttcacactgagacttagaagccaggaatcccagggacatgggtggaggccctgtggcccctggggctgggcatgcagccacacctcccttcacctcagmctctgttgccagatcctcagcctgggggaaggaagggaggctcataggaggtatttcaatgagctggaatgacttgctgaaaaacaacatagagttcccc

SEQ ID NO: 346498 - DNA, 201 bp, Homo sapiens
ccagggacatgggtggaggccctgtggcccctggggctgggcatgcagccacacctcccttcacctcagcctctgttgccagatcctcagcctgggggaargaagggaggctcataggaggtatttcaatgagctggaatgacttgctgaaaaacaacatagagttcccctcccttccactcttttccacgagggcctcat

SEQ ID NO: 346499 - DNA, 201 bp, Homo sapiens
gagaaccagaccagccacagggagagagtgggtaaggggccgggagcctggggctcagcacagagaggcctagtacactgagcctggccccatccccatcycccaggaggatctaaaacaaacacacaagcacactatgaaccgatggtgctgggactcctgcccctcccctggctccctcaatcctgctcaggcccccat

SEQ ID NO: 346500 - DNA, 201 bp, Homo sapiens
ggaaagaagttcccgttgtcatagcgatgcagagagatgtagagcacagaggggtcattgtagaacgcctgctgggtgccattgccatggtgaatgtcctrtgaggggaggtagaagcatcgggaaaatggcccgcgctctgacccaatggtcaaattccacctgtcagctgagcactgtagctcatgcctgtaatcctag

SEQ ID NO: 346501 - DNA, 201 bp, Homo sapiens
aggccctgtggcccctggggctgggcatgcagccacacctcccttcacctcagcctctgttgccagatcctcagcctgggggaaggaagggaggctcatakgaggtatttcaatgagctggaatgacttgctgaaaaacaacatagagttcccctcccttccactcttttccacgagggcctcatccttatgtaaagggaa

SEQ ID NO: 346502 - DNA, 201 bp, Homo sapiens
ctctcaggccccgggccagagctactgaatcaaaatctgcattttaacaaggttcccaggtgattccctgtgcgtatgcagtaaagtttgggctaaagcaytgctttccagggaacactttctcttctttctctttcattcaccagtagactcttcacactgagacttagaagccaggaatcccagggacatgggtggagg

SEQ ID NO: 346503 - DNA, 201 bp, Homo sapiens; identical to SEQ ID NO: 218289

SEQ ID NO: 346504 - DNA, 201 bp, Homo sapiens; identical to SEQ ID NO: 218291

SEQ ID NO: 346505 - DNA, 201 bp, Homo sapiens
taggataataaatatgtaaacagattggtggggccctggagatagaaggagagaaagtatatgtggtactggggaggaggaggaaggaagagtcagccccmtaggagccacttcccatctttggtttcctacaggctggatggcatcccctggaagccttgtaggcccacagcccctggcagggctcctgggaaagagaag

SEQ ID NO: 346506 - DNA, 201 bp, Homo sapiens
accgctcactatagaaattttggatcctcgcttcatgtataagaaacaggttgacctttctctagtccagagggaagcaaagggccagtcttggcgcggcytaacctgaacaaagttcaaaagtatttccttgccctccaagaaacataaacttcctggtgttggaagtattgatacactcattataataggaataaaaat

SEQ ID NO: 346507 - DNA, 201 bp, Homo sapiens; identical to SEQ ID NO: 218292

SEQ ID NO: 346508 - DNA, 201 bp, Homo sapiens
gacccacacggcacaccttgttgaatgtgtgactttttgtttttaatagaaaaaataaacaaaatcacaatggtgaagcccagagggatgggggccggggygtcacagggcaggctcctgctccatgggctcctctgccggcctgtggggcaagcacaggggagggtattgagtggggcgcaccagcaggggtgagggcag

SEQ ID NO: 346509 - DNA, 201 bp, Homo sapiens; identical to SEQ ID NO: 73329

SEQ ID NO: 346510 - DNA, 201 bp, Homo sapiens
tccatggataccttgagagcagtggacagaatcgtagtccctttttgacttcacccctcaggccctccagagtactctgtgtcctgcccgccttgtacccsccctggctgtgtgtgcatgtggaaagtcatcttgcatctgttctcttccaggtttctttttggagacaggcccttttggtgggtccatgagtctggttac

SEQ ID NO: 346511 - DNA, 201 bp, Homo sapiens
cccaagtggcaaagtccctattcattttcattttctctttttttttttttttttttttgagacggagtctcgctcagttgcccaggctggagtgcagtggygcaatcttggctcactgcaaactccgtctcccggcttcatgccattctcctgcctcagcctcccaagtagctgggatcacaggcgtgtgccaccacactc

SEQ ID NO: 346512 - DNA, 201 bp, Homo sapiens
ctctccttccccacacactttcaccctctcagccccggggaaggggaagtaggctgtgaggagtgtgaggcaagacagccctcctcacagactgcaggccwcagcttgggcaccagcctcccatcagtgctgagaccaagaggaaggaggaggagaggggtctgcagagatggtgaggacgaaagaaggggaaagggtgga

SEQ ID NO: 346513 - DNA, 201 bp, Homo sapiens
gacagagacaccttgcagattaaggtgtggtccctggaccatgcccaacggcataggcagcacttgaaaactggctaaaaacgcagactctcaggccccgrgccagagctactgaatcaaaatctgcattttaacaaggttcccaggtgattccctgtgcgtatgcagtaaagtttgggctaaagcactgctttccaggga

SEQ ID NO: 346514 - DNA, 201 bp, Homo sapiens
ttctgcctccatcttctcaccacgagcttctggatttgctggcaggcagcccttctggacactgcatgatcacaggagcagccctctggcccataatgacrgccctgtcttcgcaggtggccactcgggcccgcaggtatacccttggcattgcccaccattgggagcaggggtgatggcaccctgtacctaatagacaca

SEQ ID NO: 346515 - DNA, 201 bp, Homo sapiens
ctctttacactgggcctggatctttcttggtaagtctcgctttgaagcctgggcaggctgggccctgtcctatctcgcctgcacctagcctggtgtgtctstggttcattatagctaaaaaaggacacattacctattcacatagaccctcacaggcacaaaacagaacatgggagtgggccccaagggcagatggccaag

SEQ ID NO: 346516 - DNA, 201 bp, Homo sapiens; identical to SEQ ID NO: 73330

SEQ ID NO: 346517 - DNA, 201 bp, Homo sapiens
tcttagcacatttccctcaccaggtgctggctggcctaataactggtgagcaactggggcaacggggtggactgagaggatgcctttggcagtgggaggawcagtctaggatcttcccatcgctcccagcttctgtagagcccaccccagaggccccccgttatgtctcagtttattctcttgccaagctgcactgcagct

SEQ ID NO: 346518 - DNA, 201 bp, Homo sapiens
cacctttctgggcgatcccaagatcctctttctgttctacttccccgcggcctactacgcctcccgccgtgtgggcatcgcggtgctctggatcagcctcmtcaccgagtggctcaacctcatcttcaagtggtgagacagagaagccctccggcatcctggtccccacccccgagggccctgagtcatgtgtaagccctg

SEQ ID NO: 346519 - DNA, 201 bp, Homo sapiens
ggctggctgatgactccccgagtgcctatggagcgggagctaagcttctatgggttgactgcactggccctcatgctaggcaccagcctcatctattggaycctctttacactgggcctggatctttcttggtaagtctcgctttgaagcctgggcaggctgggccctgtcctatctcgcctgcacctagcctggtgtgtc

SEQ ID NO: 346520 - DNA, 201 bp, Homo sapiens
catggataccttgagagcagtggacagaatcgtagtccctttttgacttcacccctcaggccctccagagtactctgtgtcctgcccgccttgtacccccsctggctgtgtgtgcatgtggaaagtcatcttgcatctgttctcttccaggtttctttttggagacaggcccttttggtgggtccatgagtctggttacta

SEQ ID NO: 346521 - DNA, 201 bp, Homo sapiens
tgtcttcgcaggtggccactcgggcccgcaggtatacccttggcattgcccaccattgggagcaggggtgatggcaccctgtacctaatagacacagcagyatggcagcctgggagctggagttttggggaccctaggttgtgtggttcaaccatggagtacctgggtgctgcaggaggccaagctgtgtatggacacgct

SEQ ID NO: 346522 - DNA, 201 bp, Homo sapiens
gtttgggctaaagcactgctttccagggaacactttctcttctttctctttcattcaccagtagactcttcacactgagacttagaagccaggaatcccasggacatgggtggaggccctgtggcccctggggctgggcatgcagccacacctcccttcacctcagcctctgttgccagatcctcagcctgggggaaggaa

SEQ ID NO: 346523 - DNA, 201 bp, Homo sapiens
ggcaggcagcccttctggacactgcatgatcacaggagcagccctctggcccataatgacggccctgtcttcgcaggtggccactcgggcccgcaggtatrcccttggcattgcccaccattgggagcaggggtgatggcaccctgtacctaatagacacagcagcatggcagcctgggagctggagttttggggacccta

SEQ ID NO: 346524 - DNA, 201 bp, Homo sapiens; identical to SEQ ID NO: 73333

SEQ ID NO: 346525 - DNA, 201 bp, Homo sapiens; identical to SEQ ID NO: 73334

SEQ ID NO: 346526 - DNA, 201 bp, Homo sapiens
gacacagtaacaatctgatctctcttgcttttccccacactctcactcagcataatcatgctgatatttatccaagtctaaaatcctttgatattcatccrtgatacacatccatgttgcatgtgtcaaaagcccattcccctgtatggatctaacacagcctgtttatccattcacatgtggatggatttctggatcatt

SEQ ID NO: 346527 - DNA, 201 bp, Homo sapiens
ctgctgtctagtgtgcttgaggtaggagtgtcctggcagatccatatattgactaattgctactgtatgtagtacatcctcagaccacctatattctagcrtgcgtagcccaggcttgtactgatgctctgctgaggtctggcatttaagagaaagacaaacagctccttcaggccaaggatctctgtcaacaggccgaag

SEQ ID NO: 346528 - DNA, 201 bp, Homo sapiens
ctactcgggaggctgaggcaggagaattgcttgaacccaggagatggaggttgcagtgagccaagatcgcgccattgcactccagcctgggcaacaagagsgaaactccgtctcaaaaaaaaaaaagtatggaaaatgttaacggaggaagtggagaaggttagcttcagccttgagagccggcaggtggagaaaggcagg

SEQ ID NO: 346529 - DNA, 201 bp, Homo sapiens
agtttgagaccagcctggccaacatggtgaaaccctgtctgtactaaaaatgcaaaaattaaccgtgcatggtggtgcatgcctgtaatcccagctactcrggaggctgaagcaggagaatcacttgaacccgggaggcggaggctgcagtgaggggagattgcaccattgcactccagcctggacgacagagtgagatcc

SEQ ID NO: 346530 - DNA, 201 bp, Homo sapiens
acgagaactctggtcccggctacaggtgggcacggcagtgacttctctgggaaagagctggtcctctcatgatcccgccgcatttgtgcgggttcatctgyaaaacggagctggagcagggaacactgagtcctggagcacacatcagggaggaaggggggcaggggcgggggttcccccaaaagggagtccgaaaggagt

SEQ ID NO: 346531 - DNA, 201 bp, Homo sapiens
gggcagaggccctggctgagtcaacaaggctgacaaggctgtgttctggatgcaggcccggcagatgtttgagggggaggtggccagcctggaggccctcmggagcacgggcctggtgcgggtgccgaggcccatgaaggtcatcgacctgccgggaggtggggccgcctttgtgatggagcatttgaagatgaagagctt

SEQ ID NO: 346532 - DNA, 201 bp, Homo sapiens
gaggcggaggggtcgggggcaggcgcatttcctggggctgggcctggggaggggtcagctttggcccttgggaggtggcacctgctgggtgagcccggctsaagcgttctgtgaaggtttgtgtctgcacgatccgtgaccttcctttggcctccatgcgcagcgcacaggcttctaggggtggttttaactttcctatcc

SEQ ID NO: 346533 - DNA, 201 bp, Homo sapiens
tcaaactcctgacctcagtgatccgcctgccttggcctcccaaagtgttgggattacaggtgtgagccaccacacccagtccatctttttcttttgctttktctttccttttttttttgttttttgagacagagtcttactctgtcgcccaggctggagtgcagtggtgcagtctaggctcactgcaagctctgcctcttg

SEQ ID NO: 346534 - DNA, 201 bp, Homo sapiens
ctgcagtgtgggaagccggccaggcctgtgaccagcgcccgggccgagggccggacctgcgtccgctgcggggcagggataccgggtccctgcagggagcwcaagccccagcgcgcccgcgaagagctgcgcggactcccggctgcttcccccgaatcccgggcgcaggaagcgcgaagccggacgaacgcggggagcgcg

SEQ ID NO: 346535 - DNA, 201 bp, Homo sapiens
cgacacggacgcaggcccagtgttcgtcaaagtcaaccgcaggacgcaggtgctggcccgtgcgcaggcgggggctctgcgggtctctgcggggcctgggraggcggaggggtcgggggcaggcgcatttcctggggctgggcctggggaggggtcagctttggcccttgggaggtggcacctgctgggtgagcccggctc

SEQ ID NO: 346536 - DNA, 201 bp, Homo sapiens
acaaaaaaaaaaaaaaaaaaaaaaaaagccaggaatggtggcacaggcatgtggtcccagctagttgtgaggctgaggtggaaggattgcttgagccctaraagtcaaagctgcagtgagccatgattgtgccactgcactccagcctggatgacagagcaaggcctggccccagaaaagaaagaaaaagcaaaagaaaga

SEQ ID NO: 346537 - DNA, 201 bp, Homo sapiens
atttcaagaccagactggccaatatggtgaaaccccatctctactaaaaatacaaaaattagccgggtgtagtggcgggtgcctgtaatcccagctactcrgtaggctgaggcaggagaatcacttgaatccgggaggcggaggttgcagtgagccgagatggcgccactgcactccagcctgggtgacagagcaagattc

SEQ ID NO: 346538 - DNA, 201 bp, Homo sapiens
aaggggtgggttgcccctccacacctgtgggtgtttctcgttaggtagaacgagagacttggaaaagaaaaagacacagagacaaagtatagagagaaatmaggggacccagggaactagcgttcagcatatggaggatcccgccagcctctgagttcccttagtatttattgatcattcgtgggtgtttctccgagaggg

SEQ ID NO: 346539 - DNA, 201 bp, Homo sapiens; identical to SEQ ID NO: 134129

SEQ ID NO: 346540 - DNA, 201 bp, Homo sapiens
tggatgacagagcaaggcctggccccagaaaagaaagaaaaagcaaaagaaagagtcattgcctggtgttcactttttactgtttgaagaatggagaatasttttcaatgtatttaaacctttctcaaaatggaacaaactgggtggtgttatttattatttgttattttaattagctgcatttcttctttcctcagtcaa

SEQ ID NO: 346541 - DNA, 201 bp, Homo sapiens
cccaagtactgctttagtggcatctcacaaattataagttgtgtttttgctttcattcaattgaaaacactttctaatttccctttagacatctttcttamacagattttagaactgtgtttagttttaaaatatttgaggatttcccagaatttttcctattgattttgttttgttttgcttttctgagacggagtcttg

SEQ ID NO: 346542 - DNA, 201 bp, Homo sapiens
cacgagaactctggtcccggctacaggtgggcacggcagtgacttctctgggaaagagctggtcctctcatgatcccgccgcatttgtgcgggttcatctrtaaaacggagctggagcagggaacactgagtcctggagcacacatcagggaggaaggggggcaggggcgggggttcccccaaaagggagtccgaaaggag

SEQ ID NO: 346543 - DNA, 201 bp, Homo sapiens
tttctttttttttttgagatagagtttcactcttgttgcccaggctggagtgcaatggcgcgatctcggctcactgcaccctttgcctctgggttcaagcrattctcctacgtcagcctcccaagtagctgggactacaggcccacgccaccatgcccggctaattttgtatttttagtagagatggagtttccttatgtt

SEQ ID NO: 346544 - DNA, 201 bp, Homo sapiens
tttcaccatgttggtcaggatggttttgatctcttgacctcgtgatccacccacctcggcctcccaaagtgttgggattatgggcgtgagccaccaggccyggccttcctattgatttctaattgaatttgattatactttgcatgcttaaattcttctcaatttattgagatctgtttgcatggagagagaaatcctact

SEQ ID NO: 346545 - DNA, 201 bp, Homo sapiens
aaagaaagagtcattgcctggtgttcactttttactgtttgaagaatggagaatagttttcaatgtatttaaacctttctcaaaatggaacaaactgggtrgtgttatttattatttgttattttaattagctgcatttcttctttcctcagtcaagcatcaaaacttggagagcagatggcagatttgcatctttacaac

SEQ ID NO: 346546 - DNA, 201 bp, Homo sapiens
tcagcataatcatgctgatatttatccaagtctaaaatcctttgatattcatccgtgatacacatccatgttgcatgtgtcaaaagcccattcccctgtayggatctaacacagcctgtttatccattcacatgtggatggatttctggatcatttccagtttttgctcatacaaataaagccgctgtgaacctttgtgta

SEQ ID NO: 346547 - DNA, 201 bp, Homo sapiens
tgaggtgagtgttcacctaactgaaaactggaatgtttgtgggaatatttcagaaacaggaaggcccaggtcccacgggaggcgttgggggccggccgggygtgccgtgccttttaccttcccagcccctgccctggacctgaggccccgcctgatgggcccagccctcttcttccctgcctgacgtgtgtgcccaagtta

SEQ ID NO: 346548 - DNA, 201 bp, Homo sapiens
ggcctttacaaattattatttatttagatacaattgaaatataattcacataagatccaccattttaaaggattagaattaattggtttttagtacattcrtgatggtgtgcaaccatcactgctgtttaactccagaacattttctttcttttcttttcttttttatttttttgagacggcgttttgcccttgttgccca

SEQ ID NO: 346549 - DNA, 201 bp, Homo sapiens
attccctctcaaagaaaaaaacaacaaaaccaaacaaaacctgcagacatatatgtgtagcgaaataaaagtggccagagtttgctaaggtagcgcaacaytggttcctattctgtgggtcgattaaaactataacctcagaggttctccactgtgtggggattctagacctaaattaggaggaaatcctaagttagacaa

SEQ ID NO: 346550 - DNA, 201 bp, Homo sapiens
ctttttatggctgaataatactggagcctcttgaaccatcatctttgaaatctgtgaagttccaaagaagactttggacagcccaactgccctgtgcttcycttgaagaagccaatattggaccatattttggttttgttaggaacacagcacccattatataagagctagttcaaagtcactgcttcttgaagagagaat

SEQ ID NO: 346551 - DNA, 201 bp, Homo sapiens
gaccatattttggttttgttaggaacacagcacccattatataagagctagttcaaagtcactgcttcttgaagagagaatactttcaaatctgtctcctygtcgacgcccgtcctgactagttgggtccctgcgaacaatgaccaagctctccctggtgtgggtagagggtgattctcccagctggaggtcacctggggc

SEQ ID NO: 346552 - DNA, 201 bp, Homo sapiens
ggtccagctctggaccttggttcactcacacctccccacgccctcagtgctcccgggcacccacacgtggcctgtgcatcctcctgtcacagcagcctgcrgaccccacacccctcacggcccaggctcagcctcagccttgcagcctctcgtctccgacggggggcccctctgcaccctgccctctgtggtggacgccag

SEQ ID NO: 346553 - DNA, 201 bp, Homo sapiens
tgtgtgtgagacccatatgcacacatgtgtacaggcagagagagactcagagacaaacagagagagacagagaaagggatagagatggggagggagacagmaacagggagaagcctgtggctgagccgtccacacaactgcccggttatcagaggcagggccaagagttccaccctgccattcttaatggagataaaaagt

SEQ ID NO: 346554 - DNA, 201 bp, Homo sapiens
gggacgggcaggagacagatgccttcctcttgtctcaactgcaagaggcatgccttcctcttatactaatcctcctcagtacagaccctttatgggtgtcrggctgggggacggtcaggtctttcccttcctacgaggccatatttcagactgtcacatggggagaaaccttggacaatacctggctttcctaggcagagg

SEQ ID NO: 346555 - DNA, 201 bp, Homo sapiens
atttgtcttagtacagaacaaaatggagtctcctatgtctacttctttctacacagacacagtaacaatctgatctctcttgcttttccccacactctcaytcagcataatcatgctgatatttatccaagtctaaaatcctttgatattcatccgtgatacacatccatgttgcatgtgtcaaaagcccattcccctgta

SEQ ID NO: 346556 - DNA, 201 bp, Homo sapiens
tttgagatttctttgcgtatttaggatatgagtgttttaccagatatatgatttgcgaatagtgtctcctagtttgttgtttgtgtattttcttggaagcrtccttcagaggctgggcatggtggctcgcgcctgtaatcccagcactttcggaggccgaggtgggcagatcacttgaggtcaggagttcgagaccagcct

SEQ ID NO: 346557 - DNA, 201 bp, Homo sapiens
ggggtttcaccatgttggtcaggatggttttgatctcttgacctcgtgatccacccacctcggcctcccaaagtgttgggattatgggcgtgagccaccaggcctggccttcctattgatttctaattgaatttgattatactttgcatgcttaaattcttctcaatttattgagatctgtttgcatggagagagaaatcc

SEQ ID NO: 346558 - DNA, 201 bp, Homo sapiens
tttctttttttttttctttttttttttgagatagagtttcactcttgttgcccaggctggagtgcaatggcgcgatctcggctcactgcaccctttgcctstgggttcaagcgattctcctacgtcagcctcccaagtagctgggactacaggcccacgccaccatgcccggctaattttgtatttttagtagagatggag

SEQ ID NO: 346559 - DNA, 201 bp, Homo sapiens
tctgggttcaagcgattctcctacgtcagcctcccaagtagctgggactacaggcccacgccaccatgcccggctaattttgtatttttagtagagatggmgtttccttatgttgcctagactggtctttaactcctgggctcaagggatctgcccacctcagcctcccaaagtgctgggaattgcaggcgtgagccactg

SEQ ID NO: 346560 - DNA, 201 bp, Homo sapiens
ccgtccccccgtccccgtcccccgtccccgtcccccctgtccctgtcccccttcccccgacccctcccagatcctggggaccaataaagcccgcagcgggyctcggctggcgtcctgcgcctcgttcctccgctcgtggggctgctttcagggccagacgcacggcgagctgtgcacggacgtttttgcggcgattcaggg

SEQ ID NO: 346561 - DNA, 201 bp, Homo sapiens
catgaaggtcatcgacctgccgggaggtggggccgcctttgtgatggagcatttgaagatgaagagcttgagcaggtgagtgtgtgtgagacccatatgcrcacatgtgtacaggcagagagagactcagagacaaacagagagagacagagaaagggatagagatggggagggagacagaaacagggagaagcctgtggc

SEQ ID NO: 346562 - DNA, 201 bp, Homo sapiens
aggtcatcgacctgccgggaggtggggccgcctttgtgatggagcatttgaagatgaagagcttgagcaggtgagtgtgtgtgagacccatatgcacacawgtgtacaggcagagagagactcagagacaaacagagagagacagagaaagggatagagatggggagggagacagaaacagggagaagcctgtggctgagc

SEQ ID NO: 346563 - DNA, 201 bp, Homo sapiens
ccggctcaagcgttctgtgaaggtttgtgtctgcacgatccgtgaccttcctttggcctccatgcgcagcgcacaggcttctaggggtggttttaactttyctatccagcaagcgtcgggggatgtgaggcttggggtccttggctcagctctgggccgcccctctcagcccaccgtcctcctggcagtgggaaagaagca

SEQ ID NO: 346564 - DNA, 201 bp, Homo sapiens; identical to SEQ ID NO: 73338

SEQ ID NO: 346565 - DNA, 201 bp, Homo sapiens
tttagcctcagactttcctcatgtgaaacacaggtgcttgtaaatggtggtgtttaccatgattactgttcttactatcagtaacacttgtccactccatygtgttcctctcccatgggaagatgtgggtaccagatgatccagaatgactgatttcaaaacataactctcggccgggcacagtggttcacgcctgtaatc

SEQ ID NO: 346566 - DNA, 201 bp, Homo sapiens
cgggccagctggagttccgggtgggcgtgggcttggcgggccccgcactcggagcagccggccagccctgctggccccgggcaatgagcacccgggccagyggctgcgtacggtgtactgggtcccccagcagtgccagcccaccggcgctgtgctcgatttctcaccgagccttagctgccttcctgcagggcagggctc

SEQ ID NO: 346567 - DNA, 201 bp, Homo sapiens; identical to SEQ ID NO: 73350

SEQ ID NO: 346568 - DNA, 201 bp, Homo sapiens; identical to SEQ ID NO: 73351

SEQ ID NO: 346569 - DNA, 201 bp, Homo sapiens
cagcttgcagggaggtgtggagggagaggggcgagcgggaaccggggctgcctagggcgcttgcgggccagctggagttccgggtgggcgtgggcttggcrggccccgcactcggagcagccggccagccctgctggccccgggcaatgagcacccgggccagcggctgcgtacggtgtactgggtcccccagcagtgcca

SEQ ID NO: 346570 - DNA, 201 bp, Homo sapiens
gtcaggcatcgcagtgacatcccgtggcgggagggaggagcactgggctccaggcacagggtctgcaggccgaccagggcttgagcttcaactgcgaaccmtgggcacctccctgagcgtcgctttcctcgtcaaaaaaatggggataataccgttattcaccttcctcctgcggtagtgatgaggcgctgaggctcacag

SEQ ID NO: 346571 - DNA, 201 bp, Homo sapiens
cgccaaccaccgctggagccagaaggccatggacgacacgttctacctgagcaacgtcgcgccccaggtagcgcccgcgccccgggccggtcgcggaatgmggggccggcgcctggcctcgcggggcctcggtttgttcttctgcagaacggggcagctgcccaacgcgcccccggtcaggcatcgcagtgacatcccgtg

SEQ ID NO: 346572 - DNA, 201 bp, Homo sapiens
agggaaggctgcctggaagaggtggctttgggttcatccaggccccctgcccacgtgtgcctgggtctgcccacaggacagaggctgatgggaaatcctaygtaaagtaccaggtcatcggcaagaaccacgtggcagtgcccacacacttcttcaaggtgctgatcctggaggcagcaggtgggcaaattgagctccgca

SEQ ID NO: 346573 - DNA, 201 bp, Homo sapiens
tccccagtgcaccgagctctcacgccttccccatgcaggtccccagtgcaccgagctctcccgccttccccatgcaggtccccagtgcaccgagctctcaygccttccccctgcaggtccgcggtgcaccaggctctcccgccttcagtctctgctctgcttggagcacttccctccacccttctcgggagtttgaatcta

SEQ ID NO: 346574 - DNA, 201 bp, Homo sapiens; identical to SEQ ID NO: 73353

SEQ ID NO: 346575 - DNA, 201 bp, Homo sapiens
gcttgacccgcagctaccaaaacgtctatgtctgcacagggccactcttcctgcccaggtaaggtggaaaccaggggggcggcagaacctcccactcaccygaggcccctactgccactcacagggccaggcttgccccaggctctgggtcaataccagttccctactcatctggtttcttggcaagcctgtcagcttccc

SEQ ID NO: 346576 - DNA, 201 bp, Homo sapiens; identical to SEQ ID NO: 73354

SEQ ID NO: 346577 - DNA, 201 bp, Homo sapiens; identical to SEQ ID NO: 73355

SEQ ID NO: 346578 - DNA, 201 bp, Homo sapiens
tggcgcgggcaggcagcctcaaggccatcacggcgggcagtaagtgagggtggagcccagtgagactgtgggtgtgtgcaggccggggagtattaaaggtsgtgatttttggagacaagtctggtggcgtccgtcccaagtgacctgcagagcccctggtttcactgctgcttcactgatgtcctcggccccttagaactt

SEQ ID NO: 346579 - DNA, 201 bp, Homo sapiens
attctcctagcagcgtttattgtcgcccactctgcctgacccagtgttgggcataaggaaaacagagggaaagagttaaccaccctggagagagttccagsctcaaggaggagccaggcaggctacagaagtctcacagtgagggcgtggtcctgcaggttgacagaagttagaggacagatcagggaaggctgcctggaa

SEQ ID NO: 346580 - DNA, 201 bp, Homo sapiens
tttcattagcaggtgcctcctagggcctggtggaagggaggagactctgctgagggggagcccccgtccggtgtcctggcacctgtgctggtgctgggatrtcacctgtcatggtccttgcccacttgttgctcacctctgtggggagagatggacagtcgttaagtctcccctcagacgaatgtgaatattcagaaggct

SEQ ID NO: 346581 - DNA, 201 bp, Homo sapiens
gggcaccaacctctgacccagcttccttctgggaagacagccccctatccactttccattgtcccaggcctggagagctcaggatggaggtcgattcatgrcattccccgctaggctcttcctgtggctcagactgggaaaaggaacgggttggtagttggaagggctggtcttcccaggagaccctgggtggggctgggg

SEQ ID NO: 346582 - DNA, 201 bp, Homo sapiens
ttttatttctattattattacattgtaacatatagtgaaatatacaactcacagtaatgtaggatccgtgggagccctgagcttgttttcctgcaactagrcagtcctatctggaggtgatgggcaacaacgacagatcaggcattaggttttcaaaagaagcgcgcaacctcctcacatgcgcagttcaccatagggttc

SEQ ID NO: 346583 - DNA, 201 bp, Homo sapiens
cacttttggggtcaggcataggacgctgtgctacgggaactctgctgggaaggctggtactcccatcagtctcgccgggccgacagccctgtctacccatycctaaggccttgcccaagccgagcactctgagcctgacagccataccccccagcaggaaccctggctgccacccttccaacccctgcacgaggggtgaaa

SEQ ID NO: 346584 - DNA, 201 bp, Homo sapiens
gcaggtggatcacaatgtcaggagttcaagaccagcctggccaacacggtgaaacactgtgtatactaaaaatacaaaaattagccgggtgtggtggcacrcacctgtattcccagctactggggaggctgaggcaggagaattgcttgaacccgggaggcagaggttgcagtgagccgaggtagtgtcactgcactcaag

SEQ ID NO: 346585 - DNA, 201 bp, Homo sapiens
acttgaacccaggagacagaggttgcagtgagctgagatcgtgccactgcactccagcctgggtgagagagccagactccatcttaaaaaagaaaaaaaaraaaaaaaaagttgcagagctaccaaaatgtagaaaactgagtttcatctacttctatcctgtgccatgagcgccccaaaggtgcatgtttggccagtgac

SEQ ID NO: 346586 - DNA, 201 bp, Homo sapiens
tacccgcgatgccgcctatttggacacctactctgcccaacctactccagcccgcgtgcccctgcagcccgtcgggcgcccaggccacgcccctgggcgayattggctctccgattggacagcttaatggaggtgtggccggaagaggcgagtctcattggcagaggcgggaccgacggtgtgtgcggaacatggcggagc

SEQ ID NO: 346587 - DNA, 201 bp, Homo sapiens
tccacttcccagttcaatcgattctcctgccccagcctccggagtagctgggattacaggcatgcgccaccatgcccagctaatttttgtatttttagtaragacggggtttcgccatgttggccaggctggtcttgaactcctgacctcactcaggtgatccgcccgccttggcctcccaaagtgctgggattacaggca

SEQ ID NO: 346588 - DNA, 201 bp, Homo sapiens
gcctatggaaggcaagccttatctctcttttttttttttttttgagatggagtcttgctctgttgcccaggctggagtgcaacggcgccatctctgctcaytgcaacctccactgcccaagttcaagcaattttcctccctcggccccccgagtagttgggattacagaagtgtgccaccacacctggctaattttcgtat

SEQ ID NO: 346589 - DNA, 201 bp, Homo sapiens
gcctcacactcataatcctcctaccactccttctccagggtgaacacggccaaaggattgagtggcgaaaatggaagcaacagagtaagtaagggtgggtwagagtatcttcccataggccactccaccagtgctcagtcaaaccctggagaaagacaccaactttgttccctctgggtcctgcagcacacaaagtgggga

SEQ ID NO: 346590 - DNA, 201 bp, Homo sapiens
atttcaagcctatggaaggcaagccttatctctcttttttttttttttttgagatggagtcttgctctgttgcccaggctggagtgcaacggcgccatctytgctcactgcaacctccactgcccaagttcaagcaattttcctccctcggccccccgagtagttgggattacagaagtgtgccaccacacctggctaatt

SEQ ID NO: 346591 - DNA, 201 bp, Homo sapiens
gcttctggagcccttttctgacttccagggcgactgtgggcagtgctgtaccctgagcctcagttttctcttctgttttgtgggaactcattcgacagttkcttgagtgctttctgtgtgccaggctgggtcccaggcgctggggatacagcgggtccctgccctcctgccgctttctggggcagcagttcgcagaggttc

SEQ ID NO: 346592 - DNA, 201 bp, Homo sapiens
tcgtggcttctggagcccttttctgacttccagggcgactgtgggcagtgctgtaccctgagcctcagttttctcttctgttttgtgggaactcattcgamagtttcttgagtgctttctgtgtgccaggctgggtcccaggcgctggggatacagcgggtccctgccctcctgccgctttctggggcagcagttcgcaga

SEQ ID NO: 346593 - DNA, 201 bp, Homo sapiens
ccggggccgggccgcgcctcctgctgcctgcttcccgctgatcccaggccggaagcccccgaaggtgccgcgtgagcctcagcaggatgggaacagcgccygtgtcctctccggaactccctgcggctccctggcccccgctggattacggaggcgggaccctgctcgcctccggatgctgaatccggagccctttcgtgg

SEQ ID NO: 346594 - DNA, 201 bp, Homo sapiens; identical to SEQ ID NO: 73360

SEQ ID NO: 346595 - DNA, 201 bp, Homo sapiens
ctcctgctgcctgcttcccgctgatcccaggccggaagcccccgaaggtgccgcgtgagcctcagcaggatgggaacagcgcccgtgtcctctccggaacyccctgcggctccctggcccccgctggattacggaggcgggaccctgctcgcctccggatgctgaatccggagccctttcgtggcttctggagcccttttc

SEQ ID NO: 346596 - DNA, 201 bp, Homo sapiens
gaggagaaaaaaaaatggaaggatctcaagctgatgaaaaaactggagcggcagcgggcacaggaggaacaggcaaagcgcctggaagaggaggaggcagyggcagagaaggaggaccgcggtgagctggggtcttggggagggccacaggttgtggcccacggtagttgtcctgcaggcagagcagagatgtcttatctg

SEQ ID NO: 346597 - DNA, 201 bp, Homo sapiens
gggccgggccgcgcctcctgctgcctgcttcccgctgatcccaggccggaagcccccgaaggtgccgcgtgagcctcagcaggatgggaacagcgcccgtrtcctctccggaactccctgcggctccctggcccccgctggattacggaggcgggaccctgctcgcctccggatgctgaatccggagccctttcgtggctt

SEQ ID NO: 346598 - DNA, 201 bp, Homo sapiens
cagattgccagagcctgtgccatcttctgtgtggatgagatcgtggtgtttgatgaggagggccaggatgccaagtaaggggccatcccacagggtgccakggttcagggagagggaggggctgccgggatgggccgaggcttcaccatgcccccgtccacatgcctggctcttccctcgtgccctgcctgaaatattccc

SEQ ID NO: 346599 - DNA, 201 bp, Homo sapiens
cttcccctgggaacatcctgaggtcagcattctttcctaggtacctgaggaaggcgttcttccccaagcaccaggatctacagtttgcaggtaacgctgtrtgggcccgcccccccatttcccctggatcatgccacagacactgagaccacccagtcctaccctgcgctgtccaggtgggaaagcaggcctgggagagca

SEQ ID NO: 346600 - DNA, 201 bp, Homo sapiens
cacttgaacccaggagacagaggttgcagtgagctgagatcgtgccactgcactccagcctgggtgagagagccagactccatcttaaaaaagaaaaaaargaaaaaaaaagttgcagagctaccaaaatgtagaaaactgagtttcatctacttctatcctgtgccatgagcgccccaaaggtgcatgtttggccagtga

SEQ ID NO: 346601 - DNA, 201 bp, Homo sapiens; identical to SEQ ID NO: 73366

SEQ ID NO: 346602 - DNA, 201 bp, Homo sapiens; identical to SEQ ID NO: 73368

SEQ ID NO: 346603 - DNA, 201 bp, Homo sapiens
actgaagacaggctgggagcgggggcacccgctagccccccaggccccagcccactgccacgcttctcttccaggaagccatcctcatctccctggccgcsctgcagcctggcctcacccaggcgggtgcccggcacacctgaaagttctaaggggccgaggacatcagtgaagcagcagtgaaaccaggggctctgcagg

SEQ ID NO: 346604 - DNA, 201 bp, Homo sapiens; identical to SEQ ID NO: 73371

SEQ ID NO: 346605 - DNA, 201 bp, Homo sapiens
ggcagcatggtggaggcgtgagaaccagtggcgtgggggccttcgccggggccgggccgcgcctcctgctgcctgcttcccgctgatcccaggccggaagsccccgaaggtgccgcgtgagcctcagcaggatgggaacagcgcccgtgtcctctccggaactccctgcggctccctggcccccgctggattacggaggcg

SEQ ID NO: 346606 - DNA, 201 bp, Homo sapiens
ctcacgcctgtaaccccagcactttgggaggctgaggcaggcgggtcatttgaggtcaggagtttgagaccaacctggccaatatggtgaaaccctgtctytaataaaagtacaaaaatgatccaggtgtggtggcacgcatctataatcccagctactcgggaggctaaggcaggagattcacttgaacccaggagacag

SEQ ID NO: 346607 - DNA, 201 bp, Homo sapiens
tgatgaggagggccaggatgccaagtaaggggccatcccacagggtgccagggttcagggagagggaggggctgccgggatgggccgaggcttcaccatgsccccgtccacatgcctggctcttccctcgtgccctgcctgaaatattccctgtgtaatccttagtgggtagagttgccaggtgggggtgatgactacaga

SEQ ID NO: 346608 - DNA, 201 bp, Homo sapiens
ccaactcagaggggggctccgagccatccaaaattcagcacagtacccgcgatgccgcctatttggacacctactctgcccaacctactccagcccgcgtrcccctgcagcccgtcgggcgcccaggccacgcccctgggcgatattggctctccgattggacagcttaatggaggtgtggccggaagaggcgagtctcat

SEQ ID NO: 346609 - DNA, 201 bp, Homo sapiens
ccccagccaagcacaggcttggtgtctgccctgctcagtccttgactttccaggaacagctctacccacccctgctcggtacacacacacccctgcctcartgcacacacaggcagagctctacccacccacccctaccttagtacacacacgcacacacacacacacacacaccacacagctcttcccacccacccccgc

SEQ ID NO: 346610 - DNA, 201 bp, Homo sapiens
cacgggatgtcactgcgatgcctgaccgggggcgcgttgggcagctgccccgttctgcagaagaacaaaccgaggccccgcgaggccaggcgccggcccckcattccgcgaccggcccggggcgcgggcgctacctggggcgcgacgttgctcaggtagaacgtgtcgtccatggccttctggctccagcggtggttggcg

SEQ ID NO: 346611 - DNA, 201 bp, Homo sapiens
ggtgggattgggagccagaaggcctaaacctgtatctcagctgtcaccccggctggagtgcatgcagtggcatggtcatggctcactgcagcctctacttrctgcactcagatgatcctcccaccttagcctcctgagtagctgggattatacgcgtgcacttgtagacaggagctcttgaaggggccacagctggatcct

SEQ ID NO: 346612 - DNA, 201 bp, Homo sapiens
cacgggcagcacgggcagccggcccagcagtcccggcgccgcccgcgcgtcctcccgccgccgccgccagccctcgacgaccgcacccagccccgcgcccracgccagggtcaggccggcccgcagcgcccgcatggccggggagcgacctagcggcgggcgacccgcgaggctcttaaaggagccgcgtcgcgggatcca

SEQ ID NO: 346613 - DNA, 201 bp, Homo sapiens
gattatacgcgtgcacttgtagacaggagctcttgaaggggccacagctggatcctgagcccccatctctctctctccaggactgtggagggggaattcasaggagttgggaagaaggggcaggcgtgcgtacagctggcccggatcctgcagtacctggagtgtccacagtaagggggtcactcccctaagcatgaggga

SEQ ID NO: 346614 - DNA, 201 bp, Homo sapiens
tccaggactgtggagggggaattcacaggagttgggaagaaggggcaggcgtgcgtacagctggcccggatcctgcagtacctggagtgtccacagtaagsgggtcactcccctaagcatgagggaggggtgtgtcaaagtggagaccaggtaggaggcggcttcccctgggaacatcctgaggtcagcattctttcctag

SEQ ID NO: 346615 - DNA, 201 bp, Homo sapiens
gcttctccccaggaggtgaagattgacaagaacctggagcccgggcttcgggtgactgtgcgactgaaccagcagcagcacccaggtatctggaaggttcyccaacccctgggttggcctgatgagctccagggttcagccacctgcttccattccctcaccccatctttacagactctgttacccctccagactgcaaga

SEQ ID NO: 346616 - DNA, 201 bp, Homo sapiens
ctgagctggccccacccccaggtgctgtgtttgctgaggcccccttccaagatgggtatgacctgaccatcgggacgtcagagcgcggctcagatgtggcytctgcccagcttcccaacttcaggtgtgtacctcctggggctgcggccagggcaggaggaatgtggccaggaacctgcctggtgggtgaagctgcacaga

SEQ ID NO: 346617 - DNA, 201 bp, Homo sapiens
gggggccctgcccacccctgctccgggcctctggttccttagccgtgcgctcagtgatctcccagggccctggttctgccacttccttgtgtgtgaccackgtgggcacagcagctctccccttggggtctcacttgcatctgtcccacgggggaagccacgtgcagctggagccttcgtcctggcctcatggaacctgtg

SEQ ID NO: 346618 - DNA, 201 bp, Homo sapiens
gagcctgaggagcaggctgtgtggtcctccaggtggcaagtgtgcagtgtgaacctgggcctgtcattaacctcaccaggccctactaaggacaggggacmccagtgggccgggtctcgggcagccaggcactgaagacaggctgggagcgggggcacccgctagccccccaggccccagcccactgccacgcttctcttc

SEQ ID NO: 346619 - DNA, 201 bp, Homo sapiens; identical to SEQ ID NO: 73361

SEQ ID NO: 346620 - DNA, 201 bp, Homo sapiens; identical to SEQ ID NO: 73362

SEQ ID NO: 346621 - DNA, 201 bp, Homo sapiens
atccatccctctgggaggtggccgggagccttgcctgacccaaatatcagaccagggtttttgtcctgtcaacttgctgtgtgtccttgggcaagtccttycccttctctgggccttgttctccctggatgcactgcctggaatgctgttaaggactactgagcaaaagtatcattattgatcaataatgtttctgtaggg

SEQ ID NO: 346622 - DNA, 201 bp, Homo sapiens
cccagtgtcctctttgacctgtacgtcaatacctgtcctggccagggtagccgtaccatccgcacggaggtgagcccgcctgcctccccgactgccagccrctggggccttgggatctgtccgaggggcgggtgctactcttgccctgtcacccacccttgcccgtggctgccttgtctggaggtggtcctctcatccccc

SEQ ID NO: 346623 - DNA, 201 bp, Homo sapiens
tcttccaggaagccatcctcatctccctggccgccctgcagcctggcctcacccaggcgggtgcccggcacacctgaaagttctaaggggccgaggacatsagtgaagcagcagtgaaaccaggggctctgcaggtcacttgggacggacgccaccagacttgtctccaaaaatcaccacctttaatactccccggcctgc

SEQ ID NO: 346624 - DNA, 201 bp, Homo sapiens
gcaggctgtgtggtcctccaggtggcaagtgtgcagtgtgaacctgggcctgtcattaacctcaccaggccctactaaggacaggggacaccagtgggccrggtctcgggcagccaggcactgaagacaggctgggagcgggggcacccgctagccccccaggccccagcccactgccacgcttctcttccaggaagccat

SEQ ID NO: 346625 - DNA, 201 bp, Homo sapiens; identical to SEQ ID NO: 73365

SEQ ID NO: 346626 - DNA, 201 bp, Homo sapiens; identical to SEQ ID NO: 73367

SEQ ID NO: 346627 - DNA, 201 bp, Homo sapiens; identical to SEQ ID NO: 73370

SEQ ID NO: 346628 - DNA, 201 bp, Homo sapiens
ggatcatgccacagacactgagaccacccagtcctaccctgcgctgtccaggtgggaaagcaggcctgggagagcaagacctgtgtctgatgccaagacgyaggtctgtggcagagccggtactccgctccagggtccccactgcaccctgtgtgccctagcacttcccagactcttcccggctctgcctccacagggctc

SEQ ID NO: 346629 - DNA, 201 bp, Homo sapiens
agagaggggagctggatctattttgctcatctcaaaattcctcccacttgggaaattctcaaaccatgggcgctagggacagaggaagggagagaaaggtwgggggcccttgcctctcacactggctgggaacatccctcccctgctcagggcggccctacacactgagcgtagccctgccgggctccatcctggacaatg

SEQ ID NO: 346630 - DNA, 201 bp, Homo sapiens
gcctctcacactggctgggaacatccctcccctgctcagggcggccctacacactgagcgtagccctgccgggctccatcctggacaatgctcagtcgccrgagcttcgcacctacttggccggtcagattgccagagcctgtgccatcttctgtgtggatgagatcgtggtgtttgatgaggagggccaggatgccaagt

SEQ ID NO: 346631 - DNA, 201 bp, Homo sapiens
ggcatgagccaccttttgtgtgaccttgggccatgtatttgacttcccggggctgaaggcccctggtctgtaaatggggataatggcagtatcctcactarggatcaggttaatggctatcgggttaatgtgcacacactaaagacttattagatatcagctttcattttatccccatttgatagctggagaactgaggca

SEQ ID NO: 346632 - DNA, 201 bp, Homo sapiens
tttaaacaagtgaactactcagaggtctgagtgttgtatttgtcccaactcagaggggggctccgagccatccaaaattcagcacagtacccgcgatgccscctatttggacacctactctgcccaacctactccagcccgcgtgcccctgcagcccgtcgggcgcccaggccacgcccctgggcgatattggctctccga

SEQ ID NO: 346633 - DNA, 201 bp, Homo sapiens
ctgggagactgaggcccagagaggggagctggatctattttgctcatctcaaaattcctcccacttgggaaattctcaaaccatgggcgctagggacagargaagggagagaaaggtagggggcccttgcctctcacactggctgggaacatccctcccctgctcagggcggccctacacactgagcgtagccctgccggg

SEQ ID NO: 346634 - DNA, 201 bp, Homo sapiens
tggccggtcagattgccagagcctgtgccatcttctgtgtggatgagatcgtggtgtttgatgaggagggccaggatgccaagtaaggggccatcccacakggtgccagggttcagggagagggaggggctgccgggatgggccgaggcttcaccatgcccccgtccacatgcctggctcttccctcgtgccctgcctgaa

SEQ ID NO: 346635 - DNA, 201 bp, Homo sapiens
gtcctctcatcccccttggcctcttgccacagcgacgagacatgagtgtagctgggagtcaaccatgggtgctagtgcccgtcctgtgctcccagactggstgacccagggggccctgcccacccctgctccgggcctctggttccttagccgtgcgctcagtgatctcccagggccctggttctgccacttccttgtgtg

SEQ ID NO: 346636 - DNA, 201 bp, Homo sapiens; identical to SEQ ID NO: 73375

SEQ ID NO: 346637 - DNA, 201 bp, Homo sapiens
tatgacctgaccatcgggacgtcagagcgcggctcagatgtggcctctgcccagcttcccaacttcaggtgtgtacctcctggggctgcggccagggcagraggaatgtggccaggaacctgcctggtgggtgaagctgcacagatgggcccctgctgtctggggtggggagggactgaggtctgggcgctgtgctgggtg

SEQ ID NO: 346638 - DNA, 201 bp, Homo sapiens
tccctctgggaggtggccgggagccttgcctgacccaaatatcagaccagggtttttgtcctgtcaacttgctgtgtgtccttgggcaagtcctttccctyctctgggccttgttctccctggatgcactgcctggaatgctgttaaggactactgagcaaaagtatcattattgatcaataatgtttctgtagggttggg

SEQ ID NO: 346639 - DNA, 201 bp, Homo sapiens
ggacgctgtgctacgggaactctgctgggaaggctggtactcccatcagtctcgccgggccgacagccctgtctacccatccctaaggccttgcccaagcygagcactctgagcctgacagccataccccccagcaggaaccctggctgccacccttccaacccctgcacgaggggtgaaaacttcttgcccctcttcttg

SEQ ID NO: 346640 - DNA, 201 bp, Homo sapiens
agcgggggcacccgctagccccccaggccccagcccactgccacgcttctcttccaggaagccatcctcatctccctggccgccctgcagcctggcctcayccaggcgggtgcccggcacacctgaaagttctaaggggccgaggacatcagtgaagcagcagtgaaaccaggggctctgcaggtcacttgggacggacgc

SEQ ID NO: 346641 - DNA, 201 bp, Homo sapiens
tgaacctgggaggcggaggttgaagtgagccgagattgcatcgctgcactcctgcttggatgacagagtgagactccttccccaaaaaaaaaaaaaaaaaagtaatctagacttgttggtaagacatttgcatgtcaaggttagaaataaatatgagtaaaattcagagttctttatcagcgaaatttctgggagtccagt

SEQ ID NO: 346642 - DNA, 201 bp, Homo sapiens
tccaggctccaacctcagaaccctctgggagtaagattacccagccctgtgctcgggctgagcaatcaactatagcgcacacgctcctttactgtggttcygagatagttaattgaaatctggatactctgggtaaagtcagaacatccagctgggcccagcatgggagatcagcttgatgagtctcccgcaccctattct

SEQ ID NO: 346643 - DNA, 201 bp, Homo sapiens
ttattctgattggaactcgtgagcaagaagtattggtagcaataagtaatctaggtcgggcatggtggctcacacctataatcccagtactttgggaggcygaggcctgaggtcaggaatttgagaccagcctggccaacatggtgaaaccctgtctctactaaaaatacaaaaattagcagggcatggtggcttgtgcct

SEQ ID NO: 346644 - DNA, 201 bp, Homo sapiens
gactacaggagcccgccaccacacccggctaatattttgtagttttagtagggatagggtttcaccgtgttagccaggatggtctcgatctcctgacctcrtgatccgcccaccttggcctcccaaagtgttgagattacaggcgtgagccacagcgcccggcctccttaggccatctcttagtatcaccatggcctgtgg

SEQ ID NO: 346645 - DNA, 201 bp, Homo sapiens
ccacatcccctttcaaccctcctatttgtcctgtgcagaaaacagatggatcttggagaatgacagtggattatgatacatttaaccaggtggtaactccattgtagctgctgtaccagcccgacctgatgacattattctgattggaactcgtgagcaagaagtattggtagcaataagtaatctaggtcgggcatggtg

SEQ ID NO: 346646 - DNA, 201 bp, Homo sapiens
tggtgcgatctcggctcactgcaagctccgcctcccgggttcacgccattctcctgcctcagcctcccgagtagctgggactacaggagcccgccaccacrcccggctaatattttgtagttttagtagggatagggtttcaccgtgttagccaggatggtctcgatctcctgacctcatgatccgcccaccttggcctcc

SEQ ID NO: 346647 - DNA, 201 bp, Homo sapiens
tgacccacgagttttcactcaggtccttctcacagtgtgtccagtgggtccttgagcccatcctgcggctattttcccagctccaggtgcataattggaasagacatatgagcagctgacagaatcccacattgatttcctgatggtgggaaaagtcgagcagaagccattagaactgcctctacctaggaaatcaaaagc

SEQ ID NO: 346648 - DNA, 201 bp, Homo sapiens
aaattagccgggcgtggtggcgggctcctgtagtcccagctactcaggaggctgaggcaggagaattgcttgaacctgggaggcggaggttgaagtgagcygagattgcatcgctgcactcctgcttggatgacagagtgagactccttccccaaaaaaaaaaaaaaaaaagtaatctagacttgttggtaagacatttgc

SEQ ID NO: 346649 - DNA, 201 bp, Homo sapiens; identical to SEQ ID NO: 73377

SEQ ID NO: 346650 - DNA, 201 bp, Homo sapiens
agcccacatcctgtcttggaggcgggggtttctgttttgttttttttttctgctgtccaggctggagtgcagcggcatgatctctgcttactgcaacctcyacctcctgggttcaagcaattctactgcctcagcctccccggtagctggcattacagacacacaccaccatgccctgctaatttttgtatttttagtaga

SEQ ID NO: 346651 - DNA, 201 bp, Homo sapiens
gatcacgccattgcactccagcctggtgacagagcgagactctgtctcaaaaaaaaaaaaaaccaacaaacaaaaacaaaacaaaacaaattagccgggcrtggtggcgggctcctgtagtcccagctactcaggaggctgaggcaggagaattgcttgaacctgggaggcggaggttgaagtgagccgagattgcatcgc

SEQ ID NO: 346652 - DNA, 201 bp, Homo sapiens
gtgggcaggaggcagcgataatcaccacgtgcagaggtcctgccaggtgcccagcctcatcattccctagaaggcaggcaccaccacatgctcccacactrtagataaggaaacagctttgaaacagatttgaaagtgtttgaggatttgcctggaaggagggctccagagccagggactgggtccgggacacccggagac

SEQ ID NO: 346653 - DNA, 201 bp, Homo sapiens
tagataggtcaataggtaggtaggtaggtagttagacataggtatctatctatctatctatctatctatctatctatctatctatctatctatctatctatcttactgtagtttagcacagacattggttaagtcatgtcactcctctgaacctcaattttctcatctctaaaatggggatattaggccgggcgaggtagc

SEQ ID NO: 346654 - DNA, 201 bp, Homo sapiens
ggtagataggtcaataggtaggtaggtaggtagttagacataggtatctatctatctatctatctatctatctatctatctatctatctatctatctatctatcttactgtagtttagcacagacattggttaagtcatgtcactcctctgaacctcaattttctcatctctaaaatggggatattaggccgggcgaggta

SEQ ID NO: 346655 - DNA, 201 bp, Homo sapiens
aggtagataggtcaataggtaggtaggtaggtagttagacataggtatctatctatctatctatctatctatctatctatctatctatctatctatctatctatcttactgtagtttagcacagacattggttaagtcatgtcactcctctgaacctcaattttctcatctctaaaatggggatattaggccgggcgaggt

SEQ ID NO: 346656 - DNA, 201 bp, Homo sapiens
gtaggtagataggtcaataggtaggtaggtaggtagttagacataggtatctatctatctatctatctatctatctatctatctatctatctatctatctatctatcttactgtagtttagcacagacattggttaagtcatgtcactcctctgaacctcaattttctcatctctaaaatggggatattaggccgggcgag

SEQ ID NO: 346657 - DNA, 201 bp, Homo sapiens; identical to SEQ ID NO: 73380

SEQ ID NO: 346658 - DNA, 201 bp, Homo sapiens
tgcacagcagcaccccatcatcacctagaagtggtagatacatggccaggccagagcaggccctgaaggcagaagtaagtgacatgaagtggcccaaatgmtgaaggtccccactcctgcaaccctgccttctctcttcaagcacccatggctcacagggagttccctgctatcaggtgaccgaggaagaggagactcagg

SEQ ID NO: 346659 - DNA, 201 bp, Homo sapiens
gtcagttctctgaagagtctttttcatatatatcacatagatagagagataggcaggttggtaggtaggtagataggtcaataggtaggtaggtaggtagttagacataggtatctatctatctatctatctatctatctatctatctatctatctatctatctatctatcttactgtagtttagcacagacattggttaa

SEQ ID NO: 346660 - DNA, 201 bp, Homo sapiens
gagtcagaagcacaggatttgccgtcagctgaacaatttagaaaacctgctcctgagattcaggctctgctgtgggcctggtggggtctgactgtctggaygccagcagggaacagtggagcaagagtcatgggcctctgatgatctcagtgtgactttatgtctctgctttccaatgagagaaagtgacaattcactgag

SEQ ID NO: 346661 - DNA, 201 bp, Homo sapiens
aggacaaccactaacccaggactcgggctccatatctctaaaacgggcctcctagacatacctccctgaaatctgatgacctctgtgattagcccagtgtygagtgagaggacaatgcccagtgaccccgcggccatcacccatctgactgctgtccttaagcagggtggcatcatccctgaaagccctcttggctatctc

SEQ ID NO: 346662 - DNA, 201 bp, Homo sapiens
actgtagtttagcacagacattggttaagtcatgtcactcctctgaacctcaattttctcatctctaaaatggggatattaggccgggcgaggtagctcaygcctgtaatcccagcactttgggaggccaaggcaggtggatcacctgaggtcaggagttcaaaaccagcctggcaaacatggtgaaaccctgtctctact

SEQ ID NO: 346663 - DNA, 201 bp, Homo sapiens
agtcagttctctgaagagtctttttcatatatatcacatagatagagagataggcaggttggtaggtaggtagataggtcaataggtaggtaggtaggtagttagacataggtatctatctatctatctatctatctatctatctatctatctatctatctatctatctatcttactgtagtttagcacagacattggtta

SEQ ID NO: 346664 - DNA, 201 bp, Homo sapiens
cgagtagctgggattacaggcacctgtgaccacgccagctaatttttgtattttttttttagtagagacagagtttcaccatgttggccaggctggtctcraactcctgacctcaggtgatccacctgcctcgggcttccaaagtgctgggattacaggcgtgagccattgcgcccagcccaaaataacccctcatctaca

SEQ ID NO: 346665 - DNA, 201 bp, Homo sapiens
cagaaccctctgggagtaagattacccagccctgtgctcgggctgagcaatcaactatagcgcacacgctcctttactgtggttccgagatagttaattgraatctggatactctgggtaaagtcagaacatccagctgggcccagcatgggagatcagcttgatgagtctcccgcaccctattctgggcatcagcagagt

SEQ ID NO: 346666 - DNA, 201 bp, Homo sapiens; identical to SEQ ID NO: 73393

SEQ ID NO: 346667 - DNA, 201 bp, Homo sapiens
tctcaacacattcccctgcatcacaggcggaaatgggtgggacactgtcatttaaataatacaaatttctttcacttgaaagaaagtctgtgggtttttttcttatgtttttcttggccattgacaataatatgtccacttgtggttttaaaaaaattacagacctgtgtcatgtaggaagtgaaattccttgctatttta

SEQ ID NO: 346668 - DNA, 201 bp, Homo sapiens
ccctgcgatgggcatttgggctccttctgtgttatgaacagaaggcctcaatacctctttttttttttttttttttttttttttgagacagagtctcactytgttgcccaggctggagtgcagtggtgccaccttggctcactgcaacctccgccacccgagttcaagcgattctcctgcctcagcctcccaagtagctgg

SEQ ID NO: 346669 - DNA, 201 bp, Homo sapiens
gagtacagtggtgcagtcctggctcactgcaacctccgcctcccaggttcaagtgattttcctgcatcagcctcctgagtagctggaattacaggcacacrccaccacgcccagctgatttttgtatttttagtagagacggggtttcactgtgttggccaggctgttcttgaactcctgacctcaagtgatccccctgcc

SEQ ID NO: 346670 - DNA, 201 bp, Homo sapiens
cagcaacaagggcagggatttctatgagtctccctcctgacaaccctactaggtagggatcattattccctttgagcaggaggaaacggaagctcagaggmtgatactgaacggagtgcctacttgttccaggggcttcataattatttagctcccacaactgcgctggggagtgacttagggtcagctgcattttacagc

SEQ ID NO: 346671 - DNA, 201 bp, Homo sapiens
catttacaaacatgtgtgccacgcttttcccgttctgccccatagaatcaccctttatcctctggtctgtactatgcttttttttttttttttttttttttaatatggcaacagagtttgttccatatcggctcacagaggagttgcattcactgtattggtgctccagtatttatgttgccactctgttgaatgtacagc

SEQ ID NO: 346672 - DNA, 201 bp, Homo sapiens
aagcacctggtcaagcccaagagtgaagtaggcatgggagactggtttctccctttcccctttgccccacttccccagggcacctctcagcaaagccaaayatgttggcgaaaataaatgagcaagaaccgtgtacaagatccctgcccttggccaggtgcggtggctcatgcctgtaatcccagcactttgggaggccga

SEQ ID NO: 346673 - DNA, 201 bp, Homo sapiens
gcatttacaaacatgtgtgccacgcttttcccgttctgccccatagaatcaccctttatcctctggtctgtactatgcttttttttttttttttttttttttaatatggcaacagagtttgttccatatcggctcacagaggagttgcattcactgtattggtgctccagtatttatgttgccactctgttgaatgtacag

SEQ ID NO: 346674 - DNA, 201 bp, Homo sapiens
atgtctttaggggtggagggcgtccttcagcctgccacagatggcaaagtcatgccattgtggctgcagctccattgtccaggctgagtgtgggggcgcayggcgtggttctcatgcccaccacctaccctgaccctgcggaggtgggcaggaggcagcgataatcaccacgtgcagaggtcctgccaggtgcccagcctc

SEQ ID NO: 346675 - DNA, 201 bp, Homo sapiens
agcctcccaaagtgttggaattacaggcgtgagccaccgcacctggctgaggcctgggttcttaccagcaggccagcgattccttttttttttttttttttaattattatttatttattttagagacagggtcttgctctgtggcccaggctggagtgcaattgtgcgatcatagctcactgtagcctcgacttcctgggc

SEQ ID NO: 346676 - DNA, 201 bp, Homo sapiens
agattcctatcttgagatcatgtccatcagttatacgaattcccctacacagtctctcccctattttcggctcagggtagcgggaggtgatcgtctgctcyttgccccaagctggttttcccagcctctgctttctatcttgttatttcagaagaccagtcagggaagagccactctccctagtccaaggaggacaaccaa

SEQ ID NO: 346677 - DNA, 201 bp, Homo sapiens
gccgagatcacgccactgcactccaacctgggcaacaagagcgaaactctgtcttaaaaacaaacaaacaaacaaaaatcactgtgcatttatttccccaycactggctacagaaagcctagcaatactcccaaaggtcaggaaccagcagcagaggtggggccacttcctcctctctaagcctcctctgatgttagggac

SEQ ID NO: 346678 - DNA, 201 bp, Homo sapiens
ggtggaacacctgaggtcaggagttcaacaccagcctggccaacatggtgaaaccctgtctctactaaagatacaaaaactagctgggcgtggtggcacaygcctgtaatcccagctactctggaggctgaggcaggagactcgcttgaacccgggaggcggaggttgcagtgagccgagatcacgccactgcactccaac

SEQ ID NO: 346679 - DNA, 201 bp, Homo sapiens
ggctcggctgagtcagaggcaggtggaacacctgaggtcaggagttcaacaccagcctggccaacatggtgaaaccctgtctctactaaagatacaaaaaytagctgggcgtggtggcacatgcctgtaatcccagctactctggaggctgaggcaggagactcgcttgaacccgggaggcggaggttgcagtgagccgag

SEQ ID NO: 346680 - DNA, 201 bp, Homo sapiens
acctgtcactgtggccctctagtcaaagcaggggcttatgaaggtcacgtgacccacgagttttcactcaggtccttctcacagtgtgtccagtgggtccytgagcccatcctgcggctattttcccagctccaggtgcataattggaacagacatatgagcagctgacagaatcccacattgatttcctgatggtgggaa

SEQ ID NO: 346681 - DNA, 201 bp, Homo sapiens
gccatgttgcccaggctggagtgcagtggctattcacaggcatgatcatagctcactgcagcctcgagcttctgggttggagcaatcctcctgcttcagcstcccgagtagctgggactataggcctgtgccaccatggccggctagctttttgtttctttgtagagatggggtctcgaactcctggtctcaaacagtctt

SEQ ID NO: 346682 - DNA, 201 bp, Homo sapiens
ccagggtaactgcgctgggaaaggaaataatcagatatcccagggactactggacactggctctgaactgatactgacaccaggagacctcacctgtcacwgtggccctctagtcaaagcaggggcttatgaaggtcacgtgacccacgagttttcactcaggtccttctcacagtgtgtccagtgggtccttgagcccat

SEQ ID NO: 346683 - DNA, 201 bp, Homo sapiens
tggtctcgaactcctgacctcaagtgatctgcctgcctcagcctcccaaagtgctgggattacaggagtgagccaccgtgcctggccacagcagcgtgcgyttttatatttatattttccttcctggggaaagaggggctctgtgggcaaaataacctgctgggaacccaccggacccaggtgagcaggggcatcggatgc

SEQ ID NO: 346684 - DNA, 201 bp, Homo sapiens
ccagctaatttttgtattttttttttagtagagacagagtttcaccatgttggccaggctggtctcaaactcctgacctcaggtgatccacctgcctcggscttccaaagtgctgggattacaggcgtgagccattgcgcccagcccaaaataacccctcatctacagtactggggtttaaatggtagaaattcatttcag

SEQ ID NO: 346685 - DNA, 201 bp, Homo sapiens
gagtcagttctctgaagagtctttttcatatatatcacatagatagagagataggcaggttggtaggtaggtagataggtcaataggtaggtaggtaggtagttagacataggtatctatctatctatctatctatctatctatctatctatctatctatctatctatctatcttactgtagtttagcacagacattggtt

SEQ ID NO: 346686 - DNA, 201 bp, Homo sapiens
cagagtcagttctctgaagagtctttttcatatatatcacatagatagagagataggcaggttggtaggtaggtagataggtcaataggtaggtaggtaggtagttagacataggtatctatctatctatctatctatctatctatctatctatctatctatctatctatctatcttactgtagtttagcacagacattgg

SEQ ID NO: 346687 - DNA, 201 bp, Homo sapiens
ctacagtactggggtttaaatggtagaaattcatttcagcactttctgagtgcgtcttatctaataatactttatagccatttggtgaggacttactggargccgactgtatactgggcccaagtcagacctggggagtgcctgggtcccctgggcccctcctctgccacctgatttcacagaacctcatggaaacttgag

SEQ ID NO: 346688 - DNA, 201 bp, Homo sapiens
tgggaggtagaggttgcagtgagctgagattgcaccagggcactccagcctgggagatagagtgagattctgtctcaaaataagaataataataataatawggcagaggaaggaggaatttgcacctttttccttgcctgcctgcttgagctgagacatctcctctcatcttctgctcttgcactgaaatttataccattg

SEQ ID NO: 346689 - DNA, 201 bp, Homo sapiens
gtgaggacttactggaagccgactgtatactgggcccaagtcagacctggggagtgcctgggtcccctgggcccctcctctgccacctgatttcacagaayctcatggaaacttgagtgtgcagaactaagagaattctatatcctgccgtctgctaccggagaactggctggaacccgaagggggagaccacctggaagc

SEQ ID NO: 346690 - DNA, 201 bp, Homo sapiens
tgcaggaggcaatacaagtccagtctagtaggaatttgctttgggtggcttttaccttaaaaaaatggttattatttgaatgatgcatttcacccgagcaygtctgtggtacgtgcctgcctccatgtctctcggtttggagcctggaggtgggaggagggaggtgagctttcttccatcattccttggtgtctccattgc

SEQ ID NO: 346691 - DNA, 201 bp, Homo sapiens; identical to SEQ ID NO: 73398

SEQ ID NO: 346692 - DNA, 201 bp, Homo sapiens
gtgcttattgtgacctcaggacctttgcacacactggtcttccttcctggaatgcttttcccctgcagggccagcttctcatcattcaggcttctgcacakatgtctccttccctgcccacccccaccccaggcacgctgcagagcttcctacagtgtggggtggccaagcactccaggccccctctttccttttggtcag

SEQ ID NO: 346693 - DNA, 201 bp, Homo sapiens; identical to SEQ ID NO: 73399

SEQ ID NO: 346694 - DNA, 201 bp, Homo sapiens
caggctgctcctctgtcgagctgatcacacccacagttgagctgcgctggccagagatgcctgcccacagcctggtgatgagcagcccggccctcccggcyttcctgctctgcagcacgctgctggtcatcaagatgtacgtggtggccatcatcacgggccaagtgaggctgcggaagaaggtatgtgcctccctggggg

SEQ ID NO: 346695 - DNA, 201 bp, Homo sapiens
ttctccctgccttggctggtcctgggatatgggatccgggcatcaagtagaacagctgcattcactcattgaatccttcccagaggaccgaatgtggcccrgagctgagcatgagatccccgccacagccctgagggcaggggaggcgccatagtcatcctgttttctaggtgaggaacctgggctcagagaggagacatc

SEQ ID NO: 346696 - DNA, 201 bp, Homo sapiens
cggtttgaactccagtgtccagcttcagagcccacatcctgtcttggaggcgggggtttctgttttgttttttttttctgctgtccaggctggagtgcagyggcatgatctctgcttactgcaacctccacctcctgggttcaagcaattctactgcctcagcctccccggtagctggcattacagacacacaccaccatg

SEQ ID NO: 346697 - DNA, 201 bp, Homo sapiens
gctggagtgcagcggcatgatctctgcttactgcaacctccacctcctgggttcaagcaattctactgcctcagcctccccggtagctggcattacagacrcacaccaccatgccctgctaatttttgtatttttagtagagatggggtttcaccatgttggccaggctggtcttgaacccctgacctcaggtgatccacc

SEQ ID NO: 346698 - DNA, 201 bp, Homo sapiens
tgcaacctccacctcctgggttcaagcaattctactgcctcagcctccccggtagctggcattacagacacacaccaccatgccctgctaatttttgtatktttagtagagatggggtttcaccatgttggccaggctggtcttgaacccctgacctcaggtgatccacccgcctcagcctcccaaagtgttggaattaca

SEQ ID NO: 346699 - DNA, 201 bp, Homo sapiens
ggtgccaccacacccagctaattttttgtatttttagtagagagggagtttcaccatgttagctaggatggtctcaatctcttgacctcatgatcctcctrcctcagcctcccaaagtgctgggattacaggagtgagccacggcgcccggcccagacggctttactctgagtgagattgggagccactgcggtctttgct

SEQ ID NO: 346700 - DNA, 201 bp, Homo sapiens
ccggtagctggcattacagacacacaccaccatgccctgctaatttttgtatttttagtagagatggggtttcaccatgttggccaggctggtcttgaacycctgacctcaggtgatccacccgcctcagcctcccaaagtgttggaattacaggcgtgagccaccgcacctggctgaggcctgggttcttaccagcaggc

SEQ ID NO: 346701 - DNA, 201 bp, Homo sapiens
caacatggcaaaaccccgtctctactaaaaaatacaaaaagtagctgggcatggccaggcacagtggctcacacctgtaatcccagcattttgggaggccraggtgggaggatcacctgaggtcaggaattcaagaccagcctggccaatatggtgaaactttgtttctactaaaaatacaaaaattagctgggcgtggtg

SEQ ID NO: 346702 - DNA, 201 bp, Homo sapiens
cttaccagcaggccagcgattccttttttttttttttttttaattattatttatttattttagagacagggtcttgctctgtggcccaggctggagtgcarttgtgcgatcatagctcactgtagcctcgacttcctgggctcaggtgatcctcccacttcagcctcccaagtagctgggactataggtgtgcgtcactgc

SEQ ID NO: 346703 - DNA, 201 bp, Homo sapiens
cagcatggctcactgcagccttgaacacctggggtcaagtgtagctgggactacaggtgcgcaccatcatggccggctaatttttttttttttttttttttggtagagacagggtctcactgtgttacccaggctggtctcacacttctgcagtcaagggaccctcccgccctggcctcccaaagtgttggaatgacaggt

SEQ ID NO: 346704 - DNA, 201 bp, Homo sapiens
tcctagcggcttctccaggtctccctctcactcgtcacacagcacatgagctgtgatttctcctgagttttcagagttcaggatcctgtggttaatcagcrcggagctgggttttcagcctggggctctcaagaccttctcatggcttttagtgcaaagtccaaattcttcaggtgctgccaggacccctgatgacccctg

SEQ ID NO: 346705 - DNA, 201 bp, Homo sapiens
gtttcattcttgtcactcaggctggagtacaatggtgtgatctcggctcactgtaacctccacctcctgggttcaagtgattctcctgcctcagcctcccragtagctggaattacaggcacccaccaccatgcccggctaatttttttgtatttttagtagagatggggtttcaccatgttggccaggctggtttcgaac

SEQ ID NO: 346706 - DNA, 201 bp, Homo sapiens
aatgcatctttcaagcctcagattgtttgttttattttttttggagacagagtctggctctgttgcccaggctggagtgcagtggcaagatcacggctcaytgtagcctcgacctcccaggctcaagcaatcctcctgcctcagccctcctgccaagtagctgggaccacaggtgtgtatcaccacacacagctaattttt

SEQ ID NO: 346707 - DNA, 201 bp, Homo sapiens
caggagaattacttgaacctgagccaagatcatgacactgcactccagcctgcagcctgggcaacagagcaagactcaaaaaacaacaacaaaaaaaaaaacaaaaaaaaaaaaacacaaacaagtcataaagtgctgtccgagtgacaaaggccctcagggaaaggggtggtgcttcttgtggaatggaggttgttttgg

SEQ ID NO: 346708 - DNA, 201 bp, Homo sapiens
acagggtgatgatgctggtataaaatataaagcacctaaagggtgtctggccattaggaggtgcctaacaaatgacaccattgtttgctgttttttttgtkttttttttgacagagtttcactcttgttacccaggctggagtgctatgacgaaatctcggctcactgcaacctccgcctcccaggttcaagcgattcttc

SEQ ID NO: 346709 - DNA, 201 bp, Homo sapiens
gaggctgcggaagaaggtatgtgcctccctgggggtccccggcctgggtcatacttgcttctctccacgtcctgtcaggaaagccccgggatagggaaacrtggccaaggtgtgtgcagggctgggaggtgagcacctcttccagccccgccggggggcttcctgccagtcccacgtgtcagcaaggcctgcaccttctcc

SEQ ID NO: 346710 - DNA, 201 bp, Homo sapiens
gaactcaaacctcagctctctcagctctgcctgggggtcaagagcatgggctctggctggagccaactacatctctgtccagatctgttattcttaggtahggtcattcactggcttgatcctttatctccctctgtaacatgggcctgataatgctccacagtacagggtgatgatgctggtataaaatataaagcacct

SEQ ID NO: 346711 - DNA, 201 bp, Homo sapiens
accttctcctctctggcttaagagcacttactcgcttgccgtgccaccgggctgagttcttggcatggagagagccagcgagtgtctgtgagagaagcagrttctggagggtggagtgtgggagcgtgacagcacaaagcctctgtctaacctggtggcttcccggcacgggaggtctgatatctgggtggagtgggaacc

SEQ ID NO: 346712 - DNA, 201 bp, Homo sapiens
tgctttaattttttctgtccctgtcttgaaattctcttttttttttttttttttttgagacggagtctcgctctgtcgcccaggctggagtgcagtggcaygatctcggctcactgcaagctccgcctcccaggttcacgccattctcctgcctcagcctcccgagtagctggaactacgggtccccgctatcacgcccgg

SEQ ID NO: 346713 - DNA, 201 bp, Homo sapiens
gcacgaagaaggaacccctaggcttgctttaattttttctgtccctgtcttgaaattctcttttttttttttttttttttgagacggagtctcgctctgtygcccaggctggagtgcagtggcacgatctcggctcactgcaagctccgcctcccaggttcacgccattctcctgcctcagcctcccgagtagctggaact

SEQ ID NO: 346714 - DNA, 201 bp, Homo sapiens
cattgccgttgctgggccagacgtgcactgaggaccccgggataaaggggtttactgtgaggatgctggggcccaagacctcgtgggcacaggacccaggygaagaccccagggcccgtgaagagccgaagtggatttcactgtaggggcttcttgtcatccccaggggtacacattcttgtggccgctcctgctgctggc

SEQ ID NO: 346715 - DNA, 201 bp, Homo sapiens
gtagataggtcaataggtaggtaggtaggtagttagacataggtatctatctatctatctatctatctatctatctatctatctatctatctatctatctatcttactgtagtttagcacagacattggttaagtcatgtcactcctctgaacctcaattttctcatctctaaaatggggatattaggccgggcgaggtag

SEQ ID NO: 346716 - DNA, 201 bp, Homo sapiens
caccattgcactccagcctgggtgacagagcaagactctgcctctaaaaaatataaaataaaataaaataaaatagagataataatagacccacctcctakgattgctacatgagggcaatgaactgatctacataaagcaccaagcatagtgtctggcaggtaaagttggccagtaatgtcatcaacattgttatataat

SEQ ID NO: 346717 - DNA, 201 bp, Homo sapiens
ggtttcgccatgttggccaggctggtctccaactcctgacttcaggtaatccacgtgcctaggcctcccaaagtgctgggattacaggcgtgagccaccaygcccaacctgttttgttttttaaattcaagatctaatcaaggattaaaccttgcatttcgttgtcttgggaagccagaacccagactgaattgaatccag

SEQ ID NO: 346718 - DNA, 201 bp, Homo sapiens
ggtgattagggtttgataaggtcatgagggtggggccctcaagattggatcagtacccttataaaaagagacaccagggaacttccttctactctctctcrccatgtaaggacacagtgagaaggcacctggatcttggacttcccagtctccacaaacataagaaataaattcctgttgtttaagcacccaatctgtggc

SEQ ID NO: 346719 - DNA, 201 bp, Homo sapiens
tggctcacaggcgtgagccaccacacctggcttgttttagagatggggtcttgctatgttgcccaggctggttttgaactcctgggctcaagcaatccccytgccttggccttccgaagtgctgggattactggtgtgagccacctcatccagccctaagcctcagctttcatgtcactgcctcagagaaactttctcaga

SEQ ID NO: 346720 - DNA, 201 bp, Homo sapiens
ccgctgccgtggggcggggcgtgggcggtgctggctgcaggaaggctctcccctcccactttgtgctttccctgcaggctgctcctctgtcgagctgatcrcacccacagttgagctgcgctggccagagatgcctgcccacagcctggtgatgagcagcccggccctcccggccttcctgctctgcagcacgctgctggt

SEQ ID NO: 346721 - DNA, 201 bp, Homo sapiens
cttccacgcctccgtgaatgaatgaatgaatgaacacatgttctactaccagactttgtttttcagaaatatagcaaccctttggaaaaatcataggtccygtcactaacaagttgaatttagttatcaagtcactttcttggttagagaagaggaaaggggaggaggagatgggaagaggaggagggaggagggaggatg

SEQ ID NO: 346722 - DNA, 201 bp, Homo sapiens
catagctcactgcagcctcgagcttctgggttggagcaatcctcctgcttcagcctcccgagtagctgggactataggcctgtgccaccatggccggctarctttttgtttctttgtagagatggggtctcgaactcctggtctcaaacagtctttctgccttggcctcccaaagtgctgggattacaggtgtgagccact

SEQ ID NO: 346723 - DNA, 201 bp, Homo sapiens
cagaggttgcagtgagccaagatcacaccattgcactccagcctgggtgacagagcaagactctgcctctaaaaaatataaaataaaataaaataaaatasagataataatagacccacctcctaggattgctacatgagggcaatgaactgatctacataaagcaccaagcatagtgtctggcaggtaaagttggccagt

SEQ ID NO: 346724 - DNA, 201 bp, Homo sapiens
gccgtgccttcttcttaacaggtgagacaccctggccttccctggttcataggcaactcccccatcggactgtgagcttcataaaagcagagacagggggrccttttcatggtgagctaccagcccctggcacagggtaggaatcgtggatgatggttggatgggtgtgtgtgcaactgcacctctgtcctgccactgtga

SEQ ID NO: 346725 - DNA, 201 bp, Homo sapiens
ggctcacagaggagttgcattcactgtattggtgctccagtatttatgttgccactctgttgaatgtacagcccataacttccctaaccaattcccctgcratgggcatttgggctccttctgtgttatgaacagaaggcctcaatacctctttttttttttttttttttttttttttgagacagagtctcactctgttgc

SEQ ID NO: 346726 - DNA, 201 bp, Homo sapiens
tttgggctccttctgtgttatgaacagaaggcctcaatacctctttttttttttttttttttttttttttgagacagagtctcactctgttgcccaggctrgagtgcagtggtgccaccttggctcactgcaacctccgccacccgagttcaagcgattctcctgcctcagcctcccaagtagctggggctacaggcgtgc

SEQ ID NO: 346727 - DNA, 201 bp, Homo sapiens
agttgaacatcttttcatatgcttaacatccccctggtcaattaaaatgaatttcctcattataaaaatcagaactcattacagacgatttgggtaatacygaaaaaacacagagacagaaaggaaaaccactcacagttctaatcacagttcacacttgcatctctctcctctttgtcttctatagctaaatattttcca

SEQ ID NO: 346728 - DNA, 201 bp, Homo sapiens
tcttctatagctaaatattttccataaaattaggcatgcattaggtacacccaatttggagttctgattttcttttattaacattattttgcgaacacttyccatgttggtaaatgttactaaaaaaattattcttgaccagatgtggtggctcatgcctataatcccaacattttcgagggccggcagatcacttgaggt

SEQ ID NO: 346729 - DNA, 201 bp, Homo sapiens
gtttctgctctgccatcttttaccagttagctggagagtgaggcgatggcactccaggggttggggtcatcggaagagcttgaaggggaagtggggaggayggagagctggacaggctgaggccggagacaaactgtctcatgggtctcaacacattcccctgcatcacaggcggaaatgggtgggacactgtcatttaaa

SEQ ID NO: 346730 - DNA, 201 bp, Homo sapiens
atcacagtcagctccaggaattcccctgcatttaacgcacacgttcaggccgtctgtctttccacaaatatttaccaagcacagctctgggcgcacaccaygctaggcactgtaaattcagccataaacaagacagaagctcagtttcagttttctcttaccataaaactaaccatcttcaagtgtgcaattccatgtcat

SEQ ID NO: 346731 - DNA, 201 bp, Homo sapiens
gcttcctacagtgtggggtggccaagcactccaggccccctctttccttttggtcaggcccacacaccatcgcactggcccaagaatcgtcttgccagtgrgagggaagaggaggaccctgcagcgggtccccactcagtgctgctagtctgggcctggcccgaggagacggtgttattggtggaatgtatgtcagcagga

SEQ ID NO: 346732 - DNA, 201 bp, Homo sapiens
cgcactggcccaagaatcgtcttgccagtgagagggaagaggaggaccctgcagcgggtccccactcagtgctgctagtctgggcctggcccgaggagackgtgttattggtggaatgtatgtcagcaggaaggcccggagaacatgcttctgttcctgcacctcacacgcgtggcctgtccttgggggaggtcatgccct

SEQ ID NO: 346733 - DNA, 201 bp, Homo sapiens
tccgcccccaccacacatatgcacatgcttgattcctttcaacagaaaaagaggcaggaaaggatgtgtaaaatgaagagcttcaccgggggctggccatyggttggctccagtgagtgggagcggatcttgttatgattgtccctgaaaggacaggtggtagttagatttagggggaaaaggagacagagcccggcattc

SEQ ID NO: 346734 - DNA, 201 bp, Homo sapiens; identical to SEQ ID NO: 73392

SEQ ID NO: 346735 - DNA, 201 bp, Homo sapiens
cataaataaaatacaaaaattagccaggcgtggtgaaatgcgcctgtaatcccagctactcaggaggctgaggcaggagaatcgcttgaacctgggaggtrgaggttgcagtgagctgagattgcaccagggcactccagcctgggagatagagtgagattctgtctcaaaataagaataataataataataaggcagagg

SEQ ID NO: 346736 - DNA, 201 bp, Homo sapiens
agcagtgtggggtcacgagcctctggcccttatcagggagtctggggctgtgggtcacgccgggatgggcttggcatggctggctttgtttcctaagaggrcctctggctctgccgtgggagggcagggggtgtggacagccaggcagtggacacagtgggcagtggcatggctcttgcttccccagtggcttggacagtc

SEQ ID NO: 346737 - DNA, 201 bp, Homo sapiens
aagaaaaaagtataaaaattaaaaaacaggccaggcccggtgactcacgcctgtaatcccagcactttgggaggccgaggcaggcggatcacgaggtcagragttcgagaccagcctggccaacatggtgaaacctgtctctaaaaaaaatacaaaaattagctgggcatggtggcgcatacctgcagtcccagatacttg

SEQ ID NO: 346738 - DNA, 201 bp, Homo sapiens
tgtggaaaatgacaataacccaatctagatcggactatgaatggcccagacccttcaggaatgaaggtttgggtgtcactccacccagataaagaatcacractggctgggtgtggtggctcacacctgtaatcccagcaatttgggaggctgaggcgggagcatcacatgaggtcaggagtttgagaccagcctggccaa

SEQ ID NO: 346739 - DNA, 201 bp, Homo sapiens
atggtacttctcagctgccgtaatcacatgagccaattatatggcatagtaaatctatctatctatctatctatctatctatctatctatctatctatcthtttatctctctatctctctatctatctgcatttccttgacacagggtcttactctgtcatccaggaagctggagtgcagcagtgcaatcactgctcactg

SEQ ID NO: 346740 - DNA, 201 bp, Homo sapiens
catcttccgaactgaccagaggcagagtgggaattggtaccgagtgcaagatgacctcaggcactggcggggttcttcctgacctcatcccccacgcctgyggccccccacgcctgcagcccatcttcctcccaactccccccagatttagctcaactcctgggggctgtctcctccttcctgaccctggagttgggggca

SEQ ID NO: 346741 - DNA, 201 bp, Homo sapiens
caaaaggcaggttgggcacagtggctcacgcctgtaaccccagcactttgggaagctgaggcaggtggatcacttgaggtcagaagttcaagaccagcctrgccaacatggtgaaaccccgcctctactaaaaatacaaaaatttggctgggtgcagtggctcacgtctgtaatcccagcactttgggaggctgaggcggg

SEQ ID NO: 346742 - DNA, 201 bp, Homo sapiens
gaactgaccagaggcagagtgggaattggtaccgagtgcaagatgacctcaggcactggcggggttcttcctgacctcatcccccacgcctgtggcccccsacgcctgcagcccatcttcctcccaactccccccagatttagctcaactcctgggggctgtctcctccttcctgaccctggagttgggggcactgggaag

SEQ ID NO: 346743 - DNA, 201 bp, Homo sapiens
cagattacacattgtctctgggtatgtctgtgaggctgtgattggcatttgaatccacagacacaatacagtgccctccccagtggcagtgggcatcgtcyaatctgttatgggcttgaataaaacaaaaggcaggttgggcacagtggctcacgcctgtaaccccagcactttgggaagctgaggcaggtggatcacttg

SEQ ID NO: 346744 - DNA, 201 bp, Homo sapiens
tgttaggtggaattatgactttgctttgtctttacttggagattaagtacggtttaggaaatgtctacagggtacctagttgacaaggggtggacttgtgrtggttagtcttttgggtcagtttcattggccaaaggtgcccagattacacattgtctctgggtatgtctgtgaggctgtgattggcatttgaatccacag

SEQ ID NO: 346745 - DNA, 201 bp, Homo sapiens
agactgtgattgtcatcagtttttcctctttatttttctctgcatgtgtgtctgtgtgtgtgtgtatatatatatatatatatatatatatctttgtttcytttcctctcttactctcttatcatgtaacataagatgtattgattttatatcatagtatttaagctatgggatatcaaggagaagcgtaaacatcactct

SEQ ID NO: 346746 - DNA, 201 bp, Homo sapiens
cagccccctccccagggtgctggttggtctctcctctcagctgctgctgcaatgtgcttcacagtgacaacacacccacagctccagtggcagttgatgcrtccttgtggccagaatcatgcctggcaggacgcatgtggcaaagggcttgtctgggtcggtgctatgctctctgtgccagggaaaatccagctcttggag

SEQ ID NO: 346747 - DNA, 201 bp, Homo sapiens
accagctataaccatgtggtcagccacagaaacagagactgtgattgtcatcagtttttcctctttatttttctctgcatgtgtgtctgtgtgtgtgtgtrtatatatatatatatatatatatatctttgtttcttttcctctcttactctcttatcatgtaacataagatgtattgattttatatcatagtatttaagc

SEQ ID NO: 346748 - DNA, 201 bp, Homo sapiens
taccagctataaccatgtggtcagccacagaaacagagactgtgattgtcatcagtttttcctctttatttttctctgcatgtgtgtctgtgtgtgtgtgkatatatatatatatatatatatatatctttgtttcttttcctctcttactctcttatcatgtaacataagatgtattgattttatatcatagtatttaag

SEQ ID NO: 346749 - DNA, 201 bp, Homo sapiens
ctacttgggagactgaggtgggaggatcgcttgagcccgggaggtcgaggctgcattgagccaaaatcgtaccactgcactccagcctgggtgacaaaaaraaaaaaaaaaaaaaaaaaacatgaccagctgaggtgcttgctgaaggcaaaggttgtacagaaccagtagtggaagaaggtggttttaaataccagctat

SEQ ID NO: 346750 - DNA, 201 bp, Homo sapiens
cccctcccactttgtgctttccctgcaggctgctcctctgtcgagctgatcacacccacagttgagctgcgctggccagagatgcctgcccacagcctggwgatgagcagcccggccctcccggccttcctgctctgcagcacgctgctggtcatcaagatgtacgtggtggccatcatcacgggccaagtgaggctgcgg

SEQ ID NO: 346751 - DNA, 201 bp, Homo sapiens
agaatcacgactggctgggtgtggtggctcacacctgtaatcccagcaatttgggaggctgaggcgggagcatcacatgaggtcaggagtttgagaccagyctggccaacatggagagaccccacctctaccaaaaatacagaaactgcgtgcctgtggtcccagctacttgggagactgaggtgggaggatcgcttgagc

SEQ ID NO: 346752 - DNA, 201 bp, Homo sapiens
agctcaggcagaggcgcctggggacggggtaagtggtgagagggagggccacggctgtcttgggtgaaccccaggctccagttggagactctgctgtggcragaggtccaccccacccccgggcgccatctggggacactccggcatcccattccaatggctgttctgccagggcctcaccctggctcttggtcttaggac

SEQ ID NO: 346753 - DNA, 201 bp, Homo sapiens
cattgcactccagcctggtgacagagcgagactctgtctcaaaaaaaaaaaaaaccaacaaacaaaaacaaaacaaaacaaattagccgggcgtggtggcrggctcctgtagtcccagctactcaggaggctgaggcaggagaattgcttgaacctgggaggcggaggttgaagtgagccgagattgcatcgctgcactcc

SEQ ID NO: 346754 - DNA, 201 bp, Homo sapiens
ttgccaaccccgaggatgccctgagacacggaggcccccagtattgcaggagcgaccccgacgtggaacgctgcctcaggcaagtacttcgggcccctggyctggccacacctggccatggcctgccctttcagaacttcttctgcacacaggggacttggaggactcccaggggctgaggttttctgtgttcctgatctt

SEQ ID NO: 346755 - DNA, 201 bp, Homo sapiens
gccgtttgtctcacgaggagtgactctcaactggtatatttcaggcctttgccaaccccgaggatgccctgagacacggaggcccccagtattgcaggagygaccccgacgtggaacgctgcctcaggcaagtacttcgggcccctggcctggccacacctggccatggcctgccctttcagaacttcttctgcacacagg

SEQ ID NO: 346756 - DNA, 201 bp, Homo sapiens
gctgaggcaggagaattgcttgaacctgggaggcggaggttgaagtgagccgagattgcatcgctgcactcctgcttggatgacagagtgagactccttcyccaaaaaaaaaaaaaaaaaagtaatctagacttgttggtaagacatttgcatgtcaaggttagaaataaatatgagtaaaattcagagttctttatcagc

SEQ ID NO: 346757 - DNA, 201 bp, Homo sapiens
catggagctaataagcaccacagcagaactggaggtttccagcctaatactcccttccggctgcaccacgaagtactcaaaaaaaattttttttttttttkagatggactttcactcttgttgcccaggctggagtgcaatagcgtggtttcggcttgctgcaacctccgcctcccgggttcaagtgattcttctgcttca

SEQ ID NO: 346758 - DNA, 201 bp, Homo sapiens
ggcgggcagagagcctaagctcaggagttcgagaccatcctgggcaacatggtaaaaccgtgtctctactaaaatacaaaaaattaaccagatgtgacggygcacgcttgtagtgccagctactcaggaggctgaggcacaagaattgcttgagccggggaggcagagctttcagtgagcagagatcgcgccactgtactc

SEQ ID NO: 346759 - DNA, 201 bp, Homo sapiens
gtagatgcaggatttcaccatgttggctaggctggtcttgaactcctgacctcaagtgatccgcctgcctcggcctccccaaagtgttgggattacaggcrtgagccacctcgcccggtcttttttttttttttttttttttgtgacagggtcttgctctgtcgcccaggctggagtgcagtggaatcccggctcactgat

SEQ ID NO: 346760 - DNA, 201 bp, Homo sapiens
cagcagctgtccctgtcctggccatctggggatcactgtcctcaccgctgtcacctatgcaggaaaatgcagctggtgtggaaaagtctgtggagggtgarggcaggcctgatgctgcaggaggcaatacaagtccagtctagtaggaatttgctttgggtggcttttaccttaaaaaaatggttattatttgaatgatgc

SEQ ID NO: 346761 - DNA, 201 bp, Homo sapiens; identical to SEQ ID NO: 73394

SEQ ID NO: 346762 - DNA, 201 bp, Homo sapiens; identical to SEQ ID NO: 73395

SEQ ID NO: 346763 - DNA, 201 bp, Homo sapiens
gttgcccaggctggagtgcagtggcgcgatgttggctcactgcaacctctgtctcccgggttcaagagattcccctgcctcagcctcccgagtagctgggmctacaggcgcctgccaccacgcctgactgatttttgtatttttagtagagatggggtttcaccatatcagccaggatggtctcgatctcctgacctcgtg

SEQ ID NO: 346764 - DNA, 201 bp, Homo sapiens
gatttgcctgaggccatggagctaataagcaccacagcagaactggaggtttccagcctaatactcccttccggctgcaccacgaagtactcaaaaaaaawtttttttttttttgagatggactttcactcttgttgcccaggctggagtgcaatagcgtggtttcggcttgctgcaacctccgcctcccgggttcaagtg

SEQ ID NO: 346765 - DNA, 201 bp, Homo sapiens
atataacattgaaaatattgaccatatcagtgaagaatgggcttggaaaaggcaatggtaatagttgtgtttatgttttgtttaaaatttgaaagggggcyggcgcagtggctcacacctgtaatcctagcacttcgggaggctgaggcaggggaatcacgaggtcaggagttcaagaccagcctgaccaatatggtgaaa

SEQ ID NO: 346766 - DNA, 201 bp, Homo sapiens
aagggttagccctttgatccttttggtattggactttccttgtcacttacagctttgttcttgaatgtgcatgaaatcagcttaccacagaggtgaaggcragaactctggtacaacagctttggtgagggatattttattaggcttgagtttttttcctccaaagttcactacctgataaagtttatctttggtgattag

SEQ ID NO: 346767 - DNA, 201 bp, Homo sapiens
gcctaggtttttctttagaaatgcttctctttaagacttttgatagatatttcaagtgtctttgcagatttctgccactttatattcccatgatcagtatrtgagtgtttacttccttatatccccaattctggattattccattattaaatttctagacagaaaagggtctcatttcaatttgtactcctttgattatta

SEQ ID NO: 346768 - DNA, 201 bp, Homo sapiens
ctaatttttgtatttttagtagagacacggttttgccatgttagccagcctggtctcaaactcctgggctcaagagatccacttgccttggcctcccaaastgctgggattacaggtgtgagccatcgcacccagcctaggtttttctttagaaatgcttctctttaagacttttgatagatatttcaagtgtctttgcag

SEQ ID NO: 346769 - DNA, 201 bp, Homo sapiens
gaaagaaattcattccaagtgaagctttgtggacatagcctgatccttgcttttccctttagaacatgacctgcctgcctctcccacatgtgagatgactractcagctttttatttctcctttgggacctaggctaggtgggcttttctactctctactagagctattacaaaatagccgatatgtaaacattctcataa

SEQ ID NO: 346770 - DNA, 201 bp, Homo sapiens
tgaatatttgactgaattatatagctgttctggatgttttcccctcagacgcataacctggggaaaatacatgaattgtggccaaacctgcattgcacccractatattctctgtgaagcatccctccaaaatcaaattgtatggaagattaaggaaacagtgaaggtttgtattaaaaacatctgattccactgatttta

SEQ ID NO: 346771 - DNA, 201 bp, Homo sapiens
ctactagggaggctgaggcaggagaattgctttaacccgggaggcagaggttgcagtgagccaagattgtgccactgcactccaccctgggtgacagagcragactccgtctccaaaaaaaaagaaagaaaaaagaatgtttaacttacttatctctagacattttggacctgggcccagagtatcagggtgttaaaactc

SEQ ID NO: 346772 - DNA, 201 bp, Homo sapiens
gacttgtcaccatctaggcactgaactctttatgtcataatttaagaatatgttttttaaatcactaagtagttttgatttgttttcatttttaaaaaaakgtttgactttggaattcatggcagcaaatgtcgtgaaatcaaggtgtagtatacaatttaggggctactttctttgccttcctgaggctggaggtgtggt

SEQ ID NO: 346773 - DNA, 201 bp, Homo sapiens; identical to SEQ ID NO: 73442

SEQ ID NO: 346774 - DNA, 201 bp, Homo sapiens; identical to SEQ ID NO: 73443

SEQ ID NO: 346775 - DNA, 201 bp, Homo sapiens
tacagtgaagcttgttttgtctgttccctttatttcaggttccagtgggatgggagcttatcacggaaaacatagttttgatactttttctcatcagcgtycctgtttattaaaaagtttaaagagagaaggtgctaacaaactcagatatcctcccaacagccagtcaaaggtggattggggaaaattttttctcttgaa

SEQ ID NO: 346776 - DNA, 201 bp, Homo sapiens
tcactgtttaccaagtactgtttgccgtgagctggcctgagaacttccctgctatgtaaaatattccacctcatttggaaaatactttctaagttccaaayaactgatttagaaatgagtttttaacttttttataaaaattgccagataaatatatgaatctattttagttgcaagacattcaaacaacacaatgtaaca

SEQ ID NO: 346777 - DNA, 201 bp, Homo sapiens
tcgctgcaggtctggtgccaccttatgtctatatacctttttagggaggcttattttctcatattaattggaaattaaggatagtggctaattaaatacayttacttggtgatttgcctttgtttacaccaccagtgtactgagaattcatacataccatacatatttttaaatgggctgctgaggagatttgtgtggcta

SEQ ID NO: 346778 - DNA, 201 bp, Homo sapiens
tgagccccaccatcagtgtggctgacgccgcccccagagcagccccacggcggatgaccagctgtttcactgatagtctgctggtaggagctgaaagggcrtgggcctcctctggagtcctgaagaagtccacgtggcactcagaccttgaatacgttgtcaaggtaatgccaggggaactgcctgtagccactgcggaag

SEQ ID NO: 346779 - DNA, 201 bp, Homo sapiens
aaggccaaggcagacagatcacttgaggccaggaattcaagaccagctgggcaacgtagcaaaatcttgtcgctacaagaaatacaaaaattcaggtgtascggcgtgtacgtgtggtcccagctacttggcaggctgaggtaggaggatcgcttgatcctcctgggaggcggaggctgcagtgagccaagaatgtgccac

SEQ ID NO: 346780 - DNA, 201 bp, Homo sapiens
agttctctgcaggaccaggccatggagctcgaagtccggcgggtccgacaggcgttcctgtccggccggtcgcgacctctgcggtttcggctgcagcagcyggaggccctgcggaggatggtgcaggagcgcgagaaggatatcctgacggccatcgccgccgacctgtgcaaggtacgcacgcgtgcggcggggtgtggg

SEQ ID NO: 346781 - DNA, 201 bp, Homo sapiens
ttcggttccaaaatacacggagtgtattttgtgtggagtcacccagctcttggggttacacaatatatgtaggcccatggcttcatgccaaacagattctgtgtttgtctgggatttggggttaatttttgagctaacatgattttaggtgttttcatttaatggattatttaatgagggactggtactgtgctgggtgct

SEQ ID NO: 346782 - DNA, 201 bp, Homo sapiens
tggctcactcctgtaatcccagcactttggaaggccaaggcagacagatcacttgaggccaggaattcaagaccagctgggcaacgtagcaaaatcttgtsgctacaagaaatacaaaaattcaggtgtagcggcgtgtacgtgtggtcccagctacttggcaggctgaggtaggaggatcgcttgatcctcctgggaggc

SEQ ID NO: 346783 - DNA, 201 bp, Homo sapiens
cttacattggcagcagatgctgggacactttgtctagcctccccagcatctgtttcaccctcctttcttgtgcctcttccccatggtagatggaacagtgractaaggtttagggaattttgaccatttaagtctgttttcttaatctgtctaacagagttataataaaggttaatgagatcatatatatgaaagcactcg

SEQ ID NO: 346784 - DNA, 201 bp, Homo sapiens
ggagtgggaaaggctgctggaacccattgtcagtgacctgaagatgaggacagctaaggagttagccttagaagagaaagtgagatgagctcttatgctawttatgaggatatgcagcattgagagctgcagaaataattgggagtacctagcctgttcttcccactgaacatcattttggtagctattaaagttaaatat

SEQ ID NO: 346785 - DNA, 201 bp, Homo sapiens
tagcttgcatcatctacagtgaagcttgttttgtctgttccctttatttcaggttccagtgggatgggagcttatcacggaaaacatagttttgatacttyttctcatcagcgtccctgtttattaaaaagtttaaagagagaaggtgctaacaaactcagatatcctcccaacagccagtcaaaggtggattggggaaaa

SEQ ID NO: 346786 - DNA, 201 bp, Homo sapiens
acagaagctacgtgaattctcccagtaacagatgaggaaattgaggctcagagatgttcagtagcttgcctaaggttgcataagctagtgagtggcagagcccagattcaaaccagatacacttcaaaagcaagcgctctcagctactgtgccggatataccattcattcagaatagcgtgggctaagcccactctgtgtt

SEQ ID NO: 346787 - DNA, 201 bp, Homo sapiens
tgtgtaccatagaatatatgctgggagcaaggttgcattggtgttaaatctacttaaactgtctagttgatttgttgatgattagttgtggcatatacttkttttaaaaaagttaaataatcgtgtgtccgtggttttgagggaatgttgccaaccctttaggtataatcagagagactctttggcatattggccattgct

SEQ ID NO: 346788 - DNA, 201 bp, Homo sapiens
tctacagtgaagcttgttttgtctgttccctttatttcaggttccagtgggatgggagcttatcacggaaaacatagttttgatactttttctcatcagcrtccctgtttattaaaaagtttaaagagagaaggtgctaacaaactcagatatcctcccaacagccagtcaaaggtggattggggaaaattttttctcttg

SEQ ID NO: 346789 - DNA, 201 bp, Homo sapiens
gacattgggaggctgtttctcctcttttcctgcagcaggcaatggcttcactgtttaccaagtactgtttgccgtgagctggcctgagaacttccctgctrtgtaaaatattccacctcatttggaaaatactttctaagttccaaacaactgatttagaaatgagtttttaacttttttataaaaattgccagataaata

SEQ ID NO: 346790 - DNA, 201 bp, Homo sapiens; identical to SEQ ID NO: 73430

SEQ ID NO: 346791 - DNA, 201 bp, Homo sapiens
atatcttaactgagatcctttgtgggcaaaacaagtgttcctcattttttaactgtgaataacatcttgcatctgaaaattagaaaataagaggtttcagkttctctctgctaaatccggtttagctactaagaagtgccaaatcatagaactgactctgtgctctgggtggtgtggctttctctgcccttcagagattcc

SEQ ID NO: 346792 - DNA, 201 bp, Homo sapiens
aaagccttctgaactgagtgaaaatacagccaagatcttggcaaagcttctccctcagtatttagaccaggtaagaatttcttgactcatctccaacataygtgtttactgtggaaaacacacattttattttcttgctattgcatgttattgctggccggggacccaattgcagtctctttaagccttcaacagttggct

SEQ ID NO: 346793 - DNA, 201 bp, Homo sapiens
aaaagatagcttttggtggggagactgatgaggccacacgctacataggtaatggaaattctccttttcctatgggaagatggcaatttggcagtttttgstgacactacttattaacactagataaactattaaatatatagcatttaattgttaaagtactaaatcctgctttctggtatactgtacctgtagcttttg

SEQ ID NO: 346794 - DNA, 201 bp, Homo sapiens
tggtgcgatctcggctcactgcaacctccatctcttgggttcaagcgattctcttgcctcagcctcctcagtagctgggattacaggcgtgcgccaccacrcccggctcatttttgtatttttagtagagatggagtttcaccatgttgaccaagctggtcctgaactcctggcctcaagtgatccgcctgcctgggcctc

SEQ ID NO: 346795 - DNA, 201 bp, Homo sapiens
agaagggcatatgttacctagcttctgtggttccttttctgccttttctattcttgtccatttttctgttacatttgtggttcttttccttatgatgtgtrggaactctttgtatattctggatttaagtaatttgtcagtttactgtattgtggatactttctttgggtttctttcttttctttttttttaagccaaatt

SEQ ID NO: 346796 - DNA, 201 bp, Homo sapiens
ggaggatggtgcaggagcgcgagaaggatatcctgacggccatcgccgccgacctgtgcaaggtacgcacgcgtgcggcggggtgtggggaaactggcccycgccgcgcacttgtggactggagcttcggctgggttttgtttttgcttttacatttcggattactccagcactgggagtatgatctccagcgatacagat

SEQ ID NO: 346797 - DNA, 201 bp, Homo sapiens
gctaaaccagttaagaagaacgtgctcaccatgctggatgaggcctatattcagccacagcctctgggagtggtgctgataatcggagcttggaattaccycttcgttctcaccattcagccactgataggagccatcgctgcaggtctggtgccaccttatgtctatatacctttttagggaggcttattttctcatatt

SEQ ID NO: 346798 - DNA, 201 bp, Homo sapiens
actgtgattctcttataacagagtgaattcaatgtgtacagtcaggaagtcattactgtccttggggaaattgattttatgcttgagaatcttcctgaatrggttactgctaaaccagttaagaagaacgtgctcaccatgctggatgaggcctatattcagccacagcctctgggagtggtgctgataatcggagcttgg

SEQ ID NO: 346799 - DNA, 201 bp, Homo sapiens
gttctcttacttttgatgctgttattgtccaagatgttctctcttagaatagctggtaatgatagcacaatgcatagatgggctcagtccacagaagctaygtgaattctcccagtaacagatgaggaaattgaggctcagagatgttcagtagcttgcctaaggttgcataagctagtgagtggcagagcccagattcaa

SEQ ID NO: 346800 - DNA, 201 bp, Homo sapiens
gtggctcactcctgtaatcccagcactttggaaggccaaggcagacagatcacttgaggccaggaattcaagaccagctgggcaacgtagcaaaatcttgkcgctacaagaaatacaaaaattcaggtgtagcggcgtgtacgtgtggtcccagctacttggcaggctgaggtaggaggatcgcttgatcctcctgggagg

SEQ ID NO: 346801 - DNA, 201 bp, Homo sapiens
aagcttgttttgtctgttccctttatttcaggttccagtgggatgggagcttatcacggaaaacatagttttgatactttttctcatcagcgtccctgttkattaaaaagtttaaagagagaaggtgctaacaaactcagatatcctcccaacagccagtcaaaggtggattggggaaaattttttctcttgaaacggttc

SEQ ID NO: 346802 - DNA, 201 bp, Homo sapiens
cccacgtctcatgcattttccctggtcaaattcaaccatttgttctccttagtgtctttgttgctgagctcatgtaaaaaaacactggagtctccagattrgttctatgtgggttcatgcttcccagatgccatcggactgtgtgttctcctcttgtccttggtcagttccctctcccatccctcacagggactggtcttg

SEQ ID NO: 346803 - DNA, 201 bp, Homo sapiens
gagaatcttcctgaatgggttactgctaaaccagttaagaagaacgtgctcaccatgctggatgaggcctatattcagccacagcctctgggagtggtgckgataatcggagcttggaattaccccttcgttctcaccattcagccactgataggagccatcgctgcaggtctggtgccaccttatgtctatatacctttt

SEQ ID NO: 346804 - DNA, 201 bp, Homo sapiens; identical to SEQ ID NO: 73464

SEQ ID NO: 346805 - DNA, 201 bp, Homo sapiens; identical to SEQ ID NO: 73436

SEQ ID NO: 346806 - DNA, 201 bp, Homo sapiens
tgcaggagcgcgagaaggatatcctgacggccatcgccgccgacctgtgcaaggtacgcacgcgtgcggcggggtgtggggaaactggcccccgccgcgcrcttgtggactggagcttcggctgggttttgtttttgcttttacatttcggattactccagcactgggagtatgatctccagcgatacagataaagccaaa

SEQ ID NO: 346807 - DNA, 201 bp, Homo sapiens
ctttttctcatcagcgtccctgtttattaaaaagtttaaagagagaaggtgctaacaaactcagatatcctcccaacagccagtcaaaggtggattggggraaattttttctcttgaaacggttcaacaaagaaaaactcggtctcctgttgctcactttcctgggtattgtagccgctgtgcttgtcaaggtgagtccct

SEQ ID NO: 346808 - DNA, 201 bp, Homo sapiens; identical to SEQ ID NO: 73485

SEQ ID NO: 346809 - DNA, 201 bp, Homo sapiens; identical to SEQ ID NO: 73429

SEQ ID NO: 346810 - DNA, 201 bp, Homo sapiens; identical to SEQ ID NO: 73432

SEQ ID NO: 346811 - DNA, 201 bp, Homo sapiens
gttccctaaggggcaacttcactgacctggacacctttggtctgtcctcagctcatcaaacggatgattgatgagacatccagtggaggtgtcacaggcartgacgtcattatgcacttcacgctcaactctttcccatttggaggagtgggtgagtcttattttctcctgcttgtagtagatatttcaaaagcaccacca

SEQ ID NO: 346812 - DNA, 201 bp, Homo sapiens
ggtgtctgagtcccagtgctgagcttgtgttgcaaggctggttgtgggtaggtttttaaagcagctgagtaaactgaatccttttttcctctctccaggcwgaatattactgaagaatgatcctgttcaacctcctagtgcctctactgaattattcctcttttaaatggttaatgaaccaataatttttaaatcatacca

SEQ ID NO: 346813 - DNA, 201 bp, Homo sapiens
ccacagctttgttcacttcgttgattttgttatcctgccacatttaggagatttgggaaccaagaatcaggtctcaaattaattaagaagatctctcttcgtgtgtgtgtgtgtgtgtgtgtgtgtgtgtgtggtgtgtgtgtttaatgaagtagcaaatgaaaggttcggaataccagggacagaaggtagaggggtttt

SEQ ID NO: 346814 - DNA, 201 bp, Homo sapiens
ctgcttttctgctcctttctgagcttttaatcctctttttatcaaattaccttttatttaaaataaatgactttgaatctgtactgtatatttacctgaayagtctatttattgtaattacatttttctgaaatggcttttatgtacttaatagtttccttattttgttacactcttggattttattttattaattacctt

SEQ ID NO: 346815 - DNA, 201 bp, Homo sapiens
cacagctttgttcacttcgttgattttgttatcctgccacatttaggagatttgggaaccaagaatcaggtctcaaattaattaagaagatctctcttcgtgtgtgtgtgtgtgtgtgtgtgtgtgtgtgtggtgtgtgtgtttaatgaagtagcaaatgaaaggttcggaataccagggacagaaggtagaggggttttc

SEQ ID NO: 346816 - DNA, 201 bp, Homo sapiens
ttgtgtttctctttctttgaggatctctatattgttattaatggtggtgttgaggaaaccacggagctcctgaagcagcgatttgaccacattttctatabgggaaacactgcggttggcaaaattgtcatggaagctgctgccaagcatctgacccctgtgactcttgaactgggagggaaaagtccatgttatattgat

SEQ ID NO: 346817 - DNA, 201 bp, Homo sapiens
tgtttctctttctttgaggatctctatattgttattaatggtggtgttgaggaaaccacggagctcctgaagcagcgatttgaccacattttctatacggsaaacactgcggttggcaaaattgtcatggaagctgctgccaagcatctgacccctgtgactcttgaactgggagggaaaagtccatgttatattgataaa

SEQ ID NO: 346818 - DNA, 201 bp, Homo sapiens
gaggatggtgcaggagcgcgagaaggatatcctgacggccatcgccgccgacctgtgcaaggtacgcacgcgtgcggcggggtgtggggaaactggccccygccgcgcacttgtggactggagcttcggctgggttttgtttttgcttttacatttcggattactccagcactgggagtatgatctccagcgatacagata

SEQ ID NO: 346819 - DNA, 201 bp, Homo sapiens
gtccttggtcagttccctctcccatccctcacagggactggtcttgacactctctgggttttactgaatgttacatgtttatgttgaagagattgctgatrttagacgttaggatttatttggcagtgcaagagtttgtgtttctctttctttgaggatctctatattgttattaatggtggtgttgaggaaaccacggag

SEQ ID NO: 346820 - DNA, 201 bp, Homo sapiens
tgtggccagggtcagctgacccacttacctcctctgcagcaagcttccagtccagccgggcagtataagcaacaaaggcagcagttgccaggaagacacasgccagcatgcccagccagaggcctggaggagacaagtgatgatgggaacaatgtccgacgaccacccaggcctctcccgacttcctcacaccacataccc

SEQ ID NO: 346821 - DNA, 201 bp, Homo sapiens
gttcctgtccggccggtcgcgacctctgcggtttcggctgcagcagctggaggccctgcggaggatggtgcaggagcgcgagaaggatatcctgacggccwtcgccgccgacctgtgcaaggtacgcacgcgtgcggcggggtgtggggaaactggcccccgccgcgcacttgtggactggagcttcggctgggttttgtt

SEQ ID NO: 346822 - DNA, 201 bp, Homo sapiens
agcccactctgtgttgtgagacagagaacattcagactaagacatgcatgacctgtcctgtgggagccactcttcaccagaggcacttctgcacacacccrcgtctcatgcattttccctggtcaaattcaaccatttgttctccttagtgtctttgttgctgagctcatgtaaaaaaacactggagtctccagattggtt

SEQ ID NO: 346823 - DNA, 201 bp, Homo sapiens
tcatggaagctgctgccaagcatctgacccctgtgactcttgaactgggagggaaaagtccatgttatattgataaagattgtgacctggacattgtttgsaggtgagtctggctctctgattttctgaggttttcccagcacaatggagacttttcctgacaatgttactctttgtacttgaaccccataccttatggct

SEQ ID NO: 346824 - DNA, 201 bp, Homo sapiens
tatatgaatctattttagttgcaagacattcaaacaacacaatgtaacaaatgaatatttgactgaattatatagctgttctggatgttttcccctcagaygcataacctggggaaaatacatgaattgtggccaaacctgcattgcacccgactatattctctgtgaagcatccctccaaaatcaaattgtatggaagat

SEQ ID NO: 346825 - DNA, 201 bp, Homo sapiens
aatacatgaattgtggccaaacctgcattgcacccgactatattctctgtgaagcatccctccaaaatcaaattgtatggaagattaaggaaacagtgaasgtttgtattaaaaacatctgattccactgattttaataagataaggagtcaaattaactattcgcaggcagcatccccatttgtttctcccttcaggaaa

SEQ ID NO: 346826 - DNA, 201 bp, Homo sapiens
ggaaaggcatggataagtgacccaatgaaagagatgtaatatgagagttgtgcatttttgtctaataagcattttcattttgtttattttctttttagccycaacagtacttaccgatgttgatcctaaaaccaaggtgatgcaagaagaaatttttggaccaattcttccaatagtgcctgtgaaaaatgtagatgaggc

SEQ ID NO: 346827 - DNA, 201 bp, Homo sapiens
atttttggaccaattcttccaatagtgcctgtgaaaaatgtagatgaggccataaatttcataaatgaacgtgaaaagcctctggctctttatgtattttygcataaccataaggtaagctttagagagaacagctagttagcataagcaactgtcaagagtcatgttccttctttgctgtaaaacaatgcaaaaaacaat

SEQ ID NO: 346828 - DNA, 201 bp, Homo sapiens; identical to SEQ ID NO: 73480

SEQ ID NO: 346829 - DNA, 201 bp, Homo sapiens
tgagagttgtgcatttttgtctaataagcattttcattttgtttattttctttttagccccaacagtacttaccgatgttgatcctaaaaccaaggtgatscaagaagaaatttttggaccaattcttccaatagtgcctgtgaaaaatgtagatgaggccataaatttcataaatgaacgtgaaaagcctctggctcttt

SEQ ID NO: 346830 - DNA, 201 bp, Homo sapiens
gttcggttccaaaatacacggagtgtattttgtgtggagtcacccagctcttggggttacacaatatatgtaggcccatggcttcatgccaaacagattctgtgtttgtctgggatttggggttaatttttgagctaacatgattttaggtgttttcatttaatggattatttaatgagggactggtactgtgctgggtgc

SEQ ID NO: 346831 - DNA, 201 bp, Homo sapiens
gcagtgagccaagattgtgccactgcactccaccctgggtgacagagcgagactccgtctccaaaaaaaaagaaagaaaaaagaatgtttaacttacttayctctagacattttggacctgggcccagagtatcagggtgttaaaactccacttatccacaattttaaaagggtgaagtgacttgctaggaatctaagaga

SEQ ID NO: 346832 - DNA, 201 bp, Homo sapiens
gcttgcactttccatccgcgtgggggtctctgcgccgtccaactctggcttgtttcctgcctcagcccccaccatcctcacggacgtggacccccagtccscggtgatgcaagaggagatcttcgggcctgtgctgcccatcgtgtgcgtgcgcagcctggaggaggccatccagttcatcaaccagcgtgagaagcccct

SEQ ID NO: 346833 - DNA, 201 bp, Homo sapiens
gctaagaaatcccgggactatggaagaatcattagtgcccggcacttccagagggtgatgggcctgattgagggccagaaggtggcttatgggggcaccgrggatgccgccactcgctacataggtgcgtgacccctgaagagcacagcccacctgcccaggctgcaggggtccccagcaagttcacagcaagtgggcaca

SEQ ID NO: 346834 - DNA, 201 bp, Homo sapiens
actcctctgctgacctgctgacctgtgcacaccccactcccacatgggcccaggcctcaccattccaagtctccacccctttctagaccaataaagagacraatacaattttctaactcagcaaatgcaggcatatggcacttcttttgtagccctgcacccaccgacctgtcctgcctgatcccactgccccacgcagtg

SEQ ID NO: 346835 - DNA, 201 bp, Homo sapiens; identical to SEQ ID NO: 73490

SEQ ID NO: 346836 - DNA, 201 bp, Homo sapiens
gtgagagggaagaagcctaatttccagtgggcatatctgtccaagttgcaaaattacctcctgtcataaagatataagaggtttgttttctggatagagcyaattagcaggtcaggcacagtggctgacacctgcaatcctagcaccttaggaagccaaggtggtaggatcatttgaagccaggagttcaagatcagccca

SEQ ID NO: 346837 - DNA, 201 bp, Homo sapiens
tcaccgccgctcttgcctggtgaggcctctgatgaatgatgaaggcctgaaggtcagataccccccgagcccggccaaggtgagagggggaaggcgctgtsggggagaccgggctgtgcgggaccagggcctggggatcactgcccactccgtgtccctttcacagatgacccagcactgaggaggggttgctccgcctgg

SEQ ID NO: 346838 - DNA, 201 bp, Homo sapiens
gtccctgcccttttccaagcctgggcaggtttgcctggaaaagggttggagcaggggtctaggtgcttgcactttccatccgcgtgggggtctctgcgccrtccaactctggcttgtttcctgcctcagcccccaccatcctcacggacgtggacccccagtccccggtgatgcaagaggagatcttcgggcctgtgctgc

SEQ ID NO: 346839 - DNA, 201 bp, Homo sapiens
tggggtggcggccaacgatgtcatcgtccacatcaccttgcactctctgcccttcgggggcgtgggtgagtctggggctgagcttgctgcctccctctggrccccagggctgggcacactcacccagcaaattcaggagggaccacctcctgcagcccgggcggcagcctcccattagcctcttccatttggaccttggcc

SEQ ID NO: 346840 - DNA, 201 bp, Homo sapiens
agatgattgcagagacatccagtggtggggtggcggccaacgatgtcatcgtccacatcaccttgcactctctgcccttcgggggcgtgggtgagtctggrgctgagcttgctgcctccctctgggccccagggctgggcacactcacccagcaaattcaggagggaccacctcctgcagcccgggcggcagcctcccatt

SEQ ID NO: 346841 - DNA, 201 bp, Homo sapiens
taatcaatgggggtgtccctgagaccacggagctgctcaaggagaggttcgaccatatcctgtacacgggcagcacgggggtggggaagatcatcatgacrgctgctgccaagcacctgacccctgtcacgctggagctgggagggaagagtccctgctacgtggacaagaactgtgacctggacgtggcctgccggtgag

SEQ ID NO: 346842 - DNA, 201 bp, Homo sapiens
tcactgcccactccgtgtccctttcacagatgacccagcactgaggaggggttgctccgcctggcctggccatactgtgtcccatcggagtgcggaccacmctcactggctctcctggccctgggagaatcgctcctgcagccccagcccagccccactcctctgctgacctgctgacctgtgcacaccccactcccacat

SEQ ID NO: 346843 - DNA, 201 bp, Homo sapiens
agctgccctctctcattggggtgaacagagcccctgggccaggaaaggcggtctactgccagttactgctaccccccgcccaaggtggggtgctgagcttyggggctgctggtcttggccactgcaactcacccacacttgcaagagcgaggaggggcttggtctttgctgagcctcccctctctccttgcatggaaggat

SEQ ID NO: 346844 - DNA, 201 bp, Homo sapiens
ctctgatggggcagggcaatctgagttctggagagcaggcccagaggggagaagggccaccgctgctcggggtctggggcagaacccgtatctgcacctcstgaccctagccagggctctgaccacctccatatcccacatctgtggccccagagatgtaggggggcccgagtagcagtgacacctggctgtgcaggacaa

SEQ ID NO: 346845 - DNA, 201 bp, Homo sapiens
tgcagaatgaatggaacgcctactatgaggaggtggtgtacgtcctagaggagatcgagtacatgatccagaagctccctgagtgggccgcggatgagccygtggagaagacgccccagactcagcaggacgagctctacatccactcggagccactgggcgtggtcctcgtcattggcacctggaactaccccttcaacc

SEQ ID NO: 346846 - DNA, 201 bp, Homo sapiens
cctcggagctgagtgagaacatggcgagcctgctggctaccatcatcccccagtacctggacaaggtgagttgccctccagggcctcgtaactccatggcytcataactgagctagggccaggtctttggggggtgagaaatagtgaattcttgcagcaaggggccaagctactggtggggctgaggattgttcttagcag

SEQ ID NO: 346847 - DNA, 201 bp, Homo sapiens
tggggctgaggattgttcttagcagctgccctctctcattggggtgaacagagcccctgggccaggaaaggcggtctactgccagttactgctaccccccscccaaggtggggtgctgagcttcggggctgctggtcttggccactgcaactcacccacacttgcaagagcgaggaggggcttggtctttgctgagcctcc

SEQ ID NO: 346848 - DNA, 201 bp, Homo sapiens
gcccggctaattttgtatttttagtagagacagggtttcgccatgttggacaggctggtcttgaactcctgccctcaggagttcctcaggaggagttctcrgcctctcagagtgctgggattacaggcatgagccacagcgccgggcctgctactgcacttttcaagaaatggctcaggacttctcatcttaaaccagaaa

SEQ ID NO: 346849 - DNA, 201 bp, Homo sapiens
tggtggcatggtggtgcatgcctgttgtctcagctacttagaaggctacggcgaggctggagcattgcttgggcccaggagtttgaggctgcagtgagctrtgattgcaccactgcactccagcctgggcaacagaacaagaccctgtctctaagagaaaaaaaaaagataatgcacactcactatagattatttagaaaa

SEQ ID NO: 346850 - DNA, 201 bp, Homo sapiens
gcaagcaagtaagggagcggaaaaggccgggaaaggccctgccgcgagcacgctgccaagagcccccagcagcagttcggcttaggactcgggttgcggcsggtgtcaccttctcaggggctagcaaggcagccagggcccaggcgtctgagtgaggggcgggagaggaggcgaggcagaaagtggaccttccagcggaaa

SEQ ID NO: 346851 - DNA, 201 bp, Homo sapiens
acccaacaaggtggagagggaaacctggggcgtcctgggggcaggatgctgagccctgtgcttacttctcctccgcagggaacagcggcatgggatcctaycatggcaagaagagcttcgagactttctctcaccgccgctcttgcctggtgaggcctctgatgaatgatgaaggcctgaaggtcagataccccccgagcc

SEQ ID NO: 346852 - DNA, 201 bp, Homo sapiens
ctgcgtgtgcagagctctgggggtgttggtctgggattgtgccatcagctttgcaagcaagtaagggagcggaaaaggccgggaaaggccctgccgcgagyacgctgccaagagcccccagcagcagttcggcttaggactcgggttgcggcgggtgtcaccttctcaggggctagcaaggcagccagggcccaggcgtct

SEQ ID NO: 346853 - DNA, 201 bp, Homo sapiens
aaaaagctccacccagaatcccaccacccaaagacagacactgctggcctgtgtctgtgcagcctttgggcaggacgaggctctgcgtccttacccgaagyccccacctcttctccacaggagttctacggggaagatgctaagaaatcccgggactatggaagaatcattagtgcccggcacttccagagggtgatgggc

SEQ ID NO: 346854 - DNA, 201 bp, Homo sapiens
gcgcgcccgcgccgccttcagctcgggcaggacccgtccgctgcagttccggatccagcagctggaggcgctgcagcgcctgatccaggagcaggagcagsagctggtgggcgcgctggccgcagacctgcacaaggtgctcaggctgggcggccgccttctgccagtgtcggggccatgcgatggggcgtggggggaggg

SEQ ID NO: 346855 - DNA, 201 bp, Homo sapiens
ataattccacccccatcagttgtctcatcgtgtcgggggctaccgttctagtcctttcttgcatgttagagcgtgcacgcccacacacacacgcacacgcrcgcacacacacgcacatgcacacacacgcacgcacacacacacgcacatgcacacacacgcacacacacacatgcacacacacgcacacgcacacacaca

SEQ ID NO: 346856 - DNA, 201 bp, Homo sapiens
cgtgacccctgaagagcacagcccacctgcccaggctgcaggggtccccagcaagttcacagcaagtgggcacagatgcttgataagcggacacgacctcsggatgggtataaattgctttcaccagggagcctgcggtagactccagcaggcaggggctgaggacagcccctgcttcaacctcagaatcccctctcccag

SEQ ID NO: 346857 - DNA, 201 bp, Homo sapiens
acatgctgaatagcctgctccacctaatccctaaatactgcacagtaaacccttacgtgggtgtgacaggagtcatttaaactgtctcctttctttcggayctttgggatgtttacaatacttccctgttatagaaaacagtgatgactttcttattcgtgaatgtttaggaaaggctgtaggaccttttcgtcacagaga

SEQ ID NO: 346858 - DNA, 201 bp, Homo sapiens
aatcccctctcccagcaaaggcccagaaagaggggcctcatctccctgcccctctgaagcagcaggagcagggacagcagaagccacaggagccccaggtrtgcccagccgtgaggggcccccagtgcccaggctgtgggtcaccagatgggaccctcttggccccgagtttgtcaaggagacaagagaattctggcaggg

SEQ ID NO: 346859 - DNA, 201 bp, Homo sapiens
caactcctggggaaccttttggatttagtccagtctgggattctcacagacgcatcgcctgggggaaattcatgaacagtggccagacctgcgtggccccwgactacatcctctgtgacccctcgatccagaaccaaattgtggagaagctcaagaagtcactgaaagtgagtgttgaccccttggcagggtgggatgaga

SEQ ID NO: 346860 - DNA, 201 bp, Homo sapiens
tacggggaagatgctaagaaatcccgggactatggaagaatcattagtgcccggcacttccagagggtgatgggcctgattgagggccagaaggtggcttwtgggggcaccggggatgccgccactcgctacataggtgcgtgacccctgaagagcacagcccacctgcccaggctgcaggggtccccagcaagttcacag

SEQ ID NO: 346861 - DNA, 201 bp, Homo sapiens
acacaatggaggggaggcttcaggtgtggtccttgggagggcagagcctctggtgaagtaccctgggcataggcctggctcggtgtgctctgcagggaackcagtggtcctcaagccctcggagctgagtgagaacatggcgagcctgctggctaccatcatcccccagtacctggacaaggtgagttgccctccagggcc

SEQ ID NO: 346862 - DNA, 201 bp, Homo sapiens
ctctcccctttctgcttttcctccaacatctcagcaactcagagggccaggtggtgcagctctggccagcgtgtgcccgtgtgtgtccctctgtcatgtgyccgtgcgtgctcctgggtgtgccccgtgacatgtgcttgtttgctaacaactcttccatccactgtcccgaggacacacaatggaggggaggcttcaggt

SEQ ID NO: 346863 - DNA, 201 bp, Homo sapiens
ctgtgtcaaaggtaatcctcttccctgcattccttattttttctcttgtctaggtggagtctgcactcagagccggggccctaagtgtcaagagtcctacmtcatctctccagggggtccctgcctctgggaccatcatctctggagcatcctcctggacctctggcagctctgccatcccccaaaccaggaggcagaggt

SEQ ID NO: 346864 - DNA, 201 bp, Homo sapiens
ccctgggctgggtgagtgacccccatcaccctggcagctgagcagtggggctccccactcgccccagctgcaggcgggccctggccctggaagctcactcyggctctgtcgctgcagaatgaatggaacgcctactatgaggaggtggtgtacgtcctagaggagatcgagtacatgatccagaagctccctgagtgggcc

SEQ ID NO: 346865 - DNA, 201 bp, Homo sapiens
agtggggctccccactcgccccagctgcaggcgggccctggccctggaagctcactccggctctgtcgctgcagaatgaatggaacgcctactatgaggargtggtgtacgtcctagaggagatcgagtacatgatccagaagctccctgagtgggccgcggatgagcccgtggagaagacgccccagactcagcaggacg

SEQ ID NO: 346866 - DNA, 201 bp, Homo sapiens
ggccctgccgcgagcacgctgccaagagcccccagcagcagttcggcttaggactcgggttgcggcgggtgtcaccttctcaggggctagcaaggcagccrgggcccaggcgtctgagtgaggggcgggagaggaggcgaggcagaaagtggaccttccagcggaaaggccattttccccaaggccgagcccagggaagtc

SEQ ID NO: 346867 - DNA, 201 bp, Homo sapiens
cccctccaatctgatctggagagtggctgactgcgtgtgcagagctctgggggtgttggtctgggattgtgccatcagctttgcaagcaagtaagggagcrgaaaaggccgggaaaggccctgccgcgagcacgctgccaagagcccccagcagcagttcggcttaggactcgggttgcggcgggtgtcaccttctcaggg

SEQ ID NO: 346868 - DNA, 201 bp, Homo sapiens
ccttcagctcgggcaggacccgtccgctgcagttccggatccagcagctggaggcgctgcagcgcctgatccaggagcaggagcaggagctggtgggcgcrctggccgcagacctgcacaaggtgctcaggctgggcggccgccttctgccagtgtcggggccatgcgatggggcgtggggggaggggctggggagagtgc

SEQ ID NO: 346869 - DNA, 201 bp, Homo sapiens
agatttggaaacactggatttattttcttctaatataaacataatgcaagctaggcatggtggctcacaccggtaatcccagcactttgggaggtagagastggaggatcacttgaggccagaagtttgagaccagcctgggtaacatagcaagatcccatctttacaaaatatgtttttaaattagccaagcatggtggc

SEQ ID NO: 346870 - DNA, 201 bp, Homo sapiens
gaaatcctttgcccatttttgaactaggtttgtctttttttgttgaattataaaagttctttatatattttggcatatggcgcatatatatatatataatttttttttttttttttttttttgcgacagggcctcactctctcacccaggctggagtgcagtggtgcagtcgtggctcactggagccttgacctcccgggc

SEQ ID NO: 346871 - DNA, 201 bp, Homo sapiens
ggctcatgcctgtaatcccagcactttgggacgccaaggcaggccaatcgcttgggctcaggagttcaagaccagcttggacaacatggtgaaaccctgtytctacaaaaaatacaaaaattagctgaacttggtggcacatacctgcagtcccagctacttgagaggctgaggcgggaggatcacttgagcctggggctc

SEQ ID NO: 346872 - DNA, 201 bp, Homo sapiens
tgtctcttagaaaagtttttttttttccagtaatattattcttgtatggtgcaaacactatataatgctgcgctactgcccattttctttccagaaaggayaaggcactcaattttccagacatttcttgagtaccatacttgtgccaggccctgggaaacagtgatcagcaggagggacgaagagcccaccctcatgggg

SEQ ID NO: 346873 - DNA, 201 bp, Homo sapiens
gagatggctttagaagtatttaagatcccttccagaatgttgatgattaaacgtattctttctttcttttctttctttcttccctttctttcttcttctcttttcttttcttttctttatttgaaacggagtctcgctctgtcgcccaggctggagtgcagtggcgcgatcttggctcactgcaagctctgcctcctgggt

SEQ ID NO: 346874 - DNA, 201 bp, Homo sapiens
caaaggacgctggtggggtagggcctctttcttactgagttcacagaatgaagtgccataggggcctccaagtgctggtggccctgttggcattactgggyagagcttgcctgagaataaaatcaccaaagaaagacaaaaccctggagatagtggagcactggatctagccatacgaagctgtcccctgggctttttagc

SEQ ID NO: 346875 - DNA, 201 bp, Homo sapiens
agatggctttagaagtatttaagatcccttccagaatgttgatgattaaacgtattctttctttcttttctttctttcttccctttctttcttcttctcttttcttttcttttctttatttgaaacggagtctcgctctgtcgcccaggctggagtgcagtggcgcgatcttggctcactgcaagctctgcctcctgggtt

SEQ ID NO: 346876 - DNA, 201 bp, Homo sapiens
tggagtgcagtggcacgatctcagctcactgcaacctccgcctcctgggttcaagcaattctcctgcctcatcctcccaggtagctggaattacaggtgcrtgctaccacacctgggtaatttttgtatttctggtagagatgaggtttcaccatgttggtcaggctggtcttaaactcctgaccttgtgatctgcctgcc

SEQ ID NO: 346877 - DNA, 201 bp, Homo sapiens
gatggctttagaagtatttaagatcccttccagaatgttgatgattaaacgtattctttctttcttttctttctttcttccctttctttcttcttctcttttcttttcttttctttatttgaaacggagtctcgctctgtcgcccaggctggagtgcagtggcgcgatcttggctcactgcaagctctgcctcctgggttc

SEQ ID NO: 346878 - DNA, 201 bp, Homo sapiens
ggtgtatcacgaggtcaggagattgagaccatcctagttaacaaggtgaaaccccgcgtctactaaaaatacaaaaaattagttgggcgtggtggcgggcrcctgtagtcccagctacttgggaggctgaggcaggagaatcgcttgaacgcaggagggttgcagtgagctgagattgcaccactgcactccagcctgggc

SEQ ID NO: 346879 - DNA, 201 bp, Homo sapiens
ccaggtacctagaggcctcctctgggcttaccctggtctctttgcctcagaggttgtcactgatgtgaaagctgcccatcttgatcctgtagtcagccatragggcttgtggccttaaatgctgcctttttttcttgtctttgatgtttatgtaaatgatgtctttgtgtactttgggactttcttgctcaacactgttat

SEQ ID NO: 346880 - DNA, 201 bp, Homo sapiens
gttggctcatgcctgtaatcccagcactttgggacgccaaggcaggccaatcgcttgggctcaggagttcaagaccagcttggacaacatggtgaaacccygtctctacaaaaaatacaaaaattagctgaacttggtggcacatacctgcagtcccagctacttgagaggctgaggcgggaggatcacttgagcctgggg

SEQ ID NO: 346881 - DNA, 201 bp, Homo sapiens
acaggcatgagccaccatgcccagcctactttatatattttggatactagactcttaccagatacatgatatgcaaatattttctgccattctgtaggggktttttttacttttttatttttatctatttatttatttttatttatttattttttgagacagagtctcgctctgtcacccaggctagagtgcagtggcatg

SEQ ID NO: 346882 - DNA, 201 bp, Homo sapiens
atttttgtatttttttatagagacagggtttcgccatgttgctcaggctggtctcaaactcctgaactcaggcaggcaatctgtccacctcggcctcccaragtactgggattacaggcatgagccaccatgcccagcctactttatatattttggatactagactcttaccagatacatgatatgcaaatattttctgcc

SEQ ID NO: 346883 - DNA, 201 bp, Homo sapiens
taacccatcgtatgaatgtggcttagactgcccaaccacagcctaatttggggtttttatgttttcttctgttctttgcccttataatgtggcaggaaatrtatgtggataaaacacttttcccatactttggcttatttcatttcaagcttctaaaagtgagattaatgagtcagaaggtatgaatataaggctttttgt

SEQ ID NO: 346884 - DNA, 201 bp, Homo sapiens
gactacaggcgcgtgctaccacgcccagctaatttttgtatttttagtagagacagggtttcaccatgttggccaggatagtttcgatctcttgaccttgygatccacccgcctcagcctcccaaagtgctgggattacaggcgtgagtcactgtgcctgggccagctaatttttttttatttttgtagagacgaggtctc

SEQ ID NO: 346885 - DNA, 201 bp, Homo sapiens
tgaggcgggaggatcacttgagcctggggctcagaggttgcagtgagccgagatcatgccactgcactccagcctgggtgacagggtgaggctgtgtctcaaaaaaaaaaaaaaaaaaagtcatcctgtcataacatgagatattgttctgtgatcaaagtaaagtacaagctgggcacagtggctcatgcctataatccc

SEQ ID NO: 346886 - DNA, 201 bp, Homo sapiens
gaggcgggaggatcacttgagcctggggctcagaggttgcagtgagccgagatcatgccactgcactccagcctgggtgacagggtgaggctgtgtctcaaaaaaaaaaaaaaaaaaagtcatcctgtcataacatgagatattgttctgtgatcaaagtaaagtacaagctgggcacagtggctcatgcctataatccca

SEQ ID NO: 346887 - DNA, 201 bp, Homo sapiens
aaacaaaaaagaaaacaaaaatactctaacaaattaaaaaaataatagagactttaattttacctgaaaaattttatgtttttttttgagacagggtctttctctgtcacccaggttggagtgctgtagtgccatgatagctcactgcaaccttgaactcctgggctcaagagatttctcccacctcagccttctgagtag

SEQ ID NO: 346888 - DNA, 201 bp, Homo sapiens
aacaaaaaagaaaacaaaaatactctaacaaattaaaaaaataatagagactttaattttacctgaaaaattttatgtttttttttgagacagggtctttctctgtcacccaggttggagtgctgtagtgccatgatagctcactgcaaccttgaactcctgggctcaagagatttctcccacctcagccttctgagtagc

SEQ ID NO: 346889 - DNA, 201 bp, Homo sapiens
acaaaaaagaaaacaaaaatactctaacaaattaaaaaaataatagagactttaattttacctgaaaaattttatgtttttttttgagacagggtctttctctgtcacccaggttggagtgctgtagtgccatgatagctcactgcaaccttgaactcctgggctcaagagatttctcccacctcagccttctgagtagct

SEQ ID NO: 346890 - DNA, 201 bp, Homo sapiens
caaaaaagaaaacaaaaatactctaacaaattaaaaaaataatagagactttaattttacctgaaaaattttatgtttttttttgagacagggtctttctctgtcacccaggttggagtgctgtagtgccatgatagctcactgcaaccttgaactcctgggctcaagagatttctcccacctcagccttctgagtagctg

SEQ ID NO: 346891 - DNA, 201 bp, Homo sapiens
gaaacctcgtctctactaaaaatacaaaaaattagccgggcgtagtggtgggctcctgtagtcccagctactcgggaggctgaggcaggagatggcatgasaggcggagcttgcagtgagccgagatcgtgccactgcactccagcccaggcgactgagcaagactctgtctcaaaaaaaaaataagaaaatctctcacgt

SEQ ID NO: 346892 - DNA, 201 bp, Homo sapiens
tcttgcttaactatagtacaataacacagactgaaaattctcagtgccacagccacagaggtccttcagacagcaccagttgtgcatgtagtgagtgtgaktgtgtgtgtgtgtgtgtgtgtgtgtttgtgtttgtgaatgcagtcttaccatgggtagctttgtggaaccaccaccacagtcaggacacagaattgctcc

SEQ ID NO: 346893 - DNA, 201 bp, Homo sapiens
cttgcttaactatagtacaataacacagactgaaaattctcagtgccacagccacagaggtccttcagacagcaccagttgtgcatgtagtgagtgtgagtgtgtgtgtgtgtgtgtgtgtgtgtttgtgtttgtgaatgcagtcttaccatgggtagctttgtggaaccaccaccacagtcaggacacagaattgctcct

SEQ ID NO: 346894 - DNA, 201 bp, Homo sapiens
ataacacagactgaaaattctcagtgccacagccacagaggtccttcagacagcaccagttgtgcatgtagtgagtgtgagtgtgtgtgtgtgtgtgtgtgtgtgtttgtgtttgtgaatgcagtcttaccatgggtagctttgtggaaccaccaccacagtcaggacacagaattgctccttcactgcaaggcaccctca

SEQ ID NO: 346895 - DNA, 201 bp, Homo sapiens
gctttttttttttttttttttttttttgagacagagtcttgatctgtcttccaggctggagtacagtggtgcgatcagatctcactgcagcctccacctcscgggcccaagccattctcctacctcagcctcccaagtagctgggactatagatgtgtgcaccaggcctggctaattttttttttttttttggtagagacg

SEQ ID NO: 346896 - DNA, 201 bp, Homo sapiens
taattttttagacattgttttctttagttctgtgaacatatttatgatagctaatttattgtgtctagttattctgacattgggctttttcagagatcgtktctgttgactgcttttttactgtgtatgggccatgtttttcttttttttaatgtttaaaaaaacttattactttattattttaatttaatttaattttta

SEQ ID NO: 346897 - DNA, 201 bp, Homo sapiens
gtggaggctgcagtgagccgagatcatgtgaccgcactagccaagatcacgccactgcactccagcctgggcgacagagcaagactccatctcaacaacaraaaaaagccagatgcggtgggaagaagctcctgcaagaggccacggagccagcgacgggaggccttgaagccagtgacgacccactcagccgagctgccg

SEQ ID NO: 346898 - DNA, 201 bp, Homo sapiens
gcaatcctttcatttcagcctcctaagtagctaggactataggtgtgcaccaccatgcctggctaattaaaaatatatatatatattttttgttagagacrggggtctgactgtgttgcctaggctggtctctaactcctaggctcagcctcccagtgttgggattgcaggcatgagccatcacttccagcccatattttg

SEQ ID NO: 346899 - DNA, 201 bp, Homo sapiens
tctactctggggatgggactattcacacagagtgactctaagtttgatcatattctccagccctgagtctcagcaagctgccagataggcataatagtgayggttacctgagaatgggcttcttgagaagctccaaacctgttcttttcccaccagtggttgctagtcttctgtttctcatggccaccatgattatgaggt

SEQ ID NO: 346900 - DNA, 201 bp, Homo sapiens
gctcatggcaatcctttcatttcagcctcctaagtagctaggactataggtgtgcaccaccatgcctggctaattaaaaatatatatatatattttttgtyagagacgggggtctgactgtgttgcctaggctggtctctaactcctaggctcagcctcccagtgttgggattgcaggcatgagccatcacttccagccca

SEQ ID NO: 346901 - DNA, 201 bp, Homo sapiens
ttacaggcgtgagccactgctcctggccactctcttgataattttttaaaaactattttgattttttttgtaaggatgaattcaaagttatatgaatactraatcttacatcttgggatatttatcaaatgttattaaaatattctgtgtttatgatgctccctcttttcccttaggacaaatattctgtcttacacacac

SEQ ID NO: 346902 - DNA, 201 bp, Homo sapiens
aacacagactgaaaattctcagtgccacagccacagaggtccttcagacagcaccagttgtgcatgtagtgagtgtgagtgtgtgtgtgtgtgtgtgtgtgtgtttgtgtttgtgaatgcagtcttaccatgggtagctttgtggaaccaccaccacagtcaggacacagaattgctccttcactgcaaggcaccctcatg

SEQ ID NO: 346903 - DNA, 201 bp, Homo sapiens
acagactgaaaattctcagtgccacagccacagaggtccttcagacagcaccagttgtgcatgtagtgagtgtgagtgtgtgtgtgtgtgtgtgtgtgtgtttgtgtttgtgaatgcagtcttaccatgggtagctttgtggaaccaccaccacagtcaggacacagaattgctccttcactgcaaggcaccctcatgctt

SEQ ID NO: 346904 - DNA, 201 bp, Homo sapiens
cagactgaaaattctcagtgccacagccacagaggtccttcagacagcaccagttgtgcatgtagtgagtgtgagtgtgtgtgtgtgtgtgtgtgtgtgtttgtgtttgtgaatgcagtcttaccatgggtagctttgtggaaccaccaccacagtcaggacacagaattgctccttcactgcaaggcaccctcatgcttc

SEQ ID NO: 346905 - DNA, 201 bp, Homo sapiens
tgaaaattctcagtgccacagccacagaggtccttcagacagcaccagttgtgcatgtagtgagtgtgagtgtgtgtgtgtgtgtgtgtgtgtgtttgtgtttgtgaatgcagtcttaccatgggtagctttgtggaaccaccaccacagtcaggacacagaattgctccttcactgcaaggcaccctcatgcttcctttc

SEQ ID NO: 346906 - DNA, 201 bp, Homo sapiens
gaaaattctcagtgccacagccacagaggtccttcagacagcaccagttgtgcatgtagtgagtgtgagtgtgtgtgtgtgtgtgtgtgtgtgtttgtgtttgtgaatgcagtcttaccatgggtagctttgtggaaccaccaccacagtcaggacacagaattgctccttcactgcaaggcaccctcatgcttcctttca

SEQ ID NO: 346907 - DNA, 201 bp, Homo sapiens
cttgaacccaggagacagagggtgcagtgagccaagatggcgccactatactccaggctgggtgatagagtgagactctgtctcaaaaaaaaaaaaaaaaagcctgtaatcccaccactttgggaggccccaggcgtgcagatcacctgaggtcgggagttcaagaccagcctgaccaacatggagaaacgctctctctgc

SEQ ID NO: 346908 - DNA, 201 bp, Homo sapiens
aggcaagagaatcactggaacccagagggcagtggctgcagtgagccgagattgtgccactgcattccagcctgggtgacagaatgagactcttgtctcaaataataataataataataataataataataataatgtgtacaactcattggtttttagaatgttcagagttgtgcagtcattaccatagttggttttaga

SEQ ID NO: 346909 - DNA, 201 bp, Homo sapiens
gtactacagttggcgccaccacgcctggctaatttttgtatttttagtagagacggggtttcaccatgttggccagactggtcttgaactcctgacctcasgcaatctgcccgcctcggcctaccaaagtggtgggattacaggtatgagccaccgtgtccagccactcagtgttcttaacgggtggaaataaccaagtat

SEQ ID NO: 346910 - DNA, 201 bp, Homo sapiens
ggcaagagaatcactggaacccagagggcagtggctgcagtgagccgagattgtgccactgcattccagcctgggtgacagaatgagactcttgtctcaaataataataataataataataataataataataatgtgtacaactcattggtttttagaatgttcagagttgtgcagtcattaccatagttggttttagaa

SEQ ID NO: 346911 - DNA, 201 bp, Homo sapiens
gcaagagaatcactggaacccagagggcagtggctgcagtgagccgagattgtgccactgcattccagcctgggtgacagaatgagactcttgtctcaaataataataataataataataataataataataatgtgtacaactcattggtttttagaatgttcagagttgtgcagtcattaccatagttggttttagaac

SEQ ID NO: 346912 - DNA, 201 bp, Homo sapiens
gtgttaatccaggaggaattttgttgtcagagaataaaaggaggttgtccataattgactttaagcagcaatcagtaaaacattgagctcttcagctccgyctttcttgtaagtttatcatttcttcttagtggttgtgaacatcatgtgataatgtatttccataaatttaggaccctgaaatccaactgaactttctgt

SEQ ID NO: 346913 - DNA, 201 bp, Homo sapiens
ggagatgggcaaagtgcaggtttaccaggaacctaacagaggtgagctatcttgggcatgtggaacattgacctttttgtgaaatgtggcatattggctcygtccttcatcctttactattgaaacgatttgattcagttgtacatttccattagcaagaagtcaggcaggcaaggtagaacagagtggttttttagctct

SEQ ID NO: 346914 - DNA, 201 bp, Homo sapiens
gctaggtaatggattgatgtaacaatttaatgttgactttaaattttataagaagaataactttattttattttactcttatcgatttacgagtctccttraatagtaaagatactgggtttcttctattactttttcagctttttccccctttctcttctctaggcggctaggggtggagatgggcaaagtgcaggttta

SEQ ID NO: 346915 - DNA, 201 bp, Homo sapiens
ccactgcctggctaatttttgtgtttttagtagagacggggtttcgccatgttggccagactggtctccaactcctgacctcaagtgatcttgacctcaartgatcatcccaaagtattgggattacaggcatgagccaccgcacccagccaccatagctttttaatttttttgagatggagtttcactcttgttgcccgg

SEQ ID NO: 346916 - DNA, 201 bp, Homo sapiens
gtaatcccagcactttgggaggccgaggggggtggatcacttgaggtcaggagtttgagaccagcctgaccaacttagtgaagccctgtctctactaaaawtacaaaattagcggggcatggtggcgcacgcctgtaatcccagctacttgggaggctgaggcaggagaattgcttgaacctgggaggcagaggttgcatt

SEQ ID NO: 346917 - DNA, 201 bp, Homo sapiens
gtagttccaccaaatgttgtttccttgaaggtagtggggcaactatttacttccaagaatgttttctataccagtgattaggggacttgagtgttggccaratatgattgaaattgggccaggtgcggtgtcacacctgtaatcccagcactttgggaggccgaggggggtggatcacttgaggtcaggagtttgagacca

SEQ ID NO: 346918 - DNA, 201 bp, Homo sapiens
ccaaacatttcttcaaaggctgaattaattttacttaataatttttctctgatatacatgctttaaaaaaatgtaggtgaaaaatcacataatatacaatmattttaaagtatagaattcactggcatttagtgcattcacaatgttgtgtaaccaccacctgtctctgttttcagaacattttcgtcttcccagaagaac

SEQ ID NO: 346919 - DNA, 201 bp, Homo sapiens
tctagggtacaagtaatcctcctgccttggcctcctaaagttccgggattacaggcatgagccactgcatctggccttgatacatttttttttctttcccrctaaataccagaagaacatgatgaattttctgttgactttcccatctgggtggacttttagtaacctctagagtcctcagtttacttctgtcacccacct

SEQ ID NO: 346920 - DNA, 201 bp, Homo sapiens
atgctgacgctttctccatctcttgtgtttgtcactggaatttaagcaccttctgccagagtcagaaggaacattctggtactaggatgctcgttgccttraaatttttgccatctattcttttttttttttttgagacggagtctcactctgtcgcccaggctggagtgcggtggcgcaatctcagcttactgcaagctc

SEQ ID NO: 346921 - DNA, 201 bp, Homo sapiens
gacttttagatattgtgtgtgagactctgggtctcatttaggccttctgattttgctggcttctcaggactctggcagggaaagtggtggtgttggggctygtttctgctaggtaagggtagaagtcgagattcaccaccaggccttgtgtggaccacctaaggtggtccttgttactcatgggtggaaatgctccctcca

SEQ ID NO: 346922 - DNA, 201 bp, Homo sapiens
tctggctaatttttgttttttgtttttttttgagatggagtttcgctcttgttgcccaggctggagtgcaatggcatgatctcggctcacagcaacctccmcctcccaggttcaagtgattgtcctgcctcagcctcccgagtagctggggttacaggcatgtgccaccacacccggctaattttgtatttttagtagaga

SEQ ID NO: 346923 - DNA, 201 bp, Homo sapiens
aaggaaaagtagcatcattctcattgggtggtggtggaattcctgactccaccaggctgcctctgataccactgcaatggagaggggaggggcacctcttwactgctgagttgggggtagaagtccagatttcactctccactgactctggcagttgctccttactgctgagtgagggtgaaagtcccagctccctgtttg

SEQ ID NO: 346924 - DNA, 201 bp, Homo sapiens
atatgattgaaattgggccaggtgcggtgtcacacctgtaatcccagcactttgggaggccgaggggggtggatcacttgaggtcaggagtttgagaccascctgaccaacttagtgaagccctgtctctactaaaaatacaaaattagcggggcatggtggcgcacgcctgtaatcccagctacttgggaggctgaggca

SEQ ID NO: 346925 - DNA, 201 bp, Homo sapiens
tgagacgttcagtgatgggccatggtgtggccaggaagacactagcctgactaccaggaggcccctggagggaagagatggactaagatagcagtatctgyggggagccaaccaaggaggactttgaataccagtaaatacactcgtgtcctagaaggcagcccacaaaggctctcgatccgggccatttagtgttcagca

SEQ ID NO: 346926 - DNA, 201 bp, Homo sapiens
cattctggtactaggatgctcgttgccttgaaatttttgccatctattcttttttttttttttgagacggagtctcactctgtcgcccaggctggagtgcrgtggcgcaatctcagcttactgcaagctccgcctcccgggttcacgccattctcctaggcctcagcctccccagtagctgggactacaggcacctaccac

SEQ ID NO: 346927 - DNA, 201 bp, Homo sapiens
tgcccatttttgaactaggtttgtctttttttgttgaattataaaagttctttatatattttggcatatggcgcatatatatatatataattttttttttyttttttttttttgcgacagggcctcactctctcacccaggctggagtgcagtggtgcagtcgtggctcactggagccttgacctcccgggcccaagtgat

SEQ ID NO: 346928 - DNA, 201 bp, Homo sapiens
ggttcaggcgattctcctgggtagctgggactaccggtacatgccaccatgcccaggtaattttggtattattattattattattattattattattattwttttttttttttttttttttttttttttttttttagtagagacagggtttcgccatgttggccaggctggcctcgaactgactgcaagtgattcgcccgc

SEQ ID NO: 346929 - DNA, 201 bp, Homo sapiens
agtcactcccaggctggagtgtaatggcgcaatctcagcccactgaaacctccacctcccgggttcaagcaattctcgagtagctgggattacaggcatgygccaacacagctggctaattttttgtatctttagtagagatggggtttcaccatgttggccaggctgatctcgaacgctgacctcgtgatctgcctgcct

SEQ ID NO: 346930 - DNA, 201 bp, Homo sapiens
cgattctcctgcctcagcctcctgagtagctgggattacaggcatgcgccaccacgcccggctaattttttgtatttttagtagagacagggtgtcaccaygtttgtcaggttggtctcaaactcctgaccttgtgatctgcctgccttggcctcccaaagtgctgggattacaagcgtgagccaccatgcccatccaata

SEQ ID NO: 346931 - DNA, 201 bp, Homo sapiens
ctgaatgtatatgattttagaaggtatgtatcacggagcatttgcacagagtgaatagaataaaagtccccatatcactgcattttaagacaggtacttaytgtagaataaacctttttttttgtttgttttttgagacggagtcttgctctgttgcccagtctggagtgcaatgacgtgatcttggctcactgcaacctc

SEQ ID NO: 346932 - DNA, 201 bp, Homo sapiens
cactaaataccagaagaacatgatgaattttctgttgactttcccatctgggtggacttttagtaacctctagagtcctcagtttacttctgtcacccacstgttcacagagggatggatgtagtagccttttgctcagtttctttggcttttgtcagtgatgtttgtcattcatctgttcaaatgtttattgagaaccta

SEQ ID NO: 346933 - DNA, 201 bp, Homo sapiens
aaatctttttttttcctaagttaattaacagggtgaaagtctcttttaactcatcagatgtcagacttgttgtatagtgacagagaacctactcacctgartgttctgtgtttccattcactccttctttcattaacaaatacttattttgaatgtctacaatatgtgaattacagttagttacacgtatgcaggatgcct

SEQ ID NO: 346934 - DNA, 201 bp, Homo sapiens
ggtgatatgcgcttctaattccagctacttgggaggctgaggcatgagaatcgcttgaacccaggagacagagggtgcagtgagccaagatggcgccactrtactccaggctgggtgatagagtgagactctgtctcaaaaaaaaaaaaaaaaagcctgtaatcccaccactttgggaggccccaggcgtgcagatcacct

SEQ ID NO: 346935 - DNA, 201 bp, Homo sapiens
gaggctgaggcgggaggatcacttgagcctggggctcagaggttgcagtgagccgagatcatgccactgcactccagcctgggtgacagggtgaggctgtktctcaaaaaaaaaaaaaaaaaaagtcatcctgtcataacatgagatattgttctgtgatcaaagtaaagtacaagctgggcacagtggctcatgcctata

SEQ ID NO: 346936 - DNA, 201 bp, Homo sapiens
gcccctgtcttttgtcagtttcatattcctctaatcagaatcactcagcacccctttcattttctctccgtgtctcattttgcattgttccatacctgacrtaagcttgtgttaactcgggttctcagtcttgtccatgttgcagagtctggacgtcatggtcttctttgtgaaataccatgaaataacatttagtgttga

SEQ ID NO: 346937 - DNA, 201 bp, Homo sapiens
ggggtttcaccatgctggccaggctggtcttggctcagatgttctgcccaccttggcctcccaaagtgctgggattatgggcatgagccaccgtgcctggmcatctttgggaattttttttaatctgttaagtatttcatcccttctatttcttttattattttcctttgggaactattaggtcctgaaaattttggatct

SEQ ID NO: 346938 - DNA, 201 bp, Homo sapiens
ggctgaggcgggaggatcacttgagcctggggctcagaggttgcagtgagccgagatcatgccactgcactccagcctgggtgacagggtgaggctgtgtytcaaaaaaaaaaaaaaaaaaagtcatcctgtcataacatgagatattgttctgtgatcaaagtaaagtacaagctgggcacagtggctcatgcctataat

SEQ ID NO: 346939 - DNA, 201 bp, Homo sapiens
ttgaaacattgacttgagacatagatccactgtgttttcctgtcgtggcaagcctcagatttgagaagctgtcacatttccagatcaaaccatgaagctayttggctttctgatgctgtggttttttttcttttgcttcacaggtggtggtcaccaatacaattccacatgaagtccagaagctccagtgccccaagatta

SEQ ID NO: 346940 - DNA, 201 bp, Homo sapiens
ctttctctgtcacccaggttggagtgctgtagtgccatgatagctcactgcaaccttgaactcctgggctcaagagatttctcccacctcagccttctgartagctgagactagaggtgtgccaccacacctagctaatttttaaaaaatatttccagagtcagaatcttgctgtgttacccaggctggtctcaaactcct

SEQ ID NO: 346941 - DNA, 201 bp, Homo sapiens
ctcctggcctcaagcgatcctcctgcctcagcctcccaaaacagtgtgattacaggtgtgagccactgtgcctggcctaattttacctgaatattattctyagttgagagagaaggtgagataaaattggcaaatgtcttgatagggaaggatgaagaggtttaggcagagagagagtgagagggtgagcattgaacgtgg

SEQ ID NO: 346942 - DNA, 201 bp, Homo sapiens
gtgactgctgatccttctcattttcaagtccttctggttgtttatttttgtacatttcaatacttatcctgtgcccctgtcttttgtcagtttcatattcytctaatcagaatcactcagcacccctttcattttctctccgtgtctcattttgcattgttccatacctgacataagcttgtgttaactcgggttctcagt

SEQ ID NO: 346943 - DNA, 201 bp, Homo sapiens
ataacagacgtgagccactgttgggataacaggcgtgagccactgtgtttagtggttagtgcctttagaatcctgaagttattgatgaataggtcgaagtscagagctattgttttggagttgtttgacaatgagcagttgttttgactaaaagggatcatcagagaaagtgttgcttttgtaaggaacagaacttgcttg

SEQ ID NO: 346944 - DNA, 201 bp, Homo sapiens
tcctacttcagccatctttaagtagaaggtatttacacagtagatgctttagagggaagacaacacacttcaatgtgagtcttccccatctgaaatgtggrtgagtggttttgaaatgactgctagtctgtccaaaggaaatgatctctcagtgtggtttcttcattcatgagacttaacattctaaaatcttattcaaaa

SEQ ID NO: 346945 - DNA, 201 bp, Homo sapiens
tctcgaactcctgacctcaagtgatctgcctgcctcggcctcccaaagtgttgggataacagacgtgagccactgttgggataacaggcgtgagccactgygtttagtggttagtgcctttagaatcctgaagttattgatgaataggtcgaagtccagagctattgttttggagttgtttgacaatgagcagttgttttg

SEQ ID NO: 346946 - DNA, 201 bp, Homo sapiens
ggtggtcttaggttaggattctatatagaagcctatatctgaagtctagaacgtcagagaccacatgcagggtgttgcaggccattttaaaccatgagagrtaaggaaagacttcaggaaatatcctggaaaaaatatacaaaggcaggagagctatcttgaaatagtttggaggccatcctgtggaaaaggaatttgatg

SEQ ID NO: 346947 - DNA, 201 bp, Homo sapiens
ttggaaaagatacatattattctgtgtcaggcattttcaggtaacaacctaagtatttttcctgtgtttctaaataaccttcatagttgttattgggtatktgtgtcaatatatttgtgtttgtgtgtgtgcgcgcttgtataagtgtatatgattttatttatttatttatttattttgagatggagtttcgctcctgtt

SEQ ID NO: 346948 - DNA, 201 bp, Homo sapiens
tataagtgtatatgattttatttatttatttatttattttgagatggagtttcgctcctgttgcccaggctggagtgcaatggcatgatcttcgctcaccrcaacctccacctccccggttcaagcgattctcctgcctcagcctcccaagtagctgggattacaggcatgcgccaccacgcccggctaattttgtatttt

SEQ ID NO: 346949 - DNA, 201 bp, Homo sapiens
tcaaagaaaattgcagagtgagttataattgtaccattaaaatctatattcattatgtgatgctttaaatttgataatcagattagcagttattgttaaayttgaaagcagatattttataattataaaataattatatctttttttcatcatgtatcttttttttcatcatgcaagatgttcatgtagtatgtctcatct

SEQ ID NO: 346950 - DNA, 201 bp, Homo sapiens; identical to SEQ ID NO: 73501

SEQ ID NO: 346951 - DNA, 201 bp, Homo sapiens
atatggaatatgtgattgtatttattttctgcaactaaaaaaggaataaaaacttgtgtttgtgtgtttttctaaaactttgtgttttggcaatcgttttrtaactaaaataaaatgaaagctaaatctacacgctgtgaatgttgaaatgttcatcagcttgttttctcttctgcagctttgtgggggatgcagtagcct

SEQ ID NO: 346952 - DNA, 201 bp, Homo sapiens
ggtttttatagggaggatgtgtttgtgttttacttgtataattaaaatttgagaataatgaaaaagattagcttagtttcagctcattgatgatctacacyagccttcccagaggtcccaggtgaacatacaactgtggaaatgcagtgggcttgctgagaaagggcccccctgcccacagcctgctggattgttgctgtt

SEQ ID NO: 346953 - DNA, 201 bp, Homo sapiens
acttggctaatttttgtatttttagtagagacggggtttcaccgtgttggccaggctggtcttgaactcctgacctcaggtgatccgcctgcctcagcctyccaaagtgctgggattacagctgtgagccatcgcacctgaccaagactttaaattgatgtgaaaatcaggcatctcacagtactaaaaaaaaaaaaattt

SEQ ID NO: 346954 - DNA, 201 bp, Homo sapiens
gtgcagtggggcaacctcggctcactgccacctccgcctcccaggttcgagtgattctcgtgcctcagcctcccaaagtgctgggattacaggtgtgagcyacacacacacacccagccataatttttttttttttttgatacggggctttgccatcttgctcaggctggtaaagctcattttcttaacatcataccacat

SEQ ID NO: 346955 - DNA, 201 bp, Homo sapiens
cgcctgcctcagccttccaaagtgctgggattacagctgtgagccatcgcacctgaccaagactttaaattgatgtgaaaatcaggcatctcacagtactaaaaaaaaaaaaattttttttgaaaaatacaagtgctgagtttttttgatggtagaacaattttgtctttttttttttgagaccaagtctccccctttcac

SEQ ID NO: 346956 - DNA, 201 bp, Homo sapiens
cttccaaagtgctgggattacagctgtgagccatcgcacctgaccaagactttaaattgatgtgaaaatcaggcatctcacagtactaaaaaaaaaaaaawtttttttgaaaaatacaagtgctgagtttttttgatggtagaacaattttgtctttttttttttgagaccaagtctccccctttcacccaggtcggagtg

SEQ ID NO: 346957 - DNA, 201 bp, Homo sapiens
ctacagccttgaatttttgggctcatggcaatcctttcatttcagcctcctaagtagctaggactataggtgtgcaccaccatgcctggctaattaaaaawatatatatatattttttgttagagacgggggtctgactgtgttgcctaggctggtctctaactcctaggctcagcctcccagtgttgggattgcaggcat

SEQ ID NO: 346958 - DNA, 201 bp, Homo sapiens
agtatcaggctgttagaatttttgcttttttttttttttttttttttttttgaggcagtgtctcgctctgtcaccaggttggagtgcagtggtgcaatctyagctcttggtaacctccgcctcccgggttcaagtgattctcctgtctcagcctcccaagtagctgggactataggcgagcgccaccacgcccagctaatt

SEQ ID NO: 346959 - DNA, 201 bp, Homo sapiens
ctgtttagagtacctccttttgccgcttttaaataatagttctgttggtaacacattttgctggttttccttcatttgagaatgtctagagttccttttcrttcttgaaggacatcgttgctgggtataggattctggagtaacggttcttttctctcagcacctgaaaagtttttgtgtcactttcttttggtcactgtg

SEQ ID NO: 346960 - DNA, 201 bp, Homo sapiens
ttggacaccctacatagaatacttttttaaggtactagcaaataatatatgaagggaaaagaaagcattcttcctgtagcatctcgaatataaagattttkttatttagtattagattttaaaaattattttgtatcctctgatttcttatagatgaaaatatgcctactaaaaaacaatgaaaatactttttcagaatat

SEQ ID NO: 346961 - DNA, 201 bp, Homo sapiens
ttttggtcactgtggtttctgatgagaagttggttatcatgaattatttttcaagattatttctttgtctttagttttcaaaagtttaattatgatatatmttgagattgctttgggtttatcctgtttggtgtttgctggacttcttgaagctgtgggtttatgtctctgaccaatttgggaagctttcagccattgtct

SEQ ID NO: 346962 - DNA, 201 bp, Homo sapiens
accaatttgggaagctttcagccattgtctttttgagtacttttttagtcctaccgtctttctcctctttttctgggactcttatgacataaatgtcaggtgtttgtttgtttgtttgtttgtttgtttgagatggagtttcattcttgttgcccaggctggagtgcaatggcgtgatcttggctcaccgttgcaacctct

SEQ ID NO: 346963 - DNA, 201 bp, Homo sapiens
ccatgtttatctccgttcctgcctcttttctgtctcccaagatccctatgtggcgtcagtagggaaaaagtataattaaactctgcaaggagagtttggasaagattcttcctctagaggggattgaatgatgttctttgtctggagtctaggagggaaggtgaaagggagaagcagtggcataagactccaggagactgg

SEQ ID NO: 346964 - DNA, 201 bp, Homo sapiens
ccagtttttggcacacagtaggtgctcaatatatacttattcctgttccttttccactagaagatttaaaaaaacattttttttttttttttggtagaacragggtctcattatgttgcccaggcttatctcaaactctgggcaaaagcagttctcctatttcagccccccaaagtgctaggattacaggtgtgagccacc

SEQ ID NO: 346965 - DNA, 201 bp, Homo sapiens
acttcataaaatattgttaagaaatactttttgctaattgatacatgtcattacataattctcccaagttgtaaaaagaagtgttatttaacctttgtagrtccaggtgtgctggctcatgcatctaatgccagcactttgggaggctgaggcaggcagattccttgagctcaggagttgagaccagcctgggcaacacgg

SEQ ID NO: 346966 - DNA, 201 bp, Homo sapiens
aggaacctaacagaggtgagctatcttgggcatgtggaacattgacctttttgtgaaatgtggcatattggctccgtccttcatcctttactattgaaacratttgattcagttgtacatttccattagcaagaagtcaggcaggcaaggtagaacagagtggttttttagctctcactaataccagctagatatctaacc

SEQ ID NO: 346967 - DNA, 201 bp, Homo sapiens
cccgggttcaagcaattctcatgcctcggcctcctgagtagctagcactacaggtgcacaccaccacacctggctcatttttgtatttttaatagagatgrcattccaccatgttggccaggttggtctcaaaactcctgaactcaagtggtccgcctgcctcagcctcccaaagtgctggggttacagacatgaaccact

SEQ ID NO: 346968 - DNA, 201 bp, Homo sapiens
ttttaaactgaagggatggtgtgtgagttgagaaacctgaatgagccaccaagtgaaggtctggaggcagaacccccccaagcagaggggacagcagattscaagcctctgcagcatgcaggaggagttcttggtgtgtctcaggaacgtgggctggagtacagagtgtccaaggaagatggctagtgaggcaggcagagc

SEQ ID NO: 346969 - DNA, 201 bp, Homo sapiens
gttctgctttagcatgtgtgctgaagtgcttttaaactgaagggatggtgtgtgagttgagaaacctgaatgagccaccaagtgaaggtctggaggcagarcccccccaagcagaggggacagcagattccaagcctctgcagcatgcaggaggagttcttggtgtgtctcaggaacgtgggctggagtacagagtgtcca

SEQ ID NO: 346970 - DNA, 201 bp, Homo sapiens
gacctttttatttttggcccactgccaaaatttgggtgtgaccaaaactgtcatttgggtggtcgcttaagtgtccttcaaggtgattatctagtcagccygtgttccacttgaggaaaatgaagatgagaggtcagttttagacatgacacagggcagctgaaaggccgggaaaggttttatggtaaacaaggattacag

SEQ ID NO: 346971 - DNA, 201 bp, Homo sapiens
tttagtagagacagggtttcaccatgttggccaggatggtcttgatctcttgatctcgtgatctgcctgccttggcttcccaaagtgctaggattacaggygtgagccaccacatctgaccagcactgatgatttataagccagggacctttttatttttggcccactgccaaaatttgggtgtgaccaaaactgtcattt

SEQ ID NO: 346972 - DNA, 201 bp, Homo sapiens
tctcttgtgtttgtcactggaatttaagcaccttctgccagagtcagaaggaacattctggtactaggatgctcgttgccttgaaatttttgccatctatwcttttttttttttttgagacggagtctcactctgtcgcccaggctggagtgcggtggcgcaatctcagcttactgcaagctccgcctcccgggttcacgc

SEQ ID NO: 346973 - DNA, 201 bp, Homo sapiens
ggcatgagccaccgtgcctggccatctttgggaattttttttaatctgttaagtatttcatcccttctatttcttttattattttcctttgggaactattrggtcctgaaaattttggatctagtctctataacttttaaaaacttattttactttttgcatacttatatatagcattctggggaaattccttgtcttgat

SEQ ID NO: 346974 - DNA, 201 bp, Homo sapiens
ttgatacggggctttgccatcttgctcaggctggtaaagctcattttcttaacatcataccacatttcttttgtaaacttgtattctgttttttccaacatttttttttctcttatcctcacaatctgttcccattttgctactttttttttgtgtgtgtgtgtgtgtgtgtgtgtgagacagagtcttgctccattgccc

SEQ ID NO: 346975 - DNA, 201 bp, Homo sapiens
caagttagtaatattttttcataggcaggttcctttcttcattttccaaaggagaattttactttgaactttttctttttttggaaaactttcaactagcyaagcatttttgggtctgttggaattttcctttttgttgacatgcagtaatacctgacttcttgtctgtcacagatcccagattacaggaatgcagtaatc

SEQ ID NO: 346976 - DNA, 201 bp, Homo sapiens
atgctgcctaaccatttgctactatagatgacggttgaagttgccatgtggtttggctttataacaagtgacaggcacttcctgaacagccatggggcatyccctggggtggctgtgctggcacagtggccctcccatggtttgggaatggtggtgctgcactagcacggaggacaggttctgctctgggttccttggaga

SEQ ID NO: 346977 - DNA, 201 bp, Homo sapiens
acggggtttcaccgttttagccgggatggtctcgatctcctgacctcgtgatccgcccgcctcggcctcccaaagtgctgggattacaggcgtgagccacygcgcccggcctcatctgtctttagagtttaggaccctgagcttccccagagtccattggagtggcctcccctggagcactggcactggggtttacacacc

SEQ ID NO: 346978 - DNA, 201 bp, Homo sapiens; identical to SEQ ID NO: 73504

SEQ ID NO: 346979 - DNA, 201 bp, Homo sapiens; identical to SEQ ID NO: 73505

SEQ ID NO: 346980 - DNA, 201 bp, Homo sapiens
ccaatttgggaagctttcagccattgtctttttgagtacttttttagtcctaccgtctttctcctctttttctgggactcttatgacataaatgtcaggtgtttgtttgtttgtttgtttgtttgtttgagatggagtttcattcttgttgcccaggctggagtgcaatggcgtgatcttggctcaccgttgcaacctctg

SEQ ID NO: 346981 - DNA, 201 bp, Homo sapiens
tattttcaaggttcatccatgttggagcatgaatcaatacttcattttatgatcaaataatgctgtgttacatggatagtccacattttgtctctctcttygtatttcatgttgatagaaaaaattttttttctactttttaacttatgaatggtgctgcagtaaacatttgtgtacaagtttttgtgtggacatgtgttt

SEQ ID NO: 346982 - DNA, 201 bp, Homo sapiens
caatttgggaagctttcagccattgtctttttgagtacttttttagtcctaccgtctttctcctctttttctgggactcttatgacataaatgtcaggtgtttgtttgtttgtttgtttgtttgtttgagatggagtttcattcttgttgcccaggctggagtgcaatggcgtgatcttggctcaccgttgcaacctctgc

SEQ ID NO: 346983 - DNA, 201 bp, Homo sapiens
tgcaagtgcagaggccagatccgggaggctgatgaagttgagcaggcacatgggaggagagcttgatctcttgggctatgctgtccagtcgggtggccacyggctacatgtggctcctgcacactgggaacggggtggggagcagtgggagtgtgaaggacacacccctaatctgaaaactttaatgtaagtatctcatta

SEQ ID NO: 346984 - DNA, 201 bp, Homo sapiens
tgggtattttattattaaaaacaataatcattattattttttccattgtaataacatgtaaaaaaacatatttcccatatgctcagtggagaaaatttggraataaggaaagtagcaagaagaagtggggggaaagaggcacccataattctattacccagagtcaaaaacatcttttaacactttttctgtgcattaaaa

SEQ ID NO: 346985 - DNA, 201 bp, Homo sapiens
aatttgggaagctttcagccattgtctttttgagtacttttttagtcctaccgtctttctcctctttttctgggactcttatgacataaatgtcaggtgtttgtttgtttgtttgtttgtttgtttgagatggagtttcattcttgttgcccaggctggagtgcaatggcgtgatcttggctcaccgttgcaacctctgcc

SEQ ID NO: 346986 - DNA, 201 bp, Homo sapiens
tgatgggaagtgggcgctgaggagaaaagatgggagagaggctagtttttgacagcgtctgtttaggtgtggtctggacttcttctggtcttaagcgatamgagtcagtcttccctggtgttcccagggaggagatttatcacagttgagttctttggagttattttgtgaggctctgcttttcagcatataagggacttc

SEQ ID NO: 346987 - DNA, 201 bp, Homo sapiens
tgggactacaggcgtctgccactatgcctggctaatttttgtatttttagtggagacagtttcaccatgttagcaaggatggtctctatctcctgacctcktgatctgcctgcctcagcctcccagagtgctaggattacaggcatgagccactgcgcctggccagagtcttctcatttttgtttgtatgtaacatccagg

SEQ ID NO: 346988 - DNA, 201 bp, Homo sapiens
tattattattattattttttttttttttttttttttttttttttttttagtagagacagggtttcgccatgttggccaggctggcctcgaactgactgcawgtgattcgcccgcctcggcctcccaatgtgctgggattacaggcgcccggccaagatgactccttaataggggaagaggaggagggaggggactgatggg

SEQ ID NO: 346989 - DNA, 201 bp, Homo sapiens
ttccttggaaatataaattacattcctcatagataggaccagaccaataaatgtttacttacgtgtgtctgagattgtttgtttgtttgtttgtttgtttrtttgagacagggtctttctctgttgcccaggcaggagtgcagtggtgcaattatagctcagtgcagccttgaccttctgggctcaagtgattctcccacc

SEQ ID NO: 346990 - DNA, 201 bp, Homo sapiens
gccaccacacccggctaattttttgtattttagtagagatggggtttcaccttgttgcccaggctggttgaactcctgagctcaggcaatctgcctacctyggcctcccaaagtgctgggattacaggcgtgagccactgcgcctggcccaaatttttaacataagttttagtggagacaaactacatccaaaccaaagca

SEQ ID NO: 346991 - DNA, 201 bp, Homo sapiens
ctgtgaggggaaaagatgttttcatcatccaaactgtttcgaagtgagtatccagcaaaagtgttgctttctgggtttcagtttaggcatgagtgtttaawataatgatagatggctagccaggaagagttataatagtcttaaaattagtatatcttaccaatttagaatttagaaaactaagttttctgacataactgc

SEQ ID NO: 346992 - DNA, 201 bp, Homo sapiens
tcctgaatattgagaatgcacagaaattcaaaacaaagtttgaagaatgcaagaaagagatcggagagaaaagaaaggatcgggcaaaaacgatcatgccaaaaaagtggcggaaaagctagaagctcttttggtggaggaggaaaccaaggaggatgctgaggagaagcaataaatcatcttattttatttccttttcct

SEQ ID NO: 346993 - DNA, 201 bp, Homo sapiens
gtttctggtgagggccacacactaggttgaaacatggtggagaagaaaagtgagcaggcgggtgcagagaaatcacatggcaagagaggaaacgagagagyctgggaagccaaactcatttttataacaacctgttctcatgggaactaagtgccctgagagcaagaactcactcacccccataggaaggcattaatccat

SEQ ID NO: 346994 - DNA, 201 bp, Homo sapiens
ttctattacattagggaataatacagatttttttgtgtattttgaaaaatttgaactatatgcctttccctctcttctttttccttttcctgccagaaacragagtacaaattcaagagtctgtgaggggaaaagatgttttcatcatccaaactgtttcgaagtgagtatccagcaaaagtgttgctttctgggtttcag

SEQ ID NO: 346995 - DNA, 201 bp, Homo sapiens
aaaatcagacaaaaaaaggcaactttatgatttcacttacgtgaaattctagataggtgaaactatagtgacagaaagcagatcagctgttgcctggggcmacacttagtgaaaaatcactaaggggcataaggagatgcttgtggtgatgacgttccttatcttgattgtgctaatgcttatatgggcacatacagcctt

SEQ ID NO: 346996 - DNA, 201 bp, Homo sapiens
aatcagacaaaaaaaggcaactttatgatttcacttacgtgaaattctagataggtgaaactatagtgacagaaagcagatcagctgttgcctggggcaasacttagtgaaaaatcactaaggggcataaggagatgcttgtggtgatgacgttccttatcttgattgtgctaatgcttatatgggcacatacagccttca

SEQ ID NO: 346997 - DNA, 201 bp, Homo sapiens
caatgcttcagggaagtccattcattcattcagcagtatatactagagtgtagtttaacataagcaaaaagctttttatatacaaagttattgactgtgakgtttttaatgcaaaatattagaaaggtttaaatggtttaccagagtgtagggcttggtaaattatactgtgtcagtacagctaattatgcagccctttga

SEQ ID NO: 346998 - DNA, 201 bp, Homo sapiens
tctcacctcctgggcccaagcagtcctcccacttcagcctcatgagtagatggaactacaagcacttgccaccgcacctggctaatttttgtattttttgkagagacaaagttttaccatgttgcccaggctggtcttgaactcctgagctcaagtgatccacccgccttaacctcccaaagtgcttacaggtgtgagcca

SEQ ID NO: 346999 - DNA, 201 bp, Homo sapiens
acctcagcctcccgagtaggtgggactacaggcacgcgccaccatgcccagctattttttgtatttttagtagagacagggtttcaccatgttggccaggrtggtcttgatctcttgatctcgtgatctgcctgccttggcttcccaaagtgctaggattacaggtgtgagccaccacatctgaccagcactgatgattta

SEQ ID NO: 347000 - DNA, 201 bp, Homo sapiens
cttgaactcctgaccttgtgatctgcctgccttggcctcccaaagtgctgggattacaggtctgagccaccgcgcccagccatgtttcaggtttttatagrgaggatgtgtttgtgttttacttgtataattaaaatttgagaataatgaaaaagattagcttagtttcagctcattgatgatctacaccagccttcccag

SEQ ID NO: 347001 - DNA, 201 bp, Homo sapiens
ataggcagccaccaccacgcccagctcatttttgtatttttagtagagacagatttcacccttttggccaggctggtcttgaactcctgaccttgtgatcygcctgccttggcctcccaaagtgctgggattacaggtctgagccaccgcgcccagccatgtttcaggtttttatagggaggatgtgtttgtgttttactt

SEQ ID NO: 347002 - DNA, 201 bp, Homo sapiens
ggactgttaggtttttgccttgcccaggagtttgctcatttataaatagagggaaaaaaaaaccagagaaggaactagtgtggttgggatagccatgcacrcagctgggattccagctatactttgtagatcccaactgaggtggaaagggaaggccatctgggcaggggttaaatctcctaaggggtgggggactgagct

SEQ ID NO: 347003 - DNA, 201 bp, Homo sapiens
gagtacagtggtgcaatcttggctcactgcaacctctgcctcctgagttcaagcgattctcaagcctcagcctctagagtagctgggactataggcagccrccaccacgcccagctcatttttgtatttttagtagagacagatttcacccttttggccaggctggtcttgaactcctgaccttgtgatctgcctgccttg

SEQ ID NO: 347004 - DNA, 201 bp, Homo sapiens
cttctttttttttttttttgaaacgctcttttgcccagcctggagtgcagtggtgcaatcatggcacactgcaacctcggcctcccaggttcaggcgattytcctgggtagctgggactaccggtacatgccaccatgcccaggtaattttggtattattattattattattattattattattattattttttttttttt

SEQ ID NO: 347005 - DNA, 201 bp, Homo sapiens
cagcctcccaaagtgctaggattacaggtgtgagccactgtgcctggccgtatataatttttatggaggtcacatgtataaatgcatagaaaaagtcttawgttgtccctaccaaactgataagaaccctcacttctggggaggacctgggatcgaggctggtgactttatccttaactatcatgtttcaggttttttttt

SEQ ID NO: 347006 - DNA, 201 bp, Homo sapiens
ggcagtttaatcacatacatacagatgtgtgtgattaaactcttttgtgagtcacaaaaatgtgactcgaagtggttacaatttggggcttatatagcatyttaataggggaacaggaggggcagaaaaggcccctgtgggaaaacagatgacttctttttttttttttttgaaacgctcttttgcccagcctggagtgca

SEQ ID NO: 347007 - DNA, 201 bp, Homo sapiens
ttttcttaacatcataccacatttcttttgtaaacttgtattctgttttttccaacatttttttttctcttatcctcacaatctgttcccattttgctackttttttttgtgtgtgtgtgtgtgtgtgtgtgtgagacagagtcttgctccattgcccaggctggagtacagtggcgcaatcttggctcactgcaacatcc

SEQ ID NO: 347008 - DNA, 201 bp, Homo sapiens
tagtagagatggggtttcaccatgttggtcaggctggtctcgaactcctggcctcaagtgatctgcccacctcagcctcccaaagtgctaggattacaggygtgagccactgtgcctggccgtatataatttttatggaggtcacatgtataaatgcatagaaaaagtcttatgttgtccctaccaaactgataagaaccc

SEQ ID NO: 347009 - DNA, 201 bp, Homo sapiens
catcataccacatttcttttgtaaacttgtattctgttttttccaacatttttttttctcttatcctcacaatctgttcccattttgctactttttttttgtgtgtgtgtgtgtgtgtgtgtgtgagacagagtcttgctccattgcccaggctggagtacagtggcgcaatcttggctcactgcaacatccgcctctcag

SEQ ID NO: 347010 - DNA, 201 bp, Homo sapiens
aagtgctgggattacaggcatgagccaccgtgcccggcaattttttatttatttatttttttatttttttgagacgaggtcgcattcccatcgtccaggcrggagtgcagtgaagtggtgcaatcatggctcattgcagccctgaccatctgggctcaagtgatcctcccacctcattttttgatttttttgtagagacta

SEQ ID NO: 347011 - DNA, 201 bp, Homo sapiens
atcataccacatttcttttgtaaacttgtattctgttttttccaacatttttttttctcttatcctcacaatctgttcccattttgctactttttttttgkgtgtgtgtgtgtgtgtgtgtgtgagacagagtcttgctccattgcccaggctggagtacagtggcgcaatcttggctcactgcaacatccgcctctcagg

SEQ ID NO: 347012 - DNA, 201 bp, Homo sapiens
tcataccacatttcttttgtaaacttgtattctgttttttccaacatttttttttctcttatcctcacaatctgttcccattttgctactttttttttgtgtgtgtgtgtgtgtgtgtgtgtgagacagagtcttgctccattgcccaggctggagtacagtggcgcaatcttggctcactgcaacatccgcctctcaggt

SEQ ID NO: 347013 - DNA, 201 bp, Homo sapiens
atgtggcgaaccatttgaaattaagtgcaggccgggtgcggtggctcactcctgtaatcccagcacgttgggatgctgagctgggtgaatctcttcagccygggaggtcaagactacagtgagccatatttgcaccactgtaccacagcctaggcaacagggcgagatgtgtcccaaaaaaagaaaaaaaatgtaagttgc

SEQ ID NO: 347014 - DNA, 201 bp, Homo sapiens
tgaaattaagtgcaggccgggtgcggtggctcactcctgtaatcccagcacgttgggatgctgagctgggtgaatctcttcagcctgggaggtcaagactrcagtgagccatatttgcaccactgtaccacagcctaggcaacagggcgagatgtgtcccaaaaaaagaaaaaaaatgtaagttgcagacagttaatcctt

SEQ ID NO: 347015 - DNA, 201 bp, Homo sapiens
ttgtatttttagtagagacgaggtttcaccatgttggccaggctagccttaaacacctaacctcagattatccgcctgcctgggcctcccaaagttctggkattacatgtgtgagccaccgtgcccagcctaaagggtcttttatagttgttttttccaacacctccaccccaaaccaggattcttagttcaagggatttt

SEQ ID NO: 347016 - DNA, 201 bp, Homo sapiens
aacctctgcctcccgggttcaagcgattctcctgcctcagcctcctgagtagctgggattacaggcgcgcaccaccacgcctggctaattttttttttttktatttttagtagagatgggggtttcaccatgttggtcaggctggtctcgaactcctgacctcgtgatccgcccgcctcagcctcgcaaagtgctggaatt

SEQ ID NO: 347017 - DNA, 201 bp, Homo sapiens
gagagatggctttagaagtatttaagatcccttccagaatgttgatgattaaacgtattctttctttcttttctttctttcttccctttctttcttcttctcttttcttttcttttctttatttgaaacggagtctcgctctgtcgcccaggctggagtgcagtggcgcgatcttggctcactgcaagctctgcctcctgg

SEQ ID NO: 347018 - DNA, 201 bp, Homo sapiens
agagatggctttagaagtatttaagatcccttccagaatgttgatgattaaacgtattctttctttcttttctttctttcttccctttctttcttcttctcttttcttttcttttctttatttgaaacggagtctcgctctgtcgcccaggctggagtgcagtggcgcgatcttggctcactgcaagctctgcctcctggg

SEQ ID NO: 347019 - DNA, 201 bp, Homo sapiens
agcaatcctcccacctcagcctcccaaagtgctgggactacaggcatgagccaccacgcctggcctttatatgtatatttttgatcatagtaacatcagtrtgcaattaaagagtaataatatgtatgtaaaataaagacacgaatatttattcaactctagacaacgtttgatgccataatgggtttaaaataactctgg

SEQ ID NO: 347020 - DNA, 201 bp, Homo sapiens
gcttgatcacagatcactgcaacttctacctcctggctaaagcaatcctcctgcctcagcctcccaagtagctaggactacaggtgcgtacctccatgcayggctaatttttgcttttctgtttttgtagagactgggtttcgtcatgttgctcaggctggtcttgaacccctgagctcaagcaatcctcccacctcagcc

SEQ ID NO: 347021 - DNA, 201 bp, Homo sapiens
ctatgtacattcatgtataggtttttgtgtgaacagagttttaatttctctgggataattgcacttacaaatgcagttgttggtttgcatggtagttgcaratatactcttataagagactgtcaaactgttttccaaagtggctgtaccattttactagtaggacttttaaagtagcgtgtgtgtgtgtgtatgtatttt

SEQ ID NO: 347022 - DNA, 201 bp, Homo sapiens
accacccaacactgttgcactggggaataagtttccaacacatgaattttggagggacaaaaacattcaagccacagcactggcaaccactgatctgtccyctgtctttctaattattatttcaagaatgtcatataaatggaatctatggtatataaccttttgagttttgtttaacctaccatgattcccctgagatcc

SEQ ID NO: 347023 - DNA, 201 bp, Homo sapiens
gctccttcactgcaaggcaccctcatgcttcctttcatagctacactgacatccttcccacccaatctgcaaccccttgtgtctttgtccactttgtgctrctgtaacacctgagactaggttgtttataaagaatagaagaaatttattctctaacagctctagaggctgtaagtccaaatcatggcaccagcatttggt

SEQ ID NO: 347024 - DNA, 201 bp, Homo sapiens
ctaaggcaggagaatcacttgaaccagggagttggaggttgcagtgagctgagatccaagactgtgccaccgtactccagcatggcaacagagtgagacaycatctcaaaaaaaaaaagaaaaaagaaaagtttgcttggctacacacttggagttctgtcctgaacatgtttttgctttttttttttttttttttttttt

SEQ ID NO: 347025 - DNA, 201 bp, Homo sapiens
aggaagtagggggcaatacacagggacatcctgtgtattcattacccagcatcctccatcttgcttaactatagtacaataacacagactgaaaattctcrgtgccacagccacagaggtccttcagacagcaccagttgtgcatgtagtgagtgtgagtgtgtgtgtgtgtgtgtgtgtgtgtttgtgtttgtgaatgca

SEQ ID NO: 347026 - DNA, 201 bp, Homo sapiens
tctgtcacagatcccagattacaggaatgcagtaatcgtggccaagtctccagcctcggcgaagaggtaggtgggaatctcacaacctctttctggatctrcttctaaggattgtatccgtgatgagttccaggcattctaatttgaacttcagtggttcccagcgatatctcttatttttcttccatggactggtatttt

SEQ ID NO: 347027 - DNA, 201 bp, Homo sapiens
cagatctcactgcagcctccacctcccgggcccaagccattctcctacctcagcctcccaagtagctgggactatagatgtgtgcaccaggcctggctaattttttttttttttttggtagagacggggtcttgctttgttgcctaggttggtcacaaactcttgggctcaagcaatcctccctccttggcctcccaaact

SEQ ID NO: 347028 - DNA, 201 bp, Homo sapiens
gaaaggagtgacaggtcctgaccaagtctaaaacccaaccagacaaacaacattaaatcttaaggcttaagttgactcaaagccccgccttccacaaaaaytggggcaggggttggtcttgcaaagctctggatggccccactcccacagctttgctgggagcagcccatgcagcagctctcagtcactggattctcatgc

SEQ ID NO: 347029 - DNA, 201 bp, Homo sapiens
tgggctcctgtagtcccagctactcgggaggctgaggcaggagatggcatgagaggcggagcttgcagtgagccgagatcgtgccactgcactccagcccrggcgactgagcaagactctgtctcaaaaaaaaaataagaaaatctctcacgtcaccctccagggtaatagctgtccattacttattccttagttggcaaa

SEQ ID NO: 347030 - DNA, 201 bp, Homo sapiens
tgatatgagttagcatttttgtgacttactatttaagaaagcttttaaaatgttaatttatactgtacttagctattttgcttttagctgtttttctttcttttttttttttttttggtggggggtgtgatggagtcactcccaggctggagtgtaatggcgcaatctcagcccactgaaacctccacctcccgggttcaa

SEQ ID NO: 347031 - DNA, 201 bp, Homo sapiens
ccgggagacagaggttgtggtgagccgagatcgcgccattgcactccagcctgggcaacaagagtgaaactccttctcagaaaaaaaaaaagataaaggcrccagcagatttggtgtctgtcgagggcctgttcctcgtagatggtaccttcttgctgcatcctcatgtggtggagaaaggtggaagactccctcaagcct

SEQ ID NO: 347032 - DNA, 201 bp, Homo sapiens
tttgggaggccgagacgggtgtaggtcaggagatcgagaccatcctggctaacacggtgaaacctcgtctctactaaaaatacaaaaaattagccgggcgyagtggtgggctcctgtagtcccagctactcgggaggctgaggcaggagatggcatgagaggcggagcttgcagtgagccgagatcgtgccactgcactcc

SEQ ID NO: 347033 - DNA, 201 bp, Homo sapiens
tactgtacttagctattttgcttttagctgtttttctttcttttttttttttttttggtggggggtgtgatggagtcactcccaggctggagtgtaatggygcaatctcagcccactgaaacctccacctcccgggttcaagcaattctcgagtagctgggattacaggcatgcgccaacacagctggctaattttttgta

SEQ ID NO: 347034 - DNA, 201 bp, Homo sapiens
aaagctttttatatacaaagttattgactgtgatgtttttaatgcaaaatattagaaaggtttaaatggtttaccagagtgtagggcttggtaaattataytgtgtcagtacagctaattatgcagccctttgaaataatcaagactatctggaaacgagaaaaatatatggaatatatatgaacaaggcagaatataaga

SEQ ID NO: 347035 - DNA, 201 bp, Homo sapiens
ttctgtaatcccagcactttgggaggccgagacgggtgtaggtcaggagatcgagaccatcctggctaacacggtgaaacctcgtctctactaaaaatacraaaaattagccgggcgtagtggtgggctcctgtagtcccagctactcgggaggctgaggcaggagatggcatgagaggcggagcttgcagtgagccgaga

SEQ ID NO: 347036 - DNA, 201 bp, Homo sapiens
caggcgattctcctgggtagctgggactaccggtacatgccaccatgcccaggtaattttggtattattattattattattattattattattattatttwttttttttttttttttttttttttttttttagtagagacagggtttcgccatgttggccaggctggcctcgaactgactgcaagtgattcgcccgcctcg

SEQ ID NO: 347037 - DNA, 201 bp, Homo sapiens
gattctcctgggtagctgggactaccggtacatgccaccatgcccaggtaattttggtattattattattattattattattattattattattttttttwtttttttttttttttttttttttttagtagagacagggtttcgccatgttggccaggctggcctcgaactgactgcaagtgattcgcccgcctcggcctc

SEQ ID NO: 347038 - DNA, 201 bp, Homo sapiens
gttggccaggctgatctcgaacgctgacctcgtgatctgcctgcctcggcctcccaaagtgctgggattacaggcatgagccaccgcacctggccttagckgtttttcttatataaattatttctctctttaataacttttctagataacttctttttacagtactgtatttaaaagaagataacttctttttacagtact

SEQ ID NO: 347039 - DNA, 201 bp, Homo sapiens
ctcatgaggaccatgatacttccactgagaatgcagatgagtccaaccatgaccctcagtttgagccaatagtttctcttcctgagcaagaaattaaaacrctggaggaagatgaagaacttttaaaaatgcagacgaaactgttctgatttgcctcagagaaggatctcccagaatggaaggagtgaggcaccggcaacg

SEQ ID NO: 347040 - DNA, 201 bp, Homo sapiens
gaaatgttaaaaagacgatgggagggaggccaggtactttggcgcactcctttaatcccagcactgtggaaggctaaggtggaaggtttgcttgagcccargagtttgagaccagcctgggcaacatagcacaaccccgtttctacaaaaagtttaaaaattagccaggcggctgggcgcagtggctcacacctgtaatcc

SEQ ID NO: 347041 - DNA, 201 bp, Homo sapiens
tgaaatcctttgcccatttttgaactaggtttgtctttttttgttgaattataaaagttctttatatattttggcatatggcgcatatatatatatataatttttttttttttttttttttttgcgacagggcctcactctctcacccaggctggagtgcagtggtgcagtcgtggctcactggagccttgacctcccggg

SEQ ID NO: 347042 - DNA, 201 bp, Homo sapiens
aagccattctcctgccttcgtctcaaagtgctgggattacaggtgtgagccatcacccagctttaaaaagtatattgaaaataggatgatttaagcatgarttttttgtgtgtttgtttgtttgtttgttcgtttttcagtagagatggagtttcaccatgttggccaggctggtcttgaactccttgtcccaagtgatct

SEQ ID NO: 347043 - DNA, 201 bp, Homo sapiens
agggaaatttaggagcagatttctgaaacagtgacgttcctcacaggaaaaaaaaaaaaaacaaatgaacacttgggaagaagtgtgggaccattcccacraaaacctatatgggggagtataggacatctcacctactccagcactgcttaaagttaaggtgaaagagagactgggggattgaaatcctttgggaatggg

SEQ ID NO: 347044 - DNA, 201 bp, Homo sapiens
gactggttcagatcagactcctctatgagggtctctttgtcaaaggaggtcagtgtcctagctgctttgggaatcagtgggggagacccccccaacccagstatgccagggggtttaaatttacatgtgaaaagaatgacaggccaacattaatgaccatcctgtgacttgggatgcaccttctcttctcaggttcaaagc

SEQ ID NO: 347045 - DNA, 201 bp, Homo sapiens
cagcctccctggaggtgcccaggtaggaagtttttgatgcttggctctgaagatgtaatctcttctcctgacattgttgccagagcctgccacaaataacrtaagggtgtcaggacctctaggccacacaccgtcctctcctctcagtctggaagccccacagcctttgccctctgcattgggggacacaaactgtttaca

SEQ ID NO: 347046 - DNA, 201 bp, Homo sapiens
agtggcaagtgcactgagctgtaggggttcaggtgggtagagaatttactagctaaatgacctacagaaagtccttttcctttccctctccttcctccttkcttttttttttttttttgagactggttctcactctgttgcccaggctagagtgcagtggcctgatcaaccacctcccggggctccccgggctcaggttat

SEQ ID NO: 347047 - DNA, 201 bp, Homo sapiens
tagaatctgtaccccagtcccccagctcaccagtagtgacaggaggtacagaaccccctgctggttgacctgcctgatgcagtcagctttcttctcccctrcctacttccctcatgtccctgccccattctgatgcactgtactctccttttgggtttaatgcctctgtctgctctatcttaatcagtctggccttacttc

SEQ ID NO: 347048 - DNA, 201 bp, Homo sapiens
agtagaatctgtaccccagtcccccagctcaccagtagtgacaggaggtacagaaccccctgctggttgacctgcctgatgcagtcagctttcttctcccmtacctacttccctcatgtccctgccccattctgatgcactgtactctccttttgggtttaatgcctctgtctgctctatcttaatcagtctggccttact

SEQ ID NO: 347049 - DNA, 201 bp, Homo sapiens
actgattgtccccagtgccaagcccagcaggggctagaggggctttttctgccacacactaacttcagttcagctgaggtcttggtgctttcggcttgtcygaggccacactgttcttctctaattaaagacacacccccctccaccccaaccaccatcaccaaagtccccatcctcaggcccctgccctcaagccagcca

SEQ ID NO: 347050 - DNA, 201 bp, Homo sapiens
tccattgtctgggggtggcacgtgggtattgtgaggcagagctgagcccagcactgccaggcaccccacgaaggaggctgacccccaaaggagaggagaayctttagggtctagagctgacaatgagagttgggggaaacagttcctcttctgagctgaggatggggtagaacaggcttctacagaggagtcagtccattc

SEQ ID NO: 347051 - DNA, 201 bp, Homo sapiens
gtggctgtcctcatgtgctgatgggccaggtcacttggggatagctcatagtcctcatacaggccacagtgtccttgggggttaacaggagaggtcaaatrgatcaaaagcctggctgcaaacagacattgggaggttggtgctgtgcccaccagggtaggcagcaggcaggcgtcatgggacagccaatcagaggaggag

SEQ ID NO: 347052 - DNA, 201 bp, Homo sapiens
gatcagccatctcctgggggcagaggcctggacacccagaaaaacatcacatcacatgtttgctgatttgaagtgagcagaggttaaaagaaaagacatastccctgcccttgaggagcttgtggtgaatttggtagagaaaagtatacagatgggtcacttgaaagggtgtggacatcaaaggacaaagcaaagtccaat

SEQ ID NO: 347053 - DNA, 201 bp, Homo sapiens
agggtaaggggagtccctggagcaaagtcttctctgtggctgatgctccctgcagggaaatttaggagcagatttctgaaacagtgacgttcctcacaggaaaaaaaaaaaaaacaaatgaacacttgggaagaagtgtgggaccattcccacgaaaacctatatgggggagtataggacatctcacctactccagcactg

SEQ ID NO: 347054 - DNA, 201 bp, Homo sapiens
tgcccagggctcttcctggaccctgggacccttcctggcatattggattggggaggcttgtgagcaggtgagggagggatggtgagcacttcctctgtctyggctgcagtttctttttcttctaaccacaagtgctttccctttccctcttgccttctcctgtcttctgtctccttcctcattcttcccttccggctccct

SEQ ID NO: 347055 - DNA, 201 bp, Homo sapiens
tttcccccacttctccccacatggtggatggatggactgattgttctagggatggaagcctagggaagcactgattgtccccagtgccaagcccagcaggkgctagaggggctttttctgccacacactaacttcagttcagctgaggtcttggtgctttcggcttgtccgaggccacactgttcttctctaattaaagac

SEQ ID NO: 347056 - DNA, 201 bp, Homo sapiens; identical to SEQ ID NO: 73547

SEQ ID NO: 347057 - DNA, 201 bp, Homo sapiens
cctagccttgctatgcagtggaaaacccagggcactgcgactttgtgaagctgaggacaatgctggtacgtacccacatgcaggacctgaaggatgtgacrcgggagacacattatgagaactaccgggcacagtgcatccagagcatgacccgcctggtggtgaaggaacggaatcgcaagtatgaccagaagccaggac

SEQ ID NO: 347058 - DNA, 201 bp, Homo sapiens
tggcaagtgcactgagctgtaggggttcaggtgggtagagaatttactagctaaatgacctacagaaagtccttttcctttccctctccttcctcctttcttttttttttttttttgagactggttctcactctgttgcccaggctagagtgcagtggcctgatcaaccacctcccggggctccccgggctcaggttatct

SEQ ID NO: 347059 - DNA, 201 bp, Homo sapiens
tccttcctcctttcttttttttttttttttgagactggttctcactctgttgcccaggctagagtgcagtggcctgatcaaccacctcccggggctccccsggctcaggttatcttcccacctcaacctcccaagtagctggtactacaggtgtatgccaccacaccaagctaacttttttgtattttttgtagagatggg

SEQ ID NO: 347060 - DNA, 201 bp, Homo sapiens
ggaagctggtggtgggaggggatcaggtgggcttctagaaaggatgtggtccccagaactgtgggcccctcatctgtttgtcagatccgggaggagattgwgcattttggaatcaagatctatcaattcccagactgtgactctgatgaggatgaggacttcaaattgcaggaccaagccctaaaggtggggccactctag

SEQ ID NO: 347061 - DNA, 201 bp, Homo sapiens
ggtgagaacagagggtgctgacaggcacccctaacctcttccaggaaagcatcccatttgcagtaattggcagcaacactgtagtagaggccagagggcgrcgagttcggggtcgactctacccctggggcatcgtggaaggtaaagcactgagcctgtgaccagggtatctccttgccctcagtggctctcccctaccta

SEQ ID NO: 347062 - DNA, 201 bp, Homo sapiens
tgtcttccccctgccttggctgggattggggctcaaagtcagaaaatgatttggtcactggcagagctgggagtggggatggacaggcaggaggtgaggaycctggtgtcctgactccttgtctagagcccctgtggccccctccatgcggatgagcagccagggctggcagagatgaggatggtgctgggttcccggagg

SEQ ID NO: 347063 - DNA, 201 bp, Homo sapiens
cccaatagtggacctcaggccctttcctctggcctccctctgcctcctcctgatggttcctgctggtctctccctggctgggaccctgggaggaggatccwggtcggactttctgcaagagatgcccgacctcttctgggctagttaggcaagggcagccctccttagccagactcagctgcccacagcctggctttgatg

SEQ ID NO: 347064 - DNA, 201 bp, Homo sapiens
gggttcccttcttctcttctctcagatgcatggtggacttaggaccttgctgggctgggggtctcactgcagagatgaagctgcttctggccctagcaggsctcctggccattctggccacgccccagccctctgaaggtgctgctccaggtaacagttcccaaggtgggagaagatggtgtgttggggtggttgtgttcc

SEQ ID NO: 347065 - DNA, 201 bp, Homo sapiens
ggttcccttcttctcttctctcagatgcatggtggacttaggaccttgctgggctgggggtctcactgcagagatgaagctgcttctggccctagcagggstcctggccattctggccacgccccagccctctgaaggtgctgctccaggtaacagttcccaaggtgggagaagatggtgtgttggggtggttgtgttcca

SEQ ID NO: 347066 - DNA, 201 bp, Homo sapiens
acatctggtgcttcattgcccccaccctctccctcagaggcagaggcagacatacacacactcacacacacacacacacacacacacacactcctagattytggaggagagagttttcggtgctaagggtgagtttttgatttgcactaagaactcaagtgaaattcatttacactccaaaataacttctagactctagaa

SEQ ID NO: 347067 - DNA, 201 bp, Homo sapiens; identical to SEQ ID NO: 73576

SEQ ID NO: 347068 - DNA, 201 bp, Homo sapiens
gttggggtggttgtgttccagagaccccttttctcagagcaggccttcctagctctggggcctgatagggggttggggcccattcctgactttgtgatccytgctctgggcagctgtcctgggggaggtggacacctcgttggtgctgagctccatggaggaggccaagcagctggtggacaaggcctacaaggagcggcg

SEQ ID NO: 347069 - DNA, 201 bp, Homo sapiens
cgcccggggtcaagcgcaacggcttcccggtggctctggtgagcgccggcgggcagagggggcgaggcccggccacgcggtgcgcggacccaggcgccagstgatctccgtgtcccgcaggctcgcgcggtctccaacgagatcgtgcgcttccccactgatcagctgactccggaccaggagcgctcactcatgttcatg

SEQ ID NO: 347070 - DNA, 201 bp, Homo sapiens; identical to SEQ ID NO: 73579

SEQ ID NO: 347071 - DNA, 201 bp, Homo sapiens; identical to SEQ ID NO: 73578

SEQ ID NO: 347072 - DNA, 201 bp, Homo sapiens
gtgaaattcatttacactccaaaataacttctagactctagaatgtagagtgagactattccatgtcttcacttttcacagggaaaatcatgccagaatgscccttcgttccttcctgcctccctgctttccacaaacctaaactgagccttactgtgggcaggcacttggtgggcactgtgaagaatttcaacaacttca

SEQ ID NO: 347073 - DNA, 201 bp, Homo sapiens
tgaaattcatttacactccaaaataacttctagactctagaatgtagagtgagactattccatgtcttcacttttcacagggaaaatcatgccagaatggsccttcgttccttcctgcctccctgctttccacaaacctaaactgagccttactgtgggcaggcacttggtgggcactgtgaagaatttcaacaacttcaa

SEQ ID NO: 347074 - DNA, 201 bp, Homo sapiens
gcatttgttgtggctttgttatatcctgggagcagcacaagcccatcgatgccctgccagcccagaatatccttgggcacagtgtccatgggtgttccccmtgcaggttttggtgggagaacgagggtgtgttcagcatgcagcagcgacaggccctggcccagatctcattgccccggatcatctgcgacaacacaggca

SEQ ID NO: 347075 - DNA, 201 bp, Homo sapiens
ctctgaagcgcaaaggccgcgtgggcccactcctcgcctgcatcatcggtacccagttcaggaagctccgggatggtgatcggtgaggaggggcaggcgtygtgggccgctgggtggctgtgggcccatccttgactctcttggagcccaaatttcctcctgtcagttgaaggactggagggagtcagtaattttccagtg

SEQ ID NO: 347076 - DNA, 201 bp, Homo sapiens
ttccagagaccccttttctcagagcaggccttcctagctctggggcctgatagggggttggggcccattcctgactttgtgatccctgctctgggcagctktcctgggggaggtggacacctcgttggtgctgagctccatggaggaggccaagcagctggtggacaaggcctacaaggagcggcgggaaaggtggggcac

SEQ ID NO: 347077 - DNA, 201 bp, Homo sapiens
aggcagagactctggccctcctgtgctgccaggcggcatttgctgtggaggagtgggtggagaggccattccaaatgacttgtctttagatcatcacttaycgggactacctgcccctggtgctggggccaacggccatgaggaagtacctgcccacgtaccgttcctacaatgactcagtggacccacgcatcgccaacg

SEQ ID NO: 347078 - DNA, 201 bp, Homo sapiens
aatccctcaggggcagggaactaaaggacagagaacgctgtggtgccctcaccctctagagcgacactatccaatgtggtagccactagctgcatgtggcwattttaattttagttattttaaattaaataaacccagtttctcagcggtgctaaccacatttcaaatgctcaattgccttacagtctagtggctccccct

SEQ ID NO: 347079 - DNA, 201 bp, Homo sapiens
ggaatcaagagaatcaatgaaccaagcagtgttcataagtctcatactttgtaccaggcactctgttaagccccatgtatccatatgtgtgctaggagggwgggtaaaatataaaaaggcacaagccttggtcctgtgctcaaggagctcccagtttcaggtacaggaaagtggcatgtcatgtgttggaagtgataccta

SEQ ID NO: 347080 - DNA, 201 bp, Homo sapiens
cggcttctctcttccctacggctggacgcccggggtcaagcgcaacggcttcccggtggctctggtgagcgccggcgggcagagggggcgaggcccggccrcgcggtgcgcggacccaggcgccagctgatctccgtgtcccgcaggctcgcgcggtctccaacgagatcgtgcgcttccccactgatcagctgactccgg

SEQ ID NO: 347081 - DNA, 201 bp, Homo sapiens
gagctcaagagcctgaaccctaggtgggatggggagaggctctaccaggaagcccggaagatcgtgggggccatggtccaggtaggccgtcttgaacaccrggcacacgggatccagatgtgtccctgcaacatcctagctgtgtgaccttgggcaagttcctaacgctcctgagccttgccttcttcatccatgaggctg

SEQ ID NO: 347082 - DNA, 201 bp, Homo sapiens
cggcatttgctgtggaggagtgggtggagaggccattccaaatgacttgtctttagatcatcacttaccgggactacctgcccctggtgctggggccaacrgccatgaggaagtacctgcccacgtaccgttcctacaatgactcagtggacccacgcatcgccaacgtcttcaccaatgccttccgctacggccacaccc

SEQ ID NO: 347083 - DNA, 201 bp, Homo sapiens
aatagtggacctcaggccctttcctctggcctccctctgcctcctcctgatggttcctgctggtctctccctggctgggaccctgggaggaggatccaggwcggactttctgcaagagatgcccgacctcttctgggctagttaggcaagggcagccctccttagccagactcagctgcccacagcctggctttgatgagc

SEQ ID NO: 347084 - DNA, 201 bp, Homo sapiens
gggtaagggaaaggccactgggcagctgtgctttactctgcacgatgagtggagcatcacttgtgtgaaagcccctgggctgcccaagggcctggggcccycctgtgcttccaggtggcatttgttgtggctttgttatatcctgggagcagcacaagcccatcgatgccctgccagcccagaatatccttgggcacagtg

SEQ ID NO: 347085 - DNA, 201 bp, Homo sapiens; identical to SEQ ID NO: 73573

SEQ ID NO: 347086 - DNA, 201 bp, Homo sapiens
ggaggccaagcagctggtggacaaggcctacaaggagcggcgggaaaggtggggcacgaggcactgcccagctctgggcaaggatgtcccaggcctttcasagaagcagcaggcagcagggagcttgaaggtgggagagggggactatggggacccatgtggactccctttctgtctgtctgtccctgtgtttctggatgg

SEQ ID NO: 347087 - DNA, 201 bp, Homo sapiens
acgcccggggtcaagcgcaacggcttcccggtggctctggtgagcgccggcgggcagagggggcgaggcccggccacgcggtgcgcggacccaggcgccasctgatctccgtgtcccgcaggctcgcgcggtctccaacgagatcgtgcgcttccccactgatcagctgactccggaccaggagcgctcactcatgttcat

SEQ ID NO: 347088 - DNA, 201 bp, Homo sapiens
gaagttatcacaatgactaaaaaagtgatttgctatttagtcctctaaggcagagggcaatataattatccttaatgtacatttgaggaactcaggctcasagaggttaataattggtccaaggtcacccagccagcaagcagtagaactctatttatgcctctcagtgccactctgttaggcccaggtccggtattgtgg

SEQ ID NO: 347089 - DNA, 201 bp, Homo sapiens; identical to SEQ ID NO: 73570

SEQ ID NO: 347090 - DNA, 201 bp, Homo sapiens
ccccagccctctgaaggtgctgctccaggtaacagttcccaaggtgggagaagatggtgtgttggggtggttgtgttccagagaccccttttctcagagcrggccttcctagctctggggcctgatagggggttggggcccattcctgactttgtgatccctgctctgggcagctgtcctgggggaggtggacacctcgtt

SEQ ID NO: 347091 - DNA, 201 bp, Homo sapiens
atatcctttttataaaaggaagccttcctcccacccgtgggcctgcctgcatggtcctgcatgtctgcccctgggctggggctctgctgggtgggtctgtrtcccttctctggccctcactcctcctttctccaagcagcatcaagcagcggcttcgcagcggctcagccagccccatggaactcctatcctacttcaagc

SEQ ID NO: 347092 - DNA, 201 bp, Homo sapiens
cgtctctcagtgatcccctcaacttcttcctccagggagtctcaggagtctccagggctcctcagcctcaggttgcctgggataggaagtgaggcggctcrgctcccccattgttctttcccccggcagatgtgctgacgcccgcccagctgaatgtgttgtccaagtcaagcggctgcgcctaccaggacgtgggggtga

SEQ ID NO: 347093 - DNA, 201 bp, Homo sapiens
cctcttctttttggctctgtcataatccacccaatgtccttagcctcatttacccctggggcaatgttcctggttccgtctctcaacatctggtgcttcawtgcccccaccctctccctcagaggcagaggcagacatacacacactcacacacacacacacacacacacacacactcctagattctggaggagagagttt

SEQ ID NO: 347094 - DNA, 201 bp, Homo sapiens
gctggaaggtaagcaggacctaggccaggagcgagtgggctgacagctaaaggtggggtagggatcaccttggctctagggagctagggtggggagcagtytgctttcctcccatcttggagatctggtctgactctctagcctcagttcctctgactctgcttccatatctgataataaacagtggggtggggatggccc

SEQ ID NO: 347095 - DNA, 201 bp, Homo sapiens
ggggtaagggaaaggccactgggcagctgtgctttactctgcacgatgagtggagcatcacttgtgtgaaagcccctgggctgcccaagggcctggggccytcctgtgcttccaggtggcatttgttgtggctttgttatatcctgggagcagcacaagcccatcgatgccctgccagcccagaatatccttgggcacagt

SEQ ID NO: 347096 - DNA, 201 bp, Homo sapiens
gctcctctggtccccaggtggcattgaccccatcctccggggcctcatggccacccctgccaagctgaatcgtcagaaccaaattgcagtggatgagatcygggagcgattgtttgagcaggtcatgaggattgggctggacctgcctgctctgaacatgcagcgcagcagggaccacggcctcccaggtgaggggctgca

SEQ ID NO: 347097 - DNA, 201 bp, Homo sapiens
gcgccagctgatctccgtgtcccgcaggctcgcgcggtctccaacgagatcgtgcgcttccccactgatcagctgactccggaccaggagcgctcactcaygttcatgcaatggggccagctgttggaccacgacctcgacttcacccctgagccggccgcccgggcctccttcgtcactggcgtcaactgcgagaccagc

SEQ ID NO: 347098 - DNA, 201 bp, Homo sapiens
cctcttgcactgtgggccagggctgctgtgagctaggagaccagggttccagaggggctcactaggtcctgcgggaggctttcccgggcctcctgcatgcrgcgccgggctcgacggaaggcctctgtaaggaaaggagatatgctatttggctgccatatggtatttctctctgcactgcagagagaaacaggcccatgc

SEQ ID NO: 347099 - DNA, 201 bp, Homo sapiens
cttgcactgtgggccagggctgctgtgagctaggagaccagggttccagaggggctcactaggtcctgcgggaggctttcccgggcctcctgcatgcggcrccgggctcgacggaaggcctctgtaaggaaaggagatatgctatttggctgccatatggtatttctctctgcactgcagagagaaacaggcccatgctga

SEQ ID NO: 347100 - DNA, 201 bp, Homo sapiens; identical to SEQ ID NO: 73665

SEQ ID NO: 347101 - DNA, 201 bp, Homo sapiens
cacacacagtcacccttaataggtggggccacattcatgagggatgacatgtgagggcctctggatggcctctccctgttgcaaccttatctattcctcartccctggcttaggggcacctcctctggggagccttctcagatcttcctattacacttttaacatatgtcctcccctcccctctcctctctctccttcctt

SEQ ID NO: 347102 - DNA, 201 bp, Homo sapiens
gggttttcagctcaaaagggacataacttgtttacattttttaaagctcaacttggctttggtgtctgtggcaaatcaacggcaaatgggagcaaggcagsaagcagggggatacatcagaagttgaatgcactggcctagacaagagatggtggtggcttggtgtagggtgctggagagaacaaataggttcacaacagc

SEQ ID NO: 347103 - DNA, 201 bp, Homo sapiens
gggtttctagggcccagagctgccctcccccaccctagaatgggctataaaagtcccttcccagctacgtccagagaagagctggaggaagtgagaggtcrgctgggggtcctcaaagtgagaggggagcagaggatcctcccgtgcaggctgtggatgtcactcacttcccagctggtgaagcctcgctgcagagatgca

SEQ ID NO: 347104 - DNA, 201 bp, Homo sapiens
ccacactcgtcctcgcccagccctgtgagggcactgacccaggtaatagtcccctagacaggcaaggaggagggaggggaaatggaaggggaagcacttgsgtcttggagggggtcttgtggcttgctgaaccctgagtccccatctctttgaacagcctcccctggggcagtggagacctcggtcctgcgagactgcata

SEQ ID NO: 347105 - DNA, 201 bp, Homo sapiens
tcccttccagatcatcacctaccgagactttctgcccctggttctgggcaaggcccgggccaggagaaccctggggcactacagggggtactgctccaatrtggacccacgggtggccaatgtcttcaccctggccttccgctttggccacacaatgctccagcccttcatgttccgcttggacagtcagtaccgggcctc

SEQ ID NO: 347106 - DNA, 201 bp, Homo sapiens
gcaggaggtggctacgcctccagggacaaaaggggcatggagggcagaagaggagaggctgtcaattccagcaggggagctgctgctccctgagtcctggrttggctctaataccttgtggggtcagggagcccatgtcccgtgctgatgttatttccccaccaggtccgggctgtctccaaccagattgtgcgcttcccc

SEQ ID NO: 347107 - DNA, 201 bp, Homo sapiens
gctgctgtcccaggccagtggctgtgctctccgggaccaggccgagcgctgcagcgacaagtaccgcaccatcactggacggtgcaacaacaagtgcgtgyggggcggcaggaggggctgcccctgcctgggggacctctcccttcctgcacccaccctctccctccatgctgagccatctccaggccctgccccctgcta

SEQ ID NO: 347108 - DNA, 201 bp, Homo sapiens
aataaagaatatgtctgagccaccctttgaaaaggcaagggtatgggtgagtagcctctggggaatgttcctcctgtcttcccttccagatcatcacctaycgagactttctgcccctggttctgggcaaggcccgggccaggagaaccctggggcactacagggggtactgctccaatgtggacccacgggtggccaatg

SEQ ID NO: 347109 - DNA, 201 bp, Homo sapiens
tcatgcagtggggccagttcattgaccatgacctggacttctccccggagtccccggccagagtggccttcactgcaggcgttgactgtgagaggacctgmgcccagctgcccccctgctttcccatcaaggtacctaccctcagccaatctcccatgcccttgtgtggcctcccccaaaggcaaggtgctgggggtgggg

SEQ ID NO: 347110 - DNA, 201 bp, Homo sapiens
ttccccaatgagagactgacctccgaccgtggccgagccctcatgttcatgcagtggggccagttcattgaccatgacctggacttctccccggagtcccyggccagagtggccttcactgcaggcgttgactgtgagaggacctgcgcccagctgcccccctgctttcccatcaaggtacctaccctcagccaatctccc

SEQ ID NO: 347111 - DNA, 201 bp, Homo sapiens
cgggccgcagattatatgcatgtggctttggggctgcttgaagagaagttacaaccccagcggtccggacccttcaatgtcactggtactctgatccccaytgagcccgctgggcctaccctggcctggagtagaaggaatccaggagagggaggcagggtgcacaggtttggggtgctgggaggagagagggtaaaggga

SEQ ID NO: 347112 - DNA, 201 bp, Homo sapiens
gcagcggttcagccagccccatggacctcctgtcctacttcaaacaaccggtagcagccaccaggacagttgttcgggccgcagattatatgcatgtggcyttggggctgcttgaagagaagttacaaccccagcggtccggacccttcaatgtcactggtactctgatccccactgagcccgctgggcctaccctggcct

SEQ ID NO: 347113 - DNA, 201 bp, Homo sapiens
ctggccacagcttccccccagaggactggtggagaaaaacagaagctaatgggagatcagcaagactgaagctgcttctccccgttcccctgcagggtacwatgcttggaggcgcttctgtgggctctcccagccccggaatttggcacagcttagccgggtgctgaaaaaccaggacttggcaaggaagttcctgaattt

SEQ ID NO: 347114 - DNA, 201 bp, Homo sapiens
cctctctgaggctgttttccttgctgtaaaatgaggatcgagattgtttcaaaagcctcattcattcctaaccttttgagactctatgaaacaaaatgttraggacactcagactgacggggtgagcagcatgagcctgggtgagtcaaggagggcttcctggaggaagggagttttaagcaaggttttgaggaggtggaa

SEQ ID NO: 347115 - DNA, 201 bp, Homo sapiens
ggaaggggaagcacttgggtcttggagggggtcttgtggcttgctgaaccctgagtccccatctctttgaacagcctcccctggggcagtggagacctcgrtcctgcgagactgcatagcagaggccaagttgctggtggatgctgcctacaattggacccagaagaggtggacttgggtctgggggctgcatgggcctgg

SEQ ID NO: 347116 - DNA, 201 bp, Homo sapiens
gcccatgtcccgtgctgatgttatttccccaccaggtccgggctgtctccaaccagattgtgcgcttccccaatgagagactgacctccgaccgtggccgrgccctcatgttcatgcagtggggccagttcattgaccatgacctggacttctccccggagtccccggccagagtggccttcactgcaggcgttgactgtg

SEQ ID NO: 347117 - DNA, 201 bp, Homo sapiens
atgaagctggagtgtggaggaagggtggtggaagaggtgagggcagaggctggagaagtcctccagggcctaggaagccatggaaggatttggagttcccygtactgctgctgaaggaatatcatgaatagaccccacagactgtgaccctgcccactaggaccctggacgggctgggctcatcccaggacacccatgagc

SEQ ID NO: 347118 - DNA, 201 bp, Homo sapiens
ccaatgtcttcaccctggccttccgctttggccacacaatgctccagcccttcatgttccgcttggacagtcagtaccgggcctccgcacccaactcgcawgtcccacttagctctgccttctttgccagctggcggatcgtgtatgaaggtgaccaggttttccagggggcaaatgggggtgagggtggggagcatgccc

SEQ ID NO: 347119 - DNA, 201 bp, Homo sapiens
tggacctttgcccagcaggatatgatagggatgttccttcagttgggcctttgcccattagggtatgttatgtttttcatggcccgacctcctgtggaacrtttcactttgaccaaggtctgggaaatggtggggggcttagaaaatggtgcagtttggactaacattcttgccttctactttggtataaaaggaagagct

SEQ ID NO: 347120 - DNA, 201 bp, Homo sapiens
gggcccagagctgccctcccccaccctagaatgggctataaaagtcccttcccagctacgtccagagaagagctggaggaagtgagaggtcggctgggggycctcaaagtgagaggggagcagaggatcctcccgtgcaggctgtggatgtcactcacttcccagctggtgaagcctcgctgcagagatgcatctgctccc

SEQ ID NO: 347121 - DNA, 201 bp, Homo sapiens
  misc_feature (1)...(201): n = A,T,C or G
ggtcttggagggggtcttgtggcttgctgaaccctgagtccccatctctttgaacagcctcccctggggcagtggagacctcggtcctgcgagactgcatngcagaggccaagttgctggtggatgctgcctacaattggacccagaagaggtggacttgggtctgggggctgcatgggcctgggaggatcagtgaggggc

SEQ ID NO: 347122 - DNA, 201 bp, Homo sapiens
gaatccaggagagggaggcagggtgcacaggtttggggtgctgggaggagagagggtaaagggatgggaggtacagagcaggccagctcaggtctgcccayttgccttcccacagatgtgctaacagaaccacagctgcggctgctgtcccaggccagtggctgtgctctccgggaccaggccgagcgctgcagcgacaag

SEQ ID NO: 347123 - DNA, 201 bp, Homo sapiens
ggggtgctgggaggagagagggtaaagggatgggaggtacagagcaggccagctcaggtctgcccatttgccttcccacagatgtgctaacagaaccacasctgcggctgctgtcccaggccagtggctgtgctctccgggaccaggccgagcgctgcagcgacaagtaccgcaccatcactggacggtgcaacaacaagt

SEQ ID NO: 347124 - DNA, 201 bp, Homo sapiens
tcgctccccttcggctggacccccagcaggaggcgcaatggcttccttctccctcttgtgagttggggctgagggtttgggaggttgcttgatctcttaartgcggggagtaaaacacagcccagagtcacgcaggcagggcttgaacccaggcccttccactgaccagtgcagtgacttgaggcaaataacacagctttc

SEQ ID NO: 347125 - DNA, 201 bp, Homo sapiens
aggtctccctctcgctgcggctccgcaaccggaccaactacctggggctgctggccatcaaccagcgctttcaagacaacggccgggccctgctgcccttygacaacctgcacgatgacccctgtctcctcaccaaccgctcggcgcgcatcccctgcttcctggcaggtcagacagggaggaaggtggtgtcttcccagg

SEQ ID NO: 347126 - DNA, 201 bp, Homo sapiens
tggggtcagggagcccatgtcccgtgctgatgttatttccccaccaggtccgggctgtctccaaccagattgtgcgcttccccaatgagagactgacctcygaccgtggccgagccctcatgttcatgcagtggggccagttcattgaccatgacctggacttctccccggagtccccggccagagtggccttcactgcag

SEQ ID NO: 347127 - DNA, 201 bp, Homo sapiens
cgctgcggctccgcaaccggaccaactacctggggctgctggccatcaaccagcgctttcaagacaacggccgggccctgctgcccttcgacaacctgcaygatgacccctgtctcctcaccaaccgctcggcgcgcatcccctgcttcctggcaggtcagacagggaggaaggtggtgtcttcccaggaaacagccatcc

SEQ ID NO: 347128 - DNA, 201 bp, Homo sapiens
atttgaactttcctcagggtcttttgtcccatgtacatggttacaataataatggtagtcatttctcattaagatatttatcttattattattattattttaagatggagtctcactctgtcgcccaggctggagtgcagtggcgtgatctcagctcactgccacctctgcctcctgggttcaagtgattcccctgcctca

SEQ ID NO: 347129 - DNA, 201 bp, Homo sapiens
cgcgcatcccctgcttcctggcaggtcagacagggaggaaggtggtgtcttcccaggaaacagccatccctggggtcccaactgggaagcaatggtgggaygtggtgaaggtacatggtttgggacctcagtattaggcacaccataagcatggatctgtgcacagccatcatagaatcagaacgttgagtccctttgcaa

SEQ ID NO: 347130 - DNA, 201 bp, Homo sapiens
ggtttgggacctcagtattaggcacaccataagcatggatctgtgcacagccatcatagaatcagaacgttgagtccctttgcaagctccctgtgtgtggscagagataactgcttaaccgtctccagtgacaaggctctcaccgcctctatggcaccccagctcagccacaggcagctccgactgttagaaagtctcctt

SEQ ID NO: 347131 - DNA, 201 bp, Homo sapiens
atgtcactgtctcctcttccatctcagatcccacccaatgacccccgcatcaagaaccagcgtgactgcatccctttcttccgctcggcaccctcatgccyccaaaacaagaacagagtccgcaaccagatcaacgcgctcacctcctttgtggacgccagcatggtgtatggcagtgaggtctccctctcgctgcggctc

SEQ ID NO: 347132 - DNA, 201 bp, Homo sapiens
acgcgctcacctcctttgtggacgccagcatggtgtatggcagtgaggtctccctctcgctgcggctccgcaaccggaccaactacctggggctgctggccatcaaccagcgctttcaagacaacggccgggccctgctgcccttcgacaacctgcacgatgacccctgtctcctcaccaaccgctcggcgcgcatcccct

SEQ ID NO: 347133 - DNA, 201 bp, Homo sapiens
ggggccccatgtcactgtctcctcttccatctcagatcccacccaatgacccccgcatcaagaaccagcgtgactgcatccctttcttccgctcggcaccmtcatgcccccaaaacaagaacagagtccgcaaccagatcaacgcgctcacctcctttgtggacgccagcatggtgtatggcagtgaggtctccctctcgc

SEQ ID NO: 347134 - DNA, 201 bp, Homo sapiens
acatttccaattcccaattatctccacccctcaccagaagcattcgagtgttagtcttgttcttagggcctagggcatgtgggccacagaagggcagagaygagcggttacctggagtggcaggcagcaccacagccccatagccttccacacggtacctctgccagaagtccagcgagaggacctcacagtagagcacag

SEQ ID NO: 347135 - DNA, 201 bp, Homo sapiens
tgctattgagggggccccatgtcactgtctcctcttccatctcagatcccacccaatgacccccgcatcaagaaccagcgtgactgcatccctttcttccrctcggcaccctcatgcccccaaaacaagaacagagtccgcaaccagatcaacgcgctcacctcctttgtggacgccagcatggtgtatggcagtgaggtc

SEQ ID NO: 347136 - DNA, 201 bp, Homo sapiens
gtcccttgtgcttaggggcaggttaaagaattcagtagatgagaggatttcctccttccctcccttccttccatagacatgtggatttggtgtgtgcactrttggttcagtctcttctcagaaagcctgctggttttggcccccaccaacagatagctcctctttttctcttctgggctaccctgaaaagagcatgggctt

SEQ ID NO: 347137 - DNA, 201 bp, Homo sapiens
tgggctataggatgaaaaacaagtaagcaattagaatgatgtttttaagtgctatgattgaggaggcatcaggtgttagagggctggagtggagtgaaacrtcaaggaagactttcttgagaaggtaatgcttgagctgagtgctgaagaatgtgtgatacttagccaggtagacagtgaaaacaaaacaccatttgcaga

SEQ ID NO: 347138 - DNA, 201 bp, Homo sapiens
atgaaaaacaagtaagcaattagaatgatgtttttaagtgctatgattgaggaggcatcaggtgttagagggctggagtggagtgaaacgtcaaggaagaytttcttgagaaggtaatgcttgagctgagtgctgaagaatgtgtgatacttagccaggtagacagtgaaaacaaaacaccatttgcagaagcgtagtggc

SEQ ID NO: 347139 - DNA, 201 bp, Homo sapiens
tgggaggccgaggcaggcggatcatgaggtgaggagattgagaccatcctggccaacatggtaaaacctgtctccactaaaaatacaaaaattagctgggygtggtggcgcatgcctgtaatcccagctactctggaggctgaggcaggagaatagctcgaaccagggagctggaggttgcagtgagccgagattacgcca

SEQ ID NO: 347140 - DNA, 201 bp, Homo sapiens; identical to SEQ ID NO: 73683

SEQ ID NO: 347141 - DNA, 201 bp, Homo sapiens
agtctcacacatcaacagcaactacaagtgagagggttggggaccaaaacaccttccacaccaaactacttccgtgtttggataaagtgtggtgggcacakcttctgagtctgagagggaggaaggctcatggtttctcttcccacaaagccatccccagggatcctgtcatcacatgttttagacccagtgcagtgaccc

SEQ ID NO: 347142 - DNA, 201 bp, Homo sapiens
cgatgccctcattgccatctctaactaccggctgcatatcaaattcaaggactctgtcatcaacgtgagtttctgtattgttctcctacccctaagctagratccctatgaagttcaaggtgggattgttccaaggctgtccttgatcatgtcattaaaaaagttggaggccgggcgcagtggctcacgcctgtaatccca

SEQ ID NO: 347143 - DNA, 201 bp, Homo sapiens
ttgagctgagtgctgaagaatgtgtgatacttagccaggtagacagtgaaaacaaaacaccatttgcagaagcgtagtggcaatagatactccaatgatayggcttaaaaagatgggacatgcgagtatatatgtgtacatgcatgcatacacgcttacactggggctatgagagacagtcaaatagggtggtgggaggtg

SEQ ID NO: 347144 - DNA, 201 bp, Homo sapiens
ctccctgagaaagaagtgttctccctctgcgtctggaaatcaggactcctgaattctgctgaataatcttggatgacactcattcctgtttcagaacttcrtggctgacttcatgccctgcaggatcacttgttgctttctcctcatgtagctcccattgcctctctctggcatggtgacttgtggagagactggagtctc

SEQ ID NO: 347145 - DNA, 201 bp, Homo sapiens
taggtcttgggtggaccctggttgtctggatgtctaagaagatccactaagatgcctgatgtgtatcacacattcaattggcacctagcagtggaaacctsatgttgtattttgagctcattcattcatttctcaagtcatttgcccctggtactgtgctaggcgctggggattcaaataagacagagtcctgccttcagg

SEQ ID NO: 347146 - DNA, 201 bp, Homo sapiens
ctgggcacggtggttcacgcctgtaataccagcacttcgggtggccaaggtgggaagatcccttcagcttaggagttcaagatcagcctgggcaacatagygagaccccatctctactaaaaatagaaaaaattagccaggtgtggtgatgcgtggggagatcgcttcagcttaggagttcaagatcagcttgggcaacag

SEQ ID NO: 347147 - DNA, 201 bp, Homo sapiens
tcagcttaggagttcaagatcagcctgggcaacatagcgagaccccatctctactaaaaatagaaaaaattagccaggtgtggtgatgcgtggggagatcrcttcagcttaggagttcaagatcagcttgggcaacaggacgagaccccatctctactaaaaatataaaaaattagccaggcgtggtgatgcatgcctgta

SEQ ID NO: 347148 - DNA, 201 bp, Homo sapiens
tgagccaccatgcccagcctggctgaaagtttttaaagttaaaatataacatatgttattggttgaatattataaaggaaaacaaaaagcccagcatcccmaattattggttttagggtcttttgaactaagtcattgtgaggggaccgtgataggtttcaggatttcagtgattttttttttccttccccaaactatgca

SEQ ID NO: 347149 - DNA, 201 bp, Homo sapiens
attgcaagtgcccatctcctgacctggaggtgttatatttgtctttccagattacctaaaaccagatccatggatgatcttctttctgcctgtgacacaarcagccccctgactcgtacatccagtgaccctaacctgaataaccactgtcaggaggtcagggtaggcctggagccctggcacagcaatcctgagggatca

SEQ ID NO: 347150 - DNA, 201 bp, Homo sapiens
gaacgtctggagagtctcacacatcaacagcaactacaagtgagagggttggggaccaaaacaccttccacaccaaactacttccgtgtttggataaagtstggtgggcacagcttctgagtctgagagggaggaaggctcatggtttctcttcccacaaagccatccccagggatcctgtcatcacatgttttagaccca

SEQ ID NO: 347151 - DNA, 201 bp, Homo sapiens
cccacttggtgtcaaatacactcagcaggacctgtgcagccctgctgccctctgatcacaggttgtggtcccctccctcttgtcccactctggactctgcycccagtaaacaggtcaggtgggtactactcccagactcagagactggcaaaacattcctgtggattcatgctccttcaactactgccacttcaccccaag

SEQ ID NO: 347152 - DNA, 201 bp, Homo sapiens
gacagatgctgactccaaggcctggattggcctgattctgtccctgttgtgtggcctcctctccataacctccaccccacttggtgtcaaatacactcagsaggacctgtgcagccctgctgccctctgatcacaggttgtggtcccctccctcttgtcccactctggactctgcccccagtaaacaggtcaggtgggtac

SEQ ID NO: 347153 - DNA, 201 bp, Homo sapiens
cagaacgtctggagagtctcacacatcaacagcaactacaagtgagagggttggggaccaaaacaccttccacaccaaactacttccgtgtttggataaartgtggtgggcacagcttctgagtctgagagggaggaaggctcatggtttctcttcccacaaagccatccccagggatcctgtcatcacatgttttagacc

SEQ ID NO: 347154 - DNA, 201 bp, Homo sapiens; identical to SEQ ID NO: 347060

SEQ ID NO: 347155 - DNA, 201 bp, Homo sapiens
cacattggtgctctgggaagctaaccatcgtgggggctctgttgcaggtgagcacatacgttgtcgacaggaggcggagcttgcaaggatgggctttgacstgcagaacgtctggagagtctcacacatcaacagcaactacaagtgagagggttggggaccaaaacaccttccacaccaaactacttccgtgtttggata

SEQ ID NO: 347156 - DNA, 201 bp, Homo sapiens
tttagaacataacaagagtctttctatgctgtggtgtagcatatcggtaagagtgtaaatctgaagctacaatactaggttcaaatcccagctttactacrtatcagctctttctctgtggcttcattttcttatttgtaaaatggggatattagtagtatacattgtaagactgtcataagaaataagttcatgtgtgta

SEQ ID NO: 347157 - DNA, 201 bp, Homo sapiens
tgtggatgatgctaaccccccagggagcaggccccctccttggcttcattggctcccagggagtccccagtgagagtctgggaagatgacaacacacgggrtgctggggtccctgccttgtcagaagctgtggggtatgaggggtctctagttgcatgttctgccttctgagagggagtgccagagggccagcaagaggtt

SEQ ID NO: 347158 - DNA, 201 bp, Homo sapiens
gtccccccaccttccccgtgggtgtctgccgggcctcctctctctctctcccctggctgtccttgggtctcctggctcctcccaggcgcgtggatcccccygggtcccctccctggtggttgggaggggagttccttttgcttgctgtgggtattcctcaggaattcccctctgattagcaggcagagcaggttacttggc

SEQ ID NO: 347159 - DNA, 201 bp, Homo sapiens
atgacactcattcctgtttcagaacttcgtggctgacttcatgccctgcaggatcacttgttgctttctcctcatgtagctcccattgcctctctctggcmtggtgacttgtggagagactggagtctctgtgagggagaagaataagagttgtagagaaggtcaggggtagatgtgtgtcatttgttgattctatggtaa

SEQ ID NO: 347160 - DNA, 201 bp, Homo sapiens
agtggcttgtaggcgcctgatttcccttctctctgaaaccagctgccatacctggctccttttcctcaggacagcactttcccatccccactcctgccttrcccttatgcgggtctaagggaaagagtctttcttttccttagttttctctcctccatttttgaaatgttggttctataggagagtccctctttgaagagt

SEQ ID NO: 347161 - DNA, 201 bp, Homo sapiens
atgccctgtgttcctccagtggcttgattctgttcatcagttgcttaagcagttcccctgcctgtttgaatttaatgaagcattcctggtaagtcctaagscctgtgacaacagggatggggggaatgacagcccgaggcccccaggtgcaagctctctctgctttctaggtaaaactggtgcaacacacatactcctgcc

SEQ ID NO: 347162 - DNA, 201 bp, Homo sapiens
tgatctgattaatgtttcatagaatcacactggctgctatattgagactagatgaaagagaatgggggcaagagcaaaagcaaaaactgggagactagttaggaagctattgcagttacccagatgagagatcatggtggcctgtctgaggtggtagcagccaaagcggtgagaagcattcagattctgggtgtattttga

SEQ ID NO: 347163 - DNA, 201 bp, Homo sapiens
aagcccttcttcctttctcctctctccactaggaaggcagtaactgtttcccatctcatctaaatgttctctttctttcttttttttgagacggaatctcrctttgtcgcccagggtggagtgccagtggtgcaatcttggctcactgcaacctccacttcccgggttcaactgattctcctgccccagcctcccgagtag

SEQ ID NO: 347164 - DNA, 201 bp, Homo sapiens; identical to SEQ ID NO: 73689

SEQ ID NO: 347165 - DNA, 201 bp, Homo sapiens
tccccactcctgccttacccttatgcgggtctaagggaaagagtctttcttttccttagttttctctcctccatttttgaaatgttggttctataggagartccctctttgaagagtgcagattcccaattcctcctggggcctcactctttccttaggcttaataggctgatatgctctccatttcacccttccctgtct

SEQ ID NO: 347166 - DNA, 201 bp, Homo sapiens; identical to SEQ ID NO: 73680

SEQ ID NO: 347167 - DNA, 201 bp, Homo sapiens
tgatgagtacctggtcacgtccattgctaaagcctgtgccctggacccggggacaagggccactgggggctccctcagcaccgggaataatgataccagcraggcgtgtgatgctgactttggtaaggtgtggatgatgctaaccccccagggagcaggccccctccttggcttcattggctcccagggagtccccagtga

SEQ ID NO: 347168 - DNA, 201 bp, Homo sapiens
cgcttgcatctgggacgcagaggttgcagtgagctgatatcatgccactgcacctctagcctgggtgaccatgagaccctgtcttaaaaaagaaaaagaarttgtatatataaaattattgccacagagcagctactatttattgagaattgattatatattgtctttctaagtactgctatcatttgtcattactgttac

SEQ ID NO: 347169 - DNA, 201 bp, Homo sapiens; identical to SEQ ID NO: 73681

SEQ ID NO: 347170 - DNA, 201 bp, Homo sapiens
ctcctttcagagctgttgtgggtgtaagtgacatgatgtggccaaaaatccaaactgtgcagttgcgttgtgacaaacatgcaatgtgctgtaaaaattcratacagtttaaataaaatctctatattagtgctgctttgttgggtcgttttattttcatttctaaaaaaacttaatattcacttattctttgaccatgag

SEQ ID NO: 347171 - DNA, 201 bp, Homo sapiens
tggaattagtttggaagtggacacctctttatagaaactatttttgtttgtccccaacttttcatttagtatcactcattctcagtatattggcatttctyaatattaattaattaattatttttttattagcgatgggctcttgctatgttgctcaggcaagtctcaaactcctggcctcaagcgattctactgcctcag

SEQ ID NO: 347172 - DNA, 201 bp, Homo sapiens
aatcccagcactttgggaggccgaggcgggcggatcatgaggtcaggagatcaagaccatcctggctaacacggtgaaaccccgtctctactaaaaatacaaaaaaaaaaaaaattagccgggcgtggtggcaggcgcctgtagtcccagctactctggaggctgaggcaggagaatggtatgaacctgggaaggcggagt

SEQ ID NO: 347173 - DNA, 201 bp, Homo sapiens
actcctgacctcaagtgatccgctcaccttggcctcccaaagtgctgggattataggtgtgagccactgcacctgggtgagaggtagtttttttttttttwaaaaaaaaagaagttctgtggctggcaggggttgagaaggggctattttaaggaatagtggaaatataggacaggtcattgagggcattgaaggctttaa

SEQ ID NO: 347174 - DNA, 201 bp, Homo sapiens
tggctgagtgtgcatgtgatgcttctcagttcctcttttgagcttcagatgcttttatctgctgtaggtcctgtcttccctaccttcctgctagatacctsttgtccaaaaggccctgggttgtacctcttggtttcagttctcaatggggactttgttgggtggggctggctgtggatggtggagagactgctgtggcct

SEQ ID NO: 347175 - DNA, 201 bp, Homo sapiens; identical to SEQ ID NO: 347057

SEQ ID NO: 347176 - DNA, 201 bp, Homo sapiens
ctcccaggttcaagcaattctcctgcctcagtctcccgagtagctgggattacaagtgcctaccactatggccagctaatttttatatttttagtagagayggggtttcactgtgttagtcaggctgttcttgaactcctgacctcaggtgatccaaccgcttcagcctcccaaagtgctgggattacaggtgtgagccac

SEQ ID NO: 347177 - DNA, 201 bp, Homo sapiens
ctgcagatctctaggccccgccctgcaggggtacatccctttacctccgcctctccctcttggtcccacccgctgaatccttgcttggggatgtgggatgwggctagtaggctgaatgggatgttaggaggttggtcggggagcacgggatgtctttgagctggcttggggctccagtcccttccctcttccaccattcca

SEQ ID NO: 347178 - DNA, 201 bp, Homo sapiens
gtgggaatggtcttgatttttgttcactggtacagggcatggggagcttgctatattagtagcaacctttgttgtgtccagcattagcttccagaaacatmtgactctcagggaaatgggttcccagcaggaggatggccttatattactccctcagaaaaaggccagaatttaaaagggagacataaaattaggtatctt

SEQ ID NO: 347179 - DNA, 201 bp, Homo sapiens
agggagtgccagagggccagcaagaggttgggtggctggctgactcagggactccttcctgctgtgtgtttagattcttctctgactgcgtgctctggagkggagagcacagcagctcctcaaaagctgctgatcctggatgcgcgatcctacacggcagcagtggccaaccgggccaagggtggaggctgtgaatgtgaa

SEQ ID NO: 347180 - DNA, 201 bp, Homo sapiens
tgatgatgagtacctggtcacgtccattgctaaagcctgtgccctggacccggggacaagggccactgggggctccctcagcaccgggaataatgataccrgcgaggcgtgtgatgctgactttggtaaggtgtggatgatgctaaccccccagggagcaggccccctccttggcttcattggctcccagggagtccccag

SEQ ID NO: 347181 - DNA, 201 bp, Homo sapiens; identical to SEQ ID NO: 347059

SEQ ID NO: 347182 - DNA, 201 bp, Homo sapiens
ccctgggtccccactgctttacctcttgctttgcagccttctctcctcacagccttcctgtggctgtgtttttggccctgatagccccatggcacaactgyactttgcctcacctaggcctgtggcttcttgcctggcaggtgccacttctccacttttaagcagtgccaagagtggctctcacggctaagccgagccaca

SEQ ID NO: 347183 - DNA, 201 bp, Homo sapiens
gggattacaagtgcctaccactatggccagctaatttttatatttttagtagagatggggtttcactgtgttagtcaggctgttcttgaactcctgacctyaggtgatccaaccgcttcagcctcccaaagtgctgggattacaggtgtgagccaccgcgcccggcctaggacgtgcttttatgtcccactctcctgtcat

SEQ ID NO: 347184 - DNA, 201 bp, Homo sapiens
atgtgatccagcataggttacggcaaatcgaagcagggtacaaacaagaggtggagcagctacgtcgacaggtgcgtgagcttcagatgaggctggacatycgtcactgctgtgcccctccagcagagccccccatggactatgaggatgattttgtaagtagtcaccaactgccatacacccattatttactctgttcat

SEQ ID NO: 347185 - DNA, 201 bp, Homo sapiens; identical to SEQ ID NO: 347061

SEQ ID NO: 347186 - DNA, 201 bp, Homo sapiens
aagtatcttcttttgtctaacatgattatgcatttatttctctaatatgcttccctaaggaagttaaatcatagaagttaaagtagttaaacttctacctrtgtagaagctttttaaaaaaaaatcagatagaatgaatatgaacaaatattaaacccattaaaacaaaacactattagacccattaaacaaacaaacaaa

SEQ ID NO: 347187 - DNA, 201 bp, Homo sapiens
cgcctgtcgcctgtgcgcctgcgcgcggcgccgaggggacggggtccgactcagaaatggcggcctccatgttctacggcaggctagtggccgtggccacycttcggaaccaccggcctcggacggcccagcgggctgctgctcaggtaatgccttccagtccgctgtcatctcgagggtcggcaggagaaagggtgaggt

SEQ ID NO: 347188 - DNA, 201 bp, Homo sapiens
cctgcctcaccctcccaaagtgctgggattacaataggcgtgagccaccatgcctggccttcataaaaactcttaactcagcgctttgctcaacaaatgayataatagaacataaatgctttacaggtgtgccaaactattgtttcttcccagtcctgtggtggcaggagaagttgagttagcatggggtttggggccact

SEQ ID NO: 347189 - DNA, 201 bp, Homo sapiens
gcctcctgagtagctgggattacaggcatgtgccaccaccccggctaattttgtatttttagtagagacagggtttctccatgttgatcaggctggtcttraactcccgacctcaggtgatccacctgcctcaccctcccaaagtgctgggattacaataggcgtgagccaccatgcctggccttcataaaaactcttaac

SEQ ID NO: 347190 - DNA, 201 bp, Homo sapiens
caccatgttgcccaggctggtctcaaactcctggcttcaagtgatccgccctctttgtcctcccaaagtgctggtattacagacttgagccactgcgcccrgcctacattgtttagcttgatcattcactttacttattggcatttgactctttgcaaatatcttcttcatcttcaaagaatttaagattttttgttattg

SEQ ID NO: 347191 - DNA, 201 bp, Homo sapiens
acctccacctcctgagttcaagcagtttttgtgtctcagcctctcgagtagctgggattacaggcatgcgtcaccacacctggctaatttttgtatttttratagagacagtgtttcaccatgttgcccaggctggtctcaaactcctggcttcaagtgatccgccctctttgtcctcccaaagtgctggtattacagact

SEQ ID NO: 347192 - DNA, 201 bp, Homo sapiens
tgtttttgtttggtttcaaactccatttcctacctcattgatttggttggttcatctgattaggtgggagcttcctctcattctgcttgataaatgcatcrtggagtgacatcctagttgtagaggactctacttcagtctgttcaaatccatgtttatggagtagttgttatatcccagagacttccttgtgcttgggat

SEQ ID NO: 347193 - DNA, 201 bp, Homo sapiens
tcctggatcattgagccatgatgttgattgttggatgtcaagagtagataatgttgatgactaatggaagagtagtttatacagcgtggatacgctgggcraagagatggttcacattccacttggagcaggatggtgcaagatttcatcacacttctcagaacaacacacagtttaaaacttaatgacttttttatttct

SEQ ID NO: 347194 - DNA, 201 bp, Homo sapiens
gctgggactacaggtgcccgccaccacgcccggctaattttttgtatttttagtagagacggggtttcaccgtgttagccaggatggtctcgatctcctgrccttgtgatccgcccgccttggcctcccaaagtgctgggattacaggcgtgagccaccacgcctggcccaatgatgacatcttatttagctgtatatacc

SEQ ID NO: 347195 - DNA, 201 bp, Homo sapiens
aagagactcttctgaaacactcattttaatgtttgtgtaatctgtcattatagatgtgccataatttagaactatgtgtttattaatgattatcaaagtayaagggatgtgaagtatcataattcaaaagacatatatattattaatcactagatatttgttaaggagtgtatctattgtgtggccagtgtagattttgta

SEQ ID NO: 347196 - DNA, 201 bp, Homo sapiens
ggcagtaaaagacttggaaattaaaatacctgttgtggtacggttacaaggtgagtataaaaggtatcttgcagttgttcctaattctttaaaagttcacrtttccatggagttcagtttgttaaaacatagtttttaaatagctgtgtctttgaaagcattatacaatatgaaattaaaactatagtttttaaaacattt

SEQ ID NO: 347197 - DNA, 201 bp, Homo sapiens
aaggaaatgtgaactaggtgttgaaattacccaaggagatggaaataagttctggtgggcagtggactacatagacttcaataaagagagctagaagaggktattgtggtttggtctgaaaatctttctatcaagttaatgtttatcatgaagcacatatactagtattttttggggaaaagaacttaaatttcttttaaa

SEQ ID NO: 347198 - DNA, 201 bp, Homo sapiens
ggattttaaaattcatgtgaaataattctctgtgtgttttgtctcagctttgtatagtttcattgtttttaaagggattgctttttttttaaaaaaaaaaacacaaccttttgttttttattttgtatttacatgattccaaagtggaaagtatagaacaaggtattatcagggaatctagcttttatatatttccctctt

SEQ ID NO: 347199 - DNA, 201 bp, Homo sapiens
aactgcagtcttctgcaaatgagtgggacattttcctgtgtcaatttttgactttacctgaaatagttataaaatgtgcttaagaattctaattttacttygtgtgattttttttaaatacacatctttattttttatttttatttttaatttttttgagagtcttgctctgtcgcccaggctggagtgcagtggtgccat

SEQ ID NO: 347200 - DNA, 201 bp, Homo sapiens
aaaataattttcttatgtagaacaactttttaaaaaatagcaactttctgtattgtgatttttcttatttacaattaaatctattaatgtttgaatgataygtcttttgcaacttttaatttttataaggaagtatttctaaagatataacactagatggtagtaaaaatccactcagaatataaaattaagaagcattgt

SEQ ID NO: 347201 - DNA, 201 bp, Homo sapiens
tgtggccagtgtagattttgtaaggcttacaaaaaagataataatctctgtggaactattcttactggatttaaaccgagaattcttcactgatagggatsatatcttactaattgttgcttctcgtagtgtctggtataatgcccagtacatatgtaggtcattaatcaatatttattattgatgatgctgctggcaatg

SEQ ID NO: 347202 - DNA, 201 bp, Homo sapiens
cccagtacggatttcatgtagaacattaattgtgtagaatttagagtaacaaaaattttaagagtcatgaaaataattttcttatgtagaacaactttttwaaaaatagcaactttctgtattgtgatttttcttatttacaattaaatctattaatgtttgaatgatatgtcttttgcaacttttaatttttataaggaa

SEQ ID NO: 347203 - DNA, 201 bp, Homo sapiens
gcatttctcttagcacaggtctgctagtgatgaatattgtttccattattctgcaaatatctttattctgtccttcttttgaagtatattttcactggatrtagaatcttggcttgatatatttttctttcatcacttttttcctgtcccattctccttttcttccagtttcacattagacttcttgatattgtccaagag

SEQ ID NO: 347204 - DNA, 201 bp, Homo sapiens
cctttcttgaggtgccactaaagaaaggaaggttgtatgctaaaagttagagagcttgcatgggatagaaggcttatgaagagagttaaaggtatgaggcygactgctaagttgaggattgctgatgaattattattttattgctcttcaggttatgctagtgtttccagttttgttttcagtttttacttttttactttt

SEQ ID NO: 347205 - DNA, 201 bp, Homo sapiens
ggcataggccagattgtaatggattgatttgatgaggaattgagggaatagagatatccaggagagattactcttccaggactttttttttttttttttttacaaaggcatggaagggatgcagtgctatcagtcaaaggcagtaggactgaggagagttttgtggtgtatgttttcttgcttgtttagaagatcaagaag

SEQ ID NO: 347206 - DNA, 201 bp, Homo sapiens
gtgcagtagtgcagtctcggctcactgcaaccccagtctcccgggatcaagtgattcttctccctcagcctcctgagtagctggaattacaggcacccacyaccacaccctgctaatttttgtatttttgtatttttttgagacggagtctcgttctgttgcccaggctggagtgcagtggtgcgatctcggctcacagcc

SEQ ID NO: 347207 - DNA, 201 bp, Homo sapiens
tttagttattctttttctagtttcttgtggtataaatataggttgagcatcccaaatctgaaattctgaaatccaaaatgctataaaatcctaagcttttkgagcactgacatgacacttaaaggaaatgctcattggagcattttggaattcagatttttagatttgggattctccaatggtaagtataatgcaaatatt

SEQ ID NO: 347208 - DNA, 201 bp, Homo sapiens
ttgttatttcagtcttttctatttttttatagttaaagggttgtcaattttattcactttttcaatgagccaatatgcagttttgttgattttttttttttctgttccttgtttcttttatttctgctctaatctttatgattttcttccttttgccaactttgggtttagttattctttttctagtttcttgtggtataa

SEQ ID NO: 347209 - DNA, 201 bp, Homo sapiens
tcagcttctcatttttgtgtatgatgttggctgtaagttttcttttttatttttattattattatactcaagttctgggatacatgtgcagaatgtgcagrtttgttacataggtatacacgtgccatggtggtttgctgcacccatcaacctgtcatctacattaggtatttctcctgatgctatctctgccctagcccc

SEQ ID NO: 347210 - DNA, 201 bp, Homo sapiens
tctgcctgcctgggcctcccaaagtgctgggattacaggtgtgagccgccgcgcctggcctaatgactcaccttaaaagaagaatttgaatattggacttygaagttaaacatttctttttttttattattgatttttatttttagtttttttttgagacggagtctcgctctgtcgcccaggctggagtgcagtggcgcg

SEQ ID NO: 347211 - DNA, 201 bp, Homo sapiens
ccttgggccgcctgtcgcctgtgcgcctgcgcgcggcgccgaggggacggggtccgactcagaaatggcggcctccatgttctacggcaggctagtggccrtggccacccttcggaaccaccggcctcggacggcccagcgggctgctgctcaggtaatgccttccagtccgctgtcatctcgagggtcggcaggagaaag

SEQ ID NO: 347212 - DNA, 201 bp, Homo sapiens
atttatagaaaaactctgatcttatccctcaaaatcggcctttacagtcttacatggctacctcttccgcagtgatccctgggcctagagggattgaatcrttttaacttctggccctgtgtctcataaaagcagttcattatgagtgttcatcttcaaaccagtgcgacacctgcacatattctgtttacaagtacagat

SEQ ID NO: 347213 - DNA, 201 bp, Homo sapiens
agtttcttctgacacataatatttctctctctggtgtaccacttccaccaaagacaaatcacagcaggatctacctgcaaaataagcttctaccaatctasctgcaaaataatcttcagtcccatatacttggcctgattacccacacacagtgcgacaagaatcattgcccatagattcttccaaattggctttgctgga

SEQ ID NO: 347214 - DNA, 201 bp, Homo sapiens
gatgtcgtgataaaggcacaggttttagctggtggtagaggaaaaggaacatttgaaagtggcctcaaaggaggagtgaagatagttttctcgtaagtcayattttttaaggaaaaatcatccttgttaaagactgattaaagattacttattgaattgatgaaaatactgaaatttaaatattagatgagataaaatttt

SEQ ID NO: 347215 - DNA, 201 bp, Homo sapiens
aggtgaccatgtagccacccaggaatcaaagtttcatctaatagagagtttcttctgacacataatatttctctctctggtgtaccacttccaccaaagasaaatcacagcaggatctacctgcaaaataagcttctaccaatctacctgcaaaataatcttcagtcccatatacttggcctgattacccacacacagtgc

SEQ ID NO: 347216 - DNA, 201 bp, Homo sapiens
ataaacaaatatttaaagtgctggaaaatcaggactggacaggtaaacagaaacaagtggaataaatagtggctgctcccttccgtttgggcacaaactcyaatttgccatggttcagagacaacctgtagtattctcaataagaacgttattgttggttttaaggaaatttctgagttgtttctatttgttacctaatat

SEQ ID NO: 347217 - DNA, 201 bp, Homo sapiens
tatagttatgaagaaccaagtagttaacaagagtgactgccaaatcactgtcatatataaatatgtccccaatctttctaggttctgggaagttctggatkgtttaataaccatggactccaagtacagcagcaacagcaaaggaatctctcactacatgaatacatgagtatggaattattgcaagaagctggtgtctcc

SEQ ID NO: 347218 - DNA, 201 bp, Homo sapiens
atattttctcatttagtgaaattccattgttttgtcagaaaaaataatttgcatagaaactttttcataaaatgaataggattaattcagatgccaatctrttttgattatgccttataaaaacttaatgattcttaggtacagaagaaagaaataatatgtgcaggataaactgtaactatgagtatttctggcaagttc

SEQ ID NO: 347219 - DNA, 201 bp, Homo sapiens
catctagtgcaatacttagatatgagaaaaggtgaaggtaataaataggttataacttgtctctgaaagtgcacttttttggaatgaaaacttaaattaaraaaagcttggaggacatgaaaagaaggagaagaaccagtaggaccttgatcaaatagatcatgagaggtaaaagtgaacagttgatttaaattatgacta

SEQ ID NO: 347220 - DNA, 201 bp, Homo sapiens
taattcagatgccaatctgttttgattatgccttataaaaacttaatgattcttaggtacagaagaaagaaataatatgtgcaggataaactgtaactatragtatttctggcaagttctctgggaccagaactcacaagtaataagaagcaggtaggcagctctgattttgagccccttggaacagataccttgttcatt

SEQ ID NO: 347221 - DNA, 201 bp, Homo sapiens
tggctcattgcagcttcgacctcctgggctcaagccacttctcccgtctcagcctgctgagtagctgggactataggtgtgctccaccatgcctggctaakttttgtattttttcttgagatggggtttcaccatgttgcccaggctggtctcaaactccggggctcaagccttccacccacccttggcttcccaaagtgc

SEQ ID NO: 347222 - DNA, 201 bp, Homo sapiens
tcatctgcaaacacagaattttacctttccttttctctttggatgctttttatttttcttacctgttttctgtgtctaggacatctagtgctgtgttgaayagaagcggcaagagtgggcatccttgctttgtttctgatgttagaggaaaagctttcagcttctcatttttgtgtatgatgttggctgtaagttttcttt

SEQ ID NO: 347223 - DNA, 201 bp, Homo sapiens
ctaatgctatccctccccttgccccaaccccctgacaggccctggtatgtgatgttcccctccctgtgtccatgtgttctcattgttcagttcccacttaygagtgagaacatgtgatgtttggttttctgttcctgtgttagtttgttgagaatgatagtttccagcttcatccatgtccctgcaaaggacatgaacaca

SEQ ID NO: 347224 - DNA, 201 bp, Homo sapiens
ttggtaagggtctaacttcattcttttgcatgtggatatccaatttttctagcaccatttgttgaagagactgttctttttgccctcttgtgtagctttcscaccattgttgaagatcatttaatcatataccttagggattatttctgggttttctgttctattccattggtctatatgtctgtttttttatgcattatc

SEQ ID NO: 347225 - DNA, 201 bp, Homo sapiens
ttgttacatagttgtacatgtgccatggtggtttgctgcacccatcaacctgtcatctacattaagtatttctcctaatgctatccctccccttgccccarccccctgacaggccctggtatgtgatgttcccctccctgtgtccatgtgttctcattgttcagttcccacttatgagtgagaacatgtgatgtttggttt

SEQ ID NO: 347226 - DNA, 201 bp, Homo sapiens
taggtctttaatctattttgagtaaatttttgcatatagtagtattggtaagggtctaacttcattcttttgcatgtggatatccaatttttctagcaccrtttgttgaagagactgttctttttgccctcttgtgtagctttcccaccattgttgaagatcatttaatcatataccttagggattatttctgggttttct

SEQ ID NO: 347227 - DNA, 201 bp, Homo sapiens
tccagtttttctgcatcctcgccaatattcattttctgtttttttggtagtggccatcctaaagggtgtgagattatatttcactgtggtttttatttgcrtttcccccgttattagtgatactgagtatcttttcatatgcttacaggccatttgcagatctgctttggagaaatgtctatttaagtcctttgcccatct

SEQ ID NO: 347228 - DNA, 201 bp, Homo sapiens
atacttttaatgtcccctcagtttttatgaaaaatgcataggttatatttcacatacatatgtttacatatttggtgttaagttttttttcttttttttttaattatactttaagttctgggatacatgtgcagaaagtgcaggtttgttacatagttgtacatgtgccatggtggtttgctgcacccatcaacctgtcat

SEQ ID NO: 347229 - DNA, 201 bp, Homo sapiens
tgactttttaatgatcaccattctaactggcatgagatgctatcacattgtggttttgatttgcatttctctaatgaccagtgatgataaactttttttcrtatgttttttgactgcataaatgtcttcttttgaaaagtatctgttcatatccttctcccactttttgatggggttgtttttttcttgtaaatttgttta

SEQ ID NO: 347230 - DNA, 201 bp, Homo sapiens
tgttgtttcctgactttttaatgatcaccattctaactggcatgagatgctatcacattgtggttttgatttgcatttctctaatgaccagtgatgataarctttttttcatatgttttttgactgcataaatgtcttcttttgaaaagtatctgttcatatccttctcccactttttgatggggttgtttttttcttgta

SEQ ID NO: 347231 - DNA, 201 bp, Homo sapiens
tccacctgcctcaccctcccaaagtgctgggattacaataggcgtgagccaccatgcctggccttcataaaaactcttaactcagcgctttgctcaacaartgatataatagaacataaatgctttacaggtgtgccaaactattgtttcttcccagtcctgtggtggcaggagaagttgagttagcatggggtttggggc

SEQ ID NO: 347232 - DNA, 201 bp, Homo sapiens
ttttgccaggcttatgctagttactcccctacccactaatttttattattattttgacgtataatttatgtacagtaagatgtacagcttaagtggatagstagattaatttttatgtatgtattcacctgtgtaaccatcgtctgcatcaagatatacaatgtttccagccctcagaaggctctcatgtcctctctctta

SEQ ID NO: 347233 - DNA, 201 bp, Homo sapiens
attttcttattcaacatttacataaatggtttttattagcttcaatatagttattcctttcgttaccaaaacaccaggggtttggtcaaggtcctgctgcrcagaaagccaatcactgagaagtattgccaaagaagaagggtttaattgggtgctgcagctgaggagataggatctcagtctcaaatctatctccctgac

SEQ ID NO: 347234 - DNA, 201 bp, Homo sapiens
ttcaaggttcattctagctttaccactttctatgtttataattttcttattcaacatttacataaatggtttttattagcttcaatatagttattcctttygttaccaaaacaccaggggtttggtcaaggtcctgctgcacagaaagccaatcactgagaagtattgccaaagaagaagggtttaattgggtgctgcagc

SEQ ID NO: 347235 - DNA, 201 bp, Homo sapiens
ttttcaaggccttaaaggttaataattgttagtattgataccttaccttctcatattgttcatgacaatagccagagctattctttcaaactagttagctytctcttttatttattgtattttactttttttttgagacagggtctttctctgtccccatgctggagtgccatggtgtgatcacagctgactgcagccttg

SEQ ID NO: 347236 - DNA, 201 bp, Homo sapiens
aaagataacgattatgggatctagttgcacaaggtgtagaatgagggaccttagaaatacacttggttttgttcatgtagctagcaattcccaatgctgakttttcattacttcagggtgatttttgctttttgactttctgcaaaattcataaaatgctaattttcatttcataaaaactctttttttttttttttgaga

SEQ ID NO: 347237 - DNA, 201 bp, Homo sapiens
ctagcttttagttttatgctgtaattcaggtactctgaatattgtactttgctaatgtaatgtaacagttttgttatagttatgaagaaccaagtagttarcaagagtgactgccaaatcactgtcatatataaatatgtccccaatctttctaggttctgggaagttctggattgtttaataaccatggactccaagtac

SEQ ID NO: 347238 - DNA, 201 bp, Homo sapiens
tctttttttcatgttaacattatttctagtttaatgcataaattagtagatctattagataatttatgattttttcttgattgattttcaaggccttaaakgttaataattgttagtattgataccttaccttctcatattgttcatgacaatagccagagctattctttcaaactagttagctttctcttttatttattg

SEQ ID NO: 347239 - DNA, 201 bp, Homo sapiens
ggtaggatactgaatatgtattattaaagatatgtttaaggcatttgggaaaaggatcaaatttgagttcatcttaagaacttgaatttcctgacaactayttaggtcttgttgaggataaaatgtttttattttaatacttgcttactaataatacgtggttataattcaggttaaaaatactgtagtaccagtaaaact

SEQ ID NO: 347240 - DNA, 201 bp, Homo sapiens
attgtagtaaaggtaggatactgaatatgtattattaaagatatgtttaaggcatttgggaaaaggatcaaatttgagttcatcttaagaacttgaatttsctgacaactacttaggtcttgttgaggataaaatgtttttattttaatacttgcttactaataatacgtggttataattcaggttaaaaatactgtagta

SEQ ID NO: 347241 - DNA, 201 bp, Homo sapiens
ttctccatgttgatcaggctggtcttgaactcccgacctcaggtgatccacctgcctcaccctcccaaagtgctgggattacaataggcgtgagccaccasgcctggccttcataaaaactcttaactcagcgctttgctcaacaaatgatataatagaacataaatgctttacaggtgtgccaaactattgtttcttccc

SEQ ID NO: 347242 - DNA, 201 bp, Homo sapiens
gaaacaggctagataagttaacttattcaaggttgtatgtcataagtatcagaggggggatttgcagccaaagatatctaacttcaaagccttttcttaastaatttactgaggaagagagaagctgagtttgtttttttggtcttagacatgtctaaatttgtatgatgttttgtatggtaactggtggatatttttaga

SEQ ID NO: 347243 - DNA, 201 bp, Homo sapiens
ccaaagtggaaagtatagaacaaggtattatcagggaatctagcttttatatatttccctctttacttcttccccaacaggcaacctttttaccttttttktttgtttgttttttaagaaagttttggtttatctttccacttcttaaaaacataagctaattgtatgtatataactatatgtatgtgtgcagtagtcccc

SEQ ID NO: 347244 - DNA, 201 bp, Homo sapiens
tatgtccaataaaggtgacctagggttttttttgttttttgttttttttgtattttgtttactttttgttttcaggtgtgtgtgtgtgtgtgtgtgtgtgtattgtgcgtgtgtgcatacacatgcatacacatgtgtgttccactggcatactgttttgaacttatgacttaaaacattgatgtagttcagttcatgtaa

SEQ ID NO: 347245 - DNA, 201 bp, Homo sapiens
ttatgtccaataaaggtgacctagggttttttttgttttttgttttttttgtattttgtttactttttgttttcaggtgtgtgtgtgtgtgtgtgtgtgtgtattgtgcgtgtgtgcatacacatgcatacacatgtgtgttccactggcatactgttttgaacttatgacttaaaacattgatgtagttcagttcatgta

SEQ ID NO: 347246 - DNA, 201 bp, Homo sapiens
cagaaagaaagaaggaaggaaggaaggagggagagaggaaggaaggagaatgttaatttctcttttggtaaaaggaacagagtaaaacaatttgtgcacaktttgtgcaacatctccagaacagatatccaaatcttttttttttctttaatttttctagaactttttttgtcttacaaaattaaaactattcattgaaca

SEQ ID NO: 347247 - DNA, 201 bp, Homo sapiens
acctcacatttgataatgcttcctgtataattctaacataacaagcctaataagcctgatatatctctcttggatgtcagggaacctaatatccaaaaaaatagtttgaggtcaaaaagactgaatttcgatcttgaaattttgcttatagaaagtttgccaaatatcaaagttttaagacacttgttatcacaaaataga

SEQ ID NO: 347248 - DNA, 201 bp, Homo sapiens
cattttgttttggctgggtttatagttttataaccttctatgccaaaccctgacacctcaaaatacctaccagagacaaatataaaatccaggcaaaaatrtatgctgacaattctgaggacgttgctattttcattttactaactattttaaagctagcttgtttagtaaagatttacttaactcacatgaacttaaaaa

SEQ ID NO: 347249 - DNA, 201 bp, Homo sapiens
gaatgttttgtcttgctagcatcttaatgtgtggcagtatgcagaatattgccaacccaaagctccccaagcttttggtgttcagagatttttttttttttagattgtcaaaaatataacaaaaaatttaccttacccattttgagtatgcagtataatagtgcattctcagaaagaaagaaggaaggaaggaaggaggga

SEQ ID NO: 347250 - DNA, 201 bp, Homo sapiens
aattagagtcctgaaaggtctctctaatccaggggcacaaactgcaaagtttttagaaacctgcattaaagaatccttttcatgaactcctccaaagaagmaagccctggaccataggtgattataagtcactttttgaggagattaaaagcaatatatcaattgtggatgttgaaagtcataagacagtcataaagacac

SEQ ID NO: 347251 - DNA, 201 bp, Homo sapiens
agaatgttgtggttagattggagtgaggaaggggtagggtactgaaaggtgaagtcagagaggtgacctttgttaagagccattttggtagagtgctgggrgtaaaagcctgattagagtgggtataagagagaatggcaggaaaaaaatttggtacaaggagtttaagcacaggggttggcatttaataagtattttagg

SEQ ID NO: 347252 - DNA, 201 bp, Homo sapiens
gagctcaggaaaatgttaaacttagtattacagttttattatagccaaaggatataaaaatcataaccagccaacaaggtctgggagggttcccaaacackaagtttccactgttctcaggaatgttttgtcttgctagcatcttaatgtgtggcagtatgcagaatattgccaacccaaagctccccaagcttttggtgt

SEQ ID NO: 347253 - DNA, 201 bp, Homo sapiens
gccttttcctttgagcctacagccttattttccatatttattaattttgcaaggaggattaaactaaatgagatgtaaaatgtgcattatttcccttgttyagtaattactaaaacaagtaaacattttattagaactatatttctatagcttcttttgacaaactcgagaagcagagtattaaagacaatctaattatct

SEQ ID NO: 347254 - DNA, 201 bp, Homo sapiens
ttagtagagacggggtttcaccgtgttagccaggatggtctcgatctcctgaccttgtgatccgcccgccttggcctcccaaagtgctgggattacaggcktgagccaccacgcctggcccaatgatgacatcttatttagctgtatatacccaaacagttagttgacattggttcattattgttagctagactaaatatt

SEQ ID NO: 347255 - DNA, 201 bp, Homo sapiens
gttatccattttaatccttattttgttacgcagactgtcccagatttggccagcagaggccactttcaggcttgctcctgtggcctcttttttttttttttaaataaatgaaaaattataaataaaattataatttaacttacaatattgaaacaaatacagactttcaggaggttgttaaattaatagtcttgcatgccc

SEQ ID NO: 347256 - DNA, 201 bp, Homo sapiens
ctgggactacaggtgctcaccaccgcatacggctaattgtttgtatttttagtagagatggggtttcaccatgttagccaggatggtcttgatctcctgayttcgtgatctgcctgcctcggcctccgaaagtcctgggattacaggcgcaagccaagaacgttctcttatataacctgactacatttattaaaaccaaga

SEQ ID NO: 347257 - DNA, 201 bp, Homo sapiens
cagtggtgcaatctcggctgactgcaagctccacctcccgggttctcaccattcttctgcctcagcttgccgagtagctgggactacaggtgctcaccacygcatacggctaattgtttgtatttttagtagagatggggtttcaccatgttagccaggatggtcttgatctcctgacttcgtgatctgcctgcctcggcc

SEQ ID NO: 347258 - DNA, 201 bp, Homo sapiens
aaggaaaaatcatccttgttaaagactgattaaagattacttattgaattgatgaaaatactgaaatttaaatattagatgagataaaattttggctattrtgtggatttgctttttctcaactggaggaaagaaaaatttgagttctttttcttattttagtccagaagaagcaaaagctgtttcttcacaaatgattgg

SEQ ID NO: 347259 - DNA, 201 bp, Homo sapiens
ctagattacttctgaaaacatatattagatgccatcatttaaagttatttccttattaaccattttataatctatgaatatcagtcattcactgaaataakaactttaaagttaactacataggcattttcaccaataactattttcattaaaccaataacttaattactcttttcaaaaaatttgcacaaagatcatttt

SEQ ID NO: 347260 - DNA, 201 bp, Homo sapiens
ctgtgcttggacttggaaatacatgggcccttctcttaagttacttatagttttactggggtgattgacacaaagtagtgctgtggaagaacagaggacasaggcaaaaactgggagaatcagggtggccttcactgaatggatgataccttaagctgtcttgaaaattaaatgagggcaagaggaagaaaatgtacaaag

SEQ ID NO: 347261 - DNA, 201 bp, Homo sapiens
cactgccatctccacctcttgggttcaagtaattcttctgcctcagcctcccaagtagcttggactacaggcatgcaccaccgcgcctggataatttttttgtgtttttagtagagatgaggtttcaccatgttggccacgctggtcttgacctcctgaccttaggtaatctgcctgcccctgcctcccaaagtgctggga

SEQ ID NO: 347262 - DNA, 201 bp, Homo sapiens
gtaattcatctttattgtagtaaaggtaggatactgaatatgtattattaaagatatgtttaaggcatttgggaaaaggatcaaatttgagttcatcttawgaacttgaatttcctgacaactacttaggtcttgttgaggataaaatgtttttattttaatacttgcttactaataatacgtggttataattcaggttaa

SEQ ID NO: 347263 - DNA, 201 bp, Homo sapiens
gacggcccagcgggctgctgctcaggtaatgccttccagtccgctgtcatctcgagggtcggcaggagaaagggtgaggtgtgaggggtcccgtggcccgsctcggggtcacttcgccggcagtgacattttctgggtgccctgcaaggccctcgggcgacttgcctgggagtgctgctcgccaggactacgagcgagccc

SEQ ID NO: 347264 - DNA, 201 bp, Homo sapiens
ttggtggaaaagatgagattggttttagatccgctgaatttggcattgaggtagaactgccctgtagatcattggagatatgatagtaaagctgaaatctraaataaggaatagagatgatgaggaaataattaaaatgacagtggtaacagtgatatttagctgataggctagcttttagttttatgctgtaattcaggt

SEQ ID NO: 347265 - DNA, 201 bp, Homo sapiens
aaggcaaacaaaatcttttatctcttaatattacacaaacattttgttcaaaagcaaaaaccaaaattttcctttatatattattaaagttaataaaactrtataaacaaatctatctaattttaatcagtttgaccataaggtaagatttccataaacttttaataactggccccaattttctttttaaagagcatatca

SEQ ID NO: 347266 - DNA, 201 bp, Homo sapiens
actccattttctctttgcaacttactcagaaggcaaacaaaatcttttatctcttaatattacacaaacattttgttcaaaagcaaaaaccaaaattttcytttatatattattaaagttaataaaactgtataaacaaatctatctaattttaatcagtttgaccataaggtaagatttccataaacttttaataactgg

SEQ ID NO: 347267 - DNA, 201 bp, Homo sapiens
gcccaggctggagtgcagtggcgcgatcttggctcactgcaagctccgcctcccgggttcatgccattctcctgcctcagcctccctagtagctgggactrcaggcgcctgccaccacgtccggctaattttttgtatttttagtaaagacggggtttcaccgtgttagccaggacggtctcgatctcctgacctcgtgat

SEQ ID NO: 347268 - DNA, 201 bp, Homo sapiens
catagtgaaaaactttcataataaaatggtactttcatattattctttatttgaaataggtcaaaacaaaagattacattccttagtgcttttttttttttgtgggggggagacagagtctcactctgtcgcccaggcaggagtgcagtggtgtgatctcggctcactgcaacctccacctcctgagttcaagcagttttt

SEQ ID NO: 347269 - DNA, 201 bp, Homo sapiens
agaatcccttgaacctggggggcggaggttgcagtgagctgagatcgcatcatttcactccagcctgggtgacagaacgacactccatataaaaaaaaagaaaagaaaagaaagaaagaaaagtggaattagtcttttgattaaaaaaaaaagttgtcatgcctgtttttttttctggatgtaagagtagtatgttcattg

SEQ ID NO: 347270 - DNA, 201 bp, Homo sapiens
agaagtttttgattactgattcagtatcattactagttatagagctgttcatattttttatttctttatgattttgaagattgtttctagcaagttatcartgtcttctaggttattcaatttgttgatacataatttttcatagcagtctcagactctttctgtgacagctgtaatgtctcctttcacttctgatttttg

SEQ ID NO: 347271 - DNA, 201 bp, Homo sapiens
gaaggctctgaattcttttatttaaaaaagttttttttttatattgaaaggagttctaatactaagtgcccatagtttagctaaacttcagaggctaagarcatagtcctgcacttgattgcccttactttagacaccagtctcaattttggtggtccccaggttaccctcatttctgactagctagctacaaatttgagg

SEQ ID NO: 347272 - DNA, 201 bp, Homo sapiens
ttattttttcagagctattagcttgtagttttcttttaataccttctgattttggtatcatggtaatgctggcttcatagagtgagtatggaaattttccrtccttttcaattttttgaaaagagcttgggaaagattggttcagttctttaaatgtttgatagaattttccagtgaagccatttggtcccgggcttcctg

SEQ ID NO: 347273 - DNA, 201 bp, Homo sapiens
ccagtccgctgtcatctcgagggtcggcaggagaaagggtgaggtgtgaggggtcccgtggcccggctcggggtcacttcgccggcagtgacattttctgrgtgccctgcaaggccctcgggcgacttgcctgggagtgctgctcgccaggactacgagcgagcccatgtttgcgcggctctgacccagcccttagtccgc

SEQ ID NO: 347274 - DNA, 201 bp, Homo sapiens
tctagttgtttatttttctaagcatggcttttagggcccaggtgcaagaatggagaaaagtatatgaagagttacagtgtaggggactgacatgatgggcrtcagagttggaaacagaatggaaacccagggtgtcaatgtggatagcattgaagtggccatatattttgtgatggtcactgtgcttggacttggaaatac

SEQ ID NO: 347275 - DNA, 201 bp, Homo sapiens
catccttgtattctaggagttaagtcccacttgatcatgatgtaaagtccctttaatgtgttgttgaattcagtttgctagtattttttgagtttttttttcatcattattttttcagagctattagcttgtagttttcttttaataccttctgattttggtatcatggtaatgctggcttcatagagtgagtatggaaat

SEQ ID NO: 347276 - DNA, 201 bp, Homo sapiens
catggcttttagggcccaggtgcaagaatggagaaaagtatatgaagagttacagtgtaggggactgacatgatgggcatcagagttggaaacagaatggwaacccagggtgtcaatgtggatagcattgaagtggccatatattttgtgatggtcactgtgcttggacttggaaatacatgggcccttctcttaagttac

SEQ ID NO: 347277 - DNA, 201 bp, Homo sapiens
atgttgaaccatccttgtattctaggagttaagtcccacttgatcatgatgtaaagtccctttaatgtgttgttgaattcagtttgctagtattttttgartttttttttcatcattattttttcagagctattagcttgtagttttcttttaataccttctgattttggtatcatggtaatgctggcttcatagagtgag

SEQ ID NO: 347278 - DNA, 201 bp, Homo sapiens
ggcaaattgtgaccacatttgtgaagatccctattatctatagttaaggagtttggattttaactccctaccccagcacatacacaagagaattcataatraattctcttgtggaagagatccctgacaaaggcaatatcagtaagaataaattagaggcatttctgagatagggtcattaaattcattttttttcttctt

SEQ ID NO: 347279 - DNA, 201 bp, Homo sapiens
gttgtttccttcagtctttgttgagtatttttatcgtgaaagggtattcaattttgttaaatgccttttatgtatcaattgagattattgtggtttttgtycttcattctgttaatagcatgtattacactgaatttttgtatgttgaaccatccttgtattctaggagttaagtcccacttgatcatgatgtaaagtccc

SEQ ID NO: 347280 - DNA, 201 bp, Homo sapiens
agtaattgtagacatgatacatacgggataaatttatgacattcaatttcaaaagtccattattgtttctatttatgtgggaaagattttaaaagtacaarttataatctgtttgtatgtcatgagcatgatatttatgtcatttaaaaaacagcttctttaatgccgtaaaatttgatatataatatcatgatcttaaaa

SEQ ID NO: 347281 - DNA, 201 bp, Homo sapiens
ggaaaaaattgtttaccaagcaaacgggagaaaagggcagaatatgcaatcaagtattggtctgtgagcgaaaatatcccaggagagaatactactttgcrataacaatggaaaggtcatttcaagtgagtaattgtagacatgatacatacgggataaatttatgacattcaatttcaaaagtccattattgtttctatt

SEQ ID NO: 347282 - DNA, 201 bp, Homo sapiens
atgcccggctaatttttgtattttgttttagtagagatggggttttgctatgttggccatgctggtcttgaactcctgacatcaggtgatccaccctcatyggcctcctgaagtgctaagattacaggcgtgagccaccgcgtccggtcccttcattgttgttgactgataagtctcataggtcttttataacttacaggt

SEQ ID NO: 347283 - DNA, 201 bp, Homo sapiens
ttaggtactaaattaagaaaagcttttgccaccttgacatgagagctctgagaagatttgaagtttgtttttggtttgataacaacttttagctttttttwaaaaaaaatacattttctttgcttaaaatagaaggtagaactttattattattgaaattctaaaattattattattattattattatgagcacccataat

SEQ ID NO: 347284 - DNA, 201 bp, Homo sapiens
ctcaagccatcctcttacctcagctcctgaagtgctgggattaaaggtgtgagccatcacacccagcctatttttttttttttatttaaagaaaatacttkaaaataatttctgaattaatgaagaaataataatggaaatgagaaaatatttcaaactgaacaactgcaaggaatgtaggaattgtgaggaatactcatt

SEQ ID NO: 347285 - DNA, 201 bp, Homo sapiens
tgttctacggcaggctagtggccgtggccacccttcggaaccaccggcctcggacggcccagcgggctgctgctcaggtaatgccttccagtccgctgtcrtctcgagggtcggcaggagaaagggtgaggtgtgaggggtcccgtggcccggctcggggtcacttcgccggcagtgacattttctgggtgccctgcaagg

SEQ ID NO: 347286 - DNA, 201 bp, Homo sapiens; identical to SEQ ID NO: 73727

SEQ ID NO: 347287 - DNA, 201 bp, Homo sapiens
cagtagttttttctaattctgtgaagaaagtcattggtagcttgatgggataccattgaatctataaattattttgggcagtatggccattttcatgataytgattcttcctatctatgagcatggaatggaatgtttttccctttgtgttctttcttattttcttgagcagtggtttatagttctctttgaagaggttct

SEQ ID NO: 347288 - DNA, 201 bp, Homo sapiens
gagtctcactctgtcacccaggctggagtgcagtggtatgatctcagctcactgcaacctgcatttcccgggttcacaccattctcctgcctcagactccygagtagctggaactacaggctcccgccaccacgcccagctaatttttgtatttttagtggagatggagtttcaccgtgttagccaggatggtctcgatct

SEQ ID NO: 347289 - DNA, 201 bp, Homo sapiens
atcatgtttaagaaatcattgctaaatccaatgtcataaacttttttctccctgttttcttctatgagttttatagtttcaggttttatgtttaggtctttaatctattttgagtaaatttttgcatatagtagtattggtaagggtctaacttcattcttttgcatgtggatatccaatttttctagcaccatttgttga

SEQ ID NO: 347290 - DNA, 201 bp, Homo sapiens
accaccacaccctgctaatttttgtatttttgtatttttttgagacggagtctcgttctgttgcccaggctggagtgcagtggtgcgatctcggctcacarcctccgcctcctgggttcaagtgattcttctgcctcagccttctgagtagctgggactacaggcgtgcaccaccatgcccggctagtttttgtattttta

SEQ ID NO: 347291 - DNA, 201 bp, Homo sapiens
gcggtttcaccatgttggtcaggctggtcttgaacccctgactttgtgatccacctgcctcggcctcccaaagtgctgggattcaggtgtgagccactgcrcccagccttgtatttttagtagagatagggttttgccatgttgaccaggctggtctcgaactccagacctcatatgatcctcccacctcggccttccaaa

SEQ ID NO: 347292 - DNA, 201 bp, Homo sapiens
tcactgcaaccccagtctcccgggatcaagtgattcttctccctcagcctcctgagtagctggaattacaggcacccaccaccacaccctgctaatttttktatttttgtatttttttgagacggagtctcgttctgttgcccaggctggagtgcagtggtgcgatctcggctcacagcctccgcctcctgggttcaagtg

SEQ ID NO: 347293 - DNA, 201 bp, Homo sapiens
aagaattgaggggaacgatattttggtgtatctacaatgcattttaatctcattgtttgagaagccctggtatagctgagtgaactaaacctctttttttwaaaaaagagagattatttggaaaggataggagaacactgattcagaactatcattgtgatgttgaaagaatgctgacccaaacaggtcctgagatttgga

SEQ ID NO: 347294 - DNA, 201 bp, Homo sapiens
cagaggcaaagtcgaggaataggtatttcagaatgaatgtcaagtttggattgtggtgactatatctagtagacagttcattgaaaagatattgtacttcytatattggagaaaagttgaagtcttaggagttggtgaggtgatctgtgcaagtgagatgaggaaccaagaatggaacctggcccctccatttttgttgaa

SEQ ID NO: 347295 - DNA, 201 bp, Homo sapiens
agaaaactaaactaaaatgttagaatattttaaagatttgttggtctgtacctctcctgttgaataaaattatattttatggttatctgtagatttaatttgtctatattctatttcagtggcatgactaaaactgaaccgcctcttcttcaatcagaattttttcctgctctttagatctttgtaaaagctaataattat

SEQ ID NO: 347296 - DNA, 201 bp, Homo sapiens
gctttaaatatgatttggtgaatactttgcttttatattttttaagaaagatgagcattttcaaagtgattgaaattttaaaagtattcatcttgtgtagwacttatttgtatctagaatggatttttctttcaaaattaaggatatatacaagttcagaaaactgtcatataagctatgtttttgaatgagatggccatg

SEQ ID NO: 347297 - DNA, 201 bp, Homo sapiens
tgtagctagaggggtgaagacctggaggaaatactatgtagtaaatagatggagataattatctggccaggtcagctttggaaaggtggttactcctttcytgaggtgccactaaagaaaggaaggttgtatgctaaaagttagagagcttgcatgggatagaaggcttatgaagagagttaaaggtatgaggccgactgc

SEQ ID NO: 347298 - DNA, 201 bp, Homo sapiens
aagaaaactaaactaaaatgttagaatattttaaagatttgttggtctgtacctctcctgttgaataaaattatattttatggttatctgtagatttaatttgtctatattctatttcagtggcatgactaaaactgaaccgcctcttcttcaatcagaattttttcctgctctttagatctttgtaaaagctaataatta

SEQ ID NO: 347299 - DNA, 201 bp, Homo sapiens
gggaataatagtggtaaggtaaagaatgtatagtatagctcagtgtgtctcaccccttttcatgtcatggcattcacagaaggtatttcaatggggccttrgaggtagatggagaagattgcttgtagtcagagtccactggccctgaggctcctgctgccccagaacattactagctgccccaagaattgaggggaacga

SEQ ID NO: 347300 - DNA, 201 bp, Homo sapiens
aaagaaaactaaactaaaatgttagaatattttaaagatttgttggtctgtacctctcctgttgaataaaattatattttatggttatctgtagatttaatttgtctatattctatttcagtggcatgactaaaactgaaccgcctcttcttcaatcagaattttttcctgctctttagatctttgtaaaagctaataatt

SEQ ID NO: 347301 - DNA, 201 bp, Homo sapiens
aaaagaaaactaaactaaaatgttagaatattttaaagatttgttggtctgtacctctcctgttgaataaaattatattttatggttatctgtagatttaatttgtctatattctatttcagtggcatgactaaaactgaaccgcctcttcttcaatcagaattttttcctgctctttagatctttgtaaaagctaataat

SEQ ID NO: 347302 - DNA, 201 bp, Homo sapiens; identical to SEQ ID NO: 73722

SEQ ID NO: 347303 - DNA, 201 bp, Homo sapiens
ttatacaatatgaaattaaaactatagtttttaaaacattttaacattggggcaaaatgtttatacttttgcttggtataatttgatacactttttatttrttgtgatttgtcttgaattctgacttgcctgaattactaagcaagtcagaattattgtaaggcaaaatattttataagataacctgggcttttacagtgt

SEQ ID NO: 347304 - DNA, 201 bp, Homo sapiens
gaaaagaaaactaaactaaaatgttagaatattttaaagatttgttggtctgtacctctcctgttgaataaaattatattttatggttatctgtagatttaatttgtctatattctatttcagtggcatgactaaaactgaaccgcctcttcttcaatcagaattttttcctgctctttagatctttgtaaaagctaataa

SEQ ID NO: 347305 - DNA, 201 bp, Homo sapiens
gggggcggggtggcggactagaggcttttaagaggaaaagattgtgtttgatagagctagaggagaaaggcattaaagtgaaaggggaaggaggttgagcrgagaatgagatttatacatttaatattctagagacactcattctggcctagtccaggatttatccatggtagtaattcgtttaaattgactacaggtgaa

SEQ ID NO: 347306 - DNA, 201 bp, Homo sapiens
tttcttctttttttacttttttatccattgctttaattgaatatttataagagggcactgtgctggagatgtgaggataaattctcaagaaaattttaaartgtgggtagagagtaatagatgcttacatctgatattatgcacgggtaggttttaaagtttcattgatgagtctaaaataaatctagagttttggttgtt

SEQ ID NO: 347307 - DNA, 201 bp, Homo sapiens
tgtatgtgaaatatgggtccacactagatctggcttcatgcttaactattaagaattgctaaattgctgatgcatttctttacagtatttcttattttacyttcatcaagactaagagctttaactatgaaatgttaattagccaaatttctctcattctcaggttttaaagaatctattgtctaaactcttctgtgttct

SEQ ID NO: 347308 - DNA, 201 bp, Homo sapiens
ccttgcaggcaagccattattttcttctttttttacttttttatccattgctttaattgaatatttataagagggcactgtgctggagatgtgaggataarttctcaagaaaattttaaaatgtgggtagagagtaatagatgcttacatctgatattatgcacgggtaggttttaaagtttcattgatgagtctaaaata

SEQ ID NO: 347309 - DNA, 201 bp, Homo sapiens
aaataaatctagagttttggttgtttacttcccttgccagggtcctgtattaataggaagttcacatggtggtgtcaacattgaagatgttgctgctgagwctcctgaagcaataattaaagaacctattgatattgaagaaggcatcaaaaaggaacaagctctccaggtatgttgtattcctgaaaaatttctagctta

SEQ ID NO: 347310 - DNA, 201 bp, Homo sapiens
ctcgaactccagacctcatatgatcctcccacctcggccttccaaagtgctgggattacaagcatgagcccccaggcttggccagactcttgaatttaccsagttaatgtgatgtcatttcacaaaaataataaaagtcttatgtccttctttgggaaagtacttactagtaaacaaaatttaactctagcttggagacag

SEQ ID NO: 347311 - DNA, 201 bp, Homo sapiens; identical to SEQ ID NO: 73720

SEQ ID NO: 347312 - DNA, 201 bp, Homo sapiens
taatcattaggaaacactgattaactgcaagtcttcatgattctgtcatattaagaaacacctgtaggtttgcttcaaataaaggcatatataccaaggamttacagacaaaattaagaatgtcaatttaagttaataaaaatctcccaatatgatttgggttcatggcttttgtttgcttgttttgaggtaaacacagta

SEQ ID NO: 347313 - DNA, 201 bp, Homo sapiens
agctgggactacaggcccatgccaccaccatgcctggctaattctttttaaaattttttgtagagacgggccctcaatatgttgcctaggctcatccaackcatgtactcaagccatcctcttacctcagctcctgaagtgctgggattaaaggtgtgagccatcacacccagcctatttttttttttttatttaaagaaa

SEQ ID NO: 347314 - DNA, 201 bp, Homo sapiens
aataatttttgatttcagaaaataagcttacatttttaaagatttagcatgaaaaccatgagctgatgtactagctatacactgcagtttctttttagcartattttaaatcccaccaattttacgtagattagcataaataatctctcttctatgtacatttaattaataggctttaaatatgatttggtgaatactttg

SEQ ID NO: 347315 - DNA, 201 bp, Homo sapiens
atccaagaatttataacacagataatgatctgtaaacacaaagcaataacattggaaattaatataaaatattatatttttaaattttttgagacacggtyttgctttgttgcccaggctggagtacgctgacacaatcacagctcactgcagccttaaacttctgggctcaagcgatcctccctcttcagcctcttgagt

SEQ ID NO: 347316 - DNA, 201 bp, Homo sapiens
ttggaggtagatggagaagattgcttgtagtcagagtccactggccctgaggctcctgctgccccagaacattactagctgccccaagaattgaggggaaygatattttggtgtatctacaatgcattttaatctcattgtttgagaagccctggtatagctgagtgaactaaacctctttttttaaaaaaagagagatta

SEQ ID NO: 347317 - DNA, 201 bp, Homo sapiens
tctcttaatcaaaaaataatttttgatttcagaaaataagcttacatttttaaagatttagcatgaaaaccatgagctgatgtactagctatacactgcaktttctttttagcagtattttaaatcccaccaattttacgtagattagcataaataatctctcttctatgtacatttaattaataggctttaaatatgatt

SEQ ID NO: 347318 - DNA, 201 bp, Homo sapiens
gaatctgggaggtggaggttgcagtgagccgaggttgtgctactgcactcccgtctgggcgacagagtaagaatccgtttcaaaaaaaaaaaaaaaaaaaactatacatatggccaacacacatgtgattaaaaagctcatcactgatctttagagaaaagcaaatcaaaaccacaatgagataccatctcatgccactca

SEQ ID NO: 347319 - DNA, 201 bp, Homo sapiens
aaaacgccaaaagcaattgcaacaaaagcaaaaattgacaaatgggatctaattaagctaaagagcttctgcacagcaaaggaaactatcatcatagtgarcacacaacctgcagaatgggagtagatttttgcaatctatccttccgacaaaggtctaatatccaaagtttatgagaaacttaaaacaaattttcaagaa

SEQ ID NO: 347320 - DNA, 201 bp, Homo sapiens
gaatgcctgacacttaggtaatcaataaatactaaatgaataaatattaaatgaatttaatagttgcccatgtttattagcagattcctttattgataacrgccttaatagcttttgtcaatttgaattaatctcttaatcaaaaaataatttttgatttcagaaaataagcttacatttttaaagatttagcatgaaaac

SEQ ID NO: 347321 - DNA, 201 bp, Homo sapiens
agagggccatacaggagaagctgggtgattcttagggcctggtttgtgtaaaacgttgattacattgatggggattgttttgcagtgagcaggtctatgcrtatgtacccccagaggccaggggatctgagaggccagagaaagaggctggcaaatccagttctcagaaagaaactaaatttatatagggacttagaaaca

SEQ ID NO: 347322 - DNA, 201 bp, Homo sapiens
agggaaatggtgaaggaaaatcttagctgtttatgtgcttataaggagaggtccgtgcttccccctccatttttttgtcatgaaaaatatggaaccaaagrggaacaaaaagtagagtgctagaatgtaaactccttgagagcagagtttctttttcttttctttttttttttttttttgagacggagtttcattcttatt

SEQ ID NO: 347323 - DNA, 201 bp, Homo sapiens
attattattattattatgagcacccataatgccagtgacgtgggagtcacttacattggcattaggaagctgaagtcctgtttttagttggaatataattrtggggaagggaattctactactaccactctaactactctggagcttaaaggatggcagttgtgatgattcttcagggaaatggtgaaggaaaatcttagc

SEQ ID NO: 347324 - DNA, 201 bp, Homo sapiens
aattgggaaggatttttggtttggtggaaaagatgagattggttttagatccgctgaatttggcattgaggtagaactgccctgtagatcattggagatatgatagtaaagctgaaatctaaaataaggaatagagatgatgaggaaataattaaaatgacagtggtaacagtgatatttagctgataggctagcttttag

SEQ ID NO: 347325 - DNA, 201 bp, Homo sapiens
aaattgggaaggatttttggtttggtggaaaagatgagattggttttagatccgctgaatttggcattgaggtagaactgccctgtagatcattggagatatgatagtaaagctgaaatctaaaataaggaatagagatgatgaggaaataattaaaatgacagtggtaacagtgatatttagctgataggctagctttta

SEQ ID NO: 347326 - DNA, 201 bp, Homo sapiens
aattccagagttttgggtttttttctgaagtaactcttcatacatgtcatagtatgaattgatttagggccctcccgcccctacctttttttttttttttyatttttattgaagttgttcatactttcagcctaggggtagtgagttctgtgagtttgcttcccgatagaagtgactttttgaccttgaacttccttctta

SEQ ID NO: 347327 - DNA, 201 bp, Homo sapiens
ggtcaggctagtctcaaacttctgacctcagatgatctgcctgcctcggcctcgcaaagtgctgggattacaggcgtgagctaccatgcctggcctgtttkttttttttttttgtaatgggggtctcattatgtcactcaggctggagtgcaggggcacgatcacggttcactgcagcctggacctcctgggctcaagtga

SEQ ID NO: 347328 - DNA, 201 bp, Homo sapiens
ataaaaagttttgtttaaccatttagtaatggtagctgctatttcagtaatgtttgactataaatgactcatgtttatcatttaagtgataaactacaagsctttttatttatagtaatgttgattagacatatgcaaactacctataataaaaagacatattgatttcagcttgcacagaagatgggatttccacctaat

SEQ ID NO: 347329 - DNA, 201 bp, Homo sapiens
ctaatattgtggaatcagcagcagaaaacatggtcaagctttacagcctttttctgaaatacgatgcaaccatgatagaaataaatccaatggtggaagaytcagatggagctggtaaagtatcttcttttgtctaacatgattatgcatttatttctctaatatgcttccctaaggaagttaaatcatagaagttaaagt

SEQ ID NO: 347330 - DNA, 201 bp, Homo sapiens
ttcagatggagctggtaaagtatcttcttttgtctaacatgattatgcatttatttctctaatatgcttccctaaggaagttaaatcatagaagttaaagyagttaaacttctacctatgtagaagctttttaaaaaaaaatcagatagaatgaatatgaacaaatattaaacccattaaaacaaaacactattagaccca

SEQ ID NO: 347331 - DNA, 201 bp, Homo sapiens
acaaattaaaaagtttcagcagatatccaagaatttataacacagataatgatctgtaaacacaaagcaataacattggaaattaatataaaatattatawttttaaattttttgagacacggttttgctttgttgcccaggctggagtacgctgacacaatcacagctcactgcagccttaaacttctgggctcaagcga

SEQ ID NO: 347332 - DNA, 201 bp, Homo sapiens
taggttggcagtaaagcttaggcagtatggacactatggaactggaatctaggccaatgaatggcaagttacttgatctctctgaatctctttcttatctrtaaaatgggcataatatctatcttttgaagattttgaataaaaagttttgtttaaccatttagtaatggtagctgctatttcagtaatgtttgactataa

SEQ ID NO: 347333 - DNA, 201 bp, Homo sapiens
agagtctaaactgcaggtgatgaggaatggtgaagattctggataaatttgaagatagaaccagtatgatttcctggctgaatggaagtggggtttgagaragacaagttttttaaacactctcttggctgactacgcatagggtcatcatctggtttaaatagcatgtatttctggtgaaggcttacatcagtaattttc

SEQ ID NO: 347334 - DNA, 201 bp, Homo sapiens
tgtgcccagcttggttgctggcttttaatattgaagtgacactaaatcaaggaattgagctacctaggtcaaatgttaccaaggattttagcttgctaaakggatcagaaataagttgctattatatatgattgatttgtaagactagtagttctcataactgtagggttcttaagaatcaactgagtgacttgttatgaa

SEQ ID NO: 347335 - DNA, 201 bp, Homo sapiens
tttagggtatgtcccacaacttagtggattttaaaattcatgtgaaataattctctgtgtgttttgtctcagctttgtatagtttcattgtttttaaaggkattgctttttttttaaaaaaaaaaacacaaccttttgttttttattttgtatttacatgattccaaagtggaaagtatagaacaaggtattatcagggaa

SEQ ID NO: 347336 - DNA, 201 bp, Homo sapiens
ggcagtatggacactatggaactggaatctaggccaatgaatggcaagttacttgatctctctgaatctctttcttatctataaaatgggcataatatctrtcttttgaagattttgaataaaaagttttgtttaaccatttagtaatggtagctgctatttcagtaatgtttgactataaatgactcatgtttatcattt

SEQ ID NO: 347337 - DNA, 201 bp, Homo sapiens
aaaggtaagggcagggcttgatatatttttatatcatgtaaatatataaaataaatacttataaaaatgtatatttttatgttttagaatttagaattcayatatatgtcttttaatatatattttgagtctttttttgctatcatatcttgaagatttttgcaattcaccaagagactcttctgaaacactcattttaat

SEQ ID NO: 347338 - DNA, 201 bp, Homo sapiens
tctagtaagtttgactcatacactgtgcattttgggagctatggtgtaaagactgaattctgttatcttcctctgaaagaatattgacttttggtattaakggtacttaacttagctgggctccaaactttttctcctgtgttgggcagcagctgaaattgcttgcttctttcaaccctgtatcttttcaggagctgcaag

SEQ ID NO: 347339 - DNA, 201 bp, Homo sapiens
ttttgactggttttgaacgctataaaaataaatcatgtaagtatatattcttgtttctggcttctttctctctacattatgtttgtgagattaatccatcratgtgtgagccatagtactttttttctttttatttctctgtagtatactattatatacatataccacagtttatccattctcctgttgatgggcaatcag

SEQ ID NO: 347340 - DNA, 201 bp, Homo sapiens
aacctaattgttaaactcttaatctcagcctcagagtcagtcttccactctttgtgatgctggaagtgggctgaggcgctgaaaatgacattctcctttgkcaacgggctattggtcaggctctgctactcagcacgggccaggagggaggcttcaaggtgcaaggccagtggaagaacttgcttcttcctttctgcttcc

SEQ ID NO: 347341 - DNA, 201 bp, Homo sapiens
gtggagggtgcagtgagccaagatcacatcactgcacttcagcctgggcaacaagagtaaaactccgtctaaaaaaaaagaaaaaaaaggacattgccagmgtcttggcgatttggcccgacgcgctccgctttcgctacagcatggtggcctactggagacaggctggactcagctacatccgatactcccagatctgtg

SEQ ID NO: 347342 - DNA, 201 bp, Homo sapiens
accaccacacccagctaatttttgtatttttagtagagacagggttttaccatgttggtcaggctggtctcgagctgctaaccttaggtcatccgcctgcytcgacctcccagtgtgctgggattacaggtgtgagccaccgtgccaagccgtaatctgcatttttagctttttattttcaactgactttagacttaaagt

SEQ ID NO: 347343 - DNA, 201 bp, Homo sapiens
tctccagtggctggggctataggtgcgcgccaacacgccgagctaatttttgtatttttagtagagatgagctttcaccatgttggccaggatggtctcgrtctcttgacattgtgatccgcctgcctcagcctcccaaagtgctgggattacaggtgtgagccaccgtgcccggcctatttttatttatttttattttgt

SEQ ID NO: 347344 - DNA, 201 bp, Homo sapiens
tgctactgtgcacccaggcctggagttgccatgtaagatgagctctgtgtttttattttatttgtaaattgaagaaagtttttttttgttggttttgttgkttttgttgttgttgttttgttttgttttgttttgtttttgagatggagtctcactctgtcacccaggctagagtgcagtggcgtgatcttggctgactgc

SEQ ID NO: 347345 - DNA, 201 bp, Homo sapiens
gcctgaacctgggaggcggaggttgcagtgaactgagatcacaccactgcagtccagcctgggcgacagagtgagacttcatctcaaaaggtcaggagatsaagaccatcctggctaacatggtgaaaccccgtctctactaaaaatacaaaaaattagccgggcgaggtggcgggcgcctgtagtcccagctactcggga

SEQ ID NO: 347346 - DNA, 201 bp, Homo sapiens
tgcattttggggttcccagtacagttcctgacatggaggaggcttcagcatttgttgaaaaaataataaggatgtcgcccgggctggagtgcagtggtgcratctcagcttactgcagcctctgcctcccaggttcgagcaattctcctgcctcagcctcccaaagtgctgggattacaggcggagccaccgcgcccggcc

SEQ ID NO: 347347 - DNA, 201 bp, Homo sapiens
ttcgaggctgcagtgagctaagattgtaccactgcactctagcctgggtgacagggtgagaccatttcttaataagtgagtgagtgagtaagtgaaagaartgaatgaatgaatgaatgaatgaatgcagagtctacattaggtttgattatccttggcaaaagctagcaatccaaatttataatcattggaaattgcctt

SEQ ID NO: 347348 - DNA, 201 bp, Homo sapiens
ccctttttaaaggaagagcctgtctgggaatggtggcgcatgcctgtaatcccagtgctttgataggctgaggcgggagcatcacttgagcccgggagttygaggctgcagtgagctaagattgtaccactgcactctagcctgggtgacagggtgagaccatttcttaataagtgagtgagtgagtaagtgaaagaaatg

SEQ ID NO: 347349 - DNA, 201 bp, Homo sapiens
ccccattacttccagctgtggtgtggtttctctttttgcgagcctggctagtttaatgaatgcgtataccatgcctgtttcctcatctcaggttagttgtttgttgttgttgttgttgttgttgttttccaatatggaacacttcacgaatttgcgtgtcatccttgcacaggggccatgctaatcttctctgtatcattc

SEQ ID NO: 347350 - DNA, 201 bp, Homo sapiens
cgatcatagctttaaaagacactaaaaacagattttttttctacgtatctttagcaatttgcttatgttttctaaaatgaatgttttaagaattatttttwaaaaattcttgacgtaggagtgctttttccagtgatgttaattgataaatattgaaaaatctaaaacttgtgactaaaattctagcatatttgatgacta

SEQ ID NO: 347351 - DNA, 201 bp, Homo sapiens
ctgaattttattctctttcgcttcccccactactagcctaataaatatttcagaataataacaaagtttaaagaaagaatacttagcctgttcttctgaartagtctttgtttttcttctctgtttactaacctccttttgaggataaaatcttatttcctttctttatcctgtagtttcctttgtacactcatagccttt

SEQ ID NO: 347352 - DNA, 201 bp, Homo sapiens
aggcgtgagccatcatgcccagccactcatctctttttaatgtcagtttgttgatatggtttgacatttcattgaactagaaatagacaaaggtcaaaatrggtaaggaatgaattttctcatagttcttttttgctgtttactttagcagaggaaggtttggttaattggctcccaggaaagagtaaatgtgtgcacatg

SEQ ID NO: 347353 - DNA, 201 bp, Homo sapiens
tgtgtgtcataggaaaagagtgcattacttctagacatagtggtatgtttacattgcaactttcacagttatcatcacattgctttctgtgactctctttrataggcttagccaagaaaattctgaaaaaattatttcttgtatatgtaataaattgcacctcccaaattaaatatgcctcacatctgtgtgtcagttatc

SEQ ID NO: 347354 - DNA, 201 bp, Homo sapiens
caatttttcttttctttttttttttttgttttgagacgagtctctctctgtcgtccaggctggagtgcagtggttcacccagttcactgcaagctccaccycccgggttcacaccattctcctgccgcagcctcccaagtagctgggactacaggtgcctgccaccacacctggctaatttttttttttttgtatttttag

SEQ ID NO: 347355 - DNA, 201 bp, Homo sapiens
ctcatgaattttttgatgtcccagcacatgtaaaagttatgtttatactgtagtctgttaaatgctcaatatcattgtgtctaaaaaccaatgtacgtacmttaatttaaaaatactttactgctaaaaaatagtagcagttggccaggcgcaatggctcaggcctgtaatcccagcactttgggaggctgaggcgggcag

SEQ ID NO: 347356 - DNA, 201 bp, Homo sapiens
tgacgtaggagtgctttttccagtgatgttaattgataaatattgaaaaatctaaaacttgtgactaaaattctagcatatttgatgactagtttggatcrttataagagggaaaacttgaataccagcatccaggtgttattttctgataacttttcagtattttctatttttccttcaaatctagattccaaattacag

SEQ ID NO: 347357 - DNA, 201 bp, Homo sapiens
tcccccattacttccagctgtggtgtggtttctctttttgcgagcctggctagtttaatgaatgcgtataccatgcctgtttcctcatctcaggttagttgtttgttgttgttgttgttgttgttgttttccaatatggaacacttcacgaatttgcgtgtcatccttgcacaggggccatgctaatcttctctgtatcat

SEQ ID NO: 347358 - DNA, 201 bp, Homo sapiens
atccagaccttcatgtcctgatcagtgtacattccccagaccatattagtaataagaatggcactgagtgctaccagtgtgctggatgctttatatgtttygtttttgtttgttttggttttttgagacggagtctcactctgttgcccaggctggagtgcagtggtgtgatcttggctcactgcagcctccacctcccgg

SEQ ID NO: 347359 - DNA, 201 bp, Homo sapiens
gctggagtgcagtggcgcgatctcggctcactgcaagctctgcctcccaggttcacgccattctcctgcctcagcctcccgagtagctgggactacaggcrcccgccaccacgcccggctaattttttgtgtttttagtagagacggggtttcactgtgttagccaggatggtctcgatctcctgacctcgtgatctgccc

SEQ ID NO: 347360 - DNA, 201 bp, Homo sapiens
tcttcagcgagtaagaaatgaaatccagagtcctgcaagtcctggccccttggctccctgacctcctgtctctctctttcccctcactctgtctgctttcytttttttttttttttttttttttttttgacggagtcttgctctgtcacccaggctggagtgcagtggcatgatcttggctcactgcaacctccacctccc

SEQ ID NO: 347361 - DNA, 201 bp, Homo sapiens
ggctggagtgcagtggcatgatcttggctcactgcaacctctgcctcccaggttcaagcaattctcctgcctcagcctgctgagtagctgggattacagaygcccgccaccacacccggctaatttttgtatttttagtagagatggggtttcaccctgttggccaggctggtctcaaactcctgacctcaggggacccta

SEQ ID NO: 347362 - DNA, 201 bp, Homo sapiens
aatgtagaagtagtatctggttctagcagagtaggggctcatagtggccctctgaatagttgtttactaagtggcctcttttctttttctttttcttttcyttttttttttttttttttttttgagacggagtctcgctctgtcacccaggctggagtgcagtggcgagatctcggctcactgcaagctccgcctcccggg

SEQ ID NO: 347363 - DNA, 201 bp, Homo sapiens
tgtctaagtcaggttattttgccactttgtttatgagcatttccccatcatcaatgattcttttaaaagcaaaccttttttttttcgtttgagacagtctygctctgtcacccaggctggagtgcaatggtgtggtcttggctcactgcaacctccacctcccgggtttaagtgattctcatgcctcagcctcccgagtag

SEQ ID NO: 347364 - DNA, 201 bp, Homo sapiens
tggggtgcgcaagggcacggacctcggagctctccccgcttgcgccgagtttctcagcgccttccccacccaaaccggggtctcgcagtcggaagcactcmgagtgcagccccgcgcggggccggtcgtaaccgcgccgcgggccggacgatgcccaagaagctgctgctgttgcccccgccctccgcgtcctcggctttc

SEQ ID NO: 347365 - DNA, 201 bp, Homo sapiens; identical to SEQ ID NO: 73745

SEQ ID NO: 347366 - DNA, 201 bp, Homo sapiens
ccacccgcctcagcctcccaaagtgctgggattacagacatgaaccaccacacccggccttgactttgaaaactttgacacatttgaagactgacattttrccgattactttgtcgaatgtccctcaatttgggtttcaccgtgatggctctttcactatgatgagattcaggtacctcggaaggaagctgtgttcctgtt

SEQ ID NO: 347367 - DNA, 201 bp, Homo sapiens
gatgcgtgggatttcttcctgtcagtttcaccatttccctttgtccttctagggcccagtcctatgcggagagactgcgtctgggtttggccgtcattcayggggaagctcagtgcacggaactggacatggacgatggtcgtcactccccgcctatggtcaaaaatgctactgtgcacccaggcctggagttgccatgta

SEQ ID NO: 347368 - DNA, 201 bp, Homo sapiens
tcatcatgtggattctaggttctttaaaccagctcacctaatcatgcttgagcgttagggccgaaagatgaactgaagatgagctgttccgttttcacaastaagaatgggtgtccccgtgcagactcgttctgcatgttgacatactttttttcccagctctaaatatctgctggctagtgggtcatgagtcctttgcag

SEQ ID NO: 347369 - DNA, 201 bp, Homo sapiens
atcctaagaaatttctggttgtgagggtccatgccctgtggtattgagggaaggggctgcgttgccctcattgaggatatactaattcacattttctccarcagttttggttttgtattgtttgcctcctggtgactggagtcttttttgcctggtggttttgtttgactctccatcttttatttttagacggagtctcac

SEQ ID NO: 347370 - DNA, 201 bp, Homo sapiens; identical to SEQ ID NO: 73741

SEQ ID NO: 347371 - DNA, 201 bp, Homo sapiens
tcagtgggttataattcattgtcgtcacaggaataccttaaatattgcaggttcagttctgcaccattgcagtaggtgaatattataataaagtgagtctyatgaattttttgatgtcccagcacatgtaaaagttatgtttatactgtagtctgttaaatgctcaatatcattgtgtctaaaaaccaatgtacgtacctt

SEQ ID NO: 347372 - DNA, 201 bp, Homo sapiens
tccgttttcacaagtaagaatgggtgtccccgtgcagactcgttctgcatgttgacatactttttttcccagctctaaatatctgctggctagtgggtcaygagtcctttgcagtagcacactttatttcagttttcttctcatgtcacagtctatttgaaaaaaaaataaatggaacgctggctatgtgggattcaccag

SEQ ID NO: 347373 - DNA, 201 bp, Homo sapiens
gttagtgtcctttgtgatacgaagttgaattttataaaattcttggctttgatatcacatggtaaccaagagtgctcaatataagtatttaacacgtgcartctagagtgatgctgggggtagtaaagactgaacttgacaaacaaaggatcatcagtgtgcaagtgtcttccagggaagggacaaaagaagcatgaagaa

SEQ ID NO: 347374 - DNA, 201 bp, Homo sapiens
gggcggtggccttgcctctggctctgaggcggcggcgccgggcgctgcgaaggctcggccgctgtagtcagtggtgtggggtgcgcaagggcacggacctmggagctctccccgcttgcgccgagtttctcagcgccttccccacccaaaccggggtctcgcagtcggaagcactcagagtgcagccccgcgcggggccgg

SEQ ID NO: 347375 - DNA, 201 bp, Homo sapiens
cagcttggagaacagacttcagtaacagcgtttgttttccatcactgtgtgactaggtggtggtgacgaatactgtccctcatgaggttcagaagctgcartgtcccaagataaagactgtggatatcagtttgattctttctgaagccattcggagaatccacaatggagagtccatggcctaccttttccgaaacatca

SEQ ID NO: 347376 - DNA, 201 bp, Homo sapiens
gctttatctccagcctccagacagcacacatgatcgctgagttgctcagctttcctctgggaaaacaaagttccttcaagttctcagagaaaggaaagcartgaggctatgagcatttttcaagcaatggtttttttttttgttttttttttgaaatggagtttcattctgtcacctaggctggagtgcaatggcgcgatc

SEQ ID NO: 347377 - DNA, 201 bp, Homo sapiens
gcttcagtatatccaggaagaagtgaggaaccaccagcaaacaccccattgtcctcaaaagagatcttatttagtttttctctggtatcagatttcgataytggaaggcacatcaaatgagctctcccttaagtcacaatgcctgaggcagcagacagggtcagctttagtcgtggacgatcatagctttaaaagacacta

SEQ ID NO: 347378 - DNA, 201 bp, Homo sapiens
cctgcttcagtatatccaggaagaagtgaggaaccaccagcaaacaccccattgtcctcaaaagagatcttatttagtttttctctggtatcagatttcgwtattggaaggcacatcaaatgagctctcccttaagtcacaatgcctgaggcagcagacagggtcagctttagtcgtggacgatcatagctttaaaagaca

SEQ ID NO: 347379 - DNA, 201 bp, Homo sapiens
tcgaggctgcagtgagctaagattgtaccactgcactctagcctgggtgacagggtgagaccatttcttaataagtgagtgagtgagtaagtgaaagaaawgaatgaatgaatgaatgaatgaatgcagagtctacattaggtttgattatccttggcaaaagctagcaatccaaatttataatcattggaaattgccttt

SEQ ID NO: 347380 - DNA, 201 bp, Homo sapiens
tttttattttattttagaggcggggtctctgtctgctgtccaggctggagtacagtgacaggatctccctctctcacccagacctgcagtgcagtggtgcratcactgctcactgcagcctctaccacctgggctcaggtgatcctcccacctcagcctcctgagtagcttggaagctgggaccacaggtacgtgccacca

SEQ ID NO: 347381 - DNA, 201 bp, Homo sapiens
tttttaaaaatcagtcaggccaggcacggtggctcacgcctgtaatcccagcactttgggaggccaaggagggcgaatcacgaggtcagcctggccaacayggtgaaaccccgtctctactaaaattacaaaaattagccgagcatggtggcgggcacctgtaatcccaactactcaggaggctgaggcaggagaatggct

SEQ ID NO: 347382 - DNA, 201 bp, Homo sapiens
gaatcactatctatggcatctatagtcttataaaatgtatttcttttttttttttgatacagagtcttgctctgtcacccaggctggagtgcagtggcgcratctcggctcagtgcaacctctgctttccaggttcaggtgattctcgtgcctcattctctcgagtttctgggattgcaggtgtgcaccaccacgcccagc

SEQ ID NO: 347383 - DNA, 201 bp, Homo sapiens
gagacattttttgtttttgtttttgttttttttaatcatagaatgcttgcaatagttaagaaaaatccaaattacgagggtgaaattggaagttccaggarttgaacctggaagtggaaaacattgtcagaataaaaggatgtctttgaaatcgctcactcccaaatgcactctgccttagagagaagtgtaaacataaat

SEQ ID NO: 347384 - DNA, 201 bp, Homo sapiens
aagttatgtttatactgtagtctgttaaatgctcaatatcattgtgtctaaaaaccaatgtacgtaccttaatttaaaaatactttactgctaaaaaatastagcagttggccaggcgcaatggctcaggcctgtaatcccagcactttgggaggctgaggcgggcagatcacgaggtcaggagatcgagaccgtcctgac

SEQ ID NO: 347385 - DNA, 201 bp, Homo sapiens
tgagccctgcatcagtctcctcagggagacattttttgtttttgtttttgttttttttaatcatagaatgcttgcaatagttaagaaaaatccaaattacragggtgaaattggaagttccaggagttgaacctggaagtggaaaacattgtcagaataaaaggatgtctttgaaatcgctcactcccaaatgcactctgc

SEQ ID NO: 347386 - DNA, 201 bp, Homo sapiens
gaggattgtttgcttccagtttgaaatgagccggggcaacatagcaagatcccctctgagaaaaaaaagtgtaaaacatctcattaatttttatatcaggytgggcgtggtggctcaagcttgtaatcccagcactttgggaggctgaggcgggtggatcacctgaggtcaggagttcgagaccagcctgaccaacgtgga

SEQ ID NO: 347387 - DNA, 201 bp, Homo sapiens
ttaaacttcatgaaaaagccttgctctggattaggctttggcttaagggaattttattttgtggctggtttgatctatccagatcactcaaacttctctgtatcagtaataaggctgttttattttctcatcatttgtgtgttccctggagtcacatttttaatgtccttcatgaacttttcctttgcattcacagcctgg

SEQ ID NO: 347388 - DNA, 201 bp, Homo sapiens
gtttcaccatttccctttgtccttctagggcccagtcctatgcggagagactgcgtctgggtttggccgtcattcacggggaagctcagtgcacggaactkgacatggacgatggtcgtcactccccgcctatggtcaaaaatgctactgtgcacccaggcctggagttgccatgtaagatgagctctgtgtttttatttt

SEQ ID NO: 347389 - DNA, 201 bp, Homo sapiens
cttaaacttcatgaaaaagccttgctctggattaggctttggcttaagggaattttattttgtggctggtttgatctatccagatcactcaaacttctctgtatcagtaataaggctgttttattttctcatcatttgtgtgttccctggagtcacatttttaatgtccttcatgaacttttcctttgcattcacagcctg

SEQ ID NO: 347390 - DNA, 201 bp, Homo sapiens
tgttgacatactttttttcccagctctaaatatctgctggctagtgggtcatgagtcctttgcagtagcacactttatttcagttttcttctcatgtcacrgtctatttgaaaaaaaaataaatggaacgctggctatgtgggattcaccagaaacgtgagacaggaaaatgagtgttggcaatcctcagctccagccgta

SEQ ID NO: 347391 - DNA, 201 bp, Homo sapiens
gatcttggctcactgcagcctccgcctcttgggttcaagcagttctcctgtctcagcctcccaagtagctgtgacttcaggcacacaccaccacacccagmtaatttttgtatttttagtagagacagggttttaccatgttggtcaggctggtctcgagctgctaaccttaggtcatccgcctgcctcgacctcccagtg

SEQ ID NO: 347392 - DNA, 201 bp, Homo sapiens
aagcttcccctgccttcatgaggtgccattgtaagctagtgtgatggtaaaattcccacaacacccatctgggcagcccatgttaagttgataaagtcaasatcttttctagggttgatacatggaattaatccccaaatacaaactttgactgtttcagagatgtgaatacagctgtgatggagttgctcatcatggctt

SEQ ID NO: 347393 - DNA, 201 bp, Homo sapiens
ggagtacaagaccagctgggcaacatggtgagacctttctctatttaaaaaaaagaaagaaaagtagttggtaaaacaattaagaatgtcctacttagagrtaaagactacaagagctagccagggtgtacttgcaacattcttagggaacagataaagcagagactgccagccgatttcccttcgccctgctagttcaca

SEQ ID NO: 347394 - DNA, 201 bp, Homo sapiens
acggggtatgacacaggagacccaggcaaatgtgagggtgggttaactgtgctgtgaataggagtaacctcagatgaaagctagggcttactcagctacaraaagtcagaaagcttcccctgccttcatgaggtgccattgtaagctagtgtgatggtaaaattcccacaacacccatctgggcagcccatgttaagttga

SEQ ID NO: 347395 - DNA, 201 bp, Homo sapiens
cccccattacttccagctgtggtgtggtttctctttttgcgagcctggctagtttaatgaatgcgtataccatgcctgtttcctcatctcaggttagttgkttgttgttgttgttgttgttgttgttttccaatatggaacacttcacgaatttgcgtgtcatccttgcacaggggccatgctaatcttctctgtatcatt

SEQ ID NO: 347396 - DNA, 201 bp, Homo sapiens
tcagatgtcactgcagtaacggggtatgacacaggagacccaggcaaatgtgagggtgggttaactgtgctgtgaataggagtaacctcagatgaaagctrgggcttactcagctacaaaaagtcagaaagcttcccctgccttcatgaggtgccattgtaagctagtgtgatggtaaaattcccacaacacccatctggg

SEQ ID NO: 347397 - DNA, 201 bp, Homo sapiens
ggattcaccagaaacgtgagacaggaaaatgagtgttggcaatcctcagctccagccgtaatgtcacaggtgcttgactgcgcccgcctctgacagacacwcaaggtactgtcaggtgcttctgttgccatttctggatgctcgttctttgacccaggcacacagctctgattttccatcagaaatcctctgaaactgagt

SEQ ID NO: 347398 - DNA, 201 bp, Homo sapiens
ttgagccctgcatcagtctcctcagggagacattttttgtttttgtttttgttttttttaatcatagaatgcttgcaatagttaagaaaaatccaaattaygagggtgaaattggaagttccaggagttgaacctggaagtggaaaacattgtcagaataaaaggatgtctttgaaatcgctcactcccaaatgcactctg

SEQ ID NO: 347399 - DNA, 201 bp, Homo sapiens
cacctcaggttagtttttgcctgtccaaaatgctagagcagtaagggctggacttaatataggatgtggttttcttaggggaaagaaaagtagttggttgkctgggcatgatggctcaagctgtactcccagcactttgggaggccaaggcgggaggattgcctgagcccaggagtacaagaccagctgggcaacatggtg

SEQ ID NO: 347400 - DNA, 201 bp, Homo sapiens
atgttggccaggctggtcttgaactcctggcctcaagtgatccgcctgcctcagcctcctaaagtgctggctgggattataggcgtgagccactgcgcccrgccctattcagtcttctttagtttggagcagttcctcatggcctttatttgactttctttttttttttttttaatttgagacagggtcttgctgtgtcac

SEQ ID NO: 347401 - DNA, 201 bp, Homo sapiens
accttgcactcttaggtcacggaaacggcttctttccttaaacttcatgaaaaagccttgctctggattaggctttggcttaagggaattttattttgtgkctggtttgatctatccagatcactcaaacttctctgtatcagtaataaggctgttttattttctcatcatttgtgtgttccctggagtcacatttttaat

SEQ ID NO: 347402 - DNA, 201 bp, Homo sapiens
ttacaggtgtgaactactgcgcccggcctgttgtttgatattgtttgaacttttatcaattatcttagttagatcttcggagtaacttattgcagcttctrcatgagcacttactgcttcaccttgcactcttaggtcacggaaacggcttctttccttaaacttcatgaaaaagccttgctctggattaggctttggctt

SEQ ID NO: 347403 - DNA, 201 bp, Homo sapiens
ctcctgcctcagcttcccgagtagctgggattacaggcgtacaccaccacgcctggctaatttagtatttttagtagagatgaggtttcaccatgttggtygggctggtcacgaactcctgacctcaaatgatctaactgcctcagcctcccaaagtgctgggattacaggtgtgaactactgcgcccggcctgttgtttg

SEQ ID NO: 347404 - DNA, 201 bp, Homo sapiens
aagttgaaattactccttgttcaatgggctgcagaatggatgttgtattagcgggcatgaaaacatcactaatctccttgtgtatctccatcagagctgtygaaagactgttgtttgataaatatatttttttgagatggagtcttgctctgtcgcccaggctggagtgcaatggcacgatctcggcttagtgcaatcttc

SEQ ID NO: 347405 - DNA, 201 bp, Homo sapiens
gcatctagaatggtgcatcctttccagagattttcagtttactttgggtccttcagaggaatcactatctatggcatctatagtcttataaaatgtatttyttttttttttttgatacagagtcttgctctgtcacccaggctggagtgcagtggcgcgatctcggctcagtgcaacctctgctttccaggttcaggtgat

SEQ ID NO: 347406 - DNA, 201 bp, Homo sapiens
ggaggccctgaactcctcagagtcatccatgagggttagaatcaacttcttccaaactcctgttaatgttgatattttggcctcctcccatgaatcacgcrtgttcttcatggcatctagaatggtgcatcctttccagagattttcagtttactttgggtccttcagaggaatcactatctatggcatctatagtcttat

SEQ ID NO: 347407 - DNA, 201 bp, Homo sapiens
tctctctgtcgtccaggctggagtgcagtggttcacccagttcactgcaagctccaccccccgggttcacaccattctcctgccgcagcctcccaagtagytgggactacaggtgcctgccaccacacctggctaatttttttttttttgtatttttagtagagatggggtttcaccatgttagccaggatggtctcgatc

SEQ ID NO: 347408 - DNA, 201 bp, Homo sapiens
ccaatgtacgtaccttaatttaaaaatactttactgctaaaaaatagtagcagttggccaggcgcaatggctcaggcctgtaatcccagcactttgggagsctgaggcgggcagatcacgaggtcaggagatcgagaccgtcctgactaacactgtgaaatcgcgtctctactaaaaaaatgcaaaaaattagccgggcgt

SEQ ID NO: 347409 - DNA, 201 bp, Homo sapiens
gagcaaaagaataaacttgttttcttgttcaagacctaacccagggtcacacattgcatttagttgtcatttctttttagtctcatttaatctggaatggytgctttattctttgtttcttatgaccttgatacttttgaacagtgcgatcaagtgattttgtagactctcccttaattggggcttgtttgtgtcctcagg

SEQ ID NO: 347410 - DNA, 201 bp, Homo sapiens
gatgtgtgccaccacacccgcctaatttttgtattattagtagagacagggttttaccatgtcagccacgctggtctcgaactcctgacctcaggtgatcygcccgcctcggcctccaaaagtgctgggattacaggcgtgagccactgcgcccagccgaaagaactactttcaaaattgtagtcactgttctcaaaccct

SEQ ID NO: 347411 - DNA, 201 bp, Homo sapiens
cagaggcccctcgcctgattgaggagtcctccgtagacgaggtcaggctgcttctaaatcttgagccaagatttactgctgtgttttctgggaataataamatgattcagtcaatactaaattgcttaatctgtctatagcttttctagcttttgctggctagcagttcgttgggacagatacatgtttaggaatacagat

SEQ ID NO: 347412 - DNA, 201 bp, Homo sapiens
gcctgtgactgcagtgcttaatcacagtaccccgtcttcagtctgctggtaggaagcaggagttgagcatctagtttaggtccactgtagccatttacctrtaggggtgaactttgtaattttttgttttaaaatttcaggtttaactcacattatcactatggatcttcatcaaaaggaaatacaaggctttttcagctt

SEQ ID NO: 347413 - DNA, 201 bp, Homo sapiens
acttaaaatattttcaacttataatgatgcgtttatccagacataaccctgtcataagttgagagttatgttgagggtctgtatatgtctatttgcataayggtttgcttgggtactttaatttgacaccctaggagcatttctcttgaggctggaattcttcccttatgatctgagagttttgcatagcactggggctca

SEQ ID NO: 347414 - DNA, 201 bp, Homo sapiens
cccattacttccagctgtggtgtggtttctctttttgcgagcctggctagtttaatgaatgcgtataccatgcctgtttcctcatctcaggttagttgttkgttgttgttgttgttgttgttgttttccaatatggaacacttcacgaatttgcgtgtcatccttgcacaggggccatgctaatcttctctgtatcattcc

SEQ ID NO: 347415 - DNA, 201 bp, Homo sapiens
tttagagcaaaagaataaacttgttttcttgttcaagacctaacccagggtcacacattgcatttagttgtcatttctttttagtctcatttaatctggartggctgctttattctttgtttcttatgaccttgatacttttgaacagtgcgatcaagtgattttgtagactctcccttaattggggcttgtttgtgtcct

SEQ ID NO: 347416 - DNA, 201 bp, Homo sapiens
ccagagtatcattatcagactcaggaagctaacattgctgtaacactgtaatctacagaccttactcaggtttcaccagtggtcccagcagtgtcctttaragcaaaagaataaacttgttttcttgttcaagacctaacccagggtcacacattgcatttagttgtcatttctttttagtctcatttaatctggaatggc

SEQ ID NO: 347417 - DNA, 201 bp, Homo sapiens; identical to SEQ ID NO: 73752

SEQ ID NO: 347418 - DNA, 201 bp, Homo sapiens; identical to SEQ ID NO: 73753

SEQ ID NO: 347419 - DNA, 201 bp, Homo sapiens
cttgctgttctccaacaggtgctgggaggccctccttggcttaggaggacacttccaaagctggggcgccccaaggaggcaccagtggccagaatgtccaygcagagcacccaccccctgaaacctgaggccccacgtctgccacctgggatccccgagtccccgagctgtcagcggcgccacacactccctgccagtgag

SEQ ID NO: 347420 - DNA, 201 bp, Homo sapiens
gccccgcacagggtcagagggatgctccactctggtccagttatcctgtggggaggagacccttagtctcctgtccttggaggctgggtcccagagtatcrgaccatgtgtgcgctcaagaaagtgggggaaacagcagccctaacccccattttcctgtggggaacggggcatctgagtggacactcggggtgcagcaga

SEQ ID NO: 347421 - DNA, 201 bp, Homo sapiens
ttaatccatgagacatcgtccgtacaaagttagcgttacttttaaaaatgaagaccgtgatataaactggtaaaaaacgggcctgatgcgcctcgagcacyccctgggagcaggccctggggtggctccgcccagtgtcgttctacctgaggtctacttgtgtctccccccttgttctctgcccccagaccatggccaaag

SEQ ID NO: 347422 - DNA, 201 bp, Homo sapiens
gagggcctgcccccaccgagcagtccttccgctgggtctggatgcatccggagtggtcattctggacacagcagcctgagtcccgctccaggtctcgctckcgcagcaccagctgctcgatctgcccgtccttccggatgcagggtgagaacttggcccccaggtggatcaggtcaatctggggaagggaaagggagggga

SEQ ID NO: 347423 - DNA, 201 bp, Homo sapiens
ggagtgggcaaggacagaggcttttcccatctccccagggctcagtctcatctatgggggtctgggaaaggtggggcggggaggagggaacgtggtcactrcccttgaaggacagggcaagtggagctagtccgggaccagggtctggcaggggtaggagggagggcctgcccccaccgagcagtccttccgctgggtctg

SEQ ID NO: 347424 - DNA, 201 bp, Homo sapiens
attgatttaggggctgtctccaccccagttcctgctacaaaagaggccagatacatactctggggcctgcctccctggagatgaggatgagacccctgtcycttgctgttctccaacaggtgctgggaggccctccttggcttaggaggacacttccaaagctggggcgccccaaggaggcaccagtggccagaatgtcca

SEQ ID NO: 347425 - DNA, 201 bp, Homo sapiens
gaagggaaagggaggggagagagtgagtttgagccccagacctgggaggggtccatcactccacctctgccccgcagagtctcccctgatgaggggcctgygggtgggtgaggagcccacctgcccagctgggagtgacagggcacagggactcctggctcagatgatgtcccccagcctgggccctcaccgagctggggc

SEQ ID NO: 347426 - DNA, 201 bp, Homo sapiens
aggagggctgccttgtggccttcatcatcggctcgctctgggacaaggagagactcatgcaggtgaggacagggctgcgacgcccagctccagggaggccwctgaagacagaggtcagccagatggcggggaggggagcccaggggctgggatttcttcctccagaactggagagatgagtacaggccacaggcccctccc

SEQ ID NO: 347427 - DNA, 201 bp, Homo sapiens
aagggcagcagcccacacaccttgtccaagcagtgcacctgggagtgggcatatggtgctcagcgccccagaagcaggctgagtctgaggctccgacatgrgagggagtgcgtgagccccggccccagcaggctgccatgcccagcgtcctctcctccactactccaggcctgcctcgcctcacctgggagcagagtgttg

SEQ ID NO: 347428 - DNA, 201 bp, Homo sapiens
ctcacctcacccccaaatcccagtttcatgctacctgaggtctccgttaaagacaatgtactgccataaagaatattatttaatccatgagacatcgtccstacaaagttagcgttacttttaaaaatgaagaccgtgatataaactggtaaaaaacgggcctgatgcgcctcgagcactccctgggagcaggccctgggg

SEQ ID NO: 347429 - DNA, 201 bp, Homo sapiens
cacgttggccaggctggtcttgaactcctgacctcaggcgatccgcccacctcggcctcccaaagtgctgggattacaggcatgagccaccgtgccgggcyaactattagatatttagacagacaacctgtggcctctgtttgggggtttgtgcctgtgggggcagggtactttacaaatgtcatctcattcccgctgact

SEQ ID NO: 347430 - DNA, 201 bp, Homo sapiens
tagatttacacatttgatgaaagcatgcatcccaattggagaaacgttaaaatgtgggggatgtgcattcgaaatgaagaaatagggtatttagaatcaargctgttgtgggaaatcaaggctgggcagctgctcccagcctcctcactcaccatagccccttccgtgcgggaaggtagattaaatatccttggactcaat

SEQ ID NO: 347431 - DNA, 201 bp, Homo sapiens
ctcccaaagtgctgggattacaggcatgagccaccgtgccgggctaactattagatatttagacagacaacctgtggcctctgtttgggggtttgtgcctktgggggcagggtactttacaaatgtcatctcattcccgctgactgggagatgcccctgtgttcctctgcatgaatgtcccatgtcttgggcaggatacag

SEQ ID NO: 347432 - DNA, 201 bp, Homo sapiens
cagggcgggcagggctccctggttttgggggctaatgagccccttagaaagtgcaggagaagctggagcaggccccagcctcatgggagggtgccagcccstgtccccaggccagcggggaatgatggtggccgcaggttgaggggcagagagctgaggtctggacccctccaggcagttttccgaagcaacctgtcccac

SEQ ID NO: 347433 - DNA, 201 bp, Homo sapiens
gacacagcgctgagctttatcctcattgcagttgggacagggacctgggagggggtggggagggatgaggctgggccttgtgggtcctgagcctgagtccyggagggctactggagggtgtgcggggaacggggactctgagctgggtggaagggccaggtggatggggtggtcggctccctgggcatggcacaggatgtg

SEQ ID NO: 347434 - DNA, 201 bp, Homo sapiens
ggaaagcacctgctggggcccagcctggagacagggtctgctgccggctggtctcctggccggtgccccgggggggcggggctcagagctgctgctcctcyctgctgaccctctgtgttccgcccacccagatcctggtccacatcggcttcctgacggaggagtccggggacgtgttcagccctcgggtcctgaagggcg

SEQ ID NO: 347435 - DNA, 201 bp, Homo sapiens
cacctgctctgcctgcaggtcccacggccctgagaccctgggagacatcctggtgttccgcaggacatcaccactcctaatccccctcctcctgcccggtsttgggggatgtggcagggaagtgtatttgcatagcactgtctggccagggcctggctccttctctggtgtttctgctcaggggctgacacgtgttggctt

SEQ ID NO: 347436 - DNA, 201 bp, Homo sapiens
cctgggagacatcctggtgttccgcaggacatcaccactcctaatccccctcctcctgcccggtcttgggggatgtggcagggaagtgtatttgcatagcrctgtctggccagggcctggctccttctctggtgtttctgctcaggggctgacacgtgttggcttgtggaattgagccacgtctgcacgtggggtcccctc

SEQ ID NO: 347437 - DNA, 201 bp, Homo sapiens
atgttgtgaaacacaacagtcaaatcacctcccatgtgtgaccatccatttaagatcatgctgtcaccaaggactctgggtttgcctgagagtgtctgccratctctctgcctcctccccagatgaaaccttaacttgaactttgtgtatattattcctttgctttttttttttttttaatggagtttctctcttgttccc

SEQ ID NO: 347438 - DNA, 201 bp, Homo sapiens
tggaaccacataggagagcacttgcccaaggtcatacaattggactagaggtgtgtgtgcattcgtgtgtacatgtgcatgtgtgtgcatgtgtgtgtgcrtgtacgtggtcttaaactttttaatggggtatcatatacacaaatgaacaatccatgcaactaacaacccagagcaaggaccagaacgtgatcagtcccc

SEQ ID NO: 347439 - DNA, 201 bp, Homo sapiens
gggtttgcctgagagtgtctgccaatctctctgcctcctccccagatgaaaccttaacttgaactttgtgtatattattcctttgcttttttttttttttwaatggagtttctctcttgttccccaggctggagtgcagtggcgtgaccttggctcactgcagcctccgcctcccgggttcaagcgattctcctgcctcag

SEQ ID NO: 347440 - DNA, 201 bp, Homo sapiens
gtctttagtagcaacgttgagaatgaactaatagaggagtagtcttttgtgtgtgtcttttctctcagtagtacatgtgtgagactcactatcttgtatgyggttgtagtcacttgcactttttttttttttttttttttttttgctgtgtagccttccattgtgtgagtacaccaccatatttttatccatccgaccatt

SEQ ID NO: 347441 - DNA, 201 bp, Homo sapiens
ccaatctctctgcctcctccccagatgaaaccttaacttgaactttgtgtatattattcctttgctttttttttttttttaatggagtttctctcttgttscccaggctggagtgcagtggcgtgaccttggctcactgcagcctccgcctcccgggttcaagcgattctcctgcctcagctcctgagtagctgggattac

SEQ ID NO: 347442 - DNA, 201 bp, Homo sapiens
ttataggagcgtttctttcttttcccatttctctaatctccggaggcaattaggggaagacacagaaacagaagtcagggcgatagagactcagagctcartgagcccagccccctcattttacatgagggtaaattgaggccaagagaaggacggtgacctgctcacctgtctggtccgcagcagagcgggcctggagtc

SEQ ID NO: 347443 - DNA, 201 bp, Homo sapiens
ccgcagcagagcgggcctggagtccaggcttctgccccatcccccttgactgggcccatgccaccatgctgctgctgcagcctccactttgttgactttcrggggcctctgcagctctaggccagccctcatagtttttggcccatcatctgtttttcagcctgctcaatgggactgggagcgtggggtgtgggtagggag

SEQ ID NO: 347444 - DNA, 201 bp, Homo sapiens
ctggtttcaagctttgagaaaatggcatctactctatgtggtctcctaacttgctttcttcaaactcactctgtttcaaagactcatccatccatgttctkgcatgtagctttatttcattcattttcactgctatataatattccattgtgtgaatgtgccataattatgtatcagtttttcctgtctgcggatattttt

SEQ ID NO: 347445 - DNA, 201 bp, Homo sapiens
ggggtgtgggtagggagctgtgaccgtgaggtttctgggagggggctcaggcgataggcaggggcagaggaagcttggggtgggcttggagagtgggaccrgtagtgcagcaggcagggtgccaggcctaaggcgctccagggaacacagcgtcaccccaaaagccacgctgtgggctcagcaccactggggtgctgcgtc

SEQ ID NO: 347446 - DNA, 201 bp, Homo sapiens
agagccattcaatgactgccctggtcacacaggggtcagcgggcagaggccccagtccccttgcccctccccaggtggggagactgcagtgtgttctacayggtctcagggctccccagcagggctaaggttgggcgcccgggtggtaatattctcggcagtgcagctttccacagcttccccgtctctcttcctcactct

SEQ ID NO: 347447 - DNA, 201 bp, Homo sapiens
gcctggagcccagcaccctatggactgtgtggaggggcaatgtgaagccttcagatttaattaaaaaggaaggcgagaactcgctcccgcacactggcacrtgcagcgctaatgatcgggaatgattagaaaggaagccgtggaggactgcaggctggctgatgggatcttggtcgaagtgcctcattttcatgtaatttt

SEQ ID NO: 347448 - DNA, 201 bp, Homo sapiens
ccttcagatttaattaaaaaggaaggcgagaactcgctcccgcacactggcacgtgcagcgctaatgatcgggaatgattagaaaggaagccgtggaggaytgcaggctggctgatgggatcttggtcgaagtgcctcattttcatgtaattttcttcttcataaggtctcccctccccaggctgggagcagagggaagag

SEQ ID NO: 347449 - DNA, 201 bp, Homo sapiens
ctggaatgggagattaggatctctgccctgagaaaccaggggacagccccacggtttcaaaaactcggccacctcagcccccgagggagcgcctgggcagrcacctgtccaaggagtacactccttctcctcccacgggtgctcagagtgcctggaagtcgtgggtgaggaggagggcgtgccctattcctggggagtcct

SEQ ID NO: 347450 - DNA, 201 bp, Homo sapiens
tgaggaggagggcgtgccctattcctggggagtcctggccctccactgcatcctggtggatctgagccaccatgagggctgcaggtggcccagatggagcrtggctctgcaggccccgggtgtccagggtgatgcctggggtgggccttgggctcagggccctggggcaggtggccgtatggctgtaagaaatttccacag

SEQ ID NO: 347451 - DNA, 201 bp, Homo sapiens
ctttccatcttgttggccccaccaatattaggggctgagagagtctggttctcccctgtccctttacagatgggaatactgaaacccccagaagggagagygtattcaggtgagggggtgagggtcagggccgtggccagaacccaggactggacccagactggaagctcacagaaaagcattcgcggggccctccggccc

SEQ ID NO: 347452 - DNA, 201 bp, Homo sapiens
atgacgtctctgggaggccagttctcggcccggcgcctgggggactcgccattcaccatccgcacagaaggtaccttggtggggcaaggggagtgtgagaygagtgagggcgtttgtgggtcaaagaggaagtgcctctgagcctagccctgtacctggctttctggccgccctgtaggtggatgtgagtggagggggcct

SEQ ID NO: 347453 - DNA, 201 bp, Homo sapiens
tatgtatcagtttttcctgtctgcggatattttttcctgtttttgaaatggttttgaacgttgccgtggtggacattcttggacatgtcacctgatgtacytgtgtaagtttttctgggtatagacttagatgcagaattgttagatcttggcatggtgaaaattcagctttacaagataatgccgaattgtcttccaaag

SEQ ID NO: 347454 - DNA, 201 bp, Homo sapiens
ctggttctcccctgtccctttacagatgggaatactgaaacccccagaagggagagtgtattcaggtgagggggtgagggtcagggccgtggccagaaccyaggactggacccagactggaagctcacagaaaagcattcgcggggccctccggcccctggagttgaaccctgcagggagagcctcacagccagcctgggg

SEQ ID NO: 347455 - DNA, 201 bp, Homo sapiens
cagactggaagctcacagaaaagcattcgcggggccctccggcccctggagttgaaccctgcagggagagcctcacagccagcctggggccctgtccccayggagggcagggctcgtgggccccagggtaggaaccccagcctgacctgagcatcgaggcagctccagggcacacaggatgcagagggccctgaatccaag

SEQ ID NO: 347456 - DNA, 201 bp, Homo sapiens
ctggcacgtgcagcgctaatgatcgggaatgattagaaaggaagccgtggaggactgcaggctggctgatgggatcttggtcgaagtgcctcattttcatktaattttcttcttcataaggtctcccctccccaggctgggagcagagggaagagcagccgcctcagccccagggaacctgcccttgtcagttgatctttg

SEQ ID NO: 347457 - DNA, 201 bp, Homo sapiens
ggtctcccctccccaggctgggagcagagggaagagcagccgcctcagccccagggaacctgcccttgtcagttgatctttggaaatccaaagaccagctygagattcagaacacatgcattatggtttccaacaggagggtccagggaagagggatggggaagagatggagttagggcccagaggccgggcaggagaagg

SEQ ID NO: 347458 - DNA, 201 bp, Homo sapiens
ttccaacaggagggtccagggaagagggatggggaagagatggagttagggcccagaggccgggcaggagaaggagggctggggaagcaacagggccctgrggccctgaacacaggctcccaacttccctgcatgtccggatccatggggagcaaggaaagtgcagattcccgggccccgggtcctagagagttgaatggg

SEQ ID NO: 347459 - DNA, 201 bp, Homo sapiens
tctgaattttaacagcctggccagaagattcagatgctgctgggtgattggccacacttctaggaaccctgatctagaagtcctgcctggagcttaccgtytgggggctctggggcttctttcccagtgctgggccttttctgccatctcacggacatgagggttgttgggccccagagcacctcaaaggttacatctaaa

SEQ ID NO: 347460 - DNA, 201 bp, Homo sapiens
aaatgatcccaatgtcacatggctagtgggcaacggggctgcccagggctctgcactccgccacgatgctgttctctgcaccgcaaagcaatgcagcaaargggtcagcagtgcctgggaagatggagctgaggctggggtctggtgttggttggtgctgggggactttggggccagctttgtctgagctgccccagctcg

SEQ ID NO: 347461 - DNA, 201 bp, Homo sapiens
tgccccagctcggacaccaggtggcctccaggctgctcgggcctcccctaaccatacccacactctgcccacagtgatggggggccccgagtcccgcggcrtcctgcgcaagatgagcgacctgctggagctgatggtgaagcgcatggacgcactggccaggctggagaacagcagtgagctgcaccgggccggcggcga

SEQ ID NO: 347462 - DNA, 201 bp, Homo sapiens
agagtgcatttctaccacccaaatttaacaaccgttaacatttggtcacatttgtggcctgttttcctctttaaataaaacgtcacagatgaaaactaaarggccttttaatgacttctccctagagacaagtgcctccctgaatttgctgtaagtttttccagtccattccgagcacatttgcacatatgtttaacacac

SEQ ID NO: 347463 - DNA, 201 bp, Homo sapiens
aaataaaacgtcacagatgaaaactaaaaggccttttaatgacttctccctagagacaagtgcctccctgaatttgctgtaagtttttccagtccattccragcacatttgcacatatgtttaacacacacacattataaattcatagtgtgtgattttaacaaattccatgtaagtggcatctcacagcacatattccac

SEQ ID NO: 347464 - DNA, 201 bp, Homo sapiens
cacacacattataaattcatagtgtgtgattttaacaaattccatgtaagtggcatctcacagcacatattccactgcccctttttttttttttttttttkgacacagagcctggttgactctgtcacccaggctggagtgcagtggcacagtctcagctcactgcaacctctgtctcccgggttcaagcgatcctcccac

SEQ ID NO: 347465 - DNA, 201 bp, Homo sapiens
atgtaagtggcatctcacagcacatattccactgcccctttttttttttttttttttggacacagagcctggttgactctgtcacccaggctggagtgcartggcacagtctcagctcactgcaacctctgtctcccgggttcaagcgatcctcccaccccagcctcctgagtagctgggactacaggcgcccaccaccac

SEQ ID NO: 347466 - DNA, 201 bp, Homo sapiens
gtgtcctagtccaagtgctaacacacactgtgctactctgactccaccactggctggtgacagtgctcgtggctggggcaacttcagcccagggacacacrgggaggttgctgaccttggttcctggtcccctgggggggcaggtgccgaatcagggtcatcgacaccttcgggacggaacctgcgtacaaccacgaggag

SEQ ID NO: 347467 - DNA, 201 bp, Homo sapiens
ggcagagccctggagacccgcatggagcactggtgttcctctcccagtgaagctgtgacagcgcctgctctcccagcaacgatatgggacaacacacatgygtgttgccagccttggtgcccagtgatgttatgggggctcagtctcagagacatgactgaccactcaggggctgacctcagtctctggcccttccagaga

SEQ ID NO: 347468 - DNA, 201 bp, Homo sapiens
tgacctgagcatcgaggcagctccagggcacacaggatgcagagggccctgaatccaagtcctgttctgccatccaaccccaaggccctgggcggatgccrtgacctctgagcctccataattcctgtaagcgatctggagacacgagtgtccatgagaagtaaatgaaataatgcaggtaaagctacctggtattcagta

SEQ ID NO: 347469 - DNA, 201 bp, Homo sapiens
cctactgggtctgcctgggtccccagcccctccaggccaggcccctctcttctccaggggtcccttggacagcaggtgggataaaggagccgtaacacatytccttacccaggctgggatgggatgggccagagaaggggagcaggcaggactaggctgggggcagcccctaccccgccccagcccttctgcccaagtgac

SEQ ID NO: 347470 - DNA, 201 bp, Homo sapiens; identical to SEQ ID NO: 73762

SEQ ID NO: 347471 - DNA, 201 bp, Homo sapiens; identical to SEQ ID NO: 73763

SEQ ID NO: 347472 - DNA, 201 bp, Homo sapiens
tgctgctatcctacaagccccagggacacatgaggtgtgacatccaaatcatgtgtcctaggtatataaggcatctcctggacctcagagaacaggagtgsgggaggtcaggctgtcccaactggcccctagaggtggatgtggaaggaggggctttgaccccaccctattccagggagacgagctccactttccctcttt

SEQ ID NO: 347473 - DNA, 201 bp, Homo sapiens
cagggacacatgaggtgtgacatccaaatcatgtgtcctaggtatataaggcatctcctggacctcagagaacaggagtgcgggaggtcaggctgtcccarctggcccctagaggtggatgtggaaggaggggctttgaccccaccctattccagggagacgagctccactttccctcttttatatattggggttctttgt

SEQ ID NO: 347474 - DNA, 201 bp, Homo sapiens
gacctcagagaacaggagtgcgggaggtcaggctgtcccaactggcccctagaggtggatgtggaaggaggggctttgaccccaccctattccagggagaygagctccactttccctcttttatatattggggttctttgtgaaattgatttgctaaatgtattctagctgctaaaaattaagcttgaaacgcacttttag

SEQ ID NO: 347475 - DNA, 201 bp, Homo sapiens
aagccaaagctctaggcatttctaaagtacggagttgggtgaaacagaagaaaatgatgacccacaggaggtcactgtgcccgtgggagggttggagggaygcctgcctgagtcaggcctgaaacacagtgcgcccatgtggactggtgtgggatccgttgccatgtagcctgctggtgctgggctgctggccatggggcc

SEQ ID NO: 347476 - DNA, 201 bp, Homo sapiens
atgcctagtgtgtgcagagtctgggctggaggtttgagagcaggtggaggggacacaaaaaagatggaattccactgcatgcccggtgcccagcctggccrgtggcccctcagagtggggcagacctgggcggccttgggctctgcgagcctcaggttcttcacgtgtgtgttagagatgatgctgatgggaggcctgggc

SEQ ID NO: 347477 - DNA, 201 bp, Homo sapiens
ccattattgccatggctcggaccccaaccttgcagtcacccctggctcttctctctcatacacttgccccgtccctcagcaaattctcccaccttcagaahacgccttagaagcccacctcttctcaccccactgactgaccccaaccagctattccaactcagcagccgctagggtctttctttccctccctccctccct

SEQ ID NO: 347478 - DNA, 201 bp, Homo sapiens
gcagaaaatatactcaggcccaggtctcccatgccaggtacaccgagctgttttgcagatgcagtgagaagatgcagggctggcgcaggggcagtgtcagycctgggagctcgccgtgtgaccttgggaaagccactatatctgccagacatcctgggaccttgggacccaggcaggctcttgaggtcacagtgcccatgg

SEQ ID NO: 347479 - DNA, 201 bp, Homo sapiens
tgggcaccaagctcactagagcttggtgaggaggatcccatccaggtctgatccaggcctgcactgttgtcacagccccacggtgccgagagccggaccarccacatgacagccacgtttattggggatggggtgtgaaaaagtcccaagttcccagtgcagtccctgccgggctgggagggaggtgggacccttcaggct

SEQ ID NO: 347480 - DNA, 201 bp, Homo sapiens
gatctctgctccagcacccccaggtgtacacacctcacacggcttgtgctcctggggctggggacacatcccacgtgtctctgagttcgtgatgtgggcamagggcctggaacccgacgtgcactcaagaaacatttgttaaagagaattatcctgaggacccagtggggagggggtgtttggggaagcgggtgcctgacc

SEQ ID NO: 347481 - DNA, 201 bp, Homo sapiens
tccccagcttttctgttgaaggcagggcgggaccagagaccttcactcccctactgttggccatgccgtgggtggtctcctggcctggcttgggaataacstgtcactacaggatcatgtgccatggcctgggccagactcactgccaccaagaacccaggccccacagagtcctgggtctgaagagggacagtgagtggt

SEQ ID NO: 347482 - DNA, 201 bp, Homo sapiens
tctctgctccagcacccccaggtgtacacacctcacacggcttgtgctcctggggctggggacacatcccacgtgtctctgagttcgtgatgtgggcacarggcctggaacccgacgtgcactcaagaaacatttgttaaagagaattatcctgaggacccagtggggagggggtgtttggggaagcgggtgcctgaccgg

SEQ ID NO: 347483 - DNA, 201 bp, Homo sapiens
gacactccaagggctgaggggtgagctcccgggagcaggtccagggcaggcctttctttctaatgtgtgggtgtggacatcccggagctgcccagctcacytgttactgcacgcacagtacgggctcttggtacctgtgtgttcttccctgtggcccttgagtggctcagtgataccctttgatgtaccccagggtcaacc

SEQ ID NO: 347484 - DNA, 201 bp, Homo sapiens
gcgtgtctcagggcagctttttctgattgattgaagccagtgttccacttgtggctccagcctgcttcctttgctgaggaccaaggcctggaggcccctcrtaagcttgtgggcactgcacttgtgtccaggcattcattagggccacccggctccctgttcccccgccaggaacatcctctccagctgtccgtctccagc

SEQ ID NO: 347485 - DNA, 201 bp, Homo sapiens
agtgccaggcagagctgcggctcccacaccttcctctgaagctggccacgcctccttcagccctggcccaactctgaacagtggagggaagggcaggcacrggccggcctcaccaccgccctgccaggtgaccacccctccccactcacaggtgaggaaacaggtgtgatgaagcccctcagcccatggactcacctgagc

SEQ ID NO: 347486 - DNA, 201 bp, Homo sapiens
ttaaggacagtggacagaaacctctgtcctgagggaatgagactgagctgcttgccaggtgtgtgggcaggtccgagcccaccctaccgggcagacgggargccagcctgccaaggcctgtctgccttctttgagatgccaccaagctgggcctgtttgcagggcaggtggggggcctggagatgcccccttagtggacta

SEQ ID NO: 347487 - DNA, 201 bp, Homo sapiens
tgtcactacaggatcatgtgccatggcctgggccagactcactgccaccaagaacccaggccccacagagtcctgggtctgaagagggacagtgagtggtrgatctcagggtcaccccctcagaaggggctgcagtcctgtcctcggtccctctgagccattgaaacctcgggtggagcaatttcggggtcgggagactca

SEQ ID NO: 347488 - DNA, 201 bp, Homo sapiens
atgccaccatccctggctaatttttatatttttgtagagatagggtttcactatgttgcccaggctggtcttgaactcctgagctcaagcaattgggccayctcagcctcccagagtacttggattacaggtgtgagtcaccgtgcccggcctcaagcattcatttctcacagttttggaggctggaggtctgagaccagg

SEQ ID NO: 347489 - DNA, 201 bp, Homo sapiens
acatgactgaccactcaggggctgacctcagtctctggcccttccagagatcaagctgaggtggcatgtcccaccgtcaatcacagggaagcacagactcytgggggtggcccaaggccccaggtagaaaaggacactcttatcaggggacactccaagggctgaggggtgagctcccgggagcaggtccagggcaggcct

SEQ ID NO: 347490 - DNA, 201 bp, Homo sapiens
cccacacagacacaccccaggttgctctctcctctgccccctctccctgataacccccctcagggtgtccttgaggctgggcctgcgtttggttcatctgygtttggttcctctgtgcccagagcccagcaccgagcaggcacatggtaaatacgtgtgtatgcacgtggatgatggggcctcctctggggacaaccctcc

SEQ ID NO: 347491 - DNA, 201 bp, Homo sapiens
catataatcactcatgacatctgcagtgaccctgttttcaagtaaagtcacatgcttagctattgggggatagggctgcaacatacgaatttgaagggggkgcatcatttaacccatggcaaaaattatattttataatatatgaaaatcacattaaaacattttctttgatctacaaggggtttttttgtcccccgattt

SEQ ID NO: 347492 - DNA, 201 bp, Homo sapiens
agatgccatctgcactatttaaagcctgtgctggcgatgggttttacacagacatgcttgtcgcaggaaaattgctgaatcccccaaaaagtaaagtgctytgctttgtagtcgggcgtatgatgcttcctctcaggaatgggatgactgctgtccctggggagcaaaagcatatcaagcatgtattgagcacctcctgta

SEQ ID NO: 347493 - DNA, 201 bp, Homo sapiens
caaatgtgaagtgcagccaggatttgaacccaggacctctgacttccagggtttcactctttccaatacatctctggctaatgtggagagtcactgacccmgcgcttgaaactcaaggacatcccttgatttctttctttcctgtgagagcggcaggagaattaaagcttggccttcagcaagagcaacgtggttgctgaa

SEQ ID NO: 347494 - DNA, 201 bp, Homo sapiens
cctttctttgtccctgtcccactggcaggcacggggggcatctgcaatctctgtacccttgccaggtgttctcccagcatccctacgcggagaacttcatyggcaagccccacgtgtggacagtcgactacaacaactcagaggagtttgaagcagccatcaaggccattatgagaactcaggtgagagcagccacataca

SEQ ID NO: 347495 - DNA, 201 bp, Homo sapiens
ctctctctcttttttttttaaacaaagtcttgttctgtcacccaggctggagtgcagcagtgtgatcatggctcactgcagcctggacctcacgggcgcaracgatcctcctgcctcaatctgagtagctgggaccacaggcgcacaccaccatgcccagctaatttttaaaattatgtatagagatagggtatcactctg

SEQ ID NO: 347496 - DNA, 201 bp, Homo sapiens
ggccccccgaggtgccagcctttgtgaagaaccacggcctcttaccgcagcctgagtttcagcagctgctgcgcaaggccaaagtgagctcccatcccccrcaccattctcacacttgccggctgcagacactgaggtcaccacccatgcctgccaccaccactcaggccccttccacatatggacataccccagcatgct

SEQ ID NO: 347497 - DNA, 201 bp, Homo sapiens
cagagaaggggagcaggcaggactaggctgggggcagcccctaccccgccccagcccttctgcccaagtgaccaacgctgagtgacggtgctgtgcggtcsctgccaggctgcaggtgccctgtgacagcaccgagtcggagatgaaccacctgtacccggcgttcgcccagcctggccaggagtgctacctgcagaagga

SEQ ID NO: 347498 - DNA, 201 bp, Homo sapiens
tggctcctgtggatggaccaaggtggggaagagggtgatggggacagcagggtcctaggagccgtctttcctggttcctctgtcacagggaggcaagtccygggaggtcaaggtcctgcttggcatggccacagggcagcccttgggcatgagagggaccagcgttggatgggttattacatcaagcaggtggcatgaggt

SEQ ID NO: 347499 - DNA, 201 bp, Homo sapiens
ttcctcttcctgcagccgtgctggcagccagcggggtgagtgtgtggtctcctccagctctcctgggagcatggccctattcttagcactgagtttgcttrctaggaaagaacgctggggaagaaagtgccagctttggacgccagccccactttgggtctgcagtgttgaggatacgctgctccctcagtttccctttcg

SEQ ID NO: 347500 - DNA, 201 bp, Homo sapiens
tttcctgcaagccagactgctttttcctcggcatctctagcgtggagccagcggccctcaatatccgaatccaggatgcaggggctgcgtcttagcttttrgccctcatctcccactgagactgctcgagtgggattgacagcggagtcttaccccaaggtccctgcacaggttggttctcagcaaaggttggtggaaccg

SEQ ID NO: 347501 - DNA, 201 bp, Homo sapiens
aaaaggaatgcattttcctgcaagccagactgctttttcctcggcatctctagcgtggagccagcggccctcaatatccgaatccaggatgcaggggctgsgtcttagcttttggccctcatctcccactgagactgctcgagtgggattgacagcggagtcttaccccaaggtccctgcacaggttggttctcagcaaag

SEQ ID NO: 347502 - DNA, 201 bp, Homo sapiens
ctatgtgtagtcttttatccctcacataaggccacattctgaagttccagctggatatgaattttggagacactcttcagcctaagtgatggagccccgarcacagggcccacgctggccagcacctggttccacacaggaaagccaagtccctgtcctggaggactcaggactccattcggggtttcaggctggccactc

SEQ ID NO: 347503 - DNA, 201 bp, Homo sapiens
agccactgcgcccagcctctgctatatatatattttaaatcttatttattttaaaatagagatgggtttccgccatgttgcccaggctggtctcaaactcrtgggctcaagtcatctgcctgcctcagcctcccaaagtgctgggattacaggcatgagccatgtgcccggcctactctgctatctaacgtagaacttatt

SEQ ID NO: 347504 - DNA, 201 bp, Homo sapiens
acataaggccacattctgaagttccagctggatatgaattttggagacactcttcagcctaagtgatggagccccgagcacagggcccacgctggccagcrcctggttccacacaggaaagccaagtccctgtcctggaggactcaggactccattcggggtttcaggctggccactcacaaccacacccaccgtgggtca

SEQ ID NO: 347505 - DNA, 201 bp, Homo sapiens
ccctgcagccacagaaaccacgatggcaaaaaatctcattggttctcaaggactaacctgtgggggaaagcaatagagacactctttttctctctttttttaaagatttatttcttgaaataataaatattttattgggatgtgaggtgcagaagaggaactgtgctggattctcgtcttttcctgcggcatccggagctc

SEQ ID NO: 347506 - DNA, 201 bp, Homo sapiens
ccaccgtgggtcagggggttcagaaagtgacctggctcttgcaagacggatggagaggagcctcgctccagggagaggtgcctccaggaagggctgaaacrggttgaggtccgttccaaagtctctagttgacctggcaggacccctggcttggcttgtcttgacataggttgtttgtgccctggggtctctggttagaag

SEQ ID NO: 347507 - DNA, 201 bp, Homo sapiens
tcttgcccctgtaggtcagcatggaaagcagctccacgggcttcatctggactgatgtcagagcctggcagacatcaaatcggcatgtttcttcttggagkgaacccaggcattctcggtgggagcacatcactgccaaaagggagaacactggttcttgaaacaatcttagctgtaagaaacctcctagacgggcaataa

SEQ ID NO: 347508 - DNA, 201 bp, Homo sapiens
tagctcataggggtctgagcttcctctcatctccttgtatcatactggtaatgaaccttgatgagttttggatagatgaaaaatactcctacttccttctkcctgaggactttttgagcaaatgaagcaggtagcttttacgtctcttctctttctttgtaatctcacagaaggctgtcgtgcattcaactttgtgctcca

SEQ ID NO: 347509 - DNA, 201 bp, Homo sapiens
atactggtaatgaaccttgatgagttttggatagatgaaaaatactcctacttccttcttcctgaggactttttgagcaaatgaagcaggtagcttttacstctcttctctttctttgtaatctcacagaaggctgtcgtgcattcaactttgtgctccaaaaagccatgtccaagtcctagccccaggacctgtgactat

SEQ ID NO: 347510 - DNA, 201 bp, Homo sapiens
agcaaatgaagcaggtagcttttacgtctcttctctttctttgtaatctcacagaaggctgtcgtgcattcaactttgtgctccaaaaagccatgtccaartcctagccccaggacctgtgactatgacctcatttggatataagctctttgcagatgtaatcaaattaagaggaggtgctactggatttggatgggccct

SEQ ID NO: 347511 - DNA, 201 bp, Homo sapiens
tctctttctttgtaatctcacagaaggctgtcgtgcattcaactttgtgctccaaaaagccatgtccaagtcctagccccaggacctgtgactatgacctyatttggatataagctctttgcagatgtaatcaaattaagaggaggtgctactggatttggatgggccctggttccatggctggtgttcttataaagagag

SEQ ID NO: 347512 - DNA, 201 bp, Homo sapiens
tgggccagagaaggggagcaggcaggactaggctgggggcagcccctaccccgccccagcccttctgcccaagtgaccaacgctgagtgacggtgctgtgyggtccctgccaggctgcaggtgccctgtgacagcaccgagtcggagatgaaccacctgtacccggcgttcgcccagcctggccaggagtgctacctgcag

SEQ ID NO: 347513 - DNA, 201 bp, Homo sapiens
cctcccaaagtgctggaattataggcatgagccactgcgcccagcctctgctatatatatattttaaatcttatttattttaaaatagagatgggtttccrccatgttgcccaggctggtctcaaactcgtgggctcaagtcatctgcctgcctcagcctcccaaagtgctgggattacaggcatgagccatgtgcccggc

SEQ ID NO: 347514 - DNA, 201 bp, Homo sapiens; identical to SEQ ID NO: 73769

SEQ ID NO: 347515 - DNA, 201 bp, Homo sapiens; identical to SEQ ID NO: 73755

SEQ ID NO: 347516 - DNA, 201 bp, Homo sapiens; identical to SEQ ID NO: 73757

SEQ ID NO: 347517 - DNA, 201 bp, Homo sapiens
agaagggcagaaccaaagcagaggtgtgagagcagccccggtgatgcagaagccgctggctgcccctgctccgcccactgcctctagctccctctctcctytccctgttctgcctcttctcagtggcctctctcgtcaccttcctggtcctgtggtctgcagacggggcctgttattcttgccttgagacggggatgctga

SEQ ID NO: 347518 - DNA, 201 bp, Homo sapiens
cacgggctgaggaacactgagggctgctgctacctctggaagctgggagggaggcctgggggaggctcccctagagtctaaaggcgccggccctgctgccrcctcgctgtctgatttccagcctccagagctgccagaggagaaatgggtgtggttttaagccacctggtttgtggaaattattgcagtcaccccaggaaa

SEQ ID NO: 347519 - DNA, 201 bp, Homo sapiens
ggtggtgcgcgcctataatcccagctactcggcaggctgaggcaggagaatcgcttgagcccaggaggtggaggttgaggctccatctcaaaaaaaaaaaatttcctatttttagagtcagggtctcactctgtcacccaggctggagccctcaaacttctgggctcaagcaatcttcccacctcagcttcctgagtagct

SEQ ID NO: 347520 - DNA, 201 bp, Homo sapiens
agtgattctcctgcctcagcctcccaagtagctgggattacaggcacctgccaccacgcctagctaattttttttgtattagtagagccgggtttcaccaygttggccaggctggtcttgaactcctgacctcaggcgatccgcccacctcggcctcccaaagtgctgggattacaggcatgagccaccgtgccgggctaa

SEQ ID NO: 347521 - DNA, 201 bp, Homo sapiens
atgctgaggtttgtgatatgaaggatcttgtcacccaggtagtgaggatagtacccagtagttaattcttccgtctttacccccttcctcctccccactcygggagtccccaggtgtctgttgttgccatctttatgcccataagtacccaatgttcagctcccacttataagtgagaatatgcggtatttggtttctgtt

SEQ ID NO: 347522 - DNA, 201 bp, Homo sapiens
caagactccgtctcaaaattttttttcaacttttattttaggtttaaggggtacatatgcaggcttggtacctgggtatattgcataatgctgaggtttgkgatatgaaggatcttgtcacccaggtagtgaggatagtacccagtagttaattcttccgtctttacccccttcctcctccccactctgggagtccccagg

SEQ ID NO: 347523 - DNA, 201 bp, Homo sapiens
aacgttttatctctagcgctggaacttctgtgatagcccgaggcaatcctgttcagctagagacctcaaagaaactgcttccaaaaaaagacatctttgcyctggtgtttgtaaccaaaggaagtcagaggtggctggatggagagaaaaatgaaagcagcatcttgggagagatgccttccagagtacaggggatcaggt

SEQ ID NO: 347524 - DNA, 201 bp, Homo sapiens
ccaagcccctccccaaagtccaggtgggcctgggaggtgggtgggccggtgaggggctggtgtggctggacattcttaaggacagtggacagaaacctctrtcctgagggaatgagactgagctgcttgccaggtgtgtgggcaggtccgagcccaccctaccgggcagacgggaggccagcctgccaaggcctgtctgcc

SEQ ID NO: 347525 - DNA, 201 bp, Homo sapiens
cccagagaggtagagcatgcagcctgaggtcacacagctcagtcgggaccagactccttctgcagggcccgtttcaaggttgcatgagacttcttactgtsctcccagcagaagagtgcttggggtagagcaagcacagggagcagatttctggagggaaaggaaatggggagtggaaatagaggcagggaggaaatgatg

SEQ ID NO: 347526 - DNA, 201 bp, Homo sapiens
aagcagggcgggaagcaggcgtctctggaaagggccttgctcctccagggaaggccttgaatccctggcctgactgggaacgctggagggtcctcgccccytccgaccccatccctgtcccgccctccgggccgctgggtgtttcctggcgcgattggaagcagccgcgagaccccagcaccacggacagtgctcgcgacc

SEQ ID NO: 347527 - DNA, 201 bp, Homo sapiens
attagggcgcacacctgtaattagacctaatgggggtaatttccaggccaggcaggctggctcctccggcaggagattcgtggcaggcggaacgtcgtcgkcgtcgttggccgtgagtgtttgcttcacacagggacctttgaattatcttgtgacaagggcttacagacacaggagcaagagtaactcagagatttgctg

SEQ ID NO: 347528 - DNA, 201 bp, Homo sapiens
ggtcactctggtgccggaaagcacctgctggggcccagcctggagacagggtctgctgccggctggtctcctggccggtgccccgggggggcggggctcaragctgctgctcctctctgctgaccctctgtgttccgcccacccagatcctggtccacatcggcttcctgacggaggagtccggggacgtgttcagccctc

SEQ ID NO: 347529 - DNA, 201 bp, Homo sapiens
ttctggtgggacacacaagaaattgataactgggggaaggactgactgtctgcggtgagaggaaacttccctttcattgctttcctgtttggtttttttttacatgaacatctgtttaattttgttaattagttaattaaaaaataacaattacaaaaggattaaggaagcaaggtattgcaaatctgaccagctgagatt

SEQ ID NO: 347530 - DNA, 201 bp, Homo sapiens
tattttaggtttaaggggtacatatgcaggcttggtacctgggtatattgcataatgctgaggtttgtgatatgaaggatcttgtcacccaggtagtgagkatagtacccagtagttaattcttccgtctttacccccttcctcctccccactctgggagtccccaggtgtctgttgttgccatctttatgcccataagta

SEQ ID NO: 347531 - DNA, 201 bp, Homo sapiens
tgctctggtagcagggagacggggaccagagggagagggagacagccaggcctcctggctctttgccccagacctttgagccagtgttctctcccagtctytcctctttccagacatgagggctggtggtcctgcccctgccatctctggggtccttcaggcgggtcctggttcaatctcttctctgccctgtcccctgtt

SEQ ID NO: 347532 - DNA, 201 bp, Homo sapiens
ctctgcagctcttcatcgggtttggcttcccctacgagggccccgcccccctggaggccatcgccaatggttgcatcttcctgcagtcccgcttcagcccrccccacagctccctcaaccacgagttcttccgaggcaagcccacctccagagaggtgagtggaaagcatcctggtccccgatcaggaggggccgggacag

SEQ ID NO: 347533 - DNA, 201 bp, Homo sapiens
tgaagggctcttctctcagtaacttaggggtaccgccaggccggggaagctgcccgctcaccatgcccctgcccttcgacctcatctacaccgactaccayggcctgcagcagatgaagcggcacatgggactctccttcaagaagtaccggtgagagggcggccagagggtgggcacgtggcccacatgccaggggagaa

SEQ ID NO: 347534 - DNA, 201 bp, Homo sapiens
ggctctaaggaactggggtggccggttgggcaggtgggtttcttggggcccagaatctgaagggctcttctctcagtaacttaggggtaccgccaggccgsggaagctgcccgctcaccatgcccctgcccttcgacctcatctacaccgactaccacggcctgcagcagatgaagcggcacatgggactctccttcaaga

SEQ ID NO: 347535 - DNA, 201 bp, Homo sapiens
cccttgctggattgccttgtgcagtgaaaaacctacgttaccgtacagggccatcctgctcacttcctttctgagagtctgtgctaagctctctgcacttktacagttcattctgggctctaaggaactggggtggccggttgggcaggtgggtttcttggggcccagaatctgaagggctcttctctcagtaacttaggg

SEQ ID NO: 347536 - DNA, 201 bp, Homo sapiens
agaaaggctccctctctgggtagccacagccctgcgggagcacatttgtgtcgatgacaaaaggtgccccttcttcctggcaggtaacccaggctgggtgmacgggagcccacgctgacctcagtcccacctgccccttgctggattgccttgtgcagtgaaaaacctacgttaccgtacagggccatcctgctcacttcc

SEQ ID NO: 347537 - DNA, 201 bp, Homo sapiens
ggagctgcagaggtgagtgctggggaaagccactggcattaagtggggcagggaggggatgaaggggaaccccacccctccctcccaggggctgtgggagyacctgctctgcctgcaggtcccacggccctgagaccctgggagacatcctggtgttccgcaggacatcaccactcctaatccccctcctcctgcccggtc

SEQ ID NO: 347538 - DNA, 201 bp, Homo sapiens
ccggcaggtgaaggcaggcaggtcctgtgcggtgcccggggtgggaagcaggtaaccagtggcctgcagcagctcgcggcctcagccagccctgggcgccrggagctcagtcagcactgcaagactgcacttttctgaggcaggaggtttggggccctcatccagacaaacacgtagctgcgctgaggactgccgccagca

SEQ ID NO: 347539 - DNA, 201 bp, Homo sapiens
atgaaaacctgtgtgtaaataacccggcaggtgaaggcaggcaggtcctgtgcggtgcccggggtgggaagcaggtaaccagtggcctgcagcagctcgcrgcctcagccagccctgggcgccaggagctcagtcagcactgcaagactgcacttttctgaggcaggaggtttggggccctcatccagacaaacacgtagc

SEQ ID NO: 347540 - DNA, 201 bp, Homo sapiens
tgggatgaaacattccttttttcatctcagtcctttggggaagggactactccagcccgagctatgagcgacagcccaccagggctgcccagtgaggccasgcaggctgtgcgctgcacgactccacgacagacaccctttaggcggccacaataccagtggtgtcctgtggagttgtagaaagcagtggccaggcaggtc

SEQ ID NO: 347541 - DNA, 201 bp, Homo sapiens
gctacgccttctttggggtggacggcaccgagtgctccttcctcatctacctcagtgaggtcgagtggttctgccccccgctgccctggaggaaccagacrgctgcccagagggcacccaagcccctccccaaagtccaggtgggcctgggaggtgggtgggccggtgaggggctggtgtggctggacattcttaaggaca

SEQ ID NO: 347542 - DNA, 201 bp, Homo sapiens
gacattacccagcatggttggtgccacatggcacaagagtgaccagctgggagccctcctcctgaagctgggcccagccccacctcatctcacctaaggaggggtgggggtcagaactgagccctgctcactgtatcatgggggttcttttggtcactggtcaaaaggagggacatggggtagtggggaaactgaggcaag

SEQ ID NO: 347543 - DNA, 201 bp, Homo sapiens
agaatgaactaatagaggagtagtcttttgtgtgtgtcttttctctcagtagtacatgtgtgagactcactatcttgtatgcggttgtagtcacttgcactttttttttttttttttttttttttgctgtgtagccttccattgtgtgagtacaccaccatatttttatccatccgaccattggtgggcatttggtcgttt

SEQ ID NO: 347544 - DNA, 201 bp, Homo sapiens
caggggagaaaccgaggctgtggagttggaataagcaggggcttctggcgggaggagctggtttgtacggatgctggcagggggggttgtgggcagaggartttaaattggcagctgtggctgctgggacagggggctttgaacccttctccagggaggtggactgagcagatgtggggattctagaggaagccatggggt

SEQ ID NO: 347545 - DNA, 201 bp, Homo sapiens
gcctcgtcatcccctgcaggggagaaaccgaggctgtggagttggaataagcaggggcttctggcgggaggagctggtttgtacggatgctggcagggggsgttgtgggcagaggaatttaaattggcagctgtggctgctgggacagggggctttgaacccttctccagggaggtggactgagcagatgtggggattcta

SEQ ID NO: 347546 - DNA, 201 bp, Homo sapiens
tgggaacgtggaagggccgtctctgcggaggacggtacatcccacctgactcaggggctcggcatagacttaactgaatgaataagtgaccggatgcctcrtcatcccctgcaggggagaaaccgaggctgtggagttggaataagcaggggcttctggcgggaggagctggtttgtacggatgctggcagggggggttgt

SEQ ID NO: 347547 - DNA, 201 bp, Homo sapiens
gattgacagcggagtcttaccccaaggtccctgcacaggttggttctcagcaaaggttggtggaaccggatagaatagcaagagcccctggcacacaggartcacccgaggagctgaaaataatccccgacgcccaggccccagcccggagcaaatagagggaccctcggggtggcctgagcaccaggagctaaagcctgg

SEQ ID NO: 347548 - DNA, 201 bp, Homo sapiens
tctgggctggagtgaagtggcacgatcttggctcactgcaacctctgcctcccaggttcaagtgattctcgtgcctcagcctcctgagtagctgggattayaggagagcaccaccacgccagttaatttttctgttctttttagtagagatggggtttcaccatgttggccaggctggtctcgaactcctgacctcaggtg

SEQ ID NO: 347549 - DNA, 201 bp, Homo sapiens
agtcttaccccaaggtccctgcacaggttggttctcagcaaaggttggtggaaccggatagaatagcaagagcccctggcacacaggagtcacccgaggarctgaaaataatccccgacgcccaggccccagcccggagcaaatagagggaccctcggggtggcctgagcaccaggagctaaagcctggatgagaaaacct

SEQ ID NO: 347550 - DNA, 201 bp, Homo sapiens
taaaaaaatcttttcatgatgattttgaactctgtgttgaggggcatgtgtggatactatgtacccctggccatttttgccaagtagaactttctggtttrtttcttctaaatattctcctgcttcggccaggatgtctgagagcccagagtctgtgctgctatcctacaagccccagggacacatgaggtgtgacatcca

SEQ ID NO: 347551 - DNA, 201 bp, Homo sapiens
cctggcacacaggagtcacccgaggagctgaaaataatccccgacgcccaggccccagcccggagcaaatagagggaccctcggggtggcctgagcaccakgagctaaagcctggatgagaaaacctgggttcgggctcagcatttacaggcatttattctagaaattgaggcctgtctgtaaggaagaggactgggaacg

SEQ ID NO: 347552 - DNA, 201 bp, Homo sapiens
gtggtctcaaactcctgggctcaagggatcctcctgcctctgcctcccagagtgttgggattataggcgtgagtcaccatgccaggcctaggtttccttcmgctctgatctttgtagcagtctccgggaagggggtcgcaggccggggcactgattacaccctccccaccgcaccctgtgccccgccccctttcccacccc

SEQ ID NO: 347553 - DNA, 201 bp, Homo sapiens
ggtgcctctgatgcagcctctgtccgcaggcctgttccccaggtcaggagcaggcctttttggtctctgttgaggatattgctgcaggcagcagagctgarggtccagtggacccctggactccaggtctgccttcttgggctgggggtggtactgctggcgcatccagtgtttctctgatttttttccggtcctggcctg

SEQ ID NO: 347554 - DNA, 201 bp, Homo sapiens
ctctgcctcccagagtgttgggattataggcgtgagtcaccatgccaggcctaggtttccttccgctctgatctttgtagcagtctccgggaagggggtcrcaggccggggcactgattacaccctccccaccgcaccctgtgccccgccccctttcccacccctgccaaaagaggacctcttgggcggggcagtccaggg

SEQ ID NO: 347555 - DNA, 201 bp, Homo sapiens
tcccagcccccatctcaggctgtatcagtgccattattgccatggctcggaccccaaccttgcagtcacccctggctcttctctctcatacacttgccccrtccctcagcaaattctcccaccttcagaatacgccttagaagcccacctcttctcaccccactgactgaccccaaccagctattccaactcagcagccgc

SEQ ID NO: 347556 - DNA, 201 bp, Homo sapiens
ccacgcctacatccagcaccaggtcagtgagccctctggtccctgccccagatcctgtcagaccagaggagggggctgagccagcttcattgtctgcccakggccctgcacccgtgaaaccatccaactccctgctccctcctccagcctgtccagtctcttcccagagttccctcagggctggagacaggcaggcctgac

SEQ ID NO: 347557 - DNA, 201 bp, Homo sapiens
agttccccgctggccccggcccatcaccctaggcctcaggtggtggagggaacagagcatctgggtccggcctgtggcctgcagtgttggctactctttgktcccttgggacagtgcccggaggctggctgcacgagggtcggccttgggaagaggggtgggcggtgatcagaggcctcgcttggcattcttttactttcc

SEQ ID NO: 347558 - DNA, 201 bp, Homo sapiens
gcccatcaccctaggcctcaggtggtggagggaacagagcatctgggtccggcctgtggcctgcagtgttggctactctttggtcccttgggacagtgccyggaggctggctgcacgagggtcggccttgggaagaggggtgggcggtgatcagaggcctcgcttggcattcttttactttccgagtgagaaacgatggtt

SEQ ID NO: 347559 - DNA, 201 bp, Homo sapiens
ttgggacagtgcccggaggctggctgcacgagggtcggccttgggaagaggggtgggcggtgatcagaggcctcgcttggcattcttttactttccgagtragaaacgatggttttggtagaatgcctggggcttagtatatgtgcagaaaatatactcaggcccaggtctcccatgccaggtacaccgagctgttttgca

SEQ ID NO: 347560 - DNA, 201 bp, Homo sapiens
ggggcaacctaggcccgggatgaccttgtgggtgggttgtgcggctgatgagctttaaggtgggaaagcctggcagcggattgtgtgggaagctgcctccygcacccaggcctccctccctgggctcctccttggaccagggacttcagcaaggtgacctctccctacagtgtcagaaggccggcgggaccagtgtgaggc

SEQ ID NO: 347561 - DNA, 201 bp, Homo sapiens
gctggagaacttccctgggtagaaaggagcaggcaggcagtgggaacagatgcagtaaagagggatgtgggaagaactggaaggttctggaaatgcaggaktgggcttggcttccagggctccaggcaaggaacgtgagtggagctgggcttcagctatttgtttgtttgttttttgagacaggatctcgctctattggtc

SEQ ID NO: 347562 - DNA, 201 bp, Homo sapiens
aggctctcagctgtcacttttaattgttgtcagtacatctgcctccagcagcatcttgcgtgtggctctttcaaggctccaggccagaaagctagataagyagccttgttaggattgcatctgttaaagtaagagcaacgtagactctgagcagagtcctgacggacttgcttgtgagtaaagtatgtgatttgtatttgg

SEQ ID NO: 347563 - DNA, 201 bp, Homo sapiens
tatggggttttgtgcggaggaggaacctgatatggcctagattcaaaactgtcatttcagagaaaagactctaccaagagagccacaggaatgaggaggcrgctgtcagggtggtcccattgagagctgatatggcctaggccggggtgcagtcacggagaaggtggagaaagttctacctgggatgacagatgctgccta

SEQ ID NO: 347564 - DNA, 201 bp, Homo sapiens
attgttgtcagtacatctgcctccagcagcatcttgcgtgtggctctttcaaggctccaggccagaaagctagataagtagccttgttaggattgcatctrttaaagtaagagcaacgtagactctgagcagagtcctgacggacttgcttgtgagtaaagtatgtgatttgtatttggcctgtcaaattcatggcatctc

SEQ ID NO: 347565 - DNA, 201 bp, Homo sapiens
cagaagctgtctcgggccaccgtgggtaccttcactgggagagaggcgtgtggttggcaggtcaggggcctctttcagccagtgccaccccagggcagccrtcggcccccaggggcatgttctggattccaacagactttgctgcagagctggctgaagtaataattattaatcatcataataattaatgatgataataat

SEQ ID NO: 347566 - DNA, 201 bp, Homo sapiens
ggtgggagggaaatggaggcagagcctggtgattgtcgggcggactttggcatatggggttttgtgcggaggaggaacctgatatggcctagattcaaaastgtcatttcagagaaaagactctaccaagagagccacaggaatgaggaggcggctgtcagggtggtcccattgagagctgatatggcctaggccggggtg

SEQ ID NO: 347567 - DNA, 201 bp, Homo sapiens
atcttgcgtgtggctctttcaaggctccaggccagaaagctagataagtagccttgttaggattgcatctgttaaagtaagagcaacgtagactctgagcrgagtcctgacggacttgcttgtgagtaaagtatgtgatttgtatttggcctgtcaaattcatggcatctcttgtgggtgcttggactattcttttttttc

SEQ ID NO: 347568 - DNA, 201 bp, Homo sapiens
agggctctgggtgggctggatggtcaaaggtgcggtgggagggaaatggaggcagagcctggtgattgtcgggcggactttggcatatggggttttgtgcrgaggaggaacctgatatggcctagattcaaaactgtcatttcagagaaaagactctaccaagagagccacaggaatgaggaggcggctgtcagggtggtc

SEQ ID NO: 347569 - DNA, 201 bp, Homo sapiens
gcgctgaggactgccgccagcatccatgggatttgtgaaagttagagaaaggctccctctctgggtagccacagccctgcgggagcacatttgtgtcgatracaaaaggtgccccttcttcctggcaggtaacccaggctgggtgcacgggagcccacgctgacctcagtcccacctgccccttgctggattgccttgtgc

SEQ ID NO: 347570 - DNA, 201 bp, Homo sapiens
agccgagcctcccgggcacctttggttgaaggttgtcgggggacggcgttttcaattcatgtcactgctccagccaatcacttagcgtaaaattgcccatraaagtaaacttaaattacaagtgataaaactacagcctcctctcccagcagctgacctctctgctctccagggggtgaggctcagatttcttctgataag

SEQ ID NO: 347571 - DNA, 201 bp, Homo sapiens
tggaggggtatgcagcagatgcatttcaagttccttctgcccctgaggtcctccccccaccaccctcctatctgtgggggctgctgaaccgtcctcttgasccagcccttgactgagagtacaagagaaatgaggacttggccttggaggtgcagaaaggtctggacgggagtgttttgagttttcagcaggattggtgga

SEQ ID NO: 347572 - DNA, 201 bp, Homo sapiens
ctggcaggtaacccaggctgggtgcacgggagcccacgctgacctcagtcccacctgccccttgctggattgccttgtgcagtgaaaaacctacgttaccrtacagggccatcctgctcacttcctttctgagagtctgtgctaagctctctgcacttttacagttcattctgggctctaaggaactggggtggccggttg

SEQ ID NO: 347573 - DNA, 201 bp, Homo sapiens
ttggggaagcgggtgcctgaccgggttctgcatgcattctgagctcccgggcatcctcctctggtggagtggggatgggaacgtggaagggccgtctctgyggaggacggtacatcccacctgactcaggggctcggcatagacttaactgaatgaataagtgaccggatgcctcgtcatcccctgcaggggagaaaccga

SEQ ID NO: 347574 - DNA, 201 bp, Homo sapiens
acatttgttaaagagaattatcctgaggacccagtggggagggggtgtttggggaagcgggtgcctgaccgggttctgcatgcattctgagctcccgggcrtcctcctctggtggagtggggatgggaacgtggaagggccgtctctgcggaggacggtacatcccacctgactcaggggctcggcatagacttaactgaa

SEQ ID NO: 347575 - DNA, 201 bp, Homo sapiens
tgggcctctgctgctggggcctggggctgccctggcccctgcccttcatccttcctcgggatccaggagagacccttccttgcaaggcctcgtctcccctyatgctccacatgctgcactgccctggcccctgcccttcattcttcctcgggatccaggagagacccttccttgcaagggcctcgcctcccctcatgctcc

SEQ ID NO: 347576 - DNA, 201 bp, Homo sapiens
ctgaagggcctccctagtaggaggtgtcctgggcctcctgcagagctggctggcacctgaaccctgaatcctggggaggtgggcatccccgggagatgggrcccgatggcctggctgcttcccagtctgggttgggagcaaaggatggtcacatccagccccatgaggtgatgcacccaccaagagctgttgagagaggaa

SEQ ID NO: 347577 - DNA, 201 bp, Homo sapiens
tatgattttctataattttctggatgcttggaatattttgtaacttataagcacacagattaggaaaaggtggggaagaaccgcatcttggcacctagacytgtgaatggcagctctcctgcatcaccctccccgttccaagaggaggcacgagaggccgacgattacaattcactaaaaatccccggcccctctcctgtc

SEQ ID NO: 347578 - DNA, 201 bp, Homo sapiens
aatgtgccaccatgcccagctaatttttgtatttttagtagagacagggtttcaccatgtgggccaggctggtctcaaactcctgacctcaggtgttccayccacctcggcctcccaaagtgctgggattacaggcgtgagccactgcccccggccacgtttcttctttttataaggacaccagtcaacttggattagggt

SEQ ID NO: 347579 - DNA, 201 bp, Homo sapiens
ttgggaagaggggtgggcggtgatcagaggcctcgcttggcattcttttactttccgagtgagaaacgatggttttggtagaatgcctggggcttagtatrtgtgcagaaaatatactcaggcccaggtctcccatgccaggtacaccgagctgttttgcagatgcagtgagaagatgcagggctggcgcaggggcagtgt

SEQ ID NO: 347580 - DNA, 201 bp, Homo sapiens
ggaggctggaggtctgagaccagggtgccagcatggtcagctttgggggaggatcctcttttgggttatagatgatcagcttcttgctgtgtcttcacacrgtgggaagaggctgagagagctctctgggggccttttttttttttttttttttggagactgattctcccaccgtcacccaggctggagtgcagtggcaca

SEQ ID NO: 347581 - DNA, 201 bp, Homo sapiens
ggtctcaaactcctgagctcaggcgatctgcccgcctcggcctcccagagtggtgggattacaggcgtgagccactgcgcccggccctgggggttaggatygcaatatacaaattttgtggggacacagacatggttcatagcagcaggcaagacaagtgccttctattgcttactccttcacgcagccctccaagggttg

SEQ ID NO: 347582 - DNA, 201 bp, Homo sapiens
ccctccgtgaccctaacaggccttgaggagggcagggggcttcctggagtgtgtcccctgaccccactgaataagaaaaagccagcacagtgaggctggtrtggtatcagggccaggaggtaggaagtctctttttgagacagggtctcactctgttgcccaacctggagtgcagtggctcgatcacggctcactgaagat

SEQ ID NO: 347583 - DNA, 201 bp, Homo sapiens
gtgtgtcccctgaccccactgaataagaaaaagccagcacagtgaggctggtatggtatcagggccaggaggtaggaagtctctttttgagacagggtctyactctgttgcccaacctggagtgcagtggctcgatcacggctcactgaagatctcaaccttctgggctcaagcaatcctcccacctcagcctccagagta

SEQ ID NO: 347584 - DNA, 201 bp, Homo sapiens
gaagccaactcagggagtcttgactagcctttttggttcgtgtacaattttttgtagaaacatatgctttcatttctcctgggtaaatgcccaagaatatmatggctggttaatactgtagaagtgtgtttaactttttttaaaagttattacgaggctttcaattcttgaacaaattcatcaatgcttgggatggtcagt

SEQ ID NO: 347585 - DNA, 201 bp, Homo sapiens
gatgcagggcactggcacagaacatttgggatccccaaggccaccctgaggtccagtgatttgctaggaggactcagaactcagcacagccatgatcctcrcagtgacagcttattcctgtgaaaggatatggatgaaaatcagccaaggggagcggcgcacgggcggggcagagccctggagacccgcatggagcactgg

SEQ ID NO: 347586 - DNA, 201 bp, Homo sapiens
ttcaattcttgaacaaattcatcaatgcttgggatggtcagtcttgtaaatttcagccgttctaacaggcatggaatggtgtcttcttgtggtttaaactrgcattttcctaatgactaatgatgaagatatttttgtgtgtttatttgtcttccatatatctttttttttttttttttggtgatgtgtctttttaaaaac

SEQ ID NO: 347587 - DNA, 201 bp, Homo sapiens
acctgttactgcacgcacagtacgggctcttggtacctgtgtgttcttccctgtggcccttgagtggctcagtgataccctttgatgtaccccagggtcarcccacacagacacaccccaggttgctctctcctctgccccctctccctgataacccccctcagggtgtccttgaggctgggcctgcgtttggttcatctg

SEQ ID NO: 347588 - DNA, 201 bp, Homo sapiens
gcttagaggtcattaggggttcagcagatgccaagtggcaccacgtgaatccatttaaatgttggtccccatagggttcctttggaaagaaaacagtttcrtggctaaaagtaatcctgaagcctctgctctagtccaatctctgccattcataggttttcagggccagagaggggcggggcctttcccagtgtcccacag

SEQ ID NO: 347589 - DNA, 201 bp, Homo sapiens
cagggtgtggtggcacgtgctgtcatctcagctcctcgggaggctgaggcaggagaattgcttgaaccagggaggaggaggttgcagtgaactgagattgmgccactgcactccagcctgggtgacagagcaagactctgtctcggcttaaaaaaaaaaaaaaaaaaaaaagtagtggtaggaggctatcttttgggaggg

SEQ ID NO: 347590 - DNA, 201 bp, Homo sapiens
acgggctcttggtacctgtgtgttcttccctgtggcccttgagtggctcagtgataccctttgatgtaccccagggtcaacccacacagacacaccccagrttgctctctcctctgccccctctccctgataacccccctcagggtgtccttgaggctgggcctgcgtttggttcatctgtgtttggttcctctgtgccca

SEQ ID NO: 347591 - DNA, 201 bp, Homo sapiens
catggttttctcgtgtcctcctaaaagtctaggaaaagtcctgcctccctgggtggctttatgatgtcaggtaccttcctccatagaaaagattttaggcygtgcgcagtggctcatgcctgtaatcccagcactttgggaggccgaggcaggtggatcacaagatcaggagttcaagaccaggctggccaagatggtgaa

SEQ ID NO: 347592 - DNA, 201 bp, Homo sapiens
agctactcaggaggctgaggcaggagaatcacttgaacccgggaggtggatgttgcagtgagctgagatcgtggcactgcactccagcctgggcaacagarcaagattctgtcttgggggaaaaacaaaatagagaaaaaagaaaaaaaggaagggaagcagtcagattggaggctggtaagaggagcatggaggatcagg

SEQ ID NO: 347593 - DNA, 201 bp, Homo sapiens
cttttggagtagctgggaccacaggcacacgtcacttagcctggctaatttttgtatttttagtagagagagggttttaccttgttgcccaggctggtctygaactcctgagctcaggtgatccacctgcctcggtctcccaaagtgctgggattccaggcgtgagccactgtgcccagccagggcaacatttttattgag

SEQ ID NO: 347594 - DNA, 201 bp, Homo sapiens
agcttgctatgtgccaggcattgtgctaagggctcacgtgcatctcttatttaaccttcacacaatgaggtaggtgctgcatgtgatcctgcccactctayaaatgaggacaccagggcacagtgggttagaaggtgacccatagctagtaagcgccgagctgatgttccagcctacatcaatctaagtccagagccaggg

SEQ ID NO: 347595 - DNA, 201 bp, Homo sapiens
gttttaatggcacagagtccaggaaggaagtcatgagcaggcctgttcccatctagctggctgatttctccagggagctaactggggggctgctgcctctyctggccttaccctcgctctgcccccaggagctcttggcttaatggtccctgttattttaattggttgcaatacttccctgtccctctctgactggcttag

SEQ ID NO: 347596 - DNA, 201 bp, Homo sapiens
ggactcaataaacggtttattcgggatcccagtgcgcagaaggcagggctcgtgtgcctgcagattcgtaggtctcatgttcctcttaacccctccgtggsggacagagctttagcagtcactgcactccacacacggccatggaattggagcgtgagatcaaacatgttccctggccttggtgtgtaggagggtgtgtgt

SEQ ID NO: 347597 - DNA, 201 bp, Homo sapiens
ttccccgtccttcccaagcactggctgttggcagtgggcagatggaggggtatgcagcagatgcatttcaagttccttctgcccctgaggtcctccccccrccaccctcctatctgtgggggctgctgaaccgtcctcttgacccagcccttgactgagagtacaagagaaatgaggacttggccttggaggtgcagaaag

SEQ ID NO: 347598 - DNA, 201 bp, Homo sapiens
atttatttatttttttgagatggaggcttgctctgttgcccaggctggagaccagcagtggcacggtctcgggtcactgcaacctccgcctcctgggttcragcaattcttctgcctcagcctcctgagtagctgggattacaggtgtgtgtgccaccatgcccagctaatttttttttttttttttttgagacaaagtct

SEQ ID NO: 347599 - DNA, 201 bp, Homo sapiens
aggctggtctcaaactgctggactcaagcgatcctcccacctaggccacctaaagtgctgggattataggcgtgagccgctgtgccgggctggctttttamaaacttgtagtaagatgcacataacataaaatgtgctgctgtaaccactttgaagtgcacagttcagtggcaaagcacactcgcattgtggtgcaaccat

SEQ ID NO: 347600 - DNA, 201 bp, Homo sapiens
ttatttttaaattattcgtatttttaagaccgggtctcactctgttgcccaggctagagtgcaacggtgtgatcacagctcattgcagccttaacatcccrggttcaaacgattctcccacctcagcctcctgagtagctggaatgacaggtgcatgccaccatgcccggctaattttttgtatttttggtagagatgggg

SEQ ID NO: 347601 - DNA, 201 bp, Homo sapiens
ggctggggcaacttcagcccagggacacacggggaggttgctgaccttggttcctggtcccctgggggggcaggtgccgaatcagggtcatcgacaccttygggacggaacctgcgtacaaccacgaggagtacgccacgctgcacggctaccggaccaactggggctactggaacctcaaccccaagcagttcatgacca

SEQ ID NO: 347602 - DNA, 201 bp, Homo sapiens
ccactttgggtctgcagtgttgaggatacgctgctccctcagtttccctttcggaggctcccccccaacaactgcacgccttgtaccgcacccccatcccygcacccatgctttgtggtagcttcggctaaagagcacccagactgtgcctccatctgcctttggactcccttttcctctgagccagggaccctgaggggg

SEQ ID NO: 347603 - DNA, 201 bp, Homo sapiens
agccccactttgggtctgcagtgttgaggatacgctgctccctcagtttccctttcggaggctcccccccaacaactgcacgccttgtaccgcacccccayccccgcacccatgctttgtggtagcttcggctaaagagcacccagactgtgcctccatctgcctttggactcccttttcctctgagccagggaccctgag

SEQ ID NO: 347604 - DNA, 201 bp, Homo sapiens
agctcatcacctccccagcctgactctgcttatgatgtgggtccctgaagggcctccctagtaggaggtgtcctgggcctcctgcagagctggctggcacmtgaaccctgaatcctggggaggtgggcatccccgggagatgggacccgatggcctggctgcttcccagtctgggttgggagcaaaggatggtcacatcca

SEQ ID NO: 347605 - DNA, 201 bp, Homo sapiens
gcagcttctctccacctctttccatcacagcgctgtcggcaggtgaccagaaacatcatcgacacggcaccactttggacggtgtgctaacgggatggtgygcacagtcccctccccgagcttctgagcatgcgcaaagcgagcatgcacctttcaggccggtacttttccacctggcctgaatggtttcaaggagcccag

SEQ ID NO: 347606 - DNA, 201 bp, Homo sapiens
ccgagtagctgggactacaggaatgtgccaccatgcccagctaatttttgtatttttagtagagacagggtttcaccatgtgggccaggctggtctcaaaytcctgacctcaggtgttccacccacctcggcctcccaaagtgctgggattacaggcgtgagccactgcccccggccacgtttcttctttttataaggaca

SEQ ID NO: 347607 - DNA, 201 bp, Homo sapiens
aaaggtctggacgggagtgttttgagttttcagcaggattggtggaaatgcacagccgagcctcccgggcacctttggttgaaggttgtcgggggacggcrttttcaattcatgtcactgctccagccaatcacttagcgtaaaattgcccatgaaagtaaacttaaattacaagtgataaaactacagcctcctctccca

SEQ ID NO: 347608 - DNA, 201 bp, Homo sapiens
agagcaagccagatgtggagtcatgggtgcctgtgagaagatgcttctagaaggagatgtggccagcaacacattgctcattgaaaagccaagtaagaagragactgaaaaatgtccaaagaatttggtcacatgaggctgggtggggcggctcactcctgtaatcccagcactttgggaggtcacggcgggaggattgct

SEQ ID NO: 347609 - DNA, 201 bp, Homo sapiens
cgaagagcgtctggggaggagacggggcctcggtgggtaataaacacatcccgtctgtaaatgagaggatctatttgtatctcccagcgtcccagctttcyttatttatatggaaatatggagggaacgtgtgcctgttctgagttgtatcactggggcctcacattagatatatttcaatttagctgatgccaagagtgg

SEQ ID NO: 347610 - DNA, 201 bp, Homo sapiens
cttcctgctttcctagcatcagctgtgctcatcaattttatttgcacaatttcaagcatcattaatagtacatggcatgagaaaacattactgagctcttyctccatccatgagtgaaattgggtttagtagaaaattagttgacttaactggcaaatgatgaaagcttgagaggagaatgtttaagtaaggaggactagg

SEQ ID NO: 347611 - DNA, 201 bp, Homo sapiens
tggtgaagtgactctggggaagcgatgtcagcttgctctgctgacagtcccggggccagtggtggcttttaggggagtgggtcactgggggagagtcggcytgacctgcttccctcctgggtacccaccccctgcctagtctttgggcatttccagagcacaaaatgtgcctggtaccccgagggctcattgggaaggggt

SEQ ID NO: 347612 - DNA, 201 bp, Homo sapiens
atggttttctcgtgtcctcctaaaagtctaggaaaagtcctgcctccctgggtggctttatgatgtcaggtaccttcctccatagaaaagattttaggctrtgcgcagtggctcatgcctgtaatcccagcactttgggaggccgaggcaggtggatcacaagatcaggagttcaagaccaggctggccaagatggtgaaa

SEQ ID NO: 347613 - DNA, 201 bp, Homo sapiens
aggctgcaatgacccatgcctctgtatgtcctcagggtttttgtttgtttgtttgagagagggtctcgctctgttgcccaggctggagtgcagtggtgcartcgtggctcactgcagcctcaatctcatgggctccagcaatcctcccacctcagccctgaaagtagctgggattacaggcacatgccaccatgcccagct

SEQ ID NO: 347614 - DNA, 201 bp, Homo sapiens
aggcacatgccaccatgcccagctaatttttgtattttttattgaaaaggggttttgccatgttgcccaggctggtcttgaactcccgagctcaaccaatscatccaccttggcctccccaagtgctgagattatgggcatgagccactgcacctggcctgctgccagtttttataggagcgtttctttcttttcccattt

SEQ ID NO: 347615 - DNA, 201 bp, Homo sapiens
cactccagcctgggtgacggagtgagactctgtctcaaaaaaaaaaaagaaaaaaagaaaaaaaaaggcaaaaaaaaagaacagattttaaatggcattgrtttcctagggcagcacaaactgattgtgttaaaccagctgtccccaaccccctggcatggaccggtaccgctccatggtctgttaggaacctggctgcac

SEQ ID NO: 347616 - DNA, 201 bp, Homo sapiens
agggtaaattgaggccaagagaaggacggtgacctgctcacctgtctggtccgcagcagagcgggcctggagtccaggcttctgccccatcccccttgacygggcccatgccaccatgctgctgctgcagcctccactttgttgactttcgggggcctctgcagctctaggccagccctcatagtttttggcccatcatct

SEQ ID NO: 347617 - DNA, 201 bp, Homo sapiens
acgaaaccagtcctgggtgctaaaaaggttgggaaccactggattaaacaacagaaattgatcgtttcacagttctggaggccagaagtctgagatcaagrcgtcagcaggcagtgctagggaaggatctgttccaggccctgctcctggccttgactgatgggagcacaatttgagtcttcacatggtgtcctctctgtt

SEQ ID NO: 347618 - DNA, 201 bp, Homo sapiens
tttgcacatatgtttaacacacacacattataaattcatagtgtgtgattttaacaaattccatgtaagtggcatctcacagcacatattccactgcccctttttttttttttttttttggacacagagcctggttgactctgtcacccaggctggagtgcagtggcacagtctcagctcactgcaacctctgtctcccgg

SEQ ID NO: 347619 - DNA, 201 bp, Homo sapiens
ttccaaagctcgaggggagactcctccctgccccttcctggctgctcctggtggatgctggcagtgcctggccttcttcgtcccacagatgcatcactccrctctctgcctgcttcgtcacatggtcttttcccctgggtgtctgcatgtggccttcttagaaggaccccagtcattggacttagggtcagcctgatccaa

SEQ ID NO: 347620 - DNA, 201 bp, Homo sapiens
cctttttttttttttttttttggacacagagcctggttgactctgtcacccaggctggagtgcagtggcacagtctcagctcactgcaacctctgtctccygggttcaagcgatcctcccaccccagcctcctgagtagctgggactacaggcgcccaccaccacacctcggtaatttttgtgtttttagaagagacaggg

SEQ ID NO: 347621 - DNA, 201 bp, Homo sapiens
tatagctcacataacaggctgagcaaaaataatcgctccaggcccagctgcctcctgtgaatatcccgaagcctcaccttgtccccggcatcctggtgctyactgggctgtggcggcccagccctccctgatcactgcgccccttgactctgcagctcttcatcgggtttggcttcccctacgagggccccgcccccctgg

SEQ ID NO: 347622 - DNA, 201 bp, Homo sapiens
tggctgctcctggtggatgctggcagtgcctggccttcttcgtcccacagatgcatcactccgctctctgcctgcttcgtcacatggtcttttcccctggstgtctgcatgtggccttcttagaaggaccccagtcattggacttagggtcagcctgatccaatatgacctcacctgaactaattacatctgcaaagaccc

SEQ ID NO: 347623 - DNA, 201 bp, Homo sapiens
gacactcttactctgggctggagtgaagtggcacgatcttggctcactgcaacctctgcctcccaggttcaagtgattctcgtgcctcagcctcctgagtrgctgggattacaggagagcaccaccacgccagttaatttttctgttctttttagtagagatggggtttcaccatgttggccaggctggtctcgaactcct

SEQ ID NO: 347624 - DNA, 201 bp, Homo sapiens
aaccaatcctctaagacttctcctgcagaggggctcgggcaaggctggggagggggactacatagacttttccaatgtggggagcagcgtttggcccaacytccaagacacattgttaagctaaaagagcgagacactccaccttggggataacttgcccccccgggaggcccagaaagcggggtcgggggagggctgtgt

SEQ ID NO: 347625 - DNA, 201 bp, Homo sapiens
ttctaagcactgtgctcttgatgattgattcaatatgtggttatatgtggtttggtttttgtccctttctaagaggttttatttatttatttatttatttwtttgagatggaggcttgctctgttgcccaggctggagaccagcagtggcacggtctcgggtcactgcaacctccgcctcctgggttcgagcaattcttct

SEQ ID NO: 347626 - DNA, 201 bp, Homo sapiens
ttaagctaaaagagcgagacactccaccttggggataacttgcccccccgggaggcccagaaagcggggtcgggggagggctgtgtgcatgaaggtgctgsgatagtcgcgggtatttctggtgggacacacaagaaattgataactgggggaaggactgactgtctgcggtgagaggaaacttccctttcattgctttcc

SEQ ID NO: 347627 - DNA, 201 bp, Homo sapiens
cataaggccacattctgaagttccagctggatatgaattttggagacactcttcagcctaagtgatggagccccgagcacagggcccacgctggccagcayctggttccacacaggaaagccaagtccctgtcctggaggactcaggactccattcggggtttcaggctggccactcacaaccacacccaccgtgggtcag

SEQ ID NO: 347628 - DNA, 201 bp, Homo sapiens
gggtcactgcaacctccgcctcctgggttcgagcaattcttctgcctcagcctcctgagtagctgggattacaggtgtgtgtgccaccatgcccagctaatttttttttttttttttttgagacaaagtctcgcactgttgcccaggctggagtgcagtggcatgatctcggctcactgcaagctctgcctcccgggttca

SEQ ID NO: 347629 - DNA, 201 bp, Homo sapiens
tccagcctctgtccagggtggcagagtgagagcccttctctctctccctctctctctctgtgtatataaaaaaatattcattcctgtcaaaggagtgtccmtcttgcccctgtaggtcagcatggaaagcagctccacgggcttcatctggactgatgtcagagcctggcagacatcaaatcggcatgtttcttcttggag

SEQ ID NO: 347630 - DNA, 201 bp, Homo sapiens
tcatctccttgtatcatactggtaatgaaccttgatgagttttggatagatgaaaaatactcctacttccttcttcctgaggactttttgagcaaatgaakcaggtagcttttacgtctcttctctttctttgtaatctcacagaaggctgtcgtgcattcaactttgtgctccaaaaagccatgtccaagtcctagcccc

SEQ ID NO: 347631 - DNA, 201 bp, Homo sapiens
tccccgggcaggtggtaatgacaccacacacagcccaaccccagctctgctccttttaacagggggagtgcatgtgtgcacgggtgtatttatgtatttatttttttgtttggaagagaggagtcctctctgctctcacttggggagggggcctccccagcatcagggtggggagctctggatgggccaaggaggagctga

SEQ ID NO: 347632 - DNA, 201 bp, Homo sapiens
gacaaataagtcaaatggcgaggaaatcccggggcaatccctgctgtaacagagacctaactgccgcagatggggccacaaagggaggcacagtccacccmagagaaggcttccaggaggaggtgtcgtgtgagaggggccccgaaggctgagtagaatttcctcatccgagacaagggaggagggcagtgcaggccgagg

SEQ ID NO: 347633 - DNA, 201 bp, Homo sapiens
aaacagaaccattgtccacaaggtgcttttattttaacaattattattattgtttttggagatggagtcttgctctgttgcccaggctggagtgtagtggygtgatctcagctcactgaaacctccgcctcccaagttcaagtgattctcatgcctcagtctcctgagtagctgggataacaggtgtgcgccaccacaccc

SEQ ID NO: 347634 - DNA, 201 bp, Homo sapiens
caaataaatgtatagtctaatgtctggtcggtaagtgctgtgatgaaaaataaagctgttaggggacaatgagtgactggggtcaggagagacctctcacwggcccatgagcacagttctgtatggagaggggttgtgtccagcagggctctgggtgggctggatggtcaaaggtgcggtgggagggaaatggaggcagag

SEQ ID NO: 347635 - DNA, 201 bp, Homo sapiens
tagaaaagattttaggctgtgcgcagtggctcatgcctgtaatcccagcactttgggaggccgaggcaggtggatcacaagatcaggagttcaagaccagsctggccaagatggtgaaacttccatctctactaaaaatacaaaaattagctgggcgttgtggtgcacctgtaaatcccagctactcaggaggctgaggca

SEQ ID NO: 347636 - DNA, 201 bp, Homo sapiens
ggctggagaacagcagtgagctgcaccgggccggcggcgacctgcactttcccgcagacaggtgaggggacgtggggaggaggcacacggagcaggggagyggtggcacctgccactccatccggggtgctgtccgtcatctccttttgtgaatctggagaagatttggaccacactgtggtacagcccagagtgcatttc

SEQ ID NO: 347637 - DNA, 201 bp, Homo sapiens
tccccagtgcagtcctgggggatgggattgaggccccaggctcagggccctagaaaagatgtagaaagaatgggaggattcatcctgagagcacccaggayacccttggttgctagagtgtggcttagtggggggttgggccacagaggcaccctgtggaggtggcccagatggtggggcgtctggcatcatgcccagggc

SEQ ID NO: 347638 - DNA, 201 bp, Homo sapiens
ttcctattccttcctgccccaagagggtagcttttccgggtggattaatttgggcacagtgcaggggccaactctaaccaggtgacctgcggaaatgctcmattcccctggaccaccctacccctacccctttcctcttgggatttagactcctattcatctggcctggggacactcagaaatatattctaaccagccagt

SEQ ID NO: 347639 - DNA, 201 bp, Homo sapiens
cttagaaagtgcaggagaagctggagcaggccccagcctcatgggagggtgccagcccctgtccccaggccagcggggaatgatggtggccgcaggttgargggcagagagctgaggtctggacccctccaggcagttttccgaagcaacctgtcccaccttctggacctgatgggcagcgggaaggagtccctgatcttc

SEQ ID NO: 347640 - DNA, 201 bp, Homo sapiens
ggtcactgcaacctccgcctcctgggttcgagcaattcttctgcctcagcctcctgagtagctgggattacaggtgtgtgtgccaccatgcccagctaatttttttttttttttttttgagacaaagtctcgcactgttgcccaggctggagtgcagtggcatgatctcggctcactgcaagctctgcctcccgggttcaa

SEQ ID NO: 347641 - DNA, 201 bp, Homo sapiens
agcaattcttctgcctcagcctcctgagtagctgggattacaggtgtgtgtgccaccatgcccagctaatttttttttttttttttttgagacaaagtctygcactgttgcccaggctggagtgcagtggcatgatctcggctcactgcaagctctgcctcccgggttcaagcgattctcctgcctcagtctcctgagtag

SEQ ID NO: 347642 - DNA, 201 bp, Homo sapiens
catactggtaatgaaccttgatgagttttggatagatgaaaaatactcctacttccttcttcctgaggactttttgagcaaatgaagcaggtagcttttaygtctcttctctttctttgtaatctcacagaaggctgtcgtgcattcaactttgtgctccaaaaagccatgtccaagtcctagccccaggacctgtgacta

SEQ ID NO: 347643 - DNA, 201 bp, Homo sapiens
ctttctttccctccctccctcccttccttcctccctccctccctcccttcctccctccctccctccctcccttcctctctccctccctccctccctccctyccttccttcctttcttttttcttttctttttttttttttaacagaatcttgctctgtcacccaggctggagtgcagtggtatgatctagactcactgcac

SEQ ID NO: 347644 - DNA, 201 bp, Homo sapiens
ggtcagctttgggggaggatcctcttttgggttatagatgatcagcttcttgctgtgtcttcacacagtgggaagaggctgagagagctctctgggggccttttttttttttttttttttggagactgattctcccaccgtcacccaggctggagtgcagtggcacaatctcggctcactgcaacctctgcctctcaggtt

SEQ ID NO: 347645 - DNA, 201 bp, Homo sapiens
ctgaggaacactgagggctgctgctacctctggaagctgggagggaggcctgggggaggctcccctagagtctaaaggcgccggccctgctgccacctcgytgtctgatttccagcctccagagctgccagaggagaaatgggtgtggttttaagccacctggtttgtggaaattattgcagtcaccccaggaaactaaca

SEQ ID NO: 347646 - DNA, 201 bp, Homo sapiens
gtcagctttgggggaggatcctcttttgggttatagatgatcagcttcttgctgtgtcttcacacagtgggaagaggctgagagagctctctgggggccttttttttttttttttttttggagactgattctcccaccgtcacccaggctggagtgcagtggcacaatctcggctcactgcaacctctgcctctcaggttc

SEQ ID NO: 347647 - DNA, 201 bp, Homo sapiens
ggaggcctgggggaggctcccctagagtctaaaggcgccggccctgctgccacctcgctgtctgatttccagcctccagagctgccagaggagaaatgggygtggttttaagccacctggtttgtggaaattattgcagtcaccccaggaaactaacacaaaaatggtggcattttttattttaagagttttatgtttgtt

SEQ ID NO: 347648 - DNA, 201 bp, Homo sapiens
tcagctttgggggaggatcctcttttgggttatagatgatcagcttcttgctgtgtcttcacacagtgggaagaggctgagagagctctctgggggccttttttttttttttttttttggagactgattctcccaccgtcacccaggctggagtgcagtggcacaatctcggctcactgcaacctctgcctctcaggttca

SEQ ID NO: 347649 - DNA, 201 bp, Homo sapiens
gcctgtttcagccccatgcactgcccttcagcacacatgcagtaatgcacggacatgcctgacacgtgcagatagggtcacatgtgcagatatgggcacaygtgccattgtgggcacacatgcagatgtgggcacatgtacagttgtggccacacatgcaaatatgattacatgtgcagttatgggtatgtgtgcagttgt

SEQ ID NO: 347650 - DNA, 201 bp, Homo sapiens
gactgcgggcctggaaagcagcacactccgggcactcctgctgtctgggcccagccttagagcccaactccacggcactaacagaaacacaaagacttccrttcttagaaaacagtggttcgaaagtctgctaactgattgggatttggtaactgaatgggaagtgaagatccccagactctccgcccacctgctaaggat

SEQ ID NO: 347651 - DNA, 201 bp, Homo sapiens
atgattacatgtgcagttatgggtatgtgtgcagttgtgggcgcacatgcagttgtgggcacgtgtgcatatgtggggacatgtgcagatgtgggcacctrtacagttgtgggcacacgtgcagttgtggccacatgaagacatgttctctgactgctcagggaaggtggacgtgaggcctggggccgaggggtgggggat

SEQ ID NO: 347652 - DNA, 201 bp, Homo sapiens
gtggggacatgtgcagatgtgggcacctgtacagttgtgggcacacgtgcagttgtggccacatgaagacatgttctctgactgctcagggaaggtggacrtgaggcctggggccgaggggtgggggatgtccactaaagggctctctgcagatatgatcacacatgcagttgtgggcacaacatgcagttgtgaccaaca

SEQ ID NO: 347653 - DNA, 201 bp, Homo sapiens
atgaggtctgcccatccaggcagctgctgagtggctgttcgcaccagctcctcactgcatctgaaccccctgaggaggccgggggcaacctaggcccgggwtgaccttgtgggtgggttgtgcggctgatgagctttaaggtgggaaagcctggcagcggattgtgtgggaagctgcctcccgcacccaggcctccctccc

SEQ ID NO: 347654 - DNA, 201 bp, Homo sapiens
aacctaggcccgggatgaccttgtgggtgggttgtgcggctgatgagctttaaggtgggaaagcctggcagcggattgtgtgggaagctgcctcccgcacscaggcctccctccctgggctcctccttggaccagggacttcagcaaggtgacctctccctacagtgtcagaaggccggcgggaccagtgtgaggcaccca

SEQ ID NO: 347655 - DNA, 201 bp, Homo sapiens
gaaattcttaattttaatgtaataaaagttatccatctttttctttatagttagcaattttgtgttttgtggagttctctgttctctcttttctttctttytttcctttctttctctttctttcttcttttttttttttttttcagatagggcctcgctctgttgcccaggctggagtgcagtggcacaatcatggctcac

SEQ ID NO: 347656 - DNA, 201 bp, Homo sapiens
tgttccttgtgctccccctggccacgaggcagctccaggtatggaaaccgcttgccgcctgccccctctaccctctgctcccttcccctctccagcagccrctccaggggtctctccttgtgatgttctcctgactcaggctctctggggcttgtggctcctgtggatggaccaaggtggggaagagggtgatggggacag

SEQ ID NO: 347657 - DNA, 201 bp, Homo sapiens
gaagctactgatcaggggaagcccctgtatcctacatcaggcctgttacatgattattggatttaatcactctcccagctgtactggttaggattagatcyggctgtcgcagggaaaccccaaaataatcgtgatttaaacaagatggaagtatattttctttcctgcttgcaaatttcagaggtcgggagggctggtgtg

SEQ ID NO: 347658 - DNA, 201 bp, Homo sapiens
gagggctggtgtggcgttccccggggtcttcttaccttgacccatcgtgtttagtttccaccttggccttgcctcatggttcaagatggctacaggtattmgagtcattatatctgcatcccagccaacaaggagaaggaaggagcagagcgggacaccacgtttcccacactgctcatcagctccatcttggccacaggg

SEQ ID NO: 347659 - DNA, 201 bp, Homo sapiens
tggcattatttccaggcagctcagctcaatgtgcccagccctgttctgggttctatgactgaggaaggaggagagaaggaggactcagggggatctcaccrtctgggttgtgtccacccaagacgctactgttcactgagagcttgctatgtgccaggcattgtgctaagggctcacgtgcatctcttatttaaccttcac

SEQ ID NO: 347660 - DNA, 201 bp, Homo sapiens
tcttcttgtggtttaaactagcattttcctaatgactaatgatgaagatatttttgtgtgtttatttgtcttccatatatctttttttttttttttttggkgatgtgtctttttaaaaacttttgcccattgaaaatattaggttgtttattttcttactatggagttgttagagttctttatatatcctggatccaagtc

SEQ ID NO: 347661 - DNA, 201 bp, Homo sapiens
cataaagaccagtaccttgtatagggataaacggagcttaaactgggcctgcaaagccacggggtgaggtgagaatcaaaggaaaccgaattaatgtgttaaaaaaaaaaaaaggcaagcagcttcctggagaaagacccccagggctatctttgtgtgagaagatctgccagctgaggggaatccatctcaatagaagtt

SEQ ID NO: 347662 - DNA, 201 bp, Homo sapiens
tgttccacaatttgagcactacctggagagattatttctagccacagaccaaaggcacagagagaaataaaaccagggaatttttagcttagaagagaccrtggagatttgcctgagcacgtgtcccacatgtggaggcggacaccagagcgatgtggtggctcgtggaaggctacccagcaaatgcctgctggagctcct

SEQ ID NO: 347663 - DNA, 201 bp, Homo sapiens
tcctgcctcagcctcccgagtagctgggattacaggcgggtgccaccgtgcccagctaatttttgtatttttagtagagacaggatttcaccatattggtyatgctggtctcgaactcctgacctcaggtgatccacctgctttggcctcccaaagtgctggaattataggcatgagccactgcgcccagcctctgctata

SEQ ID NO: 347664 - DNA, 201 bp, Homo sapiens
atgtgaatcagcttttcttcattaacttctacacaggtggtttccttgtgagtccccaccagagcctgcctactctcttgctggtctgattggccttctckccactaatgctaatgctctgtagcacaggagtgttggagagcagaggatgctgatgaggacagagccatggcaatcttaggtcactagggcccagcaagc

SEQ ID NO: 347665 - DNA, 201 bp, Homo sapiens
cctccacatgcacccatgcatacacgtgcatatccaccacatgtgtgcacatacatgcatactcacccactcacatgcacactcatggacacatactcatrgcctctgcacccacacatgcacacccactcacacacttgaatatgcacacactccacatacacatgtgcaaatgcatgctcctgcatgtgcagacatgat

SEQ ID NO: 347666 - DNA, 201 bp, Homo sapiens
attgaggcctgtctgtaaggaagaggactgggaacgaccggagggccgagttcccgttcctcttcctgcagccgtgctggcagccagcggggtgagtgtgyggtctcctccagctctcctgggagcatggccctattcttagcactgagtttgcttgctaggaaagaacgctggggaagaaagtgccagctttggacgcca

SEQ ID NO: 347667 - DNA, 201 bp, Homo sapiens
cacccccaatgccgagcatggcagggcccccgacggctgggccttctcccgccccatgtgtctgcccatccctcccacaggtagacccctacctaccctaygagtacacctgcgaggggatgctggagcggatccacgcctacatccagcaccaggtcagtgagccctctggtccctgccccagatcctgtcagaccagag

SEQ ID NO: 347668 - DNA, 201 bp, Homo sapiens
ctctgctgacagtcccggggccagtggtggcttttaggggagtgggtcactgggggagagtcggcctgacctgcttccctcctgggtacccaccccctgcytagtctttgggcatttccagagcacaaaatgtgcctggtaccccgagggctcattgggaaggggtaggggctgtctccccaggtctcaggggtttctgga

SEQ ID NO: 347669 - DNA, 201 bp, Homo sapiens
tgtccccaaccccctggcatggaccggtaccgctccatggtctgttaggaacctggctgcacagcaggaagtgggcggcaggcaagcaagtgaggcttcgwccgtatttacggctgctcctcatcgctcgcgttaccacttgagctccgcctcctgtcagatcagcagcagcattagattcttataggcgtgaaaacccta

SEQ ID NO: 347670 - DNA, 201 bp, Homo sapiens
ggcagggccagcagagcagcagagccgtggctcagtgatggggaagtagagttggactgcccatcctcccccttgcagtaccagtccagccaaatggactyctgggtcaggcctagcttttggagacactgagctggggggtggttgggtgggtggagagaagggtcctggctagagtgccattgagccactagtcctgag

SEQ ID NO: 347671 - DNA, 201 bp, Homo sapiens
gaggtggaaaatggattttcttccagcaacccagcgtgtctcagggcagctttttctgattgattgaagccagtgttccacttgtggctccagcctgcttyctttgctgaggaccaaggcctggaggcccctcgtaagcttgtgggcactgcacttgtgtccaggcattcattagggccacccggctccctgttcccccgc

SEQ ID NO: 347672 - DNA, 201 bp, Homo sapiens
tcccttgctagctctcaacgcagtgttgtcccctgtcctgggctggtggcttaagttctggcaaggccttgtagagcaaaagcaactagaggccaggagcrggggctcacacctgtaatccctgcactttgggaggccgaagcgggcggatcacttgaggccaggagtttgagagcagcctggccaacatggtgaaacccc

SEQ ID NO: 347673 - DNA, 201 bp, Homo sapiens
gtggcagtcacctcctttaagatcctgggaaggatttgttctcaggaagccagtgataatttaccggagttttaatacctggcaagttcccaggcttctgygggtagaatttattttggcacaatatggcctcttgggaggaaatagagacagactcggagaggcccggctgtgcctaggaaaaggcctctgtcacctgtg

SEQ ID NO: 347674 - DNA, 201 bp, Homo sapiens
ggcaagttcccaggcttctgcgggtagaatttattttggcacaatatggcctcttgggaggaaatagagacagactcggagaggcccggctgtgcctaggraaaggcctctgtcacctgtgtgacccctggacagaacctagccaggctcttgaatggaattcctctgcctgtttcagccccatgcactgcccttcagcac

SEQ ID NO: 347675 - DNA, 201 bp, Homo sapiens
tagaatttattttggcacaatatggcctcttgggaggaaatagagacagactcggagaggcccggctgtgcctaggaaaaggcctctgtcacctgtgtgayccctggacagaacctagccaggctcttgaatggaattcctctgcctgtttcagccccatgcactgcccttcagcacacatgcagtaatgcacggacatgc

SEQ ID NO: 347676 - DNA, 201 bp, Homo sapiens
tctaagacacagcgagccggccccgggcctgacagccatggaaaaccagggcccggcaccccttctgtgtctctgcacctccctgggtttgcctgtggacrtctctgtgtccagagcaaggccattcaaggtgatgccaacactggcttccgctgcacccctccctgctgtcattcccgcaggccagcagttcccaggcag

SEQ ID NO: 347677 - DNA, 201 bp, Homo sapiens
atgtgggcacatgtacagttgtggccacacatgcaaatatgattacatgtgcagttatgggtatgtgtgcagttgtgggcgcacatgcagttgtgggcacrtgtgcatatgtggggacatgtgcagatgtgggcacctgtacagttgtgggcacacgtgcagttgtggccacatgaagacatgttctctgactgctcaggg

SEQ ID NO: 347678 - DNA, 201 bp, Homo sapiens
tgtggggacatgtgcagatgtgggcacctgtacagttgtgggcacacgtgcagttgtggccacatgaagacatgttctctgactgctcagggaaggtggaygtgaggcctggggccgaggggtgggggatgtccactaaagggctctctgcagatatgatcacacatgcagttgtgggcacaacatgcagttgtgaccaac

SEQ ID NO: 347679 - DNA, 201 bp, Homo sapiens
ggtgacaacaccaaggccctgggttccccacacggtgacaacaccaaggccctgtgttccccagaccacataggctgaaggccattggccaccatcccccyagtccagcccctctttttcttttccaaccaagcatttcccaggtcatagatctgttgaggtttgaggctttacgacatctacttttgttgtcacttttag

SEQ ID NO: 347680 - DNA, 201 bp, Homo sapiens
ggtgggtgggccggtgaggggctggtgtggctggacattcttaaggacagtggacagaaacctctgtcctgagggaatgagactgagctgcttgccaggtktgtgggcaggtccgagcccaccctaccgggcagacgggaggccagcctgccaaggcctgtctgccttctttgagatgccaccaagctgggcctgtttgca

SEQ ID NO: 347681 - DNA, 201 bp, Homo sapiens
tgccagctccatcttctcacccgattcactccccaccatttggtctgcttggggtcagggtttgggagcctggggcattgcagagcctgccgcctttgccygtgggccttactggcaggaccctcatgggaaggtcaccccggccggttctgtggctcacctctggcttttcccacttaggatgccccctggggccggcct

SEQ ID NO: 347682 - DNA, 201 bp, Homo sapiens
gaagtcagcgctggtgctgcctaccccacggtgacaacaccaaggccctgggttccccacacggtgacaacaccaaggccctgtgttccccagaccacatwggctgaaggccattggccaccatccccccagtccagcccctctttttcttttccaaccaagcatttcccaggtcatagatctgttgaggtttgaggcttt

SEQ ID NO: 347683 - DNA, 201 bp, Homo sapiens
ggtctgcttggggtcagggtttgggagcctggggcattgcagagcctgccgcctttgcctgtgggccttactggcaggaccctcatgggaaggtcaccccrgccggttctgtggctcacctctggcttttcccacttaggatgccccctggggccggcctcatggagcggatccaggctattgcccagaacgtctccgaca

SEQ ID NO: 347684 - DNA, 201 bp, Homo sapiens
gaccagatcctgcgccacagtctgctcctgcacagcaagggtgggtgccagggggcgggggtaccctctacccctagggggccaatgaactgggtgctggstgggccctgggagggtgggacacttggggtgtggccgacttctcctgacagcagctctgctggctcttcggggccccagtttaggctttcagcaggacaa

SEQ ID NO: 347685 - DNA, 201 bp, Homo sapiens
cacagcaagggtgggtgccagggggcgggggtaccctctacccctagggggccaatgaactgggtgctgggtgggccctgggagggtgggacacttggggygtggccgacttctcctgacagcagctctgctggctcttcggggccccagtttaggctttcagcaggacaactgggggttcactcccccgacccggcagga

SEQ ID NO: 347686 - DNA, 201 bp, Homo sapiens
ggtccctcggcggcccctccagtccctgtgatgtggggagcagcgagctgggggctgcaaacctcatttctgcctcctcagaaaacgctggggatgctttygggtgggtgcatgaggtctgcccatccaggcagctgctgagtggctgttcgcaccagctcctcactgcatctgaaccccctgaggaggccgggggcaacc

SEQ ID NO: 347687 - DNA, 201 bp, Homo sapiens
gtgtgtgtcttttctctcagtagtacatgtgtgagactcactatcttgtatgcggttgtagtcacttgcactttttttttttttttttttttttttgctgkgtagccttccattgtgtgagtacaccaccatatttttatccatccgaccattggtgggcatttggtcgtttccagttttgggcttttgcgaacagtgctg

SEQ ID NO: 347688 - DNA, 201 bp, Homo sapiens
ccagtgttcttcctctgccaaggacagaccaagagagcgtcttgtcagatggtggctggagaggaggaaggtggcagtggacgagcttcaggaaccatctrtcagggagactggaaggagccacccacgggaagggtcaaactcaggggttcccgcctcttagaaactggggccagggctggtctggggctttttattctg

SEQ ID NO: 347689 - DNA, 201 bp, Homo sapiens
atggaccggtaccgctccatggtctgttaggaacctggctgcacagcaggaagtgggcggcaggcaagcaagtgaggcttcgtccgtatttacggctgctyctcatcgctcgcgttaccacttgagctccgcctcctgtcagatcagcagcagcattagattcttataggcgtgaaaaccctattgtgaactgcacatgtg

SEQ ID NO: 347690 - DNA, 201 bp, Homo sapiens
ctgaacattgaccaataagcaagaccgatggaggccgtgccgtgtcgcctttcccagctctggcctggcctgtgttggggagggctgcaagggaagactcrtggaaatgacgtcgctggccctcatgagagatccatgcaccccaggtggagtggggagaacttggggagatcagataagaaatgaggacagaccaggccc

SEQ ID NO: 347691 - DNA, 201 bp, Homo sapiens
tcaagcgattctcctgcctcagctcctgagtagctgggattacaggcccacgccgccacgccaggctaatttttgtgtttttagtagagatggggtttcascatgttgcccaggctggtcttgagctcccaacctctggtgatccacccgcctcggcctcccaaagtgttgggattacaggcatgagccaccgcacccagc

SEQ ID NO: 347692 - DNA, 201 bp, Homo sapiens
gtcaaggccccccggccaagtctgaacattgaccaataagcaagaccgatggaggccgtgccgtgtcgcctttcccagctctggcctggcctgtgttgggragggctgcaagggaagactcatggaaatgacgtcgctggccctcatgagagatccatgcaccccaggtggagtggggagaacttggggagatcagataag

SEQ ID NO: 347693 - DNA, 201 bp, Homo sapiens
gttatccatctttttctttatagttagcaattttgtgttttgtggagttctctgttctctcttttctttctttctttcctttctttctctttctttcttcttttttttttttttttcagatagggcctcgctctgttgcccaggctggagtgcagtggcacaatcatggctcacagcagccttcccctcaagcaaccctcc

SEQ ID NO: 347694 - DNA, 201 bp, Homo sapiens
ctgcagtcccgcttcagcccgccccacagctccctcaaccacgagttcttccgaggcaagcccacctccagagaggtgagtggaaagcatcctggtccccratcaggaggggccgggacagagacccctgcaggtcctggaagaggcagactgagatgtggggcaaaaggagataggacaagtgtatggggtacctttctt

SEQ ID NO: 347695 - DNA, 201 bp, Homo sapiens
attatttttatgtgttgggaacattttaagtccactcttcaagctattttgaaatctacaatacattgttgttaagtatagtctccctactctgctatctttttttttttttgagatggagtctcactctgtcacccaggctggagtgcagtggtgcgatctcggctcactgcaacctctgcctcccgggttcaagcaatt

SEQ ID NO: 347696 - DNA, 201 bp, Homo sapiens
acaggcagctggacaatctggcttgcaaaatgccactggctggcccagcatagtggctcatgcctgtaataccagcactttgggaggccgaggcaagcggrtcacttgaggtcaggagtttgagagcagcctggccaacatggcgaaacctgtctctactaaaaatacaaaaattttgcatttttataggcatttattaca

SEQ ID NO: 347697 - DNA, 201 bp, Homo sapiens
tgctgggccgaggaggcaaccccaggggacggcaggggtcaggctggacctctgcggtccgggggtccgggaggcccggagagctggtgcaggccgtgggyggtgatgggggcgtcgggagcccatgggaagcagggcgggaagcaggcgtctctggaaagggccttgctcctccagggaaggccttgaatccctggcctg

SEQ ID NO: 347698 - DNA, 201 bp, Homo sapiens
tgctgggagagggaaacagcacgtccctcactctggctctcaccctggtgacatcttgttgtcagatccagctgttcgcactgtgcaggccacttaagagmcaaggtgtggggcccactcgcccgcctgcacccactgctgcacactaaactgtctgccaccggctccctctgaacagagagcctggaatatgcatcgatg

SEQ ID NO: 347699 - DNA, 201 bp, Homo sapiens
tgggtctggacttgaggaaggaagggttctgtgccttgttccctgctgtccccctggggttaccccagagcctggctcctgctggataatcaataactacrtgttgaaggcaggaacaggagtcctgttctgaccagccctccctcccacccagtgtgacagcacacacacctatatgacaccccttgcacaggtatgagg

SEQ ID NO: 347700 - DNA, 201 bp, Homo sapiens
ggcgtctggtgggtctgggcttgcatccttgtcatcacctaccagctgtgtgcctttggctgagtcacctggcttccctacagagaaggacagcagtgacyttctgcagaggttggattgaaggggctcacacgtggacattacccagcatggttggtgccacatggcacaagagtgaccagctgggagccctcctcctga

SEQ ID NO: 347701 - DNA, 201 bp, Homo sapiens
aggtgggaattagggatgggggagaggaggggtttttggccgggctctggtttttatgcctatctccctaagggggttagagagtcaaggtaactcacctmccccatggctcttgccccatctgggcaggatcagactcagtgccccagagtgcaaggggtgtaggagccctgctgtgctcggtgctatgcagttttgcct

SEQ ID NO: 347702 - DNA, 201 bp, Homo sapiens
ttctgttgggtatacctaggagtggagattctacgtgttgtaacattagttctcagaccaagtttatccaagccagtcttttcacatttcccaggcctcasaagctgagtgcctggaatacagaactgaagtccgggagaaggaggagacagacaagaaaagggccgctgagaacccaggagagctgaccctgattcactt

SEQ ID NO: 347703 - DNA, 201 bp, Homo sapiens
gagtcaaggtaactcacctaccccatggctcttgccccatctgggcaggatcagactcagtgccccagagtgcaaggggtgtaggagccctgctgtgctcsgtgctatgcagttttgcctgggtatgggggtgggggtccaaccccagctgcaggtctgggtctaaagatggatggaaccacataggagagcacttgccca

SEQ ID NO: 347704 - DNA, 201 bp, Homo sapiens
tcttgtagttgagctctctttatcctatagtgggggggccctcctgggtctggagctcagcccccatcctttcattctcccttgcttccttcactcatgcrctcattcgtaaaacatttgtgcagccggtacgtggtggagcgtcagggcacgatggcccttcctgccctcctgacccgcctccttcctctccgcaggctt

SEQ ID NO: 347705 - DNA, 201 bp, Homo sapiens
acatcagtgactgccgcttccctgggacccttgagtgtcagggatgtccccttggccagaggccccaggacgagtctcctaagaagtggggtacacagaargcaggaccgagcttggcgcagttggactttctagcaccacccaacgctgatgaggaagaaaggaggtggttgcaggcttgagtcaaacagttagatttca

SEQ ID NO: 347706 - DNA, 201 bp, Homo sapiens
aggcagggctggggccgcgcgggactcactggacccagccaggggcccccagggcccagcggtgccggggcagccccctctcctcccaggcatccgcggarccggcccgcagcggggtggggagggggcgctgcccagtggacgcccggcggggcccgagtgtcaccccgtgggtagctgggcagcgaggaagctggggga

SEQ ID NO: 347707 - DNA, 201 bp, Homo sapiens
ggtgggaaagcctggcagcggattgtgtgggaagctgcctcccgcacccaggcctccctccctgggctcctccttggaccagggacttcagcaaggtgacytctccctacagtgtcagaaggccggcgggaccagtgtgaggcacccagtgaccccaagttccctgactgctcagggaaggtggaggtgaggcctggggct

SEQ ID NO: 347708 - DNA, 201 bp, Homo sapiens
cctggcccctcacccaggcacaagctggcagaggccaacctcagggaaacagcttctctgctcagtgcatccaccccacccatcaatccaaatcccccagraagagtctccctcaggtgtcggtgctttctcacagcaaatgattaaatctccaagtgtcaccgccagcagccggattcccccagagactcagaggagtgg

SEQ ID NO: 347709 - DNA, 201 bp, Homo sapiens
cagagactcagaggagtggccctggctgccctgtccctgctcctcctggcccagccaacagctggacggagagtcttcctgccccatttctggggccaccrctggctgcatgaagtctgcccttgtaggagtcgtccacagccgtgaagtcagctccccactggttctgaacgccctaaggggtgggcggtggtgccgcag

SEQ ID NO: 347710 - DNA, 201 bp, Homo sapiens
ctgaacgccctaaggggtgggcggtggtgccgcagaccccttccttggtgaccatctgggatcactgcaggtggatcccgccctggctccagccctggccrccttggaggctgctccctgaccttggcctctagcccaatcctgctctggtagcagggagacggggaccagagggagagggagacagccaggcctcctggc

SEQ ID NO: 347711 - DNA, 201 bp, Homo sapiens
ctctggggtccttcaggcgggtcctggttcaatctcttctctgccctgtcccctgttgcatcagtagggtgggccacatgggccccatccttgacctcagracccctgggggtgcacgtgcgggggagtccccgagggtcagtggggctggcgcagccccctgcccagcctggccctctctgcagtggatgcgtgcccgct

SEQ ID NO: 347712 - DNA, 201 bp, Homo sapiens
cctgttgcatcagtagggtgggccacatgggccccatccttgacctcaggacccctgggggtgcacgtgcgggggagtccccgagggtcagtggggctggygcagccccctgcccagcctggccctctctgcagtggatgcgtgcccgctggacctctgacccctgctacgccttctttggggtggacggcaccgagtgct

SEQ ID NO: 347713 - DNA, 201 bp, Homo sapiens
agcccctccccaaagtccaggtgggcctgggaggtgggtgggccggtgaggggctggtgtggctggacattcttaaggacagtggacagaaacctctgtcmtgagggaatgagactgagctgcttgccaggtgtgtgggcaggtccgagcccaccctaccgggcagacgggaggccagcctgccaaggcctgtctgccttc

SEQ ID NO: 347714 - DNA, 201 bp, Homo sapiens
gtgaggggctggtgtggctggacattcttaaggacagtggacagaaacctctgtcctgagggaatgagactgagctgcttgccaggtgtgtgggcaggtcygagcccaccctaccgggcagacgggaggccagcctgccaaggcctgtctgccttctttgagatgccaccaagctgggcctgtttgcagggcaggtggggg

SEQ ID NO: 347715 - DNA, 201 bp, Homo sapiens
ccatccttgtatgatcgtatttgacagacgatgcatctgaggtttacaattgaattaatgggttcgaggcgcatagttgctgtggtggccacgtctgtccyctgccatcggagtcctggctatgaccaccaccctcactgcctccctgtcatggctgggaacctggaaactgctatggttggccacctccgtggaagggct

SEQ ID NO: 347716 - DNA, 201 bp, Homo sapiens
ccaggcctcagaagaggctgccagtgttgcttctttagttgggtgtcaggggtgagaggtctctggatatgacacttgtctccttgaggcacacatttccytgcctttggcccaggctgtggccatgtgggaacgggcctggccatgggcttaaatgtcttatctctgagctcttgggacacagctccctcccaggcccca

SEQ ID NO: 347717 - DNA, 201 bp, Homo sapiens
tatgatcgtatttgacagacgatgcatctgaggtttacaattgaattaatgggttcgaggcgcatagttgctgtggtggccacgtctgtcctctgccatcrgagtcctggctatgaccaccaccctcactgcctccctgtcatggctgggaacctggaaactgctatggttggccacctccgtggaagggctaggggccca

SEQ ID NO: 347718 - DNA, 201 bp, Homo sapiens
gctaacacacactgtgctactctgactccaccactggctggtgacagtgctcgtggctggggcaacttcagcccagggacacacggggaggttgctgaccytggttcctggtcccctgggggggcaggtgccgaatcagggtcatcgacaccttcgggacggaacctgcgtacaaccacgaggagtacgccacgctgcacg

SEQ ID NO: 347719 - DNA, 201 bp, Homo sapiens
gcgctggcgtcacagggagtctgtttcttgcaagtcaaggccccccggccaagtctgaacattgaccaataagcaagaccgatggaggccgtgccgtgtcrcctttcccagctctggcctggcctgtgttggggagggctgcaagggaagactcatggaaatgacgtcgctggccctcatgagagatccatgcaccccagg

SEQ ID NO: 347720 - DNA, 201 bp, Homo sapiens
ccaggagagacccttccttgcaagggcctcgcctcccctcatgctccacgcgctgcgctggcgtcacagggagtctgtttcttgcaagtcaaggccccccrgccaagtctgaacattgaccaataagcaagaccgatggaggccgtgccgtgtcgcctttcccagctctggcctggcctgtgttggggagggctgcaaggg

SEQ ID NO: 347721 - DNA, 201 bp, Homo sapiens
gtaggctgaaggtccatggcacagctgcatgtgtctactgggccctgccagacctcccaggcctccaccagggattgaacctggggaaggctacctggctmtgtggatggctctggctctggctctggcccttggtactaaggggccctggggctcttctctcaggcttgatggatgggggaccggggcccggaggtctga

SEQ ID NO: 347722 - DNA, 201 bp, Homo sapiens; identical to SEQ ID NO: 73758

SEQ ID NO: 347723 - DNA, 201 bp, Homo sapiens; identical to SEQ ID NO: 73759

SEQ ID NO: 347724 - DNA, 201 bp, Homo sapiens
aggcttctgccccatcccccttgactgggcccatgccaccatgctgctgctgcagcctccactttgttgactttcgggggcctctgcagctctaggccagmcctcatagtttttggcccatcatctgtttttcagcctgctcaatgggactgggagcgtggggtgtgggtagggagctgtgaccgtgaggtttctgggagg

SEQ ID NO: 347725 - DNA, 201 bp, Homo sapiens; identical to SEQ ID NO: 73760

SEQ ID NO: 347726 - DNA, 201 bp, Homo sapiens
ttatgagcgatggctcaccagggctgcccagattaaccgattgagtgtgtgagtgcgtggggagggcctgagaggctggagagacctgagttagtgtcatytaacgctagtatgaaatttcccggtcccagctgagtttttgaaaatccactctgttttccgtagagggacttgtggggaggtcctttgctgcttcagctc

SEQ ID NO: 347727 - DNA, 201 bp, Homo sapiens
ttacatctaaagttcctttttatggttgacaaaattgaggcccagagggcttaggaaatgatcccaatgtcacatggctagtgggcaacggggctgcccakggctctgcactccgccacgatgctgttctctgcaccgcaaagcaatgcagcaaaagggtcagcagtgcctgggaagatggagctgaggctggggtctggt

SEQ ID NO: 347728 - DNA, 201 bp, Homo sapiens
aggcccagagggcttaggaaatgatcccaatgtcacatggctagtgggcaacggggctgcccagggctctgcactccgccacgatgctgttctctgcaccrcaaagcaatgcagcaaaagggtcagcagtgcctgggaagatggagctgaggctggggtctggtgttggttggtgctgggggactttggggccagctttgt

SEQ ID NO: 347729 - DNA, 201 bp, Homo sapiens
taagtttttccagtccattccgagcacatttgcacatatgtttaacacacacacattataaattcatagtgtgtgattttaacaaattccatgtaagtggyatctcacagcacatattccactgcccctttttttttttttttttttggacacagagcctggttgactctgtcacccaggctggagtgcagtggcacagtc

SEQ ID NO: 347730 - DNA, 201 bp, Homo sapiens
ttgagtcaaacagttagatttcacccactggctaaagacgggaaagcggcctcattaggagatgggctgggccaggtcaggtgccaccaggcatggtgggrtggggaggttgaagcctaaaacagacctttctctgagtccgggatggctccttcctgagtcctgactgctgcccctgccctttcaggtcagtgattttct

SEQ ID NO: 347731 - DNA, 201 bp, Homo sapiens
agcaagagtaactcagagatttgctgtcacggagccggggagcggcatttggaggggaaagctcttctctggggagttttatttataacctgagagtgaarccttgtccccgcaagacccccagaagtgtgtggggctcagaggctcccaggacttcgtcatgagtgtttagggaaccagctggggcagcaactggctgcc

SEQ ID NO: 347732 - DNA, 201 bp, Homo sapiens
ggcacctgccaccacgcctagctaattttttttgtattagtagagccgggtttcaccacgttggccaggctggtcttgaactcctgacctcaggcgatccrcccacctcggcctcccaaagtgctgggattacaggcatgagccaccgtgccgggctaactattagatatttagacagacaacctgtggcctctgtttggg

SEQ ID NO: 347733 - DNA, 201 bp, Homo sapiens; identical to SEQ ID NO: 73808

SEQ ID NO: 347734 - DNA, 201 bp, Homo sapiens
tgttggccggagtctgacagctcggctacagctgggggctctggcgagctgctggccttgggcaccccgttgggcagtgcctgggccttctccagcagggyatgggtttccagccaggactcgatacggttcaccagccgccagccaccagtgctaaagtgttgcctgatctcctgctcaaagacctcggggggccgccgc

SEQ ID NO: 347735 - DNA, 201 bp, Homo sapiens
cctgcagctatgagcaggtcaccaatgaagacctcctgaccaactgcacgctattgctgtgccgccggctgctgtcacccatgaacctgctgtctctgcayacggcttcggggctgcgcctcttctctgtgctcagcctggcctggggcttcattgctgatgtggacctagagagtgagaagtatcggcgtctgggggaga

SEQ ID NO: 347736 - DNA, 201 bp, Homo sapiens
ctctttctccgcttctttggtttcacactgggtggcaccgatgcgtctggtgcggtctccgaagtctggtctgtgtggtccctgctagctgaggccaggcyctgggcaccgccctctgagtctgagccctgggaggcctctcctggggctggccctccatcctcaggttcttgttggccggagtctgacagctcggctaca

SEQ ID NO: 347737 - DNA, 201 bp, Homo sapiens
actctatggctaatgacagagcttttcagatttggtggaaatgctctccggggcggggagcagacggggaaggctgccccagctaatctccgcagccagtmccctcgaaggctgagatctcggggagcacagcctccgattcgcgttttctaggcaccaaagtccctcgctggaggaagaggaggggaagaaggcagagga

SEQ ID NO: 347738 - DNA, 201 bp, Homo sapiens
gctcagtgccctccccgctccgcggcgccggctgcgaagttgagcgaaaagtttgaggccggagggagcgaggccggggagtccgctccagcggggcgctycagtccctcagacgtgggctgagcttgggacgagctgcgttccgccccaggccactgtagggaacggcggtggcgcctccccagcaaaccggaccgactg

SEQ ID NO: 347739 - DNA, 201 bp, Homo sapiens
gtatccaggatgtgggactggatattgaccagaccagaacccactttgggcccacatgggagctaatgtcagcaggggcctgtggactgttcccattgaayggctcttcctgctagctgtggttctcagtgtggctggcctggtccagcctggcacaggacaggacctgggagggccacacatttcccacctccattttgt

SEQ ID NO: 347740 - DNA, 201 bp, Homo sapiens
ccgggatttagtcgggcgctccccacctctggcagctgcggccccggactccgccagcgctgtcttctctccctcaggtccagccgccgcagggaatgacrccggtgctcctacagccacggctccgggcggggaaggcgagccccacagccggccctgcgacgcccgcctgggcagcaccgataaggagctgaaggcagg

SEQ ID NO: 347741 - DNA, 201 bp, Homo sapiens
agcacaggtgtggagcccacttaaggctgacaagacgcatcatgctttggctttttttttgtctttttttctaataagagttaatatctttgcttttgagttttttttccaaccttaaatattacatacatacaccaaaaattacatagctgcaatgtgctcaacagcatcctctcggcctggagcttcacattatcaaaa

SEQ ID NO: 347742 - DNA, 201 bp, Homo sapiens
cttccaccccttcctcaggtgcaaagttggggttttgcgatcctgtaattactatgtttagcaaagttgccaatttctccctttagggtaattttcaaaartggaaaccaattttctttgtaggggcttctgctggataaaccaaccaccacaaagtctacagaaacatgtctccaccccagcctcactccacaaatgctt

SEQ ID NO: 347743 - DNA, 201 bp, Homo sapiens
gcacaggtgtggagcccacttaaggctgacaagacgcatcatgctttggctttttttttgtctttttttctaataagagttaatatctttgcttttgagttttttttccaaccttaaatattacatacatacaccaaaaattacatagctgcaatgtgctcaacagcatcctctcggcctggagcttcacattatcaaaag

SEQ ID NO: 347744 - DNA, 201 bp, Homo sapiens
cgggcgctccccacctctggcagctgcggccccggactccgccagcgctgtcttctctccctcaggtccagccgccgcagggaatgacgccggtgctcctrcagccacggctccgggcggggaaggcgagccccacagccggccctgcgacgcccgcctgggcagcaccgataaggagctgaaggcaggagccgccgccac

SEQ ID NO: 347745 - DNA, 201 bp, Homo sapiens
cacaggtgtggagcccacttaaggctgacaagacgcatcatgctttggctttttttttgtctttttttctaataagagttaatatctttgcttttgagttttttttccaaccttaaatattacatacatacaccaaaaattacatagctgcaatgtgctcaacagcatcctctcggcctggagcttcacattatcaaaagc

SEQ ID NO: 347746 - DNA, 201 bp, Homo sapiens; identical to SEQ ID NO: 73807

SEQ ID NO: 347747 - DNA, 201 bp, Homo sapiens; identical to SEQ ID NO: 73809

SEQ ID NO: 347748 - DNA, 201 bp, Homo sapiens
cccagcctcagcaaggacgacaaggacaaggagaccacccaagggatagagctagggtcaccccaccatacactcatcatagtcaaaccactggggagaawcagaaactcgggcaaagcacacactccctgcaagcagccaagaatctcgcatgaccagtctggtcctctggatctccacatgtggccacgtgtggcgcgt

SEQ ID NO: 347749 - DNA, 201 bp, Homo sapiens
ccttcccgccttgtccttttttcttttttaaaaaaggaagtaaagtacagtgggaaacgggccaagctggcagcttgagagatccaagtgcccgccccccvacccgcaaccgtgggaaggggaaccatcttgctcttggccaatcctgcctctctgagcagggatgcagctgggggagtttctggagataggatcaaattc

SEQ ID NO: 347750 - DNA, 201 bp, Homo sapiens; identical to SEQ ID NO: 73811

SEQ ID NO: 347751 - DNA, 201 bp, Homo sapiens; identical to SEQ ID NO: 73812

SEQ ID NO: 347752 - DNA, 201 bp, Homo sapiens; identical to SEQ ID NO: 73815

SEQ ID NO: 347753 - DNA, 201 bp, Homo sapiens
tgggttctcgttctggccgggactatagaatttaatggtaatgatggccaatggtgccccctgggatgggcaatggattttactggccccaggcatagtcrttctggtgggggactcaggaccagagctggttcagcctaatggtgggggggcctctaccaccctgataattatagcacctccaacctgaagcagcctcag

SEQ ID NO: 347754 - DNA, 201 bp, Homo sapiens
cagcggtgctgagtggctgctcggtcgcgcgggatccactccgggcctccgagggtgggtgcacgatccactagccactctccaggggagagtgacgtccrggtggaccaatcgccgctggggcaccgaccgctgggcccaatcgcaggagagccgggtagaacagtgacagcgccgcggcagccgaccccgcctcctcgg

SEQ ID NO: 347755 - DNA, 201 bp, Homo sapiens; identical to SEQ ID NO: 73835

SEQ ID NO: 347756 - DNA, 201 bp, Homo sapiens; identical to SEQ ID NO: 73837

SEQ ID NO: 347757 - DNA, 201 bp, Homo sapiens
taaatgaaaatataaaatttcaaaatcctggagacccctttcccgaagaatacacctcttgatctacgtttcagaaacacggccagggagatcacgtctgrtgaatggccactgctccttgcacacttgcttttattttttatttcttctctcagggtctttgaaggaagaaggctggagtgggaacctgtgaggagcaac

SEQ ID NO: 347758 - DNA, 201 bp, Homo sapiens
agggccctgagtctcacccagcggtcttatctcccttcaagaatgtctcctaggtcattcccgggagtgagaagcttcgatcggctcacagtttctttttktaagtgtttattcatgcattaaacaaatgtttatcacacattatcctgtggtgacaaggataagcaaaacggctctgaacccgagaagcccagagtctct

SEQ ID NO: 347759 - DNA, 201 bp, Homo sapiens
ctagaaggtagcagtagggatcatttttgaaagttgggggatgatgtcattttggagaactcactatataagaagcacttggttgttttggacatgaaaaytggggggcaggctgggcacagtggctcacgcctgtaatctcagcactttgggaggctgaggtgggcagatcacttgaggccaggagtttgagaccaactt

SEQ ID NO: 347760 - DNA, 201 bp, Homo sapiens
tgcaaatgtctgttgtagaaattgcttcaggtggtttcatgttaactctgaagtactccattcttgaaggcatgtggttgttaatagcttcctaccaatcrgggccacttgggatgaccatactgtttcctggagttataataggtgataaaggacttaattcagccagctgtcttttgaaaatccttttagaaggaaagc

SEQ ID NO: 347761 - DNA, 201 bp, Homo sapiens
ctacttgggaggctgaggcaggagaatggtgtgaacctgggaggtggagcttgcagtgagcagagattgtgtcgctgcactccagcctgggcaacagagcragactccatctcaaaatagtaataataatttttttttttaagagacgggggagtgggggtctcactctgttgcctaggctgattttgaactcctggcctc

SEQ ID NO: 347762 - DNA, 201 bp, Homo sapiens
ttgactttgcatgtatgtcctgtggtgtttatagcctgatttacctcacctacctactttagttgctcagaaaaccagaaataattatgttgaggctcttyagaaagtacagagggctatccaaagaaaagaaaagtattacctcagttctctgcttatttttgttcacctacatgttttcagaaaacatgttggtatctt

SEQ ID NO: 347763 - DNA, 201 bp, Homo sapiens
tcagttagattattttttaaaaacactgtaccagactccctcccaattttttgtttattgggaaaaagtaaaactagtttggagtctaaaaaatagacatrtggccacagaccatacagcatgagttactgaggtaaaatgttcatttcccccaggtttcagaaggatcccacttggtcagagactggagaccgttatctg

SEQ ID NO: 347764 - DNA, 201 bp, Homo sapiens
gctattttttaatcttttaagccttgtaatagacttaattacctcttgacagtgttgtttagtgagaaagcgtctctgcttttcttttttcttttcttttyttttttttttgagacggagtcttgctctgttgccaggctgtagtgcagtggtgtgatctcggctcactgcatcctccaccttccagcttcaagcgattct

SEQ ID NO: 347765 - DNA, 201 bp, Homo sapiens
acatgtgacctggtctttttttctcagctagcttggaatctcctgaagggtaaagacaattgtcctttccctttcttcacaataaactcataatagagggygctttgcacataatgtttcttactggttgtggttgttccactggaacatagtggttgttccactagaacataatggtatcaattggcctaattctaaata

SEQ ID NO: 347766 - DNA, 201 bp, Homo sapiens
ggaattatgccttttataaaagaaaaacttttataaaaggcataattttataaagagccacaattctgttacttcccactcttccattaatttattaaatwtttggtcactcttgctattaaatttcctgatgtaaaccttgatatggaggagactattcttgcagtaaatctgctaacatatttggaaataagtacattt

SEQ ID NO: 347767 - DNA, 201 bp, Homo sapiens
agtggtgtgatctcggctcactgcatcctccaccttccagcttcaagcgattctcctgtttcagcctcccgagtagctgggatacaggcacactccaccaygcccagctaatttttgtatttttaatagaaatggggtttcaccgtgttggccaggatggtcttgatctctctatctcttgacctcgtgatctgcccacct

SEQ ID NO: 347768 - DNA, 201 bp, Homo sapiens
gtgtctcacgcctgtaatcccagcactttgggaggcccaggtgcacggatcacctgaggtcgggagtttgagaccagcctggccaatgtggagaaaccccrtctctactaaaaatacaaaattagccgggcgtggtggtacatgcctgtaatcccagctacttcggaggctgaggcaggagaatcatttgaaccccaggag

SEQ ID NO: 347769 - DNA, 201 bp, Homo sapiens
gcgtggtggcaggtgcctataatcccagctactcgggaggttgaggcaggagaattgcttgaacccgggaggcagaggttgcagtgagccaagattgcgcyattgcactccaccctgggcaacgagcgaaactccatccccaaaaattaaataaataaaaataaaaacttataaattcatggtgtctgattggaaaacaat

SEQ ID NO: 347770 - DNA, 201 bp, Homo sapiens; identical to SEQ ID NO: 73839

SEQ ID NO: 347771 - DNA, 201 bp, Homo sapiens
catgagttcgaggctgcagtgagctgtgattgcactgttgcactccagtctgcgtgacagagcaagaccctcttaaaaaacgaaaacaaaaaaactgtttyttaaaaaaaaaaaaaaaagaaaagaaatgcctcatgtatcagctttctacctatctatattttcattaatattcttatttttcctcctgtctcagacaaa

SEQ ID NO: 347772 - DNA, 201 bp, Homo sapiens
tggatgttcgctatttcacccaggctggagggcagtggttcagtctttgttcactgcagcctccgcctcctgggttcaagcattcctctcacctcagcctstagtagctgggactacagacgcacaccaccatgcctggctaacttttgtatctttaatagagatgaggtttcacccagttgatcagttggccaggctgat

SEQ ID NO: 347773 - DNA, 201 bp, Homo sapiens
tagatgagtatgttcattgcactgtaatttattatgccaaaaatggaagatactgggagaaaaattattgagcatcaactgggtaaactataatacaaacraacgttaagcgtgaagggatagaaacatagggcagtgtttgtgtaaaaatgtctgagtcgaaaattatgtgcatactgatgaatgatataaatgtactca

SEQ ID NO: 347774 - DNA, 201 bp, Homo sapiens
acagccaaaatgggaagagacttttatcaacattgtcttcattggacacatagattcaaggcaagtccaccactactggccatctgatctacaaatgtggwggaatcaacaaaagaatcattgaaaaattggaaaaggaggctgctgagatgggaaagggctccttcaagtattcctgggtcttggataaactgaaagctg

SEQ ID NO: 347775 - DNA, 201 bp, Homo sapiens
ttatgtaagatgttacctgccatcaaagaaggtaaaaggtaccatttcttgtgagtctcacattatgtcaaaagaaatgtttttgaaaaaacagcaaaaamaaaaaaaaaaaaggttgggggatacttcagactatttggtgaactctcacaacttcgtaatagaaaatttaaaaatgcattaaaagtagtcaaaaaatgt

SEQ ID NO: 347776 - DNA, 201 bp, Homo sapiens
aggaaaccaacacaagaaaaaagagatattattctccctgcagacacaggctaaaggaaaccttacaagtatcacaaaactgcttcctagttgagatgcasagcagagcagtcatgttagggcagcgcaaatcagctgaattcgtttttaaaagagaaaaaaggtttcattgtttaaaatgaaagaatgaaaaaatagaaa

SEQ ID NO: 347777 - DNA, 201 bp, Homo sapiens
gataacaatgcatcttaaaaccttcagaaggaaaggagaatgttttgtgaactacttcatttttgttttttttcttttttcttttgcatgtggtagttttdctagttttttaaatcagtacgttttaatggaaacaacttgaccgaaattctgtcgcagaattttgagacccattaaaacaaagtttagtgagaaaaaaaa

SEQ ID NO: 347778 - DNA, 201 bp, Homo sapiens
cacatatataaattgacatgttgtgccatgagtgtacatgaattgtctttgctaattttgatgttaatgctttagtcttttagttgattacttaagatgtmattttttggatttctttgctgtataggtcagcacgagggaccattgcccaggcagcatgctggattattgccagaatctcttatttgggcatatattgtc

SEQ ID NO: 347779 - DNA, 201 bp, Homo sapiens
tagttttactagttttttaaatcagtacgttttaatggaaacaacttgaccgaaattctgtcgcagaattttgagacccattaaaacaaagtttagtgagaaaaaaaaaaaagccaggtaaaaaatacatacatgtgtatgacccatttatgtgaaatttttaaaaatgcagactaattcatagtgacagaaagtctcagt

SEQ ID NO: 347780 - DNA, 201 bp, Homo sapiens
accagtatagtgttttttaaattaattattaccagtttactagtagaccttgaattttcagccacagcgttagtcacgtgttttgggtagcccagctaccygtgtttaaggggcacatctacttaaacccaatcttaattatggcatgtctaagtctgtctgggcctggagttcagacattttaccatgtttagaaatgtt

SEQ ID NO: 347781 - DNA, 201 bp, Homo sapiens
gcttaatgctggttagtggtagagctgcaattctagccaagatctgttctaaatcttgagattttcctgctatattatctgtctctaattcttactttttwaaagtctacagtatcttacccctcttcccttttttataaatagtgagattgtttattccttacgcatatacagcttctgaataatttttgtcaatttttt

SEQ ID NO: 347782 - DNA, 201 bp, Homo sapiens
agattctgtctcaaaaaacaaaaaaaaaacaaaaaaaaaattgtggggtaaatttgagtgtatgagaatcttagactattgaatgaacattaatttttttwaaatgtccacttagaactatttaaaatataaacgtaaattagggttttaattatgaatataaatgagtgcatatctgtatattttacagaaaccaaaaat

SEQ ID NO: 347783 - DNA, 201 bp, Homo sapiens
tgggcctggagttcagacattttaccatgtttagaaatgttttaatatttaaatgattttaatatttaaaaagtgcatatgccaaaaatattaatacttargttatttaattataataggaattccaggtttcagaatctgtgtttaaataaaaatatacttatttctgtttcataggagctgatcaacagacatttaata

SEQ ID NO: 347784 - DNA, 201 bp, Homo sapiens
gttttacaacaatatgaatataagatcagcagggtgtagggactcatgcttgcaatctcagcacttagggaggctgaggcaggtagatcatttgagcccakgagttggagatcagcctgggcaatgtagcaaaagtgtctctacaaagaaaagaatataaggtcatattccttggaataattacaaaatcttgattaaatt

SEQ ID NO: 347785 - DNA, 201 bp, Homo sapiens
acaacaatatgaatataagatcagcagggtgtagggactcatgcttgcaatctcagcacttagggaggctgaggcaggtagatcatttgagcccaggagtyggagatcagcctgggcaatgtagcaaaagtgtctctacaaagaaaagaatataaggtcatattccttggaataattacaaaatcttgattaaatttatat

SEQ ID NO: 347786 - DNA, 201 bp, Homo sapiens
tctggaaccattggaaataggtcattatatcatatgaaatgtattcttgaattctaatgactattattttaaaagtgctcttcattcagatgacaactcarttaaaatatttttcaacaatgatgaattattttgcattaattattttttctgtttggttattggtttaacactctggagatgagcaaagaaaaaatattt

SEQ ID NO: 347787 - DNA, 201 bp, Homo sapiens
aaaagtacttcccacagaagaaaaaaattaagtagatgagtatgttcattgcactgtaatttattatgccaaaaatggaagatactgggagaaaaattatkgagcatcaactgggtaaactataatacaaacgaacgttaagcgtgaagggatagaaacatagggcagtgtttgtgtaaaaatgtctgagtcgaaaattat

SEQ ID NO: 347788 - DNA, 201 bp, Homo sapiens
cttctgaataatttttgtcaattttttttaggatttattctacctatctgagtttatctcttcatatccatccatatatactacatcctaaccatatgagrtcttttatgttacataaaatataaaatacattgtcagttctctgaaccattgttaactgagcctgaaaaatcttccttctttttcctttaagagatggct

SEQ ID NO: 347789 - DNA, 201 bp, Homo sapiens
gaaaatggcattattctactttcacacattattgatactgtgaatgcatactaaattctagattgtcctcagaaaatttttcctttttttttttgagaggraatctcgctctatcccccaggctggagtgcaatggcgcattcttggctctctgcaaccctcgcctcccaggatcaagcgattctcctgcctcagcttcca

SEQ ID NO: 347790 - DNA, 201 bp, Homo sapiens
gttttggtattacttcaggtgatttgtaatctctaggccacaggaaatgggataatgtaggcttttgatgcaatggattggactttgtaaaggtgaagctkcaagctatctacttagggtgcctggggactttgaagagttatagaactatgatgcagctgcagtggcctttctgtaaatgtactactttctgttcacaca

SEQ ID NO: 347791 - DNA, 201 bp, Homo sapiens
tttttttttttgagacagagtcttcccctgtcccccaggctggagtgcagtggcacgatctcggctcactgcagcctccacttcccagtttcaagcgattstcctgcctcagtctcctgagtagctgggattataggtgcctgccaccaagcctggctaatttgtgttttttttgttgtttttttttttgagatggagtct

SEQ ID NO: 347792 - DNA, 201 bp, Homo sapiens
ctttgtaaaggtgaagcttcaagctatctacttagggtgcctggggactttgaagagttatagaactatgatgcagctgcagtggcctttctgtaaatgtrctactttctgttcacacatctcaccctggacctcctcttctctctagctgatactcgaaatctttaatgttctcagacctactcaacccttactctatca

SEQ ID NO: 347793 - DNA, 201 bp, Homo sapiens
aaacattaccactaaatttgtcttctggccaaggtgaaagaacagagattagacttacctctcttcagaaacagctaaaaaactgaacaaaaacatatgtwacagcagttttcaagacatgagatatcagacagtgaaggacagtgatccctgagagatggaaaacaaatgaggtgaaccttgtgattaacccagcttact

SEQ ID NO: 347794 - DNA, 201 bp, Homo sapiens
attggaagccatttccctcagtagtggggccaaattagccttagaataaattcttccctggttcctcctgacaaaacttaaaagcaagacctggtagaatsaaactaatttgtaagcagtttagctacaacagagagcaaaggtcaagaagatttataggaatatgaaaatatccagcacccagcagataaaagtcacatt

SEQ ID NO: 347795 - DNA, 201 bp, Homo sapiens
atatacatagataagaaatccaaatcagactttgaaagttgaaagctatagtgtctgaaatgaataatatgtttgatgggattaatggcaatagacattgmagaacagtttagtgaacttgaaggcatagcaatagaaactgccccagaaaaccacacgcagagaaaatgtgagccatgggataacatcaggtgacctaat

SEQ ID NO: 347796 - DNA, 201 bp, Homo sapiens
atactatacaagaaaacatactgaagaagagagagctcacatacagagagaactctggcaatttaccaagggatccctcttgaatctttagctgatgtgarttcaggatgtgaatgaagaggctaccagagctggaaaaagcagttgccaagaagatcacagtcaacaattctcagatctatacatggccaggagtagttc

SEQ ID NO: 347797 - DNA, 201 bp, Homo sapiens
tatttgaaatggtatttgtagatcgcctctctcctagtgggtgtttaatctaaccaaaaagagttggctaaactttatatattgataaagtcaaaaaattmcttaatattttcaaaacattaccactaaatttgtcttctggccaaggtgaaagaacagagattagacttacctctcttcagaaacagctaaaaaactgaa

SEQ ID NO: 347798 - DNA, 201 bp, Homo sapiens
tcaccaggtttgcccagaaatctcagaaggctaaatgaatattatccctaatacctgccactctagtcttaatcagtggtggaagaatggtctcaggactsttagtttcagttggccatttaagttaatagtaaaagactggttaaagataacaatgcatcttaaaaccttcagaaggaaaggagaatgttttgtgaacta

SEQ ID NO: 347799 - DNA, 201 bp, Homo sapiens
tggcctcaagtgatccttccaccttagcctcccaaaatactgggattataggcataaacgaccacaactgcctgtctttgtacttttaactctttgtttcrtccctggctccatgtgagctcctgttcttggttcacttgttctttgctttttcttgtatgtcattgattctgaaatgttacttttagaattgtcttctga

SEQ ID NO: 347800 - DNA, 201 bp, Homo sapiens
cttgtaggttgtgggggtgaaacacttaccaatgcagaggtgtagccactcgacctctccacgactgcccccattatcctggtggcagttctgaggtactyttttttttagaatagcttgaaaaatctttaggttgattatagttatgttttatttataattaaaatagtaatagatttgcattaatgtgtgaaatattga

SEQ ID NO: 347801 - DNA, 201 bp, Homo sapiens
ttgtgttggctttggcttgcaactctttggcaggaattcagcgagagaatttacagaaagccatggaactggtgacaatcaactattcctctgacctgaaraatctgattttgtaagttttaatatatgataaattgtacagaatgattatttgcgataagacagagctttttttgttttaagtgattgttttggttccca

SEQ ID NO: 347802 - DNA, 201 bp, Homo sapiens
atgttcgaggcatttttcttttctgcaaactggctagttgtataatttgttcattttccactgcttgctttctgttttctttatgattttaagaactgtakgttaagcagactagccctttattaagtgttgcaggtatctttttttgttctgtagcaatttttgtctcttgaagaagttaaattgatgaacattttattt

SEQ ID NO: 347803 - DNA, 201 bp, Homo sapiens
attgcattgacctagaaaaagtaacacatactagagtaatgagactttgtcagaagaatgtccttcatcccagcttccttcacattcctctatttctctcrtagtgtctagtgggttgtttcatgtttgcttttaaatagtattgactgacatatgtgctgcttgatagcatgatcatttacttttcctctgcccccagat

SEQ ID NO: 347804 - DNA, 201 bp, Homo sapiens
cccagactggcctctaacgcctggcctcaagcagtccgcctgcgtcagcctcccaaaatgctgggattacaggtctgagctaccacattcagcctctgctkagaactcttaacttagaacttcttgagtgaggagttgtgtgctgagttcttgaaaatcacaattcttttttttcgaatgttgcttctccagtattctttt

SEQ ID NO: 347805 - DNA, 201 bp, Homo sapiens
ttggaaacaatctaaatatctaatggatgaaaggataaacaaattatagtatattgataatgtcgaatactaataagcaatacaaatgaagtattgatagrtgcagtgaagtggatcaatcttcatgctgagtgaaagaacccaatcaacttttttgcaacgagtttgccaccagaacacaggtgtcatgaaaactacccc

SEQ ID NO: 347806 - DNA, 201 bp, Homo sapiens
tctctggtcattatagtatctcccatttctttgcttttatagtgtgttgagtatctcataattttttagtatttttgtctttctctaatatacacacacayacatacacacacacacacacacacacacacacatatatatatatatgtatttattttagagataggctgtagcccaggctggagagcagtggctcgattg

SEQ ID NO: 347807 - DNA, 201 bp, Homo sapiens
acagaaactttatgtctttatttttattgcaaagtaaatatttcttagataaattgataaaccagtgtgtttaaattagttattgatgttttaaacatttrgttaaagggcacccagtagaagtttgttggtatccactagctacatgtgaccttttacattgatattaattgaaatttaaagcttacttcttcaattaca

SEQ ID NO: 347808 - DNA, 201 bp, Homo sapiens
tggtcattatagtatctcccatttctttgcttttatagtgtgttgagtatctcataattttttagtatttttgtctttctctaatatacacacacacacayacacacacacacacacacacacacacacatatatatatatatgtatttattttagagataggctgtagcccaggctggagagcagtggctcgattgtagc

SEQ ID NO: 347809 - DNA, 201 bp, Homo sapiens
tatccactagctacatgtgaccttttacattgatattaattgaaatttaaagcttacttcttcaattacactagtcacatttcaagagctcagcagccacrtgtaattactggctaatataattggacagcacagacatagaatatttccctcatcttggagttctgttggatagtgctgctctagagagtgtgaaagcca

SEQ ID NO: 347810 - DNA, 201 bp, Homo sapiens
ttttatagtgtgttgagtatctcataattttttagtatttttgtctttctctaatatacacacacacacatacacacacacacacacacacacacacacayatatatatatatgtatttattttagagataggctgtagcccaggctggagagcagtggctcgattgtagctcactgcaccctcaaactcctgggctcctg

SEQ ID NO: 347811 - DNA, 201 bp, Homo sapiens
ttttttggccgggtgcagtggctcacacctgtaatcccagtgctttgggaggccaaggcaggtggatcacaaggtcaagagattgagaccatcctggccawcatggtgaaaccctgtctctattaaaaatagaaaaaaattatctgggcttggtggcgcacgcctgtagtcccagttattcacgaggctaaggcaggagaa

SEQ ID NO: 347812 - DNA, 201 bp, Homo sapiens
ttagctcattggtgcttaatccccctgaaaccccttttgaaaggttgggaaagtgaggaatcaataaggcattaaaaaccaaggaaccaaacaaaaaagamacttaaccaaaatgtcagatgcctatattcaaatgagtacaattttcaagacaatgcatggtcactactatattgtatttcacaagtctgagctcttagg

SEQ ID NO: 347813 - DNA, 201 bp, Homo sapiens
attctactttcacacattattgatactgtgaatgcatactaaattctagattgtcctcagaaaatttttcctttttttttttgagagggaatctcgctctrtcccccaggctggagtgcaatggcgcattcttggctctctgcaaccctcgcctcccaggatcaagcgattctcctgcctcagcttccagtgtagctggga

SEQ ID NO: 347814 - DNA, 201 bp, Homo sapiens
acttgtagagactgtatctgacctagcttataattccccaaactccacgacataacctcctggcttcagattctgctttagtttcttgctcttggggttggtttgtttgtttgtttgtttgtttgtttggttttgagacagagttttattctgttgcccaggctggagtacaatggtgtgatctcggctcacggcaacctc

SEQ ID NO: 347815 - DNA, 201 bp, Homo sapiens
aagctgtgtagtctgatccctacctacttctcatcctggcgtcaaatctgccttttatttaattttcttccccccatcccccattctttgttcttgtcttyactctgttccttttccttgcccttaccctccctctccgtgtattctgtcgtcttttcttctcttttctcccccaacccattcagacacatgaccttcctt

SEQ ID NO: 347816 - DNA, 201 bp, Homo sapiens
cttgtagagactgtatctgacctagcttataattccccaaactccacgacataacctcctggcttcagattctgctttagtttcttgctcttggggttggtttgtttgtttgtttgtttgtttgtttggttttgagacagagttttattctgttgcccaggctggagtacaatggtgtgatctcggctcacggcaacctcc

SEQ ID NO: 347817 - DNA, 201 bp, Homo sapiens
ttgtagagactgtatctgacctagcttataattccccaaactccacgacataacctcctggcttcagattctgctttagtttcttgctcttggggttggtttgtttgtttgtttgtttgtttgtttggttttgagacagagttttattctgttgcccaggctggagtacaatggtgtgatctcggctcacggcaacctcca

SEQ ID NO: 347818 - DNA, 201 bp, Homo sapiens
tgtagagactgtatctgacctagcttataattccccaaactccacgacataacctcctggcttcagattctgctttagtttcttgctcttggggttggtttgtttgtttgtttgtttgtttgtttggttttgagacagagttttattctgttgcccaggctggagtacaatggtgtgatctcggctcacggcaacctccac

SEQ ID NO: 347819 - DNA, 201 bp, Homo sapiens
agagagacagggtctcgctatgttacccagactggagcacagtggctgttcatgggcgctttgtggctcatgcagcctcaaacccctgggctcaagcgatcctcctgcctcagtcccccaggtagctgggactacaggctcacaccactgcactcagcttacatttgaatgtatttaagtaactccagtcagcctcagctc

SEQ ID NO: 347820 - DNA, 201 bp, Homo sapiens
ggcatgtggtttccatttctcttaagacgtcaccccagtcctccaaccttcctcctttttctccattgctcttcgacagacaggcttccctttttgttctrtgagctgatagaaatgtcctgtatttactgcttttccagagtcctggttttacacagcggttttagtttcattttctgtattctgtgggctcatggccac

SEQ ID NO: 347821 - DNA, 201 bp, Homo sapiens
ttaaaaaataaaataaaaggtttatataaatatagtaatttggcttcatattttttttaaggagtttgggtttttttaaagtttcttttatacacatttargacataactcgagaattcctatcctattttaatctcaatgcagtagacattgtgttatagtaagtaggagtactagattgggaatttggagagttgagtt

SEQ ID NO: 347822 - DNA, 201 bp, Homo sapiens
ccaggctggaatgcagtaatgcaatcatggctcacctcatagtctcgacctcctgtgctcaagcgatcctcctgtctcagtctcccgagtagctgggactrcaggcacatatcactgcacccacctaatttttttttttttttcactttttgtaaagatggggtcttgccgtgttgctcaggctgatcttgaactcctggg

SEQ ID NO: 347823 - DNA, 201 bp, Homo sapiens
  misc_feature (1)...(201): n = A,T,C or G
attctgagaatcaccagtatttgaggaccctgcctgcagcttatttataatgatgctttttccatttaggcagtagtgtcagtgtattaaatgagtacctntgaaatgaaaattaaaagttatatttattctttcatgtcagcaagcagatctgatatcattaggaaaagttgtgttggctttggcttgcaactctttggc

SEQ ID NO: 347824 - DNA, 201 bp, Homo sapiens
caacagcataccaatgttctcctttttccatatcctcaccagtattcattatttttgtctttttgataaaagccactttaactggggtaatatgatctcaytgtggttttgatttgcatttccctggtgattaataatgctggacttttttcatataacttggtcatttgtatgtcttcttttgggaaatgtcggtcctga

SEQ ID NO: 347825 - DNA, 201 bp, Homo sapiens
tagcatgccacttgaatatataaagagttgtagcatagtaccactgtgaaaaaggtgttttccgtgtaatctcatagccaaatatttttcagtgtaacaartcacgcatggtactgcatgggcattaggatcgctttagtttttcttatatcttgattcctcccatatttgccgtgtttttaaatgtttctctaaccttta

SEQ ID NO: 347826 - DNA, 201 bp, Homo sapiens
ttaatggaaacaacttgaccgaaattctgtcgcagaattttgagacccattaaaacaaagtttagtgagaaaaaaaaaaaagccaggtaaaaaatacatayatgtgtatgacccatttatgtgaaatttttaaaaatgcagactaattcatagtgacagaaagtctcagtggtttcctggagacttgggggcagagagcag

SEQ ID NO: 347827 - DNA, 201 bp, Homo sapiens
tgaaatgattaaagtcttcaaatttgatgatcagatttcctttaagaaatataattatgacacaccaaaatatggaaccgaaaacacttgttaatcctttyaataatatattttacttagtaaataaagcactgtggaatatgcctagtagattcaatgtcttttttcggcttaaagtgtgttaacttactatatttgatt

SEQ ID NO: 347828 - DNA, 201 bp, Homo sapiens
atgaaatatatacacacactaaaacaaagccaaaggatatatctagatcagccaggaactggtactgtctccagggcttaatctaattagtaagtaaatckttgatttaaatactcatatatctaattcaaggacctctttgggaagaaaaatgggagaagataaagataacacagtggcgcagagcatctgttttagcat

SEQ ID NO: 347829 - DNA, 201 bp, Homo sapiens
gatagattttcatttgattaattaatagcattgatactttttttaatgaaaagttgtattggccaccttcatgattctgtctggatgcaggcttgagtaaygtttgtaaacaaaaaaactttcagtctaattcatacaaaaggaaaaatgatgtttcagtgttatgaaattagcttgagctctttagttccttttcttatt

SEQ ID NO: 347830 - DNA, 201 bp, Homo sapiens
cctcccttgaagtctgaatataacataaagtataacctttatgttttactgactttatatatacatatttgagatcggttttggtgtcctattcttttgcrctattcatatgagcctctatcaaacatctatcttcattactgtaggtttgatcatttttcagtgtctaatggtgttatggcccacttttatcttgttttt

SEQ ID NO: 347831 - DNA, 201 bp, Homo sapiens
atatatatgtaaagttattaaattatataaatatatattatatatattatatataattaatatatattatatataaattatatataatatataattaattwtatattatatataaattatatataatatataattaatatataaaattatataaatatatatattttttgagatggatgttcgctatttcacccaggctgg

SEQ ID NO: 347832 - DNA, 201 bp, Homo sapiens
tcattggaaagaaatccaaaattaaaattacattgttaactaaatcttacttttttgtgtgaatttttgtaattaattttcataagacactcttgtctttdagtttcttgtttgtaaacaacacaacacaatttatcactatgaatgaaggacaccatttactcaaacagtcactaccactcaagaagaaaaaaatggttc

SEQ ID NO: 347833 - DNA, 201 bp, Homo sapiens
gatttgcaaatattttctcctattttgtgagttgcctattcactttcttgatagtttcctatgagttacaaaaagttttaaattttgatgaagcctgattwaaaaaatgtttttggttgcttgtgctttacttgtcctatcttttatttatttatttgtttgtttgttatttatttcttgcatctgctccactggcaatac

SEQ ID NO: 347834 - DNA, 201 bp, Homo sapiens
ttgattcccggacgcccacagatagcaaaattcctgggtgctcaagtccctgatatagaatgacatagtatttgcatagatcttatacacatcctcctgtrtactttaaattatctctagattacttataatacctaatgcagtataagtgctttgtgaatagttgttataatgtatttttaatttgtattacttctcatt

SEQ ID NO: 347835 - DNA, 201 bp, Homo sapiens
tgaatagttgttataatgtatttttaatttgtattacttctcatttgttgtattgtcatttttttcccctgaatatttcctacccatggttggtcgaatcyttgaatacagaacccagggatacagaaggctgactatgtgacatttcttccaaagagctacttttatcttctcaatggagcttaaattttactgtatctg

SEQ ID NO: 347836 - DNA, 201 bp, Homo sapiens
gctgactatgtgacatttcttccaaagagctacttttatcttctcaatggagcttaaattttactgtatctgaagaaatgttttctttctcattagatttyttttttttttgagacagagtcttcccctgtcccccaggctggagtgcagtggcacgatctcggctcactgcagcctccacttcccagtttcaagcgattc

SEQ ID NO: 347837 - DNA, 201 bp, Homo sapiens
cttgaaggttaagactgcagtgagctggctataatcgccccactgcactccagccggggtgacagagtgagaccctgtctcaaaaaaaaaaaaaaaaaaaggacagtcccaaggtactactgatcatctagtttatttctgttaattctacatatgacagtattctagttcacaaaaaaagtatataattttagaattcat

SEQ ID NO: 347838 - DNA, 201 bp, Homo sapiens
aattatttagctgagaaataaggaaaggagagttactgggttttacggtgtgaaactctcttaagattttattaacttcttttgtttaaaaaaacaactctaatttaatctggactgtgtcatacatgtactttatttcaaaaagtggatgttcttaccttgagtccgctttagagaggtgatgggatgtactaaaaatca

SEQ ID NO: 347839 - DNA, 201 bp, Homo sapiens
attatttagctgagaaataaggaaaggagagttactgggttttacggtgtgaaactctcttaagattttattaacttcttttgtttaaaaaaacaactctaatttaatctggactgtgtcatacatgtactttatttcaaaaagtggatgttcttaccttgagtccgctttagagaggtgatgggatgtactaaaaatcag

SEQ ID NO: 347840 - DNA, 201 bp, Homo sapiens
tgctggtatcaatataaaaggcataatctcggacaggaatctttgggcaatagactaaacttaaattacacacatacatacacacacatatataaattgamatgttgtgccatgagtgtacatgaattgtctttgctaattttgatgttaatgctttagtcttttagttgattacttaagatgtcattttttggatttctt

SEQ ID NO: 347841 - DNA, 201 bp, Homo sapiens
ttatttagctgagaaataaggaaaggagagttactgggttttacggtgtgaaactctcttaagattttattaacttcttttgtttaaaaaaacaactctaatttaatctggactgtgtcatacatgtactttatttcaaaaagtggatgttcttaccttgagtccgctttagagaggtgatgggatgtactaaaaatcaga

SEQ ID NO: 347842 - DNA, 201 bp, Homo sapiens
tatttagctgagaaataaggaaaggagagttactgggttttacggtgtgaaactctcttaagattttattaacttcttttgtttaaaaaaacaactctaatttaatctggactgtgtcatacatgtactttatttcaaaaagtggatgttcttaccttgagtccgctttagagaggtgatgggatgtactaaaaatcagat

SEQ ID NO: 347843 - DNA, 201 bp, Homo sapiens
atttagctgagaaataaggaaaggagagttactgggttttacggtgtgaaactctcttaagattttattaacttcttttgtttaaaaaaacaactctaatttaatctggactgtgtcatacatgtactttatttcaaaaagtggatgttcttaccttgagtccgctttagagaggtgatgggatgtactaaaaatcagatg

SEQ ID NO: 347844 - DNA, 201 bp, Homo sapiens
ctaggttgttctaactgtaccacaatatttcttaaagcgtattaaagtatctttccttagcttactctgtataaatgaaatatgatataatttagtaaaawttcataaataatacagtaggaatacatttgccataaagatctcaaaatgcctgcttgtaatcagaaattcagcatcgtctagtgagtgttgtctcttgat

SEQ ID NO: 347845 - DNA, 201 bp, Homo sapiens
attaggtatcataaagagcatagtctttgaatccaaggttcagtttaccccgaatctagatgttggatacttcaagagtagaaaattgttctatcacatcytaaaaaactgttgttttaatggtaactattgatttgacccactttaaatgggatatattatatttgcatatagaagatgaagctctagtagcttcaacgt

SEQ ID NO: 347846 - DNA, 201 bp, Homo sapiens
ttaaacagcatctctctgtcacccaggcctgagtgcagtggcacgatcatagctcgctttaccattttcctccctgggctccagcaatccttccacctcakcctcttgagtagctgggactacaggtgcataccatgtctggtttattttaatttaatttaatttttttttgagacagagtttcactcttatcacccaggc

SEQ ID NO: 347847 - DNA, 201 bp, Homo sapiens
ggaagtcatagctacttctctggtcattatagtatctcccatttctttgcttttatagtgtgttgagtatctcataattttttagtatttttgtctttctstaatatacacacacacacatacacacacacacacacacacacacacacatatatatatatatgtatttattttagagataggctgtagcccaggctggag

SEQ ID NO: 347848 - DNA, 201 bp, Homo sapiens
ggctccagcaatccttccacctcatcctcttgagtagctgggactacaggtgcataccatgtctggtttattttaatttaatttaatttttttttgagacrgagtttcactcttatcacccaggctggaacagtggtgcaacctctgctcactgcaacctctgcctccctggttcaagtgattcttctgcctcagcctccc

SEQ ID NO: 347849 - DNA, 201 bp, Homo sapiens
caccatgcctgactaatttttgtatttttagtagacacggggtttcagcatgttggccaggctggtctcagactcctgacctcaggtgacccacccgcctyggcctcccaaagtgctggaattacaaacatgagccaccgcacccggcctaattttttatattttttgtagagacggggtttcaccatgttgcccagactg

SEQ ID NO: 347850 - DNA, 201 bp, Homo sapiens
ttatagtgtgttgagtatctcataattttttagtatttttgtctttctctaatatacacacacacacatacacacacacacacacacacacacacacatayatatatatatgtatttattttagagataggctgtagcccaggctggagagcagtggctcgattgtagctcactgcaccctcaaactcctgggctcctgtc

SEQ ID NO: 347851 - DNA, 201 bp, Homo sapiens
tgcaccagaatatttttatctcctgaaacttaatgaagtatgggttcttaagcaggagaggatggtaattattaggcctatttgtgagactactgtgtgcmagacagtatactaattaaatactttacatgtcttactttatttctcacaaacatcctgtgacatattattttcatttccattttacatatgaggaatact

SEQ ID NO: 347852 - DNA, 201 bp, Homo sapiens
ctatttgttttaaccagtttagcataaagacaatgttctcagtgaatgtttaaaaattaattcagtctgaattaggtgaagactgaatgaacatctgtgargaaaatctcaggcatggttccaagccataggcttagagcagggttctttttatttttgtagagatggggtctccctttgttgcccagcctggtcttgaac

SEQ ID NO: 347853 - DNA, 201 bp, Homo sapiens
gaaacccgtgtctgcattaaaaaaaaaaaaaactgcacacgctcctcattcttttctcagtagggttccttttcaagtatgttatgagtcgtgtagttacsttgaaaaacaaaacttttcataagaaaaaaatccctgagttcagacaaccaactttaagcatttagggcaccttattaatatttgtaagtcaggatatgc

SEQ ID NO: 347854 - DNA, 201 bp, Homo sapiens
taacgcatataattttgttatttaagaattaaaagattataaatgtataaattttattttaatcatttgaaagttgggatggttgaaaatatataggagtwatgatagtattacctagccagtatttgagtagattctttaaatatctttgattgattaggctagaagtacaaatagtcatccatcatggcagagtttaga

SEQ ID NO: 347855 - DNA, 201 bp, Homo sapiens
tctcttatacttatgcatggaacaggcatgtggtttccatttctcttaagacgtcaccccagtcctccaaccttcctcctttttctccattgctcttcgayagacaggcttccctttttgttctgtgagctgatagaaatgtcctgtatttactgcttttccagagtcctggttttacacagcggttttagtttcattttc

SEQ ID NO: 347856 - DNA, 201 bp, Homo sapiens
ttggtggaggtggtgtggggtaggatggaagttaaactcaattctgagatccttcctaatattttgggaaatgttacttttccatgagtatgcaatttttwaaaaacttattttaattattttctttaaattatctggtccttaaaggttgcgagtaaattgtgttggagtttttgatgttttaacatttgataacagtca

SEQ ID NO: 347857 - DNA, 201 bp, Homo sapiens
tcacacccttctttccctctgcttgtgcccacctaacctcagcagcagccaagctgttctggttgatagcaacatctagtgggcaacacagggaggaatawgattagttctgtttttcccccagcagcatcattctgttcttctgcctgagggcatttgccccctctttcttatctggagacattgtttcttagctacttt

SEQ ID NO: 347858 - DNA, 201 bp, Homo sapiens
gttataatattactattgttttagtgaagtgatacaattaaataagaactgttggactgtgcatgtgttaggggatccatttgatttcattgtctccttgycagcatctcttttgatgctacttttttccccttgtctgattaaatggcattttttgtaagaggtatttaattataagaatgcttacattaaaatctcttg

SEQ ID NO: 347859 - DNA, 201 bp, Homo sapiens
ctgttgcctaggctgattttgaactcctggcctcaagtgatccttccaccttagcctcccaaaatactgggattataggcataaacgaccacaactgcctstctttgtacttttaactctttgtttcgtccctggctccatgtgagctcctgttcttggttcacttgttctttgctttttcttgtatgtcattgattctga

SEQ ID NO: 347860 - DNA, 201 bp, Homo sapiens
tcccccgcaacccggaggctgtaaaaatgaggataaggggttagaaatttccaagaagtgactgttgttaagatagacattgaaggacagcaaaataagaktagaattaggtatcataaagagcatagtctttgaatccaaggttcagtttaccccgaatctagatgttggatacttcaagagtagaaaattgttctatca

SEQ ID NO: 347861 - DNA, 201 bp, Homo sapiens
gagcttctcagcatctctcaagtgagctagaaaggaaggggaagagcatgaaggagcaagaatgggaagatgggatgacccaagcctggaagtttctcctrtgatgacttttgactaaaatctggacttaaactattttaagcagcttggctacatttcccagcctcctttagaagcaaaagtttttaacagttgatcctg

SEQ ID NO: 347862 - DNA, 201 bp, Homo sapiens
attattaaaaataaaaattgtaaccatatttatatggttcttaaatatcaccagttttaataaacataacagattttccttgtaattgtttctcagaagtmtactgttaaatggattctgtgggatagtcaaataattacagctcaaattaatttgatttctgtctaaattgaattcttcaaattagttttgtacttaata

SEQ ID NO: 347863 - DNA, 201 bp, Homo sapiens
gtttaattacctcagtgttaacaaatttacagtgtcacagtgtgtttgaaagtgactgtaagtgcagcaggagcagcacacatttctgcatggtgttcttstgtatcatttggtggtttagtgcacagttgtgtctcaggaattgagcatctctccttctgcttaattatcatgtgtgggcccttaggaggggcagagatg

SEQ ID NO: 347864 - DNA, 201 bp, Homo sapiens
ggttcttttctcaacaggtatttcattttaatgtgatacttgttctagttaccagtttagccttatctttcaaaaaattattcttaacatgttaaaaatayatacctatgctatttttaatagattttatagttttaaaaaaagatttatattttaaaccagtagaagttttaagaatgcatctttattgttacatgttat

SEQ ID NO: 347865 - DNA, 201 bp, Homo sapiens
tggctgtgggccaggaggtgtttgggctgcttcctgggctcatgctgtatgccacgctctggctacgtgagcacaaccgtgtgtgtgacctgctgaaggcygagcaccccacctggggcgatgagcagcttttccagacgacccgcctcatcctcataggtgaggactccagacctgccctgccctggaaggtcattccct

SEQ ID NO: 347866 - DNA, 201 bp, Homo sapiens
ttggcacgcgtatgtcatcgacagtgggccggcaccctggtgacctgagggaacccctctctgtccacaggtagacctcggccacatttatggagacaatmtggagcgtcagtatcaactgcggctctttaaggatgggaaactcaagtaccaggtagtgctgggccagggggtagggcagagggaggggtctcccatggt

SEQ ID NO: 347867 - DNA, 201 bp, Homo sapiens
tccacaggtagacctcggccacatttatggagacaatctggagcgtcagtatcaactgcggctctttaaggatgggaaactcaagtaccaggtagtgctgrgccagggggtagggcagagggaggggtctcccatggtcttccctggcaaagactgcttggggcgggggtctgggtcatgtcctgagagggccaaccacgg

SEQ ID NO: 347868 - DNA, 201 bp, Homo sapiens
tcctgctcaggaggaagttcatacctgacccccaaggcaccaacctcatgtttgccttctttgcacaacacttcacccaccagttcttcaaaacttctggmaagatgggtcctggcttcaccaaggccttgggccatggggtgagtacctaggaggggctcaggactgctctggacctaatttggcacgcgtatgtcatcg

SEQ ID NO: 347869 - DNA, 201 bp, Homo sapiens
acctggctccggaattcactgcggcccagcccctctttcacccacttcctgctcactcacgggcgctggttctgggagtttgtcaatgccaccttcatccragagatgctcatgcgcctggtactcacaggtgggtgtggggcagggccccctgacctgggggagcaagcaagcctgctagtccttttggattcttggcat

SEQ ID NO: 347870 - DNA, 201 bp, Homo sapiens
gtctcagcctcccgagtagctgggattacaggtgcccgccaccatgcctggctaatttttgtatttttagtagagacagggttttgccatgttggccaggmtgatcttgaactgctgacctcaggtgatccacccgccttggcatcccaaagttctgggtttataggcatgagccacagcgcctggccgcactgatattat

SEQ ID NO: 347871 - DNA, 201 bp, Homo sapiens
gtagggcagagggaggggtctcccatggtcttccctggcaaagactgcttggggcgggggtctgggtcatgtcctgagagggccaaccacgggagtgggargcttgtgccaggagcgacagtatacgctgggaggaggcagcaggtatgagaagccagggaggagcagacgtggcctcccatgtcagccagggaggtggat

SEQ ID NO: 347872 - DNA, 201 bp, Homo sapiens
gcttcggccttgaccgctaccagtgtgactgcacccgcacgggctattccggccccaactgcaccatccgtgagctgggccttcagccctcactccttccrtcttgagcccttctgctccccgggccctttctcctagaccctaacttcctaccctcctctctgaccatggccctgttctccttccttgcctggttctgcc

SEQ ID NO: 347873 - DNA, 201 bp, Homo sapiens
cccaaacccttggaaaggtcctggaaccaggcagttctggacagtcctcatctgtggggatggggactagcagcttggcctttgggctgcgtgtgtctggyatgcagcgtggtgtgctgatcatctctgcctccgcgtgtcttggggactcagtgagagcaaatgggaaggttctctgctgatggggcagttgtgggaggg

SEQ ID NO: 347874 - DNA, 201 bp, Homo sapiens
aggtgggtggatcaattgagcccaggaggtcgaggctgtagtgagccataattgcggcactgcactctggcctgggcaatagagtgagaccctgtctcaaaaataaataaataaataaataaataaataaataaataaataaataggttggcaaactacagcctgcaggccaaattcggcccacctctccatttttgtaaa

SEQ ID NO: 347875 - DNA, 201 bp, Homo sapiens
ggtgggtggatcaattgagcccaggaggtcgaggctgtagtgagccataattgcggcactgcactctggcctgggcaatagagtgagaccctgtctcaaaaataaataaataaataaataaataaataaataaataaataaataggttggcaaactacagcctgcaggccaaattcggcccacctctccatttttgtaaat

SEQ ID NO: 347876 - DNA, 201 bp, Homo sapiens
gtgcagagactggcctgtctggggataggagtggaaatagggagcccacttagggaaaggagtcagagtggaagatgagcgggggttgcttgaggtagtgrtggtagagatggagagcaggggactgattttaagagacattttggaggtggaatcaacagccttggctgaggggaactggcagctggaggcaggagtggg

SEQ ID NO: 347877 - DNA, 201 bp, Homo sapiens
gtgggtggatcaattgagcccaggaggtcgaggctgtagtgagccataattgcggcactgcactctggcctgggcaatagagtgagaccctgtctcaaaaataaataaataaataaataaataaataaataaataaataaataggttggcaaactacagcctgcaggccaaattcggcccacctctccatttttgtaaata

SEQ ID NO: 347878 - DNA, 201 bp, Homo sapiens
tgggtggatcaattgagcccaggaggtcgaggctgtagtgagccataattgcggcactgcactctggcctgggcaatagagtgagaccctgtctcaaaaataaataaataaataaataaataaataaataaataaataaataggttggcaaactacagcctgcaggccaaattcggcccacctctccatttttgtaaataa

SEQ ID NO: 347879 - DNA, 201 bp, Homo sapiens
gggtggatcaattgagcccaggaggtcgaggctgtagtgagccataattgcggcactgcactctggcctgggcaatagagtgagaccctgtctcaaaaatwaataaataaataaataaataaataaataaataaataaataggttggcaaactacagcctgcaggccaaattcggcccacctctccatttttgtaaataaa

SEQ ID NO: 347880 - DNA, 201 bp, Homo sapiens
ctttcttttttgcccaattatagttgttgatcaaaatgactatctcttaagcatgaacgttattatttcatcctaagcaccagagctttcttttctttcctttttttttttttttttttgagatacaatcttgctctcttgcctgggctggagtgcagtggtgtgattttggctcactgtaacctctatctcctgggttca

SEQ ID NO: 347881 - DNA, 201 bp, Homo sapiens
ccagagctttcttttctttcctttttttttttttttttttgagatacaatcttgctctcttgcctgggctggagtgcagtggtgtgattttggctcactgyaacctctatctcctgggttcaagtgattcacctgcctcagtctcccaaatagctgggattactggcacctgccaccacgcccagctaatttttgtatttt

SEQ ID NO: 347882 - DNA, 201 bp, Homo sapiens
aggaacttacccaggctccaggacagcctggcctggctcccagaccactgctgtgcttctctctcggcagatcggtgggggcaggaacatggaccaccacrtcctgcatgtggctgtggatgtcatcagggagtctcgggagatgcggctgcagcccttcaatgagtaccgcaagaggtttggcatgaaaccctacacctc

SEQ ID NO: 347883 - DNA, 201 bp, Homo sapiens
tatatatacatatatatcaatatatacatatacatatcaatacatatatacatatacacacacatatatatgtgtgtgtatatatatactatatatatacatatatatatatacatatatatatatacatatatatatacatatatatatacatatatatatatatatacatatatatatatatatttcccccaatatcct

SEQ ID NO: 347884 - DNA, 201 bp, Homo sapiens
atatatacatatatatcaatatatacatatacatatcaatacatatatacatatacacacacatatatatgtgtgtgtatatatatactatatatatacatatatatatatacatatatatatatacatatatatatacatatatatatacatatatatatatatatacatatatatatatatatttcccccaatatcctc

SEQ ID NO: 347885 - DNA, 201 bp, Homo sapiens
tccagataggagaagctactgctgtttcctaccccccaaccagggaagaagcagttgccagatgcccagctcctggcccgccgcttcctgctcaggaggamgttcatacctgacccccaaggcaccaacctcatgtttgccttctttgcacaacacttcacccaccagttcttcaaaacttctggcaagatgggtcctggc

SEQ ID NO: 347886 - DNA, 201 bp, Homo sapiens
ttacactcgtattctgccctctgtgcctaaagattgccccacacccatgggaaccaaaggtaaaatggggtgaggagctgggcctggggattacaggaggygctcagttcttctctttgggaaaaatcaggcgaagaacaattattgacccaattctgcagatggctagaccaaggcaagacatatgacatgtccagagcc

SEQ ID NO: 347887 - DNA, 201 bp, Homo sapiens
tctctggacttgactcagtgcccatcttctagatggggatagggcatgacctggcaaccagagctgcatgccaggcagaggagccccaggccagctgaccygggcacatggggcaagatgccagctgtgccaaggctgcccgggtgcctgcacctgctctcgccagcaccagttgggtctgtgggccgggagagggcttcc

SEQ ID NO: 347888 - DNA, 201 bp, Homo sapiens
tgagagagctggaggctgtccagcacactggctggagatgaagctgtgaccaaaggcaggaccctagggcaccatttaactcccctacaacctcatgagcygggtatgattaccctgtgaaaatcaagattcagagaggtgaagtgaactctccagggacactcagcagatggagacttgaggtctggttgccaccaaaat

SEQ ID NO: 347889 - DNA, 201 bp, Homo sapiens
accaaaggcaggaccctagggcaccatttaactcccctacaacctcatgagccgggtatgattaccctgtgaaaatcaagattcagagaggtgaagtgaaytctccagggacactcagcagatggagacttgaggtctggttgccaccaaaatctatgctacttccactccatcacaaagggggctcttcttgaatgggaa

SEQ ID NO: 347890 - DNA, 201 bp, Homo sapiens
cacctgctctcgccagcaccagttgggtctgtgggccgggagagggcttccccaccagcaggctcttccagctgctgggcccagttgtctggatctggtgyggtggtgcttaggtgtggggactggggcccaggccaaaccagtcagggttccccaccttttttttttttctctctggctgccaggtccccagagactctc

SEQ ID NO: 347891 - DNA, 201 bp, Homo sapiens
gggcagaaggtctgggttgccctcatatttccaagtctgcgagtaaactgagggccaagctacttgggcatctgccccaggaagccaaagcctgtcttttrcctctagaggcaaaggagatgaagagatgagggctgcactcacctaagagggcaggcggagggagagaatgctgcttttgcctctctggtgggtgaggag

SEQ ID NO: 347892 - DNA, 201 bp, Homo sapiens
gaccccggtgcccggtggggaattttcttggcctcctggtggagccttgaatgccaggctcagcccctcatctctctcctctgcagggagtctcttgctcyggttcttgctgttcctgctcctgctcccgccgctccccgtcctgctcgcggacccaggggcgcccacgccaggtaggcggccccatccctccccaaggga

SEQ ID NO: 347893 - DNA, 201 bp, Homo sapiens
ccccatcaggggctagatgggggtcaggaggccaccctagcatggtctctgacctccatttctcacccacagtgaatccctgttgttactatccatgccarcaccagggcatctgtgtccgcttcggccttgaccgctaccagtgtgactgcacccgcacgggctattccggccccaactgcaccatccgtgagctgggcc

SEQ ID NO: 347894 - DNA, 201 bp, Homo sapiens; identical to SEQ ID NO: 73853

SEQ ID NO: 347895 - DNA, 201 bp, Homo sapiens
tatcaatatatacatatacatatcaatacatatatacatatacacacacatatatatgtgtgtgtatatatatactatatatatacatatatatatatacatatatatatatacatatatatatacatatatatatacatatatatatatatatacatatatatatatatatttcccccaatatcctcagatgttgggcag

SEQ ID NO: 347896 - DNA, 201 bp, Homo sapiens; identical to SEQ ID NO: 73854

SEQ ID NO: 347897 - DNA, 201 bp, Homo sapiens
agcacatagcaggccttcagaaaatagatgactgtgatggttgattattagctgggtgactcagcacatttgattagccaccctgagtctcggtttccccygtgtgctgcgcccggatgcatacttgtggtccccagcacgtgcagggtcaaactgtaacttgcccggccttcaggaatcttcatgttcccttccctgcat

SEQ ID NO: 347898 - DNA, 201 bp, Homo sapiens
atggcccatgagagttcccagtggaggatggatttgaggaactgggcagggaagcagggaagctccatatttgtctccccttggccacatgaacatgtggrtattgcagagtggagcagattctgtgcatgagctccttgtgatcctggaacagcatcttattctttactctcccatgacaaatggtccccgggggcagaa

SEQ ID NO: 347899 - DNA, 201 bp, Homo sapiens
atcaatatatacatatacatatcaatacatatatacatatacacacacatatatatgtgtgtgtatatatatactatatatatacatatatatatatacatatatatatatacatatatatatacatatatatatacatatatatatatatatacatatatatatatatatttcccccaatatcctcagatgttgggcagc

SEQ ID NO: 347900 - DNA, 201 bp, Homo sapiens
ctgggctggagtgcagtggtgtgattttggctcactgtaacctctatctcctgggttcaagtgattcacctgcctcagtctcccaaatagctgggattacwggcacctgccaccacgcccagctaatttttgtatttttagtagagacgagtctttgccatgttggccaggctggtcttgaactcctggcctcaagtgatc

SEQ ID NO: 347901 - DNA, 201 bp, Homo sapiens
agatacaatcttgctctcttgcctgggctggagtgcagtggtgtgattttggctcactgtaacctctatctcctgggttcaagtgattcacctgcctcagyctcccaaatagctgggattactggcacctgccaccacgcccagctaatttttgtatttttagtagagacgagtctttgccatgttggccaggctggtctt

SEQ ID NO: 347902 - DNA, 201 bp, Homo sapiens; identical to SEQ ID NO: 73855

SEQ ID NO: 347903 - DNA, 201 bp, Homo sapiens
atcctaagcaccagagctttcttttctttcctttttttttttttttttttgagatacaatcttgctctcttgcctgggctggagtgcagtggtgtgatttyggctcactgtaacctctatctcctgggttcaagtgattcacctgcctcagtctcccaaatagctgggattactggcacctgccaccacgcccagctaatt

SEQ ID NO: 347904 - DNA, 201 bp, Homo sapiens
tacaacctcatgagccgggtatgattaccctgtgaaaatcaagattcagagaggtgaagtgaactctccagggacactcagcagatggagacttgaggtckggttgccaccaaaatctatgctacttccactccatcacaaagggggctcttcttgaatgggaaggggttgcaaacctgagtctgatctgtgacatgtgag

SEQ ID NO: 347905 - DNA, 201 bp, Homo sapiens
attgcaaagatacacaaaagttgagagaaaagcagaatgaactatgtacccatctttcagtttcaacatttacccacagtttcttcatcttatttcatttstcccctctcatatttttataaagtattttaaatcaaattctaaaaatcatgccacttaaaattctaaaaatcatgccacttcacccataaatacttctag

SEQ ID NO: 347906 - DNA, 201 bp, Homo sapiens
cttacattatctctcgcagtcctcagattcactgtatcaaatgggtatcatttgcccctttttaaagatggagaaattgacacccagagagatgagatgayttatctgtattcacacagctagcaaatagcatagtcagttgcaaacacaggctaccttgactcagggcaagggagttcatgtttgtttttttctgtttct

SEQ ID NO: 347907 - DNA, 201 bp, Homo sapiens
atgggggactcaaagtgaattagacttggtacctgcatctccttggttttctttcttgatgaacaggggtgtcctccactgagcatagaactgagttggcrtgaaaacatgcaggattgaagttagaccgaaggaaggccttcctgtacgaatacttcctaaagatctggttgtggcaggagatggtgatccccctggggt

SEQ ID NO: 347908 - DNA, 201 bp, Homo sapiens
gttccccaccttttttttttttctctctggctgccaggtccccagagactctctaaatattactctttaggggatttgggtcctgcctcttcactgggcartcttgcagcctgacacctctgcatcctggaggacttggtgttccctggctgtgcctgtcccctagtcacgctcagtcctggacctggagccctgactttt

SEQ ID NO: 347909 - DNA, 201 bp, Homo sapiens
taggtgtggggactggggcccaggccaaaccagtcagggttccccaccttttttttttttctctctggctgccaggtccccagagactctctaaatattaytctttaggggatttgggtcctgcctcttcactgggcaatcttgcagcctgacacctctgcatcctggaggacttggtgttccctggctgtgcctgtcccc

SEQ ID NO: 347910 - DNA, 201 bp, Homo sapiens
gcccatcttctagatggggatagggcatgacctggcaaccagagctgcatgccaggcagaggagccccaggccagctgacccgggcacatggggcaagatsccagctgtgccaaggctgcccgggtgcctgcacctgctctcgccagcaccagttgggtctgtgggccgggagagggcttccccaccagcaggctcttcca

SEQ ID NO: 347911 - DNA, 201 bp, Homo sapiens
tgatcaaaatgactatctcttaagcatgaacgttattatttcatcctaagcaccagagctttcttttctttcctttttttttttttttttttgagatacartcttgctctcttgcctgggctggagtgcagtggtgtgattttggctcactgtaacctctatctcctgggttcaagtgattcacctgcctcagtctcccaa

SEQ ID NO: 347912 - DNA, 201 bp, Homo sapiens
gggctgcactcacctaagagggcaggcggagggagagaatgctgcttttgcctctctggtgggtgaggagatggaggccagcctggaggcaaggctgtgcygggggcgccctgaatgctcaagtacttcccctctagtctctggacttgactcagtgcccatcttctagatggggatagggcatgacctggcaaccagagc

SEQ ID NO: 347913 - DNA, 201 bp, Homo sapiens
gtggcgggtgggggaaacactaagagactcgaccaggaaacaccgtaagggtaatgtggagcaggaggctgaggttggatgcgtaatgtggggatgagacyggaggccagaaaactggtaccgaggctcctgcaaggatctaggaaagaacgaatgactggtggagtgcaggggcagaaggtctgggttgccctcatattt

SEQ ID NO: 347914 - DNA, 201 bp, Homo sapiens
tacatatgcgggaactcaaacttagcttgaatagctgcccaaggtccctatattagtttcctcaggctgctgcaacaaagtaccacaaactgggaagctcrgagcaacagatggaggctagaagtctgaattcaaggtgtcagcagtgccatgttctctctcaaggctctatgcctccttggcatctggtggtggccgaca

SEQ ID NO: 347915 - DNA, 201 bp, Homo sapiens
gagtagctgggattacaggtgcccgccaccatgcctggctaatttttgtatttttagtagagacagggttttgccatgttggccaggatgatcttgaactsctgacctcaggtgatccacccgccttggcatcccaaagttctgggtttataggcatgagccacagcgcctggccgcactgatattattataacacacatt

SEQ ID NO: 347916 - DNA, 201 bp, Homo sapiens
tatctctcctattcccttggtctgtgaccttcttctggatcctagagcccagaccccaccctgatgtgggccaagtctgattccatcaggaatgggggctraggcagctgagaccttggagtccccctcctcctgcacacccaccctctgtccccagggttctggaaaacttctttccttagacttggctgctgaggctgt

SEQ ID NO: 347917 - DNA, 201 bp, Homo sapiens
agtttctccaggaggcagcagggcggatgccagagctccatgcaccctcccaggagattttctagccctatctctcctattcccttggtctgtgaccttcktctggatcctagagcccagaccccaccctgatgtgggccaagtctgattccatcaggaatgggggctgaggcagctgagaccttggagtccccctcctcc

SEQ ID NO: 347918 - DNA, 201 bp, Homo sapiens
gttgctcaagttagtctcctggagtccctattatccccagaaaaaggtggacctggaagggtcccgccccaggttgaccttaatggcatcatggatctgaygctagcatttccccttatctccttgtaggagagaaggagatggcagcagagttggaggaattgtatggagacattgatgcgttggagttctaccctggac

SEQ ID NO: 347919 - DNA, 201 bp, Homo sapiens
aatggcatcatggatctgatgctagcatttccccttatctccttgtaggagagaaggagatggcagcagagttggaggaattgtatggagacattgatgcrttggagttctaccctggactgcttcttgaaaagtgccatccaaactctatctttggggagagtatgatagagattggggctcccttttccctcaagggtc

SEQ ID NO: 347920 - DNA, 201 bp, Homo sapiens; identical to SEQ ID NO: 73844

SEQ ID NO: 347921 - DNA, 201 bp, Homo sapiens; identical to SEQ ID NO: 73846

SEQ ID NO: 347922 - DNA, 201 bp, Homo sapiens; identical to SEQ ID NO: 73847

SEQ ID NO: 347923 - DNA, 201 bp, Homo sapiens
aagatgtagggagaagaaagccatctacaagccaaggaaagaggcctcaggagataccaaccctgctgacaccttgatcttgaacctctggtctccagacrgaggaaataatttctattgtttgagccactcattctgtggtacattgtcatggcagccctagcaaacaaacacattctctttccctggaattcccagcca

SEQ ID NO: 347924 - DNA, 201 bp, Homo sapiens
gtgctgcgcccggatgcatacttgtggtccccagcacgtgcagggtcaaactgtaacttgcccggccttcaggaatcttcatgttcccttccctgcatgtrtctaccttcctgcagtttggtagcttctaggtgactcagggacaggatatttttgtgttccctatgggggcgagtctgcaacctaaaatgtcagatggtt

SEQ ID NO: 347925 - DNA, 201 bp, Homo sapiens; identical to SEQ ID NO: 73850

SEQ ID NO: 347926 - DNA, 201 bp, Homo sapiens
accatgctctgggagtcaggaagggacatctgacccagagttgcgggttatgggaaaagaagggatgtccaagcagaaattggaaggagggatagagattkcccagggtaagaggtggtgttagtggcaggggatggctgtgttccagatagagaggacggcatgggtgaaaggcatggaagtcagaggacatggcagttt

SEQ ID NO: 347927 - DNA, 201 bp, Homo sapiens
atcagcccagcacttcctctgaggccccatctggcctcatccaggcactcttggtatacaggtcccacccgtctgtattcttttttagtccattcactaaygcacaatgagccatggtctgtgctattttgttttttgccttttctgtttccttttgtataataaatgtttacacggaattgtttttttttatccccaagg

SEQ ID NO: 347928 - DNA, 201 bp, Homo sapiens
aagcccaccatgctctgggagtcaggaagggacatctgacccagagttgcgggttatgggaaaagaagggatgtccaagcagaaattggaaggagggatakagatttcccagggtaagaggtggtgttagtggcaggggatggctgtgttccagatagagaggacggcatgggtgaaaggcatggaagtcagaggacatgg

SEQ ID NO: 347929 - DNA, 201 bp, Homo sapiens
agcttggtgacttggagggagtgtaaaaatgggagcgtttgctgagcctagtgatggagcgtaagaatgactttacaggaaggtggagatgtctgtggggrccgtgttaaggaattctactttctgccaagagcagagagagtatttggaaaggttttaagtcagctcatgatgcaagatttgttgtttttttttttttaa

SEQ ID NO: 347930 - DNA, 201 bp, Homo sapiens
ctgattttaagagacattttggaggtggaatcaacagccttggctgaggggaactggcagctggaggcaggagtgggagggagttggttgtgggcagctgygggtgacccccaaccccaggttgccaggtggccccatcccacaggtgctggatggagaaatgtacccgccctcggtagaagaggcgcctgtgttgatgca

SEQ ID NO: 347931 - DNA, 201 bp, Homo sapiens
caggctcttccagctgctgggcccagttgtctggatctggtgcggtggtgcttaggtgtggggactggggcccaggccaaaccagtcagggttccccaccttttttttttttctctctggctgccaggtccccagagactctctaaatattactctttaggggatttgggtcctgcctcttcactgggcaatcttgcagcc

SEQ ID NO: 347932 - DNA, 201 bp, Homo sapiens
aggctcttccagctgctgggcccagttgtctggatctggtgcggtggtgcttaggtgtggggactggggcccaggccaaaccagtcagggttccccaccttttttttttttctctctggctgccaggtccccagagactctctaaatattactctttaggggatttgggtcctgcctcttcactgggcaatcttgcagcct

SEQ ID NO: 347933 - DNA, 201 bp, Homo sapiens
ctgatgctagcatttccccttatctccttgtaggagagaaggagatggcagcagagttggaggaattgtatggagacattgatgcgttggagttctacccyggactgcttcttgaaaagtgccatccaaactctatctttggggagagtatgatagagattggggctcccttttccctcaagggtctcctagggaatccca

SEQ ID NO: 347934 - DNA, 201 bp, Homo sapiens
tcctgcatgtggctgtggatgtcatcagggagtctcgggagatgcggctgcagcccttcaatgagtaccgcaagaggtttggcatgaaaccctacacctcyttccaggagctcgtaggtgagcagctgtttcctggatgcagtccctgcccttgagggactggcagcaaagtcagggagacatcaaggaaatagaacggga

SEQ ID NO: 347935 - DNA, 201 bp, Homo sapiens
cttttttgcttgggtgcagtgcagagactggcctgtctggggataggagtggaaatagggagcccacttagggaaaggagtcagagtggaagatgagcggrggttgcttgaggtagtggtggtagagatggagagcaggggactgattttaagagacattttggaggtggaatcaacagccttggctgaggggaactggca

SEQ ID NO: 347936 - DNA, 201 bp, Homo sapiens
cggtgggggcaggaacatggaccaccacatcctgcatgtggctgtggatgtcatcagggagtctcgggagatgcggctgcagcccttcaatgagtaccgcragaggtttggcatgaaaccctacacctccttccaggagctcgtaggtgagcagctgtttcctggatgcagtccctgcccttgagggactggcagcaaagt

SEQ ID NO: 347937 - DNA, 201 bp, Homo sapiens
ccataggtgctactctgttccaccctggcccttgtcctcagtgccccatcttccaccctggctacttctggttctggtaggagggaccaactgagtgactsccattgcccctgcagctggcctgtggacctggctccggaattcactgcggcccagcccctctttcacccacttcctgctcactcacgggcgctggttctg

SEQ ID NO: 347938 - DNA, 201 bp, Homo sapiens
tggctgaccctatttccaatcctgccctgcccaggggagaccatcaagattgtcatcgaggagtacgtgcagcagctgagtggctatttcctgcagctgaratttgacccagagctgctgttcggtgtccagttccaataccgcaaccgcattgccatggagttcaaccatctctaccactggcaccccctcatgcctgac

SEQ ID NO: 347939 - DNA, 201 bp, Homo sapiens
tgctgaaatttctttcactatatatggggttttaaaatgaatatgataatctaaaaattatcccactagaatggaatacagtgacacacttagccttataygccattctcttatttggataatgcagtattttattaatttttagaattacagtgacacgctgctaactcctacttaacttgtggtttttacttgtctgga

SEQ ID NO: 347940 - DNA, 201 bp, Homo sapiens
tgtctagaaagcaaacacattatttacaagttcatagtagatcaatgtattggattaaaatatgacaaacataatttggtcattgtgagcatgccagctcrgtcaactattcaccacacatgatgccctaaatataactctaggttttcttatgcccaagagagggacatactcttgggtgtctggactagggaaacatgt

SEQ ID NO: 347941 - DNA, 201 bp, Homo sapiens
tcctcactgcccagacggggcagggcccaggcagaggcgcccctcacttcccagactgtgaggcggctgggcagaggtgctcgtcacttcccagatagggygggggcccggcagaggcactcctcactgcccagacggtgtggtggccaggcagaggcgctcctcacttcccagacggtggggcagctgggcagaggcgct

SEQ ID NO: 347942 - DNA, 201 bp, Homo sapiens
gatctgatcttacagtcaaggaaaaagaagaactcattgaagagtggcaaccagaacctcttgttcctcctgtcccaaaagaccatcctgctctcaactayaacattgttttaggacggagtcttgctctgtcaccaggctggagtgcagtggtgcgatcttggctcactgcaacctccatctcccgggttcaagccattc

SEQ ID NO: 347943 - DNA, 201 bp, Homo sapiens
tggggttttaaaatgaatatgataatctaaaaattatcccactagaatggaatacagtgacacacttagccttatacgccattctcttatttggataatgmagtattttattaatttttagaattacagtgacacgctgctaactcctacttaacttgtggtttttacttgtctggatcgattttatgccatacatttgca

SEQ ID NO: 347944 - DNA, 201 bp, Homo sapiens
aaaatccagttagaaaatggggtagagatatgaacagacatttaccaaagggaatatacaaatgacagaaatgtccatgacaacatttaacgtcattagcygttaggaaaattcaagttgaaatcacattgaggtcttaatacacagctatcacaatgactaaaattgcaagtagtgacagcaccaaatgctgtatctcat

SEQ ID NO: 347945 - DNA, 201 bp, Homo sapiens
ttgatggcagcacaaactgttgtgtgtgctatgctgtccatttagaagacattctctttgcagtgagcgccacgtttccagagtgtttggtccacaaagcrttatacaaaggctcctgtgggtattatttacatgttgaatttttccatatttttatgtgattggttatgtgatctgtttattgcagggtcccagagttgg

SEQ ID NO: 347946 - DNA, 201 bp, Homo sapiens
agaagttttataacaccttatagctctagttccttatcagaaatcttgttagcttatacatgttaagtaaggactaagaaatactagattctttcttacastctctggcagtacaatatatgtcagggcccttggctctagaatgaggatctacagttcaaagtaagacatacctcatcttaatgtggattgccataattg

SEQ ID NO: 347947 - DNA, 201 bp, Homo sapiens
gtgtcagattatatacgtcttttataatttgctaagtctcttatagaaagtgagagtgagttttgtgagttttaaattgaccactcaaagagtattcatarttacccccttttgtagaaaataggactgattttcatcttgctctctcaatatgtcgagtagtaataattggtttactgtctaagtaccttttctgtctaa

SEQ ID NO: 347948 - DNA, 201 bp, Homo sapiens
ttgtaacacctgatagcctgggatttattgggctttctgtgtcagtatttgtgtctttcggcacttgtggaaaattgccagacattatcttgtccaacttacctcttattcattctctctggtattctctccttctgacaccttgtttagacatattttagatggactttctcactctatcctacctcttattctcttttc

SEQ ID NO: 347949 - DNA, 201 bp, Homo sapiens
tttaattttatatttaggcatcataacacagtgatgaagactatagactctggagccaggctgtttggttttgaatcctagcattgctgcttcatagctgrgttacttcttggtacctcgactttcctatctgtaaaataggaaatttttggtttttcagatgtgtgtgctgctgttataaatcaaatttgatttagtttt

SEQ ID NO: 347950 - DNA, 201 bp, Homo sapiens
catagttcaccccattgtgatcttgacatctatacatggctctttaaatcatatgtaacttccaaataaagaccctagtagattaaaaaaaaaaaaaaaaatcacacttttaactctttcttgtactgcttcaaagatgctaacttcattacccaaaacgagatagaaagttaccttatccttctttgggtgatgttgatt

SEQ ID NO: 347951 - DNA, 201 bp, Homo sapiens; identical to SEQ ID NO: 73887

SEQ ID NO: 347952 - DNA, 201 bp, Homo sapiens; identical to SEQ ID NO: 73888

SEQ ID NO: 347953 - DNA, 201 bp, Homo sapiens
cagtaacctgctaggaggactcagactcactaaaaggtattacactcatggtttgaattagggtagggaaaggatacacgttagaaccagcgagagtgagwgagagagagagaccctggagtcatggataatgtttcttcctctcatcccttacatctgacaacacagagactatattaccaaccagggaagctcactcga

SEQ ID NO: 347954 - DNA, 201 bp, Homo sapiens
gtgaggagcccctccgcccggcagccgccccgtctgagaagtgaggagcccctccgcctggccagccgccccgtccgggaggtgaggggcgcctctgcccrgctgcccctactgggaagtgaggagcctctctgcctggccagccgccccgtccgggagggaggtgggggggtcagccccccgcccggccagccgccctgt

SEQ ID NO: 347955 - DNA, 201 bp, Homo sapiens
agaagattcaatatagtaaaaatgtatcttctatcctgctgtggtttgagtgtgtcctccaaaactcaggttaaaatgtcattgccattgtgacagcatcrtgaattagttaattacttcacaagagttatgataattcttacccagtccaatggtgtgatcttaacatcagaaacctgtacttgtcagagtcctttccat

SEQ ID NO: 347956 - DNA, 201 bp, Homo sapiens
ggaagctcatctgtttgctttaaattcagatctgactagaagcaaaatgctccacagtaggcagataactttaaattttctttttttttgtttttgagttrtatattcagtatatttcaatcaattgcatttgggttatatttttggatgctcagagttttcgtcattggccatattggatcctgtattctttaacatgat

SEQ ID NO: 347957 - DNA, 201 bp, Homo sapiens
gtatgttattaaaaatacatgcttctaggtaaatcagcatatttgctgaccctaaaattgttctttcccccaaaagtcaaaattatcacagggttgtaaartagcctgacattacagccttacagctgacattatacctccctttacagtttataaaacatgcttacctgcattttttccttgagacacgtaacactgtga

SEQ ID NO: 347958 - DNA, 201 bp, Homo sapiens
gtatactgaaaacttcaaaatagtgatgaaaaaaatcagacaaaatctaagtaagtggagagacgtgtatggattagaagattcaatatagtaaaaatgtmtcttctatcctgctgtggtttgagtgtgtcctccaaaactcaggttaaaatgtcattgccattgtgacagcatcatgaattagttaattacttcacaaga

SEQ ID NO: 347959 - DNA, 201 bp, Homo sapiens
aacttggttccattctccccatcactttcaggtacaccagtcagacgtagatttggtcttttcacatagtcccatatttcttggaggctttactcatttckttttattcttttttctctaaacttcccttctcgcttcatttcattcatttcatcttccatcgctgatattctttcttccagttgatcgcatcggctcctg

SEQ ID NO: 347960 - DNA, 201 bp, Homo sapiens
attttcccatctaccaactccaggactggccattcctgggtcagttgaccagacacctggaaagaagagctctcaactccaagattattttcttagtaatrgctttaaatgcagccacagcttggtcgtctgccttaatatgatttgatatgttttgcaatttactgtcctgctgaaagcattcatattatgagggaaaaa

SEQ ID NO: 347961 - DNA, 201 bp, Homo sapiens
gaggctgaggcaggagaatcacttgaacctgggaagcggaggttgcagtgagccgagatcgcgccattgtactgtagtttgggcaacaagaacgaactccrtctcaaaaaaaaaaaaaaagctcatattgcctggttttaagatgtggcctgggatcaccatattgatcttcccatgccagctgctcccatgatggttgtg

SEQ ID NO: 347962 - DNA, 201 bp, Homo sapiens
gttggcctgcctcgctagataggggaagttctcctggataatatcctgcagagtgttttccaacttggttccattctccccatcactttcaggtacaccartcagacgtagatttggtcttttcacatagtcccatatttcttggaggctttactcatttcgttttattcttttttctctaaacttcccttctcgcttcat

SEQ ID NO: 347963 - DNA, 201 bp, Homo sapiens
tcagaatgatgctggcctcataaaaggagttagggaggattccctctttttctgttgattggaatagtttcagaaggaatggtaccagttcctccttgtasctctggtagaattcggctgtgaatccatctggtcctggactctttttggttggtaagctattgattattgccacaatttcagagtctgttattggtctat

SEQ ID NO: 347964 - DNA, 201 bp, Homo sapiens
aaaattaccaggggcattaaataatgatagaagtgtcagtacacaaagaaaacagtgatcctaaatttatatgcgtctaacaaaagagttacaaaatacaygaaataaaaagatacagacattaaaggagaaatagacaaatctacaactatagttggagacttcaaagtacctttttcagtaatcaatagaccagttaga

SEQ ID NO: 347965 - DNA, 201 bp, Homo sapiens
tacggctagccagttttcccagcaccatttattaaatagggaatcctttccccattgcttgtttttctcaggtttgtcaaagatcagatagttgtagataygtggcgttatttctgaggggctctgttctgttccattgatctatatctctattttggtaccagtaccatgctgttttggttactgtagccttgtagtata

SEQ ID NO: 347966 - DNA, 201 bp, Homo sapiens
aagtggaggcacttggatggaaggagctgccccttctttgttgtatccaaccctctccccaccccagatgcctggtaacccacttgctgcctgattgactkgtcttacttttagcttataggctttatactgtggtgcctcgcctggtcaagtttgtagatattctgaccaattggtatgttagaatgaaccgcagaagat

SEQ ID NO: 347967 - DNA, 201 bp, Homo sapiens
agtacatcattctgcttgaagtcacagtttccaagaacctaccagcaacattaaggatttactgaacaagaaataatagttaagacaattacaaaggagcraggtttctacatttgtcacaaaccggtaaaatattgacaccagtggaccttaggaagttatgtttatgttaggtactacttggagttaccactaagaaaa

SEQ ID NO: 347968 - DNA, 201 bp, Homo sapiens
tttgcccactttttgatggggttgtttgttttttcttgtaaatttgtttgagttcattgtagattctggatattagccctttgtcagatgagtaggttgcraaaattttctcccattctgtaggttgcctgttcactctgatggtagtttcttttgctgtgcagaagctctttagtttaattagatcccatttgtcaattt

SEQ ID NO: 347969 - DNA, 201 bp, Homo sapiens
ttcaagtgctgaaagataagtattgtctaccaagaattccatatcaatcagaaatacccttcaggatgatgggaaaataaagacattctcaagtgaaagaraactaaaagaatccgttcccagcagaccagtcctaaaagagtagctaaaggatgttcttaccacagaaaggaaataatgaaagagggaatccagaaacat

SEQ ID NO: 347970 - DNA, 201 bp, Homo sapiens
agcacctgttgtttcctgactttttaatgattgccattctaactggtgtgagatggtatctcattgtggttttgatttgcatttctctgatggccagtgaygatgagcattttttcatgtgttttttggctgcatacatgtcttcttttgagaagtgtctgttcatgtcctttgcccactttttgatggggttgtttgttt

SEQ ID NO: 347971 - DNA, 201 bp, Homo sapiens
agtgatcaatgcataacaatcactaatccatagtccatttggaatgtattctgcagaaaagtcactcctcttcctctccccacgtgttcactcccaagtcrtagctttcagccagcctgtgccttttcccatccttttttttagctccgttgggcttctacagaatatcccctgtgactggagcagaaggtaatcagagct

SEQ ID NO: 347972 - DNA, 201 bp, Homo sapiens
tgctggccacggccctctttggacaaccgcctttcaagaacgtaattgtgaatgggcttgtcctggcaaggtaggtcaactttgttgtagtgacgggtggractttgtctccactgtttcttaagaaggagtgcgtgagagcggtcaactttgttgtagtgacaggtggagctttgtctccactgtttctcaagaaggagt

SEQ ID NO: 347973 - DNA, 201 bp, Homo sapiens
gcagtgcccagctggtttgtgcgagtggagaacatggtggaccagctcctaaggaacaatgacctgtgctactggtgagcagtaagatgtgtttcttcatmgtgtcttttgtcatgtggttagtaagtatggtttacacttcccccaagttataattttaataacccatcttttattgggtattgtaatagctatcttttc

SEQ ID NO: 347974 - DNA, 201 bp, Homo sapiens
acatatggaggtctgggaaataatatttgagaagactagactgggtgacctaacccctgtccaactgtgagggtctgattctccgaatggtcttgagttamcttcagtttacaggacaaagttgatgaaatgtatatgttacaatatagaacaattatcttgggaatctattacctcatgctcacacccatacatagactg

SEQ ID NO: 347975 - DNA, 201 bp, Homo sapiens
acctgggaggcagaggttgcagtgagccaagatcgcaccactgtgctccagcctgggcgacagagggagactccatctcaaaaaaaaaaaaaaaaaaaaaatcaatgtaattatcgtattgtcagactaaaagattacatgagtatagcagttgattcataaaaagcatttgatcaaattcaacacccattcatgatgaaa

SEQ ID NO: 347976 - DNA, 201 bp, Homo sapiens
ccatagtgatcaatgcataacaatcactaatccatagtccatttggaatgtattctgcagaaaagtcactcctcttcctctccccacgtgttcactcccargtcgtagctttcagccagcctgtgccttttcccatccttttttttagctccgttgggcttctacagaatatcccctgtgactggagcagaaggtaatcag

SEQ ID NO: 347977 - DNA, 201 bp, Homo sapiens
catttatcatatctttgtgttgcaaacatctcggttataccctttttcttgtttttaaatgtacaagaaattattgttgactgaaatcaccccattgtgccatcagatgccactcttattcagcctatcttgaccttcagtttctttatctgcagaatgcccagtagtgtttgtaaggcttaagtagagacgatttacata

SEQ ID NO: 347978 - DNA, 201 bp, Homo sapiens
aggcaggagaatctcttgaacctgggaggcagaggttgcagtgtgctgagattgcatcactgcactccagcctgggcgacaagagttaaactccatctcaraaaaaaaatctatggcattcccagtcatacacaaaggccaggagttgtgatggagacaggatctgtctatccctactccaaaacaaagctaagtgaggtg

SEQ ID NO: 347979 - DNA, 201 bp, Homo sapiens
tggaaaaacactttgtgtgactgcaggatcggctccctctctgatcaacagttctagtactcttctttgtcagtatatcaacctacagctcctgaatgcaragccacaaggtatgtgcctccccacagcaggcagactgtggggtgctgggcattgaagttgtctttaatattcaaatatgtgtgtatttctagtcggctt

SEQ ID NO: 347980 - DNA, 201 bp, Homo sapiens
aactctttcttgtactgcttcaaagatgctaacttcattacccaaaacgagatagaaagttaccttatccttctttgggtgatgttgatttctcttctagytgagccatacatccctcttttgctgttctttaacttcactgaggtataaggttaacccgttaaaatatttcatgttatatggtaaggaaataagagagtg

SEQ ID NO: 347981 - DNA, 201 bp, Homo sapiens
gacttccacaatggttgaactagtttacagtcccaccaacagtgtaaaagtgttcctatttctccacatcctctccagcacctgttgtttcctgacttttkaatgattgccattctaactggtgtgagatggtatctcattgtggttttgatttgcatttctctgatggccagtgatgatgagcattttttcatgtgtttt

SEQ ID NO: 347982 - DNA, 201 bp, Homo sapiens
gtccccagagtgtgatattccccttcctgtgtccatgtgatctcattgttcatttcccacctatgagtgagaatatgcagtgtttggttttttgttcttgygatagtttactgagaatgatgatttccaatttcatccatgtccctacaaaggacatgaactcatcattttttatggctgcatagtattccatgttgtata

SEQ ID NO: 347983 - DNA, 201 bp, Homo sapiens
tacatgttgtagtggccctgcactgactggaattttgagtttatcatgcatttcactacctctgatgcctttatgaagtgagtcatttcttaacttctctrtttactcaaaggtaaatgagatgatgcctaatgtacaagtcttttgtagagtatattttactctgcaacatgctgtgtaacagaagcgatagtgtcatta

SEQ ID NO: 347984 - DNA, 201 bp, Homo sapiens
acaagcaagaaccaccacaccctgcctaatttctaccattttcattctattcgtgttttttgtttgtttgtttgtttgtttgtttgttttgagacagagtwtcactcttgttgcccaggctggagtgcagtggcacgatatcccagctcgttgcaacctccacctcctgggttcaagcgattctcctgcctcagcctcccg

SEQ ID NO: 347985 - DNA, 201 bp, Homo sapiens
ggaggtttctaaacactgacagtgggcagttcttcctcattacagcagatgttaggggcctgaaaagttgtccaccttacaaaagtgtcatgtgatgcttstgagtttcttgacatggcttacatgttgtagtggccctgcactgactggaattttgagtttatcatgcatttcactacctctgatgcctttatgaagtga

SEQ ID NO: 347986 - DNA, 201 bp, Homo sapiens
caaagcattgggattacaagcaagaaccaccacaccctgcctaatttctaccattttcattctattcgtgttttttgtttgtttgtttgtttgtttgtttkttttgagacagagtttcactcttgttgcccaggctggagtgcagtggcacgatatcccagctcgttgcaacctccacctcctgggttcaagcgattctcc

SEQ ID NO: 347987 - DNA, 201 bp, Homo sapiens
tagtattctacctgataagttatctggtagaaataagtacacagagggctcctatccaaaaataggtgtagggtgaaaagtggtcagggaacactcttttcaagagaatatacaaactgttttagattccaggatcaatattttttgccatattggagaagagactatctctttgcagtcctgaccagacatccccagtca

SEQ ID NO: 347988 - DNA, 201 bp, Homo sapiens
cattaaccatttgtagcatatacatgtaagatagtactattgttatcctgttttgttattctttccccagaaatttaccataatataattttcttttctttttttttttttttttttttttttgagactgagtctcactttgtctcccaggctggagtgcagtggcacgatcttggcttactgcaacctccgcctcctggg

SEQ ID NO: 347989 - DNA, 201 bp, Homo sapiens
atcagcagctaaacctcaagttattactaattactaatcaactcaaaatattaaaataacaaagtgttacgagccttcaagccacaaatctaaattgttcrccagatagccaaagcatcaaaaattcctgagatggctgggggtggtgactcatgcctgtaatcccagcactttgggaggccgaggcgggcagatcacgaa

SEQ ID NO: 347990 - DNA, 201 bp, Homo sapiens
atagaattaataaaacataagacatcagcagctaaacctcaagttattactaattactaatcaactcaaaatattaaaataacaaagtgttacgagccttyaagccacaaatctaaattgttcgccagatagccaaagcatcaaaaattcctgagatggctgggggtggtgactcatgcctgtaatcccagcactttggga

SEQ ID NO: 347991 - DNA, 201 bp, Homo sapiens
ccattaaccatttgtagcatatacatgtaagatagtactattgttatcctgttttgttattctttccccagaaatttaccataatataattttcttttctttttttttttttttttttttttttgagactgagtctcactttgtctcccaggctggagtgcagtggcacgatcttggcttactgcaacctccgcctcctgg

SEQ ID NO: 347992 - DNA, 201 bp, Homo sapiens
tctctgcccggccgccatcccatctaggaagtgaggagcgcctcttcccggccgccatcccatctaggaagtgaggagcgtctctgcccggccgcccatcrtctgagatgtggggagcgcctctgccctgctgcctcgtccaggatgtgaggagcgtctctgcccggccgccccgtctgagaagtgaggagaccctctgcc

SEQ ID NO: 347993 - DNA, 201 bp, Homo sapiens
tacagcctccatctcctgggctcgggcaatcctcccacctcagcctcccaagtggcggagattaggcatagtagtacaggcttttgtagagatggggtttygccatgttgcccgggctggtctctaactcctgagctcaagtgatcctcccacctcgatctcccgaagtgctaagattacaagtttgcgccaccacaccca

SEQ ID NO: 347994 - DNA, 201 bp, Homo sapiens
gccattaaccatttgtagcatatacatgtaagatagtactattgttatcctgttttgttattctttccccagaaatttaccataatataattttcttttcyttttttttttttttttttttttttgagactgagtctcactttgtctcccaggctggagtgcagtggcacgatcttggcttactgcaacctccgcctcctg

SEQ ID NO: 347995 - DNA, 201 bp, Homo sapiens
cagagaaatattagaaaccaaaagttagattttaaattctgacattagtacctgtggctatgcataaaatagaaattttttttttttttttttttttttttgtgacagggtctcgctctgtcacccaggctggagtgcagtgatgtgatcttggctcactacagcctccatctcctgggctcgggcaatcctcccacctca

SEQ ID NO: 347996 - DNA, 201 bp, Homo sapiens
agcatctctgggtctacccattagattccagtagcaccgtgctaccctccaagttgtgacaagcaaaatgtttctccaaacgttgacaaatgtttcccatrggataaaattgcttttgtttgagaatcactggcctatgctgtgcctcttagcatctgaattgtgctttttgtcttttagttgaagtacagtgtaatacaa

SEQ ID NO: 347997 - DNA, 201 bp, Homo sapiens
attgttgccaaataaaaaaagtcccaaaaggttccatactgtatgattgcattcacataacatgttttaaatgataagattatagaaatggagactgtttgccagggattaaggagggaatgggcctgggagggaattgggtatggatattaaaaggcaacacgaggattctcatggtggcagaactactctgtatcttaa

SEQ ID NO: 347998 - DNA, 201 bp, Homo sapiens
tgatacaagtgggtgggaaacgtggggattgttgcccggacccccttcaatatttgggcaccagctgccatgacctcctgtgaagctgggtctggagatgygcattctggctggagcctggtctgcctggaaactggagatcggcagccacgttttgtgggccgtgtttaagtcccggttctgccggcctgtcagcttcat

SEQ ID NO: 347999 - DNA, 201 bp, Homo sapiens
aattgttgccaaataaaaaaagtcccaaaaggttccatactgtatgattgcattcacataacatgttttaaatgataagattatagaaatggagactgtttgccagggattaaggagggaatgggcctgggagggaattgggtatggatattaaaaggcaacacgaggattctcatggtggcagaactactctgtatctta

SEQ ID NO: 348000 - DNA, 201 bp, Homo sapiens
tttagagctggatagccatgggttcagagcccaactctaccacttgttcccaatccagagagttgcctgaagtctgaccgtcaatttccttttttttttttatgggtacatagtagatgtatatatttatggggtacaggagatatttttatataggcatacagtgtgtaatagtcatatcagggtaaatgggatatccat

SEQ ID NO: 348001 - DNA, 201 bp, Homo sapiens
ttgacaactatgtgaaggaagaagaaggcacaggggttgtccaccaagctccttacttcggtgctgtgagtagcataagtctggcaaatgtatttgagtaygtcggtagccacttttcatagatgcggagtcctgtgtctcatcatgttgggttaccaggttggcctcttttctggctcactgcctgcaagatggcttgta

SEQ ID NO: 348002 - DNA, 201 bp, Homo sapiens
gatgttgccagaggacgattactcattttaatggaagccagattgtcagccctctataaattggagagtgactatgagatccttgaaaggtgaatattcaratagttgctctgtgtttgtgtgcatgtgtctgtatgtgtgtctttagttttaaaaagaaataaactttgttatccaaaagcttgcattattcaaatttag

SEQ ID NO: 348003 - DNA, 201 bp, Homo sapiens
aaaatatattgaggcaaaataatatgaagtaatgtgaataatatgtagttaatatcagggagggtggtctcgaaattgctgaacgggaagttgaggttaargtgacctgaaggagttgtggagcagcgaagagtcaagggcctggattataataagagggaagcaaaggggatggcatccctctgcacaacaaggttgttg

SEQ ID NO: 348004 - DNA, 201 bp, Homo sapiens
aaattgttgccaaataaaaaaagtcccaaaaggttccatactgtatgattgcattcacataacatgttttaaatgataagattatagaaatggagactgtttgccagggattaaggagggaatgggcctgggagggaattgggtatggatattaaaaggcaacacgaggattctcatggtggcagaactactctgtatctt

SEQ ID NO: 348005 - DNA, 201 bp, Homo sapiens
aaattatttcccagtactcattttcagtttgtggacaatcattcaatcctagacagttctactgtccttccttcctgaggtttaaagtaactaaaccctayacttttctgacaagattttagaatatctttcaattcataattactctttggtgcagagaagtaatgttttcctaaactctcttcagtttactcaaaaaca

SEQ ID NO: 348006 - DNA, 201 bp, Homo sapiens
gaaattgttgccaaataaaaaaagtcccaaaaggttccatactgtatgattgcattcacataacatgttttaaatgataagattatagaaatggagactgtttgccagggattaaggagggaatgggcctgggagggaattgggtatggatattaaaaggcaacacgaggattctcatggtggcagaactactctgtatct

SEQ ID NO: 348007 - DNA, 201 bp, Homo sapiens
ttccgatactgcacatctgatctccagcaccttacaagtaaaattgcttgtaagtaaataactgttgaatgaaaatgagatattattcctgcttgagcagwtgaaaaagctggttggaaaaatgaactcttgttatcccactccagcaggcaggtcaattacttctgctccccttgggctctggttgttctgctaatgagg

SEQ ID NO: 348008 - DNA, 201 bp, Homo sapiens
tgaatattcatcatttaaattaacaaaacccctaggctgtaaattaccagtggggagctatttttgagtagacataacacaaacaaagctagctatcattaagttatttctctgttagctacttttacagcatgtgcatgttcggcagtcttcacaaaaacaagaatcctaaaaagtttaatagatgagattttttgtttt

SEQ ID NO: 348009 - DNA, 201 bp, Homo sapiens
gggtaacttagagccatggggaggccatacatgcaggtgcggaaggtatctagggtccgggctatgccaagaccatgggccctagcctgcaaaagagttaygtcatatagttgtttagtcgccagttgttgtttttgtttttgaggtggagtctcagtcttgtcacccagactggattgcaatagcacgatctcggctcac

SEQ ID NO: 348010 - DNA, 201 bp, Homo sapiens
atgaatattcatcatttaaattaacaaaacccctaggctgtaaattaccagtggggagctatttttgagtagacataacacaaacaaagctagctatcattaagttatttctctgttagctacttttacagcatgtgcatgttcggcagtcttcacaaaaacaagaatcctaaaaagtttaatagatgagattttttgttt

SEQ ID NO: 348011 - DNA, 201 bp, Homo sapiens
ttgaactcctgacctcaggtgatctgcctgcctcagcctcccaaagtgctgggattacaggagtgagccaccgcgcccggcctattagcactaacttctayctaagttactccttcccatttcattttgtatattcctgtttgcaaatgatttgtatccttaaaacaagatcatctgtgatattgacttacttaattggca

SEQ ID NO: 348012 - DNA, 201 bp, Homo sapiens
aatgaatattcatcatttaaattaacaaaacccctaggctgtaaattaccagtggggagctatttttgagtagacataacacaaacaaagctagctatcattaagttatttctctgttagctacttttacagcatgtgcatgttcggcagtcttcacaaaaacaagaatcctaaaaagtttaatagatgagattttttgtt

SEQ ID NO: 348013 - DNA, 201 bp, Homo sapiens
gtatatatcacaaccaggatattgatatagcccactaatcgtattcagatttctctagttttacatatacttatttgcttatacgcatttacctgtatacrgctatcgtgtgtaggatcctgtatccagcagcacagtcaggttactgaatgaattcaacatcaaaggctcccttcctgcattgccttcccctcctgcctt

SEQ ID NO: 348014 - DNA, 201 bp, Homo sapiens
aattttatttcataatagcaatctatactagcaatgaacaagtgggcaatgaaattaaaaatgtggtatcatttacagtcacttaaaaaaagatgctaggycaggcgtggtggttcacgcatgtattcccagcattttgggaggcttaggcaggaggattactttagcctgggagttcgagaccagcctcggcaacaaagt

SEQ ID NO: 348015 - DNA, 201 bp, Homo sapiens
catgtagattttgttgtcctttttttaacacacgaggaagctgtgggttctagagaccacaggtgcccaggatcaaagctagtgacagccacactgggctygaccgaggtactctgccaccagatcccattcttcccctcatctgaaacttcctcccaatgggcattatttcccacattttgctattataaggaagtctca

SEQ ID NO: 348016 - DNA, 201 bp, Homo sapiens
gcatcaaaaattcctgagatggctgggggtggtgactcatgcctgtaatcccagcactttgggaggccgaggcgggcagatcacgaaatcaggagattgagactgtcctggctaacacggtgaaaccccgtctctgctaaaaacacacacacacacacaaaattagccaggtgtggtggcaggcgcctgtagttccagcta

SEQ ID NO: 348017 - DNA, 201 bp, Homo sapiens
tagctcgagtccaagagtttgagaccagcctgggcagcatggcgaaaccctgtctttactaaaaatacaaaaaattagctgggtgaggtggtgcctgcctrtagccccaggtacttgggaggcttaggtgagaggatcacctgagcccaggaagctgaggctgcagtgagctgtgattgtgccactgcactccagcctggg

SEQ ID NO: 348018 - DNA, 201 bp, Homo sapiens
ccctgactcagccttgtgcttgaaaaggatttctgcaaagctgaacctcaaggaataaagagtactgggagtgggagggatgcaagaggatggatgcagargggagggaagctgcgtgtcagagggcaggcaggctgcgtgtcagagggcaggcatgggcaaagccagttaagtgagaaggattctagggaacttgcctca

SEQ ID NO: 348019 - DNA, 201 bp, Homo sapiens
ccccacagcaggcagactgtggggtgctgggcattgaagttgtctttaatattcaaatatgtgtgtatttctagtcggcttcaaagtattgctttaaagtrtgggctctcacgcaactttggggagcaaccacaggcttttcttttggtgtgttatagagaccctcatccatctggcatggttaggaaatgaaaaaattgg

SEQ ID NO: 348020 - DNA, 201 bp, Homo sapiens
gggttttttgtttgtttttttgttgttgttttgagatagggtctcactctgacgcccaggctggaatgcagtggtgcaatcacagctcactgcaccctccrcctccccggcttaagcaatcctcccacctcagcttctggagtagctggaactatgtaggtggtgccatcacacccggctgatttttgcatttcttataga

SEQ ID NO: 348021 - DNA, 201 bp, Homo sapiens
ttaaaacattcctgtgtggctgctctgcttatggagtagccattctttattgctttactttcttaattcctttcacttaaaaaattgatgtatgtcatctrtcttctcatttagtggatactctgctacatatggaggtctgggaaataatatttgagaagactagactgggtgacctaacccctgtccaactgtgagggt

SEQ ID NO: 348022 - DNA, 201 bp, Homo sapiens
ggttttgtcatcgcatgaaatccgtaaagacagatgttatcagttacgttcagagggtctcatatctttagaggatgcatgctgaaatttcatggggaaaratcagaaaaactccagttcatgcctcatgaagcacctttgtgaccttggggttgtcatttcagatcgaaaaactttatgaccttaaatgttgtggaatgt

SEQ ID NO: 348023 - DNA, 201 bp, Homo sapiens
agtttatttcctcatagtaactttcttcccaagtgtgccagtgtttcattaattgttccttcctaggaggaagaaatagaatttctctacaatgagaacayggttagagaaagccccaacattacagaccggtggatcctgtccttcatgcagtctctcattggcttctttgagactgaaatggcaggtgagtctctcttg

SEQ ID NO: 348024 - DNA, 201 bp, Homo sapiens
tttttaaatcaggatctaccaagacttaaacacatggtgactgttgtcttttaggtcttgtacacgtttcagttggttatataacaagtagtggaattatygagtcagagtatactttgttttaatttttatttttttgagacggagtctcactctgatgcccaggctgaagtacagtggtgtgatcttggctcattgcac

SEQ ID NO: 348025 - DNA, 201 bp, Homo sapiens
ggtggacagaggccctgggtcacagtgagggcaaaagagggcaaggcaaatccaccctcacagggctctgcggttcctgctgctgttgggcaggagcagcrgccgccacagacctgggattcaccattagcctagatacgggcacatgctgctccctggagtaggcgctgctgccccatttagcacagaaggactgctaca

SEQ ID NO: 348026 - DNA, 201 bp, Homo sapiens
agaattgctgatatttctgtttgcaaatgtgtataatatcttgtcagggttttgtgtttcctattagcaattaaactgcaagttctgttatgcttacagtyaatagaaatgactacttttctgtttgttagtgttgaccacctgaccattccttcacgctgtgggaagggatccttgcaccgcatctctgaagtgtttgac

SEQ ID NO: 348027 - DNA, 201 bp, Homo sapiens
cttatagaaatgaggtttcgccatgttgtccaggctggtctcaaactactgggctcaaataatcctcccaccttgtcctcccaaagtgctgagattacaggcatgagccacagcgcctggtctaggagagttttatgaatggctaaaaatgttgctttcctaaggaactgtgagagaaaaatagacctgtacaaatctgtt

SEQ ID NO: 348028 - DNA, 201 bp, Homo sapiens
tgacctcaggtgatctgaccgccttggcctcccaaagtgctggggttacaggcgtgagccactgcacccggccttggtaaacattttctgagaggccttcygttgcacttgtcttcaccaggcaagggtagtgtttgatcttcgcagagtctgtgcacttgtgcgtcatcctgttgaacatcactggttctggatgcattc

SEQ ID NO: 348029 - DNA, 201 bp, Homo sapiens
tcaagtctttggagaagtatatcattgaggtaaggtagatgatttgtctgtttttggtacagatagacttagaacattattttgatgaataatcctcaaartacatattgactctataatttatttttattagtatagtcataacaaatgtaataatccatattttacactgtgcttggaatcaacataaatttgttgtaa

SEQ ID NO: 348030 - DNA, 201 bp, Homo sapiens
cctcccaagtaactgggactacaggcatgccaccaccatgcttggctaattttatttaatttttttggagagaccaagtcagtatattgcccagtctggtsttgaacccagggccttaagcagtccccctgccttggcctcccaaagtgccgagattccaggtgtgagctaccacacccaaccgtgagttttaactttatt

SEQ ID NO: 348031 - DNA, 201 bp, Homo sapiens
atatatctattctcaatgctgtgcatgttaatgttatagaagattcattctttaaactatagcttttaacaccatttggtaaatttttttttttttttttktttttgttttgttttgtttgagacagagtctccctctgttgcccaggctgtagtgcaatggtgcaatcttggctcacggcaacctctgcctcccaggttc

SEQ ID NO: 348032 - DNA, 201 bp, Homo sapiens
atctcatatatctattctcaatgctgtgcatgttaatgttatagaagattcattctttaaactatagcttttaacaccatttggtaaattttttttttttkttttttttttgttttgttttgtttgagacagagtctccctctgttgcccaggctgtagtgcaatggtgcaatcttggctcacggcaacctctgcctccca

SEQ ID NO: 348033 - DNA, 201 bp, Homo sapiens
atgacatgagcccaggaagttgaggttgcagtgagccgaaagtgtgctactgcactccagcctgggtgacagagttagactctgtctcaaaaaaaaaaaawatatatatatatatatatatgtgtgtgtatgtatatatgtaagtatacatatatatgtattggcttaaaacttttatttatttatttttagagaagggat

SEQ ID NO: 348034 - DNA, 201 bp, Homo sapiens
aggatcgctttagcctaggagttgaagaccagccagggcaacatggcaaaaccctgtctctacaaaccaccccctccccaccaaaaaaaaaaaaaaaaaaagctgagtgtggtggtgcacacctgtagtcctagctacttggcgggctaaactgggaggaacacctgaacccagggaggtcaaggctgcagtgagccatga

SEQ ID NO: 348035 - DNA, 201 bp, Homo sapiens
gaggatcgctttagcctaggagttgaagaccagccagggcaacatggcaaaaccctgtctctacaaaccaccccctccccaccaaaaaaaaaaaaaaaaaaagctgagtgtggtggtgcacacctgtagtcctagctacttggcgggctaaactgggaggaacacctgaacccagggaggtcaaggctgcagtgagccatg

SEQ ID NO: 348036 - DNA, 201 bp, Homo sapiens
agaggatcgctttagcctaggagttgaagaccagccagggcaacatggcaaaaccctgtctctacaaaccaccccctccccaccaaaaaaaaaaaaaaaaaaagctgagtgtggtggtgcacacctgtagtcctagctacttggcgggctaaactgggaggaacacctgaacccagggaggtcaaggctgcagtgagccat

SEQ ID NO: 348037 - DNA, 201 bp, Homo sapiens
ggtatgtgcctccccacagcaggcagactgtggggtgctgggcattgaagttgtctttaatattcaaatatgtgtgtatttctagtcggcttcaaagtatygctttaaagtgtgggctctcacgcaactttggggagcaaccacaggcttttcttttggtgtgttatagagaccctcatccatctggcatggttaggaaat

SEQ ID NO: 348038 - DNA, 201 bp, Homo sapiens
aagaggatcgctttagcctaggagttgaagaccagccagggcaacatggcaaaaccctgtctctacaaaccaccccctccccaccaaaaaaaaaaaaaaaaaaagctgagtgtggtggtgcacacctgtagtcctagctacttggcgggctaaactgggaggaacacctgaacccagggaggtcaaggctgcagtgagcca

SEQ ID NO: 348039 - DNA, 201 bp, Homo sapiens
ctgactgtaattagcactttttaatgtaagtttttcatggtgaagcttgagattctgatataggaggaaattttaagaggagctgtattatacagagaaartactaaaatagagaaaacaattagccctatatttcagattatgaatattatgatgtttgttttgcaacattgagatttcctaccattacatgtcattaaa

SEQ ID NO: 348040 - DNA, 201 bp, Homo sapiens
agttcatatttaccaccataaaggctcccttgaaaccatatccagtttctccatcggataaagtccttattcaagaaaaaacacaggtgagtcctgagttscactgaactactactaaagggtttcagattaggtttgactttgtgtactcacgtgttgatattctgtcccacagtagagatcggcacagcactctgtctt

SEQ ID NO: 348041 - DNA, 201 bp, Homo sapiens
tacaaatcactggtttttaagcatatttatagaatggtacaactatcaccatagttttagaacattttcctcgtcccagaaagaaagccagtattcattarcattcacaaaccattttcccctcaatatctgaccatttcctggcatccacgaacctatttgctatctctggatttgccttctctggacatttcatataag

SEQ ID NO: 348042 - DNA, 201 bp, Homo sapiens
ctgcttctctggagcaaggacagtcccatctgcacaatttccctatgtcactggtgggtcactagccattctgtggtgagcttgacaatctcagcagccayctgactgagatctcaaaacacatcacccatctacctgtgtataactcttgtgcttggcagactttgtatctgagctttatcagaaactgtggtccccact

SEQ ID NO: 348043 - DNA, 201 bp, Homo sapiens
ggctggttacttatgattaatatggataagataattttatattttggaaaatatgaaagcttacctttctttttgcatgaagaatagaattatttgaaaasaatctgacttaattagaaaaataactttaaacatttgttttcatttctaattgaaaactaacaaaacaattaaaatagtacagagatataaaaagtagaa

SEQ ID NO: 348044 - DNA, 201 bp, Homo sapiens
gctaaaaaattttaattttttacaaaaattagctgggcatggtggtgcacacctgtagtcccagctattcaggaaaccgaggcaggagaatgcttgaaccygggaggtgggggttgcagtgagctgagatcacgtcactgcactccagcttgggtgacagagtgagattccatctcaaaaaaaaaagaaaagaaaaaaatt

SEQ ID NO: 348045 - DNA, 201 bp, Homo sapiens
tgttctcaattttgtcaccattcttaactcacccactgtatgaaacaagtgatgagccagatttggcccaggggccatggtttgctgacctctattctacrcggtctgtatattgattgttaaccaagggtttttaaaatttttttgacttgaccaagcacagtggctcacacctgaaatcctcgcacttttggaggccga

SEQ ID NO: 348046 - DNA, 201 bp, Homo sapiens
cttggcctcccaaagtgttggaattacagttgtgagccattgcgcccggcctgtttggttgttttttaaaacacttgaatgtggacagtttcagggacatrcaaaagtaaacagaatggtataattaatttctgtaggcccattaaggcccccagcaccaatgactggctaatcttgcctcattcatacacatattctttc

SEQ ID NO: 348047 - DNA, 201 bp, Homo sapiens
gcgccgccctcagcgctggttcgttttccacgtggaggcgcaaaaccagcaagcaccactgtcgcaccatccgagccagtgggcgcaatcatgtccggcgmgaccaatcggcgcctggcttgttggcaggtgtcaggcagcgcgcactgattggccggtgcggagcctgtctccttcactggatcccgcattttcagcgcg

SEQ ID NO: 348048 - DNA, 201 bp, Homo sapiens
catacttcctgtagtcatcgtttcttaagggttgagtaattttatgccttatctgggacctcatgatatcatttatttgttaacggtatttggaaaaaaawtaatttgagatgccaaatggtattatttttcctctgatgagatagaatcagttgttgttgttgctatgattgaggtgtttagacatgtttgatgtttaca

SEQ ID NO: 348049 - DNA, 201 bp, Homo sapiens
caaaagtaatgaagtatgaatacatattacatcatggatgagccttgaaaacatgctagagaaaggaaaccagatgcaataggccacatatagatgattcmtataaattttcccatttatatgaaatgtccagaataggtaaatctgcagggacagaaagaagataaatcgttgccactggctatggagaagaaagaatgg

SEQ ID NO: 348050 - DNA, 201 bp, Homo sapiens
tatttgcctggagaaacaattattcggtgaatgtcattgtatacacattttgtacatttgcatgagtatacctgtggagtctatgttaataggatataacwaaattgaggaaacgtttgagacggtcccactttcaggttacatttgacttaatagattatgaagacctgagaataaaaggagaaacagaaatggatttag

SEQ ID NO: 348051 - DNA, 201 bp, Homo sapiens
gaaggagtgcgtgagagcggtcaactttgttgtagtgacaggtggagctttgtctccactgtttctcaagaaggagtgtgtgacagctaagcctgatggargaggaggaaggggaggactttcagattgtgctactgctagtaacataatgctactagtgatattactagtaataaaatagcatttactaaacttagcact

SEQ ID NO: 348052 - DNA, 201 bp, Homo sapiens
gacaggtggagctttgtctccactgtttctcaagaaggagtgtgtgacagctaagcctgatggaggaggaggaaggggaggactttcagattgtgctactrctagtaacataatgctactagtgatattactagtaataaaatagcatttactaaacttagcactttatgaaatacttttgcttatagatcttatttaatc

SEQ ID NO: 348053 - DNA, 201 bp, Homo sapiens
actctgtctcaaaaaaaaaaaaaaaattcctgggctaaaccttatttgaaattgaaagcctagtttctgagcgtactgttctgcactgatggaaaacaagrtcatcttcagaacacagagacaaagtaaacataaaaatgacacccgggtgctcagagcccaagaaggtcatcatcagtgacaacagtgggcctccctatc

SEQ ID NO: 348054 - DNA, 201 bp, Homo sapiens
ggtaaaataaaccagttacttggtttagattggctttattaaactaatatattattatgcccttaacatatgcatttgtttagtgaatacataagtaagcrttttgtgatttctacatgtcagtcattgtcccaagtgtggggttgcacaaaaatgaacccttcaaggaatgagtcagtcaaggacacctgaaattaagcc

SEQ ID NO: 348055 - DNA, 201 bp, Homo sapiens
ccctagaaatcatttagacaggtctcagttactgaaatcacatgtctaagaaagtgtgaccagctaacgactctggcctggggctcagcccactgacatcygagttctggtctttgtgaaaagcagcagagagcagctctgccggttgcaacttctcgtctcttagcttagaccagaagcctcattaacagtccctggact

SEQ ID NO: 348056 - DNA, 201 bp, Homo sapiens
tatattcttacccaagtcacatgaacttgaaaagcatgtgtgttggtttctatattgctgagagaatacttaatttatgtgaaatgcttatttttctttamatcaattaaatagaaatcttttatgaattaatttttgaccataccatctggaggtagaaaaacatctcatggctgggtgcggtggctcacgcctgtaatc

SEQ ID NO: 348057 - DNA, 201 bp, Homo sapiens
aagattgggtgccagaaaaaaggtacggagggagttttttatttgttctttcctgggagcaaataggactaagagttgacctactggaaagctgttggccwcaaagaggcctggctcaggtgtctgcagctgcttctctggagcaaggacagtcccatctgcacaatttccctatgtcactggtgggtcactagccattct

SEQ ID NO: 348058 - DNA, 201 bp, Homo sapiens
ctataaagcaaagtctgaaggaacatatctgaatagtgttattgaaagccacacagagttcatatttaccaccataaaggctcccttgaaaccatatccartttctccatcggataaagtccttattcaagaaaaaacacaggtgagtcctgagttccactgaactactactaaagggtttcagattaggtttgactttgt

SEQ ID NO: 348059 - DNA, 201 bp, Homo sapiens
attttatattttggaaaatatgaaagcttacctttctttttgcatgaagaatagaattatttgaaaacaatctgacttaattagaaaaataactttaaacwtttgttttcatttctaattgaaaactaacaaaacaattaaaatagtacagagatataaaaagtagaacataaaattttcttataatttccagtttatagt

SEQ ID NO: 348060 - DNA, 201 bp, Homo sapiens
cctcggcgccccttcccagtgggccgtcacctacccggaggtgcccacaacccgagtgagacctcggtctacactactgcaacggatacaagcagcacgcmcagcgccgccctcagcgctggttcgttttccacgtggaggcgcaaaaccagcaagcaccactgtcgcaccatccgagccagtgggcgcaatcatgtccgg

SEQ ID NO: 348061 - DNA, 201 bp, Homo sapiens
agggagaactaatgaaaaacacgtttgtaaccaaggaaattagaaatttttatctgccattctccagataattatttcgtttataagtggtaactttttayttatgggaaaaatgtattgaattagcatgtttcttcccagcctgcattattctttcttttctatttctgaaaataattttaccggttaaaagcattttca

SEQ ID NO: 348062 - DNA, 201 bp, Homo sapiens
gaaaacaatctgacttaattagaaaaataactttaaacatttgttttcatttctaattgaaaactaacaaaacaattaaaatagtacagagatataaaaartagaacataaaattttcttataatttccagtttatagtacatttttccacaccatgcccctgtgacagatgaagaatctaagattcagcgatgtggcatc

SEQ ID NO: 348063 - DNA, 201 bp, Homo sapiens
aacttgaaatgtgtaaactttgaagaacataaaaacttcatggtggtttcttattaagacagtggactagacatctaataaaacttctttccaaaatcccrggtgataatttgagtcctcagagaagcagatgacatgacaaagttagatgtgcaagaatttattagaggaaacataaatggaggataaacgggagatgga

SEQ ID NO: 348064 - DNA, 201 bp, Homo sapiens
gagtttcactcttgttgcccaggctggagtgcagtggcacgatatcccagctcgttgcaacctccacctcctgggttcaagcgattctcctgcctcagccwcccgagtagctggaattacaggcatgtgccaccatgtgcagataatttttgtaattttattttattatttttttatgattattatttttattattattat

SEQ ID NO: 348065 - DNA, 201 bp, Homo sapiens
tctccttatttgattgtcatggtgtgcactgttcattcccacaggctttggtcctcttagatgtcactcctgaccagtcaatggtagatgaaggaatggckcgggaagtcatcaatcgcatacagaaacttcgcaaaaaggttagtttgtcagttaagaataagctactgttttggctttttgtttgttttggttgtttgg

SEQ ID NO: 348066 - DNA, 201 bp, Homo sapiens
atatatatgtatatatatccatccttggtatgcttttatatgtatataataagctatatatacacatatatatagtgtatagttgggggaaaaggaaaaawattagggcttgaacccctttgtatcccttttcctccaaatgtaacattttctttttagttttatttgtctgattgaggtgttatttttgtggctttttag

SEQ ID NO: 348067 - DNA, 201 bp, Homo sapiens; identical to SEQ ID NO: 73884

SEQ ID NO: 348068 - DNA, 201 bp, Homo sapiens; identical to SEQ ID NO: 73885

SEQ ID NO: 348069 - DNA, 201 bp, Homo sapiens
aaaaggcagaactcttaggataaggccaaattccttactacacaagcagttaacatttttttaaatattcacccccaataggtaaaatactgattttttttcaactttttctttccattctagaaattacagaagacatccccgtgaagactttgaatatgaagactgtgtatgtttctgtgttaccaacaacagcagact

SEQ ID NO: 348070 - DNA, 201 bp, Homo sapiens
cgagccttggtgtccagtttctgttgaggtttcattctgtaggcatgattgctgtctttctcaactgatataccatgtgacccaaagtccccatcctaaaycatatacttggtctttctgtcctggccagcactaccctgaattgtctcattagcaacaactgtcaggtttggtgaacatacccaccatgagaaacaaaga

SEQ ID NO: 348071 - DNA, 201 bp, Homo sapiens
cagataactttaaattttctttttttttgtttttgagttgtatattcagtatatttcaatcaattgcatttgggttatatttttggatgctcagagttttygtcattggccatattggatcctgtattctttaacatgatcctttgtctttggtaaattcttgctttctcacgtagcaacatgtcctaggcttattatgta

SEQ ID NO: 348072 - DNA, 201 bp, Homo sapiens
gtgcggaaggtatctagggtccgggctatgccaagaccatgggccctagcctgcaaaagagttatgtcatatagttgtttagtcgccagttgttgtttttktttttgaggtggagtctcagtcttgtcacccagactggattgcaatagcacgatctcggctcactgtaacctctgcctcctgggttgaggcactgcctca

SEQ ID NO: 348073 - DNA, 201 bp, Homo sapiens
atgttaaatactaaagctctatttcttcttgggttcctccttccctccctgggtttattttcagtgactctcctttgtcgttttccctctcatctcatcaytgggcctcatcatccatctaagtcaccagtctgcagtctgtactcttcaccagagctatcttcatgaacattcctgccttgattttgttcccttgcttag

SEQ ID NO: 348074 - DNA, 201 bp, Homo sapiens
ggagacaggatctgtctatccctactccaaaacaaagctaagtgaggtgattttctctgtattggtttctgtggctgctgcaacaaatttccacaaatggsatggctcaagtcatctcacagctctggaggccagacactgaaattagggtgtcagaaaggccacagtctctctgaaggctctgtgggagaattccttata

SEQ ID NO: 348075 - DNA, 201 bp, Homo sapiens
cacatcctggccaggcctcctgcactgccctgaagggccaccctggtggcactgaccgtggatggcctgtggtcgtggccctttctcctttctctgtctcrtgtcttgtctgtatgctgcatgttctttgaagattgcctctttttaataaacttatttttttaatgataaacacttatttaacagtttaatgtttatgtt

SEQ ID NO: 348076 - DNA, 201 bp, Homo sapiens
ttgtactgaagtcttcgggctcctcacttcactgtgtactgagtatctgctccccaagctgctgggcttttatataagttttttttttttctttttccccytccccttcacctctatgaaatgttgagagctgtttctgcatggactgcatcttcagcggtcacactcacgctcctggacgcactgctggcctcagcactg

SEQ ID NO: 348077 - DNA, 201 bp, Homo sapiens
tctctacctccatggatggtgggtttgccagaagcattataggtgacagtggcaaatccttgtccaaaaggagtgtgtgttccagtaagaccaaagcactrccttttcccataatggaaacagtgcagtacaaccaagctgccatcaggagtctggcttgtctttcctggcaataacactgtatcgaaagctcaagtaatg

SEQ ID NO: 348078 - DNA, 201 bp, Homo sapiens
aaagtcacggtaggatgagaagtagaaacgagcaaaaacaggctagagtgcacatctatctgacctcatcccacactgacaggtgccttgcagaagaaacygctggtacacttttccagagagttgcacacattcctggcctggaagttggaagagcagaggcaggagcgtgggctgctcactgtcccacttaacccaaca

SEQ ID NO: 348079 - DNA, 201 bp, Homo sapiens
taatctattggatgtaggtcattgatggcagcacaaactgttgtgtgtgctatgctgtccatttagaagacattctctttgcagtgagcgccacgtttccrgagtgtttggtccacaaagcgttatacaaaggctcctgtgggtattatttacatgttgaatttttccatatttttatgtgattggttatgtgatctgttt

SEQ ID NO: 348080 - DNA, 201 bp, Homo sapiens
atgtggtgacaaaggcagagattggagttacacacagctgcaagccaagaaacaaccaagattgccgggagcctccagaagctaggaagaggcaaaaaagrattcgcctacaggtttcagagggagcacatctgccaacactttaattttggacttctgacctccagaactttgagacagtacatttcttttatttttatt

SEQ ID NO: 348081 - DNA, 201 bp, Homo sapiens
aagtggtaactttttatttatgggaaaaatgtattgaattagcatgtttcttcccagcctgcattattctttcttttctatttctgaaaataattttaccrgttaaaagcattttcaggttcttaggaaaaactgttacaaagttaacgttgtaacacagtaatgtttcatccctgaagcctgctgtcctttctttccagt

SEQ ID NO: 348082 - DNA, 201 bp, Homo sapiens
aggctaaggccagcccctccctcctggaggctggttgggaattaaagtacgagtcttgtttggcagtcaatattatttttttctttcccttctccttgccrtgttgagtttctccccgcttcaatctttctaaacactttataagccataaatacaactgagtcagtttagatcagttggggtaaatgtcaaattatcttc

SEQ ID NO: 348083 - DNA, 201 bp, Homo sapiens
aggaccgctacctcctgggcacctctcttgccaggccctgcatcgcccgcaaacaagtggaaatcgcccagcgggagggggccaagtatgtgtcccacggygccacaggaaaggtgaggcacctgggaagggccgggcagagggagatggaggcggaggggtgtgggaaggagatgagcacccctcgagcggtttcctggt

SEQ ID NO: 348084 - DNA, 201 bp, Homo sapiens
agcaggggacatagcagggatgatgtgcaaggccaccagcccacctgcagggtcagagctgatcccctctgtggggtgcttctgcagggttgccagggtarttagcatgttaaaatgaacacgggagggagtggatgccccagtcccaagtcacctactggccacaggcctggaactagaatgtccctccttggttctgtg

SEQ ID NO: 348085 - DNA, 201 bp, Homo sapiens
ctgcttctcaggccaacattggccagaaggaagacttcgaggaagccaggaagaaggcactgaagcttggggccaaaaaggtaccaggcgggaggcagggrtttgggctgggagtggggcggtgatgtggagggcagtggtggatgctcctgccccagggatcccatcccttccagtgtgtcttcttgcttctaagagtat

SEQ ID NO: 348086 - DNA, 201 bp, Homo sapiens
agtcccgaggtgagtctgctcagcctccctcagggcctgcctcggggcccagcaaacccagagatccctgagaccctgtcccctttggacgctactacccycatgctccgtgggcgaccttgggcacgtcctttcaccacaccccgtgagaccgcagtttccctcctgccaagtggggatcgtgggccctttgcccctgac

SEQ ID NO: 348087 - DNA, 201 bp, Homo sapiens
cttttccccctgcctggaaaaatggctaggtatctacgagaccccagcaggcaccatcctttaccatgctcatttagacatcgaggccttcaccatggacygggaagtgcgcaaaatcaaacaaggcctgggcttgaaatttgctgagctggtgtataccggtgcgtaagactctatggctgccccctctaaccgcctcac

SEQ ID NO: 348088 - DNA, 201 bp, Homo sapiens
cccctggctccctggtggaagggaagaagggatatttggggctctgggctctaccgtagtcgctttaattacaggctttcaacctcgggccggtgggcacrcatggggagggaggggttgctgctccgaaaccctgtcattttctagcgtctgagggccccttcaaagggggcatctagacattttctccacaagccgcag

SEQ ID NO: 348089 - DNA, 201 bp, Homo sapiens
ccttcgaggccacctggagctgagatgggagaccccggggccgggcccattccccctccagttggctgggtggtattaggcaagccacccccctccccagscctcaggttctcatttgtaaaactggtgtgtgggactagatttaaggtgagtccagagtttgcagaggggcctctgttcctcccagcacaacctctgcca

SEQ ID NO: 348090 - DNA, 201 bp, Homo sapiens
tatatctgccattttggagacagagatttcctgtttctgcacacactggtctttctggacacactgctgaaccattcccctttctggtggcttttttggcrctgtcatgtttgtgtgcggtcatcatgttttgttttgtttctctttcagacagggtcttgttctgtcaccgaggctgtagtgcagtggtacgatcatgac

SEQ ID NO: 348091 - DNA, 201 bp, Homo sapiens
aaggactggcctgaagtcactgtgaaatggcatcctgtggggtggggcgagtcaagcagagttgagcaaaaatgaactgaaggaggtggttagtgatgaaracctggaatgcactattctgaatgtggaatggtagctgacagcattccacggaggctggacctttttcccagaatgggggcctcatccccgtagaaggtc

SEQ ID NO: 348092 - DNA, 201 bp, Homo sapiens
ctttagctccttgcttgctgttattcaggagaaacaacctaattgaagctctggggaggccttgagaacaatgttactaattagctgctcctttttatcckggcttacctttgtctcttacctatattaacatgtgattagatgcccctttgtcgcagcctgcccttgggagccagcgcggtgtgcaccctccagggagag

SEQ ID NO: 348093 - DNA, 201 bp, Homo sapiens
gttgcagcccctgaattgggcacctgaatttttatactggtggtggggtcagggcttcccgtttcggtaaatgttcaggtctctttgcttagggttgattkgaaaagataccacaaccaaatatcacctggccacggtatagtcacggccccatgtctctcaggctatttttactaagattctaaaatccaaagagagccg

SEQ ID NO: 348094 - DNA, 201 bp, Homo sapiens
tttcttgggggtcctaagagggaaagagcaaggtttcagcagttgcagcccctgaattgggcacctgaatttttatactggtggtggggtcagggcttccygtttcggtaaatgttcaggtctctttgcttagggttgattggaaaagataccacaaccaaatatcacctggccacggtatagtcacggccccatgtctct

SEQ ID NO: 348095 - DNA, 201 bp, Homo sapiens
tggctgaggctcaggggtgcggagcacaggccatgtcccttccccatagccacagagtttcccggaccagggggacccatttggcaggagaggctccgtgktccttagccttggaagataacaaccccaggaggtctcctgcctccaagggatcattaggccggggctctcaggcccttggctggatgggaggccaggata

SEQ ID NO: 348096 - DNA, 201 bp, Homo sapiens
aagccacctctcagccttggctttccctgtggtccatagaggcatcaggctgggggtccctcagggcccctcctacctcctggagtctgtcttcagggaargttctgggttcttgttcctgccccacaaatgggcactgatgcagggatacagctggccctgagtcacatcgtaccttggaggtgggggtggaggatccac

SEQ ID NO: 348097 - DNA, 201 bp, Homo sapiens
ccagtccagttcactttacctttttgctgaggatgagccttgggacccgtctgtgcccagggaatgctgcagttggcagggtgggccagccctgatgcctrcctgtggctgtgatgctggctggctctggccacaggcctcaccctgtttctcagcccaggttactacagcagctgggaaccagcataaggtggcggaaag

SEQ ID NO: 348098 - DNA, 201 bp, Homo sapiens
catttgcggcatcgatcatgcctctacatcatggtttagttcatgggccatttgcttccaatttctccttctcggggcctgtttcatgctttctttcgccytctccccctagcccccaccccgactctctctctctctttttcttcactctcttccctcccccgcacccccccccccacagatgacattggaagtgagccc

SEQ ID NO: 348099 - DNA, 201 bp, Homo sapiens
aatgggggcctcatccccgtagaaggtcaaagccatgagatcaacagtctgttccaatccccgtggctccttaccacccacctggggaaagcttcctggakcccagccttcactctgccctggtactttgtgtgtgctgttggaggctctccccaaaagcacagaatttagtcagtgtcgtacagggaagaaaatcgggat

SEQ ID NO: 348100 - DNA, 201 bp, Homo sapiens
ttcagcattttggccaggctggtcttgaactcctgacctcgtgatctgcccgccttgggctcccaaagtgctgggattacaggcgtgagccactgcacccrgctgtagtagccatattaaaaaatagaaaaatgaaacaagtgacatgattttaataacatgttttaccgaaaccgatatatccaaaatgttatcattcct

SEQ ID NO: 348101 - DNA, 201 bp, Homo sapiens
ccacccagcactgccccgggcgccatcacgggggacgggccaggtggaggctttcgggtctttgggctcagggaaggtgacagtgaaatgttggggggacmacggattggcctgggatgtgagggggaagggcatcctgtttgctggaaccgcctgagcccagccctgaaggcagaggcggaggcagcctcccttcccagc

SEQ ID NO: 348102 - DNA, 201 bp, Homo sapiens
ccagccttcaggcatttaccccctgagtaaccacccagcaccaccatcccatgagtatccacccagcactgccccgggcgccatcacgggggacgggccargtggaggctttcgggtctttgggctcagggaaggtgacagtgaaatgttggggggacaacggattggcctgggatgtgagggggaagggcatcctgtttg

SEQ ID NO: 348103 - DNA, 201 bp, Homo sapiens
agtttgggtttcatgcgtttctctcttttttctccttttccccctgcctggaaaaatggctaggtatctacgagaccccagcaggcaccatcctttaccaygctcatttagacatcgaggccttcaccatggaccgggaagtgcgcaaaatcaaacaaggcctgggcttgaaatttgctgagctggtgtataccggtgcgt

SEQ ID NO: 348104 - DNA, 201 bp, Homo sapiens
gttgacaggcaaggcgtacttctgcgcctcagtgtccctttatgacagtacccaggaaacccccaacagcctctggagacaatttccgagaactgggggtrtgagtggagaaccaggaaggctgggagcgaggggaatccaaggccttggaggtgctggtccagccttcaggcatttaccccctgagtaaccacccagcac

SEQ ID NO: 348105 - DNA, 201 bp, Homo sapiens
tctctgctttcaagatgcttcggtagccaaggcaaaaaggcgccagaggactcataaaaaacatgcatttgcttcgctggccatcctctcccaacccatcrtccaacggaaaaacactcagaaccaccccatccttgtcactgtcaccataatttaaaaaaaaattttttttagagacagtgtctcactctgtcacccagg

SEQ ID NO: 348106 - DNA, 201 bp, Homo sapiens
cattgcgtaccttcagagagcccatttcctggcaagagaagagaaaatggatgtgtgatgaggaatgggagtggggccaggggtctgtgccagggaactgygggagcagcaggcaggggctgaggatgagtctagaggagtgaataatggcatggaagagtgtgagaggcagagggaacagcctgtggaaaggcttagagc

SEQ ID NO: 348107 - DNA, 201 bp, Homo sapiens
ccggggcagacttggtgcaaggcagctacatggctttgtttagaccccaatgagaggggtaacagctcgcccctgcgctctgtgcactgtggcacctgaaygcccattctgagtcctcacctccaccttctgctgtgggagcgatgtcaccccatttggcagacttgctgctgaggcctggggacattgtccaaggtcgca

SEQ ID NO: 348108 - DNA, 201 bp, Homo sapiens
ttggccgagctgaggacagaaaagcagggaggcgggcctgggtgtctaggagttgaaaatgaggagggctcctgctaccggcctacccaggatggcgccaytacgactctgtggccagtgtaaggatgggctttgcaagtttctggaattttccaaaatgtacccaaactaatcactagaaggcctgtttccaacccgata

SEQ ID NO: 348109 - DNA, 201 bp, Homo sapiens
tttgcggcatcgatcatgcctctacatcatggtttagttcatgggccatttgcttccaatttctccttctcggggcctgtttcatgctttctttcgccctstccccctagcccccaccccgactctctctctctctttttcttcactctcttccctcccccgcacccccccccccacagatgacattggaagtgagccctc

SEQ ID NO: 348110 - DNA, 201 bp, Homo sapiens
cctgtttcatgctttctttcgccctctccccctagcccccaccccgactctctctctctctttttcttcactctcttccctcccccgcacccccccccccrcagatgacattggaagtgagccctcccgctgggagggataaatagatggcattgatacttggcaacaaactatttgtcattagaactgggcttttaggaa

SEQ ID NO: 348111 - DNA, 201 bp, Homo sapiens
ggagggataaatagatggcattgatacttggcaacaaactatttgtcattagaactgggcttttaggaaggagagtaaaaagaaggcaggcgctcgagccmccgcggaatgcaaagcaaatgtcattttatttctatttagttattttatttaatcggcgctgtcaggtgcctgcccgacagctgcctctgacttccgctg

SEQ ID NO: 348112 - DNA, 201 bp, Homo sapiens
gattcagggacgctgccgacacctcgcctgctggagcgggcaccgtgtcacccccatcaatcagatggctgcgtgtgggtctggggtacagggtcggggcrcggggtccgcctgacagacgtggcagggggctgtgtgtgtgtgtgtgtgtgtgtgagcgagtatgtgtgtgcttgagcccagccacacctcggccaggcg

SEQ ID NO: 348113 - DNA, 201 bp, Homo sapiens
acccaaggaccaggcggggggctggcccattcgtccacaaagtggctgcccacactggagctgggatgagagggagagaggctcgtggagaggcctggccyggctctggcgctcggctcttaccccggctaccacagaaaggaggatagggtggggaagcctcaggccggtggggaggcagagctgcagatccccctctcc

SEQ ID NO: 348114 - DNA, 201 bp, Homo sapiens
gagggcctgaaggggtaccttttcaggaggctggagtgatcagggaggcttcctggaggaggtggtgctgggcacaggggcacccaaggaccaggcggggrgctggcccattcgtccacaaagtggctgcccacactggagctgggatgagagggagagaggctcgtggagaggcctggcccggctctggcgctcggctct

SEQ ID NO: 348115 - DNA, 201 bp, Homo sapiens
ctcccgctcagcctcaatttcttcatctgttgatggggtaagagcgcttgaccttcttaccaaatggggctgctgagaactcagactgcagatgggaagcratacgtgaatgtgtgcaaggtgttttttttttttttttttttggtgggggggtgggggacggaatcttgctctctcacccaggctggagtgcagtggtgc

SEQ ID NO: 348116 - DNA, 201 bp, Homo sapiens
ttctttttgatttctacatcgctgacttgaaagcccttgagtgacagcgtcacagggaccagcgaggaagccgtgagaggtagcagagctggaaatgccgyggctcagtaggtagaaagtaacgtaattatagagcaggtcagagccactcgaatgagcaaaaataaaagcacagaggttttctgtagaccgtcaggggag

SEQ ID NO: 348117 - DNA, 201 bp, Homo sapiens
aggagaaatcagggcacttggtcactctaacacagagccacaggcaaatgaccacaggtgagcttccaaggcacttatgtagccccatcccatgcagaatraggaggaggctgggccgagcatgtacccccagagtgaatttcagctgccctttccacctgcagagcatgttcccgtttgtaccaggccttccctgacatt

SEQ ID NO: 348118 - DNA, 201 bp, Homo sapiens
acaataaagaagtaattaggcagatgagacacttgggggagggcccagcctgtgcccaccagctcccaggctgtgctgctggagttttggttgtggggggyggggggaggcatggctgagagccctaggccccatttgtctggatccgtgttgcacacccgccaccaccggccaccctgatccggtcccaagcttcccggg

SEQ ID NO: 348119 - DNA, 201 bp, Homo sapiens
tcatgcacatcaggtaaatcccaccctccacccatccttggtcctcccgggctcattccaaaggacggccacgcgctgccccaggacgtcctggtgacccycacaccagtggtccctgccctcggggagctgagaggcctcaggcaggacagaggtcgaagcgcccggctcatgcactgccctcattgcagttctgctgag

SEQ ID NO: 348120 - DNA, 201 bp, Homo sapiens
agtttggggctctctgaaaaagcagggcccctgggacggacctcacgcgtccttccagccgccttacctccacctgtgctgtctctttcctgcagcaacaygggattcccatcccggtcactcccaagaacccgtggagcatggatgagaacctcatgcacatcaggtaaatcccaccctccacccatccttggtcctccc

SEQ ID NO: 348121 - DNA, 201 bp, Homo sapiens
tttgtagcctaatttgaaatttcacgggggccagccgtggggctggggccgagccctgcctgtgttccccgacccccgcactggcccccctctgcccaccrtctcctcgctgcatttgaagacctccccccgcccttcctcttctaattgcctctgggatgaacaggggaaggaaatatctcagggcagcatagagagaga

SEQ ID NO: 348122 - DNA, 201 bp, Homo sapiens
tgagcagtgatgaggcctcctccaaaattctgagccaggcaggatctgagatggatgacacaaaaatcaatggggctttcaaaaatctctgctttcaagaygcttcggtagccaaggcaaaaaggcgccagaggactcataaaaaacatgcatttgcttcgctggccatcctctcccaacccatcgtccaacggaaaaaca

SEQ ID NO: 348123 - DNA, 201 bp, Homo sapiens
gaatcctggagaaccccaaggtaatcccccaaaccccgtctcctcccagctggccacctttggtggtagcagctccatgccgatgctgtctgatgtatttrtagcctaatttgaaatttcacgggggccagccgtggggctggggccgagccctgcctgtgttccccgacccccgcactggcccccctctgcccaccatct

SEQ ID NO: 348124 - DNA, 201 bp, Homo sapiens
ctgccgccctccttggcgcctccagcccgcgggccagggccaggaaccgcgagccgcctgcgcccccgccggcgcgcccctgggagggtgagccggcgcckggcccaggcccggacctggtgggaggcggggggaggtggggacgaggcctggggaggcgggccccgcccatctgcaggtggctgtgaacgctgagcggct

SEQ ID NO: 348125 - DNA, 201 bp, Homo sapiens
cttggggggatggctgggggatgtgatggccggccggggggatgtgatcgggagctgttctcccaattccctggatactaattgcccctagcgctttcccygggaacaggtaggcgctccaagggacagtcgcagacaaagccttttatggcaccagccctttttgaagtacaagttgcaataaaacatattagaagtttt

SEQ ID NO: 348126 - DNA, 201 bp, Homo sapiens
tctcaaactagctcctcttcgactgaacctggccacagctctgagtccttctctgtgtggctgtgctgttcaggactcttaggtgcaaattttagaaactsaactcaaaccaacttacgcaaaaaggaaagggaaaagacaattcttggctcacacaactgagaagtccaggggtaggatggcttcaggcagggctggatc

SEQ ID NO: 348127 - DNA, 201 bp, Homo sapiens
acaagttttttgatccgtcacaattaacactttcgaagaaaaggagcaggaatattaattgcactggtgtgttttgtggctgcagcctttccccttgcccrtgagccctccggaggctgcctgggagggtggcagccaggaagccggtgctgggggctcaggaagaggagggttctgcctggcctctgcccaccagacatt

SEQ ID NO: 348128 - DNA, 201 bp, Homo sapiens
gacgttgtgggcaccgaccagaaccatcttctctgccccagctgcatggtccatgaggtgtttccccttctaagtccaaagggcagcacaggcctgtgagycccggctgactggcaggtgggaccgtgcagcatgcacgggactgaattctcatgtgacggagctccaaagtccacctggctacacggccaggctctgcag

SEQ ID NO: 348129 - DNA, 201 bp, Homo sapiens
tgcaggcagctgagtagctctgcttttgcagagtggttcactgcactgtgaaaacagattccagacgccgggaactcacgcctccaatcccaggtactgcycaccttaagtcctccctgcctgccttcctccctccttccctccatcctgcatggccaattgcctggctgcagttgccatggataccacctgctggctcca

SEQ ID NO: 348130 - DNA, 201 bp, Homo sapiens
gtagacctcaatagagctgttttaaaacatacaacagaatttcccgcaacccaaccacaccacccgcgccatcacacgcaaacaggggtaggcttccacayatttcctgaatgccttctggagcagggggcaggaggcaggaggcaggacaggtggctctggggctcctggacctcctctgctcagtgaggctgctcacag

SEQ ID NO: 348131 - DNA, 201 bp, Homo sapiens
caaagccaagctgggcaccttctgtaaaggccaagctgggcactttctgtaaagcatggttgtaggactcctggtgcccagctccagccctgcaaatgtartttggactgccctacagttggccgagctgaggacagaaaagcagggaggcgggcctgggtgtctaggagttgaaaatgaggagggctcctgctaccggcc

SEQ ID NO: 348132 - DNA, 201 bp, Homo sapiens
catagcagcggtgcacagagcttagtgggcacatacatgcttggtgcccagctctgggctccttcccccagcatctcacccaatccttacagtcgccctgkggggagcaggctgtttgcacccctattttgcagctgagcagttatgctagagagctgaagccactcaaacccatgtctggtggacttgacctctgtcctg

SEQ ID NO: 348133 - DNA, 201 bp, Homo sapiens
aagggacagatggacacagaggtggggggattctgtgtcctacgttctccctgggctgagtataggggccagtggggctgaggctcggtttctaaaacaargtctgttgaagggatctgaggaggttggtggtctagtttggtctagctcttcctaagcactgactgcacagaaaggggtggccagcaaaagtctggtatc

SEQ ID NO: 348134 - DNA, 201 bp, Homo sapiens
ggctgtctcagggtcactcaggttgttcctcgactcccgccagacgctatgtccagcaaaggctccgtggttctggcctacagtggcggcctggacacctygtgcatcctcgtgtggctgaaggaacaaggctatgacgtcattgcctatctggtgagggagcgacctgggtgtctgtcttcctgcgtgtcctgcaacctg

SEQ ID NO: 348135 - DNA, 201 bp, Homo sapiens
cacactgtcagcctccacttcggtctggggctccctcaggaagtgtggcgggagagaaagtgacaagcaacgcattgaaaacagttgacagtcgggcccakcgcaggtggaggtgggagagagctgggcttgggtgggagtggggccctcgtaccggcaccctggttggaggcttgggggagtcccaggcagctggagatg

SEQ ID NO: 348136 - DNA, 201 bp, Homo sapiens
gtctagagttgaggagaacccaggctgaagaccctggagcatcataggcattttgatgttctctgaagcgctgggccaagagagactgcctaggggaaagygtggagtgagacaagaagggaactagccaggcaagatggtgcacacctgtaatcccaactctttgggaggccaaggcaggaggatcgcttgaggccagga

SEQ ID NO: 348137 - DNA, 201 bp, Homo sapiens
ttacacctaaaaaatcaatagtaattctgtcttgctgttattgaatatctcatcagtgttcaaacttccaactgcttataaaaatatttcttgctgggcgygggggttcacgcctgtaatcctagcactttaggaaggcaaggcaggcggatcacgaggtcaggagatcgagaccatcctggctaacacagtgaaaccctg

SEQ ID NO: 348138 - DNA, 201 bp, Homo sapiens
ctgaggaactcccgagggatttgagggcttggatctctgcataaacttggagagaggccatttcctaatcagaggtcacaactagattcagacggtggacrtgccgaaggctgcagcccccaccaatgaagcgggatgggctctttcacagcacacgatactcatatttgcacctggttgctctgaggggctttcacaagc

SEQ ID NO: 348139 - DNA, 201 bp, Homo sapiens
agacctgtgaagcaaaaaggttttcagccccagaggcccacccaggatggggcccgccaggcaccaggagcatagaggatggctagagtcccaccctgacyggcctcccatcaccatggcaactgcttctcaccttggccctggtacctaagaggggagcccttgggctccagccaacccctatgccccacctcttccaaa

SEQ ID NO: 348140 - DNA, 201 bp, Homo sapiens
acggacccatttgaactgttttacaagagtcacggtgaggcctgaggaactcccgagggatttgagggcttggatctctgcataaacttggagagaggccrtttcctaatcagaggtcacaactagattcagacggtggacatgccgaaggctgcagcccccaccaatgaagcgggatgggctctttcacagcacacgata

SEQ ID NO: 348141 - DNA, 201 bp, Homo sapiens
gctgttcacatgtcattatcacattatctttttaactctggaggggggctaattaagtgaagtaaatgaaatcagtggggaggagaaggggggcaaggcakgccggagggaagccgagggaggccgggaaggagccagcgcatgtccttgtgctcagcctctttctctgtctcctctctggccccagacttctcccgccgc

SEQ ID NO: 348142 - DNA, 201 bp, Homo sapiens
tataatgacttttctcagtcattcctctgtttctgctgccatcagcctttttaccccttcctggtttgtggctctgagctactctgcagaaaatgatgacrgacccatttgaactgttttacaagagtcacggtgaggcctgaggaactcccgagggatttgagggcttggatctctgcataaacttggagagaggccatt

SEQ ID NO: 348143 - DNA, 201 bp, Homo sapiens
ggagacaggaggccttggcgccttcgggaggcttcattgtgacggagggtggggcaggatgggagaccgcaggcacttcccggctgcagagggcctggctgcagagagccctcgtgcccatctgtccccccgggaagggccgctggttgcagaggtcttaggcctctgcctgtctatcgccttccctccctgggcctcagt

SEQ ID NO: 348144 - DNA, 201 bp, Homo sapiens
tccctgttctccaggctgtctataatgacttttctcagtcattcctctgtttctgctgccatcagcctttttaccccttcctggtttgtggctctgagctrctctgcagaaaatgatgacggacccatttgaactgttttacaagagtcacggtgaggcctgaggaactcccgagggatttgagggcttggatctctgcat

SEQ ID NO: 348145 - DNA, 201 bp, Homo sapiens
aggaaatagcatagaggtggagagaagcctttgttttctgtcaccatacctgagctgtaggtctagctggaagccatcctagccacgtggatctccatggmccaggagggtggtgcacgtcatctgaagtcactcagacctttgatcctctgtgagtcaccagtaagagtgtcagctgtacctgcctcacagatgcagtga

SEQ ID NO: 348146 - DNA, 201 bp, Homo sapiens
tgatggagtacgcaaaggtatggccgagtctccccaccacccccaacctttccctatagcccccttcccgggcacgtccctgctgggggctgtctgagccmgtggcctaggccgggactgaccccatgtgatgggggattgaacttccaccccagctgcctacacacgtggcctctgtcccctgggctgaccccacagagg

SEQ ID NO: 348147 - DNA, 201 bp, Homo sapiens
cgtcatgttgcccaggctggcctcgagctcctgggctcaagcgaccctcctccctcgggcctcctaaactgctaggattacaggctcgagccacccaaagygcctggcccccaagcttcagtctgttagagctggctggggctgagggctcaggaaacatttgcagatactgtgcggctgctaagggctctgtagactgtt

SEQ ID NO: 348148 - DNA, 201 bp, Homo sapiens
tagtcacggccccatgtctctcaggctatttttactaagattctaaaatccaaagagagccgatcaccccatgtgggccagaagaaaagggtggtggtccrgagggcaggatgcctgcttctggtctcaggtttgccctgccttgcccaacaaccttggacttgtcatctatcgctaggcctcagtttccccaagtgtaat

SEQ ID NO: 348149 - DNA, 201 bp, Homo sapiens
ggccccagcatgaacataatgacagatgcattttgcagcaagctgggagtgaatgggtccggccggcttgtctcctgtcagacgactcattattattattwtttttttttttgtcatttgctgacagtttgggtttcatgcgtttctctcttttttctccttttccccctgcctggaaaaatggctaggtatctacgagac

SEQ ID NO: 348150 - DNA, 201 bp, Homo sapiens
cgtggagaaccgcttcattggaatgaagtcccgaggtgagtctgctcagcctccctcagggcctgcctcggggcccagcaaacccagagatccctgagacmctgtcccctttggacgctactacccccatgctccgtgggcgaccttgggcacgtcctttcaccacaccccgtgagaccgcagtttccctcctgccaagtg

SEQ ID NO: 348151 - DNA, 201 bp, Homo sapiens
ttttttttttttaatttaaaactgtggtaaaatacatgtaacataaaatgaaccattttaaaatgcgtaagcgtgccgctcaacggcattaggtcctttcscagggctgtgccactgtgactaccgtccacctccagaacattttctttttgcaaagctgagactctggccccatgaaacactccccattttccctacccc

SEQ ID NO: 348152 - DNA, 201 bp, Homo sapiens
catccacatatccatctgtcattaatccctccactgtctatccatccattcatccagacagccagccattcatctatccatcccccatccatccatccatscttcatccattcaccgtttttctatccatccattcatccatccatccatctgtcatccatcatccatccttctgtccatcatccccctacctgtccttcc

SEQ ID NO: 348153 - DNA, 201 bp, Homo sapiens
cctgagtgttgaagattcgagtgcgctttcagcagcgcaggagcaggctttgtgcacggcttcagcttttgtcctttattctagatgagcagttctcaaamcttgtggtcttgggaatcctctacactctaatttacgtggcgtttttaatgtttattttcttgcatataacattaggatgggccaggcacagtggctcac

SEQ ID NO: 348154 - DNA, 201 bp, Homo sapiens
ctgagtaaccacccagcaccaccatcccatgagtatccacccagcactgccccgggcgccatcacgggggacgggccaggtggaggctttcgggtctttgrgctcagggaaggtgacagtgaaatgttggggggacaacggattggcctgggatgtgagggggaagggcatcctgtttgctggaaccgcctgagcccagcc

SEQ ID NO: 348155 - DNA, 201 bp, Homo sapiens
gtaattgtgacttgttctccccggctggcagcgtagtggggctgccaggccccagctttgttccctggtccccctgaagcctgcaaacgttgtcatcgaarggaagggtggggggcagctgcggtggggagctataaaaatgacaattaaaagagacactagtcttttatttctagtgagtgtgtgtgtgtgtgtgtgtgt

SEQ ID NO: 348156 - DNA, 201 bp, Homo sapiens
catccattcacccatcatccatccatccatcatccatccattcatccatcatccatccatccatccattcacccatcatccattcatccagccatcatccrtctatccatccatcatccatttattcatccatcatccatccatccatccatcattcttcatccttccatgcatcatccattcatccatccatcatctacc

SEQ ID NO: 348157 - DNA, 201 bp, Homo sapiens
ctctacaaaaaataaaaaacttagccgggcgtggtagcacatgcccgtagtcccagctactcaagaggctgaggtgggaggattgcttgaacccaggaggytgaggctgcagtgagctaggatcacaccactgcactccagtctggatgacagagaaagaccctgtctcaaaaaaacaaaaaaaaagttttcactcagtgt

SEQ ID NO: 348158 - DNA, 201 bp, Homo sapiens
tgaggcaggggagttgcttgaacctgggagacggaggttgcagtgagttgagactgagccactgcactccaacctgggcaacagagcaagacttcgactcaaaaaaaaaaaaaaaaagagagctattgattagcaatgtctgccatgagtgcaggagggagagtaacagtgcagtgtgctgggattgatgaatgatgtcta

SEQ ID NO: 348159 - DNA, 201 bp, Homo sapiens
gcaggaccgtgtgtatgctgccatctgtgcaaaggtggtggcagaggaggagaacccagaggatcaggactgggcgacacagcgagactctgtcccaaacaaaaaaaaaagctcccgacccatctgccttaatggaaagagctggatcgtgagcttcctatcccagaaggcatacaagccgagggcaggggatcagaattc

SEQ ID NO: 348160 - DNA, 201 bp, Homo sapiens
cagtcagagcccccagctatgcctggctcctccccaggccacctgtgcctggtccccagcatctcttgagcctttcctggggtgggaatcaccaggatctyagggcctcaaccgccctggcccgtggcatgtcacccaggcaggagggcacctgtgggtattgcccagactgctactaccatccccacccctccagcttga

SEQ ID NO: 348161 - DNA, 201 bp, Homo sapiens
ggcacactgccgctgcaagctgcccaatttttctagtagccatatatataatatataaatatttttatataatatgtattacatataaatacatatgttttatatatatatatatatatattttttttttttctttttctggagactcgctctgtcacccaggctggagtgcagtggcacaatctcactgcaacctctgcc

SEQ ID NO: 348162 - DNA, 201 bp, Homo sapiens
gcacactgccgctgcaagctgcccaatttttctagtagccatatatataatatataaatatttttatataatatgtattacatataaatacatatgttttatatatatatatatatatattttttttttttctttttctggagactcgctctgtcacccaggctggagtgcagtggcacaatctcactgcaacctctgcct

SEQ ID NO: 348163 - DNA, 201 bp, Homo sapiens
gttggagtgcagtggcacaatcctagctcattgcagcctcaacctcctgggctcatctgaccctcctacctcagcctcctgagtagctggaactacaaacrtgccctagtacatctggctaatttttgttttttatatatttatttatttatttttttacagacagggtctcaccatgttgcccaggctggtcttgaactc

SEQ ID NO: 348164 - DNA, 201 bp, Homo sapiens
aacctcctgggctcatctgaccctcctacctcagcctcctgagtagctggaactacaaacatgccctagtacatctggctaatttttgttttttatatatktatttatttatttttttacagacagggtctcaccatgttgcccaggctggtcttgaactcctgaactcaagtaatccaccctccttggcctccccaaagt

SEQ ID NO: 348165 - DNA, 201 bp, Homo sapiens
ctccaaggaggaaacttctggttagtgcacgagggctcagcagactcagcctccccagatccccggtaggcttcagagtcaaaaccaatatccttcatggtttttttttttttttaatttaaaactgtggtaaaatacatgtaacataaaatgaaccattttaaaatgcgtaagcgtgccgctcaacggcattaggtcctt

SEQ ID NO: 348166 - DNA, 201 bp, Homo sapiens
ggcaggagaatcacttgaacccggaaggcagaggttacagtgagccaagattgcacctctgcactccagtctggatgacagagagtccatctcaaaaaaawaaaaattactgaaggccttagagagcttttgtggattacatctgttgatatttatcacattagaaataaaagctgaaatgttttaaatgaacagttcatg

SEQ ID NO: 348167 - DNA, 201 bp, Homo sapiens
ggaaggcagtccttgagaaaccagattcctgacaatgttggcaactgtcagccgatgtttttataaagacccaagtcatgagctctcagtcagcggacagyatgccaagagcctggtacaggaattgactgtttaccaaccccacagtcagaaggctcggaaactccccagtgacggggagctcactacctcgcctgcccg

SEQ ID NO: 348168 - DNA, 201 bp, Homo sapiens
gagtgtgagaggcagagggaacagcctgtggaaaggcttagagccaagaggccctgaaggacagtctgtctggggctgtggagcaggagctattgctgtgrgggaggcaatagggccaggactgggctgaggccatgctgggaggtttggcttcatcctgagggcaactgattagtgggtggaaggaggtctcaggttgga

SEQ ID NO: 348169 - DNA, 201 bp, Homo sapiens
tgggctcctcttcccgtaggtgttcattgaggatgtcagcagggagtttgtggaggagttcatctggccggccatccagtccagcgcactgtatgaggacygctacctcctgggcacctctcttgccaggccctgcatcgcccgcaaacaagtggaaatcgcccagcgggagggggccaagtatgtgtcccacggcgccac

SEQ ID NO: 348170 - DNA, 201 bp, Homo sapiens
gctctggttagcagttgatcactttgccaaaggcccttcgaggccacctggagctgagatgggagaccccggggccgggcccattccccctccagttggctgggtggtattaggcaagccacccccctccccaggcctcaggttctcatttgtaaaactggtgtgtgggactagatttaaggtgagtccagagtttgcaga

SEQ ID NO: 348171 - DNA, 201 bp, Homo sapiens
gagggctgattgaagggcaatgaggcagctaatgcgaagaaagatagaaatttacttgctttaacttcatacggtccacagtgaaagagttcattcagtcrccggcccgccatagctgatggatgaataaaccatttgcggcatcgatcatgcctctacatcatggtttagttcatgggccatttgcttccaatttctcct

SEQ ID NO: 348172 - DNA, 201 bp, Homo sapiens
aggcacacatgtgcaagcccaaacacatcacacacatgcatgcacacacattgtgtactctcaggtacgcacccctgggtgcacacaggtgtgtgcgcgcrcacacacacacacacacacacactgtctcaggtacacacgccaggtccatgcattgcttcacactgcccagccccagaggctgaaggcctcagagcccac

SEQ ID NO: 348173 - DNA, 201 bp, Homo sapiens
cacctggtgggtgagagcacagctttgaggggctgcaaagagcccagggtgtatccatctcactgtaggtagcacagcggggcaatcagagctggagctgrgcgtatagacccctgggctaccacctgggggatttaaaagctgaatgtgattcagataagcacctgcagctgggctttggcaagattccagggtctggtg

SEQ ID NO: 348174 - DNA, 201 bp, Homo sapiens
ctcaacggcattaggtcctttcccagggctgtgccactgtgactaccgtccacctccagaacattttctttttgcaaagctgagactctggccccatgaaacactccccattttccctaccccggcccctggcagccaccatttctggctgtatgattttgatgactcgagggacctcgcatgagtggaacatacagtgtt

SEQ ID NO: 348175 - DNA, 201 bp, Homo sapiens
gcacttcctctccccgagcttccaggcacacagagagtgctcaggatagcgatgcctgcatcactgcaatggtgatggccgggtgacccttctgggctccrcttccccagtagtgtctaataaagaccctgggtgactctgaccttgtgacgttggtcagactccagtggaaacgttcccaggcagaacaaacatgccctg

SEQ ID NO: 348176 - DNA, 201 bp, Homo sapiens
tcaacggcattaggtcctttcccagggctgtgccactgtgactaccgtccacctccagaacattttctttttgcaaagctgagactctggccccatgaaacactccccattttccctaccccggcccctggcagccaccatttctggctgtatgattttgatgactcgagggacctcgcatgagtggaacatacagtgttt

SEQ ID NO: 348177 - DNA, 201 bp, Homo sapiens
ccaagagatgcctctccccgaccagcctaggactgcagtcagcattcccaggccccagtgtggtctgtggggctgtgtgcagagtgtgcgaggtcagggtycccgggggtggcaggcactgaaggtgaacatcctgttcccgaccttcagtggcagcttgcccaggagacaaggctgtccaaggccaaggtcggggctggg

SEQ ID NO: 348178 - DNA, 201 bp, Homo sapiens
attgcttgagcccaggagttcaagaccagcctaggcaacatagaaagaccttgtctcaaaaaaatatatatacacacacacatacatatatatatatatayacacatacatatacacacacacacacacacacacacacacatatatatataaaataattggggttgtgaagaagctcctttgctattcaaacaatagcag

SEQ ID NO: 348179 - DNA, 201 bp, Homo sapiens
ggcggggggcactggctgtctcagggtcactcaggttgttcctcgactcccgccagacgctatgtccagcaaaggctccgtggttctggcctacagtggcrgcctggacacctcgtgcatcctcgtgtggctgaaggaacaaggctatgacgtcattgcctatctggtgagggagcgacctgggtgtctgtcttcctgcgt

SEQ ID NO: 348180 - DNA, 201 bp, Homo sapiens
ttttctagttcatgctctgctgaccccacaacactcaggccagccaccctaattagccagtcagtcagctccaagggaggcagggaggccgagcctgcagrgtggcttccaggcagggcatcctctcaggcccgtgggccccaagcatgctgggcaaccactcccggccattctccaagcagcctatggcctctgcaagca

SEQ ID NO: 348181 - DNA, 201 bp, Homo sapiens
cctcaacctgcacagggcttttgaaggagtcatttggagtccatatctgtcacatccatttaaggcgtttcgggaggagggagagggtggggtggcgggtrcagactcctccgctgagccgggcccagaggcccactgccctctcttcccaccctaggggtccctgtgaaggtgaccaacgtcaaggatggcaccacccac

SEQ ID NO: 348182 - DNA, 201 bp, Homo sapiens
tggctctgacctgtctgcgtttccctggaaaggcatggcagcatggaccggggcggggacgggcttgcctcgaaagacatgggagcgcggaaggggaggcrggctcgcctctttcttgtggctttagctccttgcttgctgttattcaggagaaacaacctaattgaagctctggggaggccttgagaacaatgttactaa

SEQ ID NO: 348183 - DNA, 201 bp, Homo sapiens
tgtgcccacctgttgggactcgaagggggttgacttttggggccctggctcctttcccctccctgcctgggaacctaggccctctttacccccgccctgcrttcctggaagctagagttcaggcaggggcttcaaggtaacgcacagcccacctccctggacagtacaacccatggaccatggatgcctctaggcttggga

SEQ ID NO: 348184 - DNA, 201 bp, Homo sapiens
tttcagaaccaagcgcctccaggtctctacacgaagacccaggacccagccaaagcccccaacacccctgacattctcgagatcgagttcaaaaaaggtaygtgcccacctgttgggactcgaagggggttgacttttggggccctggctcctttcccctccctgcctgggaacctaggccctctttacccccgccctgca

SEQ ID NO: 348185 - DNA, 201 bp, Homo sapiens
cccacatttagcctgcaacagcctcccgcagccgtgtgcgcccctcctccatgtggccaccagagggcgccagaggcttgggtttgaggccttgggggccracaaaggcgggaggaggtggcggcaccaccggggtcctctgttccccatcctggacctgcagggcgtggttctgaggagaacgcccccgcaagctagtgc

SEQ ID NO: 348186 - DNA, 201 bp, Homo sapiens
tggggacatgctggagacccccatgggcccctcccaggagaggccagctctgcagcttacaggccaggggaagcccacagctcggccctcccggctctgaycccttgtcctatgtccaggtcattgctccctggaggatgcctgaattctacaaccggttcaagggccgcaatgacctgatggagtacgcaaaggtatggc

SEQ ID NO: 348187 - DNA, 201 bp, Homo sapiens
caccactttctgtcttttttcagaaccaagcgcctccaggtctctacacgaagacccaggacccagccaaagcccccaacacccctgacattctcgagatygagttcaaaaaaggtatgtgcccacctgttgggactcgaagggggttgacttttggggccctggctcctttcccctccctgcctgggaacctaggccctc

SEQ ID NO: 348188 - DNA, 201 bp, Homo sapiens
gagaacgcccccgcaagctagtgctatggccgctcgggacttgggggcgtccctgcattcacactcagaagacccaacagggacggactccggggatgccrgggagtaggtgctacctggcacagccacctctttcctggggttgacaggcaaggcgtacttctgcgcctcagtgtccctttatgacagtacccaggaaac

SEQ ID NO: 348189 - DNA, 201 bp, Homo sapiens
ccggccatccagtccagcgcactgtatgaggaccgctacctcctgggcacctctcttgccaggccctgcatcgcccgcaaacaagtggaaatcgcccagckggagggggccaagtatgtgtcccacggcgccacaggaaaggtgaggcacctgggaagggccgggcagagggagatggaggcggaggggtgtgggaaggag

SEQ ID NO: 348190 - DNA, 201 bp, Homo sapiens
cccacccagagagctgcaccgaagctggggtggcccttgcggggctcctctctccccctagttttggaagaggggcctggaaatatgattctgagactctrgccggggagcgagagttttgtaaatggcaccatctgtatgggtgccccagggcagatgggagaccccaggccccccagtcccagtgggaccgtgtttaca

SEQ ID NO: 348191 - DNA, 201 bp, Homo sapiens
gactgggctgaggccatgctgggaggtttggcttcatcctgagggcaactgattagtgggtggaaggaggtctcaggttggatggaggtggccagtgactrccccagcgagatgctggggaagagacaggggagagcttctcacagactgcggccttggtttttactgtcactccagctgtggatgatgggatggtaggaa

SEQ ID NO: 348192 - DNA, 201 bp, Homo sapiens
gaccagcctggccaaccagcctagtttctttagtagagaaaccccacatgcctgtagtcccagccactcgggaggctgaggcaggagaatcacttgaaccyggaaggcagaggttacagtgagccaagattgcacctctgcactccagtctggatgacagagagtccatctcaaaaaaaaaaaaattactgaaggccttag

SEQ ID NO: 348193 - DNA, 201 bp, Homo sapiens
tgggtgtctgtcttcctgcgtgtcctgcaacctgtcctgtctgccccctgccagcctctgtctgggttgtcagcctgtctgctcaccgtcactcattcaarcctggcctcttctctcgaagcctgtcttgaactggaactaggaaaatagcttctcgttgtactgcctcactttctccatctgcaaattggccatccttga

SEQ ID NO: 348194 - DNA, 201 bp, Homo sapiens
agtggctgcacctctctgagcttcactttcctcacccataaaatatggctaaaaatccccctggccctgggggcctctctgagtgacagcacatagtaggygctcactaaaggggctgcatggagggtgagtgaggccagcccaaggcctgtgccgcacacacagctcccagctctgcagagaggctgaaccctggattct

SEQ ID NO: 348195 - DNA, 201 bp, Homo sapiens
ctgttcaggactcttaggtgcaaattttagaaactcaactcaaaccaacttacgcaaaaaggaaagggaaaagacaattcttggctcacacaactgagaastccaggggtaggatggcttcaggcagggctggatccaggtgcttctaagatctatctccaactctacttggcttcattcttggcctctccacagggcagg

SEQ ID NO: 348196 - DNA, 201 bp, Homo sapiens
tccgaggagcagggaggccagggccaggcctggaggtcaggctgtcttgtgtctggggtgggcaggccgggtgtggaggcagaccgtgcaggcccgatttmgtggtcattaaggccgcatggaggccgccggccaggcagggcgaaaatcctgccaggggtgggcgctgtggctgcacaggcactgggagccggccagggc

SEQ ID NO: 348197 - DNA, 201 bp, Homo sapiens
aaaggggtggccagcaaaagtctggtatctcctcctcttccagggaatgcaagctcctagtggcttcagtgcctgagccctggaggggccgtggaggtgtrgaggagggaggaagggacatcaaggaggtacaggagcatgggagtgactctgcagagagttccacgcacccaccggcttcaaggcctggtgaaggtcagg

SEQ ID NO: 348198 - DNA, 201 bp, Homo sapiens
ctgggtcacggcagtggccctgtggctgaaggtgctggcaaggaccatgaaccccgtctagttcaaactctcaggtctcatctggggagactgaggcccarggaacagggacccccttctcaccccaacacaccaccattctgccatggagtgcaggctccgtccagccagccccggtgagggagtctgtgtccttcccct

SEQ ID NO: 348199 - DNA, 201 bp, Homo sapiens
gctctcttgttagccccaatacatttattgctcatttcacaccgctcgagaaagtgccccttgctattcaaagtcaaccccgaacccacccactgcccccmcccaaccccttccctcctgccaccccggacccagctcctcggattcagggacgctgccgacacctcgcctgctggagcgggcaccgtgtcacccccatca

SEQ ID NO: 348200 - DNA, 201 bp, Homo sapiens
gacatgccatgtccctccccagctgaccctgtctttcctttcccctccgcagctacgaggctggaatcctggagaaccccaaggtaatcccccaaaccccrtctcctcccagctggccacctttggtggtagcagctccatgccgatgctgtctgatgtatttgtagcctaatttgaaatttcacgggggccagccgtggg

SEQ ID NO: 348201 - DNA, 201 bp, Homo sapiens
gcccaatttttctagtagccatatatataatatataaatatttttatataatatgtattacatataaatacatatgttttatatatatatatatatatatwttttttttttctttttctggagactcgctctgtcacccaggctggagtgcagtggcacaatctcactgcaacctctgcctcccaagttcaagcaattctc

SEQ ID NO: 348202 - DNA, 201 bp, Homo sapiens
ccactgcacccagctgtagtagccatattaaaaaatagaaaaatgaaacaagtgacatgattttaataacatgttttaccgaaaccgatatatccaaaatrttatcattcctcctataatcaatgtaaaaaaataattattaatgtttacattcttttttcttctgtgttgagtctgcaagacccagaatgtgctgcatgc

SEQ ID NO: 348203 - DNA, 201 bp, Homo sapiens
cagggtgtccagtttcgaggtctttgtctgcagaggccaagcccaggcactgagatgggattggggcaggggccaagctgctccaggagctgggagtaggrctgtggtcttcccatggctgctctgaggggctgaggaggtggcgggccccttccattgccctgcaccactgtcagctccacggcccagcagccaaatgac

SEQ ID NO: 348204 - DNA, 201 bp, Homo sapiens
atccccgcgggaggtgggctgtagggtgtccagggactggtatgtcatctgcccaccactttctgtcttttttcagaaccaagcgcctccaggtctctacrcgaagacccaggacccagccaaagcccccaacacccctgacattctcgagatcgagttcaaaaaaggtatgtgcccacctgttgggactcgaagggggtt

SEQ ID NO: 348205 - DNA, 201 bp, Homo sapiens
acactaggaggtagccagggtcttgtctgaatgggggccagagtttggggctctctgaaaaagcagggcccctgggacggacctcacgcgtccttccagcygccttacctccacctgtgctgtctctttcctgcagcaacacgggattcccatcccggtcactcccaagaacccgtggagcatggatgagaacctcatgca

SEQ ID NO: 348206 - DNA, 201 bp, Homo sapiens
actcccaagaacccgtggagcatggatgagaacctcatgcacatcaggtaaatcccaccctccacccatccttggtcctcccgggctcattccaaaggacrgccacgcgctgccccaggacgtcctggtgaccctcacaccagtggtccctgccctcggggagctgagaggcctcaggcaggacagaggtcgaagcgcccg

SEQ ID NO: 348207 - DNA, 201 bp, Homo sapiens
tgccctcaggtctttccaacggtaccattaaggttcagtagggcggcattcaggtctggtggagtgcatgggtgggtgggtgagtatgggtgggtcggctmtggctcaggcagttcccgggtccatgcggagacccccaccccggaccagcccacatttagcctgcaacagcctcccgcagccgtgtgcgcccctcctcca

SEQ ID NO: 348208 - DNA, 201 bp, Homo sapiens
taaagggcaccaggctgagggcacgccagggtctcttcccagtcccgtctagctcctgggtggaaagcccaccattctgctgtaatgcttggcttcctcaragcccttgtggtctcggcacagatagggagactgaggcacagggaagccctcctgccccagcctcactcctagaggccctaggttctgtgaccactgcca

SEQ ID NO: 348209 - DNA, 201 bp, Homo sapiens
gcaagcatggcgtgggccgtattgacatcgtggagaaccgcttcattggaatgaagtcccgaggtgagtctgctcagcctccctcagggcctgcctcgggrcccagcaaacccagagatccctgagaccctgtcccctttggacgctactacccccatgctccgtgggcgaccttgggcacgtcctttcaccacaccccgt

SEQ ID NO: 348210 - DNA, 201 bp, Homo sapiens
ttcccaaaggaccagagcctttagtccaggtgccctcacctccagcccaggccccagctgagctggcggatcccactcaattctgcaaaattgctcattcygcctaacctggcagcctcagggacagatgagaagaatttgggccacagtagctgtttggttcccacctctttctgcttggtccactctccccccagccac

SEQ ID NO: 348211 - DNA, 201 bp, Homo sapiens
ggtgccctcacctccagcccaggccccagctgagctggcggatcccactcaattctgcaaaattgctcattccgcctaacctggcagcctcagggacagaygagaagaatttgggccacagtagctgtttggttcccacctctttctgcttggtccactctccccccagccacccctggccacccctagatccttgcccgt

SEQ ID NO: 348212 - DNA, 201 bp, Homo sapiens
caaacccagagatccctgagaccctgtcccctttggacgctactacccccatgctccgtgggcgaccttgggcacgtcctttcaccacaccccgtgagacygcagtttccctcctgccaagtggggatcgtgggccctttgcccctgactttcagggtgttatgagaagagctgtccaagggctgggagaggcccaggagg

SEQ ID NO: 348213 - DNA, 201 bp, Homo sapiens
tgcctcggggcccagcaaacccagagatccctgagaccctgtcccctttggacgctactacccccatgctccgtgggcgaccttgggcacgtcctttcacsacaccccgtgagaccgcagtttccctcctgccaagtggggatcgtgggccctttgcccctgactttcagggtgttatgagaagagctgtccaagggctgg

SEQ ID NO: 348214 - DNA, 201 bp, Homo sapiens
taaacccttttaaatggcccagaacaaacagggcttacatagtggcctcttcatttctcctattgccagttaaacgctttgtcttcaacaatgacaaacartgttttccccctaagataaattaattacattatcctgattggagggcaggaggggccagggcgggagagggaatagaaaaaaaggcaacttcacacacat

SEQ ID NO: 348215 - DNA, 201 bp, Homo sapiens
aaattcatagtcttttagcatcaggtttctgtcactgttttttttttccagaagaaacacacagaaatcatctgtaccccctacccctgtggagaggagarggaagagctttaaacgcacacacacacacacacacacacacacacacgtgcgcgcgcgcgcgtcggcagcaacctaaaaacaagttttttgatccgtcac

SEQ ID NO: 348216 - DNA, 201 bp, Homo sapiens
agcatagaggtggagagaagcctttgttttctgtcaccatacctgagctgtaggtctagctggaagccatcctagccacgtggatctccatggcccaggarggtggtgcacgtcatctgaagtcactcagacctttgatcctctgtgagtcaccagtaagagtgtcagctgtacctgcctcacagatgcagtgaaggttca

SEQ ID NO: 348217 - DNA, 201 bp, Homo sapiens
cagcctcaacctcctgggctcatctgaccctcctacctcagcctcctgagtagctggaactacaaacatgccctagtacatctggctaatttttgtttttyatatatttatttatttatttttttacagacagggtctcaccatgttgcccaggctggtcttgaactcctgaactcaagtaatccaccctccttggcctcc

SEQ ID NO: 348218 - DNA, 201 bp, Homo sapiens
gccaggagagcagtgccaggtgtccgagtgcaggaggaggctggagtgcacgagctggattccagtcgggcgtcatcaagggtggtgcgggtccccagggygacaagcctcatcttcttcctcctcttaaggctgagtcaggtgggccttccatgcgtgacctgcagccctcttagcctgggcctcctgggcagaggtggg

SEQ ID NO: 348219 - DNA, 201 bp, Homo sapiens
cccagataaaggtaggatgtggctcctccccttagcagggagcactagcatctgcagcacctgatggggaggagggcacagggttctgggagattccacakgacaggcacagaatctcctccgtggcaggggtgcccatcgggtggacagcctgctggggaggctcccttcgctggggccagctccaggggacacactttc

SEQ ID NO: 348220 - DNA, 201 bp, Homo sapiens
tttctcaaacaaaaaattttagttaagaatcttattggcttccatttttgcaaatctctgtaatgtctggcttgacagaaaacagatggactcttgtagcrgttttctgcattcacttgttttttcgtttgtttgtttgtttttcttttttagcctcccagggcttcctcgctatgtgatgccttgttttattgaagttta

SEQ ID NO: 348221 - DNA, 201 bp, Homo sapiens
gttccaatttcacagcccctaaatgcaaaaggggcaaagagaatgggagggtgggggagagcgtttttattgcattttctctttcattctggggggctttytcgccccttctctccctgcagcaggcctcaacctgcacagggcttttgaaggagtcatttggagtccatatctgtcacatccatttaaggcgtttcggga

SEQ ID NO: 348222 - DNA, 201 bp, Homo sapiens
ttacctccacctgtgctgtctctttcctgcagcaacacgggattcccatcccggtcactcccaagaacccgtggagcatggatgagaacctcatgcacatyaggtaaatcccaccctccacccatccttggtcctcccgggctcattccaaaggacggccacgcgctgccccaggacgtcctggtgaccctcacaccagtg

SEQ ID NO: 348223 - DNA, 201 bp, Homo sapiens
agctgctctgggacactctcctaggatgtctcatttaattcttacacaaaatttgcaactccccgggaacaggctgagtggttaagtaactttccaagggycacacagctaggaggtggtggagctgagtccggagggcctgtcctgctgtgggttctccatcaccagctcccttctcatggggattggagtctagaagaa

SEQ ID NO: 348224 - DNA, 201 bp, Homo sapiens
atcggcctcgggcagcaggctgacccccacagctcagagggcctgtttgatgcgattttccccatgagggatacagacatggtatagaccagggctttgcytgatcatgttacttaacttccctaggcctcagttttcccatctgaagagtgggaataacagttctacctgtctggtgggtgaggactaaaagtatgagta

SEQ ID NO: 348225 - DNA, 201 bp, Homo sapiens
ggacaggctgctgcctgaggccgatcctcacatcttcgggggcctggacgtcaggggacctgtgcaaagttagtattagttaatcgaatagctacctgggytaagctctcctcccctcgcctctccccctccactcccagattttgtttccttttaagcctcctaatcactgtaactcatctcaggatttcgagagggctc

SEQ ID NO: 348226 - DNA, 201 bp, Homo sapiens
agtttttacatttttaaatggttgggaggaaaaaaaattttttaatgctatttcatgacaaattatataaaattcaagtgttgccgggcacggtggctcaygccaggtgaggtggctgtttctgcattgtctgtggctcccctggagcggcaaggggaggttgagccatttgagagagaccataggacccaaagagcctaa

SEQ ID NO: 348227 - DNA, 201 bp, Homo sapiens; identical to SEQ ID NO: 73992

SEQ ID NO: 348228 - DNA, 201 bp, Homo sapiens
ccagacatcacagccactgtgaccccagacctcaagcatcctgaagggagaggtatggacatggccccatcctttgtgatctttgcttgtgtgatctttgyttggctcctgctttgtgagtgctgggcccccatctcaacactgggctgtggtgttttctgggactgattgtctaggtgtctcaccacatgctgggaatag

SEQ ID NO: 348229 - DNA, 201 bp, Homo sapiens
gccctgggtgtggcagtggatggtggcaaggactccctcagcatggctgctcgggttggcactgagaccgtgcgggctcctggtgaggtgtgggagccccrgggaggggaggaggaactatggagctgggttggcaactcattcctttggactcctccttgctctacagggtcactggtcatctcagcctatgccgtctgc

SEQ ID NO: 348230 - DNA, 201 bp, Homo sapiens
gattggcctctcactccaccgagctacgagagagtgggcccattcgttctgggccacatgccaacagaaggctggtagtaaatttttaattttttcattgaaaaaaagtatatatatacacatatgtaattaaaatatatattattaaatatatattatttatatatattatttatatattattaaaatgtatattattta

SEQ ID NO: 348231 - DNA, 201 bp, Homo sapiens
aatacaaaagtgaattagtggattgggttcatgggtgcttggactttgtacaccctctcaagcatttcccctttttacctcatttgtccagttaaagtcasgagttcttgttatcaggtcaaatgaaggggactggccctgtgtaagtggaaagacagggagaaccagtaagtctcttttctttcttgagatggagtctca

SEQ ID NO: 348232 - DNA, 201 bp, Homo sapiens
cttgtgtggaggcccccaagggaaaccccatctgcagccttcatgatcagggcgctggtggcaatggtgaggaaaggagttggaacaagagactgggcctkcctggtatcctgccaggtttcgtttagggagaggtatcaggaatctccaaccaaccacccagctctgggtcccattctccatgctctgtacattctagac

SEQ ID NO: 348233 - DNA, 201 bp, Homo sapiens
cctgaaggatgcaggctgctccggcctgtcttcacagttcattcagttcatccagttctctctccttccctcccaggttacaatctgccctgggaggatcyaagcttccagtatcctgggaattttgcccggcccctggaggttgccattgaagccagtaatggagcttctgactatggcaacaagtttggggaaccagtg

SEQ ID NO: 348234 - DNA, 201 bp, Homo sapiens
ctgtgtaagtggaaagacagggagaaccagtaagtctcttttctttcttgagatggagtctcactcagctgcccagggtggaatgcagtggcgcgatctargctcactgcaacctccgtccctcaggttcaagcaattctcctgcctcagcctcccaagtagctgggactacaggcgcaggccaccacgcctggcaaattt

SEQ ID NO: 348235 - DNA, 201 bp, Homo sapiens
ctcaaacctcaacctcacatatctcatcttccccaggctggggagtcggggtcctcgtaccactgccagactgttcacccagttcaaagaaaaccctgccygttgcaggctcatgccattctactacatccctttcatccaattctttgtgttctactgacttccccagcgcttcctttgggagaaggtgccaattcttca

SEQ ID NO: 348236 - DNA, 201 bp, Homo sapiens
tgagtccatcatgagcacccaggaatcctcgaaccccaacaacgtcctcaaattctgtgataacagcaggtgctgtgccctagactgggttggcgtcaggrcccggggaggggaggccccaggccctggttgggttagtgtaggtcccagaaaggaagcaaggtccatgacgggtatgtccacagtgcaatccagggaaag

SEQ ID NO: 348237 - DNA, 201 bp, Homo sapiens
ccctctgggtggggtccctgtggtctatagatagtgctggtggacgatcgggagtgtcctgtcagaagaaatggccagggggatgcccccccgacaccccygccaacccctgtggacctggagctcgaatgggtgctgggcaagatgcctcggaaggtatgtggggttgaggggatgggtttttcctgtggtcctctccac

SEQ ID NO: 348238 - DNA, 201 bp, Homo sapiens
attttcccacccctgccagccccagcccgcttccacccatctctcttgcaacaacatgagacgtgggagtgcccactggcccttctctttcctccccgccrtggctgtgcagcttggggacccaaccctgaatgccctggaaatctggggggctgagtaccaggaatcaaatgctcttctgctgaggtcccccaaccggga

SEQ ID NO: 348239 - DNA, 201 bp, Homo sapiens
catgcaggtggtccttggtggccttgactcttcctgaaggatgcaggctgctccggcctgtcttcacagttcattcagttcatccagttctctctccttcsctcccaggttacaatctgccctgggaggatctaagcttccagtatcctgggaattttgcccggcccctggaggttgccattgaagccagtaatggagctt

SEQ ID NO: 348240 - DNA, 201 bp, Homo sapiens
gggggctgagtaccaggaatcaaatgctcttctgctgaggtcccccaaccgggacttcctgactcatgtcagtgcccgtgaacgttgcccggcttgcttcrtgggcaccatcactggagaccggagagtgagttggcccagggagttgggagcaaacactggggcagacatgagccacctgggtatgggctagagggagag

SEQ ID NO: 348241 - DNA, 201 bp, Homo sapiens
ctagccttcattcagccagaaagcatgatattgggttggtcttatgatcagtacctgcccctcaaatctggtttcttagcctgagaaacttggctgggcgyggtggctcacgcctgtaatcccagcactttgggaggctgaggtgggcggatcacaaggtcaggagatcaaaaccatcctggctaacacggtgaaaccccg

SEQ ID NO: 348242 - DNA, 201 bp, Homo sapiens
tgcctcactgcaggctctagggcttcctaaagcaggacttcctgaagtggaacattgcaaccatgcaggtggtccttggtggccttgactcttcctgaagratgcaggctgctccggcctgtcttcacagttcattcagttcatccagttctctctccttccctcccaggttacaatctgccctgggaggatctaagcttc

SEQ ID NO: 348243 - DNA, 201 bp, Homo sapiens
cctggagtgggcctggggaaaataatcagggaaattggttgtccttattttcagtgggggtggtcagagatgggggtttgtctctgaggcacccagacctstccccactctctctttgcaggagtatgcccctttagtggtgcaaccactggcacagggggccggattcgagatgtccagtgcacaggccgcggggcccac

SEQ ID NO: 348244 - DNA, 201 bp, Homo sapiens
gtcctgccgtcctagccctcatcctccctgatccctaccctactctctggctgcatccctctgaccctcaccctggcccttcctgcatttccctgatcccrccccaactcccttggcccttcttgcatccccctgactccccacattgctctcccagtcctgtctgtgctgttcgctgaggagccaggcctcgtgctggag

SEQ ID NO: 348245 - DNA, 201 bp, Homo sapiens
acttcccatccctgagatgtccatgatgaaacatcctcagtcctgccgtcctagccctcatcctccctgatccctaccctactctctggctgcatccctcwgaccctcaccctggcccttcctgcatttccctgatcccgccccaactcccttggcccttcttgcatccccctgactccccacattgctctcccagtcctg

SEQ ID NO: 348246 - DNA, 201 bp, Homo sapiens
cccactgccctgagtgccttgggggcatgtgcgggagctcaggctgtccctgtcccttgctctcttgctaaccccacctggttccacaggtggaccgctcygtgggaggcctggtggcccagcagcagtgcgtggggcccctgcaaactcctctggcagatgtagcggttgtggcactgagccatgaggagctcatagggg

SEQ ID NO: 348247 - DNA, 201 bp, Homo sapiens
ctcccagcttggggaacaccctccagacctggaccttcctgagaacttggtgcgggccttcagcatcactcaggggctgctgaaaggtgagtgaagacccytggggagatagcgcacagggtgccaggcgtgcagcaggcgttcaccatctgagcagtggggcaaaagggactccaatggacgatgtaccccagatcccct

SEQ ID NO: 348248 - DNA, 201 bp, Homo sapiens
aatgttcaacatcttgataaaaggagtttgcctgagaatggagactataatcccagatccctgagggctaggagagctgggtgggggcgctgagcacttctgtgtgctcctggtagagtagccaccctgagaaaaaactgataataatgaaacaatgttaaatgatggctatggggaaaacaactatttcagagatttttc

SEQ ID NO: 348249 - DNA, 201 bp, Homo sapiens
atctcaacactgggctgtggtgttttctgggactgattgtctaggtgtctcaccacatgctgggaatagcagtgctgtgagcccctcagggatgggtcctyctgagctgttcccctcccctcacccctccccgtctccccaggccatctgctctatgtggctctgagccctgggcagcaccggctcgggggcacagctctg

SEQ ID NO: 348250 - DNA, 201 bp, Homo sapiens; identical to SEQ ID NO: 73999

SEQ ID NO: 348251 - DNA, 201 bp, Homo sapiens
tttgtgagtgctgggcccccatctcaacactgggctgtggtgttttctgggactgattgtctaggtgtctcaccacatgctgggaatagcagtgctgtgascccctcagggatgggtcctcctgagctgttcccctcccctcacccctccccgtctccccaggccatctgctctatgtggctctgagccctgggcagcacc

SEQ ID NO: 348252 - DNA, 201 bp, Homo sapiens
cctgagggagcggatggggcccagctattgcctgccccccacctttcccaaagcctccgtgccccgtgagcctggtgagggagtgtgtgcagaggctccgygtcctgggggcactgagcctggatgcctgggcctgccctcagaaaggtgtctggggagttggggtggggaagtgactttctggcccaaagacacttattc

SEQ ID NO: 348253 - DNA, 201 bp, Homo sapiens; identical to SEQ ID NO: 73991

SEQ ID NO: 348254 - DNA, 201 bp, Homo sapiens
ctgcctggtcaggctggaggggcagcctgcgactacagaatgagacagaacactgtgaaacagccctgcccatactgtcactcagggaacaacattgtcargggcctcctcctgagggacacacatgagggagatagacttggaacaagtgatttcaatccagtgacttttaggggaagctcagggtgccgtggagctcat

SEQ ID NO: 348255 - DNA, 201 bp, Homo sapiens
agcaattttcctgcctcagcctcccgagtagctgggagtacaggcacacaccaccacacccagctaatttttgtatttttagtagagatagggtttcaccrtgtctcccaggctggtctcaaactcctaacctcaagtgattcgcctgcctcggcctcccaaagtgctgggattacaggtgggagccactacagctggccc

SEQ ID NO: 348256 - DNA, 201 bp, Homo sapiens
tattatttatatattattaaaatgtatattatttatatattattaaaatatatattatttatatatattatttatatattattaaaatatattatttatayatattatttatatattattaaaatatgtatatttttaatatatatatatatatgtattttttgagacggagtttcacccttgttgcccaggctggagtgc

SEQ ID NO: 348257 - DNA, 201 bp, Homo sapiens
ttattaaaatatatattatttatatatattatttatatattattaaaatatattatttatatatattatttatatattattaaaatatgtatatttttaawatatatatatatatgtattttttgagacggagtttcacccttgttgcccaggctggagtgcaatggcgcaatcttggctcaccgcaacctccacctcctg

SEQ ID NO: 348258 - DNA, 201 bp, Homo sapiens
ctgcctcatcctcccaagtagctgggattacaggcatgcaaaaatacaaaaattagccaggcgtgctggcgggcgcctgtaatcccagctacttgggaggmtgaggcaggagaatcgcttgaacccaggaggcagaggttgtagtgagccgagatcatgccactgtactccagcctgggtgacagaatgagattccatctc

SEQ ID NO: 348259 - DNA, 201 bp, Homo sapiens
gagctgagctatgccatatatgcccccaggtgcagggagataacaccagtgacctggactttggggctgtgcagcgaggagacccggagatggaacagaaratgaaccgtgtgatcagggcttgtgtggaggcccccaagggaaaccccatctgcagccttcatgatcagggcgctggtggcaatggtgaggaaaggagtt

SEQ ID NO: 348260 - DNA, 201 bp, Homo sapiens
tcccaagtagctgggattacaggcatgcaaaaatacaaaaattagccaggcgtgctggcgggcgcctgtaatcccagctacttgggaggatgaggcaggaraatcgcttgaacccaggaggcagaggttgtagtgagccgagatcatgccactgtactccagcctgggtgacagaatgagattccatctcaaaaaaaaaaa

SEQ ID NO: 348261 - DNA, 201 bp, Homo sapiens
cccaggcataggggagcgtacaggagcttccagtctcgctgagctgagctatgccatatatgcccccaggtgcagggagataacaccagtgacctggactwtggggctgtgcagcgaggagacccggagatggaacagaagatgaaccgtgtgatcagggcttgtgtggaggcccccaagggaaaccccatctgcagcctt

SEQ ID NO: 348262 - DNA, 201 bp, Homo sapiens
tggagttggaggtggagctgcttcatctgtgcaggtgagtgggaattgctaaaggtgcagaatccttgatataaccgggccccaggcataggggagcgtayaggagcttccagtctcgctgagctgagctatgccatatatgcccccaggtgcagggagataacaccagtgacctggactttggggctgtgcagcgaggag

SEQ ID NO: 348263 - DNA, 201 bp, Homo sapiens
gcccactaggaatgcctgcgacattgggccatcctcccccaagcaggaagggctttgtgcagctccctctgcctggtcaggctggaggggcagcctgcgamtacagaatgagacagaacactgtgaaacagccctgcccatactgtcactcagggaacaacattgtcaagggcctcctcctgagggacacacatgagggag

SEQ ID NO: 348264 - DNA, 201 bp, Homo sapiens
tagactcttgggacctagacttctacaccaagcgcttccaggagctacagcggaacccgagcactgtggaggcctttgacttggcgcagtccaataggtgrggagaaatggggttgttcccatacctgagcccatgggtgttgggagagaccacaggggctcaccttcatgttcctcccttggcttaggggcctccctgag

SEQ ID NO: 348265 - DNA, 201 bp, Homo sapiens
tggcttccccagtgttctgattctgccttcccttcttacaggcatggaagttgtaaaggttggaggtcccgtctacaggattggagttggaggtggagctrcttcatctgtgcaggtgagtgggaattgctaaaggtgcagaatccttgatataaccgggccccaggcataggggagcgtacaggagcttccagtctcgct

SEQ ID NO: 348266 - DNA, 201 bp, Homo sapiens; identical to SEQ ID NO: 73996

SEQ ID NO: 348267 - DNA, 201 bp, Homo sapiens
ttgccccttactgctggatgatgttgctcgggagtcctggctccttcctggctccaatgacctgctgctggaggtcgggcccaggtaagtatctcatcctrcccacccctttcttctgctttcctttgcttcctcttgtgatccttgggagatttgcttttcctttgctctttgctacttcctgcctaggaaaccacacat

SEQ ID NO: 348268 - DNA, 201 bp, Homo sapiens
atccctctgaccctcaccctggcccttcctgcatttccctgatcccgccccaactcccttggcccttcttgcatccccctgactccccacattgctctccyagtcctgtctgtgctgttcgctgaggagccaggcctcgtgctggaggtgcaggagccagacctggcccaggtgctgaagcgttaccgggatgctggcctc

SEQ ID NO: 348269 - DNA, 201 bp, Homo sapiens
gaggtgagcagggtagggggcagctgggggtgattgtccagcctcagctgcgtgtcctccccacccacactccccctccccaccttcgcaggtatgggacrtgaccatgcaggacctctgctctggggcaattgggctggacactttccgtggcgtggccttcgtgggcggcttcagctatgcagatgtcctgggctctgc

SEQ ID NO: 348270 - DNA, 201 bp, Homo sapiens
cagtaatggagaccgggagatggccgatgccttccacttagctgggtttgaggtgagcagggtagggggcagctgggggtgattgtccagcctcagctgcrtgtcctccccacccacactccccctccccaccttcgcaggtatgggacgtgaccatgcaggacctctgctctggggcaattgggctggacactttccgtg

SEQ ID NO: 348271 - DNA, 201 bp, Homo sapiens
tcgccatcttgcgagaggagggcagtaatggagaccgggagatggccgatgccttccacttagctgggtttgaggtgagcagggtagggggcagctggggdtgattgtccagcctcagctgcgtgtcctccccacccacactccccctccccaccttcgcaggtatgggacgtgaccatgcaggacctctgctctggggca

SEQ ID NO: 348272 - DNA, 201 bp, Homo sapiens
gtccttcctttgggtttcagctgggtcaatagcgctgctcaaatcctttgtgagaggttatttcagtagcaccacatacctcccttttcagcccaagtctmtgttgtactttatttttcaccattgcaatcaatgaactgtgaactgtttttgtttagagatggagtctacctctgttgcccaggctgtagtgcactagcg

SEQ ID NO: 348273 - DNA, 201 bp, Homo sapiens
atgtggcccagacttttgggatcagggaaggattctcggagtgagctgagacctgaaggatgagtagcagtttgttacatgaaggtgagtggcactctagaaaaacaatatttgcaaagcctcagaggcaagagacatggtaaagagctaaacaaaggtgagtgagtctgtctggaacatcaagtataatataactgggaa

SEQ ID NO: 348274 - DNA, 201 bp, Homo sapiens
agaaggaaaaaaaatagtgctcactgtaaaaattcaaacagcacagacatccacaaagtgaagagtatgcatctctccacgtgccagcccctcttctaccktccagtgtacaaagcatgtctctgatcatgtttggagagcgggtcttggttggccctgtctaatgcctagggtgggagaaaatactggaaaggttggtag

SEQ ID NO: 348275 - DNA, 201 bp, Homo sapiens
cctgacctgccctactccagagcagagaatgaggtcgggcgtgccaaaggctggggacaaagagggccatgcgtggggggatcggtgtatggggtgacagrgagctgttcctgaccatttgacatgtgctggaatgcgtgtgcgactcacctgcgtgtggctgcagtcacgtgtgatttatgaccaagtgcaactctccac

SEQ ID NO: 348276 - DNA, 201 bp, Homo sapiens
atgactttggggcctggatgcccaatgctccatcatccatgaggcagcccccaccccagaccaaggggaccaccaccctgaagacttacctagacaccctmcctgaagtgaacatcagctgtaacaacctcctcctcttctggttggttagccaagaacccaaggaccaggtgtgtatacgggatgttgaggggagtaggg

SEQ ID NO: 348277 - DNA, 201 bp, Homo sapiens
gacctgccctactccagagcagagaatgaggtcgggcgtgccaaaggctggggacaaagagggccatgcgtggggggatcggtgtatggggtgacagggarctgttcctgaccatttgacatgtgctggaatgcgtgtgcgactcacctgcgtgtggctgcagtcacgtgtgatttatgaccaagtgcaactctccactgt

SEQ ID NO: 348278 - DNA, 201 bp, Homo sapiens; identical to SEQ ID NO: 74001

SEQ ID NO: 348279 - DNA, 201 bp, Homo sapiens
tgctggaattacaggtgtgagccaccgcgcacggccgccaatcaagacttttaagcctgaggcccaatggttaaatctgctttagctagggtgctcctgtrgctgcgtgaatggatgcaaagggcaactttggaggcaggaggctagagaggggccaatatctgagtttaggccaggcaagtagccctttatcactggttc

SEQ ID NO: 348280 - DNA, 201 bp, Homo sapiens; identical to SEQ ID NO: 74007

SEQ ID NO: 348281 - DNA, 201 bp, Homo sapiens
gatctccatgggctagtcaggcttggcagctggggctctgtcctgtaggcagaggggagccagtggaggtctgtgacaagagggcagcttggagaatacasgccaaaacaccagtgagggtggcttgtctgcaccatagggccgtgtgtgccaactttatgtgcaagtgcaatgacctgtcttagggatggctgcatatga

SEQ ID NO: 348282 - DNA, 201 bp, Homo sapiens
taggctttgaatccagtgtcatatttctgtcttctgctgtgttttctctttctttctctggtgtgtgtgtgtgttctgtttttttgatggctatactacarttttagaaatcaagtattaagccaggtgcaatggcacaggcctgtagtcccagctactcaggaggccgcagagagaggattcctagaggctaggagttca

SEQ ID NO: 348283 - DNA, 201 bp, Homo sapiens
aaacatgccaacaattgggaagattgctataatttgggggtgaagctgtcttgaatcccttctactgatgaatacacaaagaacgtgggggcaccgccacrtgtttcacagggatgtggctgtcggattgggttcaagggtcagggggttcaggcaaggtttgcagaagatgttgttggaaaagagacttataccaagagt

SEQ ID NO: 348284 - DNA, 201 bp, Homo sapiens
cttctactgatgaatacacaaagaacgtgggggcaccgccacgtgtttcacagggatgtggctgtcggattgggttcaagggtcagggggttcaggcaagrtttgcagaagatgttgttggaaaagagacttataccaagagtaattttcattccccacagcaagaactatttgtcaggactctcttcccctcctcctgga

SEQ ID NO: 348285 - DNA, 201 bp, Homo sapiens
ggcccacttcacctacaccaatttctgccttccggacagcctgcgggcccgcggcgtcctggctatccccaactaccactaccgagacgacggcctgaagrtctgggcggccattgagaggtgcgaggtgcggggcgggaccagcagtcccaccagggtctcctggcctgggacattgtggtccctgcgctcatggcgcct

SEQ ID NO: 348286 - DNA, 201 bp, Homo sapiens
tggcgcctggggatttcaggtgttttcacaccctagcatagggaattcttgagggtatgaattgagtttggggtcccttctgaaatggcaggtagctgccrtccagagaggggcttgggggtgtgtggatgcaggggaaggagggggtgtccagtggagtcagagtatcagggctggtgcatcatttaagcatgggctggg

SEQ ID NO: 348287 - DNA, 201 bp, Homo sapiens
gagttttgattagaagtatatttcaggctgggtgtagtggctcacgcctgtaatctcagcactttgggaggctgaggcaggtggatcacctgaggttgggmgttcaagaccagcctggccaacatggtgaaacctcatctctcctaaaaataagaaaattagccaggcatggtggtggctacctgtaatcccagctactcg

SEQ ID NO: 348288 - DNA, 201 bp, Homo sapiens
agggtggcctaatttgacttctttccccatctttatcctgacctcagtcttaatcagattgttcctaactctaacctcattctcaaccttgggtgcctagyttggatcaggactcttatttggacctaaccccactttaatagtgaccctgaatctgaactgagaacaccaatagtaacagttgtcccaacaccaccaatg

SEQ ID NO: 348289 - DNA, 201 bp, Homo sapiens; identical to SEQ ID NO: 74010

SEQ ID NO: 348290 - DNA, 201 bp, Homo sapiens
ccaatagcctcctcctttcagctgggtcccgcctccttatacagccttatggtctgtaaaccagccagtgcccccattcacccctcacttcccgcactccmaggccagtttctctccttcccctccccccttcactcctcctctttccgggagcctcgtgccgggtcctagaggggcagaatctggatgtcgaagggggcg

SEQ ID NO: 348291 - DNA, 201 bp, Homo sapiens; identical to SEQ ID NO: 74012

SEQ ID NO: 348292 - DNA, 201 bp, Homo sapiens
tgattttaatctcaacacaaacccatctctaacccagtgtgggcattaatgccatccttaaatgctaccctatgtgaagccagtgctttcatggagaaatrtccaattccttgtcactcatccagaaagtaggtggtttttgaagttttaatctgaagccgtgtctttaaagctaagacttgtgtttatcccgagcatgac

SEQ ID NO: 348293 - DNA, 201 bp, Homo sapiens
aagctgcaattctggaggaactctgaatttcatccccaagcgagctctgccccaatagcctcctcctttcagctgggtcccgcctccttatacagccttayggtctgtaaaccagccagtgcccccattcacccctcacttcccgcactccaaggccagtttctctccttcccctccccccttcactcctcctctttccgg

SEQ ID NO: 348294 - DNA, 201 bp, Homo sapiens
ctgccactcagctgtgcaagtcactccatctctctgacccttagtgtctagtattaaattgaagatataatgattcctacctcatagagtttttgggaagraaacctaaaccacaatgataagcaaaggacttggcaggactaggatctagggaagtagtttctagaccaactggtcccctctcttgtatcccagagtatg

SEQ ID NO: 348295 - DNA, 201 bp, Homo sapiens
ccacagagcctccaccgggtactagactttttctcccatgtggattgttaggcatctctactctggggatggaccccgtcagttcctccaggcagaggggsacacagtgattcccagcagactctagcccccagacctcaccctcatcttttcctctcccatcaggtccttgggaatgaagcttcgagggctgttggatcg

SEQ ID NO: 348296 - DNA, 201 bp, Homo sapiens
agagaggggcttgggggtgtgtggatgcaggggaaggagggggtgtccagtggagtcagagtatcagggctggtgcatcatttaagcatgggctggggccwgtggcaggcaggtcttccttcctcctgggtggggaggggggtggcagcatgaatcagactcttcgtgcactcccctgcccaccccccaggcccctgtgca

SEQ ID NO: 348297 - DNA, 201 bp, Homo sapiens
tgggcagtgggcctgataggtgggaggtgggtgtgtcaccattatggacaagggatgtgtgtggagggtatggaaatggcctgggctgcatttcacctgtrggcctcatcctctgggcagccatggtcctgcacactttaagtagagcagatacggatgagggtcagactggggttgggaggctttgaggcctgagatggg

SEQ ID NO: 348298 - DNA, 201 bp, Homo sapiens
ggtgtgtggatgcaggggaaggagggggtgtccagtggagtcagagtatcagggctggtgcatcatttaagcatgggctggggcctgtggcaggcaggtcytccttcctcctgggtggggaggggggtggcagcatgaatcagactcttcgtgcactcccctgcccaccccccaggcccctgtgcaggaaggaagtgtgga

SEQ ID NO: 348299 - DNA, 201 bp, Homo sapiens
agccacctctcccggcccggggaagctttttctaattcatacaaaagcccggtatgggctgggagcagctcaggtttgtatgcccgaataggcttaggtgkagatgcatcttgcaaggcgcaaggaccgccttggcagttccccgcctctcacctgcttgctgtcttggtcccctcaggtacagaagtacaaggtgcgttg

SEQ ID NO: 348300 - DNA, 201 bp, Homo sapiens
gtgtcctttgggattaggagtggggtctcacagagccccagagtatagggaataagattgaggtcagaaactctgggctcccaagtagatgttttctgaawaaagggagcctctcaagccctgaaatgcgagggttttgcagacggtattgactcttctggagactcacatagacacatacactcatataggcaggcaccc

SEQ ID NO: 348301 - DNA, 201 bp, Homo sapiens
cagaaaatgataatcccaaaagacatagactgaagcaaataccagtttagttaccaatctgtccgtccatccatttatccgaatgttcattcatcaactastcatgtgttaatgcaaacattcaataaacatttgttggatacttcctatgtgtccacacagcactgggcaccaggcctataacgctggctgagaccttcc

SEQ ID NO: 348302 - DNA, 201 bp, Homo sapiens
ctcacagagccccagagtatagggaataagattgaggtcagaaactctgggctcccaagtagatgttttctgaaaaaagggagcctctcaagccctgaaawgcgagggttttgcagacggtattgactcttctggagactcacatagacacatacactcatataggcaggcacccttctctcatacacataggaagcactt

SEQ ID NO: 348303 - DNA, 201 bp, Homo sapiens
agacttttaagcctgaggcccaatggttaaatctgctttagctagggtgctcctgtggctgcgtgaatggatgcaaagggcaactttggaggcaggaggcwagagaggggccaatatctgagtttaggccaggcaagtagccctttatcactggttcccatcatctttgtttccacccagccgtcttgcacacaagctctc

SEQ ID NO: 348304 - DNA, 201 bp, Homo sapiens
gatgagatgagtgaggcacagcatgaatggaccaagggctgagccttggagctctcccctctccaatcctgaaatgcttttctctgttgtcttttttccaytggaggctcatccatctttcaactcacaaggcccctcttgtcctccaggaggcctccactaaccactctgctcctggtgcccctttctgccctgcttgcc

SEQ ID NO: 348305 - DNA, 201 bp, Homo sapiens
aaagggaaaacacacaagttaacctccacctcccggttcaagcgattctcctgtctcagcctcccgagtagctgggactacagtcgcacactaccacgccyggataatttttgtatttttagtagagatggggtttctttcaccatttcggtcaggttccatattccaatgggggaaaaataggcaatatgaactacagaa

SEQ ID NO: 348306 - DNA, 201 bp, Homo sapiens
gagaggtgctagttctgaagataattggggcaagagtagcaggcagaggtatagtaagtgtgcaggccctgaattctgaatgtgctggtgcatttgagaastatcaggaaggcctgcacagctggagtcgaataagtgaacagccaggaaggaaatgaagtgggagaaggggctggggcccaatcaagtagggccatgaca

SEQ ID NO: 348307 - DNA, 201 bp, Homo sapiens
gcaagagtagcaggcagaggtatagtaagtgtgcaggccctgaattctgaatgtgctggtgcatttgagaactatcaggaaggcctgcacagctggagtcraataagtgaacagccaggaaggaaatgaagtgggagaaggggctggggcccaatcaagtagggccatgacaaggtgagtgagatgggaagccctccgagg

SEQ ID NO: 348308 - DNA, 201 bp, Homo sapiens
agaaagaaaagaaaaaaagaaattagatgtcaatctgattttaaaaacataaaacttgttatttcaaaaaaaaccacaatacaataaaataaaaaaactayagacatatttcttttttcttaagattctctggatcagaaatttgggcagggctaggctgggcagtccagagggtactggctagggtgaaacacttgcatg

SEQ ID NO: 348309 - DNA, 201 bp, Homo sapiens
cacactggtgggcacgtgtggtgaaagccccaagcagcggctagatcgaatgggcagggacttcgcccctggatcggtgagtacaaaggagacagggaagmgcgacctcagaggggcaggggccgcaggcgggaggagtattcctcctggactcttgagatcctgctgaactcaggataccggccctgacctcctcacctt

SEQ ID NO: 348310 - DNA, 201 bp, Homo sapiens
gactgagaagtggaatagtgagtattttgtgaagcctcagagtctgggtaattgttaacgttgccaccgaaatccagttctcctcctggacacatggaagkctcagcctctggccctcttgtggatgggtacagtcacaggatgagttttggttgagttgggagcagaagggatgaggatcgtctccaggccacacggaga

SEQ ID NO: 348311 - DNA, 201 bp, Homo sapiens
ggggaaggagggggtgtccagtggagtcagagtatcagggctggtgcatcatttaagcatgggctggggcctgtggcaggcaggtcttccttcctcctggstggggaggggggtggcagcatgaatcagactcttcgtgcactcccctgcccaccccccaggcccctgtgcaggaaggaagtgtggagcacccatggctca

SEQ ID NO: 348312 - DNA, 201 bp, Homo sapiens
tattgaaattctggggcggccaactgtcccattacatcccagcccaagaatcttctctgttgtcaaccaaaccacttctccctttgctcgcgcgcgcgcgygtgtgtgtgtgtgtgtgctgtgtgtgtgttggggaaggctgtctttggctgttgaattttcactttctgcatctgtgatccttggagaagaggatcctca

SEQ ID NO: 348313 - DNA, 201 bp, Homo sapiens
tcttcttcgccacccctcgggtctgtaagtttcacgcctggttctgtaaatttcgctcccggggtcggtcagtttcaccctttgggtctctaagtgtccgsttccccctcccccacagccagcctctgatgagccagcctctgttatgtcgggtggttaatttcattccctgggttgcggtttcaaatctcctcctcacgc

SEQ ID NO: 348314 - DNA, 201 bp, Homo sapiens
tcatagagtttttgggaagaaaacctaaaccacaatgataagcaaaggacttggcaggactaggatctagggaagtagtttctagaccaactggtcccctytcttgtatcccagagtatgtcacagagcactggtgtgaagatcacttctttgggtaccagtacctgaatggtgtcaatcccgtcatgctccactgcatct

SEQ ID NO: 348315 - DNA, 201 bp, Homo sapiens
aaggcgggttccgagccagctccgactgtctccaaagccattgctgcatccactgctctgtgcccctctggtcccttgacctttccacaagcccacccatkcatttcagcttcctgagctctgtcaatattctgcaacgtgcagtgggagccatctctgacttcagaggattctgggaactttctctcaaaccctccttcc

SEQ ID NO: 348316 - DNA, 201 bp, Homo sapiens
cctgccactttccccctttctccccacccctttctgtctctgcgccctcccctcccgtctgtagaacctccggaacccgaagctggagaaagcggagataytggagttcgccgtgggctacttgagggagcgaagccgggtggagcccccgggtacagcgcgggggtggggcagcggagggagggaggggggacgccagga

SEQ ID NO: 348317 - DNA, 201 bp, Homo sapiens
aagggcggggtaccccactttggccattaattcaggcaccaagaatttctgagacctcagctgggggcctcagctcctctctggggtggaagtgggcaggsaaatgggagggaagtggagcgcgagtagggagggacactcagcctctgtgtgccttctgcagagggggaacatcttcctagcggactactggatcctggc

SEQ ID NO: 348318 - DNA, 201 bp, Homo sapiens
ctgagttgagagtgggaaggactaggtatgaggtgaggaggagaggacgctggcttgtctcagcaggcgagctgttgcacaaggagggactcagctggacytcattccggacattttgggaagggcggggtaccccactttggccattaattcaggcaccaagaatttctgagacctcagctgggggcctcagctcctctc

SEQ ID NO: 348319 - DNA, 201 bp, Homo sapiens
tatagggaataagattgaggtcagaaactctgggctcccaagtagatgttttctgaaaaaagggagcctctcaagccctgaaatgcgagggttttgcagayggtattgactcttctggagactcacatagacacatacactcatataggcaggcacccttctctcatacacataggaagcactttgctttccacagcctcc

SEQ ID NO: 348320 - DNA, 201 bp, Homo sapiens
tttgcagacggtattgactcttctggagactcacatagacacatacactcatataggcaggcacccttctctcatacacataggaagcactttgctttccwcagcctccctctgcacttctccagagtgagttcctccagaccccagagaggaactaacctgcaccctgagtcattagattttaacaggtagagaagccct

SEQ ID NO: 348321 - DNA, 201 bp, Homo sapiens
aggtagagaagccctggctgctcagagattttagctggagaggccccattccctcccctactactagcttttctagtgtggatgaagtccctgagaggtgytgctaggattccttgttgaatttctggggccttctgcagatgctgggcttgagcatcttcagtttccagagctatctgatctggagaggcaacagtaggg

SEQ ID NO: 348322 - DNA, 201 bp, Homo sapiens
tgtgcaggccctgaattctgaatgtgctggtgcatttgagaactatcaggaaggcctgcacagctggagtcgaataagtgaacagccaggaaggaaatgawgtgggagaaggggctggggcccaatcaagtagggccatgacaaggtgagtgagatgggaagccctccgagggttttagcgaggggtgacgtaatctgacg

SEQ ID NO: 348323 - DNA, 201 bp, Homo sapiens
atgagtgaggcacagcatgaatggaccaagggctgagccttggagctctcccctctccaatcctgaaatgcttttctctgttgtcttttttccattggagsctcatccatctttcaactcacaaggcccctcttgtcctccaggaggcctccactaaccactctgctcctggtgcccctttctgccctgcttgccctctcc

SEQ ID NO: 348324 - DNA, 201 bp, Homo sapiens
agctgcctctgtcattggccctgcctgccggggattttctggccagatcccagcccccatctcctatcctgacccacttcagagaccacaaatcttggtgrtggccatccctaaccagcccgacaagacagtcatggctcggtgttccctacttcctcactttccccctgtggtgagccccagtcctgagctggccctagg

SEQ ID NO: 348325 - DNA, 201 bp, Homo sapiens
tacatcctaataggggctgcagattgaagtgccttggaagtcagggagaggcagctgggcacttgggcttgaagctgcctctgtcattggccctgcctgcyggggattttctggccagatcccagcccccatctcctatcctgacccacttcagagaccacaaatcttggtggtggccatccctaaccagcccgacaagac

SEQ ID NO: 348326 - DNA, 201 bp, Homo sapiens
attttctggccagatcccagcccccatctcctatcctgacccacttcagagaccacaaatcttggtggtggccatccctaaccagcccgacaagacagtcrtggctcggtgttccctacttcctcactttccccctgtggtgagccccagtcctgagctggccctaggaatccagtaccttccatccacaccctctaccct

SEQ ID NO: 348327 - DNA, 201 bp, Homo sapiens
tgcaccccaggagagatggtgaagttcctcactgcaatcatcttcaattgctctgcccagcacgctgctgtcaacagtgggcaggtgaggctacaaagggmaggcctggggacatcaggtctcagcaatggacttgaggcctgaatttgggttgagagcttgggtgggtcagcgttggggtgggtttatgattagacttgg

SEQ ID NO: 348328 - DNA, 201 bp, Homo sapiens
caggcaatgctccataaaggactttgcttctgagctgtgcctagaagagatagatttttatcatagagatggagtagatggctttctaccagaggtgaagmttaaatgaagacctggaagtgggggaaagccattttaatttcaagcatgcttctccatattataaaataatgttgcaggtcatggtggggcacatctgct

SEQ ID NO: 348329 - DNA, 201 bp, Homo sapiens
ccttttctcgctggtcgcagatgctcaagccgcttgtggagaagcggcgccgggaccgcatcaaccgcagcctggaagagctgaggctgctgctgctggarcggacccgggaccaggtcagtccctccgctagccctaggtccccaagcttcccgtttccgcgtcccagggcttcccactggggtggggacacaagcttgg

SEQ ID NO: 348330 - DNA, 201 bp, Homo sapiens
cacgctgcaggtgaacaccatcgcgagggccacgctgctcaaccccgagggcctcgtggaccaggtgcggcctccctgccgggtcactgatctccgccccsgaagacgctttgccccgctacccgcccccaagccctgttctgcgcccaagccccttgtgaggacacctggggtgtgagaacacctgtacaatcactgcct

SEQ ID NO: 348331 - DNA, 201 bp, Homo sapiens
aaaattgacatcccatccctgatgtacatggagcccaatgttcgatactcagccaccaagacgatctcgctgctcttcaatgccatccctgcgtaaggccrttgtccctctaatgaacatcttacatctctgcccatccatccccctccccgtgctcccagactgccccttctccctattcccagtatcccctctccctgc

SEQ ID NO: 348332 - DNA, 201 bp, Homo sapiens
caccttctctgaggaggggacaaaaacaggggattcaggagagagagacactctgcttgcctgggagagggtcacagtcatttagggaatcttgatcctcmtcagggacacacgactctcttcccctactccaaccaccaagtgctccgggctttgggtccagaaaggcttaggttctcaaatccctgctctgccactcag

SEQ ID NO: 348333 - DNA, 201 bp, Homo sapiens; identical to SEQ ID NO: 74006

SEQ ID NO: 348334 - DNA, 201 bp, Homo sapiens
cccagtcctgagctggccctaggaatccagtaccttccatccacaccctctacccttcctccccacacccaggtttcccaagccggctgtgcaccccaggagagatggtgaagttcctcactgcaatcatcttcaattgctctgcccagcacgctgctgtcaacagtgggcaggtgaggctacaaagggcaggcctgggga

SEQ ID NO: 348335 - DNA, 201 bp, Homo sapiens
tgggttcttcaatttcttcagaaaatgataatcccaaaagacatagactgaagcaaataccagtttagttaccaatctgtccgtccatccatttatccgamtgttcattcatcaactactcatgtgttaatgcaaacattcaataaacatttgttggatacttcctatgtgtccacacagcactgggcaccaggcctataa

SEQ ID NO: 348336 - DNA, 201 bp, Homo sapiens
ttcatcaactactcatgtgttaatgcaaacattcaataaacatttgttggatacttcctatgtgtccacacagcactgggcaccaggcctataacgctggmtgagaccttcctgccttcaagaagcctgtggtctagttgaggagacatacaggtcaatgaaaaagggcaccaccgtgttgtaggagttacttatatgtta

SEQ ID NO: 348337 - DNA, 201 bp, Homo sapiens
ttggacagagaggaagagcagggctcttttttagggagggggaagaacaggaccaaggagcgaaggcgagaaatcactggtgtgtttgtaggatcacaaayggaaatagcagagcggagaggaaggtagggctttgtctgcacagtgttcgtttagaagacaaagggtagccaatcaaggcttcccccacccccccacatg

SEQ ID NO: 348338 - DNA, 201 bp, Homo sapiens
agcagggctcttttttagggagggggaagaacaggaccaaggagcgaaggcgagaaatcactggtgtgtttgtaggatcacaaatggaaatagcagagcgragaggaaggtagggctttgtctgcacagtgttcgtttagaagacaaagggtagccaatcaaggcttcccccacccccccacatggagtcttgctctgtca

SEQ ID NO: 348339 - DNA, 201 bp, Homo sapiens
ctagggtgaaacacttgcatgcaatcagctggtgactgggctgtgctggaagttcccagaaggctttgctcacatgtctggggcctcagtgcacctgtgtrgtttttctctctctccatatgctgtcttatcccccaggactctccaaggggtctctccccagcaggatagctggacttcctcatagcacggtggctggct

SEQ ID NO: 348340 - DNA, 201 bp, Homo sapiens
cccagatcccggacacctgggctcccgcccaggatcctgcaggcccagggcggtcctggagcggaaagaatgccacgcggggcattcagaccctgtttgcyggcgctgtatttcgctttcctgacctgccctactccagagcagagaatgaggtcgggcgtgccaaaggctggggacaaagagggccatgcgtggggggat

SEQ ID NO: 348341 - DNA, 201 bp, Homo sapiens
ctggggccacctccttccctagtgactcaccccaccgagtcctggaacactgggcggggagtgacaaggagtaagctggcttcctgccccacttctgggartttccactccctaccctttcctctcttgcctttccatgatcccctcatttcccagctctcttgcctttccgtgatcccctcatttcccaactatcacctc

SEQ ID NO: 348342 - DNA, 201 bp, Homo sapiens; identical to SEQ ID NO: 74011

SEQ ID NO: 348343 - DNA, 201 bp, Homo sapiens
ctcagagattttagctggagaggccccattccctcccctactactagcttttctagtgtggatgaagtccctgagaggtgctgctaggattccttgttgamtttctggggccttctgcagatgctgggcttgagcatcttcagtttccagagctatctgatctggagaggcaacagtagggctgctctgggtgttgggagg

SEQ ID NO: 348344 - DNA, 201 bp, Homo sapiens
gggcttgagcatcttcagtttccagagctatctgatctggagaggcaacagtagggctgctctgggtgttgggaggaggctcaggatgaaggagggatatyctaggtcaaagtgaggcaaatgaatattaccccatggtccgtaataagttttccatagacctcactataaactctcatccatctccacagcacatccatc

SEQ ID NO: 348345 - DNA, 201 bp, Homo sapiens
cccctccctgttccctcaccctgttaataccccatgccttcctactctggctttttttttttttttttttttttgaggcggggtctcactttgatgctcaractggagtgcagtggtgtgatcacagctcactgcagccttgacctcccaggctcaagtgatcctcatgcctcagcctccctggtagctgggactacaggc

SEQ ID NO: 348346 - DNA, 201 bp, Homo sapiens
cctccaggcagaggggcacacagtgattcccagcagactctagcccccagacctcaccctcatcttttcctctcccatcaggtccttgggaatgaagcttygagggctgttggatcgcaagggctcctggaagaagctggatgacatgcagaacatcttctggtgccataagaccttcacgacaagtgagcagagccaggc

SEQ ID NO: 348347 - DNA, 201 bp, Homo sapiens
agaggcaacagtagggctgctctgggtgttgggaggaggctcaggatgaaggagggatattctaggtcaaagtgaggcaaatgaatattaccccatggtcygtaataagttttccatagacctcactataaactctcatccatctccacagcacatccatccatagcttcacaaaatatatttgttcatcagtcatttaaa

SEQ ID NO: 348348 - DNA, 201 bp, Homo sapiens
ttcctttcggacgcagctcagccagacccccgggcctgacagccccatcttcctgcccactgactccgaatgggactggctgctggccaagacgtgggtgmgcaactctgagttcctggtgcacgaaaacaacacgcactttctgtgcacgcatttgctgtgcgaggccttcgccatggccacgctgcgccagctgccgct

SEQ ID NO: 348349 - DNA, 201 bp, Homo sapiens
cagatacggatgagggtcagactggggttgggaggctttgaggcctgagatggggcctggtgaaatggtgtgaacgcgcagggtggctgcagggacatctytgaggaaggcttgcccttgttttgaggcctcctgaagaggtgctgaggcctagaggaaagctgttttaggacaggccaatggtagggccaccagatgcat

SEQ ID NO: 348350 - DNA, 201 bp, Homo sapiens
gtccatcgggaggcaaggcctcatctacctcatgagcacgggcctggcccacttcacctacaccaatttctgccttccggacagcctgcgggcccgcggcktcctggctatccccaactaccactaccgagacgacggcctgaagatctgggcggccattgagaggtgcgaggtgcggggcgggaccagcagtcccaccag

SEQ ID NO: 348351 - DNA, 201 bp, Homo sapiens
ggcttgcccttgttttgaggcctcctgaagaggtgctgaggcctagaggaaagctgttttaggacaggccaatggtagggccaccagatgcatcagggaaratcacggagaactaggagctctgaggttgtcggagacgaggctaacccagtctttttggggcagtcaagccctcaggcattctcctccagaaagctagag

SEQ ID NO: 348352 - DNA, 201 bp, Homo sapiens
catttagctgttgctggatacatagtgctcagatgtcagaaggggattccatctgagttgagagtgggaaggactaggtatgaggtgaggaggagaggackctggcttgtctcagcaggcgagctgttgcacaaggagggactcagctggacctcattccggacattttgggaagggcggggtaccccactttggccatta

SEQ ID NO: 348353 - DNA, 201 bp, Homo sapiens; identical to SEQ ID NO: 167113

SEQ ID NO: 348354 - DNA, 201 bp, Homo sapiens
actccctaccctttcctctcttgcctttccatgatcccctcatttcccagctctcttgcctttccgtgatcccctcatttcccaactatcacctctaggayggcagaggtggaatcagggatggtgaagagggaggtgatactccccttctggccaactgacccaactgggatgggggtctccacagcatgactttggggc

SEQ ID NO: 348355 - DNA, 201 bp, Homo sapiens
tgctgtcaacagtgggcaggtgaggctacaaagggcaggcctggggacatcaggtctcagcaatggacttgaggcctgaatttgggttgagagcttgggtrggtcagcgttggggtgggtttatgattagacttggggttggagtggcagctgagtggggtgaagggttggcattgggtgatgactgggtggagctgggtc

SEQ ID NO: 348356 - DNA, 201 bp, Homo sapiens; identical to SEQ ID NO: 74008

SEQ ID NO: 348357 - DNA, 201 bp, Homo sapiens
gaggtaagagaatcacttaaacccgggaggcagaggttgcagtgagctgagatggtaccactgaactccagcctgggcaacaagagtgaagttccatctcaaaaaaaaaaaacaaaaaaaaagcagcttggcaccgtgctggcatataaatgttcaataaatggtagttccacttcacaggggagaaaactgaggttcagg

SEQ ID NO: 348358 - DNA, 201 bp, Homo sapiens
atgagctagcacttgcttggccacaccctactcccatcagttatttattgaccagcctttgaagtagatactattaatatccccaactagcagatatggaragaggcacaaagaaggctgtgcaaggcgggttccgagccagctccgactgtctccaaagccattgctgcatccactgctctgtgcccctctggtcccttg

SEQ ID NO: 348359 - DNA, 201 bp, Homo sapiens
aggctggagtgtggaggcacaatctcggcttactgcaacctccacctcctgggttcaagagattctgctgcctcagtctcccgagtagctaggattacagscgtctgccaccacatctggctaatttttgtatttttagtagagatgcagttttgccatgttggacaggctggtcttgaactcctgacctcaggtgatctg

SEQ ID NO: 348360 - DNA, 201 bp, Homo sapiens; identical to SEQ ID NO: 74009

SEQ ID NO: 348361 - DNA, 201 bp, Homo sapiens
ctggagtgcagtgacatgatcatggctcactgcatcctcaaactcctgggctcaagaaattctctcaccccagcctctcctgtagctgaggccacaggcaycaccacgcctggctaattttttgatttttggtagagacagggtcttgttatattgcccaggctggtcttgaactcctgggctaaagtgatcctcctgcct

SEQ ID NO: 348362 - DNA, 201 bp, Homo sapiens
gtgttgggaggaggctcaggatgaaggagggatattctaggtcaaagtgaggcaaatgaatattaccccatggtccgtaataagttttccatagacctcaytataaactctcatccatctccacagcacatccatccatagcttcacaaaatatatttgttcatcagtcatttaaagtgcatcttatacacatggtgccag

SEQ ID NO: 348363 - DNA, 201 bp, Homo sapiens
aaattctctcaccccagcctctcctgtagctgaggccacaggcaccaccacgcctggctaattttttgatttttggtagagacagggtcttgttatattgcccaggctggtcttgaactcctgggctaaagtgatcctcctgccttagcctcccaatgtgctgggattataggtgtgagccactgcatctggcctagacaa

SEQ ID NO: 348364 - DNA, 201 bp, Homo sapiens
tgcaccatcacacctggctaattttgtacttttagtagagatggggtttctccatgttagtcaggctggtctcgaactcctgacctcaggtgatccacccrtctcaggcttccaaagtgctgggattacaggcgtgagcctccgcgcccggctggtagtactcttaagaagggcagtgggtctcattggaaggctctagtc

SEQ ID NO: 348365 - DNA, 201 bp, Homo sapiens
taccttagaaccaggatgctggttgtttttaggagttgaattttgtgaaattatgaagtaattgttatattcttgggtatatttcctgggcagtgtttackttgatctcggttgtatgaaaggtgtggttcgttcttttagttcacagagcagttggatcaggtatgaaagggacctttaaaggtctaggccaggcacggt

SEQ ID NO: 348366 - DNA, 201 bp, Homo sapiens
atattgaaattctggggcggccaactgtcccattacatcccagcccaagaatcttctctgttgtcaaccaaaccacttctccctttgctcgcgcgcgcgcktgtgtgtgtgtgtgtgtgctgtgtgtgtgttggggaaggctgtctttggctgttgaattttcactttctgcatctgtgatccttggagaagaggatcctc

SEQ ID NO: 348367 - DNA, 201 bp, Homo sapiens; identical to SEQ ID NO: 167119

SEQ ID NO: 348368 - DNA, 201 bp, Homo sapiens
cccactgactccgaatgggactggctgctggccaagacgtgggtgcgcaactctgagttcctggtgcacgaaaacaacacgcactttctgtgcacgcattkgctgtgcgaggccttcgccatggccacgctgcgccagctgccgctctgccaccccatctacaaggtccgcgaccccgggtgggggcccagcggggcaggg

SEQ ID NO: 348369 - DNA, 201 bp, Homo sapiens
gctttctaccagaggtgaagattaaatgaagacctggaagtgggggaaagccattttaatttcaagcatgcttctccatattataaaataatgttgcaggkcatggtggggcacatctgctacttgggaggcactacatggtagtgcctgctacttgggaggttgaggcaggaggattgcttgagcccaggagtttgaagc

SEQ ID NO: 348370 - DNA, 201 bp, Homo sapiens
gccgggtcctagaggggcagaatctggatgtcgaagggggcggggtcgggtcctatccctcctacccttgggccgcggaatataaggctccaggcgagcarggaaccggtccacacagggtccggaggagcaatggtcacccgggatcgagctgagaatagggacggccccaaggtgagaggcgggaggggagggagcaga

SEQ ID NO: 348371 - DNA, 201 bp, Homo sapiens
acctggaagtgggggaaagccattttaatttcaagcatgcttctccatattataaaataatgttgcaggtcatggtggggcacatctgctacttgggaggyactacatggtagtgcctgctacttgggaggttgaggcaggaggattgcttgagcccaggagtttgaagctgcagtgagctatgattgtgtctctaaacag

SEQ ID NO: 348372 - DNA, 201 bp, Homo sapiens
aaccccagcactttcagagaccaaggctggaggattgtttgaagccaggagttcaagaccacccttgccaacataatgagacccccatctgtatatatataaaaaaatcagggccgggtgtggtgctcgcacctgtaatcccagcactttgggaggccaaggagggcgaatcacaaggtcagaagttcgagaccagcctgc

SEQ ID NO: 348373 - DNA, 201 bp, Homo sapiens
ccccatctgtatatatataaaaaaatcagggccgggtgtggtgctcgcacctgtaatcccagcactttgggaggccaaggagggcgaatcacaaggtcagragttcgagaccagcctgcctaatatggcgataccccgtctctactaaaaatacaaaaattagccgggcgtggtggcaggcgcctgtagtcccagctactc

SEQ ID NO: 348374 - DNA, 201 bp, Homo sapiens
aggagggcgaatcacaaggtcagaagttcgagaccagcctgcctaatatggcgataccccgtctctactaaaaatacaaaaattagccgggcgtggtggcrggcgcctgtagtcccagctactcgggaggccgaggcaggagaatcgcttgaacccgggaggcagaggttgtagtgagccaagatcgcaccactgcactcc

SEQ ID NO: 348375 - DNA, 201 bp, Homo sapiens
cttgaacccgggaggcagaggttgtagtgagccaagatcgcaccactgcactccagcctggtgacagagcgagactccgtctaaaaaaaaaaaaaaaaaacaactaacgtctaatatggggtggtggtagaggagaaaaatttctgatatctattctagaagtgcaacttcattgaaaacacaagacataagaacactcaa

SEQ ID NO: 348376 - DNA, 201 bp, Homo sapiens
ggttgtgcaatttaactgatttcttattgactaggttattttataattttgtaggaaatgaagtaaaattgtaaaaaaaatctgatggtaaggcaaattctttttttttttttttttttttgagacagagtctcgctctgtcacctaggctggagtgcagtggcatgatctctgctcactgcaagctccgcctcccgggtt

SEQ ID NO: 348377 - DNA, 201 bp, Homo sapiens
gtggcatgatctctgctcactgcaagctccgcctcccgggttcacgccattctcctgcctcagcctcccgagtagctgggactacaggcgcctgccagcaygcctggctaattttttttttgtatttttagtagagacagggtttcaccgtgttagccaggatggtctcgatctcctgacctcgtgatctgctggcctcag

SEQ ID NO: 348378 - DNA, 201 bp, Homo sapiens
gtgcccgccactacgcccggctaattttttgtattttttagtagagacggggtttcaccgttttagccgggatggtctcgatctcctgacctcgtgatccrcccgcctcggcctcccaaagtgctgggattacaggcgtgagccaccgcgcccggccgaaatgtttttgataaacatccttcatgtaaccccctcagcact

SEQ ID NO: 348379 - DNA, 201 bp, Homo sapiens
taataatcctacaatagcctctaagtgttcaagtgaaaggaagagtcgcacgactctcactttaaatcaaaagctacaaatgattaagcttagtgaggaasgcatgtcgaaagctgagatcggccaaaagctatgcctcttgtgccagttagtcaagttgtgaatgcaggggaaaagctgttgaaggatgttgaaagtgtc

SEQ ID NO: 348380 - DNA, 201 bp, Homo sapiens
caagatagatgaaaggagcgagggaatgcaggcaggaaggacaagaagaaatagagtaatccaggtctttgttaattccacttatttattttattattaaragatggggccttacaatgttgcccaggctggactcaaactcctgggctcaagaaatcctcctgtcaggccgggcgtggtggctcacgcctgtaatcccag

SEQ ID NO: 348381 - DNA, 201 bp, Homo sapiens
tgaaggaaggaaacatgcaatcacaaacaatgaacaactctaaagacaaaaaggtttggtccaaaagaactcaacataattaatccaatgactgtgaagarcttcactgagtaggattaagatattgcagatgtagtgtttccacagggtggctcttcagtgcaccagcggggcctgcttgagggagatgaggactgagcg

SEQ ID NO: 348382 - DNA, 201 bp, Homo sapiens
ttcttgaaactctaagtgccttggccgttgatcttggcgggacgaacctccgagttgcaatagtcagcatgaaggtaaaataactcctaaactcctaactytatatcccatatgagcgattgattttttttttaagtatatatagttggaaggtaagactagaaacatacacaagagcttgtaatcatttgctgatagtat

SEQ ID NO: 348383 - DNA, 201 bp, Homo sapiens
ttgaaataatcttaacatcttaccagtgccctcattaattgaattgaataaaatatttgacctgtgttcattgtatatttgcacaaaactatgttttcgattttttttttttttttttttttgagacagcgtcttactctgtcacccaggctggaatgcagtggcacaatcttggctcactgcagcctcaacttcccaggc

SEQ ID NO: 348384 - DNA, 201 bp, Homo sapiens
gcacaggttgaggctactcttgggaagcttccctccccttcctcttcctcctctccctcctctctgaatgccagggagaacacagttgaaggaaggaaacrtgcaatcacaaacaatgaacaactctaaagacaaaaaggtttggtccaaaagaactcaacataattaatccaatgactgtgaagagcttcactgagtagg

SEQ ID NO: 348385 - DNA, 201 bp, Homo sapiens
taaaagggcgtatcataaaaagggtggacaattcagtaaacatgtgaatgaaaggacaaccagcaagattaaagtcataaacaagaaaaactggtgccagwgcttgggcacagcttaattacataggcacagcttgaaggcgtctttgtttctttagacctcagttagcaacagatcttccctcacacacccaccttccac

SEQ ID NO: 348386 - DNA, 201 bp, Homo sapiens; identical to SEQ ID NO: 74043

SEQ ID NO: 348387 - DNA, 201 bp, Homo sapiens
gaggcaggagaattgctcgagcctgggaggcggaggttgcagtgagctgagatcgggcctctgcactccagcttgggtgacaagagtgaaattccatctcaaaaaaaaaaaaaaaaaagacacacaggctgccatggtggctcacactggatcgctggaggctaggagttcaaggccagcctgggtaacataacaagaccc

SEQ ID NO: 348388 - DNA, 201 bp, Homo sapiens
aggcaggagaattgctcgagcctgggaggcggaggttgcagtgagctgagatcgggcctctgcactccagcttgggtgacaagagtgaaattccatctcaaaaaaaaaaaaaaaaaagacacacaggctgccatggtggctcacactggatcgctggaggctaggagttcaaggccagcctgggtaacataacaagacccc

SEQ ID NO: 348389 - DNA, 201 bp, Homo sapiens
ctccggaagtactatcaaccttagagaagttaacttgtccaagatcaatcaactgtaaatggcagagacagaattcaaactaagctctgctgacttcaaakcttgctcctttcactgtcttccagccgagtagaagagagcggtcagtgtatacagcattgttcagcttgggaggggaaggacgagggagtttgcctagga

SEQ ID NO: 348390 - DNA, 201 bp, Homo sapiens
accctggggatgcccgcatggtttccccaagcagccaacttgtttctgttgtcacactgcattccggcagggctgcccaggtcatttgaaggaatctgggmctccagcagcacttgagggtggctctgggaaagcatccttcactctgcagggcgcctgcttgctgaacaggaaagccgggggctttctgaggctgcagtc

SEQ ID NO: 348391 - DNA, 201 bp, Homo sapiens
tcagccccttgagtagctgggactacagacgcatgccactagtttttttaatttttttgtagagacagggtctcattatgttgtccaggctggtcttgagytcctggactcaagtgatcctccaacctcagcctcccgaagtgctaggtttacaggcatgatcagtgacctttgatgttactattgtaattgttttgaggt

SEQ ID NO: 348392 - DNA, 201 bp, Homo sapiens
gtacccaccaccacacccagctaatttttgtatttttagtagagatggggttttgccatgttggccagactggtctcgaactcctgacctcaagtgatacrcctgcctcggcctcccaaagtgctgggattacaagcatgagccactatgcccggtcaccagctgctcttaaccacccctcagggaccttgtgctgctctt

SEQ ID NO: 348393 - DNA, 201 bp, Homo sapiens
tctactcctgatgaagacgctgtggacattgttgaaatgacaacagaggatttagaatattacataacgcagttcataaagcagtggcatggtttgataggattgattccagtattgaaggaagttctactgtgggtaaatgctatcaaatagtatctcatgctacagagaaatctttggtgaaagagtcaatcgatgtag

SEQ ID NO: 348394 - DNA, 201 bp, Homo sapiens
ctactcctgatgaagacgctgtggacattgttgaaatgacaacagaggatttagaatattacataacgcagttcataaagcagtggcatggtttgataggattgattccagtattgaaggaagttctactgtgggtaaatgctatcaaatagtatctcatgctacagagaaatctttggtgaaagagtcaatcgatgtagc

SEQ ID NO: 348395 - DNA, 201 bp, Homo sapiens
tactcctgatgaagacgctgtggacattgttgaaatgacaacagaggatttagaatattacataacgcagttcataaagcagtggcatggtttgataggattgattccagtattgaaggaagttctactgtgggtaaatgctatcaaatagtatctcatgctacagagaaatctttggtgaaagagtcaatcgatgtagca

SEQ ID NO: 348396 - DNA, 201 bp, Homo sapiens
tttcaaaaagattatcttccagttataagtatcttaatcagtacatttgtaagtatctttcaatgttatgctcttgcaaagcttaagctgatacagtttargatattgctgaattattttcagccaatataatctctttttttgagactgagtctcactctgttgcccaggctgcaatgcagtggcacgatctcggctcag

SEQ ID NO: 348397 - DNA, 201 bp, Homo sapiens
ttttctccagattcctggcactttcatcagataaagtggggttccttttactttttgagatctctgtttcataaatacagtttatttccaaaacatgcaawgtttaactattttgtttccttcccttttgaaacatggcatgtagagctgcctgatttgtacttcttttccctcagttatttaactattgactgatcacat

SEQ ID NO: 348398 - DNA, 201 bp, Homo sapiens
gactgtgattattatttcgagacagggtctcactctgttgcccaggctggagtgccgtggtgcgaccactgtagcctcaacctcctgggctcaaacaatcygcccacctcagccccttgagtagctgggactacagacgcatgccactagtttttttaatttttttgtagagacagggtctcattatgttgtccaggctgg

SEQ ID NO: 348399 - DNA, 201 bp, Homo sapiens
actcctgatgaagacgctgtggacattgttgaaatgacaacagaggatttagaatattacataacgcagttcataaagcagtggcatggtttgataggattgattccagtattgaaggaagttctactgtgggtaaatgctatcaaatagtatctcatgctacagagaaatctttggtgaaagagtcaatcgatgtagcaa

SEQ ID NO: 348400 - DNA, 201 bp, Homo sapiens
caccatattgcccatgctggtcttgaactcctgggctaaagcaatccacccgactcagcctcctaaagtgctaggattataggtatgaaccaccacacccrgcttcccacataacttttaatgagaagtttagagcataattgtgttgatccaacattttataagagagtcaaagttaaaggcaaactagtttttaacaca

SEQ ID NO: 348401 - DNA, 201 bp, Homo sapiens
cacataacttttaatgagaagtttagagcataattgtgttgatccaacattttataagagagtcaaagttaaaggcaaactagtttttaacacatttccarttcttctggaatggctgtgccaattaaactttctgaatttctattagtcagggatgactgagcattctctgactcacttcatttcccaagcagccagata

SEQ ID NO: 348402 - DNA, 201 bp, Homo sapiens
ttaaaaagaggataatatttcactgagcaggctgggcacagtggctcatgcctgtaatctcagccctttgggaggccaaggagggcagattgcttgagccsaggagcctgagcaacatggcaaaacctcatctctacaaaaaatacaaaaattaaccaggcgtgatggtgggctcctttaatcccggttactcaggaggct

SEQ ID NO: 348403 - DNA, 201 bp, Homo sapiens
agcataattgtgttgatccaacattttataagagagtcaaagttaaaggcaaactagtttttaacacatttccagttcttctggaatggctgtgccaattwaactttctgaatttctattagtcagggatgactgagcattctctgactcacttcatttcccaagcagccagataagaaataatttattggtttacaatat

SEQ ID NO: 348404 - DNA, 201 bp, Homo sapiens
tccaaatgttttaggaaatcatcatcacagttcaattaggtgattaaaatatatattcaatttaaagatcatctatagttaaggaatggcttatacaaacgtgtgtgtgtgtgtgtgtttaaagacaggatcttgctctgtcacccaggctggattgtagtggcataatcatagctcactgcagctttcaactcctgggct

SEQ ID NO: 348405 - DNA, 201 bp, Homo sapiens
ttttttgagatggggtctcactctgttgcccaggctggagtgcagtggtgtgatcatgactcactgcggcctggacctcccaggctcaggcgatcctcccscttcagcttcctgggtagctgggactacaggcaagcaccaccatgcccagctaaattttttaaatattttttgtagagacagggtcttgccatgttgcct

SEQ ID NO: 348406 - DNA, 201 bp, Homo sapiens
ccaaatgttttaggaaatcatcatcacagttcaattaggtgattaaaatatatattcaatttaaagatcatctatagttaaggaatggcttatacaaacgtgtgtgtgtgtgtgtgtttaaagacaggatcttgctctgtcacccaggctggattgtagtggcataatcatagctcactgcagctttcaactcctgggctc

SEQ ID NO: 348407 - DNA, 201 bp, Homo sapiens
agtcattatgttaatttgtacctttcttctatgattggcaaaggagcatagggatggctcaccaccacaggtgctctaaaaagctgactggtcggcatgayaaactgattcgtaattggggctacaaatagtgattaaatggtcctgaaatataaatttcaaaaagattatcttccagttataagtatcttaatcagtaca

SEQ ID NO: 348408 - DNA, 201 bp, Homo sapiens
caaatgttttaggaaatcatcatcacagttcaattaggtgattaaaatatatattcaatttaaagatcatctatagttaaggaatggcttatacaaacgtgtgtgtgtgtgtgtgtttaaagacaggatcttgctctgtcacccaggctggattgtagtggcataatcatagctcactgcagctttcaactcctgggctca

SEQ ID NO: 348409 - DNA, 201 bp, Homo sapiens
tgatacagtttaggatattgctgaattattttcagccaatataatctctttttttgagactgagtctcactctgttgcccaggctgcaatgcagtggcacratctcggctcagtgtaaccttcgcctcccaggttcaagcaattatcctgcctcagcctcccgagtagctgagattacaggcgggggccaccacccggtta

SEQ ID NO: 348410 - DNA, 201 bp, Homo sapiens
aaatgttttaggaaatcatcatcacagttcaattaggtgattaaaatatatattcaatttaaagatcatctatagttaaggaatggcttatacaaacgtgtgtgtgtgtgtgtgtttaaagacaggatcttgctctgtcacccaggctggattgtagtggcataatcatagctcactgcagctttcaactcctgggctcaa

SEQ ID NO: 348411 - DNA, 201 bp, Homo sapiens
cggcaaacttttaaattttttgtagagacaaggtcttgctgcgctgcccaggctgatctcgaactcctgggctcaagtgatgttcctggcttggcctttcraagtgctgagattacaggcgttgagcccctgtacctggccttataaaaacttttcaatcagatgatattattcctgcaattattgccaacacagtttact

SEQ ID NO: 348412 - DNA, 201 bp, Homo sapiens
aaacaaataatttgaaaggtagaattatattcattccagagtaggggcatgaaaaacatgaggagagagagaggttgaggccttatgttcatgcttaggcttttttttttttttttgagacggagtctcgctctgttgcccaggctggagtgcagtggcaagaacttggctcactgcaacctccgacttccaggttcaagc

SEQ ID NO: 348413 - DNA, 201 bp, Homo sapiens
acctttcaggaagaaaaatttaacgttctattctgcatatttggaggtacactatgtaactttaaaagcaacatacccatcttgacttcaagtgactttcttttttttttttttttgagattgagtctcgctctgttgcccaggctggagtgcagtggcgcgatctccgctcactgcaagctccgcctcccgggttcacgc

SEQ ID NO: 348414 - DNA, 201 bp, Homo sapiens
aagaatggaaataaccgaaagctgcgggtttgtgttgctacttgtaaccgtgcagattattctaaacttgccccgatcatgtttggcattaaaaccgaacytgagttctttgaacttgatgttgtggtacttggctctcacctgatagatgactatgggtaagatgaaagcattttcttattcttcattgcaacagtgtgc

SEQ ID NO: 348415 - DNA, 201 bp, Homo sapiens
atgcggtgaatgttatagctctattggaagacgtgggtcatggaagagaaccgtagaacccagcgactagtgttcatctcaattaggacgaacccaggcayttgccgtgcaggaacaacggcaagccttcagcccgatcgggagcagcagtgggcgcctcgctggatcaggagcacagcagacaccctgccagatccggag

SEQ ID NO: 348416 - DNA, 201 bp, Homo sapiens
aaaataattaaatcaccaaataaaataagacaagtctgttacaagaaatgttcccaaagtggccagataagcatctgtcaggggtgctgtaggaaggtctyccactctgatgagaaggttagattagaggatctcttaaagcctaggagtcattgatagcctagttatgccctgaatgcttgaagttatatttatgcttat

SEQ ID NO: 348417 - DNA, 201 bp, Homo sapiens
aaaggtatttatatttatagttatatttttctagctatattaagcattatttttaaaacacattacagtaaaatacacataaaaggtacatatatattacrtatataatttgagtttttacaaactaaacacacctatgtaatcagcacccagattttaaattgtttttgaagttaatttttcttacctttcaggaagaaa

SEQ ID NO: 348418 - DNA, 201 bp, Homo sapiens
tataattaagtctcatcaattttacttccaaaataaacatcatatccatccacttcagttgagtttcactgctaccaatccattctccacagagcagccartgtgatttaaaaaagaaatctgggcctggtgtggtggctcatgtctgtaatcctagcactttgggaggccaaagtgggcggatcacctaaggtcgggagt

SEQ ID NO: 348419 - DNA, 201 bp, Homo sapiens
atcaaggtcagcccacccccagttcggaattaactggtgggagctacagccggaaaggacagcgctaagacacactatattcatctactccaacaagcatyacgggcaaagcaaaagcaatggagatgactggtctgtggggacggaggggtggcactatcacagggatggccgtggcaaacaccgctgaagcccagagcc

SEQ ID NO: 348420 - DNA, 201 bp, Homo sapiens
agtgagcaagaggcagagtgatacaggtgatgttagagaaggaaacagatgcatgtaagccagggtaagtcatttggaattttttctaagtgtaatgggarggaatgacatgacaagagttgcattttggaaagatcactccggttgctaatatacagaatggaatgtcggtggggggggcgggggggcaagaataaaagc

SEQ ID NO: 348421 - DNA, 201 bp, Homo sapiens
atttggaattttttctaagtgtaatgggaaggaatgacatgacaagagttgcattttggaaagatcactccggttgctaatatacagaatggaatgtcggkggggggggcgggggggcaagaataaaagcagggagaccagtaagggggctgattcagttgctcagatgagagatgatagtggctttgatgaagtattaga

SEQ ID NO: 348422 - DNA, 201 bp, Homo sapiens
acaaactgcagtttgatgagatttgaaatttgctgtacagcaagaaatctcaatgaactgttagacttagtttcacctgtggtaaatttttaatggttgtaaaaaaaaagatgttaatattttgtatcatcaacttcattcaaagtttcttgtcaatggtgactcaggaatctgttgcccaggttggtctcgaactcctgg

SEQ ID NO: 348423 - DNA, 201 bp, Homo sapiens
caagacaccggttcgtggcaactggctatgggagccacaggaagctaatacgactgggaaatggcaagaagcttgtctacctgacttctctgcagggcagkgggtccacaccacgcacttgcacacatactaggagggaggccagaggcagtcctcgcttcctcagggaccccttcctgctggtctcctcccacctcctgc

SEQ ID NO: 348424 - DNA, 201 bp, Homo sapiens
tttggaattttttctaagtgtaatgggaaggaatgacatgacaagagttgcattttggaaagatcactccggttgctaatatacagaatggaatgtcggtrgggggggcgggggggcaagaataaaagcagggagaccagtaagggggctgattcagttgctcagatgagagatgatagtggctttgatgaagtattagag

SEQ ID NO: 348425 - DNA, 201 bp, Homo sapiens
ctaagtgtaatgggaaggaatgacatgacaagagttgcattttggaaagatcactccggttgctaatatacagaatggaatgtcggtggggggggcggggsggcaagaataaaagcagggagaccagtaagggggctgattcagttgctcagatgagagatgatagtggctttgatgaagtattagagatggaaaaaagtt

SEQ ID NO: 348426 - DNA, 201 bp, Homo sapiens
gcctttcactttaaaggcaagacctgaaagttgcaaatctttcttctcacatccatcagaacttagtcacatggccacatctggctgcaaggcaagctgargaatatagtcttttttgtttgtttgtttgttttgtttttgtctgaaatgatactgttctgttgctcaggctggagtgcagtggtgtattcatagctcatc

SEQ ID NO: 348427 - DNA, 201 bp, Homo sapiens
cagctcggcctcccaaagtgttgggattacaggcgtgagccatatatttatttatattatcatagtttatccatggaaggacagataggaaaccagtaackgcttccagggaaaagaactagctagctggggaacacagatgaaaagacttattgctacttaacctcttgtgacttttcaattttaaaccatgtgaatata

SEQ ID NO: 348428 - DNA, 201 bp, Homo sapiens
tcggctcactgcaacctccacttcccgggttcaagcgattctcctgcctcagcctcctgagtagctggggttacaggcgcacaccaccacacctggctaatttttttttgtatttttagtagagacggggtttcactatgttggtcaggctggtctcaaactcctgacctcataatccgcccacctcggcctcccaaagtg

SEQ ID NO: 348429 - DNA, 201 bp, Homo sapiens
tgaggcaggagaattgcttgaacccacaaggtggaggttgtagtgagccaagatcgtgccactgcactccaacctgggcgacagagtgagactctgtcttaaaaaaaaaaaaaagtaaatgaaacaaaaagctggttctttgaaaagataaataaaactgttagaccattggcaagattaaccaagaaaagaagggagaaa

SEQ ID NO: 348430 - DNA, 201 bp, Homo sapiens
aaactgactgcccaagaaccctctccttaccttcataacgccccagggagaggagaatcccagtaatgagtgactggaaataataaactggctctgacagragcctaggtgtccagatgtaggcagctccaggctgactttgtggttccacaatccagagtgagaaaattccaaggcttcctcctagaccacatcctaaat

SEQ ID NO: 348431 - DNA, 201 bp, Homo sapiens
cagaagcatataatttaattgactttttgtatattgcagttcaaagatatatggggatggaaatgctgttccaaggattttgaagtttctcaaatctatckatcttcaagagccactgcaaaagaaattctgctttcctcctgtgaaggagaatatctctcaagatattgaccatattcttgaaactctaagtgccttggc

SEQ ID NO: 348432 - DNA, 201 bp, Homo sapiens
tggaactctgtggaccttaggacccccctttctgacactttgcatctccctgtgtgggtagacaatgatggcaactgtgctgccctggcggaaaggaaatktggccaaggaaagggactggaaaactttgttacacttatcacaggcacaggtaagaggggtagggggaggttggttcaggagctagaatgtatattggag

SEQ ID NO: 348433 - DNA, 201 bp, Homo sapiens
catgaattgatccacggaagctccttctgtgctgcagaactgggccaccttgttgtgtctctggatgggcctgattgttcctgtggaagccatgggtgcaytgaagcatacgcctctggaatggccttgcagagggaggcaaaaaagctccatgatggttggtgtccctctctcgaggaattaagtaaccaaatagtagac

SEQ ID NO: 348434 - DNA, 201 bp, Homo sapiens
acaaaaaaaagtgcaaaatacaaaaagtagaaataagcacacagaaaaatcagtctcgcatctacaaggaggcaacaactgttaatattctaagatacttyccttaagtcctttatgtatttttttcctttacacaagcacaactctatatgcgatcttgtgcttagccttttgattcacatcatttcatatttctccatg

SEQ ID NO: 348435 - DNA, 201 bp, Homo sapiens
ctcaaaggcacacagccatctccattcctttatacatcgtgtatggctgcttttgtaccacaagggcagagcagagaagttgtgacagagacatggcctgyaaaaatatctggccctctatagaaaagatttgatgacccctattctaaataatggacatgaaagtaattctgtagacagaaaaaagcctaaccaaatgtg

SEQ ID NO: 348436 - DNA, 201 bp, Homo sapiens
gttttaggaaatcatcatcacagttcaattaggtgattaaaatatatattcaatttaaagatcatctatagttaaggaatggcttatacaaacgtgtgtgygtgtgtgtgtttaaagacaggatcttgctctgtcacccaggctggattgtagtggcataatcatagctcactgcagctttcaactcctgggctcaaggga

SEQ ID NO: 348437 - DNA, 201 bp, Homo sapiens
gcggatcacgaggtcaggagatcaagaccatcctggctaacacagtgaaaccccgtctctactaaaaatacaaaaaaaattagccgggcatgatggcgggygcctgtagtcccagctacgcgcgggaggctgaggcaggagaatggcgtgaacccgggaggcggagcttgcagtgaacagagatcgcgccacggcactcca

SEQ ID NO: 348438 - DNA, 201 bp, Homo sapiens
gaccagcctgcctaatatggcgataccccgtctctactaaaaatacaaaaattagccgggcgtggtggcaggcgcctgtagtcccagctactcgggaggcygaggcaggagaatcgcttgaacccgggaggcagaggttgtagtgagccaagatcgcaccactgcactccagcctggtgacagagcgagactccgtctaaa

SEQ ID NO: 348439 - DNA, 201 bp, Homo sapiens
gtgagccgagatcgcaccattgcactgcagcctgagcaacaagagtgagactacatcaaaaagaaaaaaaaaagagagaaaaagaaagaaagatagaaagmaagaaatcatagacaacatgaacaaatggaaacacatcccatgctcatggatgggtagagctgatactgcgaaacacatcccatactcatggatgggtag

SEQ ID NO: 348440 - DNA, 201 bp, Homo sapiens
tctctgagaccaggtgccatgcttgaccttttcctgagcagctgatttgcttcctgtcaatggaaagcaacgcagctggtctggtatgtctcattcttgawaaatctcttcgttcttttgaacccgctggctccagggatcatacttctttctgaaaacctgagttgttcccattgaacttgccagcggccttgtcaggag

SEQ ID NO: 348441 - DNA, 201 bp, Homo sapiens
ttgcacacgcatgtttatagcagcacaattcacaattgcaaagtcatggaaccaaccaaatgcccattaatcaatgattggataaagaaacggtggtgtgwatatatatgtgtgtgtgtgtgtgtgtgtgtatctatatatatctatttatatctacatctatatatctatgtgtgtgtgtgtatctatatatatctacat

SEQ ID NO: 348442 - DNA, 201 bp, Homo sapiens
catgtttatagcagcacaattcacaattgcaaagtcatggaaccaaccaaatgcccattaatcaatgattggataaagaaacggtggtgtgtatatatatgtgtgtgtgtgtgtgtgtgtgtatctatatatatctatttatatctacatctatatatctatgtgtgtgtgtgtatctatatatatctacatctatatatc

SEQ ID NO: 348443 - DNA, 201 bp, Homo sapiens
gggtgcaccaaaatctcacaaatcaccaccaaagaactaactcatgtaaccaaataccacctaataccccaataacttatggaaaaataaataaacttaattaaaaaaaaaagtaagtggagctcactttcagttttatgggataatataggccctattggtaaataccttgcgttgtttgacatagcactgtcaatctaa

SEQ ID NO: 348444 - DNA, 201 bp, Homo sapiens
tcgataaatagcacacagtgattaccaaatattttagatctctacttacattttattgtctttgtaatatcaattagcactaagtggttctttcttttttktttttgagatggagtctcgctctgtcgcccaggctggggtgcagtagcgtgatctcggctcactgcaagctccgcctcccaggttcacgccattctcctg

SEQ ID NO: 348445 - DNA, 201 bp, Homo sapiens
atttagtgatgtctaacagtcattcagttgtctaagatttagacagctattatgtgaaaaataccattaaagagttccaaattggccggacgcgatggctyacacctgtaatcccagcactttggggggccgaggcgggtggatcgacgtcaggagttcaagaccagcctggccaagatggtgagatgctgtctctaccaa

SEQ ID NO: 348446 - DNA, 201 bp, Homo sapiens
ttatttaacctcctcatcatttaaacatgcctaagcctctcacatcttaaaaacaaacaacacaaaacaactcctttcttgaccccacacctctctccagmtgttactcgtccactcttctcttcttagccaaacccattgaacagtgtggccattttcgctagatttactccctcatattggtcaggaaatgtctggagg

SEQ ID NO: 348447 - DNA, 201 bp, Homo sapiens
atgcctacgggcccctagttgctggggagacagggattgctaatatcatacccattattactgttccaaaggttccaatgtagaatacatattttatttcttttttttttttttttttttgagatggactcttgatctgttgcccaggatagagtgcagtggcgccatctcagctcactgcaacctccgcctcctgggttc

SEQ ID NO: 348448 - DNA, 201 bp, Homo sapiens
aggttggttcaggagctagaatgtatattggagcatgtcttcaacatggtcaggtggttacaactctgccttagccttcacttcctgcatgactagagccygaaggtgagccacatgtggccttttctgagcatgtgcccagccttagacatgcctgtggccttctaaattccaggaacttgtcagagctattcaaagctc

SEQ ID NO: 348449 - DNA, 201 bp, Homo sapiens
ttggttgtttttttttttttttttttgagacggagtcttgctctgtcatccaggctggagtgcagtggtgcgatctcgactcactgcaacctccgcttccsgggttcaagcagttctcctgcctcaacctcctgagtagctgggattacaggcacccacaacgcctggctaatttttgtgtttttagtagagatggggttt

SEQ ID NO: 348450 - DNA, 201 bp, Homo sapiens
ctgaggcacaagaatctcttgaactggggaggtggaagttgcagtgagccaaggtcatgtcactgcactctagcctgggcaacagagggagactgtatttwaaaaaaaaaaaaaagtaagctttgccccaacagtttatagaatatgttaccaattttgtaatatacgttgtgtatgtgtgtatgtatacacatacataca

SEQ ID NO: 348451 - DNA, 201 bp, Homo sapiens
aagagaggggcccatcttgctgcctgtggagttgtcattgcttcaacagccccatattaggacagattacaggaactacttgagcttaccccagggctggyccagaccaggcagtgggtccttccccaagcagtcatctaagactgcggggccatcctatagcagtgtctaatttgtcatgaaaaagatcacaacactcac

SEQ ID NO: 348452 - DNA, 201 bp, Homo sapiens
gtatgggacaggaagcaaaaaggtaggggatcactgcctggtggtgccccctatgagagaggtaagaagtatgctcgtctgttggcagtgggggtagaagractgggaaggtggtgaaggtatagaaaagcgcagtcagagagaatgggtgagagctgtgagggcccaggggagacaggagaccaccagttgatgtctagg

SEQ ID NO: 348453 - DNA, 201 bp, Homo sapiens
agcaagagggtagcaaaggctttaggggcagtgtatagagatgtttgtgaacgataagctttgcaattgtgaaaagaaaacaccgtcttcccatgtagggscttgctttccacaggcccagtggtgagcttggcctccccacagctcattagtgactgcttttccttctcactctgttcagaggacctgctcttggtggaa

SEQ ID NO: 348454 - DNA, 201 bp, Homo sapiens
aaatatcacttagttttcccatttggaggtatcaactattaacatttccttcgagtctttctattcatttttttgcctagtggagatcatgtggtacaccyggctttttccacttgaggctgtcacatgatcattttctcatattaagaatcaaccgtgaactgcttttaaaacactgcctcccactgcatgccgtggatg

SEQ ID NO: 348455 - DNA, 201 bp, Homo sapiens
aggctctgaactaggtgcttcatatacattatcctaaattatctcaacatatgaggtaggtgttttaatttttattttatagaacttggtgtgtttgactrttaagctatggggctagagagagggtttgatcccaggtccctctgtgcttttgctgctgagccacacaacctctcatttcaaaaacactttcaaaatgct

SEQ ID NO: 348456 - DNA, 201 bp, Homo sapiens
aactgtaaatggcagagacagaattcaaactaagctctgctgacttcaaagcttgctcctttcactgtcttccagccgagtagaagagagcggtcagtgtmtacagcattgttcagcttgggaggggaaggacgagggagtttgcctaggagtttccctgtctttatgaagtcagtggctagatcttctgctgagctactg

SEQ ID NO: 348457 - DNA, 201 bp, Homo sapiens
aacatatgaggtaggtgttttaatttttattttatagaacttggtgtgtttgactgttaagctatggggctagagagagggtttgatcccaggtccctctstgcttttgctgctgagccacacaacctctcatttcaaaaacactttcaaaatgctaacatattctaattcactctaggccaccaaaaactttaatactaa

SEQ ID NO: 348458 - DNA, 201 bp, Homo sapiens
tttgcattctctcaactcaagactgtccattgtaagtactgatgaaaagtgattgcctccttacaaaaggaaatttacttgccccaggctggatttaaatwttaatttttttaaagatagggtcttgctcaatctttcaggctggagtgcggtggcatgatcataactcactacagcctcaaactcctgggctaaagtgat

SEQ ID NO: 348459 - DNA, 201 bp, Homo sapiens
cgcatgcgggagacatctttggcctgcttgctagacttggggttaaagtcacacagccgggccacccgttcccactcagtgcctggggacgactcgtcaaygtcatttacaaaggcttcttctgctgccctggaagcaacaacaaaatatgttggtttatgcagaaccccctttgagcaacctggtggctgccttgctaca

SEQ ID NO: 348460 - DNA, 201 bp, Homo sapiens
attcttaactaatgaagcaatgtggtttgattttctttaaacaggtgatgatgtaaaatctaaagattacattgttgcactacagcaccctgtgaccactracattaagcattccataaaaatgtttgaattaacattggatgcacttatctcatttaacaagcggaccctagtcctgtttccaaatattgacgcaggtaa

SEQ ID NO: 348461 - DNA, 201 bp, Homo sapiens
tttacgtgggctatacttgccaatgaaaatggtttctttatctcacaaaccatttaccaattggttcttttcattttcatagggagcaaagagatggttckagtgatgcggaagaagggcattgagcatcatcccaactttcgtgcagttaaacacgtcccatttgaccagtttatacagttggttgcccatgctggctgt

SEQ ID NO: 348462 - DNA, 201 bp, Homo sapiens
ttgagcatcatcccaactttcgtgcagttaaacacgtcccatttgaccagtttatacagttggttgcccatgctggctgtatgattgggaacagcagctgwggggttcgagaagttggagcttttggaacacctgtgatcaacctgggaacacgtcagattggaagagaaacaggtatttacctttgctcatacttcaact

SEQ ID NO: 348463 - DNA, 201 bp, Homo sapiens
ccgggcatggtggtgtgtgcctgtgatcccagctactcgggaggctaaggcaggagaattgcttgaacctgggaggtggaggtttcagtgagctgagatcrtaccactgtactccagcctgggcgatagagtgggaccctgtctcaaaaacaaacaaacaaacaaaaaagaaatctgatagcacttccttgcaaaaatccc

SEQ ID NO: 348464 - DNA, 201 bp, Homo sapiens
atttctatccctcgctgtaggaatcggtggtggaattatccatcagcatgaattgatccacggaagctccttctgtgctgcagaactgggccaccttgttstgtctctggatgggcctgattgttcctgtggaagccatgggtgcattgaagcatacgcctctggaatggccttgcagagggaggcaaaaaagctccatga

SEQ ID NO: 348465 - DNA, 201 bp, Homo sapiens
ctaatacaccatttatagtctggtgagtctgtcttcagattcatatatctcactgcacatttaatagcttcatgtggctcacaggcatctcaatcataacrtgccctaaattaaaactttacttttttcttcccaaaccaggtcactctcccagcctttctcatcttagcacacaaccaaccacccaattcctaatggcag

SEQ ID NO: 348466 - DNA, 201 bp, Homo sapiens
tgcctacgggcccctagttgctggggagacagggattgctaatatcatacccattattactgttccaaaggttccaatgtagaatacatattttatttcttttttttttttttttttttgagatggactcttgatctgttgcccaggatagagtgcagtggcgccatctcagctcactgcaacctccgcctcctgggttca

SEQ ID NO: 348467 - DNA, 201 bp, Homo sapiens
gctgtaggaatcggtggtggaattatccatcagcatgaattgatccacggaagctccttctgtgctgcagaactgggccaccttgttgtgtctctggatgrgcctgattgttcctgtggaagccatgggtgcattgaagcatacgcctctggaatggccttgcagagggaggcaaaaaagctccatgatggttggtgtccc

SEQ ID NO: 348468 - DNA, 201 bp, Homo sapiens
cccagcttttcctcccagtctttttggttagtgtgttggatgccccagctgttatcctttgccctagacagcacagactaatacattttaccttgaaatgtttttttttttttttttgagacggagtctcgctctgtcgcccaggctggagtgcagtggcgggatctcggctcactgcaagctccgcctcctgggttcacg

SEQ ID NO: 348469 - DNA, 201 bp, Homo sapiens
ctgcttttccttctcactctgttcagaggacctgctcttggtggaagggatgtcagtgccaaaagatgaggctgtgggtgcgctccatctcatccaagctrcgaaacttggcaatgcgaaggcccagagcatcctaagaacaggtgagcatgtggctgcaggtggctgtgctgcagggggtggcctcagatatcatatggc

SEQ ID NO: 348470 - DNA, 201 bp, Homo sapiens
tgttaatattttgtatcatcaacttcattcaaagtttcttgtcaatggtgactcaggaatctgttgcccaggttggtctcgaactcctggcctcaagctakccttctcacttggcttcctaaaatgctgggagtgactcagaaatttgaaagggtcattaaaaagtcttaaagcctgattcggtggcatggtcctgtagtc

SEQ ID NO: 348471 - DNA, 201 bp, Homo sapiens
ggtgtttataggacatagagcaggagatatctgataggcatttggagttgtcagttttgttggcactggtgtgtaggtactaatgagggcttgaaggtcargtttttatcttactcatctttctcctgcccagcattaatcacaataccttgtatttaggaagtgtatagtgtgagagtgaatagcctgtgttccttatga

SEQ ID NO: 348472 - DNA, 201 bp, Homo sapiens
ggctggagtgcagtggcgggatctcggctcactgcaagctccgcctcctgggttcacgccattctcctgcctcagcctcccaagtagctgggactacaggygcccgccactacgcccggctaattttttgtattttttagtagagacggggtttcaccgttttagccgggatggtctcgatctcctgacctcgtgatccgc

SEQ ID NO: 348473 - DNA, 201 bp, Homo sapiens; identical to SEQ ID NO: 74060

SEQ ID NO: 348474 - DNA, 201 bp, Homo sapiens
caggagaatggcatgaaccagggaggcggagctggcagtgaactgagaccgcaccactgcactccagcctgggtgacagagcaagactccatctcaaaaawaataataataaataataataataataataataataataataatccttccagctgggcgcagtggctcacgcctgtaatcccaacattttgggaggccgag

SEQ ID NO: 348475 - DNA, 201 bp, Homo sapiens
ctgatgagcaggggaggggatgtagagggaggcccaggttgacttgtcccctggaacagtgctgtccaatcaggggggatgctgactgtcccgttaggagmggggcggggcgagagagggtggagaactgcctggcaggcgagctgtcctggcgtgaaaaggctgggctaaaaggtcccctccctgctctgagtctacatt

SEQ ID NO: 348476 - DNA, 201 bp, Homo sapiens
catgaaccagggaggcggagctggcagtgaactgagaccgcaccactgcactccagcctgggtgacagagcaagactccatctcaaaaataataataatawataataataataataataataataataataatccttccagctgggcgcagtggctcacgcctgtaatcccaacattttgggaggccgagatgggcggatc

SEQ ID NO: 348477 - DNA, 201 bp, Homo sapiens
cgggtctcactctgtcacccaggctggagtgcagtggctcaatgcaacctctgccccccaagttcaagtgattctcctgcctcagcctcttgagtagctgsgattacaggcacatgcaccacgcccggctgatttttttttgtatttttagtagacagggtttcaccatgttggccaggctggtcttgaactcctgacctc

SEQ ID NO: 348478 - DNA, 201 bp, Homo sapiens
cctccccttcctcttcctcctctccctcctctctgaatgccagggagaacacagttgaaggaaggaaacatgcaatcacaaacaatgaacaactctaaagrcaaaaaggtttggtccaaaagaactcaacataattaatccaatgactgtgaagagcttcactgagtaggattaagatattgcagatgtagtgtttccaca

SEQ ID NO: 348479 - DNA, 201 bp, Homo sapiens
ttcctcttcctcctctccctcctctctgaatgccagggagaacacagttgaaggaaggaaacatgcaatcacaaacaatgaacaactctaaagacaaaaargtttggtccaaaagaactcaacataattaatccaatgactgtgaagagcttcactgagtaggattaagatattgcagatgtagtgtttccacagggtggc

SEQ ID NO: 348480 - DNA, 201 bp, Homo sapiens
tgacctcgtgatccgcccacctcggcctcccaaagtgctgggattacaggcgtgagccaccgcgcccggcccctccccccagttttacgcttgtaaaattrttagaacacaagaacgtattttttactactctggtaggaggggtggggtacagtttcgcagtataggtaactcgttaacccaactgtaggagcgccgcag

SEQ ID NO: 348481 - DNA, 201 bp, Homo sapiens
aacattattgaagttgacttgagggcaaagggggctgaactccactagcacctcctaagaagcctgcagaacagcatccagaattgtcctgtggatctgcyggctcctgccttgcctcggttgcaggttgcccctgggtgctgtgcctgcgtggctgagtaggctcttgcttcagtgttagagaaagccttggtgcagaaa

SEQ ID NO: 348482 - DNA, 201 bp, Homo sapiens
tggtgaaaccccacctctactaaaaatacaaaaaaattagctgggcatggtgtcacatgcctgtaatcccagctacttgggaggctgaggcaggagaatckcttcaacctgggaggtggaggttgcagtgagctgagatcatgtcactgcactccagcctgggcaacagagtgagaccctgtctcaaaaacaaaaacaaac

SEQ ID NO: 348483 - DNA, 201 bp, Homo sapiens
gcccggccccagaagagaccctgcttccctagggacaggtgctttgcagtgtctgttcagaggtttctttcctaattactcagaggtaaaaagggaattgsattcaaggtatttggcagcattgcctttttcagcaggtggttggtttggtttgacaactataaaaatgctcctttcattttacaggaaatttagagaaat

SEQ ID NO: 348484 - DNA, 201 bp, Homo sapiens
aaaagctgcaagttggagaaggagtctttgcttctccaaaggagacttctctcctcttttgctctctcaggaaagaggggactctaaagtagttcacttasgggtggaccatgcaacatggctaaaaatgaggcctgcccagagaccaaggcttttcacaacttcctctgtcattctgtgaaacttagtcttaaacagatc

SEQ ID NO: 348485 - DNA, 201 bp, Homo sapiens
gccttttctgagcatgtgcccagccttagacatgcctgtggccttctaaattccaggaacttgtcagagctattcaaagctcttatttcccagagcttctyatttcccagcttttcctcccagtctttttggttagtgtgttggatgccccagctgttatcctttgccctagacagcacagactaatacattttaccttga

SEQ ID NO: 348486 - DNA, 201 bp, Homo sapiens
ttcatataaatgggagtgctatcccaccgagttcttgttagtgtaaaggtgagtgtagctgggcagaggctctctcatcagcttggtgtgtggagcctgasagggttccatttgggaactctcaggttaagagatacaggctgttggcctgtctttagcctcttaattgttgtttaaggtaaaggcttttactagggcatt

SEQ ID NO: 348487 - DNA, 201 bp, Homo sapiens
tgcttttccttctcactctgttcagaggacctgctcttggtggaagggatgtcagtgccaaaagatgaggctgtgggtgcgctccatctcatccaagctgygaaacttggcaatgcgaaggcccagagcatcctaagaacaggtgagcatgtggctgcaggtggctgtgctgcagggggtggcctcagatatcatatggcc

SEQ ID NO: 348488 - DNA, 201 bp, Homo sapiens; identical to SEQ ID NO: 74033

SEQ ID NO: 348489 - DNA, 201 bp, Homo sapiens; identical to SEQ ID NO: 74035

SEQ ID NO: 348490 - DNA, 201 bp, Homo sapiens
tgtatacacatacatacatcatatatatacacatcatatatatatatatttagatagagacttattctgttgcccaggttggagtgcagtggcaccatctyggctcaccgcaagctccgcctcatgtgttcaagtgattctcctgcctcagcctcccaagtagctgggactataggtgtgtgccacaacacctggctaatt

SEQ ID NO: 348491 - DNA, 201 bp, Homo sapiens
taaacaaaaacttgatttgttctccttgggaataaaggaccctagggcccttaagtgtttgatgtactgaaatcttgccaagagtactttaaaaggtataragtagaaaagttgaattttccctaacaaaagacttaacctgaagtcagctggatttcaggtctaattatgagcatagtacactgataatttctttattct

SEQ ID NO: 348492 - DNA, 201 bp, Homo sapiens
gcggaggtagtagtgagccaagctcgtgccactgcactccaacctgggcgacagagtgagactttgtctctaaataaataagtaagaaagtttataggagrcaggcaaaccacttgacagctgttaagatcgtccagacctaaaatgagggactggactaggggaagtccttgtatggatgaagaggaggagatagatttg

SEQ ID NO: 348493 - DNA, 201 bp, Homo sapiens
tcttaatgacattctggctttcccaagataacagcccctggcccaggtcagactcaggtagacacgtagctggctctcctaggcacagggtgcccagaccrctgtgtaaaatgttggaatacaggtgtttggttcaaggctcactatgtctctctgtctgtctctgctcctgtggagcattaataaaacaagtccttagcc

SEQ ID NO: 348494 - DNA, 201 bp, Homo sapiens
atggtagctataaataatattactgtttgttattagttgttacattcaaacaaatgccacttataaatacatattgtatgagtataataatgtgattccaygtaaactgttttgtgagctgtaatggcaatctttaaaactggtttataggccaacagcatataaagtagtagatatggaacaagattttaaaaatctaat

SEQ ID NO: 348495 - DNA, 201 bp, Homo sapiens
aagcagatgggtcacagggcatcagaggatctgctaaaaacatttccatccaaaatgctgccagagaatgctttgatgcctagtgggcttcagctgtctaragaagtatctatagaccctcacatgccaaagctctgctaaatagatgaggcgttgtgatatcatagttttctgtttcaggtaaagcaccctcagtgattt

SEQ ID NO: 348496 - DNA, 201 bp, Homo sapiens
gaagacaaggactacagataaccacagaaatacctgctgcttactgagcatttactgtggccagcacttaactaaatactttatgtccatgatctcattcygttcctcaaataaccctgccaggggaggcactactggtctcatcttctaggaaggaggaatgtgtacaggtgaggtgacaggcatggggtcatgcagctg

SEQ ID NO: 348497 - DNA, 201 bp, Homo sapiens
gctggggttacaggcgcacaccaccacacctggctaatttttttttgtatttttagtagagacggggtttcactatgttggtcaggctggtctcaaactcytgacctcataatccgcccacctcggcctcccaaagtgctgagattacaggcatgagccaccgcgcctggctcatttttatttttaatgcttttcttatag

SEQ ID NO: 348498 - DNA, 201 bp, Homo sapiens
gtggccttagagtagtcacttagcatctctgagcctcagtttcctcattatataatgtagtgaaaacttatattgtaaattattgtgaggaatggagatcrtgatatagagcatccatcacaatgatgccgcttagtagatgattgataaatggtagctataaataatattactgtttgttattagttgttacattcaaac

SEQ ID NO: 348499 - DNA, 201 bp, Homo sapiens
tttctgctaaaaacacataaattagctgggtgtggtgtcacgcacctatagtcccagctacttgggaggccgaggcaggagattgcttgaacccgggaggyggagattgccatgagctgagatcacgccactgcactccagcctggtgacagagaaagactctgtctcaaaaaaaaaacaaaacaaaaaaacaaaaacaaa

SEQ ID NO: 348500 - DNA, 201 bp, Homo sapiens
caaaaacaaatggagacttcctttatggattaaatttcccttacaaaagggtaatttctactgttttcagagcttctcctgtatctgtagcttctcaaaakcatcagctcaaaatagtccttacgctaaggaggcatattttgtgctggcatatgctggtctcctacaataactcgccaaagatcacaaaactaataagcg

SEQ ID NO: 348501 - DNA, 201 bp, Homo sapiens
tacaggcatgagccaccgcgcctggctcatttttatttttaatgcttttcttatagaattgttggaatactcagattatgaatgttggaagcagtaagccrtaagtacttattaatataagggattatgatgattattaaaaagcaaaagtcatagttgtagccttagagtatatctttgtaaataagccctatgttccaa

SEQ ID NO: 348502 - DNA, 201 bp, Homo sapiens
acctgatatccatgtgtgaggaccatgatcgcatccttttggcaggctgcccttcctatgacaaacttctctcagccaagaacaaagactacatgagcatyattcgcatgtggctaggtacgtatctcagactttagtcagtctaatggctgtttttgtcagaaaatgttccgtctatttcaatccttttggaaactatta

SEQ ID NO: 348503 - DNA, 201 bp, Homo sapiens
accaacatggtgaaaccccgtctctactaaaaatacaaaaattagctgggcatggtggcgggtgcctataatcccagctactcaggaggctgaggcaggaraattgcttgaacccaggaggcggaggttgcagtgagccgagattgtgccactgtactccagcctgggcgacagagcgagactgtctcaaaaaaaaaaaaa

SEQ ID NO: 348504 - DNA, 201 bp, Homo sapiens
aggggctttcaactgaatcgaaacctgaatcttggaatagtagtggtgccttctggtgtgccatgtactacagtttgagtatccctaatcaaaaaatctgraatctgaaatgctccaaaatctcaaactttttgagcaccaatatgacgctcaaaggaagcgtttattggagcagttggattttggatgttcagattgggg

SEQ ID NO: 348505 - DNA, 201 bp, Homo sapiens
atcagaaagactgaggggttgaggaggaattatttaattatttaggtgcaccgacccagtcggattaacatccaaaggactgagccatgaacaaagagtcaagctaccttttaagcattttgtggggcggggggagatctgtgcagggggaagcatattacagaagcaagaaacaaagacagttatttaattaagacatgc

SEQ ID NO: 348506 - DNA, 201 bp, Homo sapiens
cacagcaacctccgcctcccaggttcaagccattctcttgcctcagcctctggagtagctgggattacaggcatgcaccaccacacctggctaattttttrtatttttagtagagacagggtttctctatgttggtcaggctggtcttgaactccggacctcaggtgatccgcctgccttggcctcccaaattactgggat

SEQ ID NO: 348507 - DNA, 201 bp, Homo sapiens
gtagctgggattacaggcatgcaccaccacacctggctaattttttgtatttttagtagagacagggtttctctatgttggtcaggctggtcttgaactcyggacctcaggtgatccgcctgccttggcctcccaaattactgggattacaggcgtgagccactgcgcccggcctctttaatttcttttaattcctgttcc

SEQ ID NO: 348508 - DNA, 201 bp, Homo sapiens
ctgggattacaggcgtgagccactgcgcccggcctctttaatttcttttaattcctgttccaatgcagagaagaacataagaagaaaaacccagaagtccytgtcaattttgcagaattttccaagaaatgctctgggaggtggaagacaatgtccagtaaagagaaatttaaatttggtgaaatggcaaaggcggatgaa

SEQ ID NO: 348509 - DNA, 201 bp, Homo sapiens
gcatgtttatagcagcacaattcacaattgcaaagtcatggaaccaaccaaatgcccattaatcaatgattggataaagaaacggtggtgtgtatatatatgtgtgtgtgtgtgtgtgtgtgtatctatatatatctatttatatctacatctatatatctatgtgtgtgtgtgtatctatatatatctacatctatatat

SEQ ID NO: 348510 - DNA, 201 bp, Homo sapiens
aagcaaaagcaatggagatgactggtctgtggggacggaggggtggcactatcacagggatggccgtggcaaacaccgctgaagcccagagccactacaayactgcgacttcatggcacacacagttaggggcagtgagaaaggtttacttaactgttctaggctgtagcaaggatggtttatgtttgtgcttaaaggtga

SEQ ID NO: 348511 - DNA, 201 bp, Homo sapiens
ggtcagccttttgtttgattcaggccttcaactgattagatagagcccactcacattatggagggcaattcactttgctcaaagtccatcaatctaaaggsaaatctcaccccaaaacaccctcacagaaacatccagaacaatgtttgaccaaatatctgggtatcatggcccaggtaatctgacataaaaaattaacca

SEQ ID NO: 348512 - DNA, 201 bp, Homo sapiens
taagacagcaaacttaatcaataagtgtgcatgttccgattgctcaactgaccaaccggctatttccccatctctctcccctcttccgtgggcctccctaytccctgagacacaataacattgaagttaagccaactaataatcctacaatagcctctaagtgttcaagtgaaaggaagagtcgcacgactctcactttaa

SEQ ID NO: 348513 - DNA, 201 bp, Homo sapiens
gctgaggcaggagaatcacttgaacccaggaggtggaggttgcgatgaaccaagataacgcgtcactgccctccagcctgggcgacagagtaagacctccrtttaaaaaaaaaaaaatcagccctaatattgaatttacaatacaaaattttaattatatgtgctcccataaagcacaatgaagaacatcttatttattaa

SEQ ID NO: 348514 - DNA, 201 bp, Homo sapiens
ttcaggagctagaatgtatattggagcatgtcttcaacatggtcaggtggttacaactctgccttagccttcacttcctgcatgactagagcctgaaggtsagccacatgtggccttttctgagcatgtgcccagccttagacatgcctgtggccttctaaattccaggaacttgtcagagctattcaaagctcttatttc

SEQ ID NO: 348515 - DNA, 201 bp, Homo sapiens
gcacagacttagagtcttgctttcagaatttgcttctttctcttttaagattcttaactaatgaagcaatgtggtttgattttctttaaacaggtgatgakgtaaaatctaaagattacattgttgcactacagcaccctgtgaccactgacattaagcattccataaaaatgtttgaattaacattggatgcacttatct

SEQ ID NO: 348516 - DNA, 201 bp, Homo sapiens
tcctcctgtgaaggagaatatctctcaagatattgaccatattcttgaaactctaagtgccttggccgttgatcttggcgggacgaacctccgagttgcartagtcagcatgaaggtaaaataactcctaaactcctaactttatatcccatatgagcgattgattttttttttaagtatatatagttggaaggtaagact

SEQ ID NO: 348517 - DNA, 201 bp, Homo sapiens
gccttggccgttgatcttggcgggacgaacctccgagttgcaatagtcagcatgaaggtaaaataactcctaaactcctaactttatatcccatatgagcrattgattttttttttaagtatatatagttggaaggtaagactagaaacatacacaagagcttgtaatcatttgctgatagtattgacttgtggatccttt

SEQ ID NO: 348518 - DNA, 201 bp, Homo sapiens
actgagagcaagctggccatatgagtaaactgaaaaatagaacaatgttacctaaggccaggtttatagacaagcttgccttcatcttgaactcactggcratctgagaaacccaattatttttttttgagatggaatctcactcttgttgcccaggctggagtgcagtggcaggatctcggctcactgcaacctccgcct

SEQ ID NO: 348519 - DNA, 201 bp, Homo sapiens
tattaaacagtgatttggggcaagtaaattattttctctgtgcttcctgtctgtaaaacgcggctaatacgagggctgtgaggatgaaatgagttaatacrtgtgaagaaacctattagcacaatgtttggcacttcagaagcgctcagcaaatgtttactgttgtttcctctgttcagtgactgcttgacccaagtgttc

SEQ ID NO: 348520 - DNA, 201 bp, Homo sapiens
tgagaaggatgttgttgactgtaagttgaaaggaaagttttatggcgcaaagcgtcctgctaaagttgcccggaaaaaggtggaagaggaagatgaagaasacgaggaggaagaagagaaggagaaggatgaggaggatgaacaaagaaactgtttatctgtctccttgtgaatacatagagtaggggagcgccgtaactg

SEQ ID NO: 348521 - DNA, 201 bp, Homo sapiens
acaaaaaggtttggtccaaaagaactcaacataattaatccaatgactgtgaagagcttcactgagtaggattaagatattgcagatgtagtgtttccacwgggtggctcttcagtgcaccagcggggcctgcttgagggagatgaggactgagcgcatgcgggagacatctttggcctgcttgctagacttggggttaaa

SEQ ID NO: 348522 - DNA, 201 bp, Homo sapiens
taataactctttttttttttttttgagacagagtttcgctgttgttgcccaggctggagttgcaatggcgcgatcttggctcgccacaacctccgcctccygggttcaagcgattctcctgcctcagcctcccgagtagctgggattacaggcatgtgccaccactcctggtcaattttttgtacttttagtagagacagg

SEQ ID NO: 348523 - DNA, 201 bp, Homo sapiens
ccaagtagctgggattacaggcgcctgccaccatgctcggttaatttttgtatttttagtagagacggggtttcaccatgttggtcaggctggacttgaayagacatcaagtgatccgcccatctcggcttcccaaagtgctggggttacaggcgtcagccaccgcgcctggccaatgatgaactattaaacagtgatttg

SEQ ID NO: 348524 - DNA, 201 bp, Homo sapiens
tgcaatcacaaacaatgaacaactctaaagacaaaaaggtttggtccaaaagaactcaacataattaatccaatgactgtgaagagcttcactgagtaggrttaagatattgcagatgtagtgtttccacagggtggctcttcagtgcaccagcggggcctgcttgagggagatgaggactgagcgcatgcgggagacatc

SEQ ID NO: 348525 - DNA, 201 bp, Homo sapiens
aagaaaaagaaaatctggaggaaaaaatatttaaattatttaattatttgtcttgattttgaacccccaccccataacagaagagagatgggaaggtagcwaggtgccggctgcttttttttttctttttctttttttgagacagggtctcactttgtcactcaggctggagtgcaggggcacaatctcggcttactgcag

SEQ ID NO: 348526 - DNA, 201 bp, Homo sapiens
cacaacctccgcctcctgggttcaagcgattctcctgcctcagcctcccgagtagctgggattacaggcatgtgccaccactcctggtcaattttttgtayttttagtagagacagggtttctccatgttggccaggctggtcttgaactcccaacctcaggtaatccacccgcctaggcctcccaaagttctgggattac

SEQ ID NO: 348527 - DNA, 201 bp, Homo sapiens
cctcactccaaactacaacacatcttgaggtcaataaagaagcttcacataatacagtttgaaacagaaatttattctcagaataatgcacagaagcacargttgaggctactcttgggaagcttccctccccttcctcttcctcctctccctcctctctgaatgccagggagaacacagttgaaggaaggaaacatgcaa

SEQ ID NO: 348528 - DNA, 201 bp, Homo sapiens
actcctggcctcaagtgattctcctgccttggcctcctaaagtgctgagattaaaggtgtgagatgccatgctcagccagcataatgctaatatttaaaakattggttgttatatttttctctatttttgcctctatacttgatatattttatgaaaaataagtttattgtcaagaaaaagaaaatctggaggaaaaaata

SEQ ID NO: 348529 - DNA, 201 bp, Homo sapiens
gatgctgctgtctctacaaaaaatacaaaataaaattaactgggcagtggcaggtgacttagtcttagctacttgggaggctgaggtaacaggatcacctragcccaggaggttgaggctgcagtgagctgagattgtgacactacactccagcctgggcaacagagcaagatcctgtctcgaaacaaaacaaaactccag

SEQ ID NO: 348530 - DNA, 201 bp, Homo sapiens
atgaaattgcataactcagagaacaattgaggaggaacagcttccgaaaagaaaatgagttcagtttgggacactgactttaaggtgtttataggacatasagcaggagatatctgataggcatttggagttgtcagttttgttggcactggtgtgtaggtactaatgagggcttgaaggtcaggtttttatcttactcat

SEQ ID NO: 348531 - DNA, 201 bp, Homo sapiens
acctaaggtcgggagtttgagaccagtctggccaacatggtgaaacccccgtctctactaaaaatacaaaaattagccgggcatggtggtgtgtgcctgtratcccagctactcgggaggctaaggcaggagaattgcttgaacctgggaggtggaggtttcagtgagctgagatcgtaccactgtactccagcctgggcg

SEQ ID NO: 348532 - DNA, 201 bp, Homo sapiens
ggtggggatggaggatggggttggcatgagaaggcaaggtcctatcagattaaccctaccatccatccccaatcccacagacatatcggtgccctgcaagrtaagccagtgccgctgcttcatgttctgctttatcccatcacgcccagaggaggtgggtgagttctggctcaagagacgggccacctttgaccccaaggc

SEQ ID NO: 348533 - DNA, 201 bp, Homo sapiens
tggcctccaggttgaacctgccaactgattaaaggacaccagactctggatgcttggatggaaagggaaaaatggaccctgtgatgctaataaaactgttytcccttaattatgctctcctgtctttaatataaaattttataccacaaaggggaaagaaaactgattcagggctatgatgccccttgactggtctgagtg

SEQ ID NO: 348534 - DNA, 201 bp, Homo sapiens
atgcggtcactgaggaagagatgagaatgtggtcagctcctggggataccaccatttcctaaactcttcttggctgcacttttgccccaggctgttgctgyggctgttttgagtctaatttcctctgtgcggcctgtgaccggcgctgggaggaacacgagactttctttgacacccagaagacccggcaacgaggaggaa

SEQ ID NO: 348535 - DNA, 201 bp, Homo sapiens
cttggctgcacttttgccccaggctgttgctgcggctgttttgagtctaatttcctctgtgcggcctgtgaccggcgctgggaggaacacgagactttctytgacacccagaagacccggcaacgaggaggaaggcctcgcggtgaggcagaaacctgggacagggggccattccagggtctgtagtcagaaggccaggca

SEQ ID NO: 348536 - DNA, 201 bp, Homo sapiens
taacttctagggcaagaggtgtattgggagcagggtaggtggggataggatgcaatctggggataatgatggagagcaggtatgagagccttgggcatgcrgtcactgaggaagagatgagaatgtggtcagctcctggggataccaccatttcctaaactcttcttggctgcacttttgccccaggctgttgctgcggct

SEQ ID NO: 348537 - DNA, 201 bp, Homo sapiens
acgaaccaagaacgaaaagaaccacccactcgggagccgcaacctagaagccagaattgtgtatcagattcaactaggagaaaatcccacctccaggctcyattaatccttccaatggagtggaagtttctctcacagagaaactagtaaggggatccaatgggaaaagaacgttcacacggactagaagacgaaaccaat

SEQ ID NO: 348538 - DNA, 201 bp, Homo sapiens
actttcctcctgggtgggaacgatgaataggttattagaaggacgaaattaacaactatcagagcccagcttctgccagctccctcctttgaatatggtcratccaccttcaggtccgaggagctgcaggtgtgactgatgggaatgaagtggccaaggcccagcaggcaactcctgggggagcagccccaaccatcttct

SEQ ID NO: 348539 - DNA, 201 bp, Homo sapiens
catcccacatctgcactggttttcacccccaggagcagactatgtaccttttgcagagatggctgtgctccgagaagccatcctcagcaactctgacttcyaggccctgcagatacaggggccctctggccttcccagctcccaccctagtcccccggggctccctggttcacacggtctccagcctggcctcccttctga

SEQ ID NO: 348540 - DNA, 201 bp, Homo sapiens
ccgctttgaaactcagtctccctgaaccccacacaccttacccaccccatgatcagttttccctccagggtactcagcatcctggtgctggagtgtacttygtagacagatgtagctccagcactataattgtacactccagtcgaatttcttgtgaatcctttgacttccctaatcagaaccatcatgagatttagctcc

SEQ ID NO: 348541 - DNA, 201 bp, Homo sapiens
tcccttcttcttaagaccctgctctaccacacccttgcttcagcaagtgtatgtaaaacagtcccaacttgagacagctcccatgcacagggattcccctcaaaaccccccgccacttgtgtgccttaccttgcattagactgtaatgtcttcccagccactttcctccctcccacctgaaaagcctagctttcttgttac

SEQ ID NO: 348542 - DNA, 201 bp, Homo sapiens
ttcaaggtgaacagtcatttgcttgttctggtccccaccatttcatcctgtctcatccccatctgccacctctgcccctgaacctctgtccctcatacccsactctctgtgcccagctgagctcctgggtgcttccactgctctctagcatttccttgtacccagaacttctgatattcactttcctttcccctttcactc

SEQ ID NO: 348543 - DNA, 201 bp, Homo sapiens
cttgtgtgttcttgcgttttcaaaatttatcagttttaatttctaagatggtcaatattgatagatatagtccacataaacaaactttatttggggtcctyaataatttttaagagtataaagcgattgtgagaccaaaagtttgataactgctagcctaacaaactagccaaacttagtgttgagaattagtgtttaaaa

SEQ ID NO: 348544 - DNA, 201 bp, Homo sapiens
gataccaaaataaataaaaaggaagaattcatagagattagagttatgaattaagtccagagctaaacatttagacagaaatgttttttgttagcatattraaccttgtatcctctttctgtctcacctgaactgacttgggtggctcctagggtttcatttttggggagcatcattaagactttttttttttttttctga

SEQ ID NO: 348545 - DNA, 201 bp, Homo sapiens
ccagaaggtacgaaatggtcagcggccatatttccggccaagcattgaccggacccaactgaatgaagagctagttttgctgatggagcgatgttgggctsaggacccagctgagcggccagactttggacagattaagggcttcattcggcgctttaacaagtgagagggcattatggggcaggggcttcccagggatag

SEQ ID NO: 348546 - DNA, 201 bp, Homo sapiens
gatcttgttcctcctctaccccgacttgcccacctccctctagtagatcttattcctcctctaccccgacctgcccacctccctctagtagatcttgttcytcctctaccccgacctgcccacctccctctagtagatcttgttcctcctctaccccgacctgcccacctccctctagtagatcttgttcctcctctaccc

SEQ ID NO: 348547 - DNA, 201 bp, Homo sapiens
ccacctacgcctggttatgcattaaagtttacaactggtcttccttggtatatccagctactcttgatacctgggtctcaagtcatgtcttcctaattagyagccaggtatctgaggccaccatgggtgttatatcattttggtcttcacccaagttctgttctcttcactaatcaagaagattgactgccctctccaggg

SEQ ID NO: 348548 - DNA, 201 bp, Homo sapiens; identical to SEQ ID NO: 74128

SEQ ID NO: 348549 - DNA, 201 bp, Homo sapiens
cggtaatgaagaggggtcaatgggggtctgagggctgatgtcaggaatagagtgggctgaagaagaaacagatgtcaggatcaccacagctttagtggggrttagtgaatatggcagagttgcccacacctcaagatcggggaagggtagactctgagggagccgtaggcatgagtgagtgggagaggagcccagggtaga

SEQ ID NO: 348550 - DNA, 201 bp, Homo sapiens
atgaccgagagactgactttgtcctctgggccatgggagacctggattctggggactttcaggtgatggaggaggaggcagggaagagagtgtggccctgyaaaatccagctttcaagggttcagtcggggcagaaccaaaactactagatgagggatttgttttctctgctggcactgcatcctggctgggtggtaggct

SEQ ID NO: 348551 - DNA, 201 bp, Homo sapiens
tgactgccctctccagggtagtcatttgtagctccacttatccctctttttaagcattttccctgtccctggtggctgggtgcctgtgtcctgcttatgayaccaggaacagatgactcttctgttcttcctgcttccttgggtggaaactgcaaaggatgccttccaaaatcagcttattatttttgtggacccaagatc

SEQ ID NO: 348552 - DNA, 201 bp, Homo sapiens
tttacaactggtcttccttggtatatccagctactcttgatacctgggtctcaagtcatgtcttcctaattagtagccaggtatctgaggccaccatgggwgttatatcattttggtcttcacccaagttctgttctcttcactaatcaagaagattgactgccctctccagggtagtcatttgtagctccacttatccct

SEQ ID NO: 348553 - DNA, 201 bp, Homo sapiens
actgcctcccctaagaaactgagggcagccttcaagaaaagggagcaggccaaaactttaatacctcttcctcccagttgtagaggaggcactggccccgyggcaaagtttcatagcaaaccataagcttccctttaatgtctgggggtttccatagtcctcgggcacccggttctaagacttgcaaaaattcccaaggtg

SEQ ID NO: 348554 - DNA, 201 bp, Homo sapiens
tcagggccagtgtctggaccaggcccagaggcaggaccaggatgagagccagagccatgaccaggaccagagccaggaccagagccaggaccaggaccagagccagagccagggacagagccacagccaggaccagagccagagccagagccatggccagcacctgagctggaaccaagaacaggcccagagctagagcct

SEQ ID NO: 348555 - DNA, 201 bp, Homo sapiens
gtcagggccagtgtctggaccaggcccagaggcaggaccaggatgagagccagagccatgaccaggaccagagccaggaccagagccaggaccaggaccagagccagagccagggacagagccacagccaggaccagagccagagccagagccatggccagcacctgagctggaaccaagaacaggcccagagctagagcc

SEQ ID NO: 348556 - DNA, 201 bp, Homo sapiens; identical to SEQ ID NO: 74127

SEQ ID NO: 348557 - DNA, 201 bp, Homo sapiens
agtcagggccagtgtctggaccaggcccagaggcaggaccaggatgagagccagagccatgaccaggaccagagccaggaccagagccaggaccaggaccagagccagagccagggacagagccacagccaggaccagagccagagccagagccatggccagcacctgagctggaaccaagaacaggcccagagctagagc

SEQ ID NO: 348558 - DNA, 201 bp, Homo sapiens
gagtcagggccagtgtctggaccaggcccagaggcaggaccaggatgagagccagagccatgaccaggaccagagccaggaccagagccaggaccaggaccagagccagagccagggacagagccacagccaggaccagagccagagccagagccatggccagcacctgagctggaaccaagaacaggcccagagctagag

SEQ ID NO: 348559 - DNA, 201 bp, Homo sapiens
agagtcagggccagtgtctggaccaggcccagaggcaggaccaggatgagagccagagccatgaccaggaccagagccaggaccagagccaggaccaggaccagagccagagccagggacagagccacagccaggaccagagccagagccagagccatggccagcacctgagctggaaccaagaacaggcccagagctaga

SEQ ID NO: 348560 - DNA, 201 bp, Homo sapiens
ctcagagtcagggccagtgtctggaccaggcccagaggcaggaccaggatgagagccagagccatgaccaggaccagagccaggaccagagccaggaccaggaccagagccagagccagggacagagccacagccaggaccagagccagagccagagccatggccagcacctgagctggaaccaagaacaggcccagagct

SEQ ID NO: 348561 - DNA, 201 bp, Homo sapiens
cagaccaggccagcctggaaaaggtggcaatagaggaaaggaggccttgacacagatgcccacagcttttccaggagggtatcatgctcaaggaaaggccytagctcatgccgtatcgatactggctactagggagagagctctgaaatcaagtatgttgatatgatttttctctcccatttagccactagctgctccagg

SEQ ID NO: 348562 - DNA, 201 bp, Homo sapiens
tttttttttttggtttggtttttcatttttgttttttggtactacaactacaactagtaaccacagcaaaaacagttctagcatagcagtttagggggacyatggggtcaaaactatttaaaaataatacaaagatcttatctgctttgtcacgcttgttcttttgtgattgtgtagggaagttttccagaggttacatgg

SEQ ID NO: 348563 - DNA, 201 bp, Homo sapiens
ccggattttaaattatcatttcacaaagtcatgtttcataaaatatattgaactgaagtctttccttgaagttgtgatgccagtttcctgttggagcagargttggtctcagtgactatgtggcctgaggcagggcctgagactgggaggtccagcagctcaggaaggggaaatgtgtgagactaatgggagccaagcagg

SEQ ID NO: 348564 - DNA, 201 bp, Homo sapiens
ttgtggtaggtgttccacacattaaatggatgagcacacagcttttcacaggtggaatcactgtctcaaagtatttccctcagttgtcatagggcctgaartctctctaattcactgggcggagacactgtgttcaagtggccgaaatgacaatgttagtattttactgatgacattaacagtgattaacatctcagagag

SEQ ID NO: 348565 - DNA, 201 bp, Homo sapiens
taggtgttccacacattaaatggatgagcacacagcttttcacaggtggaatcactgtctcaaagtatttccctcagttgtcatagggcctgaaatctctstaattcactgggcggagacactgtgttcaagtggccgaaatgacaatgttagtattttactgatgacattaacagtgattaacatctcagagaggagctg

SEQ ID NO: 348566 - DNA, 201 bp, Homo sapiens
gggatgtggaaatgaaggtgatggcaggccatggggaggggggcatggaaagggagggtgaaagtgattatgggaatcatagggaaagagagggagacaargggactaacatcgaagcatctgaatcatgtccactctcccacttccagggaaaaggaaagatgcgaacatactggctcttaggagagcggaaaggacctc

SEQ ID NO: 348567 - DNA, 201 bp, Homo sapiens
gtgggggttagtgaatatggcagagttgcccacacctcaagatcggggaagggtagactctgagggagccgtaggcatgagtgagtgggagaggagcccasggtagacctcaaagaaaggacactcttttctgtcttaggtgtaactgggctggttgtcatggacaagaacaatgaccgagagactgactttgtcctctgg

SEQ ID NO: 348568 - DNA, 201 bp, Homo sapiens
cgctggtgagcccttgtctcagctgttcctctgcctccctctgagttcctgtcccttcttaccctggatctctcccagcacattggcttgtaatgatagcmcctgcactaccaccatcatctaatgttcctttcatccttccgcctccatgttgcccttggccccagcggggatccagttacggctcgctcatgacagccc

SEQ ID NO: 348569 - DNA, 201 bp, Homo sapiens
ttcttcttaagaccctgctctaccacacccttgcttcagcaagtgtatgtaaaacagtcccaacttgagacagctcccatgcacagggattcccctcaaamccccccgccacttgtgtgccttaccttgcattagactgtaatgtcttcccagccactttcctccctcccacctgaaaagcctagctttcttgttacagct

SEQ ID NO: 348570 - DNA, 201 bp, Homo sapiens
gtggggagcagcaagggaggctctgggaaagggaggggcttgagagtgacagctcccttcctctggggtctggacaggctctgacttctgccagatggtcyatatggccccagggtacttatggtggactccaagaggggtgggctggggagcatctgctttggggttgataggttagggcactctctttcttgctgaaga

SEQ ID NO: 348571 - DNA, 201 bp, Homo sapiens
gtaccctgcagggcatggcctttctccacaacagcattatttcatcgcatgggagtctcaagtcctccaactgtgtggtggatagtcgttttgtgctcaaratcacagactatggcctggccagcttccgatcaactgctgaacctgatgacagccatgccctctatgccagtgaggcccacccccacaacccacttttta

SEQ ID NO: 348572 - DNA, 201 bp, Homo sapiens
tagtctccacctttcccagactctcccaacctgtttcttctcaaagggccagtctgtgctggggttgttggcctgaagatgccccgttattgtctttttggagacacagtgaacactgcttctcgaatggagtctaatggtcaaggtaagacattagccctcaaccccactgttggcctcaatttatcttgcccttttctt

SEQ ID NO: 348573 - DNA, 201 bp, Homo sapiens
tagacagatgtagctccagcactataattgtacactccagtcgaatttcttgtgaatcctttgacttccctaatcagaaccatcatgagatttagctcctrtcttcctggagtataaatacagcctatccaacatttctctccagtcctctccagacatggaagaatcatataggatgtgggtccagactgatttagtggg

SEQ ID NO: 348574 - DNA, 201 bp, Homo sapiens
ttgtttttttctgccagatgagagatgttcagttcaaccatctcactcgcttcattggcgcctgcatagaccctcccaacatttgcattgtcactgaataytgtcctcgtgggagtttacaggtgagggataggtgtaggagattatggcaggggtgggaaggatagacccaaagttatactgactctatgctgggtgata

SEQ ID NO: 348575 - DNA, 201 bp, Homo sapiens
attggtttcgtcttctagtccgtgtgaacgttcttttcccattggatccccttactagtttctctgtgagagaaacttccactccattggaaggattaatrgagcctggaggtgggattttctcctagttgaatctgatacacaattctggcttctaggttgcggctcccgagtgggtggttcttttcgttcttggttcgt

SEQ ID NO: 348576 - DNA, 201 bp, Homo sapiens
aacaaactttatttggggtccttaataatttttaagagtataaagcgattgtgagaccaaaagtttgataactgctagcctaacaaactagccaaacttaktgttgagaattagtgtttaaaatgtgttaaaaacctatcatcagcctttattgaaatataaattgtgttgaacctgatcttttctcgcccttttcctgac

SEQ ID NO: 348577 - DNA, 201 bp, Homo sapiens
cactcagaccagtcaaggggcatcatagccctgaatcagttttctttcccctttgtggtataaaattttatattaaagacaggagagcataattaagggaraacagttttattagcatcacagggtccatttttccctttccatccaagcatccagagtctggtgtcctttaatcagttggcaggttcaacctggaggcca

SEQ ID NO: 348578 - DNA, 201 bp, Homo sapiens
ctaggttgcggctcccgagtgggtggttcttttcgttcttggttcgtcctcttcaggtctggttcctattggtgcgcggggagaagggggcggggctccgycacctgctgcagaaagggctgttttagaccctctcaccgctttggccaggaggagggcggggctctgagggcatccggcgcttattggctccaagaacca

SEQ ID NO: 348579 - DNA, 201 bp, Homo sapiens
ccaggctggggggtgctcgcgtctcccctgtaggccagagcagccccaagttctgggggcggtggggctgctgctttatccccatggcgctgccatcactyctgctgttggtggcagccctggcaggtggggtgcgtcctcccggggcgcggaacctgacgctggcggtggtgctgccagaacacaacctgagctatgcct

SEQ ID NO: 348580 - DNA, 201 bp, Homo sapiens
atagatatgcattgggagcttcccagggatggttggtcgggcacggtgctatacagtatcaccaattatttgattgccttttctttgattcctcattccaycatcctccccattccacccaccccagcgctgaagatccatgtctcctctaccaccaaggatgccctagatgagctaggatgcttccagctagagcttcgg

SEQ ID NO: 348581 - DNA, 201 bp, Homo sapiens
ccagcttcctaattttccggtgagttctgggtttcttgctgacctactccctgcccccattgccacacaacctctggctgaagccaggtggtccctataaygtgggatagggtagtaggtttcttaatttgctggttgtctcttagatccaacagcgtcttcctctctagcctttctctttagttgtcgcttagcctaggt

SEQ ID NO: 348582 - DNA, 201 bp, Homo sapiens
ctgagctcagagtcagggccagtgtctggaccaggcccagaggcaggaccaggatgagagccagagccatgaccaggaccagagccaggaccagagccaggaccaggaccagagccagagccagggacagagccacagccaggaccagagccagagccagagccatggccagcacctgagctggaaccaagaacaggccca

SEQ ID NO: 348583 - DNA, 201 bp, Homo sapiens
caggggcttcccagggatagaagactcattagtcctagtgcatgaagtggggcaggtgggaccagagggtgggttggataggaagtcctgggaatcttcakaatcttagagcaagtgccttatcctggcctccctctagggagggtggcaccagcatattggacaacctcctgctgcgcatggaacagtatgccaataact

SEQ ID NO: 348584 - DNA, 201 bp, Homo sapiens
gctgagctcagagtcagggccagtgtctggaccaggcccagaggcaggaccaggatgagagccagagccatgaccaggaccagagccaggaccagagccaggaccaggaccagagccagagccagggacagagccacagccaggaccagagccagagccagagccatggccagcacctgagctggaaccaagaacaggccc

SEQ ID NO: 348585 - DNA, 201 bp, Homo sapiens
ggctgagctcagagtcagggccagtgtctggaccaggcccagaggcaggaccaggatgagagccagagccatgaccaggaccagagccaggaccagagccaggaccaggaccagagccagagccagggacagagccacagccaggaccagagccagagccagagccatggccagcacctgagctggaaccaagaacaggcc

SEQ ID NO: 348586 - DNA, 201 bp, Homo sapiens
gggctgagctcagagtcagggccagtgtctggaccaggcccagaggcaggaccaggatgagagccagagccatgaccaggaccagagccaggaccagagccaggaccaggaccagagccagagccagggacagagccacagccaggaccagagccagagccagagccatggccagcacctgagctggaaccaagaacaggc

SEQ ID NO: 348587 - DNA, 201 bp, Homo sapiens
tttgtccatgtcctgctgcagacagggtgttcattcattccgcaaatgtttactgagtattcaccaggtgctgggtggagaaagaagacttaaagattccstagacatctcctctcccctagactcaggaccatggcacttattttctagtcaatattctggtctccagcatgtcaggatgattaatgatggtgtcaagct

SEQ ID NO: 348588 - DNA, 201 bp, Homo sapiens
ggggctgagctcagagtcagggccagtgtctggaccaggcccagaggcaggaccaggatgagagccagagccatgaccaggaccagagccaggaccagagccaggaccaggaccagagccagagccagggacagagccacagccaggaccagagccagagccagagccatggccagcacctgagctggaaccaagaacagg

SEQ ID NO: 348589 - DNA, 201 bp, Homo sapiens
ttgttccacttttggtcctagactggatatactaactagtgtttttcagtggggttaagatcaaaggtgaattttccattggtcttcttttaggaaagaaytttcacccccagtctctgtgtttgttagtgagcatagggcatgtgccagatatgccgagaatgcagccttatcttccagccctgtctctcaggtgtaaca

SEQ ID NO: 348590 - DNA, 201 bp, Homo sapiens
caatagacgtttcctggtggctggtacgagtctttctgggtggtgctggagggcatgggtgactttagttgcatagtcagcagtccccggtgtccgtgtcrgaagaaaaaactctcagagccatcctgcatgcttgggacttgatccaggtggttggtggctctctgtggatcccaagttgaatgactataatatcccttc

SEQ ID NO: 348591 - DNA, 201 bp, Homo sapiens
caccttcccagaaccagtcctatctacctttcaggaggagtgccactccctcttcccagatgtatgcaacacaacacacacacacacacacacacacacamgcacacacacacgcagagagagagaggttagtagccctttcaaagccttcagactcacctgtgtatattttatatcatgtatattttaccaagtttccct

SEQ ID NO: 348592 - DNA, 201 bp, Homo sapiens
ccaccttcccagaaccagtcctatctacctttcaggaggagtgccactccctcttcccagatgtatgcaacacaacacacacacacacacacacacacacacgcacacacacacgcagagagagagaggttagtagccctttcaaagccttcagactcacctgtgtatattttatatcatgtatattttaccaagtttccc

SEQ ID NO: 348593 - DNA, 201 bp, Homo sapiens
gggaaaccatgcccgtcctcgccctatacactcccaccccactccagggctccaggagcgctcttagcttgtgatttctggagaaatagcttgaaggggggagagaaaccgtggctcttagcgcgggcagagaatgggcttatgtgcatgtcctttatgacagttggagaaaaatccccaaggtcccatagcagtccctct

SEQ ID NO: 348594 - DNA, 201 bp, Homo sapiens; identical to SEQ ID NO: 74125

SEQ ID NO: 348595 - DNA, 201 bp, Homo sapiens
ggccagacgctgacacagcggggacccccacaggcctcccacggcccatctgtctctcacctgccagggccccggagatgggccttccaggtgtctgagcyccccggcatgtaggaccccagcaggctgtgtggcagtgagcccgatgccaggggacagatggcagaggtggtggcctggctgtgagggacaggtgggcct

SEQ ID NO: 348596 - DNA, 201 bp, Homo sapiens
catggccaggcctctctgggactgtggggggcacccacaggcagttcagtgcttcctgctcaggcagacgctgtagggagtttggtccaggaagggggacrgcagccaggagcgtctggatctgccaggtgggggcaggtgcgggcaggtaggaaagagaaaaaagccttggtgcaaggagagggaggttgagggcagagt

SEQ ID NO: 348597 - DNA, 201 bp, Homo sapiens
ccagctttggctggaccgctaccctctgatgagccacaaggctggtctcgagaaagcccacgggggtgggcgaggcgtggatggccaggcagggctcgaaygggcttcacaggactgggctgcagcccttcctccctcctggctgtgggaggagacagccgagcttgttagggcatcagcgagctcctggtgtcgttcacc

SEQ ID NO: 348598 - DNA, 201 bp, Homo sapiens
tggcagccctgggctggctactctctaagggtccctggggagagggcgagaagatgaggtcggcctcctcccgggctgtgacatcctccctggccatgacrtcctccctctccatcccctgcccacagcttcacgcaggccatgctgagccagcccaggatggagagcctggacacccccgcggcctacagcctgggcctc

SEQ ID NO: 348599 - DNA, 201 bp, Homo sapiens
ccagccagcagggccatgacttttggttgaactggccacccctggattttggggaggagagaaaggatgtcctgggctgcttttctcctctcaccttttgygttcagaggcagaggtgtgccctggtcctcactctctcccccactgttcttcccctccaggcccctgcctgcaccctatcctgccatgtccctggtgacc

SEQ ID NO: 348600 - DNA, 201 bp, Homo sapiens
gtgtcactcagaagtttaagggcacttctgtcactgagctttcattctagggagggagattgtaggcctggaaagccagagagttctctgaaggagctaayaccagttagtgttttgaagagtagctgatgggaaggcgggattgaaatcccaagagagcctgttgccgtatctgcgagggagggacctgggatctgagag

SEQ ID NO: 348601 - DNA, 201 bp, Homo sapiens
agttccagccgtagacagcagcaaagcactgtctggtttgttcttggatcccggggcctgggagtcctcctggggtagctggaggaagtcagcttcttacmgatggtggctcccagctttccctcctctcatatcagcgttggcctcacctggcatctgcccagccagcagggccatgacttttggttgaactggccaccc

SEQ ID NO: 348602 - DNA, 201 bp, Homo sapiens
ttgcccgtggccccatctccgtcggaccagcctggcttgcaggcactgggtgcacacaggaaggggcctgtgaatgctccatgccagcacgtgcggagccrgggcaggccttgctggtggtcaggcccctcacacactcaccgagggtggcctaggccttccccctccgtggccaggcacccttgctgccttctcgtcatt

SEQ ID NO: 348603 - DNA, 201 bp, Homo sapiens
aaagtgtacaacaaggtgtctcgaactgggtcagctcacagcctgtgccaggatggctgggagtgacatggacaggaacaaaagggaggggagagggagcrcactcccacctggagcctggcaggcaggatccccactgagccgatctcttccactgagccggcccatccctccctgtaggttcctcatactccagagatg

SEQ ID NO: 348604 - DNA, 201 bp, Homo sapiens
gatggggcgcgtgtagcctggctctccccattgcccgtggccccatctccgtcggaccagcctggcttgcaggcactgggtgcacacaggaaggggcctgygaatgctccatgccagcacgtgcggagccggggcaggccttgctggtggtcaggcccctcacacactcaccgagggtggcctaggccttccccctccgtg

SEQ ID NO: 348605 - DNA, 201 bp, Homo sapiens
ctgctggcactggcctggtggggagcctctgctatcaggctagggctaactttagaattgtggtgcctgagcaacgtggtgacaaagtgtacaacaaggtrtctcgaactgggtcagctcacagcctgtgccaggatggctgggagtgacatggacaggaacaaaagggaggggagagggagcgcactcccacctggagcc

SEQ ID NO: 348606 - DNA, 201 bp, Homo sapiens
cttgcattctcccttctatcaaagcttcctcttagatgctccatttacctttttcatcacccactcttcatgaagcctgtaaggcacatctctgccccaarcagcttctaatccagttctttcgctcccttcattccttactcacatgtgcatttattcactcactgatccagccagtattgattcagggccggctgaggg

SEQ ID NO: 348607 - DNA, 201 bp, Homo sapiens
tcgagaccaccctggccaacatgatgaaactccgtctctactaaaaatacaaaaattagccgggcatggtggtgcatgcgcctgtaatcccagctactcgrgaggctgaggcaggagaattgcttgaacccaggaggcggaggttgcagtgagccgaggttgcaccagtgcactccagcctggggcaacagagcgagactc

SEQ ID NO: 348608 - DNA, 201 bp, Homo sapiens
agtggacgtgggcttttagctggcaacagccctgctgcccctggggcactgcctgcctctgaatggcagctgagctgggcagcagcattactctgtgtgcygctggcactggcctggtggggagcctctgctatcaggctagggctaactttagaattgtggtgcctgagcaacgtggtgacaaagtgtacaacaaggtgt

SEQ ID NO: 348609 - DNA, 201 bp, Homo sapiens
catgtccatgagtgtgaccttaaccaccagatctcaattatatagaaaggagagaaacatttttttctttctttttttttggagacagggtctcactctcrtcacttaggctggagtacagtggcacaatcacagctccctgaagtctctctctcctgggctcaagtgatcctgccgctttagtttcccgagtagctggga

SEQ ID NO: 348610 - DNA, 201 bp, Homo sapiens
agaaatctggctcccagggcatggccgcatatccagtgggctccaagccagtgtttctggaccagaaagcgtcgtcctctgccagggcctcttgcacttgygggaaagctgagctgagctgggcttactggcggagcctgtggcacaagaagggtttttctttgagcagagccagctggctcatcaggcctgactgagacc

SEQ ID NO: 348611 - DNA, 201 bp, Homo sapiens
actggccctgtctctccctctagaacctttccttgtggccagggcaggctcaggacaggctgccgtcagccaggcccactccagggctcccaggtcagagyggccatggtagcttacaatgcggcctgcaggacccagcaggcagccggcccctctcccctcccctctcccgcctgcgctctgaaggctccaagtcagtgt

SEQ ID NO: 348612 - DNA, 201 bp, Homo sapiens
cagtcatctcccgccccccagtccctggcagcactcgtctgctttctgtccccatgagtgtgcctgttctggacctttggggtgtggcatcgttctccatrggagatggcaagctttgtggggtccaggctgtgctcaaaagcctctgcacccagcaggagtcggttggtgggcagagaacacaggcacgtgcttgagcca

SEQ ID NO: 348613 - DNA, 201 bp, Homo sapiens
gccggaccgggctgttgggccaggctctgacaggaccctcgggaccagctcctgcatcccccacacccccacaccctttcccatgcatgcctcgcttcagyggctgtctagaggtgggtattcttttttgtgcagtaaaatagacataacataaactgttatgaaccattttaagctttacaattcagtgacatttagcag

SEQ ID NO: 348614 - DNA, 201 bp, Homo sapiens
agccggaccgggctgttgggccaggctctgacaggaccctcgggaccagctcctgcatcccccacacccccacaccctttcccatgcatgcctcgcttcartggctgtctagaggtgggtattcttttttgtgcagtaaaatagacataacataaactgttatgaaccattttaagctttacaattcagtgacatttagca

SEQ ID NO: 348615 - DNA, 201 bp, Homo sapiens
aaagccagactcaggaaggggcagtgctgcctgggctcggtcggcccaagtggcccagcgtcggccggagggcctgggtcacggcaggaagggccagcctrggcaggtgggccgtggccctgagagaccctggctccagccaggcctgacctgcctctgtcctttcaggcacgccagccccacgggcctgctcctgacggt

SEQ ID NO: 348616 - DNA, 201 bp, Homo sapiens
gtggctcacacctgtaatcctagcactttgggaggccgaggcgggtggatcacctgaggttaggagttcgagaccaccctggccaacatgatgaaactccrtctctactaaaaatacaaaaattagccgggcatggtggtgcatgcgcctgtaatcccagctactcgagaggctgaggcaggagaattgcttgaacccagg

SEQ ID NO: 348617 - DNA, 201 bp, Homo sapiens
tgtgaatggggggcaagggacaatgcctgggtggtccccaggtcacatcccagcctctgccacgtagccaaggctgttttaggagtctcctccaggaagcrtccagtcagaaggtggatgctggctcgggagccctcaggggtcaggcctgaccatctctccaggttaggtttgaatcagcgtcagaaagcttctttgagg

SEQ ID NO: 348618 - DNA, 201 bp, Homo sapiens
ggggttttctttgctttgctttgcgcctgtgatggacactttgtgaggcccccagcggaaatttgggcctgtgctctgaaggccgcgtgctcctgcagccwtgggctcctctggcagttctgctggggcccttttagagtctgtgggatgcactcagcagctcccaggtagggcctgaggtcagaccccatgtgtctcccc

SEQ ID NO: 348619 - DNA, 201 bp, Homo sapiens
gaggttgagcatgagcactgaggctgggggaggcgagtgtcccccgctgtgccatggcccctcgggtgtgaagctgggtcatgttgctttgctggggcctygggtgcaggttgtctggaagtgggcagctggtgctgggacctgctctctggcactagtgtgctcactgcagggcgagagcttgggtgcaccttggacagg

SEQ ID NO: 348620 - DNA, 201 bp, Homo sapiens
cacagcccctggcccaggcctgcccatgcgccctctgtgcccgccagacagctcctttcctccctctccttcctctcttcctccctccctccctcctcccyggcagcagcccagcacctgcgggagctgtgggatcagaggtaactatagaaatagattgggggacagcttgacggcagctatttctggaaacccaaagca

SEQ ID NO: 348621 - DNA, 201 bp, Homo sapiens
agaggggacaccctccccctctcctcctggcatccatgccgccacttcctgttttcatcccagttctgctgctggtggcagggtcacccctcagcccccargactccaggccccctgactggggcaggtcgaggacttctatgcttggtgggctttggggtgattctccccggggtgctagaggccctcagcccttcagct

SEQ ID NO: 348622 - DNA, 201 bp, Homo sapiens
tgcagctcctcccctctgaggcccctctctcccacagtgcaccctgcccaagacctctcgctccattgggccgggggtggctcctgcacatgtgctccagrgaggaaaggcatttgacaggtcagctgcagacaggtgttctgacactcactgtcaaccagaccaaagccccagcccttggccctgcagaggatacctata

SEQ ID NO: 348623 - DNA, 201 bp, Homo sapiens
tgggcctttctgggtgatctggcttctcttgtgcaaggctgcccacagacctttgttaccgcagcttggagtggtccttgtcaggtgtcccctccctcatrcctcctcaccctgccctctctgactcagggttgctgacttttggggccatccctggcactacaggtgtccagcaatgtccccggcctctgcccactagat

SEQ ID NO: 348624 - DNA, 201 bp, Homo sapiens
gaaagggcagggaagaagcatgggtcctggcgtggagacagaggccggagctgccacctcaggccagacgggcaccacgggcatgtgcatgggcagaggcygttcccatctgagtgggacccagaaggaaatcagacacagtccctgctctgagccacggatagggggagagacgggcgctctcacatgtcctgggccaca

SEQ ID NO: 348625 - DNA, 201 bp, Homo sapiens
cccacacctgccagtgtgaggcacacaggtggcaggtgctggagccggaccgggctgttgggccaggctctgacaggaccctcgggaccagctcctgcatmccccacacccccacaccctttcccatgcatgcctcgcttcagtggctgtctagaggtgggtattcttttttgtgcagtaaaatagacataacataaactg

SEQ ID NO: 348626 - DNA, 201 bp, Homo sapiens
ttgaacccaggaggcggaggttgcagtgagccgaggttgcaccagtgcactccagcctggggcaacagagcgagactccgtctcacatttttttttttttwaaaagaaagcttctttgcccatctctggacttgggacaggcaccttcctgctgtcaaatgaaaaggtcagagaagaagaactggaactagatgatgaggc

SEQ ID NO: 348627 - DNA, 201 bp, Homo sapiens
ctccaggtggcaggaacaccgtgaggagcatgcaacgtgctggagaccatggggcatgtgacctccgggcacaccctggacagacctgggtgagaggtggkctgggacgccaggacggtgaggggcttcaaggtgtgtttgtcctttgtccttatacaggtgacctgcatgggcgggtgaggtccatcagaatgctctaga

SEQ ID NO: 348628 - DNA, 201 bp, Homo sapiens
ttgttctctgctcacggtttaggttgcacgatgggaacacaagacccgcaagctgagcagggccttcggatccccctacctggcctgctactctctaagcrtcaccatcctgctcctgaacttcctgcgctcgcactggtaagcacagctctctcactggggagccacaacccctgggctagcgggagggccgctactggt

SEQ ID NO: 348629 - DNA, 201 bp, Homo sapiens
tgtttttaccaggtttattgattgagtttttggatttctagtagttcctttgttctctctctttttttttggagacggagtctctctgtcacccaggctgragtgcaatggtgccatctcagctcactgcaacctccgcctccggggttcaagggattctcccacctcagcttcccaagtagctgggattaaaggcacccg

SEQ ID NO: 348630 - DNA, 201 bp, Homo sapiens
tctgctggggcccttttagagtctgtgggatgcactcagcagctcccaggtagggcctgaggtcagaccccatgtgtctccccagggacagatcttctccrccagacgtctctttctgcctcttggtgggttcatggctgtgtctggttgaagagttgtttccagaaggaccttgttgtccgtccagatgaactgagcaag

SEQ ID NO: 348631 - DNA, 201 bp, Homo sapiens
aagggaggcacactatcggacgtcccccgtggggctggcatgcagattgaataggatacatggctgcactcaccccagcgcctggtgtgcagcaggccctrtgccagtgtcggctgacgtcactgtgctgtgggtgtcatcagagcctgcatgccacagtcagtgcagtggcacagggcctgcatgccacagttaaggaga

SEQ ID NO: 348632 - DNA, 201 bp, Homo sapiens
cctgaacttcctgcgctcgcactggtaagcacagctctctcactggggagccacaacccctgggctagcgggagggccgctactggtggtacctcatcccycaccacgcgggagccttgtgtctgagcactcaggggttagctctcaaagccacctgccacagcaagccaccctacccctcccagccgtttagactctggc

SEQ ID NO: 348633 - DNA, 201 bp, Homo sapiens
ctgttctttccctatcactccagatgccagggcagtggtccaaggaccagcatggactccctcttctcacctgcccccggatctgtaccctcgcggactcyacctggcttcatgccatcacccccgccagatcaccagcagcagctgcttgcagccagtctccccactgctcctctctagccacccttgagggccatgctc

SEQ ID NO: 348634 - DNA, 201 bp, Homo sapiens
ggagagacattccctggactctgagctgggagccattgcagaggtggcatgatctgagtcagagtttcaaggtcactgcaccaaggacagaggagaagagrcaaaggtggagctgagaggccagcaggccccagatggcagcttgaccacagtgggactggcggaggtgggagcagtgatcagggagagctgagagaggtg

SEQ ID NO: 348635 - DNA, 201 bp, Homo sapiens
tgaatcttcacagcaaatgctgttaatatcccctttggagactgaagcttgaagaggttcattcatacattcttcaaatgtttattgagcatctactgtgygctgggcaccatcccggcccctggccctcacgcagcagcttcagtggtgaatgaatgtatagcactgccggtgacacagcaggcaaggggagggacagac

SEQ ID NO: 348636 - DNA, 201 bp, Homo sapiens
ccccttgccatcctcgggagcccggtgcggttgtgcccccctcatatctctgggcctctcagcacacaggtctgtcctgcctttgatagcaagacggaccygggcaaggttcctggcttctccgagccttggtattctcatctgtgacccaggcacagctgcctggctcactgttgcaagggccgggatggtgcctggagt

SEQ ID NO: 348637 - DNA, 201 bp, Homo sapiens
acggtgaaaccctgtctctactaaaaatacaaaaaaatagctgggcatggtggcgggcgcctgtagtcccagctacttaggaggctgaggcaggagaatgrcgtgaacccgggaggtggagcttgcagtgagcagagatcgcgccactgtactccagcctgggtgatagagtgagactccatctcaaaaaaaaaggaaaga

SEQ ID NO: 348638 - DNA, 201 bp, Homo sapiens
aggcctgcccatgcgccctctgtgcccgccagacagctcctttcctccctctccttcctctcttcctccctccctccctcctccctggcagcagcccagcrcctgcgggagctgtgggatcagaggtaactatagaaatagattgggggacagcttgacggcagctatttctggaaacccaaagcagctgcgcccgggctc

SEQ ID NO: 348639 - DNA, 201 bp, Homo sapiens
acaggcagagattgtgctgttctgtcctgtccctccctttgggtgacagagaaccacgaacgtctgtgtcctcagagggtcacgggacacgttccagaggkgggtggtggggagcacagtgagcacagaacatggtattttcaatccaggctgtactggcgaggagagagagtctctgtgcccagccctgctgatcccccc

SEQ ID NO: 348640 - DNA, 201 bp, Homo sapiens
gatcatcccattgcattctggcttgggcgacagagcgagactccgtctaaaaaaaaaaaaaagtgagagagagagagcaggaaggaaggaaggaaggctcycatgcagaaggctccggccttggctgagcatccagtttgctgggtacctgggccaggcccttctctcttgggcaatgagactcccaatgacagctgcctc

SEQ ID NO: 348641 - DNA, 201 bp, Homo sapiens
agggcttctctgtctcttttctgcatcctgtgcttggctgaagatgagaaccttgctttcccactgagaggcagtgggccacagcactgcgggagccacgrcatctgcagacgcatttgatttccccattaatagcaaagctcccactccaaggatcttccagcagacaaagggcattttaaccttcctctcagtcccagt

SEQ ID NO: 348642 - DNA, 201 bp, Homo sapiens; identical to SEQ ID NO: 74157

SEQ ID NO: 348643 - DNA, 201 bp, Homo sapiens
catcccctggggtactccctgcagccttgggccctgctcctgcaacggtggccgaacggtgcaaaggagggggcggcccagtccctgcaggctgccctcarcctgggtttgctcatctgtgagatgggatcacatgtataatcctggctacttcacagagcccaggcgaggatctcatggacttgtgcatgtggaaaagcc

SEQ ID NO: 348644 - DNA, 201 bp, Homo sapiens
tttatgaatcatgcttttcatattgtgcctaagaaatcatcatataatccaagatcataaagattctctctagtctattttcttctaaaagttttagaagrctttatatatttagattgatatatttatatatagatttaggtttatatttctatttatagtccatcttgaattcatttttatattttttctgagttatgg

SEQ ID NO: 348645 - DNA, 201 bp, Homo sapiens
gttcccaaggctgccatgtgctgtggtcaggtccagccactggatggcgctgctcaggtcagctgcgtcctcccgattttccacctgcgtttttttttttctttctttctttctttctttctttctttctttctttctttctttctttctttctttctttctttctttctttttctttctttctttctttccttccttctt

SEQ ID NO: 348646 - DNA, 201 bp, Homo sapiens
ttctttccacattcatttgttttggcagccttgttggaaatcacttgccatgtatgtggaagtttatttctgggctctgtatgctattccattggtctatrtctatccctatgtcagtgccacactgtcttgattactgttgcattgtggtaagtttgaaatcaggaagtgagtcctccaactttggttttttgttttttt

SEQ ID NO: 348647 - DNA, 201 bp, Homo sapiens
tcctcccgattttccacctgcgtttttttttttctttctttctttctttctttctttctttctttctttctttctttctttctttctttctttctttctttctttttctttctttctttctttccttccttctttttctttttctttctttctttttctctttctttttctttctttctttctcattagattttttttaat

SEQ ID NO: 348648 - DNA, 201 bp, Homo sapiens
atgtccttgagcccactggagtctgtcccccttgccatcctcgggagcccggtgcggttgtgcccccctcatatctctgggcctctcagcacacaggtctrtcctgcctttgatagcaagacggacctgggcaaggttcctggcttctccgagccttggtattctcatctgtgacccaggcacagctgcctggctcactgt

SEQ ID NO: 348649 - DNA, 201 bp, Homo sapiens
cctcccgattttccacctgcgtttttttttttctttctttctttctttctttctttctttctttctttctttctttctttctttctttctttctttctttctttttctttctttctttctttccttccttctttttctttttctttctttctttttctctttctttttctttctttctttctcattagattttttttaatg

SEQ ID NO: 348650 - DNA, 201 bp, Homo sapiens
gactccaatgggccggaacgccagccttgctggcaggaagaggccctccaagcgcctctcgtggatccggcccagatccggtcctgaggcccctcccaccrgagcctggggtgccctcacatgccctgcgccaacttcgcaacagcccagcttcccggctgctgtgtgccctgcctgtgtcaatattatgactggacttcc

SEQ ID NO: 348651 - DNA, 201 bp, Homo sapiens
gttgggcctgagtgacccgtgggaggcaaggccgttggctgccctggggcaaccgtgggaggagaggcttgtggaggaagagctcggttttgcctgtgtcmgacacggatgtccttgggctccagacagtgtgagaaggccaggcatggtggctcacgcctataatcccaagcactttgggaggccaaggcaggcggatcg

SEQ ID NO: 348652 - DNA, 201 bp, Homo sapiens
gctgggtcatgtggtggtaggtgtgtgcataacacttcaagagactgccaaactgggctggatgcagtggctcatgtctgtaatcccttgcgaggccgagrtgagtggatcacctgaggtcaggagttcaagaccagcctagccaacatgttgaaacccctatctctactaaaaatacaaaaattagccgggtgtcgtggc

SEQ ID NO: 348653 - DNA, 201 bp, Homo sapiens
attggttccagttccccgtggataccaaaatcggcagatgctcaggtccctgatgggaaacaatgttgtattcgagtataacgtatgcccaccctcccatrtactttacatcatctctagattacttatcatacccaagacagtgtacatgctgggtagttacactgtattattttttatgttattactttttgtttttat

SEQ ID NO: 348654 - DNA, 201 bp, Homo sapiens
ggggagagtatccggacggcatctggaatgggatgacgaggcccagctctgtgatgccagaagcccagtgggtggatcagttgagccaaggagttggagaycatcctggggaacatggcaaaaccctgccactacaaaaaatacaaaaattagccgtgtgtggtggtgtgcacctgtagtcccagctactgggttggctga

SEQ ID NO: 348655 - DNA, 201 bp, Homo sapiens
ggagtgagctcttcaaagtggtttcaaaaggagaaaagttaagaaacatgttgcagttccgtgggctgctgccggggagagtatccggacggcatctggartgggatgacgaggcccagctctgtgatgccagaagcccagtgggtggatcagttgagccaaggagttggagaccatcctggggaacatggcaaaaccctg

SEQ ID NO: 348656 - DNA, 201 bp, Homo sapiens
gccctctgctgtctgcgtgcctgttgggtccctctgactctgcccattgttgaactctctgaagtctcctggagggcagggccctgtctcacctgcaggtytcgccacagcccgctctggggcctccctcagtgatggtgtggccagggctgatgaatagccgagggaccctgccttgcctcatccacaggtgattacttc

SEQ ID NO: 348657 - DNA, 201 bp, Homo sapiens
tgcagtaagatttggccgggcgcggtggcccacgcctgtaatcccagcactttgggaggctgaggtgggtggatcacctgaggtcaggagttcgagaccarcctggccaacatagtgaaacctcatctctactaaaaatacaaaaatttagccggatgtgatggtgtacgcctgtagtcccagctactcgggaggctgggg

SEQ ID NO: 348658 - DNA, 201 bp, Homo sapiens
ccccagagcctctggtggaagcacagcccagtcggcaccttgattttggcccagtggtaactgattggggattgctgttgttttcagcccctaagttggcrgtcatttgttacagcagccacaggaagcgaggccagggtatttaaaaagccaaagacccctgctggaagacgttgtgggcctaacctttggagtgttggg

SEQ ID NO: 348659 - DNA, 201 bp, Homo sapiens
ctcccgattttccacctgcgtttttttttttctttctttctttctttctttctttctttctttctttctttctttctttctttctttctttctttctttctttttctttctttctttctttccttccttctttttctttttctttctttctttttctctttctttttctttctttctttctcattagattttttttaatgg

SEQ ID NO: 348660 - DNA, 201 bp, Homo sapiens
tcagggtgacccttgttgactaacattctgcttttcttctgctgtccttgttggtgcagttaagcttcctgttgccaagggatttttcttaaagaaagaargaaagaaacatacaacatacaacattacatatttgcttatgtggtagctctactccctcctcaatcaaaatctccggttttaaaatatgtcagtccctgg

SEQ ID NO: 348661 - DNA, 201 bp, Homo sapiens
tcccgattttccacctgcgtttttttttttctttctttctttctttctttctttctttctttctttctttctttctttctttctttctttctttctttctttttctttctttctttctttccttccttctttttctttttctttctttctttttctctttctttttctttctttctttctcattagattttttttaatggg

SEQ ID NO: 348662 - DNA, 201 bp, Homo sapiens
tgacctcgtgatccgcccgcctcggcctcccaaagtgctgggattacaggcatgagccaccgcgcccggccgacctagtgcttttaactgctgtagtttarctgctgtaggaatgggccgtgggttttttttttttttcttcatttctttggttgctggacacctaagttgtttgtcattgttcctgacgttttcatgcaa

SEQ ID NO: 348663 - DNA, 201 bp, Homo sapiens
gattacttatcatacccaagacagtgtacatgctgggtagttacactgtattattttttatgttattactttttgtttttatttttttcctgaatttttctttttttttttttttgagacagcatctcactctgtttcccaggctggagtgcagtggcatgatcttggcttactgcaacctctgcctctcaggttcaagcg

SEQ ID NO: 348664 - DNA, 201 bp, Homo sapiens
ctatcactccagatgccagggcagtggtccaaggaccagcatggactccctcttctcacctgcccccggatctgtaccctcgcggactccacctggcttcrtgccatcacccccgccagatcaccagcagcagctgcttgcagccagtctccccactgctcctctctagccacccttgagggccatgctcagaggtcccca

SEQ ID NO: 348665 - DNA, 201 bp, Homo sapiens
agtgtagacaaaaggtggactacaggtgggcctggggcttgtgagggaggaccccaagtgcatacctgcaatctggactgtctgctcaaggatggtggcakgtgtgtgtgtgtgtatgtgtgtgagtgtgtgcatgtgtgtgagtgtgtgtgtgtcagaagttaggatgggggcatgagccaaactgtctgagacccttgc

SEQ ID NO: 348666 - DNA, 201 bp, Homo sapiens
gacaaaggtggagctgagaggccagcaggccccagatggcagcttgaccacagtgggactggcggaggtgggagcagtgatcagggagagctgagagaggyggcttggccagcccatggttgggcctgagtgacccgtgggaggcaaggccgttggctgccctggggcaaccgtgggaggagaggcttgtggaggaagagc

SEQ ID NO: 348667 - DNA, 201 bp, Homo sapiens
ggactacaggtgggcctggggcttgtgagggaggaccccaagtgcatacctgcaatctggactgtctgctcaaggatggtggcatgtgtgtgtgtgtgtakgtgtgtgagtgtgtgcatgtgtgtgagtgtgtgtgtgtcagaagttaggatgggggcatgagccaaactgtctgagacccttgcttccatctggctcaga

SEQ ID NO: 348668 - DNA, 201 bp, Homo sapiens
tttcagtgctcagtttccgtccttcatcttggctcccacagaaggtgaaaaaagcatatttcttgctcactttcccagtttccttgggtttcaagacccaraagcactcacttttatccttgtcccatttttatggggctttctgtctggtagggctggccttgctcaggctggctctgctcctcactgcctggggtctgg

SEQ ID NO: 348669 - DNA, 201 bp, Homo sapiens
gcctctgccctctctggcctctgtgcccttattatgtgtaattctgttctgcaccgccctgctgtgtaaacttggcaagttctggtcccctctcctgcttrtagtttcctgggctaaaatcaaaggaggtaaattatctcccaaggtcctttccattctggatcctctgttaatccaagggagatggggaagagggcttgg

SEQ ID NO: 348670 - DNA, 201 bp, Homo sapiens
cctgcttgtagtttcctgggctaaaatcaaaggaggtaaattatctcccaaggtcctttccattctggatcctctgttaatccaagggagatggggaagagggcttggaaacagctggatttggggatgaagattccactgggggcagaggggaggcagccccccacccaagccccatactccatctccattcctcactcc

SEQ ID NO: 348671 - DNA, 201 bp, Homo sapiens
ccttgcggggctgctgagttcttgatagaggtaacaagcaaccctggggctcccgtgtgcaggaggaaggttggggactgcctggttgtgcttcggacccrgaggcagacagaggaggcctttgaacttggcctgagcttgttgggtgaagccaaggacagaggctggggtctgagtgaggggagatggtcccgtgaagtc

SEQ ID NO: 348672 - DNA, 201 bp, Homo sapiens
caggctggagtgcagtggtgcgatctccactcactgcaagctctgcctcccaggttcaagaaattctcccacctcagcctcccaagtagctgggactaccrgtgtgtgccaccatgcccggctaatttttgcaattttagtagagacaaggtttcaccatgttggccaggctggtctcaaactcctgacctcaagtgatct

SEQ ID NO: 348673 - DNA, 201 bp, Homo sapiens
ccaggcccaggagcaggtggggcctcctcacaggagcagggcaggattcgaggagctctgggctcccacctccgagctggactctgagcatgctggctccytccttctttccagggcagcagcagccccacattcaggacagagccatctgtgtaagcagggctcagagaccctcagacagacagggaaaaggagcaaaat

SEQ ID NO: 348674 - DNA, 201 bp, Homo sapiens
tgggaacctgcagggacagcatctgccctctggccggtggggggttcttagtagcagggcaaggggaaggcaaagggggccaggcccaggagcaggtgggkcctcctcacaggagcagggcaggattcgaggagctctgggctcccacctccgagctggactctgagcatgctggctccttccttctttccagggcagcag

SEQ ID NO: 348675 - DNA, 201 bp, Homo sapiens
cctgagagattcaggcgccagtgcatgggtggggcacaggggctgcggcagacagagggtggtgatacaggggtggagtcccacaggccggatgccttgayacttctcagctgcagggctgtgcccggggctctgtgcccctgaatgagggcaatggttcccctgcacagtgaccttgtgagctgattcaggccccatgat

SEQ ID NO: 348676 - DNA, 201 bp, Homo sapiens
cccgctccctggccccggatctgcccttcatcaggaatctgcttccaagcagatctgatttgcctactgagccatgcccccagggaagctgggccctgaaygagctgggcttttgggccacaccagagggaggaagttccctttcatctgctgcctgcttgtgtgatgcagatgaattctggcagaggaaccctgagcatg

SEQ ID NO: 348677 - DNA, 201 bp, Homo sapiens
aaggcctacccagggtcacctcccttttgattaactcaaggccagctgattaggacctgaattctatttgtgaaatcccttcaccagagtgatttcctcgmggcaggtgcctggggtagccactgggcggggtccatgagggcagctggagagtaaggggtgggggggcacttaggacagggaagctggcataggctttcc

SEQ ID NO: 348678 - DNA, 201 bp, Homo sapiens
cctgagcctcactttcctccatagtatgagttgctcattggacaggatgagagtttgcaagctggtggccttcgggctgaatccagcctgctcacatgcakggtctaaagtggctttcatgaattgtctatttctaaaaattaggatatttcacatacgagtcaggatttctggcttctcttgaaaaaatttaaaaatctg

SEQ ID NO: 348679 - DNA, 201 bp, Homo sapiens
aggccctggaacaggcagagattgtgctgttctgtcctgtccctccctttgggtgacagagaaccacgaacgtctgtgtcctcagagggtcacgggacacrttccagaggggggtggtggggagcacagtgagcacagaacatggtattttcaatccaggctgtactggcgaggagagagagtctctgtgcccagccctgc

SEQ ID NO: 348680 - DNA, 201 bp, Homo sapiens
tgcactggggttcgctggaactttcctaggtaagaccctgagggctggggtgaccctgagcaggaccgctggagccccagggaggtgcagggccaggtggytgctgccctgctatccgtgacatcggtgggagtgctaggggccccctccatcggggcgtctttgctcctccaggcctggcttgtctgtggttagaacagg

SEQ ID NO: 348681 - DNA, 201 bp, Homo sapiens
gcccaccagaagctggaagaagcaaaaaatggagtctcccccagagcctctggtggaagcacagcccagtcggcaccttgattttggcccagtggtaactrattggggattgctgttgttttcagcccctaagttggcagtcatttgttacagcagccacaggaagcgaggccagggtatttaaaaagccaaagacccctg

SEQ ID NO: 348682 - DNA, 201 bp, Homo sapiens
gaggggtggaggcaccttatcccttctccatttccctctgcctgtggctgaggtgctttcaggctgtgagcccagtgctggcctggctagacgcccaccartgaccctgatgatggcagcaacttccagctccttggaatctgggaaagaaaagcagccatgggaaaggcagtaggggtcggggtgggaggggagatgggg

SEQ ID NO: 348683 - DNA, 201 bp, Homo sapiens
accatggaggcagaggctggagtgaccaagccactagccaaggaaggccaggcccaccagaagctggaagaagcaaaaaatggagtctcccccagagcctmtggtggaagcacagcccagtcggcaccttgattttggcccagtggtaactgattggggattgctgttgttttcagcccctaagttggcagtcatttgtta

SEQ ID NO: 348684 - DNA, 201 bp, Homo sapiens
tgcctggccatcctggcgtttcctcccactgcctggcctgcatgcttcctctctcctttcacctttgcacacacccagcatgccagagatatgaggtggtkaagggtgaggagggtgtttggaggctgaaaaatggtcctgcaaagacgtccacatcctgtgaaggtctcttatatggcacacacacaaggatctttgcag

SEQ ID NO: 348685 - DNA, 201 bp, Homo sapiens
aagccttggctgggctggggagcacctgtactctcagccacaccgtccccagctggccccagcctcctgacatgggcctctggagccagggctgcagccgmagtgcctggccatcctggcgtttcctcccactgcctggcctgcatgcttcctctctcctttcacctttgcacacacccagcatgccagagatatgaggtg

SEQ ID NO: 348686 - DNA, 201 bp, Homo sapiens
tcgtggattgtcaggaggattctgtaataatccacaggatgtgttctgcatgcactaggtgctcaactttcctgacccccgtccagtgcccccctcaccgrccacgtctgccctctaagctgccagtcctataggaggcattaagacgtctagcaaggctgtgttctcagatgcctcgaaatgggacctcagccttggagt

SEQ ID NO: 348687 - DNA, 201 bp, Homo sapiens
gacttgtggggacggcggccacaagaggaggatcttcagcatggcctgacagcacctgtaatgtaggcaggcaatgggctcctccaggtggcaggaacacygtgaggagcatgcaacgtgctggagaccatggggcatgtgacctccgggcacaccctggacagacctgggtgagaggtgggctgggacgccaggacggtg

SEQ ID NO: 348688 - DNA, 201 bp, Homo sapiens
aggatgggaggcagaaaaacaggtggcttccgccccagagggcgagcatttgcttctgtgtgatcggagggcagcacaggggctggctgggccctgggatsatcgtgacaggctttagtggtctgggtggatgggccgtggtcagagccgatgtgaccaaattggctttcaggggagcccaggccaccttctgagtggaac

SEQ ID NO: 348689 - DNA, 201 bp, Homo sapiens
agaatcacgtgaacccgggaggcggaggttgcagtgagccaagattgtgccactgcactccagcctgggcgacagagtgagactccgtctcaaaaataaayaaataaataaataaaaattttgttaaaaagggcatggtggcacatgcctgtagtcccagctatttgggagtctgaggtgggaggatcatctgagcccagg

SEQ ID NO: 348690 - DNA, 201 bp, Homo sapiens
tttcactagagtgttttaaagcaaatccagacatcaaatttcatcagtaaatatctcacatgcatatgaaatgcagaatgtatctctaacaagtaaggactttttttttttttttcttgagacggagtctcagtctgtcgcccaggctggagtgcagtggcgcgatctcagctcactgtaacctcgtctcctgggttcaag

SEQ ID NO: 348691 - DNA, 201 bp, Homo sapiens
ttcactagagtgttttaaagcaaatccagacatcaaatttcatcagtaaatatctcacatgcatatgaaatgcagaatgtatctctaacaagtaaggactttttttttttttttcttgagacggagtctcagtctgtcgcccaggctggagtgcagtggcgcgatctcagctcactgtaacctcgtctcctgggttcaagc

SEQ ID NO: 348692 - DNA, 201 bp, Homo sapiens
gccctgctgggcactggggtggacacttgcccatcagtccttcagtgagtgcgaaggagccgtgtctcacttcaaagagggatttaaaaattctaccctcrccgggcacagtggctcactcctgtaatcccagcactttgagaggccgaggcgggcggatcacctgaggtcgggagtttgagaccagcctaaccaacatgg

SEQ ID NO: 348693 - DNA, 201 bp, Homo sapiens
ttagattgatatatttatatatagatttaggtttatatttctatttatagtccatcttgaattcatttttatattttttctgagttatggattgaagttcyttttttttttttttttttttttgcatatgatagccaattgttccagtggcatctgtggaaaggctgtcctttctccactgaattgccttagcactttgtc

SEQ ID NO: 348694 - DNA, 201 bp, Homo sapiens
tagattgatatatttatatatagatttaggtttatatttctatttatagtccatcttgaattcatttttatattttttctgagttatggattgaagttctttttttttttttttttttttttgcatatgatagccaattgttccagtggcatctgtggaaaggctgtcctttctccactgaattgccttagcactttgtca

SEQ ID NO: 348695 - DNA, 201 bp, Homo sapiens
agattgatatatttatatatagatttaggtttatatttctatttatagtccatcttgaattcatttttatattttttctgagttatggattgaagttctttttttttttttttttttttttgcatatgatagccaattgttccagtggcatctgtggaaaggctgtcctttctccactgaattgccttagcactttgtcag

SEQ ID NO: 348696 - DNA, 201 bp, Homo sapiens
tttgtggtttccatctgatttttgacatagatgattattgttgtctgtgaataaagacaaatcctactgagacagactgagaccatgtctcataaaaaagaaaaaaaaaaccatttcagaataatgcgttagtgtcctagcaacctcagcatgtctgcctttagccagctggggacccttcaagtgtttcttagtgttctt

SEQ ID NO: 348697 - DNA, 201 bp, Homo sapiens
ttcccacagagggggccccgtgccatgagggaagcctagaactgctgtcggcctcagccaggtacgggtactgacaaggtatggagatgtgctcccccggsgggtcagaggacctgcggtcaaggatggcacagcgggcgctgccctcggcttcatacccagcccccaccccagcagttctagtttagccattttcttcca

SEQ ID NO: 348698 - DNA, 201 bp, Homo sapiens
agcaaggctggctccagcctttctgtcttgaaatctcagagctgaggggtgggcacctctctccaggcctcccagtaaggtacttaggaggcgtcaggggytcacctggccatggccatggtttcatctccaggagacttggtgtcttgtgtcacctgctcccacccctgccccagcacacccaagacagcccctctgctg

SEQ ID NO: 348699 - DNA, 201 bp, Homo sapiens
agccaaacacaggcctcccggacacccctttctcctgagaagccttggctgggctggggagcacctgtactctcagccacaccgtccccagctggccccarcctcctgacatgggcctctggagccagggctgcagccgaagtgcctggccatcctggcgtttcctcccactgcctggcctgcatgcttcctctctccttt

SEQ ID NO: 348700 - DNA, 201 bp, Homo sapiens
gagaccctggctccagccaggcctgacctgcctctgtcctttcaggcacgccagccccacgggcctgctcctgacggtgctggtggccctcacctacatartggctctcctatacgaagagtgagtaggggctgcggcgggtgggggcgtggctgcccgactggccctgtctctccctctagaacctttccttgtggccag

SEQ ID NO: 348701 - DNA, 201 bp, Homo sapiens
agctttgtggctgccgtcatcaccatcaccttcaatccgctctactggaatgtggtaagtgatgtgcctgacactgtccagacgggagtatcccactgctyggtgagccccacatgcaggggatcgcggtggttgctgctggctggccagacagacagacagctctgctcttccctcccgtgtctgtcgctggctggtgtg

SEQ ID NO: 348702 - DNA, 201 bp, Homo sapiens
cacggggcgctgggccgccctccagccaaggctcctggcctgggggaaagggggcaagggatgagggatgcagggagcagtgtgttcagaaaaggttgttycctgagcacagatttgacacctcttcactgtcagcgctgagacacgcccctgccctggggagctcagaaagtcaggtgcgggatccagtggcctaatttt

SEQ ID NO: 348703 - DNA, 201 bp, Homo sapiens
catctggcatccaggcacatttctgcggccgccctcccaggacatgacacagctcattaggtttcagctttttatcttcccttttatgagactacactgtrgtaacctttgccggacttggatgttcccaggcctcccagtgtgttcccagagggtaactttttctccgactcctgggggctcacaggccctgctgtgtct

SEQ ID NO: 348704 - DNA, 201 bp, Homo sapiens
cacctggctctcctcctccaagactttctgcgtgcaccagcatcttccattttgtgtttcctgtctgtttaccatgtgtaattttgtcagcatgtcacgtycctttcataatgaagcaagggacaaagaaacaagggccagtggagcccagtacagggtggccagaggtgtcggctctatgtaggtctgctgctctggtgt

SEQ ID NO: 348705 - DNA, 201 bp, Homo sapiens
ggccatgagcaggaagttgactccggaggctgcagggacctgcttaggcatcctcattaccgcctgggtcccagagcgagccaggagcctctgaggcagcrggggcttctcaaccacacacctggctctcctcctccaagactttctgcgtgcaccagcatcttccattttgtgtttcctgtctgtttaccatgtgtaatt

SEQ ID NO: 348706 - DNA, 201 bp, Homo sapiens
aatgcaatagaacaaaacacaccattatgggaaagatcacagctctgatggactttacacttattttttttattttttgtttttaattttttaaaaaaatktttattattatactttaagttctggggtacatgtgcagaacatggaggtttgtacataggtatacatttgccatggtggtttgctgcatccatcaaccca

SEQ ID NO: 348707 - DNA, 201 bp, Homo sapiens
tgaggagcatgcaacgtgctggagaccatggggcatgtgacctccgggcacaccctggacagacctgggtgagaggtgggctgggacgccaggacggtgargggcttcaaggtgtgtttgtcctttgtccttatacaggtgacctgcatgggcgggtgaggtccatcagaatgctctagaacaggacaactgaggtcccgg

SEQ ID NO: 348708 - DNA, 201 bp, Homo sapiens
caccgtgaggagcatgcaacgtgctggagaccatggggcatgtgacctccgggcacaccctggacagacctgggtgagaggtgggctgggacgccaggacrgtgaggggcttcaaggtgtgtttgtcctttgtccttatacaggtgacctgcatgggcgggtgaggtccatcagaatgctctagaacaggacaactgaggt

SEQ ID NO: 348709 - DNA, 201 bp, Homo sapiens
gcctcttccttacccatgctttggggtgttaacagctgaggctattcgtcggtgacctgtgggactcgagctattcctgcagctcagcagacctcctggcygtggtgggtagctcctttcctttagtcagattccgaggcctctgcaacctggagccttggagtgggggttccattagaattactgggtagcagaaagccg

SEQ ID NO: 348710 - DNA, 201 bp, Homo sapiens
cgttgcggagacaccccaggatgatcaaagtcagggaagtgtttctggtcggctgcagatagaaacgggacaggcctgtcccaggtggggccgtgtgcctstggcctggtgtgtggcccaggactgctggctggggacagggcggggacactgagggcagtgatgccccctccccacctccaccccagggtttccgggatt

SEQ ID NO: 348711 - DNA, 201 bp, Homo sapiens
gtgagactccatgtctacaaaataaaaaaaaattagccaggtttgggccgggtgcggtggctcacgcctgtaatccctcggcactttgggaggccgaggcrggcggatcatgaggtcaggagatcgagaccatcctggctaacacggtgaaaccctgtctctactaaaaatacaaaaaaatagctgggcatggtggcgggc

SEQ ID NO: 348712 - DNA, 201 bp, Homo sapiens
aacatggggaccctggtcctggcacaaaagccagactcaggaaggggcagtgctgcctgggctcggtcggcccaagtggcccagcgtcggccggagggccwgggtcacggcaggaagggccagcctgggcaggtgggccgtggccctgagagaccctggctccagccaggcctgacctgcctctgtcctttcaggcacgcc

SEQ ID NO: 348713 - DNA, 201 bp, Homo sapiens
ctccctctccatcccctgcccacagcttcacgcaggccatgctgagccagcccaggatggagagcctggacacccccgcggcctacagcctgggcctcgcrctcctgggactgggcgtcgtgctcgtgctctccagcttctttgcactggggttcgctggaactttcctaggtaagaccctgagggctggggtgaccctga

SEQ ID NO: 348714 - DNA, 201 bp, Homo sapiens
gatcgcgccactgtactccagcctgggtgatagagtgagactccatctcaaaaaaaaaggaaagaaaaaagaaaatggggtgaagctcacaaccagcagargagtgagaagaggcagcccagcgtggaggcgagcagggccttgagaagcaccgtcttacccgtgggccccacacccacccctgctggagcacgtgagctg

SEQ ID NO: 348715 - DNA, 201 bp, Homo sapiens
tcttgtgccctggagtgagagtcacccttgggctcggggcagccaggccagggctctgggggacgcataagccacctccagaggacatcagccatgcagcrtgctgagagatggcatcaatggtccaggagctcattagagatgagccattatctggccagacgctgacacagcggggacccccacaggcctcccacggcc

SEQ ID NO: 348716 - DNA, 201 bp, Homo sapiens
gcatgggctgtggcttctccagtgggcccataggaatggccctggggctgggacttgtggggacggcggccacaagaggaggatcttcagcatggcctgamagcacctgtaatgtaggcaggcaatgggctcctccaggtggcaggaacaccgtgaggagcatgcaacgtgctggagaccatggggcatgtgacctccggg

SEQ ID NO: 348717 - DNA, 201 bp, Homo sapiens
ggtctgcatcttgctgtccacaggccggggcacctccaggattcagaagatgactccagtagggcctaggggtgcgggcacccaggctggcagagcacacygaggtcctcagagcaagggcacatgcccaggtctcaggtcccttttccatagcgaatcacctgctcaccagagcgggtgagtgatgatgtctccagcttg

SEQ ID NO: 348718 - DNA, 201 bp, Homo sapiens
tgtaggtgagggtggggtgaggtggaggtggggaggagtgtcgaggggaggctggacaccctgcccctgtggctagggcagcagggagcctgtgtagacaygcagctggtgtggacgcgaagggtggcttggttgggacctgtcacccggtcaccatgctgctccttggctaggcagggctattcctcaagggccagtttg

SEQ ID NO: 348719 - DNA, 201 bp, Homo sapiens
cccagtggcttagtgtccccagcagtgtcttgtgccctggagtgagagtcacccttgggctcggggcagccaggccagggctctgggggacgcataagccrcctccagaggacatcagccatgcagcgtgctgagagatggcatcaatggtccaggagctcattagagatgagccattatctggccagacgctgacacagc

SEQ ID NO: 348720 - DNA, 201 bp, Homo sapiens
ggctcactgttgcaagggccgggatggtgcctggagtgggtggtgcctggagccagctcagcgtcagtgaccctcgtctgttccctcttcctacctccagycttaccgtccgcttccccctcgggcagccaccccagggcatctgttgtggaactgctctgtgggttttgtccttgatacctttccaggcttcttcaggtt

SEQ ID NO: 348721 - DNA, 201 bp, Homo sapiens
gtgggtctggctgggacccaccctacccccaccccacgtccaggccaggcagtccccagggacacgtcctacctgccttctagcctggtccctctgcctgmtaaggcccagactatgtgcccccaggctcaccggccatggagcacccccactggggccacaggatgagcccaaactcaaaacaatcccccccacccaggt

SEQ ID NO: 348722 - DNA, 201 bp, Homo sapiens
gcccgctcccctgtgatgaggcctgggtacatcagcacatgcctagcccctgtgccctccctgcaccagcccctcagttctccggagccaactggagaacytgagcctctagacccactgctgtcatagtcacccccttttggtcacgccactgccttttctttttttcttttttcttttgatactaagtctcgctctatt

SEQ ID NO: 348723 - DNA, 201 bp, Homo sapiens
ggccctgctgtgtctgggtggtgctgatgctagctctgtccctgcaggcagacttctgcgttatgacccggctgctgggctacgtggaccccctggatccyagctttgtggctgccgtcatcaccatcaccttcaatccgctctactggaatgtggtaagtgatgtgcctgacactgtccagacgggagtatcccactgct

SEQ ID NO: 348724 - DNA, 201 bp, Homo sapiens
ttgctcctcagctgggcagctgcctgaaggcagtggggtggcagatggatgagagcagggtctgcatcttgctgtccacaggccggggcacctccaggatycagaagatgactccagtagggcctaggggtgcgggcacccaggctggcagagcacactgaggtcctcagagcaagggcacatgcccaggtctcaggtccc

SEQ ID NO: 348725 - DNA, 201 bp, Homo sapiens
gtcaggattctggagccttgctcctcagctgggcagctgcctgaaggcagtggggtggcagatggatgagagcagggtctgcatcttgctgtccacaggcmggggcacctccaggattcagaagatgactccagtagggcctaggggtgcgggcacccaggctggcagagcacactgaggtcctcagagcaagggcacatg

SEQ ID NO: 348726 - DNA, 201 bp, Homo sapiens
gaaaggcgtttggtctttcctctaagatgagcatagcgtcccttcctcagggttggctgaggagcttggtgtggacagccgggctccaggcacacagcggycccagtacacctgtcgctttgcctgccacccgcttacggtagcagcatggttgtaataaagcaataaagccagcgtggatgggcgatgttgctattgcta

SEQ ID NO: 348727 - DNA, 201 bp, Homo sapiens
cgtctgtggctcttctccttccccctgacccacccatgcctccgccctggggctggtgggattgctctcaaaaccaccttagccaagagggctccttcccaagactcaggaggaagaacataggggacagccaggcctaaaggggctgggcaggggctctagagaattaaagctgcccaggccacagccccgccctgtgag

SEQ ID NO: 348728 - DNA, 201 bp, Homo sapiens
ggtttttcaggcagagcggtacttttttaaattgacaaattttaagcatacagaaaagtagagaggacgaacctccaaacatcagcccttagattccagtmcatcctgccttggtagctgacgtcacgaacgctgtgacctgtccctctgcactccatcatagcatctctaaaacggaggacatttcctacctcagcacaa

SEQ ID NO: 348729 - DNA, 201 bp, Homo sapiens
attcctcactccctgccaggagtggaatgtgggcaggtaagagtcccagaggggtaagagccattggtgggaagcaactgtgggaccagtgccgccaccayggcccaaggacctggtgttcgatgccgcatccttccggtggcgtctgtggctcttctccttccccctgacccacccatgcctccgccctggggctggtgg

SEQ ID NO: 348730 - DNA, 201 bp, Homo sapiens
tggatcccagctttgtggctgccgtcatcaccatcaccttcaatccgctctactggaatgtggtaagtgatgtgcctgacactgtccagacgggagtatcycactgcttggtgagccccacatgcaggggatcgcggtggttgctgctggctggccagacagacagacagctctgctcttccctcccgtgtctgtcgctgg

SEQ ID NO: 348731 - DNA, 201 bp, Homo sapiens
tttccagttttgttccttttgcttaggatagctctggctattctggaatttttgtggttctatgtaaatgttaagggttttttttttttttttttttttgkatttctgtgaagaatgtcattggtattttttttttttttttttgagatggagtcttactctgtcacccaagctggagtgcagtggcgcgatctcggctca

SEQ ID NO: 348732 - DNA, 201 bp, Homo sapiens
ctatggactggtacttcttccctggctgagggcgggctggtattaatggttcctgtgttccatgcctgggggaggcaaggaagggctggagatgggtctcrgggcacatctgcacaggacagaggtctcccacggtagccccggtctaggcttaagccccagagcactcacagttccttccccagctcctgtccactgagt

SEQ ID NO: 348733 - DNA, 201 bp, Homo sapiens
gctctggctcacttgaacaaaggcaggactgattagaaggatattgccttgctcagggaatcaaagggaagcccgaggaagcaggcctgaggccgtagggkcagagcccgcagaccgtctctccagcaaacagcccaagacgctgaagcgccctttctccatccttgggtttcattgcccaagattcctagtccccaggag

SEQ ID NO: 348734 - DNA, 201 bp, Homo sapiens
taggaactgctttttgtcttggttttctttcttcagtgcctaacagtacgcactgcccacatgcatgtggggcaggaggtggcagtggcccagcaggtggmaggggtggcacacatggccgccctctgctccctgtgtttgggttatgctgtgcagtgttcgctgggtgtgaagaggggacagggctgggtttgtcgtgac

SEQ ID NO: 348735 - DNA, 201 bp, Homo sapiens
tctcctgactgggctgggacctgtgcaggctgggctctcaccctcctgcccactgtcaagcccagcacccagcgcagggtggcacactgggaggactcagygtttgttgttaaatgagtagattcatttgtccaacagagagttattaaacaccggcgagtacagtgcttgccattcatttgacacctttgatacgccagg

SEQ ID NO: 348736 - DNA, 201 bp, Homo sapiens
ctgccccccggggagcaccagcaccccagtttgctatccatcggcccagacacaccctgccccatgtccgttagcacctggaatgcgctgtgtgctagggrtgcccctgtggtcagcttgcctgtcctgaagaaagccttccttgggcagcctgtggcttctttgtaggcctgtcccaggtgttatgtaaccattgtttaa

SEQ ID NO: 348737 - DNA, 201 bp, Homo sapiens
tggcatttactgccagtacagctgacagggcctcctaaactgcctgctcctttcagttccatgcaggctgacaaggccctcacagagcagatcatggcagmtcctgacttgaaacctctgaatagtttccctttaaaaaccacatacaccctcctgagcatgacctgcagggcctgcctgcctctccacccactgtgcccc

SEQ ID NO: 348738 - DNA, 201 bp, Homo sapiens
tgggattacaggcatgagccaccgtgcctggccataacttaggttttttgttttttgtttttgtttttgtttttgttttttttttttgagacagagtctcrctctgtcgcccaggctggagtgctgtggcatgatctcggctcactgcaagctctgcctcctgggttcatgccattctcctgcctcagcctcccgagtagc

SEQ ID NO: 348739 - DNA, 201 bp, Homo sapiens
cccaggctggaatgcagtggcgcaatctcagctcactgcaacctctgcctcccgggttaagcgattctcctgcctcagcctccagagtagctgggactatmggcacatgctaccacgcctggctaattttttgtatttttagtagagacagcatttcaccctgttagcctggatggtctcgatctcctgacctcatgatcc

SEQ ID NO: 348740 - DNA, 201 bp, Homo sapiens
ggttcctggaactgtacctcatgcaatattggctaaattactacacaagtcaggaaagtttggctacttggaatgttgccgtgaggcttagatacgatgayggacactgcatgcctgtggagtgggtctgctgaaaacattagccccaggctcttgccccccatccagcctgcaccagcgatttacagtcctgtggggaag

SEQ ID NO: 348741 - DNA, 201 bp, Homo sapiens
gcacggtctcctatgtggaagaaggggccagcccctggctgagacgccctgcagagacccagggctggggggagcttgctgaggtggaaatgggaagcagrcgttgatgagtgaggtgccgtctgcacctggatgctcagccggctgctgccgtccccattgcactgaccttggctgagaccccaaattcatgatcgtgtc

SEQ ID NO: 348742 - DNA, 201 bp, Homo sapiens
cggtgtgatcccagctcactgcaagctccgcctcccgggttcatgctgttctgcctcagcctcccaagtagctgggactacaggcatctgccaccacgccyggctaatttttttttgtattttttagtagagatggcgtttcactgtgttagccagaatggtctcgatctcctgaccttgtgatcagcccgccttggcctc

SEQ ID NO: 348743 - DNA, 201 bp, Homo sapiens
gagattgatgtgatctaacttagggtttttttgttttttttttttttttttttttgagacagcctcgctccatcacccaggctagagtgcagcggtgtgakcccagctcactgcaagctccgcctcccgggttcatgctgttctgcctcagcctcccaagtagctgggactacaggcatctgccaccacgcccggctaatt

SEQ ID NO: 348744 - DNA, 201 bp, Homo sapiens
gtcgtttccccaatatatgttcttggcacctttgtcaaaaatgagttcaaggtagatatatggatttatctgtgggttctgtgatctttttttttttttttgagacggagtcttactctgtcgcccaggcgggagtacaatggcaccatctcggctcactgcaatgtccgtctcccgggttcaagtgattctcctgcctca

SEQ ID NO: 348745 - DNA, 201 bp, Homo sapiens
aagttttttggtttacctaactggaaaggggtgaggagggctttggccggccaaatctaggcgttgaaactgcccgtgagtgttgtttctttgcctcttgsctctgccctggcctggtttttgacatcctcctcctggtagccgtcagtagtttcaggtcgagtcttttggacaccccagtgggaatatacattctatttt

SEQ ID NO: 348746 - DNA, 201 bp, Homo sapiens
agaggggaagttttttggtttacctaactggaaaggggtgaggagggctttggccggccaaatctaggcgttgaaactgcccgtgagtgttgtttctttgyctcttggctctgccctggcctggtttttgacatcctcctcctggtagccgtcagtagtttcaggtcgagtcttttggacaccccagtgggaatatacatt

SEQ ID NO: 348747 - DNA, 201 bp, Homo sapiens
ccaacatagcgagactctctctacaaaaaatacaaaaattatctgggcatggtggtgcatgcctgtagtcccagctacttcaggggctgaagtggaaggaytgtttgagcctaggagttggagaccagcctgggcaacatggtgagactccctgtctctacaaaaaaaaaaaaaaaaacacaaaaaaattagctgatcatc

SEQ ID NO: 348748 - DNA, 201 bp, Homo sapiens
ccagccactcagtaagtttgtctgagcagccactgagccctgtacctccttcctgcttcttccctcctctgccttctcctttctctctccttggccctgcrcaaggctgcacttgcctcgtcattgctgagcctggggaaaaccaccaaatacaatgatctcggtttgtaggctgtgatgttttgatccaggaacttgagg

SEQ ID NO: 348749 - DNA, 201 bp, Homo sapiens
catacaccctcaagtttaaggattgcgggactggagtcactatttcagctggagtttcactgggtggccatggtggttgaccagcagttgtgggagtgagrtgaacgacatggcctcattcatccgttcctggggatttagatactgtctttgtgccagctgtcccacctgcgttgcctcggcccgggactgccctctgag

SEQ ID NO: 348750 - DNA, 201 bp, Homo sapiens
tgtgctcagtgggaatcacacttgctgaacagttgctctggcattatgtgggtgcttggtgcccactgtttcatcatgtcctcatgacaccttgttccctrgttaccctgacatccctcatgtttttagagagtgggtcttgttctgtcacccaggctggagtgcagtggccactcacaggtgccatcccagctcactgca

SEQ ID NO: 348751 - DNA, 201 bp, Homo sapiens
aggctgagtctttaggagaggggattgcgtggttggtggaggtagtgccaagtatcaggtaatgagagggcacaccctgtgcccagggacccgggagtctmacctctgcctgttgagggacgcgtttgccagagagaaagcgtcagcaaagtgccatcttccagaggctcagcaagacgtgcaggaggcacaggctccagt

SEQ ID NO: 348752 - DNA, 201 bp, Homo sapiens
ctcacctgccatctctgaagtctgtgggggatgaggaagaggcagctgtcactcagaggcgagttggggaggtgctcccttcgtgtgaggccagttttggytggggcaggagtgaggatgctggggagaggctgagtctttaggagaggggattgcgtggttggtggaggtagtgccaagtatcaggtaatgagagggcac

SEQ ID NO: 348753 - DNA, 201 bp, Homo sapiens
cacaggtggagcccaggagaagggagtggtgtggcttcctcctgtgcagcaggaagggaggaagaagtgagcccggcggcaggtgagtctccagatccatsatgaggtgggcttggagtctcacccacaagaaggttgaggaaatggggcgggtgtgtcctggctgtgcccagagcaccagagagggcattgaagagagct

SEQ ID NO: 348754 - DNA, 201 bp, Homo sapiens
tggatgctgggtggaaatggcttggaggggtgagaactggaagttgaagagtcagtggaggtggttgcagccgctcagtgggagacgactcagtttgactrgggtgaggtctgtggagagaggtgggtggatgacgtgtgctttggcgggacccataagacctggggatggatctgatattgggggtggaataaaggtagg

SEQ ID NO: 348755 - DNA, 201 bp, Homo sapiens
tctctaaaaaaaccacaattcacattgtgggtgtgaatataaaacagtgcagccagtgtggaaaaacaccttgaaaaacatttcctccaaatgttaggccrggcatggtggctcacgcctgttatcccagcactttggaaggccatggagggcgaatcacctgaggtcaagagtttgagaccagcctggccaacatgatga

SEQ ID NO: 348756 - DNA, 201 bp, Homo sapiens
gctactcagaaggctgagaagggcaacagaaggccggaaggccagcctgggcaacatagagtgagacagtctctaaaaaaaccacaattcacattgtgggygtgaatataaaacagtgcagccagtgtggaaaaacaccttgaaaaacatttcctccaaatgttaggccgggcatggtggctcacgcctgttatcccagca

SEQ ID NO: 348757 - DNA, 201 bp, Homo sapiens
ctgcagggaaggtgggttgggacagaagacccccctccccaaaaccaaacaagccagtcaaccttgaactgccgtagaaaggagagggagatgggcgtggygactcacgcctgtaatttgggaggctgatgtgggtggatggcttgagcccaggagtgtgaaaccagcctggccaacatagcgagactctctctacaaaaa

SEQ ID NO: 348758 - DNA, 201 bp, Homo sapiens
ggtccatttctggaatgtatcctgcttctctgatctaagtgtcccacctaatgtaaataccacactgtctcagttactgtagtttttttttttttttttttgagatggagtcttgctctgtcgccaggctggagtgcagtggtgtgatctcggctcactgcaacctcctactgggttcaagtgattctcgtgcctcagcct

SEQ ID NO: 348759 - DNA, 201 bp, Homo sapiens
agactacaggtgcctgccaccatgccccgctaattttttgtatttttagtagagacagggtttcaccgtattagccaggttagtctcgatctcctgacctsgtgatctgcccacctcggcctcccaaagtgctgggattacaggcgtgagccactgctcccggccaatttaggtttttaaaatgtggatttggggcaatga

SEQ ID NO: 348760 - DNA, 201 bp, Homo sapiens
aggactctgtcccttccaacattttgcctgctagggactgtgtctagctcatagatctcttatttctgatgtgtccatttggtcatgggcctgtgagccaygcggagcaggaagggcagggaggtggggtcgagagctgccagccatctgcccctctgatcttttccagcactgtcctctgccagcatccccctttacttc

SEQ ID NO: 348761 - DNA, 201 bp, Homo sapiens
ggaaccagaggagcttagggaaaaagtgcatccagtcctgcccctcctctgcttaaaatctgctgctggttaacctctgtagctgtaacagggtctgtgasttaagggttggttgccagtgtcagaaatcaacaagggtgttggaatctggatggctgtagagacagcctggagctgggcagggctcagttagggtgcctg

SEQ ID NO: 348762 - DNA, 201 bp, Homo sapiens
ctaggcggctgcgctccaggtctccactgctgagctgaatgccgctttcccacccacaggggccgagccaacccccagctgggagcatgtcctcttcaccrcctgccacaaccagcacctgcagctgcagcccccccgccgcaggctgcactcgtgggcggacgactggaaggccattctggacagcaagcggccctgctg

SEQ ID NO: 348763 - DNA, 201 bp, Homo sapiens
aggcacatgatttgatttcatatcttacaaaagcattggtcacaatgcagtggaaattaaaaaaacaaaacctgacccttctcttcccacactcccagatkttccatgttccagccacactccagggttttccccattcctcaaacacctgagcaccggcctgccttggaacatcagtgtttgtttttccctctgcctgga

SEQ ID NO: 348764 - DNA, 201 bp, Homo sapiens
gaagtattccttccttctgtatatttctgaatagtttaagtaggattggtattagttatttaagtgtttggtagaattcagcagtgaagctattgggtccyggccttttctttgctgggagactttttattatggcttcagttgttgttacttgttattggtctgtttgttttgaatttcttcatggttcaatcttggtag

SEQ ID NO: 348765 - DNA, 201 bp, Homo sapiens
ctacttcccttcctgaggcacggcttgctgctgtggacatccctgggcctaccccaagctggcccagtatctgtggttaaaacaaccgcccccccccccccgcccccacacacgtggctccttatgtgtatgtaggcatttctacttttcaaaattctgctctgtctgtattccctttggtcttcacagtaccctatgtgg

SEQ ID NO: 348766 - DNA, 201 bp, Homo sapiens
gtcaggtcctttctggaaaggggttcgaagtccacatactctccgcactacccccaggaagtacgtccttgggtgtgtgtttgggggagtgagaggaatgmagaaccactccccctatagcctggccatactccccaagatgagggcagtaaggtgctgaggaccctggaagtaacttgcttttctcaacttctcaggaga

SEQ ID NO: 348767 - DNA, 201 bp, Homo sapiens
actacttcccttcctgaggcacggcttgctgctgtggacatccctgggcctaccccaagctggcccagtatctgtggttaaaacaaccgcccccccccccccgcccccacacacgtggctccttatgtgtatgtaggcatttctacttttcaaaattctgctctgtctgtattccctttggtcttcacagtaccctatgtg

SEQ ID NO: 348768 - DNA, 201 bp, Homo sapiens
gtgagtcctcaccccgtggggtcgtcaggccagatgaggccatgcatgtgaggaaagcttctgatccttctccagtccacggcagtgccattcccacctgtgggggggaggaggcaggctcgggaggtgcagttacgttcccgaggccatgcggcgttcgacctgggtcagccttgctcagtgtttctcaggaggccctcc

SEQ ID NO: 348769 - DNA, 201 bp, Homo sapiens
cttcaggggctgaagtggaaggattgtttgagcctaggagttggagaccagcctgggcaacatggtgagactccctgtctctacaaaaaaaaaaaaaaaaacacaaaaaaattagctgatcatcatggcgcatgcctgtggtccctgctactctggaggctgaggtgggaaaatcacctgagctggggaggtggaggctgc

SEQ ID NO: 348770 - DNA, 201 bp, Homo sapiens
tgacacctttgctggtctctgctggatcccgacgaagtcaggtcctttctggaaaggggttcgaagtccacatactctccgcactacccccaggaagtacrtccttgggtgtgtgtttgggggagtgagaggaatgaagaaccactccccctatagcctggccatactccccaagatgagggcagtaaggtgctgaggacc

SEQ ID NO: 348771 - DNA, 201 bp, Homo sapiens
agaattgacatcagacctgaagagtaagaatgaatgggccagtgaagagtcgggacaggccttgcaggccaggagaggagcaggtgccaatgcctgagccrggccaggcctttgtttgtctgagtaacataaaggaactggacagctggcactggaacttaggaagcatgttgggggtggcaggggtgggtggagggtgaa

SEQ ID NO: 348772 - DNA, 201 bp, Homo sapiens
tgtgctgcagaggaaacagggaaggggctgctttgggtagaatgggaagctggctctagggagctgagaattgacatcagacctgaagagtaagaatgaaygggccagtgaagagtcgggacaggccttgcaggccaggagaggagcaggtgccaatgcctgagccgggccaggcctttgtttgtctgagtaacataaagg

SEQ ID NO: 348773 - DNA, 201 bp, Homo sapiens
cctaggcggctgcgctccaggtctccactgctgagctgaatgccgctttcccacccacaggggccgagccaacccccagctgggagcatgtcctcttcacygcctgccacaaccagcacctgcagctgcagcccccccgccgcaggctgcactcgtgggcggacgactggaaggccattctggacagcaagcggccctgct

SEQ ID NO: 348774 - DNA, 201 bp, Homo sapiens
gaagtgggcactgagtacaagagatgtgggcccagcagcagagaccaaggctgatcagtcaccctcatgactatttatccagcatctgctgcatgctcagyctcatcccaggggctgcggggacacaaataggtaagagagttcttaccttcaaagagttccctggtaaacagacattggaacatagatctcaaagtaatc

SEQ ID NO: 348775 - DNA, 201 bp, Homo sapiens
ttacaggtgtgagccaccgcatccggcctatggtattatttttctagcagtgtcattcacccaactccacacctgcataccccaccctccttgatttaagrcctgtcttgggatctgctcatctgagtggagcaggactctgtcccttccaacattttgcctgctagggactgtgtctagctcatagatctcttatttctg

SEQ ID NO: 348776 - DNA, 201 bp, Homo sapiens
gagcctcttcctctaacctgaaataaaaacgtaaaaacgtagactttttttttttttttgacagagttttgctgttgttgcccaggctggaatgcaatggygtgatctcagctcactgcaacgtctgcctcctgggtttaagtgattcccctgcctcaacctcctgactagctgggattacaggcatctgccaccatgccc

SEQ ID NO: 348777 - DNA, 201 bp, Homo sapiens
aggtgtcagagaaacacaaaatacagagtttgagttgaatcgtagaccttatttggtagtaatttatctttggatgtgagtccaagtcctgcagagtagtraattttattctggtttatggtatgaacttgatgtatcgtgttcctgtagcaggagtctgagaggcaaagaatatgtgtacagcattcacacttaagcttt

SEQ ID NO: 348778 - DNA, 201 bp, Homo sapiens
ctccagcctgagtgacagtcagactccgtctcaaaaaaaaaaaaacaaaaaaaaaacccactccttaattgagcctcttcctctaacctgaaataaaaacstaaaaacgtagactttttttttttttttgacagagttttgctgttgttgcccaggctggaatgcaatggcgtgatctcagctcactgcaacgtctgcctc

SEQ ID NO: 348779 - DNA, 201 bp, Homo sapiens
gaatatatttataaatcatgtatctgataagagacttgtatctagaatatataaagaactcttccaagttaacaatgaaaaaaagccaggcacagtggctyatgcctgtaatctcagcagaaagccaaggcaggaggatcacttgaggccagcagttcaagaccagctggggcaacatagtgagaccctgtctctacaaaa

SEQ ID NO: 348780 - DNA, 201 bp, Homo sapiens
gattacaggcgtgagccacctcgcccggcctaacttttgtgtttctaaggacaaaattaagaaattgaaatgaaagtctacagaatgagggaatatatttrtaaatcatgtatctgataagagacttgtatctagaatatataaagaactcttccaagttaacaatgaaaaaaagccaggcacagtggctcatgcctgtaa

SEQ ID NO: 348781 - DNA, 201 bp, Homo sapiens
ggctgcagtgagctatgatcacgccatgtactcctgcctgagcaacagagcaagaccccgtctcttaaaaaaagatattctaggccgggtgctggctcacrcctgtaatcccagcactttgggaggctgaggcgggcggatcacctgaggtcaggagttcgagaccggcctgaccaacatggagaaaccctgtctctacta

SEQ ID NO: 348782 - DNA, 201 bp, Homo sapiens
tgcagaagctttttaactggatgtgatcccatttgtccgtgtttgctttggttgcctgtgcttttggggtactattcaagaaatctttgtccagaccaatrtcctggagagtttccccaatgttttcttttagtagttcttgtatatggcaagagataggggtctagtttcattcttttgcatatggatatccagttttcc

SEQ ID NO: 348783 - DNA, 201 bp, Homo sapiens
tgcacctgggaggtggaggctgcggtgagccaagattgcgccattgtactccagcctgggcaacaagagtgaaactccatctcaaaaaaaaaaaaaaaaaatgtattctagcctgggtggggtttggtagctcatgcctgtaatcccatcactttgggagactgaggcaggagaatcacctgagctcaggagtttgagacc

SEQ ID NO: 348784 - DNA, 201 bp, Homo sapiens
ttcttttgagaatatacctaggaatggaattgttaggccataggataattctgtgtttgacattttgaggaactgtcaaactattttccaaagcaattgtrctattgcacatttcccactagcatcatatgaaggtttcagtttctccacatctttgtcaacacttgttaatttctgttttactttagccatccttgtggg

SEQ ID NO: 348785 - DNA, 201 bp, Homo sapiens
aggcatggtggtgcatgcctgtaatcccagctactcgggaggctgaggcaggagaattgcttgcacctgggaggtggaggctgcggtgagccaagattgcrccattgtactccagcctgggcaacaagagtgaaactccatctcaaaaaaaaaaaaaaaaaatgtattctagcctgggtggggtttggtagctcatgcctg

SEQ ID NO: 348786 - DNA, 201 bp, Homo sapiens
tgcaaatactttcttccattctgtggattgtctcttcactttgttgactgtatcctttgctgtgcagaagctttttaactggatgtgatcccatttgtccrtgtttgctttggttgcctgtgcttttggggtactattcaagaaatctttgtccagaccaatgtcctggagagtttccccaatgttttcttttagtagttc

SEQ ID NO: 348787 - DNA, 201 bp, Homo sapiens
taatggtaaatacacatgataaaatttatcaagtgtacagttcagcttatttcgtttttaatgctattataaactttgtttaattgaaatttccaaatatrtagaatacaagtgatttttttttttgagatggagtcttgctctgttgcccaggctggaatgcagtggtatgatctcggctcactgcaagctccgcctcct

SEQ ID NO: 348788 - DNA, 201 bp, Homo sapiens
tcttctgatccacaagcacatacacatcctcatttatgtaggccacctctaccttctctcagcaatgttttgtagctttcagtgtaccactcttgcacatrttgtgttaaatttgtctctatttcatgtttttttttttggcatagagactatctttataaatatatttttaaatattttataatggtaaatacacatgat

SEQ ID NO: 348789 - DNA, 201 bp, Homo sapiens
gaccttgtgatccgcccactttggcctcccaaagtgctgggattacaggcgtgagccactgtgcctggccactgtagttttatagtaacttttgaaagcartgtgagttttccaaaattattcttcattttaaaaattgttttggctattctgggtcctttatatttctatagaatgtttagaacaagctggtcagtttct

SEQ ID NO: 348790 - DNA, 201 bp, Homo sapiens
gtctcattgttgttttgatttgcatttccttgattaatgacattggacatgtttttaagcaagtaaccctttgtatattttctgtaacgaaatgttcaagycttttgcctcgtttctcattgagttgtttgtgagttgtgagagttctttagatatgctagaaacaagttctttatcagataatgtgttttacaaatattt

SEQ ID NO: 348791 - DNA, 201 bp, Homo sapiens
cctgcataccccaccctccttgatttaagacctgtcttgggatctgctcatctgagtggagcaggactctgtcccttccaacattttgcctgctagggacygtgtctagctcatagatctcttatttctgatgtgtccatttggtcatgggcctgtgagccacgcggagcaggaagggcagggaggtggggtcgagagctg

SEQ ID NO: 348792 - DNA, 201 bp, Homo sapiens
tggcagggcacggagagggaagtcgggggaacaccatgtggtgtaagccatcaggaggcggggcacatgtcccttgccagtgctggtggtgacagtgaccygcagtcagtccctgttgactgagcactggctgcgcgtgctgacggcctccttgccgcatctcgtgccatcctcacacccgctgcgaaggcgggtgtgcgt

SEQ ID NO: 348793 - DNA, 201 bp, Homo sapiens
ggtctgtggggtcccgtgaccttgagggcccaaaggctggcttggcctccatctccagccacaggttgttgggggcgggtgtataacccaaaggggtggcrtcaccagcagcaccagtgtggacacgagggaatgaggcctggagaggctgcaggggcctgtgatcagcggctggtgagctgcagagctggtgccacctgg

SEQ ID NO: 348794 - DNA, 201 bp, Homo sapiens
ttctcgtgcctcagcctccaaaagtggtgggattacagatgttttcaattcttttgagaatatacctaggaatggaattgttaggccataggataattctrtgtttgacattttgaggaactgtcaaactattttccaaagcaattgtactattgcacatttcccactagcatcatatgaaggtttcagtttctccacatc

SEQ ID NO: 348795 - DNA, 201 bp, Homo sapiens
cctataggaaaaagtcaatttccccagggaatcgaggcaaagggaaaggatgccgagagcccaccagtggcgagaggatgccggtggcttgccaggccccsgtctgctccctgccccccggggagcaccagcaccccagtttgctatccatcggcccagacacaccctgccccatgtccgttagcacctggaatgcgctgt

SEQ ID NO: 348796 - DNA, 201 bp, Homo sapiens
ttccttttgacccgctgggaagtgacagcttgaaccagccacctccccactaacctttggagaggttttgggaccactttcttgtccttatgcccttcccsttactgctctggccgctctcccatcatggcccttgaagggaacatgggttgcccatgcccctaattcaccccagctctggggccctcctggcaggcctct

SEQ ID NO: 348797 - DNA, 201 bp, Homo sapiens
cctgtaatcccagctacttaggaggctgaagcaggagaatagcttgagcccaggaagtggaggttgcagtgagctgagattgctccattgcactctagccygggcaacaagattgaaactctgtctcaaaaaaagaatcacaaagtgaagacacttgcagattgtccaaagagctgaaggaaaagaggttcagcgggaaac

SEQ ID NO: 348798 - DNA, 201 bp, Homo sapiens
tgaggtatgttccttccatacccagttttttgagggtttttatcatgaaaggatattgaattttatcaaataccttttcagcaccaattgaaataatcatwtgttttttgtccttcattctgttgatatgatatatcacattaattgatttgcatttgctgaactatcctggaatccctgggataagtcccacttggtcat

SEQ ID NO: 348799 - DNA, 201 bp, Homo sapiens
tgttgaatcacagtggtgaaagtaggcattcttgtcatgttcccggtcttagaggaaaggctttcagtttttccccattcagtatgatactagccatatayaggtctgtcatatatggcttttattatgttgaggtatgttccttccatacccagttttttgagggtttttatcatgaaaggatattgaattttatcaaat

SEQ ID NO: 348800 - DNA, 201 bp, Homo sapiens
acttttgggctattgggaatagtgctgctatgaacattcgtgtaaatatttgtttgaatcttgttttcaattctttttctttctttcttttttttttttttgagacagggtcttgccctatctcaaaaaggctggagtgcagtggcatgatgatggcttactgcagcctttaccgcctggactcaaatgatcctcctgcgt

SEQ ID NO: 348801 - DNA, 201 bp, Homo sapiens
caaatataagatcatgtcatctgcaaacaaggataatttgacttctaatcctttctaatttggatgctctttctttctttctcttgtctgattgctctagygaggacttccagtactatgttgaatcacagtggtgaaagtaggcattcttgtcatgttcccggtcttagaggaaaggctttcagtttttccccattcagt

SEQ ID NO: 348802 - DNA, 201 bp, Homo sapiens
taccagctgggcgccgtggctcatgcctacaatcccagcactttgggaggtcgaggcgggcggatcaagaggtcaggagttcgagaccagcctggccaacrtggtgaaaccccatctctactaaaaatacaaaaattagctgggcgtgggggcgggtgcctgtaatcccagctactcgggaggctgaggcaggagaatctc

SEQ ID NO: 348803 - DNA, 201 bp, Homo sapiens
gcctgggggccaggtcaccagtcccagtaccagagcggggaacttgtggtgcttttccccaggcctgctcatggccacctatggccgcccatggaccaatsagcactcacttcttcccctctgaggtccataaaaaaccctggactcagccagactcaaagagaggacgggtagatggggagaaaaccagctgcagagagg

SEQ ID NO: 348804 - DNA, 201 bp, Homo sapiens
gtcttggttttctttcttcagtgcctaacagtacgcactgcccacatgcatgtggggcaggaggtggcagtggcccagcaggtggcaggggtggcacacayggccgccctctgctccctgtgtttgggttatgctgtgcagtgttcgctgggtgtgaagaggggacagggctgggtttgtcgtgactctgctgctttctag

SEQ ID NO: 348805 - DNA, 201 bp, Homo sapiens
ttgggaggctgaggcgggcggatcacgtgaggtcgggagtttgagaccagcctgaccaacatggagaaaccccatctctactaaaaataaaaaagttagcygggcatggtggcacatgcctgtaatcccagctactcaggaggctgaggcaggagaaacgcttgaacccgggaggtggaggttgtggtgagctgagatcgc

SEQ ID NO: 348806 - DNA, 201 bp, Homo sapiens
cgtagaaagggcccagaaatagcgaggggtggtggtggcggcaaacctggcagcagagcctgtgacaagtgcagtgacgcctcacagcgggctcagggggygggtggcctggtctgaagtcaccataagcagaacaggcttcgcaccaggacatccgggtcaataacagccggccccaggctggcgatgactcatgttgga

SEQ ID NO: 348807 - DNA, 201 bp, Homo sapiens
tgagtcctcaccccgtggggtcgtcaggccagatgaggccatgcatgtgaggaaagcttctgatccttctccagtccacggcagtgccattcccacctgtkggggggaggaggcaggctcgggaggtgcagttacgttcccgaggccatgcggcgttcgacctgggtcagccttgctcagtgtttctcaggaggccctcct

SEQ ID NO: 348808 - DNA, 201 bp, Homo sapiens
tgctcatttttaatgtaatctgcattgtttctgacaaaaagtctgctgtcatccttttctttttttttttttttgagacggagtctcactctgtcacccaygctggagtgcagcggcgcgatcacggctcactgaaagctcagcctcctgggttcacaccattctcctgcctcagcctcccgagtagctgggactacaggc

SEQ ID NO: 348809 - DNA, 201 bp, Homo sapiens; identical to SEQ ID NO: 74165

SEQ ID NO: 348810 - DNA, 201 bp, Homo sapiens
aaaagacttggcactttctcttggcatgtaaagaaaccctaggttcttttggggatggcacggccacactgccagcattcaggagcttcccctggagctcytgaaccccagtgtcacccctgccatctcagtggggctcatggtgtctttcttggcgtgtttctggcccataccgtgtttattttaaaaattgttcatgct

SEQ ID NO: 348811 - DNA, 201 bp, Homo sapiens
cgcagcgcctggccttaaaataggtatctttattatccctgttctacagatgggcagactgaggcacagacagttgaagctgagggttagcggccagaaaktggggagtcagacttcagagcccatgctctgctcctcggcctcactgcctcttctcggactccttgacttgaaacttaagcagcatgacctgtacctttt

SEQ ID NO: 348812 - DNA, 201 bp, Homo sapiens
tagccaggatggtctcgatctcctgacctcgtgatctgcccgcctcggcctcccaaggtgctgggattacaggcgtgagccgcagcgcctggccttaaaakaggtatctttattatccctgttctacagatgggcagactgaggcacagacagttgaagctgagggttagcggccagaaagtggggagtcagacttcagag

SEQ ID NO: 348813 - DNA, 201 bp, Homo sapiens
tggaatttttgtggttctatgtaaatgttaagggttttttttttttttttttttttgtatttctgtgaagaatgtcattggtattttttttttttttttttgagatggagtcttactctgtcacccaagctggagtgcagtggcgcgatctcggctcactgcaagctccacctcccaggttcacaccgttctcctgcctca

SEQ ID NO: 348814 - DNA, 201 bp, Homo sapiens
gctaatttttttgtatttttagtagagacggggtttcactgtgttagccaggatggtctcgatctcctgacctcgtgatctgcccgcctcggcctcccaargtgctgggattacaggcgtgagccgcagcgcctggccttaaaataggtatctttattatccctgttctacagatgggcagactgaggcacagacagttga

SEQ ID NO: 348815 - DNA, 201 bp, Homo sapiens
aagcgcaaggtcaagtagtaagccatagcgttccttttagttgcttagaggtgtaaaaactttccatatatccttgatagaggtgtacgcttacatgtgawctgtcagtgtatattcatacattcaatagatatttgaataccattctgcttggtgctgccccatgttctggaaataaagcagtgtacaaaacagaacccc

SEQ ID NO: 348816 - DNA, 201 bp, Homo sapiens
aaggtcaagtagtaagccatagcgttccttttagttgcttagaggtgtaaaaactttccatatatccttgatagaggtgtacgcttacatgtgaactgtcagtgtatattcatacattcaatagatatttgaataccattctgcttggtgctgccccatgttctggaaataaagcagtgtacaaaacagaacccctgccct

SEQ ID NO: 348817 - DNA, 201 bp, Homo sapiens
ttccaaggatgttcatccgcacagcaactcaaggaaagtatgtatgtcagtatagtagacatcgaataccttagcagagagaatgtaaagaaaggagggartagtaaggggagagacttatggggcaggtcatctggtggtgaatctgcagcagtcctaaagaaggtagtgtttggtttgtaagaggaaggaaggaaaggg

SEQ ID NO: 348818 - DNA, 201 bp, Homo sapiens
gttatttagattatgaatttgcaggaaaatctgcagttatgtaatagttcagacattaattatcagctgttttataagattgtatgatataaaggtggacmgtataaatctgaaaagcaatgaaatagtgatttaagaatgtcagaattgtttttcccattggactactgatttagtgactcatctagtgagacatttgtg

SEQ ID NO: 348819 - DNA, 201 bp, Homo sapiens
ttaaagggagtagtgtactgtgaaacacactgtaggaaaagttagttctctattttgtggacaattttctatttacatttcattttatttgcttatctatkatgtcatctagcaattttagcagaaaagagaataagaatagactattccagttacccttttttttttttttttttttttttgagatggagttttgctctg

SEQ ID NO: 348820 - DNA, 201 bp, Homo sapiens; identical to SEQ ID NO: 74171

SEQ ID NO: 348821 - DNA, 201 bp, Homo sapiens
gagagacttatggggcaggtcatctggtggtgaatctgcagcagtcctaaagaaggtagtgtttggtttgtaagaggaaggaaggaaagggcattccaggyggcaggaatgaggcattcatcccatgtgcatacacgtttaagtcatgaacataattaattattgtttgtataatgacggatcagtacatgagctcaagta

SEQ ID NO: 348822 - DNA, 201 bp, Homo sapiens
ggttgtggacatgagtattctgataaaattttgactgtcattttgcctcagttaacatttaccacaactgctaactagtaacaggaaatccttatatagcyctcttatagttgacaaatggcttctatgaaattaattagtaacatcttccccttctgtactgttgttttttttttaatatgcacatcacataaaccatca

SEQ ID NO: 348823 - DNA, 201 bp, Homo sapiens
atttaagaatgtcagaattgtttttcccattggactactgatttagtgactcatctagtgagacatttgtgtatagttccaaattctgataatatttgtgyaccgaattgtattgtgcatcaattgttaggagccttagaaagtattaacttcatctgctacattaagttaaataactgttgcctgtctttggactctatt

SEQ ID NO: 348824 - DNA, 201 bp, Homo sapiens
aaggagtattgcttagttcacagtattaaaggatttgatgaacaattttatatctacctttcatttggtacacaactttatgtctaccttgcatttttgcrtacttttattagcattaaatatcttattaacatttacttaaggctgagtgctgtggctcacacctgtaatcccaacactttggaaggccaaggccggagg

SEQ ID NO: 348825 - DNA, 201 bp, Homo sapiens
gattgtagagtgggcaggaattagtgatttaataatgacgcaaatgtcagattttgtcctgacgttaataatgcactctaaccaagtgagctaactaggtrcagaatatacaattttatatgtattttgaggggaatattctattctcagctgaaacaaacagcattctatataaaactacataaattcttgagctttgct

SEQ ID NO: 348826 - DNA, 201 bp, Homo sapiens
gtaacagaacaaacttacctagaatgtattctatagaatttaagttgcttaacagagcactagggttcccagtgcatattaccactcaaagcgttctgagrattcctacagaaaagaaactgatacctttgtgtagctcggtattactcagacttcttgatcagagaatctttcttgcagctaacagttgttaaaatcctg

SEQ ID NO: 348827 - DNA, 201 bp, Homo sapiens
tttattttggtaacagaacaaacttacctagaatgtattctatagaatttaagttgcttaacagagcactagggttcccagtgcatattaccactcaaagsgttctgaggattcctacagaaaagaaactgatacctttgtgtagctcggtattactcagacttcttgatcagagaatctttcttgcagctaacagttgtt

SEQ ID NO: 348828 - DNA, 201 bp, Homo sapiens; identical to SEQ ID NO: 74176

SEQ ID NO: 348829 - DNA, 201 bp, Homo sapiens
tgagaaagaaatgacctaaattgagttcctgaagctcaacttttgctttgacattttttaggtaatttatttgcttgaggtgcagggtaataaataggaarcgtggattaatgcagaggatgcattcatagcatataaagaatattttgattcttcttcacactggccttgttagatatgcaaagtttgcaggatgagctt

SEQ ID NO: 348830 - DNA, 201 bp, Homo sapiens
tttccttttaatcatgttctaccctttccagtttaaagagcagcctctttgaaaaaggaaattgacactaaaaaataattgaagcattctttttcttttayccatttctctaaagacagtggataaagtccttccttcttcctgctttcaacataacaaaacatcttttggctagtctctgctctttttggctttagcttt

SEQ ID NO: 348831 - DNA, 201 bp, Homo sapiens
gcccaggctggtctcaaactcctggtctccagtgatccacctacctcggcctcccaaagtgctgggagtacaggtgtgagccaccatgcccagccatgggkgatattttttaactctttgttgcactctgattttctgatacatccccagttgtccagacttcatctaggatgtagtaagtggttctgagttaatgtcttc

SEQ ID NO: 348832 - DNA, 201 bp, Homo sapiens; identical to SEQ ID NO: 74178

SEQ ID NO: 348833 - DNA, 201 bp, Homo sapiens
cggtaggaatgtaaagaagtctgtgtcagcactttgatgactccacccattggcagtctgtggatttaaatctgctcggtgccgtgcagcatgccttcgcrctaacctaaatggtggacagtctgcagcgcagatgacagttttagtgtagcactgttagaaagctaggtactaaacacctttgaagcttttgctctataa

SEQ ID NO: 348834 - DNA, 201 bp, Homo sapiens
ctacataaattcttgagctttgctctaaactggcagaagctctctaattctcataagttggtatgttgataccttgtgttctgttgtagctttttattagrgaaacaacaatcatacacaaaaggaaagagaagggtataataaaccactgtgtgcccatcacttcagaaattattgactcatggccttttctgtttcatg

SEQ ID NO: 348835 - DNA, 201 bp, Homo sapiens
acctcctcctttgtgttttctgctccttagttgctcacctgaaaactgttattttttgggaaaccttccctgcaacccagatgtaccctttcccatctcaytgcatcccacctgtccttatttgcctggcgctggtagatggtcagagaataatccttggatggaattgaacctgtgaacatttgttagtgtcctgtcatt

SEQ ID NO: 348836 - DNA, 201 bp, Homo sapiens
ttatttaaaatattaattgaaggcagtatccttgttcttaatgttaagccattcacaatcacttgttgcactttcttgttggaaagaatgtgtatgtttgygtacacacgttcgcctttgaaattattgctcatagaatgtttgcaatggtcttaagagtattaagatgcactgttcatgtaactgactttacttctttaa

SEQ ID NO: 348837 - DNA, 201 bp, Homo sapiens
agcttgctatgagccaagattgcgccactgtactccagcctgggcgacagagccagactccgtctcaaaaaaaaagaaagaaaatataatgcagttatacrggtatgaaggagtaggagtctggattaatgtcgtggttgtggacatgagtattctgataaaattttgactgtcattttgcctcagttaacatttaccaca

SEQ ID NO: 348838 - DNA, 201 bp, Homo sapiens
ccagtcctgccagagtttgatatatagaaggtgtttgctccatgacagcattgcccggcatccagctccagaaggtgagtgctttcccttacttgggaggrtgggtgggtggaacatgctggcagagggccagcgccccagaataacagttctagtcacactctacacttcttggtattgtgttgtcgggggttgggggtg

SEQ ID NO: 348839 - DNA, 201 bp, Homo sapiens
tgtaactgactttacttctttaaaagttaacttttggggctgggcgtggtggctcacgcctgtaatcctagtactttgggaggccgaggagggcagaacayaaggtcaggagaccaggagactagctggccaacatggcgaaaccccgtctctactaaaaataaaaattagccgggtgtggtggcgggcgcctgtaatccc

SEQ ID NO: 348840 - DNA, 201 bp, Homo sapiens
ttacatttagcatggtgatgtgattccaacatagccattttaaaaaccagaagattgcacacccgtccctgtttatagcaactgagtttattgaagaccaygcattcctgtcttaaaaatccaactatatgcataaaatgaagactttttaaacctaggatgttggcttattagcagttataaattattttggagattatc

SEQ ID NO: 348841 - DNA, 201 bp, Homo sapiens
ggcttattagcagttataaattattttggagattatcagcctagtatgctagtacagttaaactagcattttttaacctttttaaattatcactccccccsgaacatttttagacactttttctgaattgcccctgcccatgaagttttaatgtattttgtgtgtctgtttatgtactgtgtgtatatctatgttttatac

SEQ ID NO: 348842 - DNA, 201 bp, Homo sapiens
actgtgcccagccaagagtgtaatcttaaagcagagaaaagcaaaactgaagcaaagaaaggcctagagcctgtgccattacctctctcactcccagcttsttgctcctatcgtgggtcttgccatgcctctgcagtggggtcagcttgtctcagattgcaggctactggaccatgttggccatgggtctttgggccatca

SEQ ID NO: 348843 - DNA, 201 bp, Homo sapiens
cagccaagagtgtaatcttaaagcagagaaaagcaaaactgaagcaaagaaaggcctagagcctgtgccattacctctctcactcccagcttcttgctccyatcgtgggtcttgccatgcctctgcagtggggtcagcttgtctcagattgcaggctactggaccatgttggccatgggtctttgggccatcagaatagac

SEQ ID NO: 348844 - DNA, 201 bp, Homo sapiens
tccaagaaatatactgtgttctgaaatattcaaaaccacaaatatctgtactcctttttacttcaaagactgatacttactgactaaagtcttatttaaartattaattgaaggcagtatccttgttcttaatgttaagccattcacaatcacttgttgcactttcttgttggaaagaatgtgtatgtttgcgtacacacg

SEQ ID NO: 348845 - DNA, 201 bp, Homo sapiens
ttgcactttcttgttggaaagaatgtgtatgtttgcgtacacacgttcgcctttgaaattattgctcatagaatgtttgcaatggtcttaagagtattaaratgcactgttcatgtaactgactttacttctttaaaagttaacttttggggctgggcgtggtggctcacgcctgtaatcctagtactttgggaggccgag

SEQ ID NO: 348846 - DNA, 201 bp, Homo sapiens
ctgaaaagaaaaaaggccaaaaattaatgggatttaaatttgtagaggatatacagaagaggtaagatagctggcttaccaacttctgagctagtaagacrccctttgaaacgtaagtgaactaattttagtgaattaatccaaaatcttgtggattcatccataagaggttaagcagaaatggattcgaaactagaaggg

SEQ ID NO: 348847 - DNA, 201 bp, Homo sapiens; identical to SEQ ID NO: 74174

SEQ ID NO: 348848 - DNA, 201 bp, Homo sapiens
gtagcgagaccctgtctcaaaacaacagcaacaacaaaaaacctaacgaataattctcaatataatacatgatcaatttttaaaaaacagatcaagaattyaaagtgcggtcaggtgtggacagactaaattcttttctgatgctcaaacaggaaaactgcaatctacctggattagaaccgttgtgtctctttgctaagc

SEQ ID NO: 348849 - DNA, 201 bp, Homo sapiens
atccagctccagaaggtgagtgctttcccttacttgggagggtgggtgggtggaacatgctggcagagggccagcgccccagaataacagttctagtcacrctctacacttcttggtattgtgttgtcgggggttgggggtggggagtaggcccctgctgctctttacggtgttactgtgaagccacagctaactaaaaca

SEQ ID NO: 348850 - DNA, 201 bp, Homo sapiens
tgggagggtgggtgggtggaacatgctggcagagggccagcgccccagaataacagttctagtcacactctacacttcttggtattgtgttgtcgggggtkgggggtggggagtaggcccctgctgctctttacggtgttactgtgaagccacagctaactaaaacatggccattggaatatgtcatattgaagtgcttac

SEQ ID NO: 348851 - DNA, 201 bp, Homo sapiens
cactgcaaacaaattattcattccaaaaaatgtcagagcttgtttcagtagatgacatagatagattatatttgaatgtaaactctgtggatgatactttrtacgaagacattattgaaccagtaataggatattcacttggagtcattcttccagtagccatgatgggtttttttcctggttggtctatgtgctctttcc

SEQ ID NO: 348852 - DNA, 201 bp, Homo sapiens
ccgtttctgagataactacctggaaataagattgtagagtgggcaggaattagtgatttaataatgacgcaaatgtcagattttgtcctgacgttaataaygcactctaaccaagtgagctaactaggtacagaatatacaattttatatgtattttgaggggaatattctattctcagctgaaacaaacagcattctata

SEQ ID NO: 348853 - DNA, 201 bp, Homo sapiens; identical to SEQ ID NO: 74177

SEQ ID NO: 348854 - DNA, 201 bp, Homo sapiens; identical to SEQ ID NO: 74180

SEQ ID NO: 348855 - DNA, 201 bp, Homo sapiens
cattcctcaggtacgtgaggcgccctccacctcaggacgtctacactggctgattcctctacctaggatgctgttccagcagatgtccacgtggcttcctycagtttcccattatcagttaggccttcctggccaccatatctaaaattgtaacaccccactgacataccttcccctcccattactttgcatcctccttcc

SEQ ID NO: 348856 - DNA, 201 bp, Homo sapiens
tgcctctgcagtggggtcagcttgtctcagattgcaggctactggaccatgttggccatgggtctttgggccatcagaatagacatttgtacagttctgcmaagagagcagtattccacataatattttgcctatagagattatgctttttcttcttaaagtcaaaacattataaataatagctaaatactttgtcttcta

SEQ ID NO: 348857 - DNA, 201 bp, Homo sapiens
gacaattttctatttacatttcattttatttgcttatctattatgtcatctagcaattttagcagaaaagagaataagaatagactattccagttacccttttttttttttttttttttttttgagatggagttttgctctgttgcccaggctggagtgcagtggtgccatcttggctcactgcaggctccacctcccggg

SEQ ID NO: 348858 - DNA, 201 bp, Homo sapiens
gacagaatagcaactttatgccagttatctgttgcccttgccaatttgttggagaaaagctgctattataaagcctgatgtggacttttttcatcagtgtyactcaagcaagttggcctttaaagacagttttttactgcttaatatataggagttttcttgttttatttgttcattttcctaattgaacaaattatggct

SEQ ID NO: 348859 - DNA, 201 bp, Homo sapiens
acaattttctatttacatttcattttatttgcttatctattatgtcatctagcaattttagcagaaaagagaataagaatagactattccagttacccttttttttttttttttttttttttgagatggagttttgctctgttgcccaggctggagtgcagtggtgccatcttggctcactgcaggctccacctcccgggt

SEQ ID NO: 348860 - DNA, 201 bp, Homo sapiens
tgcatttggcacaattactccctccttgaagcactttcatcacctgccttccgggacacagcactccctggtttttgtcctgtctctgactcttcattctyagttgtctttgctgatgggcacctcagctgtctgtctttctgcctgtttttcttctctcagcactttccctgggtggttgcttatcatctgcacactgat

SEQ ID NO: 348861 - DNA, 201 bp, Homo sapiens
ttcctccatctttgatgtccctttaaaatcttattaaagagctcacagctgggcacggtggctcacacctgtaatcccagcactttgggaggccgaggcakgtggatcacttgaggtcaggagttcaagaccagcctgaccaacatggtgaaaccctgtctctactaaaaatacaaaaattagctgggtgtggtggtgcac

SEQ ID NO: 348862 - DNA, 201 bp, Homo sapiens
caaaacttaactataatttccttgtcagggtgctcagtagctcttggtttgactttgggctaagggatgtgaaattttagctccttcccaccacctgtttsccctcactcccacccccagccaatattcttcataagcaaaaattatggttaagctaagctgaatgggttatattcaaagtaagtacagacggcaaatagg

SEQ ID NO: 348863 - DNA, 201 bp, Homo sapiens
aaatcagatagacagatgcaaccctatgaaattgagaaatacaaaaggagggaggcagaagaaaggtgatttaaaaggtgtatcttctgctgtaaaggaayttaactgtttccaaggatgttcatccgcacagcaactcaaggaaagtatgtatgtcagtatagtagacatcgaataccttagcagagagaatgtaaagaa

SEQ ID NO: 348864 - DNA, 201 bp, Homo sapiens
atcccagcctccaaattacatatccagtgaagttttaaaaaaaaaaaaagaattggattcaagttttcttttcagacttttatttttaaacagtataatctttttttttttttttttttttttactgagatggagtctcactgtgtcaacccaggctgatgtgcagtggcgcaatctcggctcactgcaacctccactcac

SEQ ID NO: 348865 - DNA, 201 bp, Homo sapiens
ttttagtagagacggggtttcaccatgttggccacctggtctcgaactcctgacctcaagtgatccacccgccttggcctcccaaagtgcagggattacakgcatgagccactgtgcccagccaagagtgtaatcttaaagcagagaaaagcaaaactgaagcaaagaaaggcctagagcctgtgccattacctctctcac

SEQ ID NO: 348866 - DNA, 201 bp, Homo sapiens
actcaccagttctgttatcaaaatgtatgtacatttttctacatcactacaaagataacattcttaatggctatagaggtttctagtgtatgaatgtttcmtaatttacccccttattataatttgttttttttccaatttgtattgcattcctacactttttttttttttgagatggggagatgaggtctcactatgttg

SEQ ID NO: 348867 - DNA, 201 bp, Homo sapiens
ttatgtgttttgtttacagctatttctagaacaatgcctagtacatggtgggcactaaattttttaatttttttttttttttttttgagacagggtcttgytgtatcgcccaggctggagtgcagtggcacaatcttggctcactgtgacctttgcctcctgggttcaagcgattctcccacctcagcttcccctatagct

SEQ ID NO: 348868 - DNA, 201 bp, Homo sapiens
ttttcttgactaaagttagggctgaaataccccagtatgatttctctaggtgagaaccagtgcttgctgtcactcagttgtaatctttcttcctagatatycagttctttactcaaggtgtgcctgcctggagtcccttcccctaacctctgcctgcttggagtcccttccccaacctcctcctttgtgttttctgctcct

SEQ ID NO: 348869 - DNA, 201 bp, Homo sapiens; identical to SEQ ID NO: 74172

SEQ ID NO: 348870 - DNA, 201 bp, Homo sapiens
gttttgtttacagctatttctagaacaatgcctagtacatggtgggcactaaattttttaatttttttttttttttttttgagacagggtcttgttgtatygcccaggctggagtgcagtggcacaatcttggctcactgtgacctttgcctcctgggttcaagcgattctcccacctcagcttcccctatagctggaact

SEQ ID NO: 348871 - DNA, 201 bp, Homo sapiens; identical to SEQ ID NO: 74173

SEQ ID NO: 348872 - DNA, 201 bp, Homo sapiens; identical to SEQ ID NO: 74175

SEQ ID NO: 348873 - DNA, 201 bp, Homo sapiens
tggtcctagctactcaggaggctgaggtgaaaggatcacttgaccccgggaggttgaggcggcagtgagctgtagtcacgccagctgcactgcagccaggstgacagagaggaatctcaaaagttttttttttaacttagtcctcagagtatattaacaattatcataggtaactttattgagcgcttaatatatgctttg

SEQ ID NO: 348874 - DNA, 201 bp, Homo sapiens; identical to SEQ ID NO: 74166

SEQ ID NO: 348875 - DNA, 201 bp, Homo sapiens; identical to SEQ ID NO: 74167

SEQ ID NO: 348876 - DNA, 201 bp, Homo sapiens
caggaatggcaactagaatagtctgattagagtgaacattattctatagaaacagtaaacaaagcagttggagttggctctcgccattatttgtcaatgamatttcagataaaggacctaaagctggcatttgtattgcaaagatgttgtaaaaatctaaatatcaatttgtatcaaagatatatatagatacatattttc

SEQ ID NO: 348877 - DNA, 201 bp, Homo sapiens; identical to SEQ ID NO: 74168

SEQ ID NO: 348878 - DNA, 201 bp, Homo sapiens
caaacgggtaaatactggatctcggggtttgtactttagtttttctttactagctaaacatctttgggatgttgaatgaaaataaagattcgaaacaactrcctatcttaaacttcaagcgcaaggtcaagtagtaagccatagcgttccttttagttgcttagaggtgtaaaaactttccatatatccttgatagaggtg

SEQ ID NO: 348879 - DNA, 201 bp, Homo sapiens; identical to SEQ ID NO: 74169

SEQ ID NO: 348880 - DNA, 201 bp, Homo sapiens; identical to SEQ ID NO: 74170

SEQ ID NO: 348881 - DNA, 201 bp, Homo sapiens
gctcaacttttgctttgacattttttaggtaatttatttgcttgaggtgcagggtaataaataggaagcgtggattaatgcagaggatgcattcatagcayataaagaatattttgattcttcttcacactggccttgttagatatgcaaagtttgcaggatgagctttccagactggattagctcagaggctgcatttag

SEQ ID NO: 348882 - DNA, 201 bp, Homo sapiens; identical to SEQ ID NO: 74179

SEQ ID NO: 348883 - DNA, 201 bp, Homo sapiens; identical to SEQ ID NO: 74181

SEQ ID NO: 348884 - DNA, 201 bp, Homo sapiens; identical to SEQ ID NO: 74182

SEQ ID NO: 348885 - DNA, 201 bp, Homo sapiens
tttaggacttgaccttgttgctcaattttgtgttccatggattcaaggaacaaatgaacatgtgaccaaagtcctcctcaactaaggagtcttttttttttttttcttgagtcagagtctcactctgtcgccctggctggagtgcagtggcgtgatcttggctcacagcaacctccacctccccagttcaagagattgtcc

SEQ ID NO: 348886 - DNA, 201 bp, Homo sapiens; identical to SEQ ID NO: 74184

SEQ ID NO: 348887 - DNA, 201 bp, Homo sapiens; identical to SEQ ID NO: 74185

SEQ ID NO: 348888 - DNA, 201 bp, Homo sapiens
agtgggctggggaaggggagggaggtctccctgagccacaggagtttatagttgggaagagaccagaccagacgtgcacacaggaccctgctgggcacccrggaggctcggaaccaggtgccaagcagatagaaagtacagtgtagggtgtgatagtgggatgggagcttcctggagtaggggatctggctctagcataga

SEQ ID NO: 348889 - DNA, 201 bp, Homo sapiens
gcttctgaattctgccttgtactggcctcctggcctttgacttgctcttttctctgcctggatcatccttcaaccaatgttgatggggaatccccgttcaygctcccaaattcaccctctgtttctgtccttccatgaagctcctggggctgcccctcaccctgctgtttgtgtggggggcctggcatcaagaatatacac

SEQ ID NO: 348890 - DNA, 201 bp, Homo sapiens
gaagctgcactacaagagggagaagccactccagcccgtggtatggtaaggagactggcatttcctcttttgtggccgtgagggtggtggctctcctccaycactggtccttcttggttgcaggtcacagtaccctcagcccaagctgctggagcacaggtaggtgtcatggagaggcctgatgggggcgggggaaaagga

SEQ ID NO: 348891 - DNA, 201 bp, Homo sapiens
cctcttctctactaaaaatacaaaaattagctgggcatggtggcttgtgcctgtaatcccagctactcaggaggctgagacaagagaatcgcttgaacccmagagaagaggttgcagtgaatggagattgcgccactgcactccagcccagttgacaagagtgaaactctatctcaaaacaacaaaagtgttcctttgcag

SEQ ID NO: 348892 - DNA, 201 bp, Homo sapiens
tggtcttgaactcctggccttgtgatccacccgcctccgcctcccaaagtgctgggattacaggcgtgagccaccgcgcctggccctttgcaggttttcamatcttctttccgacaacgagagcgacatggttggaaaagcatcagccttgggagcaagcggcactgggttcgaatcactgccctgccacttactctctca

SEQ ID NO: 348893 - DNA, 201 bp, Homo sapiens
ccgccaccatgcccagctaatttttgtatttttagtagagacgaggtttcaccatcttggccaggctggtcttgaactcctggccttgtgatccacccgcstccgcctcccaaagtgctgggattacaggcgtgagccaccgcgcctggccctttgcaggttttcacatcttctttccgacaacgagagcgacatggttgg

SEQ ID NO: 348894 - DNA, 201 bp, Homo sapiens
atggtgcgatctcggctcactgcaacctctgcctcctgggttcaagcaattctcctgcctcagcctcccgagtagctgggattacaggcgcccgccaccaygcccagctaatttttgtatttttagtagagacgaggtttcaccatcttggccaggctggtcttgaactcctggccttgtgatccacccgcctccgcctcc

SEQ ID NO: 348895 - DNA, 201 bp, Homo sapiens
catggagaaacctcttctctactaaaaatacaaaaattagctgggcatggtggcttgtgcctgtaatcccagctactcaggaggctgagacaagagaatcrcttgaacccaagagaagaggttgcagtgaatggagattgcgccactgcactccagcccagttgacaagagtgaaactctatctcaaaacaacaaaagtgt

SEQ ID NO: 348896 - DNA, 201 bp, Homo sapiens
ttctgctctcaggggagcctgctgaacatgtgttcttctgggcatccctggggtcaaggtctaggtatggcttccagcacagccaagaagctcctctcccrggtgctgggggcccaggaaccagccctgggatccctcctccgggcctagctggctggtttcagttagtgcttggactggcttccctgggacagggtgcag

SEQ ID NO: 348897 - DNA, 201 bp, Homo sapiens
tttttttttttttgagacagggtctcactttgtgggtggcccaggctggagtgcagtagtgtgattacagctcactacagcctccacctcctgggctcaarccatcctcctgcttcagcctcccaagtagccaggaccacaggtgcacaccaccatacccagctaatttttgttgtttttgtagagatgaggtcttgccat

SEQ ID NO: 348898 - DNA, 201 bp, Homo sapiens
cctgtaatcccagctactcaggaggctgagacaagagaatcgcttgaacccaagagaagaggttgcagtgaatggagattgcgccactgcactccagcccrgttgacaagagtgaaactctatctcaaaacaacaaaagtgttcctttgcaggtgttcctgggacctcagagaccaggctcagagcctgacatccctgcga

SEQ ID NO: 348899 - DNA, 201 bp, Homo sapiens
cttctgctctcaggggagcctgctgaacatgtgttcttctgggcatccctggggtcaaggtctaggtatggcttccagcacagccaagaagctcctctccyaggtgctgggggcccaggaaccagccctgggatccctcctccgggcctagctggctggtttcagttagtgcttggactggcttccctgggacagggtgca

SEQ ID NO: 348900 - DNA, 201 bp, Homo sapiens
aaaacaacaaaagtgttcctttgcaggtgttcctgggacctcagagaccaggctcagagcctgacatccctgcgaggggacagcctcatccgcccaggccrgtgggggtctctacaagtgcccaggctcaggtgcagcccccagcaatgcatcgccggagactggccctgggtctggggttctgcctgttggcgggcacaa

SEQ ID NO: 348901 - DNA, 201 bp, Homo sapiens
gggggtctctacaagtgcccaggctcaggtgcagcccccagcaatgcatcgccggagactggccctgggtctggggttctgcctgttggcgggcacaagcytcagtgtcctgtggtgagtctgccccacggagctccccctgtctctatccccacccaggactccccctgtctctatccccacccaggactccccctgtct

SEQ ID NO: 348902 - DNA, 201 bp, Homo sapiens
tgttccatggattcaaggaacaaatgaacatgtgaccaaagtcctcctcaactaaggagtcttttttttttttttcttgagtcagagtctcactctgtcgycctggctggagtgcagtggcgtgatcttggctcacagcaacctccacctccccagttcaagagattgtcctgtctcagcctcccaagtagctgggattac

SEQ ID NO: 348903 - DNA, 201 bp, Homo sapiens
ttttttttcttgagtcagagtctcactctgtcgccctggctggagtgcagtggcgtgatcttggctcacagcaacctccacctccccagttcaagagattstcctgtctcagcctcccaagtagctgggattacaggcacccgccaccatacctggctaatttttgtatttttatttgagatggcgtttcaccatgttggc

SEQ ID NO: 348904 - DNA, 201 bp, Homo sapiens
cgggtcacacagtgtgagagccagggctgggatgagacttaggctttcacaggggagggtctcagtgcccacggcccccctgctgccaggcccacacagcygctgacactcacaccctggttggcgcccatcgtctccgagggaaccttcaacccagagcttctgcagcacatctaccagccactgaacctgaccattggg

SEQ ID NO: 348905 - DNA, 201 bp, Homo sapiens
ttttcttgagtcagagtctcactctgtcgccctggctggagtgcagtggcgtgatcttggctcacagcaacctccacctccccagttcaagagattgtccygtctcagcctcccaagtagctgggattacaggcacccgccaccatacctggctaatttttgtatttttatttgagatggcgtttcaccatgttggccagg

SEQ ID NO: 348906 - DNA, 201 bp, Homo sapiens
attgttcataacaacgtggtcttgccctttttaatgaccctcatttattaggggcttggcacatatgaataatgccaggcttctccttggtgtgcgttaaytcctggtactcccaaccctgctgggaggtggctatcattatccccactttccatatgaggaaagggaggcccagagatggggacgaagctgccccgggtc

SEQ ID NO: 348907 - DNA, 201 bp, Homo sapiens
cagagccgttgccctggttggagtgaggaggcctcacgagtgaactggacaccccaggaccagcagagggaaagaggggagcaaatgaagcttctgaggckccttgaattacccctggagcctgcaggttctgctcctttgaccccctgggactcaggagagctgctaccttgacaacacccaaacaaaggtgtgtgtttt

SEQ ID NO: 348908 - DNA, 201 bp, Homo sapiens
gctggtaagtggaccccagcctggctgaccccagcacacagtggggaccctggcaggctgctggtgtagcagtgggtgaccgggtgatcatcactaggtamactcatttcatccagtccttcctggagtcagccgaggagttcttcatgcgtgggtaccgggtgcactactacatcttcactgacaaccctgcagccgttc

SEQ ID NO: 348909 - DNA, 201 bp, Homo sapiens
atctgcaccgtgcttgcactcaggaggtgctcaggccattgttcataacaacgtggtcttgccctttttaatgaccctcatttattaggggcttggcacayatgaataatgccaggcttctccttggtgtgcgttaactcctggtactcccaaccctgctgggaggtggctatcattatccccactttccatatgaggaaa

SEQ ID NO: 348910 - DNA, 201 bp, Homo sapiens
accttcaacccagagcttctgcagcacatctaccagccactgaacctgaccattggggtcacggtgtttgccgtggggaagtgagtagtgggctggggaakgggagggaggtctccctgagccacaggagtttatagttgggaagagaccagaccagacgtgcacacaggaccctgctgggcacccaggaggctcggaacc

SEQ ID NO: 348911 - DNA, 201 bp, Homo sapiens
cctggttggcgcccatcgtctccgagggaaccttcaacccagagcttctgcagcacatctaccagccactgaacctgaccattggggtcacggtgtttgcygtggggaagtgagtagtgggctggggaaggggagggaggtctccctgagccacaggagtttatagttgggaagagaccagaccagacgtgcacacaggac

SEQ ID NO: 348912 - DNA, 201 bp, Homo sapiens
gccctctgacctcccgatcccagccgctgccctcgctgagcttggaccacgtgcctgagacccgtctttcctcatttaaaccctgctcggggtggggggggctccacaccggcggggaacgtgcttgttcaccgtgtgttcttagcctctagaacagagcctcaggcacaggaggcacttcacatttattgaataaataga

SEQ ID NO: 348913 - DNA, 201 bp, Homo sapiens; identical to SEQ ID NO: 74190

SEQ ID NO: 348914 - DNA, 201 bp, Homo sapiens; identical to SEQ ID NO: 74192

SEQ ID NO: 348915 - DNA, 201 bp, Homo sapiens
atgtattgaaactcacaggggaccaggcaaggcagctcatgcctgtaatcccagcactttgggaagccaagacaggcagatcacttgagctcaggagttcragaccagcctgggcaacatggtgaaacccagtctgtacaaaaaatattaatacaaaaacagctgggtgtggtggtgggcacctgtggtctcagctcctca

SEQ ID NO: 348916 - DNA, 201 bp, Homo sapiens; identical to SEQ ID NO: 74194

SEQ ID NO: 348917 - DNA, 201 bp, Homo sapiens
gatgtattgaaactcacaggggaccaggcaaggcagctcatgcctgtaatcccagcactttgggaagccaagacaggcagatcacttgagctcaggagttyaagaccagcctgggcaacatggtgaaacccagtctgtacaaaaaatattaatacaaaaacagctgggtgtggtggtgggcacctgtggtctcagctcctc

SEQ ID NO: 348918 - DNA, 201 bp, Homo sapiens
atacatgatgtattgaaactcacaggggaccaggcaaggcagctcatgcctgtaatcccagcactttgggaagccaagacaggcagatcacttgagctcargagttcaagaccagcctgggcaacatggtgaaacccagtctgtacaaaaaatattaatacaaaaacagctgggtgtggtggtgggcacctgtggtctcag

SEQ ID NO: 348919 - DNA, 201 bp, Homo sapiens
cagtccctccaccccagctccacggccagggaagctctgcagactctccccacctctccttagagattaaaggtctggggggttctgccacccctgctcayctgagttcccagacttgaccatgaactcccttatttctgggaaacactctggagcattctctggcatcccagaggtaaggcccagccggggatcaattac

SEQ ID NO: 348920 - DNA, 201 bp, Homo sapiens
gctcagaggcgggagggggctccaagagcttcctctttcccttcagcaggtgtgcccaagcactcaccctgggttgtgggggggcagcgttgggcttgggygtggctctgaaagtgacccaggggggcctgccctccagagctggcagtctggagggggcgatggacagggcacaaaagcaaacaggcacagaaaggaaaa

SEQ ID NO: 348921 - DNA, 201 bp, Homo sapiens
ggttatgaaaacaaaaatgaacctaccttgctgattgggagagggaaaatgctatcctctttggtataaattttatttattattattattattattattattattattatattgagacagagtctcgctttgccacccaggctggagtaccgtggcgtgatctcagctcattgcaacctccacctcccgggttcaagcaat

SEQ ID NO: 348922 - DNA, 201 bp, Homo sapiens
agagaatcgcttgaacccaagagaagaggttgcagtgaatggagattgcgccactgcactccagcccagttgacaagagtgaaactctatctcaaaacaayaaaagtgttcctttgcaggtgttcctgggacctcagagaccaggctcagagcctgacatccctgcgaggggacagcctcatccgcccaggccagtggggg

SEQ ID NO: 348923 - DNA, 201 bp, Homo sapiens
gtgaccctggacagatcacttctgtaggggtccccagctcctctgtagagtcgggtggggctgtgggggaaggtcagagggagcctgcatggaccctgggwgcccacccgcaggggcctctgactcctccttcttcctgtgctgagtgtctctgtccccagacccatgatgatggctctttcttgcctctgccaccagcaa

SEQ ID NO: 348924 - DNA, 201 bp, Homo sapiens
actctatctcaaaacaacaaaagtgttcctttgcaggtgttcctgggacctcagagaccaggctcagagcctgacatccctgcgaggggacagcctcatcygcccaggccagtgggggtctctacaagtgcccaggctcaggtgcagcccccagcaatgcatcgccggagactggccctgggtctggggttctgcctgttg

SEQ ID NO: 348925 - DNA, 201 bp, Homo sapiens
gggagacaggagagtatttaagttcacttcatctgccggttcctgattcctaagttcatgtttctgataaatgcaatagtatttatgtaatttaagggctrtgacaagcgtgaagtgaaattcccatttcggtcttccagcatccttgcagccccctgcatggtctgaccgtccacatgttgcacagctgtgagccttgct

SEQ ID NO: 348926 - DNA, 201 bp, Homo sapiens
acctggcctcctaatgcactgtgggagacctgcactcccaatgacgtgcatgaggtgcgttttcagcctctggtgcagagtggatcaacagattttttttyttttttttattcacagggtgtatcttgagaactggctgccagtctcctatgtcccctattatctcccctgcccagagatcttgtaagtatgggtgtggct

SEQ ID NO: 348927 - DNA, 201 bp, Homo sapiens
cccagggtcccgggtcccgaccacggactggggccggcggcgctcggggctgggctctgcgttcgcgggaggcgggggcgagacggggcttggaggcccgrgtggggaaactgaggccccagaggaagagagagggagagggcttgccggacactcccgagtggcagcggcctaatccccaggaccccggctctccgctca

SEQ ID NO: 348928 - DNA, 201 bp, Homo sapiens
actctctcagtgaccctggacagatcacttctgtaggggtccccagctcctctgtagagtcgggtggggctgtgggggaaggtcagagggagcctgcatgkaccctgggtgcccacccgcaggggcctctgactcctccttcttcctgtgctgagtgtctctgtccccagacccatgatgatggctctttcttgcctctgc

SEQ ID NO: 348929 - DNA, 201 bp, Homo sapiens
aagctgcactacaagagggagaagccactccagcccgtggtatggtaaggagactggcatttcctcttttgtggccgtgagggtggtggctctcctccatyactggtccttcttggttgcaggtcacagtaccctcagcccaagctgctggagcacaggtaggtgtcatggagaggcctgatgggggcgggggaaaaggac

SEQ ID NO: 348930 - DNA, 201 bp, Homo sapiens
aaaagttcacctggcctaggagcataagaatctctaccaggaacatgcttacaacagccgtaagaggctggtactagcattttgggaattggacaaatgargacccagagggccagagcagagtgacatcttgagatggggagctggtaagtggaccccagcctggctgaccccagcacacagtggggaccctggcaggct

SEQ ID NO: 348931 - DNA, 201 bp, Homo sapiens
aggttatgaaaacaaaaatgaacctaccttgctgattgggagagggaaaatgctatcctctttggtataaattttatttattattattattattattattattattattatattgagacagagtctcgctttgccacccaggctggagtaccgtggcgtgatctcagctcattgcaacctccacctcccgggttcaagcaa

SEQ ID NO: 348932 - DNA, 201 bp, Homo sapiens
aagatcataagaattcttagaacgtcgctgggcacttagaaattgctcagtaaaagttcacctggcctaggagcataagaatctctaccaggaacatgctyacaacagccgtaagaggctggtactagcattttgggaattggacaaatgaggacccagagggccagagcagagtgacatcttgagatggggagctggtaa

SEQ ID NO: 348933 - DNA, 201 bp, Homo sapiens
gaggttatgaaaacaaaaatgaacctaccttgctgattgggagagggaaaatgctatcctctttggtataaattttatttattattattattattattattattattattatattgagacagagtctcgctttgccacccaggctggagtaccgtggcgtgatctcagctcattgcaacctccacctcccgggttcaagca

SEQ ID NO: 348934 - DNA, 201 bp, Homo sapiens; identical to SEQ ID NO: 74189

SEQ ID NO: 348935 - DNA, 201 bp, Homo sapiens
ggacttgaccttgttgctcaattttgtgttccatggattcaaggaacaaatgaacatgtgaccaaagtcctcctcaactaaggagtcttttttttttttttcttgagtcagagtctcactctgtcgccctggctggagtgcagtggcgtgatcttggctcacagcaacctccacctccccagttcaagagattgtcctgtc

SEQ ID NO: 348936 - DNA, 201 bp, Homo sapiens
aggacttgaccttgttgctcaattttgtgttccatggattcaaggaacaaatgaacatgtgaccaaagtcctcctcaactaaggagtcttttttttttttttcttgagtcagagtctcactctgtcgccctggctggagtgcagtggcgtgatcttggctcacagcaacctccacctccccagttcaagagattgtcctgt

SEQ ID NO: 348937 - DNA, 201 bp, Homo sapiens
taggacttgaccttgttgctcaattttgtgttccatggattcaaggaacaaatgaacatgtgaccaaagtcctcctcaactaaggagtcttttttttttttttcttgagtcagagtctcactctgtcgccctggctggagtgcagtggcgtgatcttggctcacagcaacctccacctccccagttcaagagattgtcctg

SEQ ID NO: 348938 - DNA, 201 bp, Homo sapiens
ttaggacttgaccttgttgctcaattttgtgttccatggattcaaggaacaaatgaacatgtgaccaaagtcctcctcaactaaggagtcttttttttttttttcttgagtcagagtctcactctgtcgccctggctggagtgcagtggcgtgatcttggctcacagcaacctccacctccccagttcaagagattgtcct

SEQ ID NO: 348939 - DNA, 201 bp, Homo sapiens
cttcattggtcttggcacacttccgttcttttggaactatcataaattctagttaaggggcttttttggtttcttctttttttttttttttttttttttttttgagacggagtctcgctctgtcgcccatgctggagtgcaatggcgcgatcttggctcactgcaacccctgcctcccaggttcgagtgattcttctgcct

SEQ ID NO: 348940 - DNA, 201 bp, Homo sapiens
tgtggttatgtagatcagtgtccttttacttaggaggtatgtgttaaagtatttagggttaaattgtcatgatgtttgcaacctactttcagatggttcaraaaaatgtgcttgcatatgtgtgtgtgtgcgtgggcatgcgtagatagaacacagatgggccaaagactggtggtggcagaatctaggtaaaggagttac

SEQ ID NO: 348941 - DNA, 201 bp, Homo sapiens
ccagcctgggcagcagaatgagaccccatctttaaaaaaaaaaaaaaaaaaaaaaacatcttaggtacagttggagaatttgaatatggactgtttattaraaaatgctattcagcattaaatttctgaggtgtgataatggtggtgtggttatgtagatcagtgtccttttacttaggaggtatgtgttaaagtatttag

SEQ ID NO: 348942 - DNA, 201 bp, Homo sapiens
caggaggttgaggctgcagtgagcagtgattgtgccactgcactccagcctgggcagcagaatgagaccccatctttaaaaaaaaaaaaaaaaaaaaaaamatcttaggtacagttggagaatttgaatatggactgtttattagaaaatgctattcagcattaaatttctgaggtgtgataatggtggtgtggttatgta

SEQ ID NO: 348943 - DNA, 201 bp, Homo sapiens
cgaggccagagcatcacttgaacccaggaggttgaggctgcagtgagcagtgattgtgccactgcactccagcctgggcagcagaatgagaccccatcttwaaaaaaaaaaaaaaaaaaaaaaacatcttaggtacagttggagaatttgaatatggactgtttattagaaaatgctattcagcattaaatttctgaggtg

SEQ ID NO: 348944 - DNA, 201 bp, Homo sapiens
gtctcaagcagcatgtgactgtggttcccagcaaactgaggcttgtctgcctagcggccttcatccttcagaaatgcaaggtgggactgtgggctagagcmgacttgattcagggaagaaaggcctgctttcttgtgttaagccattgggagcaatgagttgagacaccaaaaatcagaggttttccaacttatgtctgca

SEQ ID NO: 348945 - DNA, 201 bp, Homo sapiens
tggcggaacttacctctggtcgtccagctactcaggaggtcgaggccagagcatcacttgaacccaggaggttgaggctgcagtgagcagtgattgtgccmctgcactccagcctgggcagcagaatgagaccccatctttaaaaaaaaaaaaaaaaaaaaaaacatcttaggtacagttggagaatttgaatatggactg

SEQ ID NO: 348946 - DNA, 201 bp, Homo sapiens
tgggatggtgtctccctcaagtcctgcctccgacgctgggggaagcaggagtgtgtttcttttctttttcttcttctctttttttttgagacagagttttrctcttgttgcccaggctggagtgcaacggcgcaatcttggctcactgcaccctccacctcccgggttcaagcagttttcctgcctctgtctccgaagtag

SEQ ID NO: 348947 - DNA, 201 bp, Homo sapiens
tttgttatttattgtgctcgctgccaacagatgtgactcacttgatttggggtagtagagactttgtgtatgggttacttcctctgtcaagcaatacattyattttaagaaccatgaacattagatgaggccaaatcttgattgttttttttttttcctcgtctttgcttctggatgcgtttgccactctcatctagcgag

SEQ ID NO: 348948 - DNA, 201 bp, Homo sapiens
attataaactgcttcattattcctgaccttgactctatctctcctttaatccttccgtcgccctctcagaaatcccatgctgttggcccccaggaaatccragagcgagccacagtcttgcagacggtatttgaagattacgtgcactccagtgagaggagggtctcctgggcaaagaaaggtcagtcgatttcctaggtg

SEQ ID NO: 348949 - DNA, 201 bp, Homo sapiens
tatggctccagggcagctctgtgggatcagcagggagcagatgtggatctgttggaggaggcagtgtagcagagtggctaagagcatggccttagggtcawgttcctcatctgtcaccagtgtgtgaccttgggcagggactggacctctctaagccttagtttcttttcggagaggcagtgtagcagagtggctaagagc

SEQ ID NO: 348950 - DNA, 201 bp, Homo sapiens
cgtgcactccagtgagaggagggtctcctgggcaaagaaaggtcagtcgatttcctaggtgcttgcgcagtggatagcccagcagagtgctctcccccacyttcacccacatacccccaaaccggttgagaggccaacatggaggtccctgctcaccagccaaagccttcaatctccataattctgcagggtttggaagca

SEQ ID NO: 348951 - DNA, 201 bp, Homo sapiens
ggactgcagtaggtccctgagccccctgaagttgtatgcaggactgtgtgtgtgtgtgtgtgtgtgtgtgtgtgtgtgtgtgtgtgtgtgtgtgtgtgtgracgtactgggcatatacgtgtatgcccgaatgtgcatgtactgtgggcgggtgaactctcagagtttgcattaaattatcaaacatatccaggaccccag

SEQ ID NO: 348952 - DNA, 201 bp, Homo sapiens
gactgcagtaggtccctgagccccctgaagttgtatgcaggactgtgtgtgtgtgtgtgtgtgtgtgtgtgtgtgtgtgtgtgtgtgtgtgtgtgtgtgtycgtactgggcatatacgtgtatgcccgaatgtgcatgtactgtgggcgggtgaactctcagagtttgcattaaattatcaaacatatccaggaccccaga

SEQ ID NO: 348953 - DNA, 201 bp, Homo sapiens
tggggtaacatacgtagtcctaacatacatgggtgggtgctgtatgggggtacgcttttgtgaccagtttcatggtgtgtttgttgtctgctttgccctthttttatccaaggtgtaacgcggctagctgatatcagtttgcatgatccagtcagtatttctgtcctggacaagagccatgaccagttgaacccaaaggac

SEQ ID NO: 348954 - DNA, 201 bp, Homo sapiens
tcaccatgttggccaggctggtctcaaactcctgacctcaagtgatccgcctgtcttggcctcccaaagtgctgggattacaggcgtgagccactgcaccyggctattgatttttatatgttaattttgcattcagctgcttgacaaaattatcttgtttgtaatagattttacattagttctcttatggttttttttttt

SEQ ID NO: 348955 - DNA, 201 bp, Homo sapiens
agcttatattccttttatcttttttgttgctattaactttttatattggaaggctgttgaaattttttttttttttttttttttttttttttttttttttttgagactgagtttttcacttgttgcccaggctggagcacaatggtgcgatctcagcccactgcaacctccacctcctgggttcaagtgattctcctgcct

SEQ ID NO: 348956 - DNA, 201 bp, Homo sapiens
aagcttatattccttttatcttttttgttgctattaactttttatattggaaggctgttgaaattttttttttttttttttttttttttttttttttttttttgagactgagtttttcacttgttgcccaggctggagcacaatggtgcgatctcagcccactgcaacctccacctcctgggttcaagtgattctcctgcc

SEQ ID NO: 348957 - DNA, 201 bp, Homo sapiens
taagcttatattccttttatcttttttgttgctattaactttttatattggaaggctgttgaaattttttttttttttttttttttttttttttttttttttttgagactgagtttttcacttgttgcccaggctggagcacaatggtgcgatctcagcccactgcaacctccacctcctgggttcaagtgattctcctgc

SEQ ID NO: 348958 - DNA, 201 bp, Homo sapiens
tgaagcacatcttccacgtccgatccctccaccttgggcatgtggcgaagagcttcggactaagagatgcccccaggaatcttagtgccttgactagaaaraagaggaaagcacacgtgaaaaggtaagatgagctgaattcgtcccgtgacggggctagagagctccgttcacatgatgtgatgtgctagctgccatgct

SEQ ID NO: 348959 - DNA, 201 bp, Homo sapiens
tcttagcaaactgttaacattggttttctctgagtgaggaattttacttcctaaaggtaactgatttttttccccctattaagtgctttacggtgagagartttgtgtaaagtgcttagcattgtccctggcacatagagaaaaataaatgtaaattactacaatcatgtagtaaagtctcatccacttacgtactccagg

SEQ ID NO: 348960 - DNA, 201 bp, Homo sapiens
gtttcttgttttaaaatacatgtgtagacacacatttcagcatgtccataaccttttcctggagaatggacagctgctgctggctctctgaatagttggcragcttcctcctgctatcctgcatggaaacctttccattatgtttcgttgtgtttcatattcctgttagtgagggcaagagtgtgtgatacacttggtggt

SEQ ID NO: 348961 - DNA, 201 bp, Homo sapiens
atgctgtgaacccaggaggcggagcttgcagtgagccgagattgcgccactgcactccagcctgggcgacagagcgagactctgtctcaaaaaaaaaaaamaaaaacaaaaaacaaacacaaaaatagctgggtgtggtggtgggtgcctgtgatcccagccactcgggaggctgaggcacgagaatcacttgaacccggg

SEQ ID NO: 348962 - DNA, 201 bp, Homo sapiens
atttttaatggggtcagagtgagcctcattgtgtaggtgatacttgagcaaaaacctgaagtgggatgagccccgtggctctctaaaggaagggcattctsggcagtgggagctggtgcagacgagctcgaggaaggcagtgtgggtggaaagggggtgctggccaaggcagaatcacgtaggactttgggtcttggtcgg

SEQ ID NO: 348963 - DNA, 201 bp, Homo sapiens
tgatttctggcctgagcgtacactgatcagatgccagttgtgctcgaggacagaacactgtttctgccgtgttccaggccagtctggacttgcttttttgrccctcatgtgccctcagtgggcagtcagctatcctttactcccaccagctcggccaccattcagaaggctggatacccaaagtttttgccatctgttggt

SEQ ID NO: 348964 - DNA, 201 bp, Homo sapiens; identical to SEQ ID NO: 74208

SEQ ID NO: 348965 - DNA, 201 bp, Homo sapiens
catgcccacctaattttcgtatttttagtagagacagggtttcactatgttggccaggatggtctcaatctcttgactttgtgatccgcccgcctcagccycccaaagtgctgggattacaggcatgagccactgcacccggcctggactggacctttctaagcctcagtttcttcgcacgtaaagttgagataaaatagt

SEQ ID NO: 348966 - DNA, 201 bp, Homo sapiens
gcgagtcgggtgagttctgacccggcttcagctccgtccccacccgcggcccggctgtgggcgcgccgcgagctgcagccgtgccttggagtcgggtttcragtcattcacggagttaagcgggagaaagacaccgggcagcttcgggacaagttgcgccgaaacacgtgtctctaaccggaacaccacccgcagggatgc

SEQ ID NO: 348967 - DNA, 201 bp, Homo sapiens
gacataatctctattaaggaaattctaaatgtagcctattttaaattcatcagagaggaaagaaattgtcaggaatatcatcctgtccctttaatatcatrgaggtccccttctcaattcctaagggtttaggaaaatatttcctttcctaggaaggtgtcacttctacttcatgtctaattagctcaagaataggccagt

SEQ ID NO: 348968 - DNA, 201 bp, Homo sapiens
agggtagggagagacctccctctaacacccgggtttgtgtgggctgcagaaagctgctggtctaatcctagatgcagacattgaccaggctgtgccctggrtttgggttttgtagggtcagaaatatgtttaagagttttttccgttcataaagagctatctggctgtcatcccagccttcactgtggaaccctggagggc

SEQ ID NO: 348969 - DNA, 201 bp, Homo sapiens
tgggcgtggtggtgggcgcctgtagtcccagctactcgggaggctgaggcaggagaatggcgtgaacccaggaggcggagcttgcagtgagccgagatcgygccattgcactccagcctgggcaacagaacgagactccgtctcaaaaaaaaaaaaaaagctgcaccccgaccaccttgggcacatgttctcaggacctct

SEQ ID NO: 348970 - DNA, 201 bp, Homo sapiens
ctgggcgtggtggtgggcgcctgtagtcccagctactcgggaggctgaggcaggagaatggcgtgaacccaggaggcggagcttgcagtgagccgagatcrcgccattgcactccagcctgggcaacagaacgagactccgtctcaaaaaaaaaaaaaaagctgcaccccgaccaccttgggcacatgttctcaggacctc

SEQ ID NO: 348971 - DNA, 201 bp, Homo sapiens
gggaggccgaggcaggcggatcacgaggtcaggagatcgagaccatcctggctaacaagatgaaacccccgtctctactaaaaatacaaaaaattagctgrgcgtggtggtgggcgcctgtagtcccagctactcgggaggctgaggcaggagaatggcgtgaacccaggaggcggagcttgcagtgagccgagatcgcgc

SEQ ID NO: 348972 - DNA, 201 bp, Homo sapiens
ctgaagcataacagaaatattaggactaaaagaatctgttttcactgagtatttttttcacctccttttaatttatttattgcataaatgtgttgtatctrgagactgtgcctagagtagaataaatacacttcacaattgtcatagtaagtgtaacagggaagctttgtaagatgctccccgtgtgtcaggcatgatact

SEQ ID NO: 348973 - DNA, 201 bp, Homo sapiens
tcacggagttaagcgggagaaagacaccgggcagcttcgggacaagttgcgccgaaacacgtgtctctaaccggaacaccacccgcagggatgcgcctggragcggggagtggagcggtgtggaggggcggggagctggctcctgcgcctagaaaagtaaaggaaggaattagaggctgtttcccgtggaaggtaggacct

SEQ ID NO: 348974 - DNA, 201 bp, Homo sapiens
ttaatttatttattgcataaatgtgttgtatctagagactgtgcctagagtagaataaatacacttcacaattgtcatagtaagtgtaacagggaagcttkgtaagatgctccccgtgtgtcaggcatgatactttgcatgtgttcccttcttgaatctttaactgctctctcccccactgtgttataggtattactgtta

SEQ ID NO: 348975 - DNA, 201 bp, Homo sapiens
tattaggactaaaagaatctgttttcactgagtatttttttcacctccttttaatttatttattgcataaatgtgttgtatctagagactgtgcctagagkagaataaatacacttcacaattgtcatagtaagtgtaacagggaagctttgtaagatgctccccgtgtgtcaggcatgatactttgcatgtgttcccttc

SEQ ID NO: 348976 - DNA, 201 bp, Homo sapiens
actgtgatttgtttgcatttctatcccagtgtctagcacagagcaggcatgcagtaggcgcttggttttgtagatcaaattgggggcgctagacagggccmaagaaacttgatgttaagagctaccagtgtgtgtgtttttctaaagacagagattaatagacttgctcactgggaataagtttttcattcatctggtgtt

SEQ ID NO: 348977 - DNA, 201 bp, Homo sapiens
tccaaatccttttcttcttttgggtaaatgtttcttatgcaaaacacgaaaaccatacttgtaattgaatttgctgttaactctgtgcttagctttggcastaacgttgttttgttcattcattcagtgtctttgagcactttgaatgtgcaaggcaccattggcttaggggcctttttcggattactttggtttcttctg

SEQ ID NO: 348978 - DNA, 201 bp, Homo sapiens
taacaggccttaattattgatgcccggagcagtaatcagtatttattattaatggggcgatgtgttctgaggcttgtttatgaaaagcaccattcctgccyctgctaagagcgtgcgagtgactgtggggctgagcgtgcgtgcgtgtgtgactgcaagttgtattgatgtgtgtgtcggtgtgtggctatttgggttgag

SEQ ID NO: 348979 - DNA, 201 bp, Homo sapiens
gcaccgctcctgtcctctccactgtgtcttgccttctcagtttccttctcctctgcagtgactgtgccgccctctgtggtctccccaggaccagtgttgargcaccacttcagtagatcccccccagatccttggaaggtctgagtggccacgagagggtggtgagagttggcaaggtgggccttcctgcagggaccacgg

SEQ ID NO: 348980 - DNA, 201 bp, Homo sapiens
tggagggcaaggagggcgagaaagttggcaggttcctgggagcactgcagcttggcagaaggagaaattgagtgcccatcgcatgcttgggtttagagcakttcatcttcccatctgtacttcgccttttcagcattgggccttggaacaaaggaaaaggagacagggagctggccaagggatgaatgggttttgttgagg

SEQ ID NO: 348981 - DNA, 201 bp, Homo sapiens
tcactccgagctctgttttcatggactaatgcatctcttgttgatctttccttctgggaacaacgcagcaagcaaaggctacgaaaagaaaataccaagcrtccagtgaggctcccccagcgaaacggaggaacgaaacttcatttctcccagccaagaaaactagtgttaaagaaactcagaggacttttaaggggaacg

SEQ ID NO: 348982 - DNA, 201 bp, Homo sapiens
ttttccctatcgaatcctgtcttgtcttcaagaaaggtctgggggtctttgtattgtgacccaggccacagctgcccgccccccgcccccgacccaccccrccctgcccctgcattatgttttctgggaggtttgaaagaggccccctggagcatattgatttcccaataaatgtaagatttgggcacttgcagaggggtc

SEQ ID NO: 348983 - DNA, 201 bp, Homo sapiens; identical to SEQ ID NO: 74211

SEQ ID NO: 348984 - DNA, 201 bp, Homo sapiens; identical to SEQ ID NO: 74213

SEQ ID NO: 348985 - DNA, 201 bp, Homo sapiens; identical to SEQ ID NO: 74214

SEQ ID NO: 348986 - DNA, 201 bp, Homo sapiens
cacaaaatcaagtgagtcagaaacctgaatggggtttcggctggtctcacctaattaactttctgtcgctttttacagtgaatgggccttgtaagctgacraagagccattaacccttgtgatccctaaatgagtcccagaatagccagtggcaaaaactaaaacctttaatatcctcagcacatgacagttttcattgcg

SEQ ID NO: 348987 - DNA, 201 bp, Homo sapiens
gttactgttcttcaggcctgaccttcataagaagacccagagtaaacacagcctcgctgaaatcctacgttcggaatactcaagcggcatggaggccgacrtcgccaaggtcaaaaagcaaaacgcacctggagagcctggtggccggcccctgcagcacagtctgcagccgacaccctgctttggccgtgggaaaacatt

SEQ ID NO: 348988 - DNA, 201 bp, Homo sapiens
tagtcttatttctaattcttgggttttaaaggcattgttacatttattttgaccacagtttcagttcagtttattctctgattacagcaaagaaaatgctstaaatgtagtagcagaacgtaacatatgtctttgtgagaactccatgacactatagtatcctaagacattgccgttttggtattgaaggagttgccagca

SEQ ID NO: 348989 - DNA, 201 bp, Homo sapiens
actgaaattttgcatattttgaaacttaggttgttacatttaaaattatacacattgtgaacctggcttcaaacaagagggaagaaaaagcattccttccwgtcagacccttttcactctgtcacataacctgactaaaaataaactacaggcacaggaactggcagccttcagtttggaacaagttgagtgcgcccaacc

SEQ ID NO: 348990 - DNA, 201 bp, Homo sapiens
gcatttgtgggtgtgggcttctgctctgttgggtggatggcagcctgggagcacgggcgcactgcctgagcgctggtgcctggaagatgctcccgcagccygcaccgcttctgtaggcaattagtgtatcagtcactccagtaagatgctggttctttattttgccttagcggtagcaggagccatcgttgaagtgctgga

SEQ ID NO: 348991 - DNA, 201 bp, Homo sapiens
tcttccaccacgtgggccctcctgttcctattcagtggcgcaatgtacgcaccagtggttgccttcctccaccccagacccacggtgtttgtgaagggacrggtctggaggagctgtagaagtggccccggtggtgtctgggtgtctgcctgttgtgtaggctgcatttgtgggtgtgggcttctgctctgttgggtggat

SEQ ID NO: 348992 - DNA, 201 bp, Homo sapiens
tccttctttgcacggtacgtatcctcctgtgttccatgtgaaggctgatacatttctgtgatggctgtgtaatctttcgtctcttgacagtttgtcctgtsgtcagtcctacagggcccaggaacactaggggccccttggtggggctggcctctttgcacctctttcttgttacctgacagggctgcagatagccagcca

SEQ ID NO: 348993 - DNA, 201 bp, Homo sapiens
agatttccacaataaatacggtcttaaaaatgtctagtatgaccaggtaagaacttcaggctcctcttgatttcttaggcattacgtgggtataaccggaygaaacctgtgtgtgcaaggcagagcaaatttgtgtcttggcgttggaacacagtgccaggttatcgaccataaagggttgtcgtctcacttagctactca

SEQ ID NO: 348994 - DNA, 201 bp, Homo sapiens
cagtagcaagctagatgaaaatatactttaatatttttgaaatcctagaatgaagactttcccaaacatgaccctaaagccataaaacatggaagaaactrttgatagccttaacggtacataaataaaatttaaacttctgtcctataaaagagtgccattagcaaaagcctgaattagaatgggtttttacctaggaag

SEQ ID NO: 348995 - DNA, 201 bp, Homo sapiens
ccaggccttagttcacatgacaatatgccacatatctgaggatgactcctgtctcctccccttttctctttttcgtgctgttaataataacactagtcagyatttactgagtactttcctaacaggctgtgtgctgaatagagtgttagctcattaatcgttgtaagtgaataacgtgggacttagagaaataagtacctt

SEQ ID NO: 348996 - DNA, 201 bp, Homo sapiens
tggaacaactttgagaagagatgattataagcaagatttggatctaactttttttccagtttcctctaggtctggaagcagaacggtacagtgctaggagygtgggttttgaagccaacattcctgagtttgattccaactcagcagcttagctgtaaaatggaggtgctgtagggttgttgtgtagggtgtggggaaggg

SEQ ID NO: 348997 - DNA, 201 bp, Homo sapiens
gcgattagaggatttcacagtgaccctgagcttcctccacacctgggtcacctgcagacagcgggaaccacagggcgtgctttcagtcatgcagtcagggstgacaacaaagaacaggaacccagccagcctctcccgggacgatgctggagacgggcacattcactgctggagctgcccaagcactggaattagtagatg

SEQ ID NO: 348998 - DNA, 201 bp, Homo sapiens
agcattccccatgcccctcgtggtccagccgctggttctgttccctggtgaaggaggcctgggatcagcccacagaacacagaaatgagcaggctcaggartggggcctccaccccacctagacaaggccagagcaggcacccaggcagagagaggttgctaggccttgctggaagaccagagcaaaacagttaggaccac

SEQ ID NO: 348999 - DNA, 201 bp, Homo sapiens
aggatggtctccatctcccgaccttgtgatctgcccacctcggcctcccacagtgctgggattacaggcgtgagccagccaggcctagatctacattttcrttgatgtcgtgaatgagaatgatggatatgctgatgagacttgccagtagcctgaacttgagatgggtagctaatatactggatttagaaagactaacag

SEQ ID NO: 349000 - DNA, 201 bp, Homo sapiens
atatgccaagcgggagctcaggcgggtattagaatggggatcgggagcaggttagtgaggaggctgttcggctggtccatgcgatgggagagggacccttygtctcttacattgcctttagtccttcactcgaccacttttcagaaaagaaaaataaatagttcgtggccccaaatgagatcttaataactaggtttctgt

SEQ ID NO: 349001 - DNA, 201 bp, Homo sapiens
tttgaaggcatttctcttcacactccttagatcctccccccacccctgcctttcgaaggcagacgggcactcgaggatacagtagttacctttttttattkggggaaatcttgtcactcctggaggaggaatgactttgcagctaatctgcacatggaccgtataattgtggtcagggtaagcggcagagaaaacttgaca

SEQ ID NO: 349002 - DNA, 201 bp, Homo sapiens
accggcccagatcttggaaagcagagagggaggcctgtgggcgggggaattggaggcagcattgtccttaccttgagaagccgctagggagagagcagccygccgcctcctgccccagctgaccctcgctagcagatgggcaccaagaccacgatacccctgtgagcaggggatttaacagggctttatttagggaagaat

SEQ ID NO: 349003 - DNA, 201 bp, Homo sapiens
ttatcttggcttatatcgggactagagttttgacccaacaacttggatcttaaggatctgttttcctctttctttgaaaaccagatagaagacatgtgacrcgttagtagaaatagttgtagagatggaaattagagatgaaggccagagctggaaatattagacctaagcagttcctatttgaaggcacaaagaaaaacg

SEQ ID NO: 349004 - DNA, 201 bp, Homo sapiens
ggtggcaggtggaagtagaggcactagcaccactcaagtgatcagtgtcacttggcaggttggcctcattgggtggaagaatctgtgttctcttgatttcrcattcagtagaaagcactcatgtttgttttacgatattggagacaaaagccactagtttttagcggggatatttaaaaaggaaatttttttctctggtac

SEQ ID NO: 349005 - DNA, 201 bp, Homo sapiens
tatacatacaggcatacagatttatgtatattaaaaacattttatgccaggaacttgccccttgttttgaaaactgtagcatggtgacagactgctatggwtaaactctgtgaagtcagatttcctgagttcaaattccagctcttgcattactgatttttggccctggacaaatgacctaatctctctgtgcctcagttt

SEQ ID NO: 349006 - DNA, 201 bp, Homo sapiens
aggattgaatcctggccgggccacttacagtctgtgtgcctctggacaagtcactcagcgtctctgtgcctgggtcctctggcctcaaagggaggtactcmagtcgccctttgattgtgggggttaagccagatcatgagtggaaacatcgtggtgtccggcacgggaataagcgggagcatctggtgatcatcacaacga

SEQ ID NO: 349007 - DNA, 201 bp, Homo sapiens
aggatagttttagtcatcccaaacccctcctgtattacagccgactacctcctctcctcttctaatctaactctactttcattaagttgctttctgcaacrggaaggtgtgtatcccggacccctccacactcttcttcatgatgtcagagcctttccatcttgttataacctgtacgaaatgacttcaagtctttttcag

SEQ ID NO: 349008 - DNA, 201 bp, Homo sapiens
aaacatcgtggtgtccggcacgggaataagcgggagcatctggtgatcatcacaacgaccatattgtcgcattgcttcttcccccagcctccatcattgtygcgagtacccgcggaaccgagagtacgaaaagtgaacttcaaccttttagcacccttgaacttttcttatcaggaacaaccttggaaacatggaaccgag

SEQ ID NO: 349009 - DNA, 201 bp, Homo sapiens
ccacacttggagacatgaggatttctccgtgtaaatccactgcacctgagtcagtgcttatctactccatctcagccgcgtccaacactgttgatccctcyggcctccttaaatctgtctcttccctccgcttcccaaacgctgtctttatgaatagcagccctcagccccggcgctccatccgaacctctgaaacagtct

SEQ ID NO: 349010 - DNA, 201 bp, Homo sapiens
aatagcagccctcagccccggcgctccatccgaacctctgaaacagtctcccaccgagtcttcctgtggccacggcaccgcagtcagctagcacctccacrgccctcaccgcatcttgccctggcttagcgcctttcagtggcatcccgttaggctgtgattagagcaagccacaacaaacccccctcctcacaaaggccc

SEQ ID NO: 349011 - DNA, 201 bp, Homo sapiens
gagatgagaggctggacgaaaccacacttggagacatgaggatttctccgtgtaaatccactgcacctgagtcagtgcttatctactccatctcagccgcrtccaacactgttgatccctccggcctccttaaatctgtctcttccctccgcttcccaaacgctgtctttatgaatagcagccctcagccccggcgctcca

SEQ ID NO: 349012 - DNA, 201 bp, Homo sapiens
ccggcgctccatccgaacctctgaaacagtctcccaccgagtcttcctgtggccacggcaccgcagtcagctagcacctccacagccctcaccgcatcttkccctggcttagcgcctttcagtggcatcccgttaggctgtgattagagcaagccacaacaaacccccctcctcacaaaggcccccagcctttgctgattg

SEQ ID NO: 349013 - DNA, 201 bp, Homo sapiens
tcactcgaccacttttcagaaaagaaaaataaatagttcgtggccccaaatgagatcttaataactaggtttctgtcgacttttccagtgctcagttctgmaagggaacagtaaatatcttcccctacacatagaaatacagtcatagtcacaaaaactcttctgacacctacacgcaaacctgtcaaaacagcccccacc

SEQ ID NO: 349014 - DNA, 201 bp, Homo sapiens
gggagctcaggcgggtattagaatggggatcgggagcaggttagtgaggaggctgttcggctggtccatgcgatgggagagggacccttcgtctcttacawtgcctttagtccttcactcgaccacttttcagaaaagaaaaataaatagttcgtggccccaaatgagatcttaataactaggtttctgtcgacttttcca

SEQ ID NO: 349015 - DNA, 201 bp, Homo sapiens
cgggtggtgagtgacagcagtgtgtcacaggattactccgcccgtgacaatgccgctctctgttcttgccatgtccccactctgttacagctactttttcygttgctatgcccttcttttgaaggcatttctcttcacactccttagatcctccccccacccctgcctttcgaaggcagacgggcactcgaggatacagta

SEQ ID NO: 349016 - DNA, 201 bp, Homo sapiens
ttcctgcccagtgtccagcttgcctgttcaccgggaaggaccactctgtgcttcctgttcccacacgatgtctggcttctccgttcaccgggaagtgtcarttattccatcagtcttgtcagggccccgtttctctagcctgtcacggcaaagacagagggaccacccagtggagggaagtgaccattggtcttgcagtca

SEQ ID NO: 349017 - DNA, 201 bp, Homo sapiens
cagactagcatgcattaactattcaaaagtaagtaaaatttaattaggaaaaatgtgttaatataaatgtctaatgattttctcattttcataagaaaacratgtcctgtgttgatcatttcttagtttcttcacctattctctcttttcactcatttacacaacagacatctaccgagtgcctgctggtaccaggtgctg

SEQ ID NO: 349018 - DNA, 201 bp, Homo sapiens
atttatttattgcataaatgtgttgtatctagagactgtgcctagagtagaataaatacacttcacaattgtcatagtaagtgtaacagggaagctttgtragatgctccccgtgtgtcaggcatgatactttgcatgtgttcccttcttgaatctttaactgctctctcccccactgtgttataggtattactgttatcc

SEQ ID NO: 349019 - DNA, 201 bp, Homo sapiens
gacctccccacaagttttttatcaaccaaatttaagtgatttttgtgtctcttttgtttcttgttttaaaatacatgtgtagacacacatttcagcatgtmcataaccttttcctggagaatggacagctgctgctggctctctgaatagttggcgagcttcctcctgctatcctgcatggaaacctttccattatgtttc

SEQ ID NO: 349020 - DNA, 201 bp, Homo sapiens
ttatagagcaaaagcttcaaaggtgtttagtacctagctttctaacagtgctacactaaaactgtcatctgcgctgcagactgtccaccatttaggttagygcgaaggcatgctgcacggcaccgagcagatttaaatccacagactgccaatgggtggagtcatcaaagtgctgacacagacttctttacattcctaccg

SEQ ID NO: 349021 - DNA, 201 bp, Homo sapiens
tttatcactgggaacacgaaggcttggaaaagttgtatcactctaccagatccaccccacacagtgagtcattgaccagcagtgcagctttcacgtttttstgtctggtttccttgatttactaggccacattatgatgtgcatgtaccagatgccatgcatgtggtccctcacagttccccatgttctaatttttgaggg

SEQ ID NO: 349022 - DNA, 201 bp, Homo sapiens
ttcattattaaagtgctttactttttaataacagaggattctgtccgccaggggaaagggcatcctcgctaatttcacattcatattaaaaaaaaaaaaamacacagggaaggtgacagttgcgctgctgaggtggcttaacgaaaggagggcagcaaaaaaaagtttgcatttcacatcagttaagagggtaaaaaaaaa

SEQ ID NO: 349023 - DNA, 201 bp, Homo sapiens
gggtgtggttccaaactaaggaagtctacagagacacaacggagtgcgtgacctaccatctgatcctagtttaggaaagaaaaacaactgtaagaggcatyttaaggcgtggtggctcttgcctgtaatcccaacgctttgggaggctgggatggggggatcgcttgagcccaggagtttaagaccagcctgggcagaaag

SEQ ID NO: 349024 - DNA, 201 bp, Homo sapiens
ctgaccttgactctatctctcctttaatccttccgtcgccctctcagaaatcccatgctgttggcccccaggaaatccgagagcgagccacagtcttgcaracggtatttgaagattacgtgcactccagtgagaggagggtctcctgggcaaagaaaggtcagtcgatttcctaggtgcttgcgcagtggatagcccagc

SEQ ID NO: 349025 - DNA, 201 bp, Homo sapiens
aggcgtggtggctcttgcctgtaatcccaacgctttgggaggctgggatggggggatcgcttgagcccaggagtttaagaccagcctgggcagaaagagtytagattagctgggtgtggcggaacttacctctggtcgtccagctactcaggaggtcgaggccagagcatcacttgaacccaggaggttgaggctgcagtg

SEQ ID NO: 349026 - DNA, 201 bp, Homo sapiens
gcctcccaggttcaagcagttctgcctcagcctcccaagtagctgggaatacaggcgcatgccaccatgcccacctaattttcgtatttttagtagagacrgggtttcactatgttggccaggatggtctcaatctcttgactttgtgatccgcccgcctcagcctcccaaagtgctgggattacaggcatgagccactgc

SEQ ID NO: 349027 - DNA, 201 bp, Homo sapiens
agtgttgcatgtggcaagccctgggcgaataaagggaacggagctcccacacagctgtgctcccaggtgtgtttatttttgtcagataagggaaacctgtktgaaatgatagctgtgtcgttttcctctcctgcattctttgtagagtggagtatcactgtttttgtttttgtttttttaaataattcaaagatagtcacc

SEQ ID NO: 349028 - DNA, 201 bp, Homo sapiens
tgctacactctttatgtgcacggtcccatttaatcttatagcaatccgagaagttggtgatggccccaatttatagatgaggaaactgagacttagagagrtaaaggaactttcacaggggcacactaatatgctttagtcattctgggatttgaagtcttaacttcaaagcacatatatttaactgtataccaatatgcc

SEQ ID NO: 349029 - DNA, 201 bp, Homo sapiens
cttcactcatccatagggctgtgagttggcagcagagagaggatgctgaggggtgagggctgggggtgtgcagggagatgacacatgtcaggtaaatcgcygtcagagacgtggcattttcattcatagccttgtcagagtaacctttgggtgaaagggggagaattgtcttctcccacctaagaggttgccattcatgtt

SEQ ID NO: 349030 - DNA, 201 bp, Homo sapiens
ctcctaggggaagtttggacatcatgcatttaagcacattcctgtaatggaaataagaagcaacaggcaagagatccctagtgctgtgtagcctgtaatcsgcaatcaggcagagactcggggactcagagactcgaaaggcaagggaggtaggaagtaattgtggtagaggtgatggatggagcagcattctcatttgga

SEQ ID NO: 349031 - DNA, 201 bp, Homo sapiens
aattgagaagggaaaacagtgattagcaaaggcacgaagtattagggagtcaggtatattttaaagacataacaaataccatcatctgctgtgatgatctygtctggaaaaaatagtgtgcccgcatttacgtgactccctttttaatcccgcattagaaaggagacaactcagtgataacgccacctcttctgaaaggag

SEQ ID NO: 349032 - DNA, 201 bp, Homo sapiens
cttgtgtgtcacagttcagcacctcatacctctgcgtaaagccctggattctagacttggtgtgccatgagcacacagcccagctcgctgtaaatgggatrgtcttatttctttttccttgcccagccctgtgttttatgtaaaacatcaaataaaactgcaacacttttctcccctaaagtacagtgctagaaaaaagca

SEQ ID NO: 349033 - DNA, 201 bp, Homo sapiens
gttgacacacttttagtgcatttaacttctgcttacacacttataaatgcagcctagccagcattcaaaggaaacctgcaaatctcagttacgagtgaagrcagacaaatcctgaggtaccctcagtggtccttctgggggagtgatggtgggatggtgtctccctcaagtcctgcctccgacgctgggggaagcaggagt

SEQ ID NO: 349034 - DNA, 201 bp, Homo sapiens
cctgaggttgtttgtgccagaaagcctaaccgcaaccttaccatgaggaagcagttagacaaatccagttgtccgatgtcctcaggaacattttgatgttyttaaaaaatgacagacatcgaaaaactaagtaagtcaatcaaaggcaggggtgtggttccaaactaaggaagtctacagagacacaacggagtgcgtgac

SEQ ID NO: 349035 - DNA, 201 bp, Homo sapiens
cactttcccaagtggaattaagcaatcaaagggatcagatatcagacactggattatctgcaaaatgttatttcctcctacttacagtgaagaactcaccytaagccagaggaaaggaaccttgcttttaataccatcattatgttgacgagttgataagaagtaccaccgaatggccggaaaatggagtttctaagccac

SEQ ID NO: 349036 - DNA, 201 bp, Homo sapiens
aggaacgagggccacttcaggacgagacagatggagaactggcttcttttgataaagaagaatcgtgctgttaatcgttacatggggattttccccccttwatactgtgccttttgccattttaatttatcatcccgagatccttttaacaaggccagaatgaatgtctttatgaaaatttggaaatagcagtgtgctcac

SEQ ID NO: 349037 - DNA, 201 bp, Homo sapiens
tctcggtgttcctggctcttctgccatgcttgtttgctctagctgatgcttctagcatatgagagctgcggggcgagtgggacacacacgctgtaatagakcatgcctgggtcgggggagatgctgccactctgcgtccttttaagcagcctgttgcttgccaggctatccgaacactctccaggagcctccttggtgtta

SEQ ID NO: 349038 - DNA, 201 bp, Homo sapiens
gtttgagatgaagtctcgctctgtcgcccaggctggagtgcgatggcacgatctcggctcactgcaacctccacctcctgggttcaagagattctcctgtstcagcctcctgagtagctgggattacaggcatgcaccaccacgcctggctaattttttttgtatttctgtagagacagggtttcaccatgttggccaggc

SEQ ID NO: 349039 - DNA, 201 bp, Homo sapiens
accacctgaggtcaggagttcaagaccagcctgggcaacatagtgaaaccctgtctctacaaaaataaaaatttaaaaattagcctgtagtctgaggcacraggattacttgaacccaggagcttgaggctacagtgaggtatgatcacgtcactgcactctagtctggacaacatagtgagaccccatctctttaaaaaa

SEQ ID NO: 349040 - DNA, 201 bp, Homo sapiens
tgagcaagaagctctgtattggttaatcctggatacttttagaatgaacttggttttaaaatcccatgaggaaggctgggtgaggttgctcacacttgtawtcccaagcactttgagaggctgaggcgggaggaccacctgaggtcaggagttcaagaccagcctgggcaacatagtgaaaccctgtctctacaaaaataa

SEQ ID NO: 349041 - DNA, 201 bp, Homo sapiens
cactgaaactttcctgacgtagtgtttgatgaatgtccctaaattgttgtcagtcctcaagggactattttagagacttagtagttttctttctcctttamacatttgtttcattcccttttttacacattctttgagcaagaagctctgtattggttaatcctggatacttttagaatgaacttggttttaaaatcccat

SEQ ID NO: 349042 - DNA, 201 bp, Homo sapiens
ggtcagttttttttggtgtgtttgtccgttcagaaggtctgtgaaatggccgctctaggaggagagatcagagagtgtttgtttctgctctaagttacctraatgaactcagattgatatgatactcttctaggacagttcaagggtgcttaggttactgttcactgttttctggcccccccttcccccatcctctgtttt

SEQ ID NO: 349043 - DNA, 201 bp, Homo sapiens
gcactgaaactttcctgacgtagtgtttgatgaatgtccctaaattgttgtcagtcctcaagggactattttagagacttagtagttttctttctcctttmaacatttgtttcattcccttttttacacattctttgagcaagaagctctgtattggttaatcctggatacttttagaatgaacttggttttaaaatccca

SEQ ID NO: 349044 - DNA, 201 bp, Homo sapiens
tctgtgtactccaaacagtacagaccatttgaagcgttaaagattttctttgaaaaagtccctagttattaaaaaggggagtaagcacagatttaagagtrgggtacagaggagttgccttggttattattgctcatcgattgggaaaaggagttcactttactcagtaaatagagctttgatggattccccaggatcctt

SEQ ID NO: 349045 - DNA, 201 bp, Homo sapiens
ggcttgacttggtttcggtcttgtcttttttgagaccagagtgagtgttgggggttggggaaagaaaggttgaggagaagaggcttgaatctcctgggtcrcgtagcagtagagcctttccctctgagggcttggctgtggggctctgtatctagtggggctctgtgtactccaaacagtacagaccatttgaagcgttaa

SEQ ID NO: 349046 - DNA, 201 bp, Homo sapiens
tcagctcataggattggtggagaggaggagaggaagagaggtgaccagggtggaagcccagggactcatctgcatacacagaagagaggtaggaaatgaakagacctagagcgggatttgggtaactgagattttaaaagtgcaggctcttggcatggtttcggcttgacttggtttcggtcttgtcttttttgagaccag

SEQ ID NO: 349047 - DNA, 201 bp, Homo sapiens
aataaatgtctgctttcattacttctccaccttccgcttgtgtgggtcccacagcccctgttccttctgcacattctcgacgctgccaacatgagcacttyctgctccttgaaaggttctgcagacagctactgcagcgtctttgaaattcctgcttctctgaattatccaaacatgggagtccatgcaagtatgtgagaa

SEQ ID NO: 349048 - DNA, 201 bp, Homo sapiens
ctattttgagaagagtgccaggctggcttaccaatatcggaacactgtagcatcctttctttttataaatagaaatgctttaaaaaccattcatttgacaratatttatcaaatcgggcactattctgagtgcttggaatgcatgcgagatcaaaacaaaaatccttgctttgtgaagccaacatgttagtggggtgcagg

SEQ ID NO: 349049 - DNA, 201 bp, Homo sapiens
gccgcgagctgcagccgtgccttggagtcgggtttcgagtcattcacggagttaagcgggagaaagacaccgggcagcttcgggacaagttgcgccgaaasacgtgtctctaaccggaacaccacccgcagggatgcgcctggaagcggggagtggagcggtgtggaggggcggggagctggctcctgcgcctagaaaagt

SEQ ID NO: 349050 - DNA, 201 bp, Homo sapiens
gccccttcttcatagataggacaggttcatagatttttcctgtctgaattatcagaaatgcttccaattggaaattttgcaaagctctggggtggttttcwtctttgaaggcctgtgctgtgttgttctctggttctcacccttgctcattcagcaattgtttaatacctgggaagagctaactgtgcagaatagagctct

SEQ ID NO: 349051 - DNA, 201 bp, Homo sapiens
agtggcagagcgggggaagatggcttctcagccctctcctattgtcaggcctgttggggtcccacattcattctttttttcttacacgagagctcgcccarcctcagggttgggaacagaaaccaatttagccttctaagtggatggaaggcaggagcccacctcactgcaaaggttgtgaagttattattacagatggga

SEQ ID NO: 349052 - DNA, 201 bp, Homo sapiens
tatttcgacatttaaaaaagagagaacccgagaggcctggctgcccccggaccggggctgaggctgggggctggggtcggggtgggtgggcaagccccctyggccccttcctgccccgcctgggagtggggagggcacaggccacagactcactaatccacggacacggtcacgggctcatgggtcacgaataaataactt

SEQ ID NO: 349053 - DNA, 201 bp, Homo sapiens
gcagacaaagccctccgtacagggcctagcacacaggaagtgctcagtagatgttaaagcgcctttattactattgtttttatctgtctttcaggaatagytctttttttatagtttaaaagttgtttttttatagttaaaattgtgtttttatagtttaaaaagtagaatgtctgtgtagtatttagcctttgcagtgga

SEQ ID NO: 349054 - DNA, 201 bp, Homo sapiens
tccgacgctgggggaagcaggagtgtgtttcttttctttttcttcttctctttttttttgagacagagttttgctcttgttgcccaggctggagtgcaacrgcgcaatcttggctcactgcaccctccacctcccgggttcaagcagttttcctgcctctgtctccgaagtagctgggactacaggcatgcaccaccatgc

SEQ ID NO: 349055 - DNA, 201 bp, Homo sapiens; identical to SEQ ID NO: 74218

SEQ ID NO: 349056 - DNA, 201 bp, Homo sapiens
gtgcccccctcccctggttataacaagcacaaatttttccagactttgccctgtgtccccagggagttagggcgggtggcagaatcgccccaagtagagakcaccacctgggtggaggaacttaatttgatcatagtagtcaatgttctctcaatagtttctcctttcttgtgtaatttccgttaaatattttgtatcaaa

SEQ ID NO: 349057 - DNA, 201 bp, Homo sapiens
ccccatggggctgtcccaatgcaccctacgtttcttcactgtaatgatcatcccgcctggtctgcgtgccttcccagccggtcgtaagcatcatgaagacraggactgtgatttgtttgcatttctatcccagtgtctagcacagagcaggcatgcagtaggcgcttggttttgtagatcaaattgggggcgctagacagg

SEQ ID NO: 349058 - DNA, 201 bp, Homo sapiens
attttatgtcttcagagaaatgaaactcagaagcccccccattcttccccatggggctgtcccaatgcaccctacgtttcttcactgtaatgatcatcccrcctggtctgcgtgccttcccagccggtcgtaagcatcatgaagacaaggactgtgatttgtttgcatttctatcccagtgtctagcacagagcaggcatg

SEQ ID NO: 349059 - DNA, 201 bp, Homo sapiens
atggtgggcactcgatgaatgtttgttgtttgtatgtctttatccagtgtactcagtgaggtgtgccccgggcttccagccatggacaaaatctacgcacrggaaagaccagaaagacatgccacagcacatagtgactgtgccaaagcggcagagactttacttttttccagattttgagtagtttggttctatttcttt

SEQ ID NO: 349060 - DNA, 201 bp, Homo sapiens
gttccttaacctgtctgtgcctcagtttttttcttctggaaaatgggggtgatgatagtacttacacatagggttgttgtgaggattagcaaagttcagaygtgtgaggtctggtacatggtgggcactcgatgaatgtttgttgtttgtatgtctttatccagtgtactcagtgaggtgtgccccgggcttccagccatg

SEQ ID NO: 349061 - DNA, 201 bp, Homo sapiens
tgatagccatgatgttcagcttgaaatgttctcgatacctttcctgggactgatattaggaacatcacaggtggcgggaacagctggatgtgaggcagacrtaggggcttgtgctcatgtttctccaagagtcttggcatttgtgtatttatttactagatttctgcgctgactctgagatgtgagaaaatagtaagtgga

SEQ ID NO: 349062 - DNA, 201 bp, Homo sapiens
aatccagttgtccgatgtcctcaggaacattttgatgttcttaaaaaatgacagacatcgaaaaactaagtaagtcaatcaaaggcaggggtgtggttccmaactaaggaagtctacagagacacaacggagtgcgtgacctaccatctgatcctagtttaggaaagaaaaacaactgtaagaggcatcttaaggcgtggt

SEQ ID NO: 349063 - DNA, 201 bp, Homo sapiens
gatgtcctcaggaacattttgatgttcttaaaaaatgacagacatcgaaaaactaagtaagtcaatcaaaggcaggggtgtggttccaaactaaggaagtytacagagacacaacggagtgcgtgacctaccatctgatcctagtttaggaaagaaaaacaactgtaagaggcatcttaaggcgtggtggctcttgcctgt

SEQ ID NO: 349064 - DNA, 201 bp, Homo sapiens
gttccataggtgagtgtttatagaatggctatggaaagatacgttggtagatctccctgcaacacacacgttggcactagggcggatcagtgctgggactyggtgatacccatggggtaacatacgtagtcctaacatacatgggtgggtgctgtatgggggtacgcttttgtgaccagtttcatggtgtgtttgttgtct

SEQ ID NO: 349065 - DNA, 201 bp, Homo sapiens
gtgctccagtgtcggggaccaagctctttctgtctttttgtgccactatgggaggattccatttttaagattacctcatagtcttagatagttgcaggcaytccaaccattgcatctaatttcttgccagcaggtacagagatgctcatacctgctccctctgaaggtgcttgtgtgattggcgtgttccctttacctttt

SEQ ID NO: 349066 - DNA, 201 bp, Homo sapiens
ggaaggctttaaagtgatattaaatgttaatttcatccttccccatgttttgcacaaatgaggctttatcttggcttatatcgggactagagttttgaccsaacaacttggatcttaaggatctgttttcctctttctttgaaaaccagatagaagacatgtgacgcgttagtagaaatagttgtagagatggaaattaga

SEQ ID NO: 349067 - DNA, 201 bp, Homo sapiens
ctgctgtaaaaaggcttcactcatccatagggctgtgagttggcagcagagagaggatgctgaggggtgagggctgggggtgtgcagggagatgacacatktcaggtaaatcgccgtcagagacgtggcattttcattcatagccttgtcagagtaacctttgggtgaaagggggagaattgtcttctcccacctaagagg

SEQ ID NO: 349068 - DNA, 201 bp, Homo sapiens
tcattggtttattaaaatgtaaatgcttcatcaaaatgtgtatttcttagatcaggcataagacagttccctgaatttatttatttatccatctcgtttcrtactaaggtgaggtgattcagatctgttgatggacccataaataatcatagtagatttgctttgttcctcagaagcagcagtttcttaggaagaggaaga

SEQ ID NO: 349069 - DNA, 201 bp, Homo sapiens
acatgaactgtttctttgacttaatgcaaaacagcaacaacgacaacaacaaaacccctattaactagttgcaaagtgcgcagtgggaagaagcagactgsaaagtttctagaatccaaaaggtcgactcctaaatattttttgaggaggaagcatgtgcatgtttcgtgcctgagaacatgagagccaggcagaggggcg

SEQ ID NO: 349070 - DNA, 201 bp, Homo sapiens
tctctctgctctcttcatttttctctaataacacattcaagtagattgctatgaagggctcagatataaagctaaaattgagaagggaaaacagtgattascaaaggcacgaagtattagggagtcaggtatattttaaagacataacaaataccatcatctgctgtgatgatctcgtctggaaaaaatagtgtgcccgca

SEQ ID NO: 349071 - DNA, 201 bp, Homo sapiens
gcaggagccgtgtgtggctgtccccaccacacctgccccgtctcccatccgcagaactctgcctctcatgctagtaagacttttcaaaactctttcaaggktgttagtgtgaacacttacggactgaggctcattcagaaaacatgctgtgtgtccttcagtgttgggggaggcaggaaactactcctggttgtaatgtca

SEQ ID NO: 349072 - DNA, 201 bp, Homo sapiens
ccagacctcagtttcctaatgtttaactgtgactgcgatccacatgccaaccaccagctacccccttatatgtcttgattttttctaatcctcacacctatgagtgccattctcagtgaggaaactgaggcacagagcctgagtcactcattctgtgtcctcagctgatgagtgatagtcaagttccaaccctggcttctc

SEQ ID NO: 349073 - DNA, 201 bp, Homo sapiens
tccagacctcagtttcctaatgtttaactgtgactgcgatccacatgccaaccaccagctacccccttatatgtcttgattttttctaatcctcacacctatgagtgccattctcagtgaggaaactgaggcacagagcctgagtcactcattctgtgtcctcagctgatgagtgatagtcaagttccaaccctggcttct

SEQ ID NO: 349074 - DNA, 201 bp, Homo sapiens
ccgatattctggggactctctttgctgtgtagtgaagatgactggagaagagctgggtggggttcatttctctcggttgctgggccagaacaggagggccrgttcccagtcgtgggaagttcttcgcttcctctcggtgttcctggctcttctgccatgcttgtttgctctagctgatgcttctagcatatgagagctgcg

SEQ ID NO: 349075 - DNA, 201 bp, Homo sapiens
attatatattatgtgcaaacctgtgatatctgcaaaccaaatccatcagactaacagaagcctgtctcacctgtcatatgccaagcgggagctcaggcgggtattagaatggggatcgggagcaggttagtgaggaggctgttcggctggtccatgcgatgggagagggacccttcgtctcttacattgcctttagtcctt

SEQ ID NO: 349076 - DNA, 201 bp, Homo sapiens
cttatctgcaagagggggcttattggtaacctgcttatcacagtgtcatttctcgtgtgtgaggcaaacagtggctctgcagacactcattcagacctgaragctgtaaccatggaatacttgcctcctgaggagatctgtgtctgaccaagtccttccctttatgaggcccatccacgagtcagatgctcgagcttgttc

SEQ ID NO: 349077 - DNA, 201 bp, Homo sapiens
gttgaacccaaaggacaaagcggtccaggaggtctgtcctccaccagctggcgacaagctggacagctttgcaataccagagagtctcaagcagcatgtgrctgtggttcccagcaaactgaggcttgtctgcctagcggccttcatccttcagaaatgcaaggtgggactgtgggctagagccgacttgattcagggaag

SEQ ID NO: 349078 - DNA, 201 bp, Homo sapiens
acttgaaaatagatttgccctaattcaggcaccttaagtagttggcaagaaataggaatcagtgactgcaaagtgctgaactctggtggcctgtagcttcrtccgtcaccccaaataaatgtctgctttcattacttctccaccttccgcttgtgtgggtcccacagcccctgttccttctgcacattctcgacgctgcca

SEQ ID NO: 349079 - DNA, 201 bp, Homo sapiens
ctattcaaaagtaagtaaaatttaattaggaaaaatgtgttaatataaatgtctaatgattttctcattttcataagaaaacgatgtcctgtgttgatcayttcttagtttcttcacctattctctcttttcactcatttacacaacagacatctaccgagtgcctgctggtaccaggtgctgtgctgggccccaccctgt

SEQ ID NO: 349080 - DNA, 201 bp, Homo sapiens
taggaatcagtgactgcaaagtgctgaactctggtggcctgtagcttcatccgtcaccccaaataaatgtctgctttcattacttctccaccttccgcttktgtgggtcccacagcccctgttccttctgcacattctcgacgctgccaacatgagcacttcctgctccttgaaaggttctgcagacagctactgcagcgt

SEQ ID NO: 349081 - DNA, 201 bp, Homo sapiens
gagcaccacctgggtggaggaacttaatttgatcatagtagtcaatgttctctcaatagtttctcctttcttgtgtaatttccgttaaatattttgtatcraaatattaattaaagctttttcatctcctcttttagatttccacaataaatacggtcttaaaaatgtctagtatgaccaggtaagaacttcaggctcctc

SEQ ID NO: 349082 - DNA, 201 bp, Homo sapiens
tcttgttgcccaggctggagtgcggtggcaccatctctgctaactccatcctcagccttccaggttcaagtgattctcctgcctcagcctcctgagtagcygggattacaggcacctgccaccacatccggctaatttttgcatttttagtagagacagggtttcaccatgttggccagtctggtctcaaactcctgacct

SEQ ID NO: 349083 - DNA, 201 bp, Homo sapiens
taatttatttattgcataaatgtgttgtatctagagactgtgcctagagtagaataaatacacttcacaattgtcatagtaagtgtaacagggaagctttrtaagatgctccccgtgtgtcaggcatgatactttgcatgtgttcccttcttgaatctttaactgctctctcccccactgtgttataggtattactgttat

SEQ ID NO: 349084 - DNA, 201 bp, Homo sapiens
ttctccaccttccgcttgtgtgggtcccacagcccctgttccttctgcacattctcgacgctgccaacatgagcacttcctgctccttgaaaggttctgcrgacagctactgcagcgtctttgaaattcctgcttctctgaattatccaaacatgggagtccatgcaagtatgtgagaacaaccaactgtcgctgtccccg

SEQ ID NO: 349085 - DNA, 201 bp, Homo sapiens
tcattattaaagtgctttactttttaataacagaggattctgtccgccaggggaaagggcatcctcgctaatttcacattcatattaaaaaaaaaaaaaaacacagggaaggtgacagttgcgctgctgaggtggcttaacgaaaggagggcagcaaaaaaaagtttgcatttcacatcagttaagagggtaaaaaaaaaa

SEQ ID NO: 349086 - DNA, 201 bp, Homo sapiens
ctatcagcctctttccaaatgggaaagaaaaataataaagtttcttttccctctctgctgttactgttcttcaggcctgaccttcataagaagacccagartaaacacagcctcgctgaaatcctacgttcggaatactcaagcggcatggaggccgacgtcgccaaggtcaaaaagcaaaacgcacctggagagcctggt

SEQ ID NO: 349087 - DNA, 201 bp, Homo sapiens
tagaaactctgtctcatgatctcagccccagctcctaccttgatagacagtagtgaatgcttggatatttttaaggtttggtgatttttttttttttttttttaagaaaagctgagtaagtttgggctttcatgatataactggttaacttagaaagctaaattaaccatcctacgttgtaggtgtcatgttggtgaagac

SEQ ID NO: 349088 - DNA, 201 bp, Homo sapiens
ctagaaactctgtctcatgatctcagccccagctcctaccttgatagacagtagtgaatgcttggatatttttaaggtttggtgatttttttttttttttttttaagaaaagctgagtaagtttgggctttcatgatataactggttaacttagaaagctaaattaaccatcctacgttgtaggtgtcatgttggtgaaga

SEQ ID NO: 349089 - DNA, 201 bp, Homo sapiens
taagagcacgcctcagggtcacgttcctcatctgtcaccagcctgtgatcggacctttcttttttcttttttcttttttttttctttttttttttttttttgagatggagtctcgctctatcgccaggctggagtacagtggcacgatcttggctcactacaacctctgcctcccaggttcaagcagttctgcctcagcct

SEQ ID NO: 349090 - DNA, 201 bp, Homo sapiens
agctacttgaatgatttaagaagctcacatttctctctcactgtggtagaagctagttatatacctataattcaagttactgctgatagtgaacatgggtrtagcaatgcctaggaattgtgtctgcacaataacaccttatacaatgagaagcaccagttttctcccatgccttgtttaaggaaagggaatttggaatca

SEQ ID NO: 349091 - DNA, 201 bp, Homo sapiens
cacagacttgaacttctctgtgtggcactctgggaatttgagccagcagagggagcacaaaacactatttttgtgtatgtccaagaaatagaagtgttgtstttaccctctttgcccaaactgacaggttgcagaaccagtctaagaacaaggtatattagattctgtgtataggattttttttcttcttaaatcttaact

SEQ ID NO: 349092 - DNA, 201 bp, Homo sapiens
ctcagccaggtagtgttgcatgtggcaagccctgggcgaataaagggaacggagctcccacacagctgtgctcccaggtgtgtttatttttgtcagataarggaaacctgtttgaaatgatagctgtgtcgttttcctctcctgcattctttgtagagtggagtatcactgtttttgtttttgtttttttaaataattcaa

SEQ ID NO: 349093 - DNA, 201 bp, Homo sapiens
tacaacatgtgggaattctgggagatacaatgcaagtcgaaatttgggtgggggcacagccagaccacatcagtgggcaaccttattttgtccctttcttyattaagagtgcttctgatgttctacaaccggccacccctgtgtcctgtccgtttggagtctgcctttgtttatcctgctcatggcattttttttctgtgt

SEQ ID NO: 349094 - DNA, 201 bp, Homo sapiens
atatattaacttttaggcaggcttggtttcctctgcactttcggttacagcttactaccccttctgtagggtgggttacctaaacttgttttctcacctgsggggtggatcagggtttctcagccttggtgctgtggacattttggactaggtcagtcttagttttggggactgtcctgtgcactgtaggatgttcagcag

SEQ ID NO: 349095 - DNA, 201 bp, Homo sapiens
gggtgcttaggttactgttcactgttttctggcccccccttcccccatcctctgtttttttgtgtttttgtgtgtgtgtttttttaagtattgaagacttwcctcgactaacgtgatttagggtcaggacatcacttgctaaacttaaaacagctccctatttactggatagttgtagtggtgaagccatttgtggtggca

SEQ ID NO: 349096 - DNA, 201 bp, Homo sapiens
tatgtccttttagagaacaactcaaaattggaatcactacacatgatgttttcttttttttttttaacttatcaaaaattaagaattattatgaagctctrtttcttcagacagtctggaataaggtgcaaaactgtacaaattgaccagcaaaggagaaaagagagcccagaagcagaccaatacaaaaatggaaatttt

SEQ ID NO: 349097 - DNA, 201 bp, Homo sapiens
aacaaaaacaaaaaacaaacacaaaaatagctgggtgtggtggtgggtgcctgtgatcccagccactcgggaggctgaggcacgagaatcacttgaacccrggaaccagtggaggttgcagtgagcagagatcactgcactccagctggggtgacagtgtgagactgtctcaaaacaaaagcaaaacaaaaaaaaatttct

SEQ ID NO: 349098 - DNA, 201 bp, Homo sapiens
ccctgcatgcagtaacttgtgccttcctgttcttgtttttggccattcctggagagtgtgcctgccctggtagtgtctcacaaaaatgcaccctcaaagcrcctgctacttggctgtagcctcaagtccggtcctgtaagtacagggtcatcttagaagatgtaaagaatccgcttcttcctctttcctggcaaacctctc

SEQ ID NO: 349099 - DNA, 201 bp, Homo sapiens
gggatgataattgtacttcctttaaggttggctgagttaatgcagacaaagccctccgtacagggcctagcacacaggaagtgctcagtagatgttaaagygcctttattactattgtttttatctgtctttcaggaatagttctttttttatagtttaaaagttgtttttttatagttaaaattgtgtttttatagttta

SEQ ID NO: 349100 - DNA, 201 bp, Homo sapiens
tccactacagcctcttcctacagaccctgctgagcagctcaggggcgccggcatcagggcagttgccatctgcctccatgcgattaaaattcctacggctrcatggcggcatggagcaggaggtgagcactgatctccctgtgcagcgacaacactgcggccccacgtggagatgggggcgaacctgagtccggcaaacct

SEQ ID NO: 349101 - DNA, 201 bp, Homo sapiens
gtgcagctttcacgtttttgtgtctggtttccttgatttactaggccacattatgatgtgcatgtaccagatgccatgcatgtggtccctcacagttcccyatgttctaatttttgagggatgattcacgaagaagggattctgtggtcaagaaagtttgagaaatgccccacatccctcccttggatattctcagggcac

SEQ ID NO: 349102 - DNA, 201 bp, Homo sapiens
gtctttttgtgccactatgggaggattccatttttaagattacctcatagtcttagatagttgcaggcactccaaccattgcatctaatttcttgccagcrggtacagagatgctcatacctgctccctctgaaggtgcttgtgtgattggcgtgttccctttaccttttatcccattgctaaaacaaacatgactatact

SEQ ID NO: 349103 - DNA, 201 bp, Homo sapiens
agtaaatatgaaaataagcagccatttagctgaaatgttaatatgaggacaaattgggctacctcatttttgagattatgtagaatttatctttagttgtraaacatgttaagttagtgcctgggttgagttccctaggaggccagttaactgctgtgatccgtgggcagaggcttcatctcaaacgccagcccaggatcc

SEQ ID NO: 349104 - DNA, 201 bp, Homo sapiens
gttccaatgtggtgtttgcttttgaccaagaaggctgaacttcatatttaaaacagtggtttctcatgaacagtaaatatgaaaataagcagccatttagytgaaatgttaatatgaggacaaattgggctacctcatttttgagattatgtagaatttatctttagttgtgaaacatgttaagttagtgcctgggttgag

SEQ ID NO: 349105 - DNA, 201 bp, Homo sapiens
gaactcctggcctcaagcaatcagctcacctcagcctcacaaagtgctgggattacaggcatgatccatggcacctggcaatattacagattttttagttyagcctaagagcaatggaaaacctaatgggtttaactctgagtacttgcttttagagagatgttgacataggaataaagggtgaccaagatgataaaggat

SEQ ID NO: 349106 - DNA, 201 bp, Homo sapiens
gggaggctgggatggggggatcgcttgagcccaggagtttaagaccagcctgggcagaaagagtctagattagctgggtgtggcggaacttacctctggtygtccagctactcaggaggtcgaggccagagcatcacttgaacccaggaggttgaggctgcagtgagcagtgattgtgccactgcactccagcctgggcag

SEQ ID NO: 349107 - DNA, 201 bp, Homo sapiens
acacgttggcactagggcggatcagtgctgggactcggtgatacccatggggtaacatacgtagtcctaacatacatgggtgggtgctgtatgggggtacrcttttgtgaccagtttcatggtgtgtttgttgtctgctttgcccttcttttatccaaggtgtaacgcggctagctgatatcagtttgcatgatccagtca

SEQ ID NO: 349108 - DNA, 201 bp, Homo sapiens; identical to SEQ ID NO: 74207

SEQ ID NO: 349109 - DNA, 201 bp, Homo sapiens
taattcaaagatagtcacctttatttccaaatgggggtcagcatgactgtatagtttagagaaatattcgttttggcgtcacctaatcttaaaatatgtckgtttttcctccctttgtatcgatgtagtttgaggaagaccagaagatggttgtctttttctcaagttgcgagctggtggagttccactacagcctcttcc

SEQ ID NO: 349110 - DNA, 201 bp, Homo sapiens
tcattggtcttggcacacttccgttcttttggaactatcataaattctagttaaggggcttttttggtttcttctttttttttttttttttttttttttttgagacggagtctcgctctgtcgcccatgctggagtgcaatggcgcgatcttggctcactgcaacccctgcctcccaggttcgagtgattcttctgcctca

SEQ ID NO: 349111 - DNA, 201 bp, Homo sapiens
attttcacattccagaagaggcgtccttctttgcacggtacgtatcctcctgtgttccatgtgaaggctgatacatttctgtgatggctgtgtaatctttygtctcttgacagtttgtcctgtggtcagtcctacagggcccaggaacactaggggccccttggtggggctggcctctttgcacctctttcttgttacctg

SEQ ID NO: 349112 - DNA, 201 bp, Homo sapiens
ttcattggtcttggcacacttccgttcttttggaactatcataaattctagttaaggggcttttttggtttcttctttttttttttttttttttttttttttgagacggagtctcgctctgtcgcccatgctggagtgcaatggcgcgatcttggctcactgcaacccctgcctcccaggttcgagtgattcttctgcctc

SEQ ID NO: 349113 - DNA, 201 bp, Homo sapiens
ggcagatcgcttgagctcaggagtttgagaccatcctgggcaacatgaaaacccatgtctacaagaaatacaaaaattagtagggtgtggttatgtgagcytgtagtcccagctacttgagaggctgaggtgggaggatggcttgagcccaggaagcggaggttgcggtgagccaagttcatactactgcactccagcttg

SEQ ID NO: 349114 - DNA, 201 bp, Homo sapiens
acagcatgacatgtctctgaattttcaggtttaatgtctgtattggcagaaataagaccaaagaatgacttggggcatcctttttgtaataatttgagatstggagattggatgattgactatgtcagtaaccggcttatttcacgatcaggaactattgctgaagtaagtagagctatattatcgtcccaaaaaatcaag

SEQ ID NO: 349115 - DNA, 201 bp, Homo sapiens
agataagaaagcagcatagctgttgcctttattgtgcatgtctttttcctcactgtgactgagcaagttgcatttctgtgagcaattttgcaatctttacwtgtctttttctagaatagtgctgtccaaaataatgtgaaccacatacataattttaaattttatagtacccacattttaaaaagtaaaaagaagcaggtg

SEQ ID NO: 349116 - DNA, 201 bp, Homo sapiens
tgtgcctctaatacgtattcaccccaaatcactagaatagagactagcagaatagggactagaggatataggaacaaattgatgctaccaataatacagcrtgacatgtctctgaattttcaggtttaatgtctgtattggcagaaataagaccaaagaatgacttggggcatcctttttgtaataatttgagatctggag

SEQ ID NO: 349117 - DNA, 201 bp, Homo sapiens
ctgatctgcctttatgttaatagtttgttatatatgattgggggggctgggaggggatagtagctttgtaagctactccagggttagcatatatttgtgtyctcatgatatttatttatatcatgaagtactcaacatttgtccaaaatttttttatttgtcctctgttatcaactgacatttctgttacaatgaatatag

SEQ ID NO: 349118 - DNA, 201 bp, Homo sapiens
gtagtcctagctactcaggaggctaaggcaggagtatcacttgagcccaggagatcaaggctgtagtgagctatgatggcaccactgcactccagcctgcytgacagaatgagacactgtattaaaacacacacacacacacgcacacacacaccaaaactcacaattaaagctgactcttgtgaccagctctccaaaaaa

SEQ ID NO: 349119 - DNA, 201 bp, Homo sapiens
atctcataccactttagatataatttaaccaatatatcatttatggcagaaatgatcaaagcaatttaaaaaccagtgtttccttgaagtaattgttttcrttttatttcttgaaccattgaaagcaatctcttttctgaacaggttcagaagtttacctaaggagagaacttatttgctggggagacagtgttaaattac

SEQ ID NO: 349120 - DNA, 201 bp, Homo sapiens
ccctttgcccttcacggcgcccggccctccttgggctgcggcttctgtgcgaggctgggcagccagcccttccccttctgtttctccccgtcccctccccscgaccgtagcaccagagtcgcgggtcctgcagtgccccagaagccgcacgtataactccctcggcgtaagtgctaggaatgccgctggcctcgcggggaa

SEQ ID NO: 349121 - DNA, 201 bp, Homo sapiens
taacacatgattaaagtcctgtgaactcagtatgtactaatttaaggttagatggatgatgtactaatgccgagcttattctgtagaagacaaaataattrattatttctcttacctttgttattgaaatttttctaatgctttttacataatatctgatcatcttttatttaacttaaatttcaatcattttgcagtgat

SEQ ID NO: 349122 - DNA, 201 bp, Homo sapiens
attttaaataagtatatgtatatatgtattttttaactattgacatttttcagtccatccgaaaaataatttgggaggatatttttccaaagcttaaactytgggaatttttccaagtagatgtcaacaaagcggttgagcaatttagaagacttcttacacaaggtaaaggatacatactagaatgttcctatcgatttt

SEQ ID NO: 349123 - DNA, 201 bp, Homo sapiens
attaatgaagtatatttttacaccttgattagctatttatatttcttccattaattgcctgttaatgtttcttctcatttttctattgagttgtctctttktttatatcgacattattgattattacacaggcctcaaatatatcccctagtatgctcttgatcttttaactcttgtttatggtgacattttttttcaatg

SEQ ID NO: 349124 - DNA, 201 bp, Homo sapiens
tttcatagatattcactcataaaaataataaccatgcttactgtttaattataactgtgcaccaggcatttatgtgtgttttttatggctagctgattctycatgtttctattttttccaactcttgacattctgtgtttttttaaatcaaatttattttactattctcttttctatattttcccccaattttaaaaaata

SEQ ID NO: 349125 - DNA, 201 bp, Homo sapiens
caatagttattttcgatattttaactcctttttgtttcataggggtaactcattcgactgtggagttcttttaattcttatgaaagatttcaaatcctctrgaagccaaaatgggacacagtaaacagattcgaattttacttctgaacgaaatggagaaactggaaaagaccctcttcagacttgaacaaggtcagtagc

SEQ ID NO: 349126 - DNA, 201 bp, Homo sapiens
gaaaaataccttgaatttcagtgattgtgttgatgaatctcggaggaactacttaatgcaagttttgagaattaccaatttaacttttattacaacttctytgctccttacatagcctttcttcatctgagtgcttattatgggtatgaataaatactaagtaaataaatgacttactaaataaatgactgaaactggaaa

SEQ ID NO: 349127 - DNA, 201 bp, Homo sapiens
taattataaaattatgcaaatgtataaaaagcattttttctgtgttttttttttaattaggattatactatctaaacaattttgtaacctgcctttttccygtttgtagtagtattatggtgtatgtactctacctccctgcctactgccatgtttcagccatacttttttccagaagatattttaaaagctctacataaa

SEQ ID NO: 349128 - DNA, 201 bp, Homo sapiens
gattctaaaattatataagggtgctcagctgagtaaatgaagcacaaacaattcatttcagcagcagagcaatgtggttaagattgcatattctgaagagrgacttggccaagttaattcctgactgtatgacttgggctgagttacttaactctctgtgcttcagtttctcttttgttaagggaacataacagtatgtcc

SEQ ID NO: 349129 - DNA, 201 bp, Homo sapiens
aatgtttatttgaatgctgagttcctaaaacatacactgctaagacattttatgattgtaattcagattttcttcttttgtttctattgacaacaagcgawacttcaatatatggttatctttattttccaattcttagtcttgcctccagattaactttggctgagctaaatcagatcctttaccgatgtgaatcagaag

SEQ ID NO: 349130 - DNA, 201 bp, Homo sapiens
ctgcactcctgcactcctgggtgatggagaaagacctttctcaaaaataaatggatgaatgagagcagcattggtatttactcttttttttttttttttttgagacagggtctcattctgtcacccaggctgtagtgcagtggcacaatctcagttcattgcaacctccacttattggggtcaagcagccctcccacctta

SEQ ID NO: 349131 - DNA, 201 bp, Homo sapiens
ccaccacacccagctaatttttgtatttttagtagagacggggtttcaccatgttggccaggatggtctcgatctcttgacctcgtgatctgcctgcctcrgcctcccaaagtactgggattacaggcgtgagccaccgcgcccagccttttaagttacatttctttgcttattaatgaagtatatttttacaccttgatt

SEQ ID NO: 349132 - DNA, 201 bp, Homo sapiens
tgatcaaacacctctcaccaggcccctcctccaacatcggggattacaattcgaatgagatttgggcagggacacaaatccaaaccatatctttttgcctstatgtttaattttgtttcttattatttagtaatataagtagatagaaccatattaaaaaaaaattttttttttttgagacggagtatcaccctgtcacgt

SEQ ID NO: 349133 - DNA, 201 bp, Homo sapiens
cttcaggaagcaaactttgaaagcaatcttgaaaaagaactcctgaggttagaatatttggtagcaccggggaggaaaacgggttccactaaagtccttamagtgtttaaaaaaaaaaaaggtacatgtatacatgtataacaaacctgcaagttgtgcacatgtaccctagaacttaaagtataataaaatatatatata

SEQ ID NO: 349134 - DNA, 201 bp, Homo sapiens
tacaccttccttagccaagattgtatctcattctccatcattaatgtcatagatctttacagttgcccaagtcattcctgttaattcccttctcagcaggytttctcatgcctgtccttatacccgtactcccatcagattcctttatatctgttaaatctcatttactgtcagtctatgtgttgcctaagtttcaacttt

SEQ ID NO: 349135 - DNA, 201 bp, Homo sapiens
tggctgagctaaatcagatcctttaccgatgtgaatcagaagaaaaggaagatggtggagggtgctatgacataccaaactggtcagcccttaaatatgcmggtcttcaaggtaagcaaatagaaggatagctgagctttgtgtttttcttttagggtcatctggtgtcttctttacagacatagatataggctcagagta

SEQ ID NO: 349136 - DNA, 201 bp, Homo sapiens
ctgttgacaatgcagatcctatattaaaaattccttttgcttcgtaagtatgccttgtttggtagagatttgccaccttaataagtaagttaccactagaytgaattaagcagttttaagggtcctctatatccttgctactcaaagtacggtccaaggaccagcagtgtcagcatcacctgttgttaacattttacccta

SEQ ID NO: 349137 - DNA, 201 bp, Homo sapiens
atatgaggacacatatcttgaaagatttaaataaacttgcttaaagtctcttgtggtacagttaggatttgaacccaagtgtttgacctcttttccagtakcatgcttgccttgctatttataattacttaagaaagtttaaatttatattttcttcattttaggctggttttgtttgtttgtttttacagtggtctttcc

SEQ ID NO: 349138 - DNA, 201 bp, Homo sapiens
ggatttgaacccaagtgtttgacctcttttccagtagcatgcttgccttgctatttataattacttaagaaagtttaaatttatattttcttcattttagsctggttttgtttgtttgtttttacagtggtctttcctttatttgctttgcaggctacaacatgattcattttaccccattgcagactcttggactatcta

SEQ ID NO: 349139 - DNA, 201 bp, Homo sapiens
tatatctgcatttctccatctgctctagcaaggggccagcagcaattgaagaatgctgtaattggtttcataaaagaatggaggaattaaattcagagaakcatcgactcattaactatcatcaggaacaggttttacttatttttgaactgctgcttttccttgcatcttactactatttttttgttgtcttgaggatgg

SEQ ID NO: 349140 - DNA, 201 bp, Homo sapiens
ctaataaaacatattgataagaatattgttttatattgtttctatgtattcactgacttattgagttaattgataaagtttctgaaatctacatgtacaawttttctaatttttcatcaattaggagaaaaaattccactattactatgaatgaaatttgcctttaatgatgaatttccctaaaatgaaaccacaaattta

SEQ ID NO: 349141 - DNA, 201 bp, Homo sapiens
gatttcagtggtttctgaagaacggttttacactaagtggaatcctgaagcattgccttcaaacacaggtgaagttaatttccaaagcggcattattgcakccaggtgtgctatcagtaaacttcatcaggagcttggagccaagggttttattcaggcaagaaataattaaatttgtttcttcaggttcaatttcagagt

SEQ ID NO: 349142 - DNA, 201 bp, Homo sapiens
ccagcagggaatttatgaataattatttagtcaaccacctggaaattaagtctgattaaagttttaaaaataagcaagcaggcccaggcacggtggctcaygcctgtaatcccaacacttttaggctcaggcaggcagatcagctgaggttgggagtttgcaaccagcctgaccaacatggagaaaccccatctctactaa

SEQ ID NO: 349143 - DNA, 201 bp, Homo sapiens
ctagtgatattgaagccagatattgacgagataacaaaaggtaacgaagtgagtcttctattaaggacataactaatcaagcagttaatgtgccccccccccaacaaaatagggtaggaaaaaataggtgaaatgagaaagtagggtttgtaggagacaaattagaaaggattattaagagtctatctgcatttcatatag

SEQ ID NO: 349144 - DNA, 201 bp, Homo sapiens
cttctaagattgttacatggcagaaaagaatgttcaaacttaatttacttaattttaaattacaaaatctaggattctacttgttagctaatagagtttcragtattttattaatctttgtgcaaatgttgtgtttaacagtttggaaccaatctgattttttattataaaccagtgtttataataaacagctagatagat

SEQ ID NO: 349145 - DNA, 201 bp, Homo sapiens
gctgtctccagctcctggactcaggtgatactccctcctcagcctcccaaagtgctgagattacaggcgtgagccactgcacctagccccaatatttattytttatacgtgaaaatcctatttggacataagttattactacattttgtcattttgaaaaataccttgaatttcagtgattgtgttgatgaatctcggagg

SEQ ID NO: 349146 - DNA, 201 bp, Homo sapiens
gcaccactgcactcctgcactcctgggtgatggagaaagacctttctcaaaaataaatggatgaatgagagcagcattggtatttactctttttttttttkttttttgagacagggtctcattctgtcacccaggctgtagtgcagtggcacaatctcagttcattgcaacctccacttattggggtcaagcagccctccc

SEQ ID NO: 349147 - DNA, 201 bp, Homo sapiens
aagtaacatcaatgcctcaattatgtatttattttttttctttgagatggagtcttgttctgtcacccaggctggagtgcagtggcacgatctcagctcaytgcaacctccgcctccagggttcaagcgattctcctgcctcagcctcccaagtagccaggactacagaggtgcaccaccatgcccagctaatttttgtag

SEQ ID NO: 349148 - DNA, 201 bp, Homo sapiens
atcctcttcgaaactttgctgaaccgggtatgtaatttttaacttctctgtggatggggaaagaatagttcatggcaaggtcaaaataaaatctgctttaytgattttcttccccattagtctattggtttttaaatatttcaccataaaggtaccagagatacatacaatttgagaaagaaaacatggagccaacaaaaa

SEQ ID NO: 349149 - DNA, 201 bp, Homo sapiens
acattgacataagagatattttcactcattggccagaggtattaagaatttcagtggcaattaaaccagaacctaatggttttaggtcccccctcactctyagtgtcttgtgtttctatagctatttcattaccaggaagaatgttgcaggagcccattgatatatttattttttaacatttcgaaactaggagtctatat

SEQ ID NO: 349150 - DNA, 201 bp, Homo sapiens
gtggcaattaaaccagaacctaatggttttaggtcccccctcactcttagtgtcttgtgtttctatagctatttcattaccaggaagaatgttgcaggagyccattgatatatttattttttaacatttcgaaactaggagtctatattagtgacattaaaatttattcagaaatcttaatgcttttttttaagagtataa

SEQ ID NO: 349151 - DNA, 201 bp, Homo sapiens
atcatactggtatgagcttcattgactgccttcattaattttgatgagaatttatgcacacacacatatacacacaaataagagaaaggaagaaagaaagrgaaaggaaaggggctaacataaattttaaaaacacaaatgatgattaggtgtccttccgtttaaaaaattaatatttttcctttcaaagaaaacattctt

SEQ ID NO: 349152 - DNA, 201 bp, Homo sapiens
aggtcccccctcactcttagtgtcttgtgtttctatagctatttcattaccaggaagaatgttgcaggagcccattgatatatttattttttaacatttcraaactaggagtctatattagtgacattaaaatttattcagaaatcttaatgcttttttttaagagtataaatttgggtgtaagtatctctgccctctttt

SEQ ID NO: 349153 - DNA, 201 bp, Homo sapiens
cacacacatatacacacaaataagagaaaggaagaaagaaagagaaaggaaaggggctaacataaattttaaaaacacaaatgatgattaggtgtccttcygtttaaaaaattaatatttttcctttcaaagaaaacattcttaattgaggattaagtcaatatataagtatcttgcatctgttgcttataaatacaggag

SEQ ID NO: 349154 - DNA, 201 bp, Homo sapiens
gatgttttattttcttagcctttgtaatttttcaacattgaagaagtgtaatatatgaaaaatccagtcccccttattaatgtaccaaatggatgttgctrgtcataaacatttcaaaggaatttttaaatttcgctaatgttttaagaattaaatttttgaaaaaaatttcacacatacaatgtgatatcttcatgccaa

SEQ ID NO: 349155 - DNA, 201 bp, Homo sapiens
ggagtctatattagtgacattaaaatttattcagaaatcttaatgcttttttttaagagtataaatttgggtgtaagtatctctgccctcttttttctagycattctaaacgaaatcaagccattctgctgtatgccatggatctaatacaacctgttgccgaaaataagtaggagggtggagatggagttttaaatgttt

SEQ ID NO: 349156 - DNA, 201 bp, Homo sapiens
taaatttgggtgtaagtatctctgccctcttttttctagccattctaaacgaaatcaagccattctgctgtatgccatggatctaatacaacctgttgccraaaataagtaggagggtggagatggagttttaaatgtttttggtagaactatggttttaaaaggcctatgatattaacatttctgttttcccttatgatg

SEQ ID NO: 349157 - DNA, 201 bp, Homo sapiens
tgtcacccaggctgtagtgcagtggcacaatctcagttcattgcaacctccacttattggggtcaagcagccctcccaccttagcctcctgagtagctggsactttaggcacatgccaccatgctcagctaattttttaaaaattttgtagagatgaggtctcactatgttgcccaggctgtctccagctcctggactcag

SEQ ID NO: 349158 - DNA, 201 bp, Homo sapiens
aatttttagaagagactgtaagctagagttttttcagaatagctatgagaaataaataattattaattttttaaaacattatctcataccactttagatawaatttaaccaatatatcatttatggcagaaatgatcaaagcaatttaaaaaccagtgtttccttgaagtaattgttttcattttatttcttgaaccattg

SEQ ID NO: 349159 - DNA, 201 bp, Homo sapiens
tcgtttattttaaattaaaacaaattatctgtttttaaataggtagatataaggtttcactgtgttgcccaagctggtcttgaactcctgcaggctatccwacctccactcccacaaagtgctggggttgagctaccgtgcctggccaaaacaaattatcttcaatgttgtaaatatttggaatactgtgccaaactcctg

SEQ ID NO: 349160 - DNA, 201 bp, Homo sapiens
accagtgtcacttaggtgttctttggaaatgtgtgcttacctaaaaaatgtctatttctataatattaaagcagtattataatatatatttcaagtcctakgatgaaaaattgatttgatttggagggatttagtgaatattagttaagctggtagaacattgtttagttccaaaaaatgacggctttattttattgtgct

SEQ ID NO: 349161 - DNA, 201 bp, Homo sapiens
ctcttttcttctaatttgtatttttacatttgaatatttaatatacctgaaatttatttttgtgtattatataaagaagatatttaacttgatttgtattyttaaaattatattgagttgaaaatccatccttttatactgatttgaagtaccaccataatacttcatagtgtatggtaatatacaaaatatacatctgtt

SEQ ID NO: 349162 - DNA, 201 bp, Homo sapiens
tatttcacctctaaacttaacatagatacagtttcaatttaattatgagatactcctttgtgtctcctttttccttcagctgctaatagtaaatggatccrggaacatccagaatgtgcctataatcttgtgaattctccacacttaaaacctgcctgggtcttagacagagcactttggcgtttctcctgtgatgttgca

SEQ ID NO: 349163 - DNA, 201 bp, Homo sapiens
aaggaatggaatgttatttgtattactgatgttgtctacaatcatactggtatgagcttcattgactgccttcattaattttgatgagaatttatgcacayacacatatacacacaaataagagaaaggaagaaagaaagagaaaggaaaggggctaacataaattttaaaaacacaaatgatgattaggtgtccttccgt

SEQ ID NO: 349164 - DNA, 201 bp, Homo sapiens
aataaatatttgttttattttcagtgaaaaaattataggccaaaaattagaaaatagtgacagttataatctctttgtagatatttgcatttaaggtatcrtcttttctttcttttagaaaataggcgagtaaccaagtctgatccaaaccaacaccttacgattattcaagatcctgaatacagacggtttggctgtact

SEQ ID NO: 349165 - DNA, 201 bp, Homo sapiens
agataccagaatattttacattttttatattaaccagtatttgttaatcatttttaacacatgattaaagtcctgtgaactcagtatgtactaatttaagkttagatggatgatgtactaatgccgagcttattctgtagaagacaaaataattgattatttctcttacctttgttattgaaatttttctaatgcttttta

SEQ ID NO: 349166 - DNA, 201 bp, Homo sapiens
gtttaacccagtttaccttacaaatgttatcttgtgtgtatgctacaatgtagaaaagtttggaaaccactgatttgcatatgtaaagaacaagaattctrgttggtacaaacatttaaaagatacaatctgctgtttcataaaacagttctccaagtaaccatagaaactatgaagatatttaaaagctcatagatctgg

SEQ ID NO: 349167 - DNA, 201 bp, Homo sapiens
ccgtactgtcttccacagtggctgtgccattttacactcttactaatagtaaacaggcttccattcatctatatcctcaccaatacttgtttttttctgtktttgtttttttggattttgtttttgttgttttggtttttgtttttgttcgtttgtttttgttttttgttttttttgctagtagccatcctaaatggctat

SEQ ID NO: 349168 - DNA, 201 bp, Homo sapiens
gtctaagaattttatagttttaactcttgtgtttaggtctttgatccatattgagttaatttttgcatatgatattaagtccaagtccattttttttttttgcatgtgaatatccagtttactcagctccatttgccaaaaaaaatataaactgtcccttccccaatgaatggtcttggcacccttgtcaaaaaaaatttg

SEQ ID NO: 349169 - DNA, 201 bp, Homo sapiens
tattttctcccatattgtgggttgtctattcactatcttaaaagtatcctttgataaacaaaagtttctgattttgattaagtccaatttatctacttttrttacctgtgcctattgtatcatatgcaaaaaagcctcatcaaattcaatgtcatgaagcttttgccatacatttttgtctaagaattttatagttttaac

SEQ ID NO: 349170 - DNA, 201 bp, Homo sapiens
tctcactgtgttgcccaagctggtcttgaactcctgggctcaagtagtcctcttgccttggcctcccaaagtgctgggattacaggtgcaaaccactgcayctgatctcaatattaattttctgcttttaagttggataatacatgaagaaaggaatgagaagttcactgacataactaaaacagaatacaagtactatgg

SEQ ID NO: 349171 - DNA, 201 bp, Homo sapiens
ctctgtcacccagactggagtgcagtggcctgatctattttttgtagagacaaaagtctcactgtgttgcccaagctggtcttgaactcctgggctcaagyagtcctcttgccttggcctcccaaagtgctgggattacaggtgcaaaccactgcacctgatctcaatattaattttctgcttttaagttggataatacat

SEQ ID NO: 349172 - DNA, 201 bp, Homo sapiens; identical to SEQ ID NO: 74256

SEQ ID NO: 349173 - DNA, 201 bp, Homo sapiens
aggctgcaatggtgcgatctcagctcactacaacctccacctcccgggttcaaacgattttcctgcctcagcctcctgagtagctgggattataggcaccygccaccatgcctcactaatttttgtatttttagtagagacggggtttcaccatgttggccaggctggtctcaaacttctgacctcgtgatctgcccacct

SEQ ID NO: 349174 - DNA, 201 bp, Homo sapiens
caaagataattgggaaaacatgagactggtcatattgatgaatattgtaacatgtgaattgtgatccatttctgatatgtcttgaactactgtgtctagtrggcaaatgtcattgttacctctgtgtgttaagaaaataaaaatattttctaaaggtctgtattttgctttcattcatagtcattgcacccagctaatttt

SEQ ID NO: 349175 - DNA, 201 bp, Homo sapiens
attttgtttcttattatttagtaatataagtagatagaaccatattaaaaaaaaattttttttttttgagacggagtatcaccctgtcacgtaggctgcartggtgcgatctcagctcactacaacctccacctcccgggttcaaacgattttcctgcctcagcctcctgagtagctgggattataggcacctgccaccat

SEQ ID NO: 349176 - DNA, 201 bp, Homo sapiens
acatgtgaattgtgatccatttctgatatgtcttgaactactgtgtctagtgggcaaatgtcattgttacctctgtgtgttaagaaaataaaaatattttytaaaggtctgtattttgctttcattcatagtcattgcacccagctaattttttattttttacttattttttattttgtagagacaggattctacactatg

SEQ ID NO: 349177 - DNA, 201 bp, Homo sapiens
tctatgtttaattttgtttcttattatttagtaatataagtagatagaaccatattaaaaaaaaattttttttttttgagacggagtatcaccctgtcacrtaggctgcaatggtgcgatctcagctcactacaacctccacctcccgggttcaaacgattttcctgcctcagcctcctgagtagctgggattataggcac

SEQ ID NO: 349178 - DNA, 201 bp, Homo sapiens
tagtctatcccttcataattgtagctctaattttaaaatgttttccctaattataaaattatgcaaatgtataaaaagcattttttctgtgttttttttttaattaggattatactatctaaacaattttgtaacctgcctttttcccgtttgtagtagtattatggtgtatgtactctacctccctgcctactgccatgt

SEQ ID NO: 349179 - DNA, 201 bp, Homo sapiens
tttctaacagaggtaacacccattatgtctcaaacaggatcagccattgtttgaagtcatacaggaagcaatgcaaaaacacatgcagggcatacagttcygagaaaggaatgctggtccccagatagatcgaaacatgaaggacgaaggtacagaactttaactaaaatagtacaaatttatcaaggtgatgaaattaaa

SEQ ID NO: 349180 - DNA, 201 bp, Homo sapiens
tggatggggaaagaatagttcatggcaaggtcaaaataaaatctgctttactgattttcttccccattagtctattggtttttaaatatttcaccataaakgtaccagagatacatacaatttgagaaagaaaacatggagccaacaaaaaaagaagttcatcttctgtcctctcctttgccttcctaccttttatcttct

SEQ ID NO: 349181 - DNA, 201 bp, Homo sapiens
gcccaactttacagggaaaagcagttaccgtgtatacaaattacccatttcctggagaaacatttaatagagaaaaattccgttctctggattgggaaaayccaacagaaagagaagatgattctgataaatactgtaaacttaatctgcaacaatctggttcatttcagtattatttccttcaagggtaagtcaggtgtt

SEQ ID NO: 349182 - DNA, 201 bp, Homo sapiens
ttttattaatctttgtgcaaatgttgtgtttaacagtttggaaccaatctgattttttattataaaccagtgtttataataaacagctagatagatagcamcagtgttaaacgtaaatcacacaagtggaaattgtaaggtgtaagagtttttaagagttatttatcatcatctgtaggagaaactggcttcagtctggtc

SEQ ID NO: 349183 - DNA, 201 bp, Homo sapiens
ttggatattttgtgtattatacatgtaattatgtagattgtgaaagggtaaaagtagcttttccattaagttttgttgcaacttttaaaatgattttatgygcttagaaataaatacattttatttgggacaattaaccttttagttagagtcagactatattatatgaggattttttttctatcactgactgaaaagttt

SEQ ID NO: 349184 - DNA, 201 bp, Homo sapiens
gattcattacaattgtttaccgaatgccctttaaatagtacttaaaggacgccaacttaaagaataaaaatacgttttttaattttagagatgggtctgcygtggaaattgtgggcctgagtaaatctgctgttcgctggttgctggaattatccaaaaaaaatattttcccttatcatgaagtcacagtaaaaagacatg

SEQ ID NO: 349185 - DNA, 201 bp, Homo sapiens
agtaaacaggcttccattcatctatatcctcaccaatacttgtttttttctgtgtttgtttttttggattttgtttttgttgttttggtttttgtttttgktcgtttgtttttgttttttgttttttttgctagtagccatcctaaatggctatgaggtggtatctaatggttttgatttgcatttccttaatgatttctt

SEQ ID NO: 349186 - DNA, 201 bp, Homo sapiens
tgtggacgtacttgagaaaaagaatttaaactttttggtaacttggccaggtatgatggctcacaccagtaatcccaacacctcaggaggctgaggcaggmagatcacttgagctcaggagttcaagaccagtctcagcattatggtaacaccctgtctctatcaaaaaaaaagtacaaaaaattagatgggcatggtggc

SEQ ID NO: 349187 - DNA, 201 bp, Homo sapiens
aggcctcaagaaacttacagtcatggcagaaggcaaaggggaagcaggcatgtcttacatggccagagaaggaggaagagaacaaagtgggaggtgctacrtgcttttaaacaaccagatcttgtgaaaactcactcactatcatgagaacaagggggaaatccacctctgtgatcaaacacctctcaccaggcccctcct

SEQ ID NO: 349188 - DNA, 201 bp, Homo sapiens
atattcactatccttatctgatctttgctaatatacgtattcagttttataggacaacaatcactgtgtacaatattatctcaggttttgttttggtcacrgatcattcttaaaacatttccacttcagtccgcaaaattgtgatttttattttgttaaatgttcgtacgttctgttattatgcccttttaaatattctat

SEQ ID NO: 349189 - DNA, 201 bp, Homo sapiens
ttggtgcatataccactcttctggatacagcatggaagcagatgtcaaggtatatccaacaaagcttgaataaatgggcatatctgtgttgaaactatatrcagagtcacttcatacatgttcttaaaaaaccaaaccataaagaattgtcatagaactgaaaaggcttgtaggtggatagtaaatttattagcatccttt

SEQ ID NO: 349190 - DNA, 201 bp, Homo sapiens
tccaagagtttccatcattagcaatactgagtatatattattataacgtagtgtttaagggcatggagtatagaaccagactaactggatttgaattccawtgcagactcttattagctataagaagtaagacctggctgagtgcagtggctcactcctataatctcagcactttggtaggccaaggtgggaggattgctt

SEQ ID NO: 349191 - DNA, 201 bp, Homo sapiens
tattcttaataaagtagttgcattcttaaccaaaaaatctgtgatgaagcagctttgtgtttggatggactgcttgtaaaatgcatgttcctcctcagacmtgctcagattattttggagcaaggccaagaaatttgcagttttataagatccccaggtaatttttaggcaaggagtccactggctattgaaaaatattgt

SEQ ID NO: 349192 - DNA, 201 bp, Homo sapiens
ggtttttgattttttggttattgacttgtagaagtttcttatatattctggatattaaccccttatcatacatatgagaatttcatttctttttaaggctraataatattccattgtatgtatataccacattttgtgtttccattcatttgtcaatggacatttgggttttttccaccttttggctattgggaataatgc

SEQ ID NO: 349193 - DNA, 201 bp, Homo sapiens
tcctttttgtttcataggggtaactcattcgactgtggagttcttttaattcttatgaaagatttcaaatcctctagaagccaaaatgggacacagtaaayagattcgaattttacttctgaacgaaatggagaaactggaaaagaccctcttcagacttgaacaaggtcagtagcaagttgttttgatttgctcatttgc

SEQ ID NO: 349194 - DNA, 201 bp, Homo sapiens
ttcttctcttgataaattctcttgtttctatgtgttttggtatgtttgatatcttgctgcatatttttctatgtcaaatcatgcctccttttgtctctttscttcctcctatcttgcttttctctttctgttacatttatttgttacatttgtcactgtgctttttacagtacatgttggatgctgctaggaatttgcaac

SEQ ID NO: 349195 - DNA, 201 bp, Homo sapiens
tgtgattttgactactttagatacttcatatgagtgaaatcatgcagtatttgttcttttgtgactgattttttccacttagcataatgccaaggttcatycatctcatagcatgtgacaggattcccttctttttcaaggctgcataatattccattgtatgcatacattttctttattcattcattgtcagtgggcatt

SEQ ID NO: 349196 - DNA, 201 bp, Homo sapiens
aataaaccagaggactgtccttatctctgggcacacatgaaaaaatacactgaaataactgcaacttatttccagggagtacgtcttgataactgccactsaacacctcttcacgtagctgaggtacagaaaaacaatttatctacattaagaaaagaaattcagtgttccttcctagctttccttaagtaaactatgcag

SEQ ID NO: 349197 - DNA, 201 bp, Homo sapiens
gcgtatgatgctcttccaagtactacaattgtttctatggcatgttgtgctagtggaagtacaagaggctatgatgaattagtgcctcatcaggtttgttyatatgttgtttcttaaaacctacatggccaacaactttgggcatttttattaaaaaaaattcattgtaattaagatgtatccatgctaaattttaccttt

SEQ ID NO: 349198 - DNA, 201 bp, Homo sapiens
atttcaatcattttgcagtgatatggtttactgtggaatttatgacaatgcattagacaatgacaactacaatcttgctaaaggtttcaattatcaccaasgacctgtaagaatttcatttatcttctgagtttcagtttaaattatttttcaagtaatttttaggtatttatggttttttttgtcttttaaataatcttt

SEQ ID NO: 349199 - DNA, 201 bp, Homo sapiens
acagaggctttattgtatttgtaaagtttaagtgaggaagtagaacttgggtttttaatttttttttgtatccgaaatattccaagttttaaaaaaatgtmagcctttcaagtgatttgcttttctctgctcaaaattaggaagttgttccctagagctaagctattattttgatacgtttctacttcaaaaaaagctttg

SEQ ID NO: 349200 - DNA, 201 bp, Homo sapiens
gatttgccaccttaataagtaagttaccactagactgaattaagcagttttaagggtcctctatatccttgctactcaaagtacggtccaaggaccagcartgtcagcatcacctgttgttaacattttaccctattgttttataatttgtgtgtgtacctgcatgtgtattctctctatagatatagatacacacatgcc

SEQ ID NO: 349201 - DNA, 201 bp, Homo sapiens
catcattttttaaaaatgtcaacatattattctactttatggctttaccataatttatttaaacaatttccatttttggacatctagattgcttctaattrttccctattatttatgtctttgtacattcatctttacatgaatccttagttattccctttctagatgtttctgcatactacagaagaatataggttttga

SEQ ID NO: 349202 - DNA, 201 bp, Homo sapiens
tatccatatatttgaggctgttaatacatactgccaaattttctccagaaagattataataattaatactttcagctctatccaagagtttccatcattascaatactgagtatatattattataacgtagtgtttaagggcatggagtatagaaccagactaactggatttgaattccattgcagactcttattagctat

SEQ ID NO: 349203 - DNA, 201 bp, Homo sapiens
tctatatcctcaccaatacttgtttttttctgtgtttgtttttttggattttgtttttgttgttttggtttttgtttttgttcgtttgtttttgttttttkttttttttgctagtagccatcctaaatggctatgaggtggtatctaatggttttgatttgcatttccttaatgatttcttagtgatgttgagcatctctt

SEQ ID NO: 349204 - DNA, 201 bp, Homo sapiens
tgttaatacatactgccaaattttctccagaaagattataataattaatactttcagctctatccaagagtttccatcattagcaatactgagtatatatyattataacgtagtgtttaagggcatggagtatagaaccagactaactggatttgaattccattgcagactcttattagctataagaagtaagacctggct

SEQ ID NO: 349205 - DNA, 201 bp, Homo sapiens
aaatactgttttggagattttagatgagttttaacctttgctctgcaagttctctgaatacttgtgtaattataaaaacagtatttgtataaacttaacaggggacaggttgtacacatatacccagacagctaatctctgctgtttgtacttgttcaaaatgacactatttctcctaaagataaatttagtcattcttgt

SEQ ID NO: 349206 - DNA, 201 bp, Homo sapiens
tcaagtgcccagtttccagaatgtatcctacagatgattctgctcctttgcctgctggcacactggtaaagatatttcttaaaatgtttttttgttttttkttttttttctgaaaaatgacttttagtttctaatgtaaaaataagggtaattaagaatccaaatcttacgaattattcaaatgtcagtattgatttggca

SEQ ID NO: 349207 - DNA, 201 bp, Homo sapiens
ctttcagctctatccaagagtttccatcattagcaatactgagtatatattattataacgtagtgtttaagggcatggagtatagaaccagactaactggrtttgaattccattgcagactcttattagctataagaagtaagacctggctgagtgcagtggctcactcctataatctcagcactttggtaggccaaggtg

SEQ ID NO: 349208 - DNA, 201 bp, Homo sapiens
caaatactgttttggagattttagatgagttttaacctttgctctgcaagttctctgaatacttgtgtaattataaaaacagtatttgtataaacttaacaggggacaggttgtacacatatacccagacagctaatctctgctgtttgtacttgttcaaaatgacactatttctcctaaagataaatttagtcattcttg

SEQ ID NO: 349209 - DNA, 201 bp, Homo sapiens
tttaccgatgtgaatcagaagaaaaggaagatggtggagggtgctatgacataccaaactggtcagcccttaaatatgcaggtcttcaaggtaagcaaatrgaaggatagctgagctttgtgtttttcttttagggtcatctggtgtcttctttacagacatagatataggctcagagtatgcctacttgggttgcaatta

SEQ ID NO: 349210 - DNA, 201 bp, Homo sapiens
tcttcacttcccagtaggggcggccgggcagaggcgcccctcacctcccggacggggtcgcagccgggcagaggcgctcctcacatcccagacggggcggygggacaaaggcgctccccacatctcagacgatgggcggccgggcagagacgctcctcacttcctagatgggatggcggccgggaagaggtgctcctcact

SEQ ID NO: 349211 - DNA, 201 bp, Homo sapiens
atttttaaaagatgtatgtatgttatcagatttgagtaattatctacttcattttcactctgagttgttaaactacttctagttcactacaaagaccaaayttgtgtgtgctctttttctagcctttgtctttcttatagttaagtttggttctttgctaattctccttatctttctaatgaaatgattcttcttatcttt

SEQ ID NO: 349212 - DNA, 201 bp, Homo sapiens
tatgcctttgtaacttggctcaagccagtattgtcatacttatctccaactgtattaagcagtgttgtggactgggtagcccttgtgtgtgcctctaataygtattcaccccaaatcactagaatagagactagcagaatagggactagaggatataggaacaaattgatgctaccaataatacagcatgacatgtctctg

SEQ ID NO: 349213 - DNA, 201 bp, Homo sapiens
acattttaatatttgttttttatttcagtcatcaaatatttataggtatatattatatacagttacaattttcaatgaatacatacttgttggtgaacaargtagatgaggtttctactcataggtcttatttcctactgggaagatatatgcattcaacagatagcaaacaagataattttcagatagcgttaagtgctt

SEQ ID NO: 349214 - DNA, 201 bp, Homo sapiens
cctccttccttctttccttccttcttccctttcttttcttttcttgtatttatttatttatttatttatttttattgatcattcttgggtgtttctcgcaragggggatttggcagggtcataagacaatagtggagggaaggtcagcagataaacaagtgaacagaggtctctggttttcctaggcaaaggaccctgcgg

SEQ ID NO: 349215 - DNA, 201 bp, Homo sapiens
accggtaaatgtatccaaatgttataaatgagaatgtgccacctttttttgcagtaatggtgtgatcattttgttttagaagataatttgaagccgggtgyggtggctcacgcctgtaatcctagcactttgggaggccgaggcgggcggatcacgaggtcaggagatcgagactatcctggctaacatagtgaaaccccg

SEQ ID NO: 349216 - DNA, 201 bp, Homo sapiens
ctttattttattgtgcttttagcaatagcaaaaagaaatatgcttctaagattgttacatggcagaaaagaatgttcaaacttaatttacttaattttaarttacaaaatctaggattctacttgttagctaatagagtttcaagtattttattaatctttgtgcaaatgttgtgtttaacagtttggaaccaatctgatt

SEQ ID NO: 349217 - DNA, 201 bp, Homo sapiens
gctcacacacttggcggactgaggcaggaggatcacttcagcccaggagtttgagaccagcctggatatcataatgaagccccaccaccatatttgaaaaraaaagaaaagaaaatgatatttgtatagcacaataggttacatggagtaggctgcttgtgctagatccaactacttcagttagccccaggccccacccag

SEQ ID NO: 349218 - DNA, 201 bp, Homo sapiens
tcctaccttttccaactgccatcttcttttattccacaattcccattctacatcatagaattttttaaaattatgtgaggatgatagacaatggcaaaacygtgagaggaaaaaatctttacatgatatagtacacattcctatagagtaaggattttttaatagttttcataatatgttatatgattcattacaattgtt

SEQ ID NO: 349219 - DNA, 201 bp, Homo sapiens
atggaatctgacctactgtaggctctctgatgtttcatttactgtatataaaaattttagtttcagtgatttgcattagaggtctacagagtggctatgtrtcccttggggtatgcgctgatatatctattgggctacagaaagaaaatataacatcccttccttccttcctccctccctccctccctccctccctccctc

SEQ ID NO: 349220 - DNA, 201 bp, Homo sapiens
tccagcaggctgctaataagagcctcagattaaatcagatttaactactttgttgacctgtctttcccttaaacaaaatgtatttccctccttataatacrgtatatctagtcatgttggaatccaggaatccattttggatctgctcctttcatcctcagtatccaatcagtcattatgatttgtggattcttttccatg

SEQ ID NO: 349221 - DNA, 201 bp, Homo sapiens
catcagatctgtttctaaaacactgttttccttatgtccttccattattcaacagtgagaccaacatttaccgagcattatctgctgtccatgaaaatgcyagggcatatgtagaatattattttatagtcttgtttcccaacatctttatgttttaagctttcttccccagagaagattgtgagccccttgagggaaaga

SEQ ID NO: 349222 - DNA, 201 bp, Homo sapiens
aaatcaaggacataataataaatattaccatgttatatataatatttacattgttttctaacctgaaccattttcctccttccttcatcatctttcagttrtaataaatggaaatcgggtttatagattactagataaagttgcacatttagatttacctctaaaaacacacctagtctgtacacataccaaattaacttt

SEQ ID NO: 349223 - DNA, 201 bp, Homo sapiens
tattttatagtcttgtttcccaacatctttatgttttaagctttcttccccagagaagattgtgagccccttgagggaaagaactttatcttaaatttatrtagtttttagtttctcaaaacatgctacatacctagtaaaattcatgcaattctaaatagataaataaatttagtctaaatgaagtcagtgatgccaata

SEQ ID NO: 349224 - DNA, 201 bp, Homo sapiens
ataataaatggaaatcgggtttatagattactagataaagttgcacatttagatttacctctaaaaacacacctagtctgtacacataccaaattaacttwcaaatttattttaattacaggttggtaaatggttgcaggctatgttcttctacctgaagcagatcccacgttaccttatcccatgttactttgatgctat

SEQ ID NO: 349225 - DNA, 201 bp, Homo sapiens
tgatgccaatataatttttaaggtagcatcattgaaataataaaatctgggaaattctaatgcttctaattgaagactagaaggattaagaaaaaaaaaawatatatatatatacctcattttgatacttcacttagttctaagtacctcctgttaaattttaacaattccttccaaagcatgctttattcttattatctc

SEQ ID NO: 349226 - DNA, 201 bp, Homo sapiens
gcttgactcacaaactagctctggggagggaggctgatatggagagaacaaagcacagatgacaatgattttctaaattgagccagaactaaatgggaaaraaagatacacattcaagaggatatgtgttcacataaaatggcagtcatgtaaaatgaaattacctgagcatctattatagaagcacaagaaaatacagtt

SEQ ID NO: 349227 - DNA, 201 bp, Homo sapiens
ggagagaacaaagcacagatgacaatgattttctaaattgagccagaactaaatgggaaagaaagatacacattcaagaggatatgtgttcacataaaatrgcagtcatgtaaaatgaaattacctgagcatctattatagaagcacaagaaaatacagtttcagctgtattcaggtgtggtcagttatacagtcttactg

SEQ ID NO: 349228 - DNA, 201 bp, Homo sapiens
attaatgccaaattgtattatagaaaaagtacatttagttgcttagagaagaaattcttagtttcactatagagcattctcttagtgtcttttactgaaawcttttgttcacagaaaatatccctgttagtatatcctcttttattactttgttggatgtttaataagtcaaggattataaattataaataatatatatta

SEQ ID NO: 349229 - DNA, 201 bp, Homo sapiens
ttgtaacttggctcaagccagtattgtcatacttatctccaactgtattaagcagtgttgtggactgggtagcccttgtgtgtgcctctaatacgtattcmccccaaatcactagaatagagactagcagaatagggactagaggatataggaacaaattgatgctaccaataatacagcatgacatgtctctgaattttc

SEQ ID NO: 349230 - DNA, 201 bp, Homo sapiens
ttcagacttgaacaaggtcagtagcaagttgttttgatttgctcatttgcgtcttttaaacttttaattcattggcagtcctgttaaatgttttaaagctytaagataaatattatttccaagggtctaaaacttgatttgtgcaaagatggtgctgtgttctccatatatcactaattaatgttgatttgaattaaaaat

SEQ ID NO: 349231 - DNA, 201 bp, Homo sapiens
ttaagaaacaggctttaaaaccagatttcctgggttacattgactagttttataacctgaagtaaatgctctatggcttacttttcccctgcaaaatggtrcctaccacagggattatggttaggattaatgaattaatacatgtgaacagctcattagacgacacctaattcatactaagtaattggaaattgttagcct

SEQ ID NO: 349232 - DNA, 201 bp, Homo sapiens
catgaaaactttagatccagagtaagttggaatataagtattaagaatgttatcatatttaatccaaatacattgacatcaaccataatttttttttttttgccagggcaacaaaaggagatgccatctctacaaaaataaaagttaaaaaaaaaattagttgggagagattgtgtacacctgtagtcctagctactcagg

SEQ ID NO: 349233 - DNA, 201 bp, Homo sapiens; identical to SEQ ID NO: 74263

SEQ ID NO: 349234 - DNA, 201 bp, Homo sapiens; identical to SEQ ID NO: 74267

SEQ ID NO: 349235 - DNA, 201 bp, Homo sapiens; identical to SEQ ID NO: 74268

SEQ ID NO: 349236 - DNA, 201 bp, Homo sapiens; identical to SEQ ID NO: 74270

SEQ ID NO: 349237 - DNA, 201 bp, Homo sapiens
tgtgttttttttgttaggcttacctcatttttcttctggtattttccgctgctggggaagggatacttttattgcacttagaggtatactgctgattactrgacgctatgtagaagccaggtaggagagcctctaaagtgttgtactgcgagtttatgtctgaatgtcttttacatgctcttcaaactttccttcttgtcc

SEQ ID NO: 349238 - DNA, 201 bp, Homo sapiens
ccagaactttgtcatcattcctaattgaagcaggaactcctcattatctccttccccagcccctggaaccactatcctactttctgcctctataaattcarttatcctagggacctcatataagcggaatcatacagtctttgcccttttgtacctggcttatttcacttagcataattattttttatcaatacataagag

SEQ ID NO: 349239 - DNA, 201 bp, Homo sapiens; identical to SEQ ID NO: 74310

SEQ ID NO: 349240 - DNA, 201 bp, Homo sapiens
acaatggttgaactagttaacagtccccccaacagtgtaaaagtgttcctatttctccacatcctctccagcacctgttgtttcctgactttttaatgatygccattctaactggtgtgagatggtatctcattgtggttttgatttgcatttctctgatggccagtgatgatgagcattttttcatgtgtctgttggctg

SEQ ID NO: 349241 - DNA, 201 bp, Homo sapiens
cacctcctttgtgaagtctttccctaatttttcactgtctgcttcctttgatttccaattacacaatgagcacagaactattaagtgctgaataatgaagyagtgtctaaaggcttgttagtcttacagtgtcagactagggtttaaaatctgtgagaattgatgagggcaggtgactcacacttgtaatctcagtgcttt

SEQ ID NO: 349242 - DNA, 201 bp, Homo sapiens
tctttttcaaacatttcttggcagtgttcttttttttttttttttttgagacagagtttcactcttgtcgcctaggctaaagtgcagtggtgtaatctccrctcaccacaacctccgcttcctgggttcaagcgattctcctgcctcagcctcccgagtagctgggattacaggcatgtgccaccacacccagctaattct

SEQ ID NO: 349243 - DNA, 201 bp, Homo sapiens
gtatttttaaaattatattgagttgaaaatccatccttttatactgatttgaagtaccaccataatacttcatagtgtatggtaatatacaaaatatacakctgttatctgtgctcttccactgatccgtctcttttattctatcaatactaaagattattagtttatactgatggcatagctttttctctttttcaaaca

SEQ ID NO: 349244 - DNA, 201 bp, Homo sapiens
attttgtttttttgttcgtgtttttataagtcatttcaaagtctctttagaataagccagacacaaattaattagttaatataaaatcaagttcaatggargcaatcctgtaccagttcttaattttattacaaacaagttccagaaaaagagtgaaaatttccccaaaaaccatttatttcctttttaatttttaagtta

SEQ ID NO: 349245 - DNA, 201 bp, Homo sapiens
aaacaagttccagaaaaagagtgaaaatttccccaaaaaccatttatttcctttttaatttttaagttattatctaaggaatatggttgatgaaaagggaraaaaagtattaaacctgtgtgcttcttttagagaattcaaagaaagtcaggttgttaataagacttcaggaagcaaactttgaaagcaatcttgaaaaag

SEQ ID NO: 349246 - DNA, 201 bp, Homo sapiens
agagtgaaaatttccccaaaaaccatttatttcctttttaatttttaagttattatctaaggaatatggttgatgaaaagggaaaaaaagtattaaacctktgtgcttcttttagagaattcaaagaaagtcaggttgttaataagacttcaggaagcaaactttgaaagcaatcttgaaaaagaactcctgaggttagaa

SEQ ID NO: 349247 - DNA, 201 bp, Homo sapiens
tattatctaaggaatatggttgatgaaaagggaaaaaaagtattaaacctgtgtgcttcttttagagaattcaaagaaagtcaggttgttaataagacttyaggaagcaaactttgaaagcaatcttgaaaaagaactcctgaggttagaatatttggtagcaccggggaggaaaacgggttccactaaagtccttaaagt

SEQ ID NO: 349248 - DNA, 201 bp, Homo sapiens; identical to SEQ ID NO: 74258

SEQ ID NO: 349249 - DNA, 201 bp, Homo sapiens
ccatgttttggccaggctggacattgtggttttaatttgcatttccctaatggctaatggtatggaatatcttttcatgtgctcattggccatccatcttycctctttgctgaaatgtcggttcacgtattttgcacattgtctctttctttattattttttagagacagggtcccactctgtcactgagactggatggca

SEQ ID NO: 349250 - DNA, 201 bp, Homo sapiens
ttacaccagttccaagctatttctcagtgtttaattctatttttctccctttctatatttgtaattcccttttccaacaatgaataacctacttcccacaytgggccatcaccaccacatagagtctgctcacccagcttgggcctgctaccccacagtaagccacctctatgtgtggagccctcctggcaccacttggat

SEQ ID NO: 349251 - DNA, 201 bp, Homo sapiens
agatgaggcttcgccatgttttggccaggctggacattgtggttttaatttgcatttccctaatggctaatggtatggaatatcttttcatgtgctcattkgccatccatcttccctctttgctgaaatgtcggttcacgtattttgcacattgtctctttctttattattttttagagacagggtcccactctgtcactg

SEQ ID NO: 349252 - DNA, 201 bp, Homo sapiens
acagtttgatcctttctggtcttgattttaagcttgttagacctgaccagaatagcatttggtctaggaataattattctccattagtgaatcaagacccrtctgtgttccctaccctgtatttcgaaaattatgacgttttcaaatctggctggtgggaacaagcaagtgttcctgacgctgtatgagtgccacatactg

SEQ ID NO: 349253 - DNA, 201 bp, Homo sapiens
tagaccactacaaactgtgtgtggtgggggggtgggtctgagatggagtcttgctctgtcccccagctggagtgcagtggcgcaatctcagctcactgcamtctctgcctcctgggttcaaacgattcttgtacctcagcctcccaagtagctggactacaggtgcatgccaccacaactagctaattttttgtatttgtt

SEQ ID NO: 349254 - DNA, 201 bp, Homo sapiens
agctgctcaagaggctaaggcaggatgatcgcttgagcccaggagattgaggctgcactgagctctgatctcgccactgcaccccagcctggtgacagagygagaccctgtctccaaaggggttaaaataaaagtgtgttctgccttcagtgtagctgtggcaacttccttttggagctgagtaactttcttgaggtgaca

SEQ ID NO: 349255 - DNA, 201 bp, Homo sapiens
aagaactttatcttaaatttatatagtttttagtttctcaaaacatgctacatacctagtaaaattcatgcaattctaaatagataaataaatttagtctwaatgaagtcagtgatgccaatataatttttaaggtagcatcattgaaataataaaatctgggaaattctaatgcttctaattgaagactagaaggattaa

SEQ ID NO: 349256 - DNA, 201 bp, Homo sapiens
cattaaaattaatgcatattcttggtcaacaatgcttttctcttctttctctgtatctctgataaatttactcatgctattggagtaaaagttctgtgttwatttatggccccagaagcaaacaatgggtatcagatgtacttaaagaaagctattatgaatctgctgaagaatgagttacataaatttaagtgtgtgctg

SEQ ID NO: 349257 - DNA, 201 bp, Homo sapiens
tttatcattgtgattaagaaacaggctttaaaaccagatttcctgggttacattgactagttttataacctgaagtaaatgctctatggcttacttttccmctgcaaaatggtacctaccacagggattatggttaggattaatgaattaatacatgtgaacagctcattagacgacacctaattcatactaagtaattgg

SEQ ID NO: 349258 - DNA, 201 bp, Homo sapiens
tggggtattttccaaagtcattatggatcctcaaatttgagagtttccctttagctcataatttacccccattacctgtgtatgcagatgagtaaaaatarcaatgccaatttaaaattcagatgctggataacaagctaggttcgtttattagctgaagagatcactctgatagaaactgtagaagctcactagatttgt

SEQ ID NO: 349259 - DNA, 201 bp, Homo sapiens
tgtccggcaaagaattttagactctctgctgttttaaatctatactttagtctaaaaataaactacaaggaagtaaaatagagaaggtatgtgttcttctrtgcctggctagctgttttcacgttgtcaaaaagagtaccaaacctactactataaattatagtagaatgaaaagtgtaaaagtacacaaaggtagctttg

SEQ ID NO: 349260 - DNA, 201 bp, Homo sapiens
catttctgatccacttaattctgttgttttaggaatattattttagcatttgcgggtaccctgaggcatggtctcattcctaatctactgggtgaaggaawttatgccagatacaattgtcgggatgctgtgtggtggtggctgcagtgtatccaggattactgtaaaatggttccaaatggtctagacattctcaagtgc

SEQ ID NO: 349261 - DNA, 201 bp, Homo sapiens; identical to SEQ ID NO: 74325

SEQ ID NO: 349262 - DNA, 201 bp, Homo sapiens
tcttaatctgagaaaaatcctggtttcttgaataaacaagctgaggggcagtgcaaccttagagaagagaaaggaagggacttggagagaaatatgaaggyagagagcatgtgatttcctaggcaattaactttgactttttattcctttagtcatcctctgataagtatttttagtatacaataactagcataaaaagtt

SEQ ID NO: 349263 - DNA, 201 bp, Homo sapiens
gggagaaagtgacagagctagaaacagaggaatcccagccacaccaaggtagtgtaaatgttataatgctgtgtaattatacccttctttaagaaagcacwtacttgtggaatcttttattctgttaactatgaactctttacattaagtcaatcaaaatttccctgccttcttcccttcatctccccattatacatttac

SEQ ID NO: 349264 - DNA, 201 bp, Homo sapiens
atttgcaggtgcctgccttgtaccccaggtttagagtaactgttctatagtaatggagttcataggtttgtgtgtattattatgattaacatattactttrttgtgttttttttgttaggcttacctcatttttcttctggtattttccgctgctggggaagggatacttttattgcacttagaggtatactgctgattac

SEQ ID NO: 349265 - DNA, 201 bp, Homo sapiens
catactatgactactttctacatgaaaatataaagaaatagggcaagagagaaaacgcattcaaaatatagtcaccaaaagtgactggtttttgtcttcartttttaagtgtttgttttcatttctgatccacttaattctgttgttttaggaatattattttagcatttgcgggtaccctgaggcatggtctcattccta

SEQ ID NO: 349266 - DNA, 201 bp, Homo sapiens
gataaaatgggagaaagtgacagagctagaaacagaggaatcccagccacaccaaggtagtgtaaatgttataatgctgtgtaattatacccttctttaaraaagcacttacttgtggaatcttttattctgttaactatgaactctttacattaagtcaatcaaaatttccctgccttcttcccttcatctccccattat

SEQ ID NO: 349267 - DNA, 201 bp, Homo sapiens
tcagttgagcccaggaggtctaggctgcaatgagccatgattgtgccactgctctccagcctgggcaacagagcaagaccctgtctctagaaaaaaaaaaagagatctttgagaatttataatagacataattatagcacctttcttacagattacttgagtaaaacacaatagtttttgacacatagtgattgataagtg

SEQ ID NO: 349268 - DNA, 201 bp, Homo sapiens
tgccataaattataaacacttaaaatcttaatggcttttcacaaataaaatttatttcttgcttgtagtcgtagacgcatgctcagtaagcagccttctayatactgattcagggaagcaggtttcttccagcttgaggatctgtcagtttccatggcttctggggcctctccaggaggcaagcagagagggaaagagagc

SEQ ID NO: 349269 - DNA, 201 bp, Homo sapiens
tattcagtgtactataatatatactataatcaataatttatgttttgagattatacacagatattagatataccagtattatctatgattaaacttttacraaaaagttatcttactatatatgtccttttgcaacttgttttattcaatcattttgttttggagatttatcttttttatataaatttaaggggtacaagg

SEQ ID NO: 349270 - DNA, 201 bp, Homo sapiens
accccaaggccacctactactgccaggttgggtgtggaagttcatactccccagattcccctcgtggtgcccgcaggtaccacgctgctgaggaaggggarcactgccttaagccatctgctacccccaggtaggggataggagtccaggcttccactcagtctccactgacattccagggagaaaggacatccatggtgt

SEQ ID NO: 349271 - DNA, 201 bp, Homo sapiens
tacttctcaggtacgatataaaacaaataaaaactaaaaaattaagttgataaacaaatacaaatagaagtgtgatatttgctcctagcatcccaagggartgttttgcctattccatacttgtaaaaaataggactgtattcagatttgcagataggttttttggggttcattttaaactgattggggatgtcttccttt

SEQ ID NO: 349272 - DNA, 201 bp, Homo sapiens
accaggcatttatgtgtgttttttatggctagctgattcttcatgtttctattttttccaactcttgacattctgtgtttttttaaatcaaatttattttrctattctcttttctatattttcccccaattttaaaaaataaacccaatcttgtaattatcaagaggtcatgtaagggtccctataaattataaaacaaaa

SEQ ID NO: 349273 - DNA, 201 bp, Homo sapiens
gttaaatttgaataaattactcctaaaaattaaccactttttaattaacattttcagagttagtcttgatccacatgcacaagtcgctgttggaattcttygaaatcatctgacacaattcagtcctcactttaaatctggcagcctagctgttgacaatgcagatcctatattaaaaattccttttgcttcgtaagtatg

SEQ ID NO: 349274 - DNA, 201 bp, Homo sapiens
ccagtttccagaatgtatcctacagatgattctgctcctttgcctgctggcacactggtaaagatatttcttaaaatgtttttttgtttttttttttttttctgaaaaatgacttttagtttctaatgtaaaaataagggtaattaagaatccaaatcttacgaattattcaaatgtcagtattgatttggcacctgctgg

SEQ ID NO: 349275 - DNA, 201 bp, Homo sapiens
cccagtttccagaatgtatcctacagatgattctgctcctttgcctgctggcacactggtaaagatatttcttaaaatgtttttttgtttttttttttttttctgaaaaatgacttttagtttctaatgtaaaaataagggtaattaagaatccaaatcttacgaattattcaaatgtcagtattgatttggcacctgctg

SEQ ID NO: 349276 - DNA, 201 bp, Homo sapiens
cttaattctgttgttttaggaatattattttagcatttgcgggtaccctgaggcatggtctcattcctaatctactgggtgaaggaatttatgccagatasaattgtcgggatgctgtgtggtggtggctgcagtgtatccaggattactgtaaaatggttccaaatggtctagacattctcaagtgcccagtttccagaa

SEQ ID NO: 349277 - DNA, 201 bp, Homo sapiens
gctggtctcaaactcctgacctcaggtgttccgcccgcctcggcctcccaaaatgctgagattacaggtgtgagccactatgcccagccagtttgttttcytatatgtttgttttactcttggtttctgctatttaaaataattaagttcttgtttaatagttacttcgattttgaaataccatagacttcaaaagtagaa

SEQ ID NO: 349278 - DNA, 201 bp, Homo sapiens
tctctctctctctctttctctctctctttctctctctctctctttccctccctccctccctccctctctccttccttccttcctttctttctttccttctttctttcttttctttcttttttttgagactgagtctcgctctgccatccaggctggagtgccgtggcgcaatctccgctcactgcaagctccgcctccctg

SEQ ID NO: 349279 - DNA, 201 bp, Homo sapiens
aaaaatctctaatcataatggcaaagttaggtaaagaaataggtacattctaaaatttggtgtttctgcatgtacctagaaaccaagcctccagttctacrgtgaaaacttcataatacctaagaactcagtattcttcatttgaaaatttgacattattaagccaggtgctgtggcttgcacctgtaatcccagctgctt

SEQ ID NO: 349280 - DNA, 201 bp, Homo sapiens
ctctctctctctctctttctctctctctttctctctctctctctttccctccctccctccctccctctctccttccttccttcctttctttctttccttctttctttcttttctttcttttttttgagactgagtctcgctctgccatccaggctggagtgccgtggcgcaatctccgctcactgcaagctccgcctccct

SEQ ID NO: 349281 - DNA, 201 bp, Homo sapiens
ttcttacaaaagattagataggcattcctggactaggatggtagttcagtggtgatagggaactagtttctctcatgttgctctgcagtctccaacacttwgcttcaaattcttagtcagatatggctattccagctcctgctaccacattctccccagtggaaatgaggaaagggcaggcatgtctttttgggtatgata

SEQ ID NO: 349282 - DNA, 201 bp, Homo sapiens
tctctctctctctctctttctctctctctttctctctctctctctttccctccctccctccctccctctctccttccttccttcctttctttctttccttctttctttcttttctttcttttttttgagactgagtctcgctctgccatccaggctggagtgccgtggcgcaatctccgctcactgcaagctccgcctccc

SEQ ID NO: 349283 - DNA, 201 bp, Homo sapiens
ttctctctctctctctctctttctctctctctttctctctctctctctttccctccctccctccctccctctctccttccttccttcctttctttctttccttctttctttcttttctttcttttttttgagactgagtctcgctctgccatccaggctggagtgccgtggcgcaatctccgctcactgcaagctccgcct

SEQ ID NO: 349284 - DNA, 201 bp, Homo sapiens
cttccttgagatgcaaatagaatattctttgatttctaggaggtaattttatggtccattgcagagctaaagtatcaagtaaatgtattttaagtaacatmttaaaatgtagtaatttcatgcaacctgattataggttgctgtttatttgcgtgcccttgttattactgataggttttagtatacttatatttcattaaa

SEQ ID NO: 349285 - DNA, 201 bp, Homo sapiens
tgcatataccagtatttatttaaccattcatccaaaccattcatccattgaaggacatttgggttgttttcatgttttggctaatacgagtaaagctactrtgaacattcatgtacaagtttttgtgtgacacataagttttcattttttctgggataaatgtccaagaatgggattggttcatatagtaagtatatgttt

SEQ ID NO: 349286 - DNA, 201 bp, Homo sapiens
atcaaaaaaaaagtacaaaaaattagatgggcatggtggcacatgcctgtagtcttggctactcctgaagctgaggtgggaggatcgcttgagcccagcasgcagtggttacactgagtccagatcccaccactgcactctactgggtgatagagtgagaccctatctcaaaaaaaaagaaatttttggcaacttatattt

SEQ ID NO: 349287 - DNA, 201 bp, Homo sapiens
agtttgaaagataattttggtggtttcatttataactataataatcgccatgaactgcatgcttactattgctaggcattgtggtaactactttacctatrttattaccatttaacactccccaaaacattgagaatgagtgatattgtttccattttttttaattattatactttaaattctagggtacaggtgcacaac

SEQ ID NO: 349288 - DNA, 201 bp, Homo sapiens
tgtcggatttgggggaaaataagaaaaatgtaatttctaacagaggtaacacccattatgtctcaaacaggatcagccattgtttgaagtcatacaggaarcaatgcaaaaacacatgcagggcatacagttccgagaaaggaatgctggtccccagatagatcgaaacatgaaggacgaaggtacagaactttaactaaa

SEQ ID NO: 349289 - DNA, 201 bp, Homo sapiens
gttgttgtcagtttatttcatttcaataaatgaggctgtgataaatatccttatacataatctctgtttacatcactgatacttttctcaaaaaatctatrtaaaattcctagatcaaaaaatataaacattcttaatatattaatgccaaattgtattatagaaaaagtacatttagttgcttagagaagaaattcttag

SEQ ID NO: 349290 - DNA, 201 bp, Homo sapiens
atgctgagattacaggtgtgagccactatgcccagccagtttgttttcctatatgtttgttttactcttggtttctgctatttaaaataattaagttcttrtttaatagttacttcgattttgaaataccatagacttcaaaagtagaatctggagctatgagggaccttaaaaatcacccagtccaatctcaaatgaaaa

SEQ ID NO: 349291 - DNA, 201 bp, Homo sapiens
ctcatcagttattattgcccattattaattgaaagttatattcgtgtttaaaatttatatgtattatatttctaatagacttgaccatagtcagtattttygtattctaataattataaagaaggtttaaagtctgctttaaaccaaccaaaatgtttctttcacagtacagttttaactgtaatgtgcttatttgttttc

SEQ ID NO: 349292 - DNA, 201 bp, Homo sapiens
tgaagtttgaaagcactgctctaaaagataaaactttcagcaaaagggcatttatacgataccttgttttgatgccatcaggaaaataactgaagtttgcrtctttacatgccaaaattttatttttgatacttttaaaactgaagtttttaggtgggcatctgaaatgaattgcatttttgttaatccgatatatagtaa

SEQ ID NO: 349293 - DNA, 201 bp, Homo sapiens
agtcaaattctttcacttttcgatctacattttaatatttgttttttatttcagtcatcaaatatttataggtatatattatatacagttacaattttcartgaatacatacttgttggtgaacaaggtagatgaggtttctactcataggtcttatttcctactgggaagatatatgcattcaacagatagcaaacaaga

SEQ ID NO: 349294 - DNA, 201 bp, Homo sapiens
cctgttctaataattgacaaattagaaatcacttagaagatatggaatctattagttgtgtactcttagaggtcaaaaagttaatacaaacatttccatayatagtgctagagattttatagttttgactttttcacaaagacagaccgcatatatttttggatataccgattcagactcacctttgaatctacctgtatt

SEQ ID NO: 349295 - DNA, 201 bp, Homo sapiens
catctggctccttactttgtaagtgacataaagcataggttgggcaactagagtgcagtaaaagcctttgcatatctttacttagagtcttttttaaaaatatctttgcaaagtaacatcaatgcctcaattatgtatttattttttttctttgagatggagtcttgttctgtcacccaggctggagtgcagtggcacgat

SEQ ID NO: 349296 - DNA, 201 bp, Homo sapiens
gtaccttataggttaaatgagatcacaaaagaaaaggagcaatgttgtgtttctctagctgcaggtaaggaattatgtacaaggttaaaatatgtaaatcratagtattcgcggaagaaaagttataggaaaatgattattttttaaaagcttgtaatgctactcaagattttattttaccacttagtacatttcatagat

SEQ ID NO: 349297 - DNA, 201 bp, Homo sapiens
ttttgttttgttttttcccttagaaatgagaaaagtggtggaggttacatagttgtggaccccattttacgtgttggtgctgataatcatgtgctaccctwggactgtgttactcttcagacatttttagctaagtgtttgggaccttttgatgaatgggaaagcagacttagggttgcaaaagaatcaggtaatgtcagc

SEQ ID NO: 349298 - DNA, 201 bp, Homo sapiens
tttgtatgttcacttaataggatcataaaatttcaaaggggtgaaaatctttgaagtcactaagttctagtccttcatattacaagtcaggttatctttarcattagctaatttatttcaacaaaactaaaaatgttataacctttttatgccttccatagtgaaggcattgctagttctttgtctgagtcttgtagaagt

SEQ ID NO: 349299 - DNA, 201 bp, Homo sapiens
aaagcaatcttgaaaaagaactcctgaggttagaatatttggtagcaccggggaggaaaacgggttccactaaagtccttaaagtgtttaaaaaaaaaaaaggtacatgtatacatgtataacaaacctgcaagttgtgcacatgtaccctagaacttaaagtataataaaatatatatataaaaaaataaaaaaagaata

SEQ ID NO: 349300 - DNA, 201 bp, Homo sapiens
ctgcatttctccatctgctctagcaaggggccagcagcaattgaagaatgctgtaattggtttcataaaagaatggaggaattaaattcagagaagcatcractcattaactatcatcaggaacaggttttacttatttttgaactgctgcttttccttgcatcttactactatttttttgttgtcttgaggatggtgatg

SEQ ID NO: 349301 - DNA, 201 bp, Homo sapiens
ctgtcttcaaccagtttttaaactggttgaattatgtttttcaaggtcagcttctaccagtttgttttctttctctctctctctctctctttctctctctytttctctctctctctctttccctccctccctccctccctctctccttccttccttcctttctttctttccttctttctttcttttctttcttttttttga

SEQ ID NO: 349302 - DNA, 201 bp, Homo sapiens
tatatatttcaagtcctatgatgaaaaattgatttgatttggagggatttagtgaatattagttaagctggtagaacattgtttagttccaaaaaatgacrgctttattttattgtgcttttagcaatagcaaaaagaaatatgcttctaagattgttacatggcagaaaagaatgttcaaacttaatttacttaatttta

SEQ ID NO: 349303 - DNA, 201 bp, Homo sapiens
acatgcagggcatacagttccgagaaaggaatgctggtccccagatagatcgaaacatgaaggacgaaggtacagaactttaactaaaatagtacaaattyatcaaggtgatgaaattaaaccttgcaattgttcacttagtaaatatttgtgtgccaaacctcacgatataatgattaaaaagattaacatagttcctga

SEQ ID NO: 349304 - DNA, 201 bp, Homo sapiens
tctagacttaaaatggttttttttgtttttgttttttgttttttgtttttgagacagagtctcgcactgtcgtccgggctggagtgcagcggcacagtctyggctcactgcaacctccgactccgcctcccgggttgaagccattctgctgcctcagcctcctgagtagctgagattacaggcgcccgccaccacgcccag

SEQ ID NO: 349305 - DNA, 201 bp, Homo sapiens
tttagcaaactgagtcatggaatctgacctactgtaggctctctgatgtttcatttactgtatataaaaattttagtttcagtgatttgcattagaggtcwacagagtggctatgtatcccttggggtatgcgctgatatatctattgggctacagaaagaaaatataacatcccttccttccttcctccctccctccctc

SEQ ID NO: 349306 - DNA, 201 bp, Homo sapiens
ataccataaccaaagaaaaaacttttcctgtaacagtatcatcgtaaaattgatgtccaatatagaaaaaaatgagtggtagatctttatattttatttcrcctctaaacttaacatagatacagtttcaatttaattatgagatactcctttgtgtctcctttttccttcagctgctaatagtaaatggatccaggaaca

SEQ ID NO: 349307 - DNA, 201 bp, Homo sapiens
gtttttatcatttcaaatgctaaatacatcatcataagctattaaaatcacttttaatattactatcacccaaataacgtactttgtacccattaagtaatgtctattaaaatagcttctgatactgtattaagctgagaagttattttcttattctaatttttttttttgaaagagagagcctcactctgttgcccagcc

SEQ ID NO: 349308 - DNA, 201 bp, Homo sapiens
ctaaggtatgtttttttaaaaataacctaacttgggcaaaagtagaaatgcattggctctcaggattacaagacagctttagtaactaaaccatgaagcayagggatataggcagtagtgtgttggaggtgcttttgctggctcacaagagctgattgtgcacatcccttcccacttccacgttcaatgttgtcgtgttgg

SEQ ID NO: 349309 - DNA, 201 bp, Homo sapiens
agtttttatcatttcaaatgctaaatacatcatcataagctattaaaatcacttttaatattactatcacccaaataacgtactttgtacccattaagtaatgtctattaaaatagcttctgatactgtattaagctgagaagttattttcttattctaatttttttttttgaaagagagagcctcactctgttgcccagc

SEQ ID NO: 349310 - DNA, 201 bp, Homo sapiens
agaaatgcattggctctcaggattacaagacagctttagtaactaaaccatgaagcacagggatataggcagtagtgtgttggaggtgcttttgctggctyacaagagctgattgtgcacatcccttcccacttccacgttcaatgttgtcgtgttggtagcttaagattgcccatgtcgggattatttccaccagaaagt

SEQ ID NO: 349311 - DNA, 201 bp, Homo sapiens
tttaagtaacatgacaaactctcatgccatcctgctctatcccacctggaatgtgactcatccttttgtccagtgcatccatgctgtaaatactacctgtmcaccagttacttaatagcctgctcagttatcagataaaaaaacacaaaatatcaaaatatatatatatatagggtttcatactatctatagttttacaca

SEQ ID NO: 349312 - DNA, 201 bp, Homo sapiens
ttcaacctttgtgaaacacctttcattgggttcagttcaactgtgtggagtaggaaaattcccttccctgccaattctttcacctgccctaatggatgtaycttataggttaaatgagatcacaaaagaaaaggagcaatgttgtgtttctctagctgcaggtaaggaattatgtacaaggttaaaatatgtaaatcgata

SEQ ID NO: 349313 - DNA, 201 bp, Homo sapiens
ggaagcagatgtcaaggtatatccaacaaagcttgaataaatgggcatatctgtgttgaaactatatacagagtcacttcatacatgttcttaaaaaaccmaaccataaagaattgtcatagaactgaaaaggcttgtaggtggatagtaaatttattagcatcctttagtctgtgtagcatacaaaaacaaacttgaata

SEQ ID NO: 349314 - DNA, 201 bp, Homo sapiens
ttgggtatgatatgatatatattactgtgttcatattgcatcacaggaatttgtctcttgccatacctaccttaaaggagacctgcagcgtagtcttgagwttgtcagctatgtgtaaagttgaaccttgggaattttattactaaagaaagaaagggaggataaaactgagtacagcagcagtctctaccacagactgta

SEQ ID NO: 349315 - DNA, 201 bp, Homo sapiens
aaagttgaaccttgggaattttattactaaagaaagaaagggaggataaaactgagtacagcagcagtctctaccacagactgtatttctgagacatttgrgagattctgtgcaatgtaaaagaagtaaaccttgccacagccttacttgaaaagtgttgcaaatcgtaatatcctttctgtgaaacaagttttcttttat

SEQ ID NO: 349316 - DNA, 201 bp, Homo sapiens
cttggtgattgaaccaagacctgctccattatcttacacaaatgcctctgttatggaagctgtatcacaggtgctccactcctggtaggtgtggccaagarggagacattctctcctcccaactcccagcctggggttatagtttcatgctaagaggcacagtctatgagtgtttttaattctccctgccggccctgtctt

SEQ ID NO: 349317 - DNA, 201 bp, Homo sapiens
gggtccaggagtgcttatgaacttttcaggccaagaatggagctcctcaagccagtggcttggttgcatgtccatctgtggtgaacctagagctgttgatytttttctctcagtctgggaaaggggtctgcattagagaccactcaccacctggaccattctactaacacctgttttttccctccttccaggaaactatgc

SEQ ID NO: 349318 - DNA, 201 bp, Homo sapiens
ttccggcggctgggggggccagcgagcggaggggggggcctgtcccggaggtggcggcggcgccatcttggcgaaggggggatcaggaagtgcggaccgcggcggcggcggcggcggcggcggcggcggcggagcccggagcgcaggccggaggctcccggcccgccggccccggagcggagcggagcggaggatgcagca

SEQ ID NO: 349319 - DNA, 201 bp, Homo sapiens
tcttccttctctcctttggattctttttctggtgtaacctctaactctcctctttttgcctcagctggtagcagttctgccactcccctgcctgttccctrtggatatgtccatttgccctgggttgttgcttttcctggtaatgatagtgatgtgatgtgcgagggctacccccatttattctaagcagtaacagttgca

SEQ ID NO: 349320 - DNA, 201 bp, Homo sapiens
ccctactgaactctgcttttttcacttcagtgtcattgtgatgaggtgatcccttcctcagccgattctggagtttgaaaagcaagcttggaggactgttstgggtccagggagaacttgaagtctagaacttgtataggcagtgcaggagatgaggagtcccccttcgctgttagccaagtttggctgtgctaggtttcc

SEQ ID NO: 349321 - DNA, 201 bp, Homo sapiens
ggagaccctgcatcggccctgggattggtccatcaggagactcattcccacagccacgtggcccataaggcttagagaactagttattggtgtggggcccraactaagagctcatccatgcacttatccagatcggagtggggaaggatttgatgtctctgtgctcccctacctgtagctattgcagcatctgaagaggat

SEQ ID NO: 349322 - DNA, 201 bp, Homo sapiens
cacagccacgtggcccataaggcttagagaactagttattggtgtggggcccgaactaagagctcatccatgcacttatccagatcggagtggggaaggatttgatgtctctgtgctcccctacctgtagctattgcagcatctgaagaggatcatctccgacctgtgtaaactctataacctccctcagcatccagatgt

SEQ ID NO: 349323 - DNA, 201 bp, Homo sapiens
gccctccccaatatcctcttatctctgccactggagacgtcttcagggattggggcaggacagggagggtgggcctgaaccttcacctcactgaccattcyatttctttgcaggctggtacacacccccaaaagaagacggctaaccctggagtatcacccttcctccctccccaggcaccactggaccaattacctttga

SEQ ID NO: 349324 - DNA, 201 bp, Homo sapiens; identical to SEQ ID NO: 74481

SEQ ID NO: 349325 - DNA, 201 bp, Homo sapiens
actcaaccacccattaacacagcacctgccccagttctcccaggagggactggcggtggctaacattcacaacctcttccagaaacacaccaaaatgatcrtatcaccgataaacttggtgctacccccttcttgaccaccttttgaaaaagctcatctaactctcccatcatctcaggttgggcacatcattcccccttc

SEQ ID NO: 349326 - DNA, 201 bp, Homo sapiens
ggaagctccatctggacctgcttgccttgtccttcccttcacccagggctggagcagtgcctactccatagagtcagtgatcatgcagatcagtgccacaytggtgaaggggaaagcacgagtgcagtttggagccaacaaagtaaggatcctggtcctggggctggtggggctgggtggagccaagtacacttggggcca

SEQ ID NO: 349327 - DNA, 201 bp, Homo sapiens
tactcctggcagctgccaagaccactgcgacaaggtgttagccatttaggcctaggaaagggaatggggaccacccgagtcagcactccttccatgactcygtggaggaagcccatgctgtccttcccccaacctcgtccagacccatggggtctgaaaagcgcgaaaggcctgatattaactaacacttgtacataacac

SEQ ID NO: 349328 - DNA, 201 bp, Homo sapiens
gaaaaggaagactatgggattatgcctccaagggacctcgaaggtggagggtacttagtgttttactagaccaccgtgctgggagctgggactctggggtmtctgggtgacagcctgcagaaggtgaggggcagtaaggccacagctagccatggcctgatctggtggcttcctctccccagtctcaatacagtctgacaa

SEQ ID NO: 349329 - DNA, 201 bp, Homo sapiens
gcttccggcggctgggggggccagcgagcggaggggggggcctgtcccggaggtggcggcggcgccatcttggcgaaggggggatcaggaagtgcggaccgcggcggcggcggcggcggcggcggcggcggcggagcccggagcgcaggccggaggctcccggcccgccggccccggagcggagcggagcggaggatgcag

SEQ ID NO: 349330 - DNA, 201 bp, Homo sapiens
ctgtatgattggaatgtcaaactcctcaagtgagtggggactctgggattggagaggaagttgaggaggagtgtgagtggggctactgtggtgggatctcyagggcagccccatccagcattttcattcagggtcccggagcgggtgtgggcagtggtttcgtggtctgctgccagccagggcaggggagcccttatgaag

SEQ ID NO: 349331 - DNA, 201 bp, Homo sapiens
aggacttttgggaggtttcgggtctggaaaaggaagactatgggattatgcctccaagggacctcgaaggtggagggtacttagtgttttactagaccacmgtgctgggagctgggactctggggtctctgggtgacagcctgcagaaggtgaggggcagtaaggccacagctagccatggcctgatctggtggcttcctc

SEQ ID NO: 349332 - DNA, 201 bp, Homo sapiens
cttccggcggctgggggggccagcgagcggaggggggggcctgtcccggaggtggcggcggcgccatcttggcgaaggggggatcaggaagtgcggaccgcggcggcggcggcggcggcggcggcggcggcggagcccggagcgcaggccggaggctcccggcccgccggccccggagcggagcggagcggaggatgcagc

SEQ ID NO: 349333 - DNA, 201 bp, Homo sapiens
taaagtaagacttttcttttccagtctctccctctggcctaggctgcccagtctgcctgacagtcctgtggaggatgctggcctccctcccctgattgtcrtctctctctctctcaggataactttccctttgacccaccatttgtcagggttgtgtctccagtcctctctggagggtgagtggctggcatgcggaagagg

SEQ ID NO: 349334 - DNA, 201 bp, Homo sapiens
cttggttgcatgtccatctgtggtgaacctagagctgttgatctttttctctcagtctgggaaaggggtctgcattagagaccactcaccacctggaccaytctactaacacctgttttttccctccttccaggaaactatgcagtcgaactcgtgaatgacagtctgtatgattggaatgtcaaactcctcaagtgagtg

SEQ ID NO: 349335 - DNA, 201 bp, Homo sapiens
tgcacaccggaaggctggttctcctgccaggtgagctgtgtgccctttatcctggggccacccggctggcctgtggaacacagcccgcctggggcgaggcrggtggggaccttcagcccttgccctgcctgggcaaagccttgtgaagaggtacagccctcacattcccagggagggcggcagtgtctcagccagtgcctc

SEQ ID NO: 349336 - DNA, 201 bp, Homo sapiens
tggagtgagatggatcgagagccagtgcgggttttggggcgctgtgcaccaggctcaccgacgttccttggttcctccaggtgagctcctacccctccacrgtgggtgcggaggctcaggaggaattcctgcgggtcctcggctccatgtgccagaagctccggtccatgcagtacaatggcagctacttcgacagaggag

SEQ ID NO: 349337 - DNA, 201 bp, Homo sapiens
gcaggcgcctgtaattccagctactcaggaggctgaggcaggagaattgcttgaacccgggaggcggaggctgcagtgaacgacagcccacagaataggayaaaatagttgccaatcatgtatctaatacgggacttgcatcagaatatataaagaatccttataacttaatagtaaaaagataacccaattaaacatggg

SEQ ID NO: 349338 - DNA, 201 bp, Homo sapiens
ctctactaaaaatacaaaaattagccgggcgtggtggcaggcgcctgtaattccagctactcaggaggctgaggcaggagaattgcttgaacccgggaggyggaggctgcagtgaacgacagcccacagaataggataaaatagttgccaatcatgtatctaatacgggacttgcatcagaatatataaagaatccttata

SEQ ID NO: 349339 - DNA, 201 bp, Homo sapiens
tttctttttcttttagagatggagtcttgctctgtggcccaggctaaagtgcagtggcaggatcatggctcactgaagccctgaactcctggcctcaagcratcctcctgcctcagcctcctgagtcgctgggactacaggtgctcgccaccatgcctggctggcttattttgtggaaccagcatgagcagaagtctcagc

SEQ ID NO: 349340 - DNA, 201 bp, Homo sapiens
tctggaatctgtgagaaatctgttggcagcctaattttctgcctttttaatggtagttttagatttttctcctcctcttggaaaatgataagtatctaggkagagctctttcttttggattctgcctgggacttgtattccttgtgctgaggacacacttttctttggttttggaaaatgcttctgcgttgatgaggtgtg

SEQ ID NO: 349341 - DNA, 201 bp, Homo sapiens
taggatgacagatacctaccttcagtactttgaagaataactccattgtcttctggaatctgtgagaaatctgttggcagcctaattttctgcctttttartggtagttttagatttttctcctcctcttggaaaatgataagtatctaggtagagctctttcttttggattctgcctgggacttgtattccttgtgctga

SEQ ID NO: 349342 - DNA, 201 bp, Homo sapiens
gtgtatgaccagaaggaagagcaggaatgacaggcaggcatattaagtacaaaaaggttcatgcagagttaggttgagggactgactcacaggacattgascccaatttgctcagggactctgggttacttttcagttactaagccagtcagattcctcctaagtaagccaatttgggttaggtctaaatcatcgggggga

SEQ ID NO: 349343 - DNA, 201 bp, Homo sapiens
attctttagtgttcgtgtctcaccttattttaatcctgcacaaaatgctggtgtggttttatggccaacacttccatttatttatcaacagattcacccgygtctgtgtttgccagtgcttcttgcatctcatctctgggttcaatttctgattactgatgtgtagcccttagtgtttcttccacgagtggctgtgagggg

SEQ ID NO: 349344 - DNA, 201 bp, Homo sapiens
ttctacctttgtgggtttcttcttgcttattcatttgttcgtgtctcttttgtatctaatctatacttaaggtagttcctcctaggctgcatgagttgtgtcttgggagttcagttttttttttttttttttttgaggcagagtctcactctgtactcaggctggagtgcagtggcatgatctcgactcactgcaacctct

SEQ ID NO: 349345 - DNA, 201 bp, Homo sapiens
cgtctttggccctttacttcactttattaacgtttgcttttttgtaaaatttattcctaccttctacctttgtgggtttcttcttgcttattcatttgttygtgtctcttttgtatctaatctatacttaaggtagttcctcctaggctgcatgagttgtgtcttgggagttcagttttttttttttttttttttgaggca

SEQ ID NO: 349346 - DNA, 201 bp, Homo sapiens
ggatgtgcacagcagtggagcctaaacatggcctgccacctgctgcctgcgccttctcttcccacccttagtgccacctcacaccaggggcctgcacagaragcgtccaggcttggaacaccttccctctcgggctgaagggcgcgggccctggggctcagcctgtccgaggaagacggcctggcccagagcccatgcggt

SEQ ID NO: 349347 - DNA, 201 bp, Homo sapiens
atcatggctgggaaggttcgagaagaatttgcaggtcttccccagttccgggatgtgcacagcagtggagcctaaacatggcctgccacctgctgcctgcrccttctcttcccacccttagtgccacctcacaccaggggcctgcacagagagcgtccaggcttggaacaccttccctctcgggctgaagggcgcgggccc

SEQ ID NO: 349348 - DNA, 201 bp, Homo sapiens
ccacatgtttaattatttaagaattaaaagctaatgaacaatgaaataaaatgcatgctgtccccctacctggacttacgtagcatcatggctgggaaggytcgagaagaatttgcaggtcttccccagttccgggatgtgcacagcagtggagcctaaacatggcctgccacctgctgcctgcgccttctcttcccaccc

SEQ ID NO: 349349 - DNA, 201 bp, Homo sapiens
gccctaccctgtctgtccgaaagagatcctcctactcttttctctgctgtttgctggaccccttgccacatgcaacaagtacccaaaaatgttttctcccsgccatccaaatgctcttgtccttttcaagaccattgcaggtggggacatcaatctaggggacacaatcagcatttacagaatgaaataggccatcctaga

SEQ ID NO: 349350 - DNA, 201 bp, Homo sapiens
cactgtgcctggcccacaacaagttttcagtgttaatgtgctcagatgttccctttgtatgttaagaaatcctgccctaccctgtctgtccgaaagagatyctcctactcttttctctgctgtttgctggaccccttgccacatgcaacaagtacccaaaaatgttttctcccggccatccaaatgctcttgtccttttca

SEQ ID NO: 349351 - DNA, 201 bp, Homo sapiens
actatgttgtccaggttggtctcaaactcctgggctcaggcgatccacccaccctggcctcctgaagtgctgggattacaggcgtgagcccctgcacccgscgcaagacacattcttgagggaagtccttccttctcagcggtccaggcatgctgtgccaccttgccctggacacacagggcggctatccctctaccacgt

SEQ ID NO: 349352 - DNA, 201 bp, Homo sapiens
gttcccgacaacgccgagctggtgctgctcaccttgggccaggcctggcagggctgtgagtggcaaggactttggaggtgggcgggaagctggcactctcsgaggtcctgggggcttagctccaggtgcccatcagggtggggaagagtcccccttactgtgaactctcgggtctcaaggaggaagccctctggaggcaga

SEQ ID NO: 349353 - DNA, 201 bp, Homo sapiens
aagactgacactggtacaaggacagatatatagatcaatggaatagaacagagcacccagaaatctatgtatctgtggtcaggatgccaggaccattcaayggagggggaagagtagtatcttcaacagatagtgctgggacaactgtatattcacatacaaaagaatgaagttggactcttagctggtaccttatacaaa

SEQ ID NO: 349354 - DNA, 201 bp, Homo sapiens
acccgggctgaggacccgccgtggtttgaaggtgcgtgggggctgcagctggcaggggagaggcttctttggagcctgaggtgccagaagaagttggattycaaaaagcccccagtgaagggctggcctgtaccctcgtgggttgaggtgggggacttggaagaaaatgtgctcatttcccagcatttcccagcctcgtgg

SEQ ID NO: 349355 - DNA, 201 bp, Homo sapiens
caagtgatcccgttgcctcagcctcccaagtatctgggaccacaggcatgcattaccacgtctggctaattgttttgtattttttgtagagatagggtttygccatgtttcccaggatagtctcacactcctgggctcaagctgtcctcctgccttggtctcctaaagtgctgggattacaggtatgagccactgtgcctg

SEQ ID NO: 349356 - DNA, 201 bp, Homo sapiens
acgtcagccagaacatcgcggccgagacccgggctgaggacccgccgtggtttgaaggtgcgtgggggctgcagctggcaggggagaggcttctttggagyctgaggtgccagaagaagttggattccaaaaagcccccagtgaagggctggcctgtaccctcgtgggttgaggtgggggacttggaagaaaatgtgctca

SEQ ID NO: 349357 - DNA, 201 bp, Homo sapiens
atgaagaggaatgaaacacagcatggccgagccttgaaaccatgccaagtcaagaagcctgcacatacagtagggttccattcataggaaatacccagaayggggatgttagagagatggaaaatagattagtggttgtttagggttgggggtagggtagaggggagggaggttggtagctaaagagtatgaggtttcttt

SEQ ID NO: 349358 - DNA, 201 bp, Homo sapiens
ggagatgcttctggcagcccaggaaggacatgggtgctctgagggatggagctgtggctccttggcctaaggggcaaaaagagagaagtcgaagagtaacrtccatgtggccacctccccggctacagtgttgggggctccactgtcagcattgaggggtgacgcctctggtgtgtgctccaaggttgcaaaccccctttc

SEQ ID NO: 349359 - DNA, 201 bp, Homo sapiens
ttgtgcaaatggggtcaggctccaggagatgcttctggcagcccaggaaggacatgggtgctctgagggatggagctgtggctccttggcctaaggggcaraaagagagaagtcgaagagtaacatccatgtggccacctccccggctacagtgttgggggctccactgtcagcattgaggggtgacgcctctggtgtgtg

SEQ ID NO: 349360 - DNA, 201 bp, Homo sapiens
cttttggccactggggcaggagatgccatcatgtgcctttacctgggagggtcggccagtgttgtgcaaatggggtcaggctccaggagatgcttctggcrgcccaggaaggacatgggtgctctgagggatggagctgtggctccttggcctaaggggcaaaaagagagaagtcgaagagtaacatccatgtggccacct

SEQ ID NO: 349361 - DNA, 201 bp, Homo sapiens
ggtttcaagggctgcacccgtgttacagcccagggaaggggtacctgatggcagcatagggggctgctgagtgggcacacaccattccctccactgtcagyatgtgtacctgacccggagccagccctcctgtcccctccagtcctccctgtggatggagctggtgggcagcgtccttccccagaacacaggtcccagccc

SEQ ID NO: 349362 - DNA, 201 bp, Homo sapiens
gtccctgccacggccctgtccctgccacggtgttgcctccttgggtttcaagggctgcacccgtgttacagcccagggaaggggtacctgatggcagcatrgggggctgctgagtgggcacacaccattccctccactgtcagcatgtgtacctgacccggagccagccctcctgtcccctccagtcctccctgtggatgg

SEQ ID NO: 349363 - DNA, 201 bp, Homo sapiens
gctgctgggtctgcctctcctgctggtggagccttctgctgctgtgtgtttgggcctggagctcgcttcagtgggaagtgcttcccgtaggcctcctctgygctccagtgtgtcacggtgccttcagtgtggctctggtggagccttctgctgctgtgtgtttgggcccggagctcgcttgggcctggagctcgcttgggc

SEQ ID NO: 349364 - DNA, 201 bp, Homo sapiens
caaaggcagagctttttttttttttgtttgtttgagacgagtctcgctctgtcaccaagctggaatgcagtggtgcgatctcggctcactgcaacctctgyctcccaggttcaagtgattctcctgcctcagcctcccaagtagctgggattacaggcgcccgccaccatgcccggctaatttttgtgtttttagtagaga

SEQ ID NO: 349365 - DNA, 201 bp, Homo sapiens
gccctctgccgctgctgggtctgcctctcctgctggtggagccttctgctgctgtgtgtttgggcctggagctcgcttcagtgggaagtgcttcccgtaggcctcctctgtgctccagtgtgtcacggtgccttcagtgtggctctggtggagccttctgctgctgtgtgtttgggcccggagctcgcttgggcctggagc

SEQ ID NO: 349366 - DNA, 201 bp, Homo sapiens
tgacaataactaccttgtcctctttgggaactcagaacatattgttaggggtaatgagggaaaaagaaggatctgattccaaaggcagagctttttttttktttgtttgtttgagacgagtctcgctctgtcaccaagctggaatgcagtggtgcgatctcggctcactgcaacctctgcctcccaggttcaagtgattct

SEQ ID NO: 349367 - DNA, 201 bp, Homo sapiens
gacatgggtccttgcttctcacgcgctggtcctgccctggcaagtcagtaccttcctggcctcacttcccatgaggtgggggtgctggtgtgtgatcacasgggtaacagtgacaataactaccttgtcctctttgggaactcagaacatattgttaggggtaatgagggaaaaagaaggatctgattccaaaggcagagc

SEQ ID NO: 349368 - DNA, 201 bp, Homo sapiens
accactcagtgagtacttactttgtgcctggcactgtgggaggggttgggacacaaaaatgaaaaatccttcatccctgatggcagggtgagtcctgcacwatggaaggtgaaagacacataaatgagcgagacagaggaggccaaggggctgcaggagccgcagccagcatcctgggagccagggccagtcagaagcggc

SEQ ID NO: 349369 - DNA, 201 bp, Homo sapiens
acggcccgccggggaggcgtgtggggagaataggaggtgccgcttttcctcttccaaaacggagggtgcaggcggcgcccggggcgggtagttttcgttcscctcagccgctaggaccccgggcccccgcagcctggggttcctgagcgtggcttcagaacgcagggggtttgggggacgacctggatcaccccttccctc

SEQ ID NO: 349370 - DNA, 201 bp, Homo sapiens
cgctcgctcaccactcagtgagtacttactttgtgcctggcactgtgggaggggttgggacacaaaaatgaaaaatccttcatccctgatggcagggtgartcctgcacaatggaaggtgaaagacacataaatgagcgagacagaggaggccaaggggctgcaggagccgcagccagcatcctgggagccagggccagtc

SEQ ID NO: 349371 - DNA, 201 bp, Homo sapiens
agtcctaagttcctattgtgtgaacgtgcctcaggcccagctccagtcatctccatccatgtcctaactccagagctcttggtgggctccccatctagggrtcaatgcgccaactctcccctgaccctcacttcttgtcctgaattctgaagtccagccaaacaatcaaagctcaaagttaatacccttcagctctgaagc

SEQ ID NO: 349372 - DNA, 201 bp, Homo sapiens
ggctctggccataaaaacgcttcttccaagttagcttaacatttagactttgcagtgcgctcgctcaccactcagtgagtacttactttgtgcctggcacygtgggaggggttgggacacaaaaatgaaaaatccttcatccctgatggcagggtgagtcctgcacaatggaaggtgaaagacacataaatgagcgagaca

SEQ ID NO: 349373 - DNA, 201 bp, Homo sapiens
ctgtgttcgtgccactgtactccagcctggaggacagagcaagaccctgtcaaaaagatgaagcagtatgaccctcatattctgccctgcttggcacctgrgctgggcaggacacagacccagaggcccctggcctgccctgtggacttgggggtcttctcgttttccttgcaggcttggagtcccgatttcagagcaagt

SEQ ID NO: 349374 - DNA, 201 bp, Homo sapiens
ggacccctccctgctgtagttggtgtcaggagtgagggtccttgtggactgtgctgggctcctgaagggcctgtcacgtgggcagccctctgccgctgctkggtctgcctctcctgctggtggagccttctgctgctgtgtgtttgggcctggagctcgcttcagtgggaagtgcttcccgtaggcctcctctgtgctcca

SEQ ID NO: 349375 - DNA, 201 bp, Homo sapiens; identical to SEQ ID NO: 74486

SEQ ID NO: 349376 - DNA, 201 bp, Homo sapiens
tataggcatgagccactgtgcctggcccacaacaagttttcagtgttaatgtgctcagatgttccctttgtatgttaagaaatcctgccctaccctgtctrtccgaaagagatcctcctactcttttctctgctgtttgctggaccccttgccacatgcaacaagtacccaaaaatgttttctcccggccatccaaatgct

SEQ ID NO: 349377 - DNA, 201 bp, Homo sapiens
cagcagcaggggccaggtggtgggcatggcctgcggtgcttcttcccatgggacagggctccttgctgctcctgccaggcagatccttctggggtgatggrctctggccataaaaacgcttcttccaagttagcttaacatttagactttgcagtgcgctcgctcaccactcagtgagtacttactttgtgcctggcactg

SEQ ID NO: 349378 - DNA, 201 bp, Homo sapiens
cacaccctgtgtgctcccctgccttctctccccacgctgaattcaggcttgtccacgtgacaccagtgaaggcaacactgagctaacagaggcctgcttgygtgggggacttgtcccctctgaacactgccatggccatgtgagggagcctgtcctggctccttcaggatgggggaggacaggggagaagggcccagccct

SEQ ID NO: 349379 - DNA, 201 bp, Homo sapiens
cctccacctcctagattcaagcgattctcctgcctcagcttcccgagtagctgggactacaggtgtgcaccaccacacccggctaatttttgtgttttttyagtagagatggggttttgccatgttggccaggctggtctcaaactctgacctcaggtgatctgcccaccttggctttccaaagtgctgagattataggca

SEQ ID NO: 349380 - DNA, 201 bp, Homo sapiens
gctggagtgcagtggtgtgatttcggctcactgccacctccacctcctagattcaagcgattctcctgcctcagcttcccgagtagctgggactacaggtrtgcaccaccacacccggctaatttttgtgttttttcagtagagatggggttttgccatgttggccaggctggtctcaaactctgacctcaggtgatctgc

SEQ ID NO: 349381 - DNA, 201 bp, Homo sapiens; identical to SEQ ID NO: 74490

SEQ ID NO: 349382 - DNA, 201 bp, Homo sapiens
ttattttttgagatggagtctcactctgtcgcccaggctggagtgcagtggtgtgatttcggctcactgccacctccacctcctagattcaagcgattctyctgcctcagcttcccgagtagctgggactacaggtgtgcaccaccacacccggctaatttttgtgttttttcagtagagatggggttttgccatgttggc

SEQ ID NO: 349383 - DNA, 201 bp, Homo sapiens
gtgaaggtggggacaggaacacactcccgatgtccacaccctgtgtgctcccctgccttctctccccacgctgaattcaggcttgtccacgtgacaccagkgaaggcaacactgagctaacagaggcctgcttgtgtgggggacttgtcccctctgaacactgccatggccatgtgagggagcctgtcctggctccttcag

SEQ ID NO: 349384 - DNA, 201 bp, Homo sapiens
tgcggatgactgtgaaggtggggacaggaacacactcccgatgtccacaccctgtgtgctcccctgccttctctccccacgctgaattcaggcttgtccaygtgacaccagtgaaggcaacactgagctaacagaggcctgcttgtgtgggggacttgtcccctctgaacactgccatggccatgtgagggagcctgtcct

SEQ ID NO: 349385 - DNA, 201 bp, Homo sapiens
gcttgggcctggagctcgcttgggcctggagcttgctttagtgggaagtgtttcctgtaggcctcctctgtgctccggtgtgtcacggtgccccttcagcrtggctcttcgtgggttcggatttgattcctgcggatgcccagggtttccctgtgacttggaagcaacttcctgccatttcttgcttgtggttccctgcct

SEQ ID NO: 349386 - DNA, 201 bp, Homo sapiens
cttgtggtggaaggggaggcaggagcaggcacatctcacgtgcggggagcaggaacgagagagagattgaggggagggtgctacttttaagccagatctcrggaggactcacactggcgtgggcagcacccaggcgatggtgctagacccttcatgagaaatccacccccaggatccatcacctcccaccaggccccgcct

SEQ ID NO: 349387 - DNA, 201 bp, Homo sapiens
ctgtacaggaagcatggcgctggcatctgctcagctgccggggaggcctcaggaaactcacacttgtggtggaaggggaggcaggagcaggcacatctcasgtgcggggagcaggaacgagagagagattgaggggagggtgctacttttaagccagatctcgggaggactcacactggcgtgggcagcacccaggcgatg

SEQ ID NO: 349388 - DNA, 201 bp, Homo sapiens
cccgaggaagttcggcgtggctggccggagctgccaggaggtgctgcgcaagggctgtctccgcttccaggtgcccgctgggctgggcggggacggcccgycggggaggcgtgtggggagaataggaggtgccgcttttcctcttccaaaacggagggtgcaggcggcgcccggggcgggtagttttcgttcgcctcagcc

SEQ ID NO: 349389 - DNA, 201 bp, Homo sapiens
tgcgggccctgcgcagcccgaggaagttcggcgtggctggccggagctgccaggaggtgctgcgcaagggctgtctccgcttccaggtgcccgctgggctrggcggggacggcccgccggggaggcgtgtggggagaataggaggtgccgcttttcctcttccaaaacggagggtgcaggcggcgcccggggcgggtagtt

SEQ ID NO: 349390 - DNA, 201 bp, Homo sapiens; identical to SEQ ID NO: 74487

SEQ ID NO: 349391 - DNA, 201 bp, Homo sapiens; identical to SEQ ID NO: 74493

SEQ ID NO: 349392 - DNA, 201 bp, Homo sapiens
gacagctgcttatcaagacactccatcaacccctacagtaacagggagagcaggatcctcttcagcacctggaacctggatcacatgtaagctcacagagygaggttcagacccacgagtgcctgcagggccctgtccctgccgcggccctgtccctgccgcggccctgtccctgccatggccctgtccctgccacggccc

SEQ ID NO: 349393 - DNA, 201 bp, Homo sapiens; identical to SEQ ID NO: 74494

SEQ ID NO: 349394 - DNA, 201 bp, Homo sapiens
tgtccgtgatagcacttaggggaatttgtgaagagctgtgactgcaatacactgctatgacctgttgcctgtggcactgtgaccacagaaaatgatgtctstaaccttactttgcagaatagaaaagaaacgcaccatcattcctacactggtggaagcaattaaggaacaagatggaagagaagtggactgggagtattt

SEQ ID NO: 349395 - DNA, 201 bp, Homo sapiens; identical to SEQ ID NO: 74510

SEQ ID NO: 349396 - DNA, 201 bp, Homo sapiens
aggctggaacggcagctggttactgctcatagttctggaggctggaagctgagatcaggtccgcactcccccgctgccttcccaggtgtccctgctgcacygtgctaggcgtggtctggcctttagtggtgatgcatctgtgtctctggcgagtcctgggcacacccctccccctcccatggtgtggggagcaacttgagg

SEQ ID NO: 349397 - DNA, 201 bp, Homo sapiens
gtcagccccggctgccataacagatgacccctgctggggaggctggaacggcagctggttactgctcatagttctggaggctggaagctgagatcaggtcygcactcccccgctgccttcccaggtgtccctgctgcactgtgctaggcgtggtctggcctttagtggtgatgcatctgtgtctctggcgagtcctgggca

SEQ ID NO: 349398 - DNA, 201 bp, Homo sapiens
ggtggcacaatctttctctctgcaacctctgcctccagggttcaagcagttatcctgcttcagcctcctgggcagctgggattacaggcatgcatcaccaygcccagctaatttttgtatttttagtagagatgaggtttcgccatcttggccaggctggtgttgaactcctgacctcaggtgatccgcacgcctcagcct

SEQ ID NO: 349399 - DNA, 201 bp, Homo sapiens
caagctgcagtgcacacaggaatccctggggagcttgcagagggctgcagggcccgccccaggggttgtctcggtagggctgggcggtgtcttagtcagcyccggctgccataacagatgacccctgctggggaggctggaacggcagctggttactgctcatagttctggaggctggaagctgagatcaggtccgcactc

SEQ ID NO: 349400 - DNA, 201 bp, Homo sapiens
gcagtgtctcagccagtgcctctcaagctgcagtgcacacaggaatccctggggagcttgcagagggctgcagggcccgccccaggggttgtctcggtagkgctgggcggtgtcttagtcagccccggctgccataacagatgacccctgctggggaggctggaacggcagctggttactgctcatagttctggaggctgg

SEQ ID NO: 349401 - DNA, 201 bp, Homo sapiens
cccagggagggcggcagtgtctcagccagtgcctctcaagctgcagtgcacacaggaatccctggggagcttgcagagggctgcagggcccgccccagggsttgtctcggtagggctgggcggtgtcttagtcagccccggctgccataacagatgacccctgctggggaggctggaacggcagctggttactgctcatag

SEQ ID NO: 349402 - DNA, 201 bp, Homo sapiens
tcaccaccgtgcccggccaaggcagaactctgaatctccctaaagcagtataccctggagcagggaccagcccccacggggtgcgtctctcagtaagatcrcctgacttggtgtattaggccattctcgcattgctataaagaaatagagagtgggtaatttataaagaaaagaggtgcaattggcttacggttcagcagg

SEQ ID NO: 349403 - DNA, 201 bp, Homo sapiens
agggaggggacagctggaagctctgggattggaaccttcctggaccgccccctctgtgcctcttaaccttggctgattttcatctgcagctataagaaackataaccttgagtccaacggctcactgggggatctgcgagtcctttcagagagttatggagtctgaggtggtctcagggacccctccctgctgtagttggt

SEQ ID NO: 349404 - DNA, 201 bp, Homo sapiens
atggggtctttggttcagcttgacctctagagggtttgaggtggaggttggccccatgggccatcagccatgtctgtgtgagccccagtaaaggctggcayccaggcctggtgagcttcctggttggcagtgtcgtcacagagggctgtggaagttagtgcttggggaaggtagggctggccatgaccccacagggagggg

SEQ ID NO: 349405 - DNA, 201 bp, Homo sapiens
ggagagcaggatcctcttcagcacctggaacctggatcacatgtaagctcacagagcgaggttcagacccacgagtgcctgcagggccctgtccctgccgyggccctgtccctgccgcggccctgtccctgccatggccctgtccctgccacggccctgtccctgccacggtgttgcctccttgggtttcaagggctgcac

SEQ ID NO: 349406 - DNA, 201 bp, Homo sapiens
ggatcacatgtaagctcacagagcgaggttcagacccacgagtgcctgcagggccctgtccctgccgcggccctgtccctgccgcggccctgtccctgccrtggccctgtccctgccacggccctgtccctgccacggtgttgcctccttgggtttcaagggctgcacccgtgttacagcccagggaaggggtacctgatg

SEQ ID NO: 349407 - DNA, 201 bp, Homo sapiens
gatcacatgtaagctcacagagcgaggttcagacccacgagtgcctgcagggccctgtccctgccgcggccctgtccctgccgcggccctgtccctgccayggccctgtccctgccacggccctgtccctgccacggtgttgcctccttgggtttcaagggctgcacccgtgttacagcccagggaaggggtacctgatgg

SEQ ID NO: 349408 - DNA, 201 bp, Homo sapiens
ttcagcacctggaacctggatcacatgtaagctcacagagcgaggttcagacccacgagtgcctgcagggccctgtccctgccgcggccctgtccctgccrcggccctgtccctgccatggccctgtccctgccacggccctgtccctgccacggtgttgcctccttgggtttcaagggctgcacccgtgttacagcccag

SEQ ID NO: 349409 - DNA, 201 bp, Homo sapiens
ctctgaccacaggactgggcttgggcagggtctcagagggccatggagtgagatggatcgagagccagtgcgggttttggggcgctgtgcaccaggctcascgacgttccttggttcctccaggtgagctcctacccctccacggtgggtgcggaggctcaggaggaattcctgcgggtcctcggctccatgtgccagaag

SEQ ID NO: 349410 - DNA, 201 bp, Homo sapiens
tcagcacctggaacctggatcacatgtaagctcacagagcgaggttcagacccacgagtgcctgcagggccctgtccctgccgcggccctgtccctgccgyggccctgtccctgccatggccctgtccctgccacggccctgtccctgccacggtgttgcctccttgggtttcaagggctgcacccgtgttacagcccagg

SEQ ID NO: 349411 - DNA, 201 bp, Homo sapiens
accccgtctctactaaaaatacaaaaattagccgggcgtggtggcaggcgcctgtaattccagctactcaggaggctgaggcaggagaattgcttgaaccsgggaggcggaggctgcagtgaacgacagcccacagaataggataaaatagttgccaatcatgtatctaatacgggacttgcatcagaatatataaagaat

SEQ ID NO: 349412 - DNA, 201 bp, Homo sapiens
caggtcatcggcattaggtacagtcacattgtatgcggccatccccaccgtcatctccggaactccttccaccttgcaaagctgaacccgtgtccctgttmcatcactcccccttccccctccgccagcccctggccaccaccattccggtttctgtctctctgatttgatgactctagggacctcatatgaatgcagtca

SEQ ID NO: 349413 - DNA, 201 bp, Homo sapiens
cctgggggccttgggtcactggatagtttaatggcgtgatttaggatggggtctttggttcagcttgacctctagagggtttgaggtggaggttggccccrtgggccatcagccatgtctgtgtgagccccagtaaaggctggcacccaggcctggtgagcttcctggttggcagtgtcgtcacagagggctgtggaagtt

SEQ ID NO: 349414 - DNA, 201 bp, Homo sapiens
ggacttccaccaagtcctcactccccagcatgtcctcctgtcttcttctgacccactgatgtgatcgtgaggcttttctcatatggtggatcgcactgatmgatttgcaggtgtgaaccagccttgcgttcccacttggccgtggtgatatttctttgtgcatgttactgagttctctttgctaacattttgttaaggtcc

SEQ ID NO: 349415 - DNA, 201 bp, Homo sapiens
aggagtgtctttgttcacctgggggccttgggtcactggatagtttaatggcgtgatttaggatggggtctttggttcagcttgacctctagagggtttgmggtggaggttggccccatgggccatcagccatgtctgtgtgagccccagtaaaggctggcacccaggcctggtgagcttcctggttggcagtgtcgtcac

SEQ ID NO: 349416 - DNA, 201 bp, Homo sapiens
cttgagccctgggaggtaaacgccaatgccttcaaatgtcctgcctggtaggagtgtctttgttcacctgggggccttgggtcactggatagtttaatggsgtgatttaggatggggtctttggttcagcttgacctctagagggtttgaggtggaggttggccccatgggccatcagccatgtctgtgtgagccccagta

SEQ ID NO: 349417 - DNA, 201 bp, Homo sapiens
agcccttgccctgcctgggcaaagccttgtgaagaggtacagccctcacattcccagggagggcggcagtgtctcagccagtgcctctcaagctgcagtgyacacaggaatccctggggagcttgcagagggctgcagggcccgccccaggggttgtctcggtagggctgggcggtgtcttagtcagccccggctgccata

SEQ ID NO: 349418 - DNA, 201 bp, Homo sapiens
tttctttttaatcactttaatcattaatcatccattttaagcatatttgttttacagtcacatgctaaagcattcaaccttgcccacaggtctggcattcrttcttgagccctgggaggtaaacgccaatgccttcaaatgtcctgcctggtaggagtgtctttgttcacctgggggccttgggtcactggatagtttaat

SEQ ID NO: 349419 - DNA, 201 bp, Homo sapiens
agcttttctatcccccttaatggctatggcaggggtctcggtcccatctccctgtctttctagggtcccctgggcctgtatcagggactggaaccctggtrggcccctggaccatagcttgcctgtgtgcactaatttctctttggtttctggcagctggggagcccctttcttttgatctcaactaagtattttaacaag

SEQ ID NO: 349420 - DNA, 201 bp, Homo sapiens
aaggtcatgagggtggggccctaatccactaggactggtgtccttagaaaatgggaaaggagctcactctccctctgtctctgccacgtggggacacagaragaaggcagccatctaccagccaggaggagagcccttactagcacccggcgtgcgggcacctgttcttccagcctccaggactgtgagagagtaaatact

SEQ ID NO: 349421 - DNA, 201 bp, Homo sapiens
gaaggtcatgagggtggggccctaatccactaggactggtgtccttagaaaatgggaaaggagctcactctccctctgtctctgccacgtggggacacagmgagaaggcagccatctaccagccaggaggagagcccttactagcacccggcgtgcgggcacctgttcttccagcctccaggactgtgagagagtaaatac

SEQ ID NO: 349422 - DNA, 201 bp, Homo sapiens
tgtctcactgggactttctgctgtggactccatcatgttccccaagattcgtatgttgaaaccctaatccccagtgtgactgcatcaggcgataaggtctktgggagataatgaaggtcatgagggtggggccctaatccactaggactggtgtccttagaaaatgggaaaggagctcactctccctctgtctctgccacg

SEQ ID NO: 349423 - DNA, 201 bp, Homo sapiens
cagagcgaggttcagacccacgagtgcctgcagggccctgtccctgccgcggccctgtccctgccgcggccctgtccctgccatggccctgtccctgccayggccctgtccctgccacggtgttgcctccttgggtttcaagggctgcacccgtgttacagcccagggaaggggtacctgatggcagcatagggggctgct

SEQ ID NO: 349424 - DNA, 201 bp, Homo sapiens
accgacgttccttggttcctccaggtgagctcctacccctccacggtgggtgcggaggctcaggaggaattcctgcgggtcctcggctccatgtgccagargctccggtccatgcagtacaatggcagctacttcgacagaggagccaagggcggcagccgcctctgcacaccggaaggctggttctcctgccaggtgagc

SEQ ID NO: 349425 - DNA, 201 bp, Homo sapiens
gcctgtgcggttttccgggagcgcctgttagctgtgtgttggaccttctcattctgctctcctcatgctgtgcctgcgtctgggctgctgtctcactgggrctttctgctgtggactccatcatgttccccaagattcgtatgttgaaaccctaatccccagtgtgactgcatcaggcgataaggtctttgggagataatg

SEQ ID NO: 349426 - DNA, 201 bp, Homo sapiens
ataacgggctcagtgggtttcccttcctcttgcccaagccccgggctccactcaagcttttctatcccccttaatggctatggcaggggtctcggtcccayctccctgtctttctagggtcccctgggcctgtatcagggactggaaccctggtgggcccctggaccatagcttgcctgtgtgcactaatttctctttggt

SEQ ID NO: 349427 - DNA, 201 bp, Homo sapiens; identical to SEQ ID NO: 74512

SEQ ID NO: 349428 - DNA, 201 bp, Homo sapiens
gtgctgggtgcatcctgtcatgcgtgtgtcctgcctcgtggtgtgtgtgtaggttgtgtgctgggtgcatcctctcatgcgtgtgtcctggctcgtggccygtgtgtaggtcgtgtgctgggtgcatcctgtcatgcatgtgtcctgcctcgtggtgtgtgtgtaggttgtgtgctgggtgcatcctgtcatgcgtgtgtc

SEQ ID NO: 349429 - DNA, 201 bp, Homo sapiens
ccttcctccagccccccgacctcggggacccagcagcccctcccacctctgccctcctccctgcagactgggccacattcgctgtgggtcccggccacggygtgcagctgccctcaggccgcctgctggtacccgcctacacctaccgcgtggaccgccgagagtgttttggcaagatctgccggaccagccctcactcct

SEQ ID NO: 349430 - DNA, 201 bp, Homo sapiens
gtggtgtgtgtgtaggttgtgtgctgggtgcatcctctcatgcgtgtgtcctggctcgtggcccgtgtgtaggtcgtgtgctgggtgcatcctgtcatgcrtgtgtcctgcctcgtggtgtgtgtgtaggttgtgtgctgggtgcatcctgtcatgcgtgtgtcctggctcgtggcccgtgtgtaggtcgtgtgctgggtg

SEQ ID NO: 349431 - DNA, 201 bp, Homo sapiens
actgcagggcctcatgccccccgcctgccctctgctctctctgtgtgggcagcgctcaccagcctccctgggtgccgtccacctgggctcggctgctaagrgctgtgagaggcttgttcagcctgggaggactcagggcggctgggatgagtcgtgtggaagggcggtcagagtgcgatggtcctaacccgaggcaccagc

SEQ ID NO: 349432 - DNA, 201 bp, Homo sapiens
cacctgaccccggcccgtgggagctacagcagggagtgcagcagacacatggccaacccagggaccccactgcagggcctcatgccccccgcctgccctcygctctctctgtgtgggcagcgctcaccagcctccctgggtgccgtccacctgggctcggctgctaagagctgtgagaggcttgttcagcctgggaggact

SEQ ID NO: 349433 - DNA, 201 bp, Homo sapiens
gccatgtgacgcgcctgctcccccttctcttccaccaggattgtgggtttcctggggcctccccggaagccgagcagatgccagcaccacgcttcctgtaragcctgcagaaccggaagccgattaaacttcttttccttaagaatcacccagcctccggtgttccttcacagtagggtgaggggggcgaacgcacaccct

SEQ ID NO: 349434 - DNA, 201 bp, Homo sapiens
cagcctcccctgcaccctggcaccaaccagcctggccgagggtcagctcccagagccgtgttgagaggggaaggggctgattccacagacatttggggtgsagtgggtgcgagggagggtgggggaggggctgctccagatctggggtgagggagtcagaaacagggctgaccccaaggtgggtacaggaagaggcccagg

SEQ ID NO: 349435 - DNA, 201 bp, Homo sapiens
gctcccccttctcttccaccaggattgtgggtttcctggggcctccccggaagccgagcagatgccagcaccacgcttcctgtaaagcctgcagaaccggragccgattaaacttcttttccttaagaatcacccagcctccggtgttccttcacagtagggtgaggggggcgaacgcacaccctgagccttaggggcaac

SEQ ID NO: 349436 - DNA, 201 bp, Homo sapiens
gccgggggctccgtgcgggtgagtgagtggccgggggctctgtgtgggtgtagtggccggatctgctggggctgcacaccccgggatggggcgggggtggyggcggcaggcagatgcccgaggtagagatgagcaaaccaggctcagcgatcctgggtgccctgcggggggctgtgcccaggtccctggacgtcctggtca

SEQ ID NO: 349437 - DNA, 201 bp, Homo sapiens
aagggaaagtggcccgggaggagcccacgtgccaacaacaggagtcccagaagacagaaaagaccacagatgagaaagcagttcacgcagagaacaaaacrttcccggaccaaacccagggtcgggttgctcattcccgaggcccgatagcgagatgcagatgaactggggaagaagagggattttatttctgtaactggt

SEQ ID NO: 349438 - DNA, 201 bp, Homo sapiens
gctgagggtcttgaggtgagaaatcatcctggtcatctgggtgggtccagggtctcaccagggtccttatgggaggggacaaagggtgggagaggagggargaggccttggagctgggtttgaagatggaggaggggccacagctgaggagccggtggcctctggaagctggaaaagacgggaagcgaagcccggacagcc

SEQ ID NO: 349439 - DNA, 201 bp, Homo sapiens; identical to SEQ ID NO: 74515

SEQ ID NO: 349440 - DNA, 201 bp, Homo sapiens
tccttgagcgggtgtggccagggcgcgcctcctccccgcgggtgggccaccctggcctgggcccgcggtccgcagcccgcctctctgtcgccacacaggtkcagaaagtcatgcccaacgacaccttctacttctccatcctgaggaaccccgtgttccagctggagtcctccttcatctactacaaaacctacgcccccg

SEQ ID NO: 349441 - DNA, 201 bp, Homo sapiens
cccaacgacaccttctacttctccatcctgaggaaccccgtgttccagctggagtcctccttcatctactacaaaacctacgcccccgccttccggggcgycccgagcctggacgcgttcctggcctcgccgcggacgttctacaacgacagccgccacctcaggaacgtctacgccaagaacaacatgtggttcgacttc

SEQ ID NO: 349442 - DNA, 201 bp, Homo sapiens
cgccgaggtggagcggcgcttccggctggtgctcatcgccgagcacctggacgagtccctggtgctgctgcggcgccggctgcgctgggcgctggacgacrtggtggccttcaggctcaactcccgcagcgcgcgctccgtggcccgcctgtcgcccgagacccgggagcgcgcgcggagctggtgcgcgctggactggcg

SEQ ID NO: 349443 - DNA, 201 bp, Homo sapiens
gctgcctgagaggggacaccactgggttccagacgggggcaggatgggggcctggatccggggcccctgacagccctgagttcccacaatcaccccgggcscctccccacctcaggcagcctcagcccctcataggaggggcccgttgcccgggccctggcagtgctggttttagggggtctgtgtcttagtcccttgggg

SEQ ID NO: 349444 - DNA, 201 bp, Homo sapiens
gggcaggcacaggtgttttagggtcaccctgagcgctctgtggagaatggccagcagaggctaggtgaccaggcggggccagagggaggccgggtggggaraggtgatgggcagagagcggggcagcgggggtgtgctgtggggtgggggctgcggggcagagggaggaggaggggccgggaggaggggaaaggaagaggg

SEQ ID NO: 349445 - DNA, 201 bp, Homo sapiens
ggaacgtctacgccaagaacaacatgtggttcgacttcggcttcgaccccaacgcgcagtgcgaggagggctacgtgcgcgcgcgcatcgccgaggtggarcggcgcttccggctggtgctcatcgccgagcacctggacgagtccctggtgctgctgcggcgccggctgcgctgggcgctggacgacgtggtggccttca

SEQ ID NO: 349446 - DNA, 201 bp, Homo sapiens
taggaggggcccgttgcccgggccctggcagtgctggttttagggggtctgtgtcttagtcccttggggctgccaaaatgaaatacacagaccaggggccytggaaacaacagaaatgtatttatcacggttctggaggctataagtccaaggtcaaagtctgtgatcatgagggcaggctccgtgtctggtaagggccca

SEQ ID NO: 349447 - DNA, 201 bp, Homo sapiens; identical to SEQ ID NO: 74511

SEQ ID NO: 349448 - DNA, 201 bp, Homo sapiens
cagactggttgtgaggggcccaatgcagggggccggccccagcccacagggtcgttctgcagatgggctggtcggggacgctctaccaggtgaagggtctrtggtcggagtcttcgccctggccagggcccaggacgctcacggtgcaggctgagggtcagagccgccgagggccccctgccgggattctgtgcaaagggc

SEQ ID NO: 349449 - DNA, 201 bp, Homo sapiens
tgggggtgctggacgagtcccactccttgccaaccccagggtggctcctcagctctcaaacaaggggcgggctgcagggattccgagggcccctccagcargaggtcccacatgcatctcccaatgggacacttacctggcccacagggtgggtgtgacactgagggttcctgggggcagattcagggcatgggatggaga

SEQ ID NO: 349450 - DNA, 201 bp, Homo sapiens
gtgcgcggaccccagagggtgtgcgtggaccccagagggtgtgtgcggaccccagagggtgtgcgtggagggcctggtctgacctcaaggctcttggggcrcccacacaggatgggctgtgaggggttggcgggggtggggggggtggtctgtgatggccccctgctgagccagagtgacccctacaaccggtccaggggt

SEQ ID NO: 349451 - DNA, 201 bp, Homo sapiens; identical to SEQ ID NO: 74522

SEQ ID NO: 349452 - DNA, 201 bp, Homo sapiens; identical to SEQ ID NO: 74523

SEQ ID NO: 349453 - DNA, 201 bp, Homo sapiens
aggggtcaccctgggccctgagaggcacaggacattgcgatggggtgctggcctgccaggagcacagatacagagctagagcccagcgaggcctgtgctgygaggggctgtgctgtgccaggggaggccccgcacccgggaagcccagaggagagtgtgcactcacggagccctcctggcagggccgcgtctctggagcag

SEQ ID NO: 349454 - DNA, 201 bp, Homo sapiens
gcccacagggtcgttctgcagatgggctggtcggggacgctctaccaggtgaagggtctgtggtcggagtcttcgccctggccagggcccaggacgctcayggtgcaggctgagggtcagagccgccgagggccccctgccgggattctgtgcaaagggcctctgcactttatgtgggtgcatgtgaatgcccctcgccaa

SEQ ID NO: 349455 - DNA, 201 bp, Homo sapiens; identical to SEQ ID NO: 74517

SEQ ID NO: 349456 - DNA, 201 bp, Homo sapiens; identical to SEQ ID NO: 74518

SEQ ID NO: 349457 - DNA, 201 bp, Homo sapiens
tgagtcgtgtggaagggcggtcagagtgcgatggtcctaacccgaggcaccagcccctccttccccgtccccctgtgccttcctccagccccccgacctcrgggacccagcagcccctcccacctctgccctcctccctgcagactgggccacattcgctgtgggtcccggccacggcgtgcagctgccctcaggccgcct

SEQ ID NO: 349458 - DNA, 201 bp, Homo sapiens
gagccccgtgactcccccgatgacgttcaggaagtgggagcggatcccctgtccccagagagccccgtgactcccccgatgacgttcaggaagtgggagcsgatcccctgtccccagagagccccatgactcccccgatgacgttcaggaagtgggagccgatcccctgtccccagagagccccgtggctcccacaggtcc

SEQ ID NO: 349459 - DNA, 201 bp, Homo sapiens
ctcattgtccacatgacctcctgctgggcgaattctgggatgaccctgtgtcctgggcacatggctggcagggtcccgggggctctctggccagcctcccstgcaccctggcaccaaccagcctggccgagggtcagctcccagagccgtgttgagaggggaaggggctgattccacagacatttggggtggagtgggtgc

SEQ ID NO: 349460 - DNA, 201 bp, Homo sapiens; identical to SEQ ID NO: 74514

SEQ ID NO: 349461 - DNA, 201 bp, Homo sapiens
ctgcttcccgcttgggcacaattgccctttgagagcagagccaggggcttcttggggacggaagctgctctcagaagccgcgcactggtggtgggggagcrgcaggaaggggccggccagctgtcctagccaagagcctttcaggaaccggtggcccagggcagaggtggctggaggtggagctgtctgtttgggcctcag

SEQ ID NO: 349462 - DNA, 201 bp, Homo sapiens; identical to SEQ ID NO: 74526

SEQ ID NO: 349463 - DNA, 201 bp, Homo sapiens
tccccgtcgtaggcaggcgttctgccctggccaggcgtggtgtccggcatccggccatctccctcctccctccttcccttagccccgcatccaggtgcccygtgtgcccggcctgggcggctggccgtggatctgaccgctcctgcatggtggaggaccagcgttcccactgtctgcagctgtgccacctccctgtgccgg

SEQ ID NO: 349464 - DNA, 201 bp, Homo sapiens
catcgccgaggtggagcggcgcttccggctggtgctcatcgccgagcacctggacgagtccctggtgctgctgcggcgccggctgcgctgggcgctggacracgtggtggccttcaggctcaactcccgcagcgcgcgctccgtggcccgcctgtcgcccgagacccgggagcgcgcgcggagctggtgcgcgctggactg

SEQ ID NO: 349465 - DNA, 201 bp, Homo sapiens
tatatcaggggctcacatgaacaagtctcttgtaaaaagaagctctctctgatgaaactgagaacagatagcagactcacgcaagctccggatggtggggyagtgtgttaaggaaacaatggggatgagaatgaggaagtagatggggagaaatagaatcagagggtttggcaactgcttggatgtacaggaaagggagaa

SEQ ID NO: 349466 - DNA, 201 bp, Homo sapiens
agccaaaagggtttaaaatcacaggtaaccagaaacagtacaattgtttccgttttctttcccatccaatttattagcagggctgctattattagcttctygttgaccttcttcccttgtccctttcagcctgtgggtggagtagttaaggaacaatagaagatccaaaaggaaaaggaaggagaagttttgttaagggct

SEQ ID NO: 349467 - DNA, 201 bp, Homo sapiens
agaagttttgttaagggctaggaaaatcacagactgataatcagcccgtggctaatcaacccttggctttagtactttcaaggcagaatacagtcacaccygatctcaccccagtccttgggaggggcctgattttcccccagtcttcctgaaaattgaggaatttaagtatttgtttgtttgtttgtttgtttgtttttt

SEQ ID NO: 349468 - DNA, 201 bp, Homo sapiens
tcctcatagagaccagcccagcactaggttccctccacagattctgacaaatcttgcttgataagtgattatgattctggttagggtattgttttcctccraaaaatcagttaactatttactttgagtcttgtgacattcagatcatttacatccttcctgtctattgcttgtcccagagtaagaagttcagtttgttag

SEQ ID NO: 349469 - DNA, 201 bp, Homo sapiens
tcccagatgatattaattagacaagtgcatctcaaactaattaccggccaatcaccttgggaatgtgttaaaatgtggattctgactcaggtatgaggagsgccagagattttgcatttctaacaagctcccaggcaatactgtgctgctggtccaggagccacccattgaatagcaaagagctaggtgaactgtgaagtg

SEQ ID NO: 349470 - DNA, 201 bp, Homo sapiens
caccagcctggaagctcttcaaaccctgttgctgaagtgttcttatggagttttcactaggtaattatggttgattaaatcattggcccttggcggttggrtttggtctccagccctgctcccctccctataggtcacggggtggggctgaacattcaaaccctctaaccacctgtttggttcctctggcagccagccctc

SEQ ID NO: 349471 - DNA, 201 bp, Homo sapiens
gtggtgttgaaaggaatttagtatggctgtgttttcataactggctcttggggcggaattaaacttggaaagatgcaaagatgtataggtttttttctatytctgcttagatgagtactttctggaaaggcagacaaaacgccagggcaaacagtccttctttttcttccttagatattgaaatctggactcatactctgc

SEQ ID NO: 349472 - DNA, 201 bp, Homo sapiens
gctgagaacactccttgggagggttggtcatctgatggcatgtgaaaaactcccttggttgggaatctgggagattccctcagggcctagtgtctatcatrgaccagggctttttacagttttgatgacaataagcctttttcttggccaaacattgtgatcagatctcctttcaaggtactgagtatgcgaagccctgtg

SEQ ID NO: 349473 - DNA, 201 bp, Homo sapiens
agctgtgtccagcacaatctgcctttcccagcagcctttttgttctagcccagatgcacagcacaaccacatttccgtgcctttcaggagaaagctacccrggtctcatgaactggtggtgattcaggttttctttgaagtggtgtccttccttggtgtacagtaaataatttgctttgcttatataataaacaagagtgt

SEQ ID NO: 349474 - DNA, 201 bp, Homo sapiens
gttttacttttgagcatttttgttggtacaaatcatcacttgggacatactttggcaggttgggcctgtgtactataccatcatgatatgagatggaaggyagatgaggctgacagagtggcttgaaatgtagacttcattattattcaggtatggggaggccaacagatgatgagatgacggccattgaagagatagttt

SEQ ID NO: 349475 - DNA, 201 bp, Homo sapiens
tggcccaagacctgttctttaatatgagcatactgtttgccattgtgatcctctttcttcaaaagattcccactcataattcatcatctataatatctgtytttgattcctttatattacagcgggaacttaaggacaattgtgaagcaacctgaaaaaataattcttctataattttaaaatttctccctaatattttgt

SEQ ID NO: 349476 - DNA, 201 bp, Homo sapiens
tattggcctggcccagaaaaacaggacatgtcaaagaaggggaggcttccaggtcataggtggattcaaagattttctgattggcaattggttgaaaaatytaagctttgtctgaagaggtaaagtcagtataaacaaatgcttgagttaagataaagaaagttgtggaagctgaggttcttgttatgtggatgaagcctc

SEQ ID NO: 349477 - DNA, 201 bp, Homo sapiens
aaatgttcaataaatgttgattgtcactaatgttattgtttttgcctttttttttttttttttttttttttagatggagtctcactctgtcaccaggctgragtgcagtggtgcaatctcagctcactgcaacctccacctcccaggttcaagcaattctcctgcctcagcttcctgagcagctgggactacaggcatgcg

SEQ ID NO: 349478 - DNA, 201 bp, Homo sapiens
ggtaaaattgttagggagcaccccaacaagattttgtttttttcacataccatcaaagctggatggcctctgatacaaaggttgggctttgaaatcagcatttttttttttttttttttttgagacagagcctcgctctgtcactcaggctggagtgcagtggcgcaatctcagctcactgcaagctccgcctcctgggtt

SEQ ID NO: 349479 - DNA, 201 bp, Homo sapiens
taaaccatacacactataaatttcaaaattacatttgtatttgtgtatatttgtatacatagatgaattgtgaagttttagggaaaaaaatatcaaatctytctggaaatctccagcatgaggcttctgaggttgaactccatagcttttgattgcaaccaaacatgaaagggaaatgattatgtttgtattcatgaaatc

SEQ ID NO: 349480 - DNA, 201 bp, Homo sapiens
ctaaatgtcaacagctaagctccagagaggaggatatattgaggcatatgctacgcccttttcctgttatggcctgaactagttttcgggatccttttggmcaatgattaggggcagggaggagatgtccattcagtcagtttggggcttagaattatatttttggtttatacctgacatgtgaataaatgttcaataaat

SEQ ID NO: 349481 - DNA, 201 bp, Homo sapiens
actcagattctgtattttaacaagctcctcaggtgattcatgtgcacattaaagtttgagaagtcctaatgctgggcgtggtggcattagcctataaagtkccatctactcaggaggctgaggtggggaggatcccttgtgcttaggagttgaagaccagcatgggcaacttaaggaggccctatctctaaaaaaagaaaa

SEQ ID NO: 349482 - DNA, 201 bp, Homo sapiens
gagaggaagtctcactctgtggcccaggttgaagtgcagtggcatgatctcagctcactgtaacctccacctcttggattcaagggattctcctgcctcarccccccgagtagcggggattacaggtgaccgccaccatccctggctgattttgtatttttagtaaggacagggttttaccatgttggccaggctggtctc

SEQ ID NO: 349483 - DNA, 201 bp, Homo sapiens
atagatggctgtcttttccctgtatctcttcattatcatcttccttcttgtgtgtctctgggtccaaatttccccttttaataaggacaccagtcatattkgattagacctcaccctaatgatctcattttaacatgagtacctctgtaaaggccccgtcttaaaataatgtcacattctgaggtattggcaattaggacc

SEQ ID NO: 349484 - DNA, 201 bp, Homo sapiens
actgtttttaacagcgctttatacttttgctacactaaaggtagttcttggactagcagcatcaacatcacctggttgctacttagaaatgcagaatctcrggccccaacccagatctactgactcagattctgtattttaacaagctcctcaggtgattcatgtgcacattaaagtttgagaagtcctaatgctgggcgt

SEQ ID NO: 349485 - DNA, 201 bp, Homo sapiens
agtctctcctcgtttacagggctcatttccatgtttttagtgcctggtgttaatgactgtcccactactgcctcctccgtaagactcaggtggccctcacrgcagaagttctcttctagtttgcttctgctactcaactctgccactcagctttgctcaatgtggaagtccttgctaacttctttagaatctgatacaccc

SEQ ID NO: 349486 - DNA, 201 bp, Homo sapiens
taattttaacatgtcacaaaatcttatttttttcccaaccattaaacataaaaaccatttttatggctgcaccaaaaccaggtggtggccagggtttggcytaaggcctataatttgttgatccttgccttataggtttctgaatatgacacgttatttacaatttctgattacattcagtacagcatgtatcaacatgag

SEQ ID NO: 349487 - DNA, 201 bp, Homo sapiens
aagagttaaatcccccaggaagacacagtagttttaaatttataaagaaaaaaaaaagagggagagagagatgaaaatgtaagaagaaaataaatccacarttgcccttgagtattttagcacccctctcagtaattattagaataagtatacaattagtaaagaacatagaatatttaaacaacttagttaacacacctg

SEQ ID NO: 349488 - DNA, 201 bp, Homo sapiens
agggagaaggacccaccaacaagtacttccagctgagcagattgagagttcagagggacctgctcctagcaggaaagagaaggtggaaccatggactggcrtagcgaggaagttaattttggtttgcaagatgttacatttcatattttgggtttgttggtggtagaatactggaccatgatggtacctccaaacaatcta

SEQ ID NO: 349489 - DNA, 201 bp, Homo sapiens
ttctctgagagctcccagggctctcatgacatggcattttagatgtaccatgctttgtcagaaggttcaaggatgaagtggagtttctctacttgtctctscattcatggaacaaattcactgccctcctggcttggagtaagaggtagtgagtaggggttgttcaatgatttcatttcatccaaataatgtgcaatctgt

SEQ ID NO: 349490 - DNA, 201 bp, Homo sapiens
ggggtcatacaaaatctaaagaagttctgtggttcctggaaaatggctgaaaagactgaacatcagtgaggtggtcttcttcccaaacactcatatttccyggaaggcagatgactccatggcatctgtgccggattagcccaggctcttggctcaggatgggagtcctcatatttaggagtttcctcatgtggcattttc

SEQ ID NO: 349491 - DNA, 201 bp, Homo sapiens
aaatgcagattcactgagccagacaaaggcatgaatgactatttttccctacccacctcttacatgaaaattgtgtacttctcaatatcctgccctttccyctttaaatttggagccttcaaaatcatctttggggaaaggcatagacctgtctcctaggtgtgcatccttaactttggcaaataaacctcctaaaataat

SEQ ID NO: 349492 - DNA, 201 bp, Homo sapiens; identical to SEQ ID NO: 74538

SEQ ID NO: 349493 - DNA, 201 bp, Homo sapiens; identical to SEQ ID NO: 74539

SEQ ID NO: 349494 - DNA, 201 bp, Homo sapiens
gccaccctcagactgtacgcagagagctacgagagggatcccagcggccatgaccaggagccacaggtacagaaacagctgtgctcccagcagtgtgtctygcagctcctggcaaatttagagagctccatgggcctttagtggggctattttacctcctggaaaggtacatgataatttcagctggaggacaagctcagg

SEQ ID NO: 349495 - DNA, 201 bp, Homo sapiens
tattttctcaagttgctgaacttttaatgatctctaacttgtaagttcatatgtaaattagtccttacataaaaattatatttctttattttgatatggartcatgcgtggacagtagcccaaatatatatttagccatcagtccatccattcatccatctatgtgttcattcattcattctgtggacattggttgagcaa

SEQ ID NO: 349496 - DNA, 201 bp, Homo sapiens
caaatgcagcagggcctttagttgtctgttaaagctgcactataatttggtatctacattttatcacacaaaggaacctccccttttgacaacaactgggytaggcagctgttaatcacaacatttgtgcatcacttgtgccaagtgagaaaatgttctaaaatcacaagagagaacagtgccagaatgaaactgacccta

SEQ ID NO: 349497 - DNA, 201 bp, Homo sapiens
gtccactatacacatagatatcctattacatttgtatcataaaacatataaatgtacatgcatttgccagtattttgattttggcccaagacctgttcttyaatatgagcatactgtttgccattgtgatcctctttcttcaaaagattcccactcataattcatcatctataatatctgtctttgattcctttatattac

SEQ ID NO: 349498 - DNA, 201 bp, Homo sapiens
ttttgtagagatgcggtctatgttgttcaggctggtattaaactcctggctcaagtgatcctctgcctcagccttccaaaatattgggattacaggcatgwgccaccacgcgtggccaatatttgtctttaaattgactcactttgtttttacctcaatctacttatttattataaaagtactctacatggaaaaaacaat

SEQ ID NO: 349499 - DNA, 201 bp, Homo sapiens
tcgatccagccaaagttggggatctgtacttttgtgagcgaaagataataattgtaattatgtttagattgtccccaataaaccaggagacatgattactstagctaccagcctgcatcctctcttagaaccgcatctctttggagatggctttctaagaaaactagcaatgaaacctggaaggaaagagggaacatacag

SEQ ID NO: 349500 - DNA, 201 bp, Homo sapiens
catttttaaggtccctacaacatgcaggctccattctaaatacatcctttatcttattcatcgttccagtggcctcatggcagaattatcctgctttgctyttgcaggaaaggagactgagtcaggaagcaattcagattcatggagtaggtaatttctggattggaggtttaaactaagtctttcttataacaaaatcca

SEQ ID NO: 349501 - DNA, 201 bp, Homo sapiens
gaaaatgagccaaagctctttctgtcctagggaatttgtccatctaggagaggtactaaagaagaggtgcttttgatgactggcacagggtaaaggtgacmggcatcaggtccaggtggaggaggatctggtctattacagtctgcctctgctaaccaggagactaaccaaagaggcagcaaagaggcagacctgtgtggc

SEQ ID NO: 349502 - DNA, 201 bp, Homo sapiens
cacataccagaatcaacagaaacaacataccacagaaaaagatctatagatactggaatttattcaatacacactgtaaaatagttattttcactatgttyatggaaataaagcactgaatgtaaaaacatcagcaaataactgaaaactataaaaatacaccaagatgttgaaattaaagagctgagaaagataaccaaa

SEQ ID NO: 349503 - DNA, 201 bp, Homo sapiens
tgaaagtggattataacaatgacataaagcaaaagagaagatgggagagaaagtaaaaagagaaactctgtctttccagggagtatggacaagttaaaacytaatctaggatttatgtgggctaggattaatgtgaggttaactgggtgcaaaatttaagtgggtgtggatgccaaaatactcagtaatcaagataaatat

SEQ ID NO: 349504 - DNA, 201 bp, Homo sapiens; identical to SEQ ID NO: 74537

SEQ ID NO: 349505 - DNA, 201 bp, Homo sapiens
ccatagaaaccctttctcaatatcaactcagcagtgttagacagttttcttcacacaattatactagttgagctgagagattcaaaataacagtggatgargtaaagaaagttctaatttgattttgccaaggcacaaagccttgctaaaattgtgggtagacagtctagcacacttcaattactaggaaaaggtcaatta

SEQ ID NO: 349506 - DNA, 201 bp, Homo sapiens
actcactttaatgttgggtacttcaagctatacagctggctgctcctgtcttcttggtgtcttcaatctgggttttgaagcaaggtccttgataagatgattttttcagatgaaaacattggttctacctgccatacttcctttgtggaaaagtagagaaacagagaaatactcactgctactcattttagaggtgctcag

SEQ ID NO: 349507 - DNA, 201 bp, Homo sapiens
ccgtatgggggctaggcagaatgctatgtgttttgtgtgtgttatatctcattctcaccacaatccaatgctataggtagtcatgctatccatccatgttktacaaataagaaaactttggccctgagaatttgaacaatctactgtttctaaacagtgtccctggtatttgaacctagatttgggcctcagagcccaaga

SEQ ID NO: 349508 - DNA, 201 bp, Homo sapiens
aacttgtgatataatctatatgcatttagaccatactcacatgtagattttccatttgcatccttttgtagaacagtgattatgctatttaagttaatatyaatttcttatctacatcaaaaatattttttaaaaattatatccatatgtgcctacgaattggtggtaaggagaggatgggccggggagggccctgatgag

SEQ ID NO: 349509 - DNA, 201 bp, Homo sapiens
agcaatcagtaggccttcaatgagccctcaaaccagctggtaatcatttggaaaaaggaatgagccaaaagggtttaaaatcacaggtaaccagaaacagyacaattgtttccgttttctttcccatccaatttattagcagggctgctattattagcttctcgttgaccttcttcccttgtccctttcagcctgtgggtg

SEQ ID NO: 349510 - DNA, 201 bp, Homo sapiens
aaactttggccctgagaatttgaacaatctactgtttctaaacagtgtccctggtatttgaacctagatttgggcctcagagcccaagaccttaactaagktccttattatgtgccatcaaaaaatatgggggtgctcacccacctataaaaagtaaattggagtagaccagcattcccatcttcaatctggcatagttaa

SEQ ID NO: 349511 - DNA, 201 bp, Homo sapiens
tttggaattttgtaactattcacttctccagcagcataaggtggttaagaagacagtttctgttcgttgtaaaaaattactccaggcttaaggaggacaaytattgtgtctttatattcatatacccaggatttagcacagtgcctaatccataagggccacactaaaatgtttgcccagtgaataaatcctggataatat

SEQ ID NO: 349512 - DNA, 201 bp, Homo sapiens
gccctgagaatttgaacaatctactgtttctaaacagtgtccctggtatttgaacctagatttgggcctcagagcccaagaccttaactaaggtccttatyatgtgccatcaaaaaatatgggggtgctcacccacctataaaaagtaaattggagtagaccagcattcccatcttcaatctggcatagttaacacacctc

SEQ ID NO: 349513 - DNA, 201 bp, Homo sapiens
cacaggcgtggttctccagccatctccaaaggagccaccatcagggacctcacacacggcaccccggaatcggctctctcttctccaggtgcccttggggkcagtgcccctcctggtaatccttgtgagggtggtgtcccggctttcacctgggaggaccgaggggcccagacccccatccccacgcctgacctggcaggg

SEQ ID NO: 349514 - DNA, 201 bp, Homo sapiens
gtcgctggcctggttagggacagtggactcacaggcgtggttctccagccatctccaaaggagccaccatcagggacctcacacacggcaccccggaatcrgctctctcttctccaggtgcccttgggggcagtgcccctcctggtaatccttgtgagggtggtgtcccggctttcacctgggaggaccgaggggcccaga

SEQ ID NO: 349515 - DNA, 201 bp, Homo sapiens
cgctcctgctcgcccccttcatccctgggctcctgctgacggtggagtcgccggtgtggtgagggagggcggagtcgctggcctggttagggacagtggamtcacaggcgtggttctccagccatctccaaaggagccaccatcagggacctcacacacggcaccccggaatcggctctctcttctccaggtgcccttggg

SEQ ID NO: 349516 - DNA, 201 bp, Homo sapiens
gtggccaggaatgggcaaggccgggtgagcaggcctggggggcctggcttccatcgtctcagcagctctggggcatgggccatcctcctgagtggttgggygggaggatggtagcccagagtgaaggacagaggcagtgggctgtggattcgcgttggctggtggggcgtggactctcgttgcctggtttgcatttggaaa

SEQ ID NO: 349517 - DNA, 201 bp, Homo sapiens
agcacataaacagcctcaccaagagccagggccacacccagcaatcctccccgggctgcactggcatccaggcggtgccgggcgccgcgtcctggcctccrtttagaaactgactgtgtctcgtgtgtggggcctacagcccgacaggagggctggtaaattgcagctcggtgtgcgaggaagtacttttgtccctgagag

SEQ ID NO: 349518 - DNA, 201 bp, Homo sapiens
gcatggcagcgctcttgggaaagggaggaagcacgccctccctggaggagctgcttgtgctctccgtcgaggccagcacataaacagcctcaccaagagcsagggccacacccagcaatcctccccgggctgcactggcatccaggcggtgccgggcgccgcgtcctggcctccatttagaaactgactgtgtctcgtgtg

SEQ ID NO: 349519 - DNA, 201 bp, Homo sapiens
cccgcactcgccaagccccggcatggcagcgctcttgggaaagggaggaagcacgccctccctggaggagctgcttgtgctctccgtcgaggccagcacayaaacagcctcaccaagagccagggccacacccagcaatcctccccgggctgcactggcatccaggcggtgccgggcgccgcgtcctggcctccatttaga

SEQ ID NO: 349520 - DNA, 201 bp, Homo sapiens
cttgaacctcggtcttggagccaacaagcaggatcaagtggaccctgggccacgctagccttgcctggccctcggagtggtccccgcactcgccaagcccyggcatggcagcgctcttgggaaagggaggaagcacgccctccctggaggagctgcttgtgctctccgtcgaggccagcacataaacagcctcaccaagag

SEQ ID NO: 349521 - DNA, 201 bp, Homo sapiens
cctcgaagggtgcacctggctcccggggtccctcatgctgcgccctgaccacaccccaaaccgtgtctcctgcaggtgcagacagatgagctatggctccyggggtccctcatgctgcgccctgaccgcaccccaaaccgtgtctcctgcaggtgcagacagatgagctatggctcccggggtccctcatgctgcgccctg

SEQ ID NO: 349522 - DNA, 201 bp, Homo sapiens
cctggggctgcaccctcgggtgactctggactttctcctggggcttctgcttgcaggtgagaaacagcaaagccagtgcctactgtctggaccagggagcrgaggacggcgaccgggcgatcctctacccctgccacgggatgtcctcccaggtaggagtagcagcggccacccatgcagttcccaaggggacgaccccag

SEQ ID NO: 349523 - DNA, 201 bp, Homo sapiens
accttgggcaagctcctagcttctcacagccccggcttcctcatcggagaaaggattcctttattaggattaaatcagtgaacacctgtggtgccctgaaycccgtaactggcactgagttggtgcttcacagatgccggtgaccatgatttctttctcgcctgggactcagggagaggctggtggcttcccagctaagct

SEQ ID NO: 349524 - DNA, 201 bp, Homo sapiens
gcaagctcctagcttctcacagccccggcttcctcatcggagaaaggattcctttattaggattaaatcagtgaacacctgtggtgccctgaaccccgtamctggcactgagttggtgcttcacagatgccggtgaccatgatttctttctcgcctgggactcagggagaggctggtggcttcccagctaagcttgccaac

SEQ ID NO: 349525 - DNA, 201 bp, Homo sapiens
cgtgctcatgagagcaggacttactgcggggctgtgcctgcgagtgtggccctggggcctgccgcggggtgtggtcggtgtctggggcattagtgaatgarcagataagtcatctggatagtctctccataaagtgctcgtgccagggcaggacgggtggggcgtcaaagggaagcgagttattcattggctgaacagact

SEQ ID NO: 349526 - DNA, 201 bp, Homo sapiens
tcggtgtctggggcattagtgaatgaacagataagtcatctggatagtctctccataaagtgctcgtgccagggcaggacgggtggggcgtcaaagggaarcgagttattcattggctgaacagactcctgagtgagctcaggtgctggaggctgctctgggttcaggttccacagagagcaaagcagacaaagcgtgcgc

SEQ ID NO: 349527 - DNA, 201 bp, Homo sapiens
agcacctcccccgagggccccgttcggcccgacaggctttctgccctgactcctgcacacgtatgcattcagggtgatgcaggcacatccacatgcacacrgagaggtagcgcctcccccagagggtcccactcggcccgacaggccttccgccctgactcctgcacacacgtgtgcattcacggtgatgcaggcacatcc

SEQ ID NO: 349528 - DNA, 201 bp, Homo sapiens
caagggggtgggttcatcaagatcctgttaataagccctgtctcgccagaggcaaagaggtgtcacccttcctctggggagggagcgaggaggtgctgackggccgccctgtcttgccagaggcaaagaggtatcacccttcctctggggagggagcgaggaggtgctgacgggccgccctgcctcgccagaggcaaagag

SEQ ID NO: 349529 - DNA, 201 bp, Homo sapiens
ctgggggggaggctgctcctgtgaggggacttggtccctggagacccccaacctcattatggggaagacccaggtcatggtgacacccacgtaccctctcrcctacttctggccttgcagaacccaggggtggacttcggggacgtgtctgagaggctggccctgcgtcagaggctgaagtgtcgcagcttcaagtggtac

SEQ ID NO: 349530 - DNA, 201 bp, Homo sapiens
ggatggggcctcagcatctgaatactgggggggaggctgctcctgtgaggggacttggtccctggagacccccaacctcattatggggaagacccaggtcwtggtgacacccacgtaccctctcgcctacttctggccttgcagaacccaggggtggacttcggggacgtgtctgagaggctggccctgcgtcagaggctg

SEQ ID NO: 349531 - DNA, 201 bp, Homo sapiens
agtggaccgcgagtacttcggagacattgggctgctggaccccggcatggaggtgtatggcggcgagaacgtagaactgggcatgagggtgagtgcggccmcggtgtccagggacagggtgagggcgagtgaggccacagcgtctgggaacaggatgagggcgagtgaggccgcggtgtccggggacggggtgagggcgag

SEQ ID NO: 349532 - DNA, 201 bp, Homo sapiens
cggcccacccggccagagcatcccacacgccccctcctcctcccgcgggcacctccttaggtgctggctgcagagctggctgcgtgaagctccctggggcygcaccctcgggtgactctggactttctcctggggcttctgcttgcaggtgagaaacagcaaagccagtgcctactgtctggaccagggagcggaggacgg

SEQ ID NO: 349533 - DNA, 201 bp, Homo sapiens
gcatctgaatactgggggggaggctgctcctgtgaggggacttggtccctggagacccccaacctcattatggggaagacccaggtcatggtgacacccaygtaccctctcgcctacttctggccttgcagaacccaggggtggacttcggggacgtgtctgagaggctggccctgcgtcagaggctgaagtgtcgcagct

SEQ ID NO: 349534 - DNA, 201 bp, Homo sapiens
cagcagggggtggcagggctagatgcagaccaggtggggactggcctcccctccctgtgggcgagtggaccctcctcagggaatgcggtgggctggggccrcccctcctcacagctgtgcctccgcagggccgagcccgcactgtcgcggatccgagaggaccggcgtcgcatcgtgctgccagccatcgacaacatcaag

SEQ ID NO: 349535 - DNA, 201 bp, Homo sapiens
ccctctgtggatattaggaggctggggggggtcccacctggatggggccggatggggcctcagcatctgaatactgggggggaggctgctcctgtgagggsacttggtccctggagacccccaacctcattatggggaagacccaggtcatggtgacacccacgtaccctctcgcctacttctggccttgcagaacccagg

SEQ ID NO: 349536 - DNA, 201 bp, Homo sapiens
ggcaggcccagcacgcacccaaggacatggcgcttagaagctcccaggcatgtgtatgaggcttggtctgtgcccaccttgccccaggagaatgtgacccygtcctgactccagcaggctcgggtaccgtgtgtcccccgcggggtgggaacctcagatcaggtggggtggggctaaggtgcagaagtccggcctctcagg

SEQ ID NO: 349537 - DNA, 201 bp, Homo sapiens
ccgtctgtccaggccggggctggcctctggcagggtccttcccatcaggagcagctgcctcagaccctctgtggatattaggaggctggggggggtcccamctggatggggccggatggggcctcagcatctgaatactgggggggaggctgctcctgtgaggggacttggtccctggagacccccaacctcattatgggg

SEQ ID NO: 349538 - DNA, 201 bp, Homo sapiens
tggcaggatctccctcgtacgacctgcgaggcggacgcggttgggatcctcattgtgccggagactgaggctcccaatggctgtcggtctcgcctgtgggygcctgggctcgaacctggatcggaccctggcgctgctccctgtcaggaacatctgctgacggctggtccagcatccacgggccccacttctaggagccgc

SEQ ID NO: 349539 - DNA, 201 bp, Homo sapiens
tgtctctgcctcccagtctctgcctcattctctccatgtctctgtctctgtctctcccagtctttttgtctctctgtgtctctttgtctcagtctgtctgtatctctgtctctttgtctctctgtctctctctgtctctgactctgtctctgactctgtctctctgtctctcagtctctcagtgtgtgtgtctctctctgt

SEQ ID NO: 349540 - DNA, 201 bp, Homo sapiens
caggccctgagtccagcatgacgcggtggagcataagccaatctgagtgccctatttcctctggccacagcgattggttcagggaagagcacgtcacccartcagagcccagcagacacagggatgcttttcctgcgtgtcctgggaagacaggtgggtttgctgccctggactcaaacccctggaaggtttggacctgcg

SEQ ID NO: 349541 - DNA, 201 bp, Homo sapiens
ctgtctctgcctcccagtctctgcctcattctctccatgtctctgtctctgtctctcccagtctttttgtctctctgtgtctctttgtctcagtctgtctgtatctctgtctctttgtctctctgtctctctctgtctctgactctgtctctgactctgtctctctgtctctcagtctctcagtgtgtgtgtctctctctg

SEQ ID NO: 349542 - DNA, 201 bp, Homo sapiens
tctgtctctgcctcccagtctctgcctcattctctccatgtctctgtctctgtctctcccagtctttttgtctctctgtgtctctttgtctcagtctgtctgtatctctgtctctttgtctctctgtctctctctgtctctgactctgtctctgactctgtctctctgtctctcagtctctcagtgtgtgtgtctctctct

SEQ ID NO: 349543 - DNA, 201 bp, Homo sapiens
ccccttcctcgctcctccgcagggcgctttcctttccctcgatgtttatcagcttctgacgtgttgtgcatgaattgtgttccactgtctgccccccacartgtcaccccatgcagtcgcacacgttgtgcactgcacaactacaccggcagccttttagtccctctgatgccgggtaagctccccgaggcctgagggcgt

SEQ ID NO: 349544 - DNA, 201 bp, Homo sapiens
atctgtctctgcctcccagtctctgcctcattctctccatgtctctgtctctgtctctcccagtctttttgtctctctgtgtctctttgtctcagtctgtctgtatctctgtctctttgtctctctgtctctctctgtctctgactctgtctctgactctgtctctctgtctctcagtctctcagtgtgtgtgtctctctc

SEQ ID NO: 349545 - DNA, 201 bp, Homo sapiens
tgtccccggctgggctgagctgagcagcgaggaggctctgggttgccggaccggggtcagggagcctggcgttagctgcgtgctgtgtggtcatctcggcraggagggagcggctccctcctgccccggactctggatctgtcctgcggtgggtggtgtcggagcagccgtaagtgattggcgatacggcctcccggttct

SEQ ID NO: 349546 - DNA, 201 bp, Homo sapiens
tattaaacagcaatgatttaagaccacacatcctgataggccccaaggggagcagttctataaactgcccaaggactgtggatcttcctgtgtttagagcrgcgggcctgggttggggagccactcttcacctctgatcactcctctccccagacaccagacagcctagcagctcccaggcaggcggctgcctgaggccag

SEQ ID NO: 349547 - DNA, 201 bp, Homo sapiens
cgaggaggctctgggttgccggaccggggtcagggagcctggcgttagctgcgtgctgtgtggtcatctcggcgaggagggagcggctccctcctgccccrgactctggatctgtcctgcggtgggtggtgtcggagcagccgtaagtgattggcgatacggcctcccggttctctctctccctgggactcggcttcctga

SEQ ID NO: 349548 - DNA, 201 bp, Homo sapiens
ctcaggccatccagcctctcactgcagcctctgggctctgtgtcagccagtggctgggtggctttggccctgtgggtctccagcgtggacggcgggcctcygcggccatctcaccttgcggtagaccatggcgtctccaagggcgagggctgcacctgcttcccaggacccctgcttgggacggggaatcgaagactgagc

SEQ ID NO: 349549 - DNA, 201 bp, Homo sapiens
tgctcagaaggacgggaagaaggggtgaagacagccgtgtggtctcacaggcagggtcagggccttgcctctccccatgccggctctgcctgagccgacccgaatctgccctcaggccatccagcctctcactgcagcctctgggctctgtgtcagccagtggctgggtggctttggccctgtgggtctccagcgtggacg

SEQ ID NO: 349550 - DNA, 201 bp, Homo sapiens
gcggtagaccatggcgtctccaagggcgagggctgcacctgcttcccaggacccctgcttgggacggggaatcgaagactgagctgatgcccatcgaggcygcttctactcaccttcctctctgccctcctcgccccccattgccccatcgctctgtccggcctcctggccagccctgcaggcccattaggcacacgccgg

SEQ ID NO: 349551 - DNA, 201 bp, Homo sapiens
ccttccccttcctcgctcctccgcagggcgctttcctttccctcgatgtttatcagcttctgacgtgttgtgcatgaattgtgttccactgtctgcccccyacagtgtcaccccatgcagtcgcacacgttgtgcactgcacaactacaccggcagccttttagtccctctgatgccgggtaagctccccgaggcctgagg

SEQ ID NO: 349552 - DNA, 201 bp, Homo sapiens
agggcagccctacttaaaactgtgagccccctctacaacatccacgactgcttatacctcatcctccgtcccgtccttgagcggggccgctgcacactcaygcaggttccacactgcacaacggtgcctggtggcttttcatcccacaccgtgcgagctccccgtggcacggattgtttttattccttagttcatgattgt

SEQ ID NO: 349553 - DNA, 201 bp, Homo sapiens
cttaaaactgtgagccccctctacaacatccacgactgcttatacctcatcctccgtcccgtccttgagcggggccgctgcacactcacgcaggttccacwctgcacaacggtgcctggtggcttttcatcccacaccgtgcgagctccccgtggcacggattgtttttattccttagttcatgattgtattccaatttgt

SEQ ID NO: 349554 - DNA, 201 bp, Homo sapiens
ccctcgggtgactctggactttctcctggggcttctgcttgcaggtgagaaacagcaaagccagtgcctactgtctggaccagggagcggaggacggcgaycgggcgatcctctacccctgccacgggatgtcctcccaggtaggagtagcagcggccacccatgcagttcccaaggggacgaccccaggccacccggacc

SEQ ID NO: 349555 - DNA, 201 bp, Homo sapiens
ccccgggacccaccaggcccgtcggtggtgggggtgccccaggaacagagggccgggccccttggcctctcacgggcccctagctggccgggctgcccgcytccgttgggaaggacgccggcacccagcgccgtctccccgcaggtgtggcagtgtggcggcagcatggaggtgctgccctgctcccgcgtggcccacatc

SEQ ID NO: 349556 - DNA, 201 bp, Homo sapiens
agcctagagcaattgccccgtggttagaagccagggaggggcggcctctccccaacctggtgccgccgcctcagccagggccccacttagtgccctgcacrgcacctgtcagccagtgcggacccctccccagccccgggcagcctcaactgtctggcggtttcatgaacggctcatacgctgtgtggcttcccgtcctca

SEQ ID NO: 349557 - DNA, 201 bp, Homo sapiens
agcgcacacacgcatacatttacatctgtccacatacagcgctttgtgtacgtagcaccaaagtgacccttctcatttacaatattactacttcttaaaamttcccaccacagcccctaaattggcttaccaccccctgctagagtgcaccccagcgtgtgggtgacacggcctgaagtggccccgggctggaccattcac

SEQ ID NO: 349558 - DNA, 201 bp, Homo sapiens
aagagggtacccggtgctcctacagccttgttttccatgaagtgataaggaaaacgtgcagggtgatgacctccccaagtgtgtgggcaactgagtgaggkgctccaggcccccgggcagtgaggccggcaaatgcctgtcacctccgtgtccaagggccctggtgtgagccccttggctgattaaaacctcataacagag

SEQ ID NO: 349559 - DNA, 201 bp, Homo sapiens
gacttgattctccggcacccatgcgtgacaacacgtgccaggcggggccagccaggagcccccaagcctcagtatccagggtcctcaccaggctggtctcgtggatatggctgacctcagtctccaccctccagaggtcaggctgatgccgtgcagtaaggccaggtgagcagggccgtcttctcaggcaggaggttcctg

SEQ ID NO: 349560 - DNA, 201 bp, Homo sapiens
cagagtgccagccgggctccggcctccttcacctgatcttcctctagtgtggccaggaaggggaggggcccgggcctcctgcctcttgagagcccctgagaggggggccaagtgcctctggctcctgtgggaggattttgcctgatccttaggtgttggtctcctctggcccacagagtggagaagttattgccaatattc

SEQ ID NO: 349561 - DNA, 201 bp, Homo sapiens
cctcagcctcccaagtagctgggactacaggtgcacgccaccatgcccagctaattttttattttttatttatttatttatttattttttttagtaaagayggcatttcaccatgttggccaggatggtcacgatctcttgacttcatgatccacccacctcagcctcccaaactgctgggattacaggcgtgagccaccg

SEQ ID NO: 349562 - DNA, 201 bp, Homo sapiens
tgaccacaagtcactcgttgccatcttggttttggtgggacttggcggctcctttactggaacctgtttgtttgtttgagatgaagtcttgctctgtcacycaggctggagtgcaatggtgcgatctcggctcactgcaacctttgcttcccaagttcaagcaattctcctgcctcagcctcccaagtagctgggactaca

SEQ ID NO: 349563 - DNA, 201 bp, Homo sapiens
taggaaggggatgaggtatgattccaacctgggccgctagccctgcaggaaagatgggaaatcctcgaagctccactgaagtcagccccttcccggccccmctgggtgctgctgtgatgctggctttccattcaagctgccccaagaatgagcacgagggctgagagcacgaagcagcctccctgaggtggggggaggggg

SEQ ID NO: 349564 - DNA, 201 bp, Homo sapiens
aactgagaacacattctgctcatctttctccttttgcatacacttgaaaatttccataaaagtaaatatgcatattaaaagcagcggaggggccgggtgcrgtggcttacgcctgtatttccagcacttttgggaggccgaggcgggtggatcacctgaggtcaggagttcctagcctggcaaaaccctgtctctactaaa

SEQ ID NO: 349565 - DNA, 201 bp, Homo sapiens
ttctgctcatctttctccttttgcatacacttgaaaatttccataaaagtaaatatgcatattaaaagcagcggaggggccgggtgcggtggcttacgcckgtatttccagcacttttgggaggccgaggcgggtggatcacctgaggtcaggagttcctagcctggcaaaaccctgtctctactaaaaatacaaaaattc

SEQ ID NO: 349566 - DNA, 201 bp, Homo sapiens
agtcagatatagagatgatcatggacaattatcaatcattattataaacattattaatcattagcttttaatattactctttgttgcattactaatataayctaggaataacctgagggtatagggtcaggtgctgaaggaacattgtgagaagtgacctagaaggcaagaggtgagccctctgtcatgcccgcataaggg

SEQ ID NO: 349567 - DNA, 201 bp, Homo sapiens
tctcagagggctgtcagggttccttccaagacagagtggaagctggaaggtctcccaagggtccaagccaaggccagcctagactgcaaggctggcgagcrgtctctacccactcagtgggagccgcaagggcacagggagcaggcggcaaggcagggaagccactccacagcctggggctgtcgtccctgctgctcaagt

SEQ ID NO: 349568 - DNA, 201 bp, Homo sapiens
tgatcatggacaattatcaatcattattataaacattattaatcattagcttttaatattactctttgttgcattactaatataatctaggaataacctgmgggtatagggtcaggtgctgaaggaacattgtgagaagtgacctagaaggcaagaggtgagccctctgtcatgcccgcataagggccgcttgagggctcc

SEQ ID NO: 349569 - DNA, 201 bp, Homo sapiens
tgtgagccccttggctgattaaaacctcataacagagcaacaatgagtttctggcgtgatcgtccccactttaccaatgagtaactgaggcacagagaagrtaggggactgtcccaggcccacataccagaaggtgacgggattcaagcccaggccgtgaaggccaagtcgtctgccctccccacaaggcctgagcctgga

SEQ ID NO: 349570 - DNA, 201 bp, Homo sapiens
attataaacattattaatcattagcttttaatattactctttgttgcattactaatataatctaggaataacctgagggtatagggtcaggtgctgaaggracattgtgagaagtgacctagaaggcaagaggtgagccctctgtcatgcccgcataagggccgcttgagggctccttggtcaagcggtaacgccagtgtc

SEQ ID NO: 349571 - DNA, 201 bp, Homo sapiens
agtcacagtgacatgctgatgtagattggatgtttgtcccctccaaatttcaggtagaaatttaaccaacatggaggtggtgcctgctgggacgtgtttgsgtcacgggtggatccctcatgaacagtccagcactgtcctcatggtaactaacatccactctagtagttcctgagggagctggttgttagaagggtcctg

SEQ ID NO: 349572 - DNA, 201 bp, Homo sapiens
ggtgactctggactttctcctggggcttctgcttgcaggtgagaaacagcaaagccagtgcctactgtctggaccagggagcggaggacggcgaccgggcratcctctacccctgccacgggatgtcctcccaggtaggagtagcagcggccacccatgcagttcccaaggggacgaccccaggccacccggaccctacac

SEQ ID NO: 349573 - DNA, 201 bp, Homo sapiens
ggatgtcctcccaggtaggagtagcagcggccacccatgcagttcccaaggggacgaccccaggccacccggaccctacaccctggggcagaggcacgggkccagcctgctggggtgttctgaggccaccagggctgcattccagggcttggagcagcctgagggcccctctagaagaggcctcccagcccgccccacctg

SEQ ID NO: 349574 - DNA, 201 bp, Homo sapiens
ggcgagaacgtagaactgggcatgagggtgagtgcggccccggtgtccagggacagggtgagggcgagtgaggccacagcgtctgggaacaggatgagggygagtgaggccgcggtgtccggggacggggtgagggcgagtgtggctgcagcgtccggggatggggtgagggcgagtgcggccacggcatctggggacggg

SEQ ID NO: 349575 - DNA, 201 bp, Homo sapiens
tcaagtggtacctggagaacgtgtacccggagatgagggtctacaacaacaccctcacgtacggagaggtagcacctcccccgagggccccgttcggcccracaggctttctgccctgactcctgcacacgtatgcattcagggtgatgcaggcacatccacatgcacacagagaggtagcgcctcccccagagggtccca

SEQ ID NO: 349576 - DNA, 201 bp, Homo sapiens; identical to SEQ ID NO: 74545

SEQ ID NO: 349577 - DNA, 201 bp, Homo sapiens
ccgcaagctcagcacacactgacggggctggcacctgtggagctggcttggggaggcctcgcagaccgcccagcagtcccaccaggttcccatgtggaatygccccagcgccacagaaggccccggggacagagtggccgtaagtggctgtggggttcctaaagggaacacattcgttccgcagctatttatcaagcacct

SEQ ID NO: 349578 - DNA, 201 bp, Homo sapiens
tactgtctggaccagggagcggaggacggcgaccgggcgatcctctacccctgccacgggatgtcctcccaggtaggagtagcagcggccacccatgcagytcccaaggggacgaccccaggccacccggaccctacaccctggggcagaggcacggggccagcctgctggggtgttctgaggccaccagggctgcattcc

SEQ ID NO: 349579 - DNA, 201 bp, Homo sapiens
acctggctgacttgatgtgcctgtccccacagagtggccccattgtgagccgggccacgggccgctgcctggaggtggagatgtccaaagatgccaacttygggctccggctggtggtacagaggtgctcggggcagaagtggatgatcagaaactggatcaaacacgcacggcactgaccccacctccgcccggaccccc

SEQ ID NO: 349580 - DNA, 201 bp, Homo sapiens
gtgcagacagatgagctatggctcctggggtccctcatgctgcgccctgaccgcaccccaaaccgtgtctcctgcaggtgcagacagatgagctatggctyccggggtccctcatgctgcgccctgaccgcaccccaaaccgtgtttcctgcaggtgcagacagatgagctacgcccaggacctgccccaggtctccgtgg

SEQ ID NO: 349581 - DNA, 201 bp, Homo sapiens
ggacctccctagaggcaggcaggtgtgtagtcacatccatgcgtgttcacattgcctgattcaatgtacctacgctctcacgtatgtgtacatagggatayatgcactcacctagatgtgtgtacagagacattcacaggcaggtgcgtaaatccatgcaaacactcatatgtacaagagcacgcggacacgagtatacat

SEQ ID NO: 349582 - DNA, 201 bp, Homo sapiens
acctccctagaggcaggcaggtgtgtagtcacatccatgcgtgttcacattgcctgattcaatgtacctacgctctcacgtatgtgtacatagggatacaygcactcacctagatgtgtgtacagagacattcacaggcaggtgcgtaaatccatgcaaacactcatatgtacaagagcacgcggacacgagtatacattt

SEQ ID NO: 349583 - DNA, 201 bp, Homo sapiens
ttcacattgcctgattcaatgtacctacgctctcacgtatgtgtacatagggatacatgcactcacctagatgtgtgtacagagacattcacaggcaggtrcgtaaatccatgcaaacactcatatgtacaagagcacgcggacacgagtatacatttgcacccagttttgctaatgtacacagctcttcctacacagatg

SEQ ID NO: 349584 - DNA, 201 bp, Homo sapiens
tgcggtgggctggggccgcccctcctcacagctgtgcctccgcagggccgagcccgcactgtcgcggatccgagaggaccggcgtcgcatcgtgctgccakccatcgacaacatcaagtacagcacgtttgaggtgcagcagtatgcgaacgccgcccatggctacaactggggcctctggtgcatgtacatcatcccccc

SEQ ID NO: 349585 - DNA, 201 bp, Homo sapiens
agcagatgtcagaaggtgtaggcaggtgcaggcagctgtgagcaggtttgggcaggtgtgagcagctgtgaactggtgtggatgggtgtgagcaggtgtgkacaggtatgaacaggtgtggacgggtgtgatcaggtggcctggggcagctgagggtacacggcagatacaggagctccacgtgaaggcagccagactcca

SEQ ID NO: 349586 - DNA, 201 bp, Homo sapiens
acctgagtgcacagggaggaggcacaggagggaggggtggtggggtcttccaggctttcctggctcatggcccagcaggcagggctcaggcctgcatggcsaggtcctcacgccgctgtctctgcctcccaggaccccagccatgatcggctgctccttcgtagtggaccgcgagtacttcggagacattgggctgctgga

SEQ ID NO: 349587 - DNA, 201 bp, Homo sapiens
tggcccccacccgctccccgccagccgcctgtcggggctgtcattgctgatttattcacgagatcgatgcctgggggagggaggctggcatttgcttgtayttgaaaggcccgtctgaccttgaactccagcccaggggatcttctgccctgtcccgagggttgaactccagcccgggggaccctcctgccctgtcccgag

SEQ ID NO: 349588 - DNA, 201 bp, Homo sapiens
aaagcccagaaatgccgcctcacaggctgcctgggagccaaagcctcgagctcagaacggtgccaagtgaagaggtgaactttggccacagaagcagccayggcttctctccagtcttgtgagtgggcatcccagtcagcggcccaaagagaaaactgctcatccccccagatgctggaacacctcccaaggtagccacgt

SEQ ID NO: 349589 - DNA, 201 bp, Homo sapiens
atgccgcctcacaggctgcctgggagccaaagcctcgagctcagaacggtgccaagtgaagaggtgaactttggccacagaagcagccacggcttctctcyagtcttgtgagtgggcatcccagtcagcggcccaaagagaaaactgctcatccccccagatgctggaacacctcccaaggtagccacgtgggcacgcaga

SEQ ID NO: 349590 - DNA, 201 bp, Homo sapiens
cctgaccgcaccccaaaccgtgtctcctgcaggtgcagacagatgagctatggctcccggggtccctcatgctgcgccctgaccgcaccccaaaccgtgtytcctgcaggtgcagacagatgagctacgcccaggacctgccccaggtctccgtggtcttcatcttcgtcaatgaggcgctgtcggtcatcctgcgctccg

SEQ ID NO: 349591 - DNA, 201 bp, Homo sapiens
cctttccaacctgcagccgctcctgcagtccgtcctaggacgtacttcctttctcaggactttctgttttacacattttgcaagttcatgaaaactgtgcratccaagctttttcctctacagatgagtggagtgacgttttcttgtcagaaagcatttttctgagtgatgaaatctccctggctgagcaccacagcccag

SEQ ID NO: 349592 - DNA, 201 bp, Homo sapiens
tgattatttactaattaacttttgtggttattttttgatcatttgctaaacaagggatggattattcctgagttttctgggaaaggcagcaggatttcccsgaactgagggctccaccctttttagaccacgcagggtaacttcctgacgttcccatggcatctgtgaactgtcttggtgctggggggagtgtcttttagc

SEQ ID NO: 349593 - DNA, 201 bp, Homo sapiens
tcaggtagcacgggggtgaccacaggcatcgtcacccaaaccaggacacctgagagttaccagaggtgctattaataattaccccaagacaggggtatcarctcggattgtcttgggcagtggggatgcatggctagtaactagcattaactggtactatgtgctgcatgcaaggaagccacaggagtgagggtctttgcc

SEQ ID NO: 349594 - DNA, 201 bp, Homo sapiens
ttctgaggccaccagggctgcattccagggcttggagcagcctgagggcccctctagaagaggcctcccagcccgccccacctggaaggtagcagaacacrgggaattgaaaacagcctgggccgggtgcagtggctcacgcctgtcatctcagcacgatgggaggccaaggcagacagatcacttaagcccaggaattga

SEQ ID NO: 349595 - DNA, 201 bp, Homo sapiens
attttctgattggtaattggttgaaagagttaagttattatctaaagacctggtatgaatagaaaggagcatctggttaagataaagggttgtggagaccraggttttatgatgcagatgaagcctccaggtagcgggcttcagaaggagcttcagaaggaggagattgtaaatgtttcttatcagacttaaaaaggggcc

SEQ ID NO: 349596 - DNA, 201 bp, Homo sapiens
tggggccatgttagaagttccaggacggcttccatggtggacacccagcgtgacgatcgcaaaggcgcatgtgggtccacgtggtgttgtcatcgcggccrgtgcccctgcgttccatgcttagcgtgcaggcgtgcagcctgctggatgtgtatgttttagggagaaggaatcaatgcacacatgtcaggtgtgcactgg

SEQ ID NO: 349597 - DNA, 201 bp, Homo sapiens
agggagcggaggacggcgaccgggcgatcctctacccctgccacgggatgtcctcccaggtaggagtagcagcggccacccatgcagttcccaaggggacraccccaggccacccggaccctacaccctggggcagaggcacggggccagcctgctggggtgttctgaggccaccagggctgcattccagggcttggagca

SEQ ID NO: 349598 - DNA, 201 bp, Homo sapiens
catggaggtgctgccctgctcccgcgtggcccacatcgagcgcaccaggaagccctacaacaacgacattgactactacgccaagcgcaacgccctgcgcrccgccgaggtgtggatggatgacttcaagtcccacgtgtacatggcctggaacatccccatgtcggtgagtcccccacaggccgggagccggggccatgc

SEQ ID NO: 349599 - DNA, 201 bp, Homo sapiens
ttctctccagtcttgtgagtgggcatcccagtcagcggcccaaagagaaaactgctcatccccccagatgctggaacacctcccaaggtagccacgtgggyacgcagatcttaggaaggaagacacccagcggagaccagggaggagctggacatgggggacactcagtgccgcctgcctgtggaccccctccctgtccca

SEQ ID NO: 349600 - DNA, 201 bp, Homo sapiens
gcggagaccagggaggagctggacatgggggacactcagtgccgcctgcctgtggaccccctccctgtcccattcctgccacagaaaacaccccgtcctcygaggctgcagactgcgctcagcacccaggtcctggctcctcgctgggcctgcggctgtgccacgcaccgtcctgcctgcagatgagagtgcttggtgctg

SEQ ID NO: 349601 - DNA, 201 bp, Homo sapiens
cggagaccagggaggagctggacatgggggacactcagtgccgcctgcctgtggaccccctccctgtcccattcctgccacagaaaacaccccgtcctccraggctgcagactgcgctcagcacccaggtcctggctcctcgctgggcctgcggctgtgccacgcaccgtcctgcctgcagatgagagtgcttggtgctgg

SEQ ID NO: 349602 - DNA, 201 bp, Homo sapiens
gtcaggagttcctagcctggcaaaaccctgtctctactaaaaatacaaaaattcgcagggcgtggtgtcaggtgcctgtaatcccaactacttgggaggcygaggcaggagaattgcttgaacagaggaggcagaggttatagtgagctgagatggtgccattgcactccagcctgggcaacgagagcgaaattcagtcta

SEQ ID NO: 349603 - DNA, 201 bp, Homo sapiens
cctgccacagaaaacaccccgtcctccgaggctgcagactgcgctcagcacccaggtcctggctcctcgctgggcctgcggctgtgccacgcaccgtcctkcctgcagatgagagtgcttggtgctggtctccaggacgtcgtcagcaaatgacccttccaggaaagcctccacattgttctccctgtgtgagggaccctg

SEQ ID NO: 349604 - DNA, 201 bp, Homo sapiens
aatggatagatagtggctaggtgggtgaatgagtaggtagatggatggataaaggaatggatggatgagtgggtggatggatgggtgaatggatggattgrtggctggctggctggatggatagatagatggatgagtgagtggatggatgggggggtgggatgcatggatggatgaatggatggctggctggatgcaggg

SEQ ID NO: 349605 - DNA, 201 bp, Homo sapiens
atggatggataaaggaatggatggatgagtgggtggatggatgggtgaatggatggattggtggctggctggctggatggatagatagatggatgagtgartggatggatgggggggtgggatgcatggatggatgaatggatggctggctggatgcagggatggatggatggatgagtccgcgtggatgggtggatagat

SEQ ID NO: 349606 - DNA, 201 bp, Homo sapiens
ggaatggatggatgagtgggtggatggatgggtgaatggatggattggtggctggctggctggatggatagatagatggatgagtgagtggatggatgggkgggtgggatgcatggatggatgaatggatggctggctggatgcagggatggatggatggatgagtccgcgtggatgggtggatagatagtggctaggtgc

SEQ ID NO: 349607 - DNA, 201 bp, Homo sapiens
tgcagtctcctgaggcccaagcttggccttggcactgggtgggttctggccctttctgttggtccaagcaaatcacgtgacgaaggcctagggtgatagcrtccccctctcagtggggagagctgcacacacagacgccagaaggcgagtccagcttatccccagttgctctcagtgcagagtgccagccgggctccggcc

SEQ ID NO: 349608 - DNA, 201 bp, Homo sapiens
aagcctcatggccccgctcagtcctccagctgcacccacacgtgatgagtgtgacgtctgagcctcgcctgcctcccctctagatgacagtttcacgatgraggccgcatgtccccagcgcttccaggagaaccctacgagccctgttgctttgcttgccttgaccagaagaacaggtccgacttcacgggacggcctcgc

SEQ ID NO: 349609 - DNA, 201 bp, Homo sapiens
ccgccagttaaccccactcgccacccatctccgctcagagctggggttcaggaagctgtccccagccagggcgcacctcctgcccaagcctcatggccccrctcagtcctccagctgcacccacacgtgatgagtgtgacgtctgagcctcgcctgcctcccctctagatgacagtttcacgatgaaggccgcatgtcccc

SEQ ID NO: 349610 - DNA, 201 bp, Homo sapiens
gagcagccctgcccccctccccctgggctctgggagtgcctctgcccaccaccccaactccaaaacctctcctttccaacctgcagccgctcctgcagtcygtcctaggacgtacttcctttctcaggactttctgttttacacattttgcaagttcatgaaaactgtgcaatccaagctttttcctctacagatgagtgg

SEQ ID NO: 349611 - DNA, 201 bp, Homo sapiens
gggccctttctgtggactgaggccggcggcaggcaccgcgatttttggtgcatctcatggatttgctgagcgcacctctcaagtgtgatggttttgccagsattcagaaagctgttgtgagtcaggccggcagccgaccaccagacagcgacctccagacagcgaccacccagacggcgacctccagatggcaaccgccag

SEQ ID NO: 349612 - DNA, 201 bp, Homo sapiens
tgacaaactcttggaaagcattttctgcatcctgctggttgtggaagcgttttctctgcaaaaagttgtcgagaggcttgcagaagcggtagttggttggygagaagtcaggtgaatgtggcggatgaggcaaaactttgcagcccaattcgttcagcttgtgaagcgttggttgtgtgacgtgcagccaggcgttgtggt

SEQ ID NO: 349613 - DNA, 201 bp, Homo sapiens
tgggaagctctgggcctgctgcctttcacagagagaatattcgggaaaaccacggtggagacagaggatgagggacacagaatggccaggtggacgagagwgggtggacggagtgagcggatcacagtaagactgcggatacacggctgtttctggccagcgcgaaaggcagctgcatgtggtttgaccgaatagacacga

SEQ ID NO: 349614 - DNA, 201 bp, Homo sapiens
ccaggcggcccacccggccagagcatcccacacgccccctcctcctcccgcgggcacctccttaggtgctggctgcagagctggctgcgtgaagctccctrgggctgcaccctcgggtgactctggactttctcctggggcttctgcttgcaggtgagaaacagcaaagccagtgcctactgtctggaccagggagcggag

SEQ ID NO: 349615 - DNA, 201 bp, Homo sapiens
ggctggacagtctgatcatagccctgcatctgcctcttccagcctcaggtgcccagggtagagggaggatttaggaaggggatgaggtatgattccaaccygggccgctagccctgcaggaaagatgggaaatcctcgaagctccactgaagtcagccccttcccggcccccctgggtgctgctgtgatgctggctttcca

SEQ ID NO: 349616 - DNA, 201 bp, Homo sapiens
acgctgtctgggctgagggcttaaccaggctccaagggactcaagtcctggtggctggaggagcagcggcccctcaccttgagcacagggacctgagtgcmcagggaggaggcacaggagggaggggtggtggggtcttccaggctttcctggctcatggcccagcaggcagggctcaggcctgcatggcgaggtcctcac

SEQ ID NO: 349617 - DNA, 201 bp, Homo sapiens
gcagacagccgcaacgagatggggccatgttagaagttccaggacggcttccatggtggacacccagcgtgacgatcgcaaaggcgcatgtgggtccacgyggtgttgtcatcgcggccagtgcccctgcgttccatgcttagcgtgcaggcgtgcagcctgctggatgtgtatgttttagggagaaggaatcaatgcaca

SEQ ID NO: 349618 - DNA, 201 bp, Homo sapiens
tggctttccattcaagctgccccaagaatgagcacgagggctgagagcacgaagcagcctccctgaggtggggggagggggaacaaggacgcctgcacctrgctgacttgatgtgcctgtccccacagagtggccccattgtgagccgggccacgggccgctgcctggaggtggagatgtccaaagatgccaactttgggc

SEQ ID NO: 349619 - DNA, 201 bp, Homo sapiens
tcccaactacttgggaggccgaggcaggagaattgcttgaacagaggaggcagaggttatagtgagctgagatggtgccattgcactccagcctgggcaaygagagcgaaattcagtctaaaaaaaaaaaaaagaaaaaacagtgaagggcattttcaaggatgtacagcaggggtcagggaatcatggcccacagtcctg

SEQ ID NO: 349620 - DNA, 201 bp, Homo sapiens
ttttggtccttttttttttttttttgagacggagtctcgctctgtcgcccaggctgcagtgcagtggtgtgatctcagctcactgtcacctctgcctcccrggttcaagagattctcatgtttcagcctcctgagtagctgggactacaggcatctgccaccatgcccagctaatttttgtatttttagtagacatggggt

SEQ ID NO: 349621 - DNA, 201 bp, Homo sapiens
cagacccgggtggggtttccgtgtcgaggtctgagggctgcagacccgggtggggtttccgtgtcgaggtctgagggctgcagacccgggtggggtttccstgtcgaggtctgagggctgcagacccgggtggggtttccgtgtcgaggtctgagggctgcagacccgggtggggtttccgtgtcgaggtctgaaggctgc

SEQ ID NO: 349622 - DNA, 201 bp, Homo sapiens
gaggtctgagggctgcagacccgggtggggtttccgtgtcgaggtctgagggctgcagacccgggtggggtttccgtgtcgaggtctgagggctgcagacmcgggtggggtttccgtgtcgaggtctgagggctgcagacccgggtggggtttccgtgtcgaggtctgagggctgcagacccgggtggggtttccgtgtcg

SEQ ID NO: 349623 - DNA, 201 bp, Homo sapiens
cgaggccctcccatgtttgtgcccagcgctgctgtaacacaggaccacagcaggtggcttcagatggcagaattgattccctcacagtcccagagtccaasgcccaggtgccagcccggcttcctccgagggctccggggctcctcccacctcctccctcgctgggcctgacccgtctctgctgccggtggcctgttcctc

SEQ ID NO: 349624 - DNA, 201 bp, Homo sapiens
cgggtggggtttccgtgtcacggtctgagggctgcagacccgggtggggtttccgtgtcacggtctgagggctgcagacccgggtggggtttccgtgtcamggtctgagggctgcagacccgggtggggtttccgtgtcgaggtctgagggctgcagacccgggtggggtttccgtgtcgaggtctgagggctgcagaccc

SEQ ID NO: 349625 - DNA, 201 bp, Homo sapiens
ccgggtggggtttccgtgtcacggtctgagggctgcagacccgggtggggtttccgtgtcacggtctgagggctgcagacccgggtggggtttccgtgtcrcggtctgagggctgcagacccgggtggggtttccgtgtcgaggtctgagggctgcagacccgggtggggtttccgtgtcgaggtctgagggctgcagacc

SEQ ID NO: 349626 - DNA, 201 bp, Homo sapiens
cgggtggggtttccgtgtcgaggtctgagggctgcagacccgggtggggtttccgtgtcacggtctgagggctgcagacccgggtggggtttccgtgtcamggtctgagggctgcagacccgggtggggtttccgtgtcacggtctgagggctgcagacccgggtggggtttccgtgtcgaggtctgagggctgcagaccc

SEQ ID NO: 349627 - DNA, 201 bp, Homo sapiens
ccgggtggggtttccgtgtcgaggtctgagggctgcagacccgggtggggtttccgtgtcacggtctgagggctgcagacccgggtggggtttccgtgtcrcggtctgagggctgcagacccgggtggggtttccgtgtcacggtctgagggctgcagacccgggtggggtttccgtgtcgaggtctgagggctgcagacc

SEQ ID NO: 349628 - DNA, 201 bp, Homo sapiens
gacccccgtctccactggcccccacatgcacagcactccgtaaagccagcgagaaggtgctgctcttctgccctctccccagtctgtgcaggggatggggygcctcccaccatgagactcgagcgtcccagccctgagctggcactcggatggggcacggaaaagggtccctggggtggatggtcctcgctgagcctcccc

SEQ ID NO: 349629 - DNA, 201 bp, Homo sapiens
gggtttccgtgtcgaggtctgaaggctgcagacccgggtggggtttccgtgtcgaggtctgagggctgcagacccgggtggggtttccgtgtcgaggtctsaaggctgtagactcgggtggggtttccgtgtcacggtctcaaggctgtagacccgggtggggtttccatgtcacggtctgagggctgcagacccgggtgg

SEQ ID NO: 349630 - DNA, 201 bp, Homo sapiens
tgctgctcttctgccctctccccagtctgtgcaggggatggggcgcctcccaccatgagactcgagcgtcccagccctgagctggcactcggatggggcamggaaaagggtccctggggtggatggtcctcgctgagcctcccctcctgcagctcctggtccaccctgcgctgactccagtcccttgggcacagaggtttc

SEQ ID NO: 349631 - DNA, 201 bp, Homo sapiens
ctgagatccttaaggtgggcagtgggtgggttttctgtgtcatggtctgaaggctgcagacccgggtggggtttccgtgtcgaggtctgagggctgcagamccgggtggggtttccgtgtcgaggtctgaaggctgcagacccgggtggggtttccgtgtcgaggtctgagggctgcagacccgggtggggtttccgtgtc

SEQ ID NO: 349632 - DNA, 201 bp, Homo sapiens
aggaatgacagctgagtgcacatgtgtgtgagtgtgtgtgtgtgactgtgtgtaggtgggagtgcctgtgtgtgactgtgtgagtgcgcctgtatgtgggwgggagtgcgtgtgtgtgagtgcgcctgtgtgtgagtggagtgcgtgtgtgtgactgtgggtgtgggtgtgagtgtgcctgtgtgtgggggtaacagtgca

SEQ ID NO: 349633 - DNA, 201 bp, Homo sapiens
ccctggactcatgctgcagggagggtgtgcggacatagggggtggggttgggcctgcatctccagggctgctccgtgaccgggctgttctggactgtcagygcccacgcgcaccaactgatgcagtcgaggctctttctttcagcttctgggacgtgtctgcattctgctcgagagagctggcagcaagctggggcctcct

SEQ ID NO: 349634 - DNA, 201 bp, Homo sapiens
ggctttctgccctgactcctgcacacgtatgcattcagggtgatgcaggcacatccacatgcacacagagaggtagcgcctcccccagagggtcccactcsgcccgacaggccttccgccctgactcctgcacacacgtgtgcattcacggtgatgcaggcacatccacgtgcacacacaaggtgcaggttcacataaaca

SEQ ID NO: 349635 - DNA, 201 bp, Homo sapiens
acgttcatacaccagcgtgcatgcatgaaggtgcccccacagatgcacacaatgggtgatatgcacactcacacaggcccatcagctacacagagacccccgtctccactggcccccacatgcacagcactccgtaaagccagcgagaaggtgctgctcttctgccctctccccagtctgtgcaggggatggggcgcctcc

SEQ ID NO: 349636 - DNA, 201 bp, Homo sapiens
aagctgccccaagaatgagcacgagggctgagagcacgaagcagcctccctgaggtggggggagggggaacaaggacgcctgcacctggctgacttgatgygcctgtccccacagagtggccccattgtgagccgggccacgggccgctgcctggaggtggagatgtccaaagatgccaactttgggctccggctggtggt

SEQ ID NO: 349637 - DNA, 201 bp, Homo sapiens
cttcctttctcaggactttctgttttacacattttgcaagttcatgaaaactgtgcaatccaagctttttcctctacagatgagtggagtgacgttttctygtcagaaagcatttttctgagtgatgaaatctccctggctgagcaccacagcccagataaatatgatggtggcgcacagcccttgtccctttgaaattct

SEQ ID NO: 349638 - DNA, 201 bp, Homo sapiens
aggtgtggcagtgtggcggcagcatggaggtgctgccctgctcccgcgtggcccacatcgagcgcaccaggaagccctacaacaacgacattgactactaygccaagcgcaacgccctgcgcgccgccgaggtgtggatggatgacttcaagtcccacgtgtacatggcctggaacatccccatgtcggtgagtcccccac

SEQ ID NO: 349639 - DNA, 201 bp, Homo sapiens
ccaggtgcccttgggggcagtgcccctcctggtaatccttgtgagggtggtgtcccggctttcacctgggaggaccgaggggcccagacccccatccccaygcctgacctggcagggagcgggggtggttgaggactcggagtcgcgggtgtccctggactcatgctgcagggagggtgtgcggacatagggggtggggtt

SEQ ID NO: 349640 - DNA, 201 bp, Homo sapiens
caccccggaatcggctctctcttctccaggtgcccttgggggcagtgcccctcctggtaatccttgtgagggtggtgtcccggctttcacctgggaggacygaggggcccagacccccatccccacgcctgacctggcagggagcgggggtggttgaggactcggagtcgcgggtgtccctggactcatgctgcagggagg

SEQ ID NO: 349641 - DNA, 201 bp, Homo sapiens
cctgtgacccttggtagggcaaggacatggcccttgtgcctgagcaggaggaagggcaggtgctgggaaagccaacacggggaggggcggacgccatccaragaggcttgagagggtgcagggatacatatcgggagatacacacacccctgacccccaaagccaagctgcagggccaggcccgcctcccccagctgccca

SEQ ID NO: 349642 - DNA, 201 bp, Homo sapiens
gattcaagaacctggcccaccagcaccagtcgatgttccccaccctggaaatagacattgaaggccaactcaaaaggctcaaggtgaagtcggggccgcartgtgggggctgcggaagtgctcctccagggaggctggatgtcctacctggtgctcgttgaacacccttggggcacacctgatactaggcattgttatggg

SEQ ID NO: 349643 - DNA, 201 bp, Homo sapiens
ctcaaggtgaagtcggggccgcagtgtgggggctgcggaagtgctcctccagggaggctggatgtcctacctggtgctcgttgaacacccttggggcacayctgatactaggcattgttatgggctggccaaccttcttgggacgcaggcctcccctgccccaggccacaggctcactctgctgcttggcccttccttgca

SEQ ID NO: 349644 - DNA, 201 bp, Homo sapiens
catcgagggcccctggaccagaaagcgaagagggcgttgggggcaggaggcctgtggggccatgtgtgggggccgtctgggtggcgggagctgttggggcrgggctgagcgccctcagcagcccactggagaaagcgctgctggggtcctcgtgtggggcccagggcccgacgtggaagcaatggagggctgcagggggtg

SEQ ID NO: 349645 - DNA, 201 bp, Homo sapiens
gtcacctcaggccatgctgtgggcaactttctccctcctctcaccccagactcttttgtgagccacatggcccagcacacagcacccattcggccactccmccaggacaggccaggctggcgaccccacggagggggccccccacggtttgaactgcccactgccctttactgagaaggcctcttgggccgggtggaataa

SEQ ID NO: 349646 - DNA, 201 bp, Homo sapiens
gccgggcactcacaccagctctggcttcccagcctggagtgggcgaagcctgcaggcacgagagtgggcatcctggcggcggggtggagtgagggtccggragtctcagctggggaggagacaacgaggggcgggtctgccgcttgctgcgcaacagaggtggccctgtcagcctcctccctgcatgccttacctggatgg

SEQ ID NO: 349647 - DNA, 201 bp, Homo sapiens
tcgtgtggggcccagggcccgacgtggaagcaatggagggctgcagggggtggcagtggggatgaatgagtaaggacagagtgcagcctgggtctcagacrgggggtgggggacaggccacagagattccctatctcagcagagaggagacaggctcaggctgccacgccttgccaaaacccagcctggccaggccagccc

SEQ ID NO: 349648 - DNA, 201 bp, Homo sapiens
gccaacccccacaaccctgcccagctctccagccccaggaaggtttctggaagctgctgtggccccagaatcctcaggagaccccagccttcctctttcascctcaacctgtgacccttggtagggcaaggacatggcccttgtgcctgagcaggaggaagggcaggtgctgggaaagccaacacggggaggggcggacgc

SEQ ID NO: 349649 - DNA, 201 bp, Homo sapiens
ctgactcccgacacctgcagaggcaagcagcacttgacgcaggggctgagggccaccaagtctccttggacaaggtttccactgatctcgacccttccacwaagcacggcccagaggttagcggtatggaggcctgtgcagggtgtgttggagccagccgtaggagcacaaactcccaccccagggctgatgccgtgaagg

SEQ ID NO: 349650 - DNA, 201 bp, Homo sapiens
gtcgatgggaccgggtgccgcggagcagggggccgcgcaagagcccacggcaggggggagactcaggcatggcgggctgcaggtcctgagccctgcctcgyggggaggcagctgaggcccggtgagaattcgagcgcagcgccggcgggccggcactggtgggggacccggcgcatcctccgcagctgctggcccgggtgc

SEQ ID NO: 349651 - DNA, 201 bp, Homo sapiens
gctaggtgggtatagagctaatccggcaacgggaagcagaggaaccgagtagctgagggtgtggcgtctgggatccgtgaccctcactttccttgtgcgcratgcagggttcacggcgcagcctcatcacgtgctagggccagcatggaggacaggcagggtcagcagtgctcagcagacccatccatagcctgctgcatc

SEQ ID NO: 349652 - DNA, 201 bp, Homo sapiens
aagacgaagggagtcagcccagcaccctgtgtggctcagggctgtccgagcccctcctgccggaagggactgtggcttcctagaaagttcttcctggaacrgtgggggacctccccccttgctctccgtcctaagcagcaggcaagcgcatccctcgctccagagatcccccaggtcctagaggtggtcctcagcccatgc

SEQ ID NO: 349653 - DNA, 201 bp, Homo sapiens
gtttgcccggccccttggctttccacaggctggccctgacgaagctggacatcctggacgtactgggtgaggttaaagtcggtgtctcatacaagctgaaygggaaaaggattccctatttcccaggtatgtgaagtggggcaaccgttctgcctgttgggccgtttcatggtattggaatagataggacctgtgacttct

SEQ ID NO: 349654 - DNA, 201 bp, Homo sapiens
acctggccctgaccctcagctcgtccccagctcacagcacagccctcccctggctgcctccaaggagtctccagttactgagtggccactccgtgccagckcagcccacccctcaccttcccagtgcctgtggaggcccaactagggtgacgctgggagaggagagggcttggaggagccacgggtcaaatgcaggaggcc

SEQ ID NO: 349655 - DNA, 201 bp, Homo sapiens
gagcccctcctgccggaagggactgtggcttcctagaaagttcttcctggaacggtgggggacctccccccttgctctccgtcctaagcagcaggcaagcrcatccctcgctccagagatcccccaggtcctagaggtggtcctcagcccatgctccctccacactgcctctgccccgccaccttgtcctgggccgccagg

SEQ ID NO: 349656 - DNA, 201 bp, Homo sapiens
gaggggtgagttcccacgttcacaggacacagggcaagcagcttgtctccagtgaccagcctccatcatggcttttgcctctcacgggtttctccccacarcgttccccaggaggcctggctgggcaggggtggctgtaggccccttccagtgttttgggaatggctcagggggacagactactcgcctgggaccctgggg

SEQ ID NO: 349657 - DNA, 201 bp, Homo sapiens
gccactcccccaggacaggccaggctggcgaccccacggagggggccccccacggtttgaactgcccactgccctttactgagaaggcctcttgggccggktggaataatctacagggggtgacaggtagccccctaaacctgctctgtcttgcagggacctacccctttgtgacttcatccaactgcaccgtgggcggtg

SEQ ID NO: 349658 - DNA, 201 bp, Homo sapiens
tgtcacagtggaggttctagcagagtgggtagcacatatgtgtcatgtccctctggtctggaaggcgtgtagtgtctgagccccactgctgtcccctgctyaccacccaacactgagaaaatcaaactgggccacgtgcccacttgctgccttccttgcagctgagtccctaggcaaggaggccctggatgggggtggccg

SEQ ID NO: 349659 - DNA, 201 bp, Homo sapiens
ccagggcgcttcctgccgtgcaggccaggggagagcttagtaagaggcgctggggtgggcctgttcccacggccacagcacgtgagctcacacggggtgcrcacatgcccacacgtacacgtgacctcgttcccctcggagtgtgtgaggcccacaggcaagtgcggacgccttgcagttcctcaggacaccctcattcgg

SEQ ID NO: 349660 - DNA, 201 bp, Homo sapiens
ctgctctctcagtcaaatgggttggtgttggcaagtcaagagagtcgatgatccagctgttttagtcgcagactgagctgatcccaacaggccctggcagygtctggacttgtgtaaacagcagcagtcacgttcctcggccgccacaaccaacaccaaagcaggaaaaccattttctgtacttttatatttctgttcaac

SEQ ID NO: 349661 - DNA, 201 bp, Homo sapiens
cgctccgcgcaggagtcccgcctcccacttcgcccgcagcctatgacgcgccgcgtcgctccctctcctcaaacccgctctcgcccgcggatgggcgcgcrgctgtgacgtcacggcgtcgttggtaaggggctggcggccggggagctgcgtagctcccggccccgcggccatgcccaagcggagctgccccttcgcgga

SEQ ID NO: 349662 - DNA, 201 bp, Homo sapiens
ccactggggagctgggacaccacctggcactgtggtggcagtgggggtgacactcagacaagggccatcgagggcccctggaccagaaagcgaagagggcrttgggggcaggaggcctgtggggccatgtgtgggggccgtctgggtggcgggagctgttggggcggggctgagcgccctcagcagcccactggagaaagc

SEQ ID NO: 349663 - DNA, 201 bp, Homo sapiens
gggacaaagcaggggtcagagctgtgtttggttcctgagtgggccttgtccaggatggagagagcctcttttcctaaactccctgccaccagggaggcagytggcacggatgtcccctagggactgtgagtgacaagccagactaggcagagagtggggggggggggggggctcagtgtccgtgggggctcagagctgtgt

SEQ ID NO: 349664 - DNA, 201 bp, Homo sapiens
gtccaggttgagttttggggcaggagttctaccccaagggatgccatgtcctccccagctgggtggggacgtttgtggcagcagcgctgaccacggctgcsggggtggtttctgaacctccactgcacgaacaccacgctgtctggttaataagcaccggtggtgacctgtggaaccaaccgctgcagcgcggttctgtgt

SEQ ID NO: 349665 - DNA, 201 bp, Homo sapiens
gcaaggaggtgggcagaggcccacgaacctggccctgaccctcagctcgtccccagctcacagcacagccctcccctggctgcctccaaggagtctccagytactgagtggccactccgtgccagctcagcccacccctcaccttcccagtgcctgtggaggcccaactagggtgacgctgggagaggagagggcttggag

SEQ ID NO: 349666 - DNA, 201 bp, Homo sapiens
ccaggagccccacgcatgggggcacggggcaccagagcctggtgatgactgctctagcagtaggctggaccccagcctccacccgccccaccaggcactgktgcacagaaacctgcatagccggggcctgggctgggaacgcagctgagaggacacagggctgatgggaggaggggcagagtcacatccaccgcgcaggag

SEQ ID NO: 349667 - DNA, 201 bp, Homo sapiens
gttttcctccaggtacctgagccgtctgcagtccccggggaggatggggagaagttgccggaagggactgtggctagtggggagggccctgaggaccagcrtggaccatgacagggggtgatgatgactgtcccttgtgcagattcaagaacctggcccaccagcaccagtcgatgttccccaccctggaaatagacattg

SEQ ID NO: 349668 - DNA, 201 bp, Homo sapiens
aggagcgtggcgtcggcgtcgtggggaggagcgtggcgtcggcgtcgtggggaggagcgtggcgtcggcgtcgtggggaggagcgtggcgtcggcatggtrgggaggagctgtggggtggcaacccagaggcaaggaggtgggcagaggcccacgaacctggccctgaccctcagctcgtccccagctcacagcacagccc

SEQ ID NO: 349669 - DNA, 201 bp, Homo sapiens
tcacaccagctctggcttcccagcctggagtgggcgaagcctgcaggcacgagagtgggcatcctggcggcggggtggagtgagggtccgggagtctcagstggggaggagacaacgaggggcgggtctgccgcttgctgcgcaacagaggtggccctgtcagcctcctccctgcatgccttacctggatgggagccgggc

SEQ ID NO: 349670 - DNA, 201 bp, Homo sapiens
ctcatggtcacaccccagtttgtcctctttgaaatctcaaccacccccttcccaggagactcaggccagcaggaggtgaggtccatgtatacacatctgtyctctgcttctctcctgtctcctgctgccctcacctggcccgcccgacagtgtttgattttcaccaggctgtcgacggacttcaggaagtgcagcgccagg

SEQ ID NO: 349671 - DNA, 201 bp, Homo sapiens
ggcagagaacaattcctttgggttgaaggaatgaatgaatggtgggagcctgcaagcagagcccagaagggagtgaagcagtgtaagtgggtgaacccacygcaccacactggtagtcacaggtgtgtgcacactgggcgccagggccccttgctctgtgccgggcacagtcgtcgtacaaactgccattgagtgccagtg

SEQ ID NO: 349672 - DNA, 201 bp, Homo sapiens
gccctccctgctctgcggccacatcacatcgtctgcctgtctgtgctggggtcctgtgttccctctcttctctctgggcacggacaccccatcctacttcygagggggtccccaggtacctccgcctgtgcttcctcccttgcgtccatggcgtttccttcccctgcgtgctgtccagctcctacccctcaaatgggcagc

SEQ ID NO: 349673 - DNA, 201 bp, Homo sapiens
gggtgaccccggtgagtcagccaaggagaggcagaggtggaagggggccaggccgtcctggggggcaattggggccgcgcctgagggagggtgcttgggaygatcctagccagacatgggagagggagggccacagacttctggccagggtgaccccgtggctggcagtgccaccgaggaggccagacctgctttgtcccc

SEQ ID NO: 349674 - DNA, 201 bp, Homo sapiens
tcagccaaaattcctggagaattaaccagacccctgctaggtgggtatagagctaatccggcaacgggaagcagaggaaccgagtagctgagggtgtggcrtctgggatccgtgaccctcactttccttgtgcgcgatgcagggttcacggcgcagcctcatcacgtgctagggccagcatggaggacaggcagggtcagc

SEQ ID NO: 349675 - DNA, 201 bp, Homo sapiens
caggcagcaatggtgggcactggagtcatgagccggcgggggtcatggcctcagtgggatgcctgagctcctcagggctcctgggttctcatgggtacccrctccccatctttcagtataggcaccaccaagaagggaatcggaccaacctactcttccaaagctgcccggacaggcctccgcatctgcgacctcctgtca

SEQ ID NO: 349676 - DNA, 201 bp, Homo sapiens
tgggttatgagattcctgtgactccagggatgcaagcaacttttctagacagtaccaagaacagccctcagtgacttgagcggcaggaaagccatgcaacygcacggccctgccccaggccacgggcgcttccttcctcaggccggagtccctcagcagcactagccaccttgagatggggtgggacacacaggcagaagc

SEQ ID NO: 349677 - DNA, 201 bp, Homo sapiens
gggcgcctgtagtcccagctactggggagggtgaggtggtagaatagcttgaactcaggaggcagaggttgcagtgagccaggatcacaccattgcactcyaacctgggcgacagagtgagaccctgtctcaaaaaaaaattccattgtttaaagctgtccaggctgtgtattttgttttggcagccctggagactataga

SEQ ID NO: 349678 - DNA, 201 bp, Homo sapiens
gagattcctgtgactccagggatgcaagcaacttttctagacagtaccaagaacagccctcagtgacttgagcggcaggaaagccatgcaactgcacggcyctgccccaggccacgggcgcttccttcctcaggccggagtccctcagcagcactagccaccttgagatggggtgggacacacaggcagaagccagccttt

SEQ ID NO: 349679 - DNA, 201 bp, Homo sapiens
tcttttcctaaactccctgccaccagggaggcagctggcacggatgtcccctagggactgtgagtgacaagccagactaggcagagagtgggggggggggkggggctcagtgtccgtgggggctcagagctgtgtcctgacccaagcctgcaccacagaggggaagaccccaagagaaacctggaggcaggtagagagcgc

SEQ ID NO: 349680 - DNA, 201 bp, Homo sapiens
ttctgcctccagtgtgtatcataacagtcttttctgctctctcagtcaaatgggttggtgttggcaagtcaagagagtcgatgatccagctgttttagtcrcagactgagctgatcccaacaggccctggcagcgtctggacttgtgtaaacagcagcagtcacgttcctcggccgccacaaccaacaccaaagcaggaaa

SEQ ID NO: 349681 - DNA, 201 bp, Homo sapiens
gttctccaagtcgccgctagactcaggagcccagctggcttcacctagtggatcccacaccggggctgcaggtggagctgcccgccagtcccgcgccgtgygcccgcactcctcagcccttgggcggtcgatgggaccgggtgccgcggagcagggggccgcgcaagagcccacggcaggggggagactcaggcatggcgg

SEQ ID NO: 349682 - DNA, 201 bp, Homo sapiens
ctgcaggtggagctgcccgccagtcccgcgccgtgcgcccgcactcctcagcccttgggcggtcgatgggaccgggtgccgcggagcagggggccgcgcargagcccacggcaggggggagactcaggcatggcgggctgcaggtcctgagccctgcctcgtggggaggcagctgaggcccggtgagaattcgagcgcagc

SEQ ID NO: 349683 - DNA, 201 bp, Homo sapiens
gtggtgagatgggtgcagctctacaggggcgtaatttacaaaccaccagactccctggttatgtgtgtgctgcggtggtgtttgctctccagcagatcaartttgtgcaatgatccattttgagaatctctccgtcaccccaagaagtcctctcgcacccatcagtccgaccccttccccgtgctcctccccagccctggc

SEQ ID NO: 349684 - DNA, 201 bp, Homo sapiens
aagaggggaagaagtaagtctgccgggacactctcaccctcggggagtcttctgggcccgtaagccggtagactgtggggcgtgtctggtcctgggcacarcgaggagggtacctcaacccactcaaagcccctggagaatggcaccgtcaaaattccacagcgcatcacccaacccccggacgagccagcccgtctctct

SEQ ID NO: 349685 - DNA, 201 bp, Homo sapiens
cctagttcacagcagggaggccctaagcagtgaggtggcctgcccgccatgtcgcaggagcccctagccctggcagactgggcagtagcgctggctggccrctccgggttgtgctgcaggaagcccttctccagccgccagcctcgtcctgcccagccctgggccccacatggcaggaaacaaggccaaagaggcaccgct

SEQ ID NO: 349686 - DNA, 201 bp, Homo sapiens
cctggcttcaggggcaatgagccatcatgggccatcagagatgctgcctcttcctcagctgtgaagcggggcctcctgcctgcacgtaggggagccctatsagccgtgccttgggactggagtgtccctgtatccatcatgccaccagcccacctgccctgcaggagcagagggtgggggcagcaggggacacccactgga

SEQ ID NO: 349687 - DNA, 201 bp, Homo sapiens
actgggcctacaggggtctcttatggtggcataaagaccaaaaggtgctgtagggatatcccttgccgttggtgggggcctggcttcaggggcaatgagcyatcatgggccatcagagatgctgcctcttcctcagctgtgaagcggggcctcctgcctgcacgtaggggagccctatcagccgtgccttgggactggagt

SEQ ID NO: 349688 - DNA, 201 bp, Homo sapiens
cacggggcaccagagcctggtgatgactgctctagcagtaggctggaccccagcctccacccgccccaccaggcactggtgcacagaaacctgcatagccsgggcctgggctgggaacgcagctgagaggacacagggctgatgggaggaggggcagagtcacatccaccgcgcaggagcgggagtgcctgatccctgatc

SEQ ID NO: 349689 - DNA, 201 bp, Homo sapiens
cttctctcctggggcagagaccttctggggctccctccaggctctgtcacactgggcctacaggggtctcttatggtggcataaagaccaaaaggtgctgkagggatatcccttgccgttggtgggggcctggcttcaggggcaatgagccatcatgggccatcagagatgctgcctcttcctcagctgtgaagcggggcc

SEQ ID NO: 349690 - DNA, 201 bp, Homo sapiens
ggccagaagtggggctggagacctggccttctctcctggggcagagaccttctggggctccctccaggctctgtcacactgggcctacaggggtctcttayggtggcataaagaccaaaaggtgctgtagggatatcccttgccgttggtgggggcctggcttcaggggcaatgagccatcatgggccatcagagatgctg

SEQ ID NO: 349691 - DNA, 201 bp, Homo sapiens
cactgacccacctgtgtgccgtgtccccgcaggcctgaaggactgggagaagaggctcatcatctctgacagagcccaccttggtacgtttcccactggastacagggaacagcccctcctgcccccaccattgccagccggccctgctcctacatggccaccgagatcagggaagtccccaaggccttcttgctccacat

SEQ ID NO: 349692 - DNA, 201 bp, Homo sapiens
agggggtgtcagccagcccaggagccccacgcatgggggcacggggcaccagagcctggtgatgactgctctagcagtaggctggaccccagcctccaccygccccaccaggcactggtgcacagaaacctgcatagccggggcctgggctgggaacgcagctgagaggacacagggctgatgggaggaggggcagagtca

SEQ ID NO: 349693 - DNA, 201 bp, Homo sapiens
tggcccgcccgacagtgtttgattttcaccaggctgtcgacggacttcaggaagtgcagcgccaggcacaagaggggaagaagtaagtctgccgggacacwctcaccctcggggagtcttctgggcccgtaagccggtagactgtggggcgtgtctggtcctgggcacaacgaggagggtacctcaacccactcaaagccc

SEQ ID NO: 349694 - DNA, 201 bp, Homo sapiens
cccccatgccatccagtggctggccagaagtggggctggagacctggccttctctcctggggcagagaccttctggggctccctccaggctctgtcacacygggcctacaggggtctcttatggtggcataaagaccaaaaggtgctgtagggatatcccttgccgttggtgggggcctggcttcaggggcaatgagccat

SEQ ID NO: 349695 - DNA, 201 bp, Homo sapiens
aagaatgtgattctggggacatgggcaccagggggtacccagactgaggccctgagggggcaggtcaccttcagagtggcagcagctagggaggaaagccrggcactcacaccagctctggcttcccagcctggagtgggcgaagcctgcaggcacgagagtgggcatcctggcggcggggtggagtgagggtccgggagt

SEQ ID NO: 349696 - DNA, 201 bp, Homo sapiens
gtgagacaccccactgccaggcttgtgagggtgggaggggagctgagacccctctgccgggcagagagcagtggggtgtggctgggagaatcccccatgcrtagacaagttgagggcttttctgccgggaggtgaggcaggaaggtggggctggatctgggctctggggtcctggggacagagtgggccccaaaagggaag

SEQ ID NO: 349697 - DNA, 201 bp, Homo sapiens
caactggtgatggggaggacagactggtgtctctctggggccatcgtcctgggctccccagaactgggagcccctgcggatcagcaggccccaggctcagygtcctgagctggctcctgctcccaggggtggcctggcactggccctgcggtcattggacacccactggcctacgacaagccgcgcctgttcctaggagcc

SEQ ID NO: 349698 - DNA, 201 bp, Homo sapiens
ggaggaaaggcaggaggacttcttgtccccagcctctcaccacgtgcctgtgcagcctgacgtcctgagacctcaactggtgatggggaggacagactggkgtctctctggggccatcgtcctgggctccccagaactgggagcccctgcggatcagcaggccccaggctcagcgtcctgagctggctcctgctcccaggg

SEQ ID NO: 349699 - DNA, 201 bp, Homo sapiens
cagacgcatcagagctggccaccaaaccagacaccccaaaatccaacagcagtgccctgcagggacagacgaagccccatgtgggtcagtccatgtccggrgggtcctcagtacccaagtgccttcagctcagccgggtttctgttccaggggggcaacaacgccggccacacggtggtggtggatgggaaagagtacgac

SEQ ID NO: 349700 - DNA, 201 bp, Homo sapiens
ctttgggtacaggtcactcaaggcaggtgttctgcaccatccatcttcatatcgtctctctcactcgcacccttgcatcactgtgcttctgagagttgggsgcttaccttaatctactgtccctgacctggcaaacagtggaaaggtggcatgatgtggccctgcagctgctacacctctaggcgccatcattcatgccat

SEQ ID NO: 349701 - DNA, 201 bp, Homo sapiens
taggcaccaccaagaagggaatcggaccaacctactcttccaaagctgcccggacaggcctccgcatctgcgacctcctgtcagattttgatgagttttcytccaggtacctgagccgtctgcagtccccggggaggatggggagaagttgccggaagggactgtggctagtggggagggccctgaggaccagcatggacc

SEQ ID NO: 349702 - DNA, 201 bp, Homo sapiens
gggcaactttctccctcctctcaccccagactcttttgtgagccacatggcccagcacacagcacccattcggccactcccccaggacaggccaggctggygaccccacggagggggccccccacggtttgaactgcccactgccctttactgagaaggcctcttgggccgggtggaataatctacagggggtgacaggta

SEQ ID NO: 349703 - DNA, 201 bp, Homo sapiens
tgggccaggcgcagtggttcatgcctgtaatcccagcactttgggaggctgaggcgggtggatcacctgaggtcaggagttcgacaccagcccggccaacrtgatgaaacctcgcctctactaaaaatacaaaaaattaactgggcatggtggcaggcacctgtaatcccagctactcgggaggctgaagcaggagaatca

SEQ ID NO: 349704 - DNA, 201 bp, Homo sapiens
aggaagccaaggctggaaggatcactggagtccagtagttctagaccagcctgggcaacacagtgacatctgatctataccgccccccgccccacaatatrtgtgtgtgtgtgtgtgtgtgtgtgtgtgtgtgtgtgtgtgtgtgtgtgtagagccagactcatgtagagccagttgtgtggccggaccggtcttgaactc

SEQ ID NO: 349705 - DNA, 201 bp, Homo sapiens
tttacgtcctcatcgagacttcaggctccaacgcaggccatgacgctgagaagctgggccacttcctggagcacgcgctgggctccggcctggtgaccgaygggaccatggccaccgaccagaggaaagtcaaggtgccctgtgtcctgcttgcaggtccccgctctctgtccgtccagtccagccttgtcttgggatgcc

SEQ ID NO: 349706 - DNA, 201 bp, Homo sapiens
tgggacctagttttggtttttttgagatggcttcttgctctgtcacccaggctggagtgcagtgttgcgatcatagctcactgcagccttgacctcctggrctcagatgattctccctcctcagcttcccaaataagatcactctctgggggctgggcatggtggctcatgcctgtaatcccagcactttgggaggccgca

SEQ ID NO: 349707 - DNA, 201 bp, Homo sapiens
ggctcctctgagtagtgaccacggcgggtctcattggcactgcctatccacccgtcacgtgtcattcagttagcaaacctgctagggagatgcctcctgtrccctgtgcctgccgggcgacagcagtgaccagggcgggagaagccttgccccataaactcacgcagcagaaggaacaagctcagcccatggcccctcaga

SEQ ID NO: 349708 - DNA, 201 bp, Homo sapiens
tgttgtccggtgttggcgaggctctgggcaggtctgggcaggtcctgaggcttttctctgctgttgtccagcattggcgaggctctgggcaggtcctgagscttttctctgctgttgtccggtgttggcgaggctctgggcaggtcctgagccattctgctttccactctgtggtctttcccttctgggagccctgggttt

SEQ ID NO: 349709 - DNA, 201 bp, Homo sapiens
tcctctcacggctctcatgggcccacgtggtggcacaggtgcatggggcccctcggggtgggaggtcttggttcctggccctgggcccctcaaggatgtgygggctacatacacccccatcctgagggaggcctggccctgccctgtcctcccacgagagggtgattttgtgtccactgcctcggggccacacagagagga

SEQ ID NO: 349710 - DNA, 201 bp, Homo sapiens
tctgctgttgtccggtgttggcgaggctctgggcaggtctgggcaggtcctgaggcttttctctgctgttgtccagcattggcgaggctctgggcaggtcytgaggcttttctctgctgttgtccggtgttggcgaggctctgggcaggtcctgagccattctgctttccactctgtggtctttcccttctgggagccctg

SEQ ID NO: 349711 - DNA, 201 bp, Homo sapiens
aagaacgtgcggtgctgcgggcgagggccccggcacggacaagggccactgcagagtgtgtttctgctcgtcagctgccctgggcagcggatgggctgggygatgcagctggatgcacatctcattctgtcatgaatgtccagtaaaaatctgaattggttgcaaccttctctttgcttctgttactggaaaatcatcttt

SEQ ID NO: 349712 - DNA, 201 bp, Homo sapiens
agggccccggcacggacaagggccactgcagagtgtgtttctgctcgtcagctgccctgggcagcggatgggctgggcgatgcagctggatgcacatctcrttctgtcatgaatgtccagtaaaaatctgaattggttgcaaccttctctttgcttctgttactggaaaatcatctttcagagcccattgtgaagggcctg

SEQ ID NO: 349713 - DNA, 201 bp, Homo sapiens
gcacatcagtccccagcccctccacagcctggtccagtcctagacctgtgccttgaacattaatgcccagagccgggttcatgaccaggacagggccgaayggggctggttctgtgttcacaaagtcacctccagacgcttcctgggacgggttcaggagacgccttgtgtgtctgtcacctcgttctggctcatgctcga

SEQ ID NO: 349714 - DNA, 201 bp, Homo sapiens
ctctaccagcccccatgccacccccagggcgggccgtcctccatgcccccagcctctgcacatcatcccccacgccacccccagggcggactgtccccaaygcccccagcctctgcacatcagtccccagcccctccacagcctggtccagtcctagacctgtgccttgaacattaatgcccagagccgggttcatgacca

SEQ ID NO: 349715 - DNA, 201 bp, Homo sapiens
ggcagggcctgaagctgcctcgacctttgtcggttctggtggagggaggggccttgcccttgtcagtcattcctgtgccgctctgaggcaggacctgagtygggggagctttccttggatctgccgcttctcagttgcctttgtgggaaaacagccctcaccccaacatggcacagtttggggtggtgcgtcctggtttgc

SEQ ID NO: 349716 - DNA, 201 bp, Homo sapiens
aggcagggagctggcagaggacggcagggcctgaagctgcctcgacctttgtcggttctggtggagggaggggccttgcccttgtcagtcattcctgtgcygctctgaggcaggacctgagtcgggggagctttccttggatctgccgcttctcagttgcctttgtgggaaaacagccctcaccccaacatggcacagttt

SEQ ID NO: 349717 - DNA, 201 bp, Homo sapiens
ctgaagtgcagtggtgtgatcatagcccctgggttcaagccatcctcttgagtagctgggattacaggtgcacaccaccatgcctaggtaattaaaaaaawttttgtatgtagaaacagggtctcatgtaactcctgggctaaacgatcctcccactgtggcctcctaaagtgcgggggttataggtgtgagcctgagccg

SEQ ID NO: 349718 - DNA, 201 bp, Homo sapiens
ccttctcctgatctgatgctggtggtgacactaggtgtgcacctacccctcctgatctgatgctggtggtaacaccaggcgtgcacctgccaggcaaaccytgggctgtttgttgcagtgccagtcctcgtgctcctcgtggctgcccagctcacccacccacatgagtcgggctgatgttgctgctttgaagggggactt

SEQ ID NO: 349719 - DNA, 201 bp, Homo sapiens
agattacaggcgtgaggtactgtgcctggcattatttgctgcttgcattatcattccttctttgaccgatgagttatgcagaagtgtgtttcttaatttcyaaacgtggtggttttctagttattttaaaaattattgatttcttttttattgcattatacccaggaaacttcgtccttatcagatcagatttttgaaact

SEQ ID NO: 349720 - DNA, 201 bp, Homo sapiens
gcagtgcttagcccccagctgctctaccccttcagatgggaggatttcaaaaccacgttcagatcatcttttttctgcagaaaaatcatgctttaacgtgyaagctattaattcataggaagaaaatgtttcaatcctatcagttcttttttttgagacgcagtttcactcttgtcacccaggctggagtgcagtggcgca

SEQ ID NO: 349721 - DNA, 201 bp, Homo sapiens
gcacctgcaaggggatgctgggtgagatcctgtctgcattcgagttcatggatgctgtgtgcatgcagctggtcgggcgccatctccacctggccagcccrgtgcaaggtactgaccccccacacagggggcagctggtcctgcagctccttctgcacgtctggacacatgggacggctcagagaccccgggtgggcgggg

SEQ ID NO: 349722 - DNA, 201 bp, Homo sapiens
tcagatgattctccctcctcagcttcccaaataagatcactctctgggggctgggcatggtggctcatgcctgtaatcccagcactttgggaggccgcagygggcggatcacgaggtcaggagttcgagaccagcctggccaatgtggtgaaaccctgtctctactaaaaatacaaaaattagccaggtgtggtggcgggt

SEQ ID NO: 349723 - DNA, 201 bp, Homo sapiens
gtcctcgctggaagaggaggctgagatgctgggggaaggccccacaacgccgaaaccagcacctgccatctcgctggaagaggaggctgagatgctggggsaaggcctcacaatgcggaaaccagcacctgccatctcgctggaagaggaggctgagatgctgggtgagggccccacaacgctgaaaccagcacatgccgt

SEQ ID NO: 349724 - DNA, 201 bp, Homo sapiens
gacgagatcatcctctccactgcccgcatgaaccgggtcctcagcttccacagcgtgtctggtaagcctgtgccacccgtcggggcccaggagtccctccyggtgctggtggagttcttccttgccagcgtctgcaactgtggggtgcttgggtgggtgaatgagttagggccggcgctggggaaagaaccagcgtctgta

SEQ ID NO: 349725 - DNA, 201 bp, Homo sapiens
tgacctcgtgatccacccgcctcagtctcccaaagtgctgagattgcaggtgtgagccaccgcgcccagcctgctttttcctttttgctgctttcagctcyttccattgtctttggggttctgcggtttcactctggtttggccgggagtcggccagatgagtgtttgtttacctgcctgttggccgggtgagtgtttacc

SEQ ID NO: 349726 - DNA, 201 bp, Homo sapiens
cagcgggcggatcacgaggtcaggagttcgagaccagcctggccaatgtggtgaaaccctgtctctactaaaaatacaaaaattagccaggtgtggtggcrggtgcctataatcccagctacttgggaggctgaggcaggagaatcgcttgaacctgggagggagaggttgcagtgagccaggatcgtggcacttcagcct

SEQ ID NO: 349727 - DNA, 201 bp, Homo sapiens
atgatcagccttcgtaactgtggagtgcttgaaaagaatgtgctctctgcagttgctggaatcagtgtttgtacagatccatcagatagaagtatacgtcrcgtgttcattctacatcctgctgacctgccactccctgagggaggtgttagaaatctgctgacaacagactaatctgttcctcctgtagctttgccagtt

SEQ ID NO: 349728 - DNA, 201 bp, Homo sapiens
tatttaggacaaagaacaggctgccctggtcctgtgtaaggtttgtagttacacagatttcctgatcttctgcaggaaggacgggaaggaactaagtggcyatttttggtgagctgggagactttctttccatttcttcttttctttgttttcccatgttgctttctgtaagcacgtttttcttttatgctgggaaaaaag

SEQ ID NO: 349729 - DNA, 201 bp, Homo sapiens
ggctcatgtgtaagaaagctgctcttaacatatttaggacaaagaacaggctgccctggtcctgtgtaaggtttgtagttacacagatttcctgatcttcygcaggaaggacgggaaggaactaagtggctatttttggtgagctgggagactttctttccatttcttcttttctttgttttcccatgttgctttctgtaa

SEQ ID NO: 349730 - DNA, 201 bp, Homo sapiens
tggacacatgggacggctcagagaccccgggtgggcggggggtgcccgggcgggcgggtggggggtccctgggcggagcatggagtggccgttgggctcaygtgtaagaaagctgctcttaacatatttaggacaaagaacaggctgccctggtcctgtgtaaggtttgtagttacacagatttcctgatcttctgcagga

SEQ ID NO: 349731 - DNA, 201 bp, Homo sapiens
ggtgacaccaggcgtgcacctgtccctcctgatctgatgctggtgacaccaggcgtgcacctgcccctcctggcatctgatgctggtggtgacaccaggcrtgccctgcccctcctgatctgatgctggtggtgacaccaggcgtgcaccttctcctgatctgatgctggtggtgacactaggtgtgcacctacccctcct

SEQ ID NO: 349732 - DNA, 201 bp, Homo sapiens
gacgctgagaagctgggccacttcctggagcacgcgctgggctccggcctggtgaccgatgggaccatggccaccgaccagaggaaagtcaaggtgccctrtgtcctgcttgcaggtccccgctctctgtccgtccagtccagccttgtcttgggatgcctggaacggtcattggtgcagcctagacagtgtgggatgtgg

SEQ ID NO: 349733 - DNA, 201 bp, Homo sapiens
acgccccctctgagtcccactgccgtctcaggtgctgtgtggttcttcggcgccttcccctcctgatttgatgctggtggtgacaccaggcgtgcacctgyccctcctgatctgatgctggtgacaccaggcgtgcacctgcccctcctggcatctgatgctggtggtgacaccaggcgtgccctgcccctcctgatctga

SEQ ID NO: 349734 - DNA, 201 bp, Homo sapiens
agatggggtttcaccatattggccaggctggtctcgaactcctgacctcgtgatccacccgcctcagtctcccaaagtgctgagattgcaggtgtgagccrccgcgcccagcctgctttttcctttttgctgctttcagctccttccattgtctttggggttctgcggtttcactctggtttggccgggagtcggccagat

SEQ ID NO: 349735 - DNA, 201 bp, Homo sapiens
ttcgccacagcgtgggtgggccttacccaatcagtcgaaggcctttgctacagtgtgggtgggccttacccaatcagtcgaaggccttcgccacagcgtgrgtgggccttacccaatcagtcgaaggcctttgccacagtgtgggtgggccttacccaatcagtcgaaggctttttgccacagcgtgggtgggccttacgc

SEQ ID NO: 349736 - DNA, 201 bp, Homo sapiens
tcgaaggcctttgctacagtgtgggtgggccttacccaatcagtcgaaggccttcgccacagcgtgagtgggccttacccaatcagtcgaaggcctttgcyacagtgtgggtgggccttacccaatcagtcgaaggctttttgccacagcgtgggtgggccttacgcaatcagttgaaggctttttgccacagcgtgggtg

SEQ ID NO: 349737 - DNA, 201 bp, Homo sapiens
gttcgacaccagcccggccaacgtgatgaaacctcgcctctactaaaaatacaaaaaattaactgggcatggtggcaggcacctgtaatcccagctactcrggaggctgaagcaggagaatcacttgaacccaggaggcggaggttgcagtgagcagaggttgcaccattgcactccagcctgggtgacaagagtgaaact

SEQ ID NO: 349738 - DNA, 201 bp, Homo sapiens
ggcctttgctacagtgtgggtgggccttacccaatcagtcgaaggccttcgccacagcgtgagtgggccttacccaatcagtcgaaggcctttgccacagygtgggtgggccttacccaatcagtcgaaggctttttgccacagcgtgggtgggccttacgcaatcagttgaaggctttttgccacagcgtgggtgggcct

SEQ ID NO: 349739 - DNA, 201 bp, Homo sapiens
tgcttctgcagtgggtggggagggtgagggcctggggccccgcccggaacctctttaatctccacattctcagcctttgggacccgaggcagcgtgagttscgggtgcaggccgccgttgctcgggaatacagttgggtgttgctgaatgatggggatgcgtcctgagaaatgtgtcattaggtggtttcgttttgtgtga

SEQ ID NO: 349740 - DNA, 201 bp, Homo sapiens
attctgtggatgtggtttttcttctttcacaaccagtccttcctgggcaagtccccgggcaggggatgtgttcagccctctctggcctgagcacgcatccrtggggactgtgggaggggcggggactggggggcgacggggactgtgggaggggtccctgctgtactccctgcctggggtttgttctcgtaggggtggaga

SEQ ID NO: 349741 - DNA, 201 bp, Homo sapiens
cagtccttcctgggcaagtccccgggcaggggatgtgttcagccctctctggcctgagcacgcatccgtggggactgtgggaggggcggggactggggggcgacggggactgtgggaggggtccctgctgtactccctgcctggggtttgttctcgtaggggtggagaaatagttttctgtctaccctttctagttcccag

SEQ ID NO: 349742 - DNA, 201 bp, Homo sapiens
ggtgaggctcagccgggggtctcggggttgctggggaggggatcttgggaggggctgttgggggaggagtggggtcctgggggctgccctgcccagcctgrcccatgtgcccttgtccctccaggagatggtaacctgcacctcaatgtgacggcggaggccttcagcccctcgctcctggctgccctggagccccacgtg

SEQ ID NO: 349743 - DNA, 201 bp, Homo sapiens
tgtttctactaaaaatatcaaaattagccgggcatggtggcaggcacctgtagtcccagctgcttgggaggctgaagcaggaggatcgcttgagctcaggmggttgaggctgcagtgagctgtgattgtgtcactgtactccagactgggtgacggagtgagaccctgtttcaaaagaaataaaaggaagtgtaggtggac

SEQ ID NO: 349744 - DNA, 201 bp, Homo sapiens
cccttttttttggtggggacagggtctcgctgtcacccaggctggagtgcagtggctcaccacagcctcgaccttctgggatcaagcaggcccgccacctsacacacaccagcaggcctggctaactaaaaaaaaatttttttgtaggcccggtgcagtggttcacgcctataatctcagtacttcaggaagccaaggctg

SEQ ID NO: 349745 - DNA, 201 bp, Homo sapiens
tataatctcagtacttcaggaagccaaggctggaaggatcactggagtccagtagttctagaccagcctgggcaacacagtgacatctgatctataccgcmccccgccccacaatatatgtgtgtgtgtgtgtgtgtgtgtgtgtgtgtgtgtgtgtgtgtgtgtgtagagccagactcatgtagagccagttgtgtggcc

SEQ ID NO: 349746 - DNA, 201 bp, Homo sapiens
ccggggcctgggcagggggagccctcggtcaccgtcaccggggcctggatagtgggagccattggtcactgttaccgggacctgggtgggaggagccctcrgttaccttcaccggggcctgggcagtgggaggcgcccttggtcaccgtcaccagggcctgagcagtgggcgcaggactttactcccgcttagttgatttc

SEQ ID NO: 349747 - DNA, 201 bp, Homo sapiens
ttccctggcccttgccactctgtgccgtgtcatgacctgaagctgcaggtgggcgcctcccccttccgtcatggctgtcccccttctgtgaggtgtcccasccgcctgattgccggagtcccagggtgctcggtgctgtcgtggagcctgggacattcactgtctgggattgattccagggttggagccacacctggtctg

SEQ ID NO: 349748 - DNA, 201 bp, Homo sapiens
tgggcttcctcgatgtgtgccttgagatgggtggttgggctcgagcgtctgctctgatggtgccactgttggtgtgaggaaggggatggagggaccccccsccaaggacagtcggttcccgtgtctcctgacatctctgcttccaaaggaatcaggaatccaggacctggccttcctggtggtcatgggtaaaggtgtaga

SEQ ID NO: 349749 - DNA, 201 bp, Homo sapiens
attgctcatttgatgaaagagagataagtggctttctgatcagaaaagcaaggtggacaccacagcctggttctcagagctccacgaagaggtgacaggcwcccgtgactgcacctgctgcctctctgcagcccccatcacctgggaaagtcgtctcaaggaaacccaaaggcagaaagacgcctgctcacttggggcagc

SEQ ID NO: 349750 - DNA, 201 bp, Homo sapiens
gactgggtttcatggctttgagagagtagcctctttggatggaaaatgtattcctggtgtctaggccattttcattaatatttaaaaagtacttcctcccsaccatgaccctccccaaccccatgctgtgggatgagcaaggggactgccccattgctggtcccctgcagcctgtggttaagcggccagtcagcggcagct

SEQ ID NO: 349751 - DNA, 201 bp, Homo sapiens
ttgagctcaggaggttgaggctgcagtgagctgtgattgtgtcactgtactccagactgggtgacggagtgagaccctgtttcaaaagaaataaaaggaartgtaggtggacagatggatttaggaaaatcaccagttggcaaccatcctagtaactgatttggtctaggataatcaaagatgttaatgggtgaagcttga

SEQ ID NO: 349752 - DNA, 201 bp, Homo sapiens
tgacccgctgaccctggctgtgcacctgccctcctgccctgggtggctgctgctggcccaggggtgacttgggggctttcaagcttctgcccgtgctggcygcacgaccccacgtcccaccctgggtagggacttgtgattctcagagctggggtccgttgctttcctaaggacctccggccctggtcgtggtctaaatgc

SEQ ID NO: 349753 - DNA, 201 bp, Homo sapiens
cctcggtcaccgtcaccggggcctgggcagggggagccctcggtcaccgtcaccggggcctgggcagggggagccctcggtcaccgtcaccggggcctggrtagtgggagccattggtcactgttaccgggacctgggtgggaggagccctcagttaccttcaccggggcctgggcagtgggaggcgcccttggtcaccgt

SEQ ID NO: 349754 - DNA, 201 bp, Homo sapiens
gggcctgggcagggggagccctcggtcaccgtcaccggggcctggatagtgggagccattggtcactgttaccgggacctgggtgggaggagccctcagtyaccttcaccggggcctgggcagtgggaggcgcccttggtcaccgtcaccagggcctgagcagtgggcgcaggactttactcccgcttagttgatttcagg

SEQ ID NO: 349755 - DNA, 201 bp, Homo sapiens
aggagaatcgcttgaacctgggagggagaggttgcagtgagccaggatcgtggcacttcagcctgggcaacagagtgagagtccgtctccaaaaaaaaaarctcgctctctggggcgagtgaccacttgcctcatctgcagctccccccacgctgtctcatagggtcttcttcctgtcacaggctgtagcaaggtgctgct

SEQ ID NO: 349756 - DNA, 201 bp, Homo sapiens
ggtgttgcccttgccatcttcccccctcacctttgccgcctgactgtcatgattccagtgcttctgggcaaaacggtgtctgctcccaagggctggggtgyggtcggctgggctcacttgtgtgtcctgatgcccagcccaggggcgtcctctgggcgaatggcagctgtgtggtgccatctctgttgactgaggcatgat

SEQ ID NO: 349757 - DNA, 201 bp, Homo sapiens
cctgcctggcacttcttgggctttggggtcttgctggctttagaaattcctcagccaccagagcctcttcaaacaccgtttctccccttcctctgttctcytcttggaactcagtccaagcccccttgtttcttatcggctgctgccagggtcccgcctctcaggtttggatgctatttgcagtgtctccagcttggcgtt

SEQ ID NO: 349758 - DNA, 201 bp, Homo sapiens; identical to SEQ ID NO: 74560

SEQ ID NO: 349759 - DNA, 201 bp, Homo sapiens
gcccagctgttttcctgtcagttctttggagccttggagcgaggtgtctaaaaggccagcttatagggcaggggtgggggcagtgctgggggtgtggagcrtggctttggggcctgacagatattcactctggcttcttccctggcctggtggcactggagtcactgacctgaagcctccatccatctgccagtaaatggg

SEQ ID NO: 349760 - DNA, 201 bp, Homo sapiens; identical to SEQ ID NO: 74562

SEQ ID NO: 349761 - DNA, 201 bp, Homo sapiens; identical to SEQ ID NO: 74563

SEQ ID NO: 349762 - DNA, 201 bp, Homo sapiens; identical to SEQ ID NO: 74565

SEQ ID NO: 349763 - DNA, 201 bp, Homo sapiens
acgccaagcacgtggtgggctatggccaccttggtgagcggcgccccggggccgcggccctgtgtgtgctgggtggtgggccccacggtcaccgtcacccygccaggcttcgaggcagggcagtttgaccatggtctctggcttagcatatctcccgtagacactggcaggaccacggtgtctgacagggaagggaaaatc

SEQ ID NO: 349764 - DNA, 201 bp, Homo sapiens
atggggccagcatcatctctgtggtccggggttgggtgaaacgttgttatgaagcgtgactgtattcacatactttgtggacgccaggcacgtggctcacrcctgtaatctcagcgctttgggaagctgaggtgggaggactgcttgaggtcaggagttcaagaccagcctgggcaacatggtgagaccggccccccaccc

SEQ ID NO: 349765 - DNA, 201 bp, Homo sapiens
tgggctcacgccctactcccagggagcctccccactgcccccgaccccgggcgtgccccctgggcagtgagctgctgtgtgtggagggtgtcactcgtacrggaggaaagtccatccttcagcctcttggcatgacctcaggctgctgcagaagtgacacctggccccggaggcgaccgacgtcttgtcaggaggctggca

SEQ ID NO: 349766 - DNA, 201 bp, Homo sapiens
ggggccgggcacagtggctcacgtctgtaatcccagcaatacgggaggccaaagcgggtggatcaccggaggtcaggagttcaataccagcctggccaacrtggtgacaccccatctctactaaaaatacaaaaattagccaggcatggtggcgtgtgcctgtaatcccagctgcttgggaggctgaggcaggagaattgc

SEQ ID NO: 349767 - DNA, 201 bp, Homo sapiens
ctcttggcatgacctcaggctgctgcagaagtgacacctggccccggaggcgaccgacgtcttgtcaggaggctggcaggtgggtgaacgtgcttctcttygccccaaggtgctggccgacggcactgtcctggactgcctgacctccctgaggaaggacaacacgggctatgacctgaagcagctgttcatcgggtcgga

SEQ ID NO: 349768 - DNA, 201 bp, Homo sapiens
cttcttgttgtgatgtgtgttccgtattttaagcaatctcaccaggattattattttatggccactttctctgccctccactctcttgtgtccgatcttcygtctgggattatgttgcaaacatatcctcgttcatttcctgcagtaaaggtctcctggtgaccacttcttcacttctggcgtgtctgaaaatacctttat

SEQ ID NO: 349769 - DNA, 201 bp, Homo sapiens
ctctgcacatcagtccccagcccctccacagcctggtccagtcctagacctgtgccttgaacattaatgcccagagccgggttcatgaccaggacagggcmgaatggggctggttctgtgttcacaaagtcacctccagacgcttcctgggacgggttcaggagacgccttgtgtgtctgtcacctcgttctggctcatgc

SEQ ID NO: 349770 - DNA, 201 bp, Homo sapiens
tttcctcctcaggagttcagaagtcgcacagcccggcagtcttcgcgcgggaggtggcgggtctagctcaccaactcccagttcggtgtcttgagctgccrgaagcttgggcagccctggaggatgctgagactccgcatgcttgttccttcagccacttacatcttcttgttgtgatgtgtgttccgtattttaagcaat

SEQ ID NO: 349771 - DNA, 201 bp, Homo sapiens
attacagctgttctgcccgagcagccctgattcttgccctggcagccggagcctctgctcactctgccttccttgctcacttctagagagtccgttttacrtcctcatcgagacttcaggctccaacgcaggccatgacgctgagaagctgggccacttcctggagcacgcgctgggctccggcctggtgaccgatgggac

SEQ ID NO: 349772 - DNA, 201 bp, Homo sapiens
ccttgctcacttctagagagtccgttttacgtcctcatcgagacttcaggctccaacgcaggccatgacgctgagaagctgggccacttcctggagcacgygctgggctccggcctggtgaccgatgggaccatggccaccgaccagaggaaagtcaaggtgccctgtgtcctgcttgcaggtccccgctctctgtccgtc

SEQ ID NO: 349773 - DNA, 201 bp, Homo sapiens
tgaccaagttcacaggatgaaattctgtgaaactcccaggtagcaagtcagtgtagggctgtgtcgggctgatccatggtcatgatttatcaggagagtgtttttttttttttttacattattcttctgtatttttttgagagacaaggtctcactctgtcatccaggctggagtgcagtggtgcaatcgtggctcactgc

SEQ ID NO: 349774 - DNA, 201 bp, Homo sapiens
gctcactgcagccttgaactcctgcactgaagggatcctcctgcctccctagtagctgggaccaggtgtgtaccaccatacctggctacatttttaaaatygttttatagagacagggtctcccatgatgcccaggctggtcttgaactcctgagctcaaacaattctcctgccttggcctcccaaagtgctggggctaca

SEQ ID NO: 349775 - DNA, 201 bp, Homo sapiens; identical to SEQ ID NO: 74553

SEQ ID NO: 349776 - DNA, 201 bp, Homo sapiens
cacctcccatgtgggacctagttttggtttttttgagatggcttcttgctctgtcacccaggctggagtgcagtgttgcgatcatagctcactgcagcctygacctcctggactcagatgattctccctcctcagcttcccaaataagatcactctctgggggctgggcatggtggctcatgcctgtaatcccagcacttt

SEQ ID NO: 349777 - DNA, 201 bp, Homo sapiens
atcatagctcactgcagccttgacctcctggactcagatgattctccctcctcagcttcccaaataagatcactctctgggggctgggcatggtggctcaygcctgtaatcccagcactttgggaggccgcagcgggcggatcacgaggtcaggagttcgagaccagcctggccaatgtggtgaaaccctgtctctactaa

SEQ ID NO: 349778 - DNA, 201 bp, Homo sapiens
tagggctgtgtcgggctgatccatggtcatgatttatcaggagagtgtttttttttttttttacattattcttctgtatttttttgagagacaaggtctcrctctgtcatccaggctggagtgcagtggtgcaatcgtggctcactgcagccttgaactcctgcactgaagggatcctcctgcctccctagtagctgggac

SEQ ID NO: 349779 - DNA, 201 bp, Homo sapiens
attttgtatgtagaaacagggtctcatgtaactcctgggctaaacgatcctcccactgtggcctcctaaagtgcgggggttataggtgtgagcctgagccrctgcacccagcctgtgtggtctgtttttagtgtctgttgtttctgctggttcatgctcctggctccttagtttcttgtgtgcttggctgtctgtggcagt

SEQ ID NO: 349780 - DNA, 201 bp, Homo sapiens; identical to SEQ ID NO: 74561

SEQ ID NO: 349781 - DNA, 201 bp, Homo sapiens
ctgggagagcaagacctctgcatccacactgccttccgctgggcctctggggactggggaagcggacacagtccaggactgttggaggaggaagaggctgyggctgctcttccctgggggtccggctccaggaggctgcggtgaccgttgggccggagcaggccagtgccgggcacgtcctgcccatgacagccctgctgc

SEQ ID NO: 349782 - DNA, 201 bp, Homo sapiens
gggcaacagagtgagagtccgtctccaaaaaaaaaagctcgctctctggggcgagtgaccacttgcctcatctgcagctccccccacgctgtctcataggrtcttcttcctgtcacaggctgtagcaaggtgctgctgaggccacggacgtcggaggaggtgtcccacatcctcaggtgaggtggtggctcccggctcccc

SEQ ID NO: 349783 - DNA, 201 bp, Homo sapiens
ctcggtcaccgtcaccggggcctgggcagggggagccctcggtcaccgtcaccggggcctgggcagggggagccctcggtcaccgtcaccggggcctggayagtgggagccattggtcactgttaccgggacctgggtgggaggagccctcagttaccttcaccggggcctgggcagtgggaggcgcccttggtcaccgtc

SEQ ID NO: 349784 - DNA, 201 bp, Homo sapiens
gagccctcggtcaccgtcaccggggcctgggcagggggagccctcggtcaccgtcaccggggcctggatagtgggagccattggtcactgttaccgggacytgggtgggaggagccctcagttaccttcaccggggcctgggcagtgggaggcgcccttggtcaccgtcaccagggcctgagcagtgggcgcaggacttta

SEQ ID NO: 349785 - DNA, 201 bp, Homo sapiens
ctgggcagggggagccctcggtcaccgtcaccggggcctggatagtgggagccattggtcactgttaccgggacctgggtgggaggagccctcagttaccktcaccggggcctgggcagtgggaggcgcccttggtcaccgtcaccagggcctgagcagtgggcgcaggactttactcccgcttagttgatttcaggctcg

SEQ ID NO: 349786 - DNA, 201 bp, Homo sapiens; identical to SEQ ID NO: 74566

SEQ ID NO: 349787 - DNA, 201 bp, Homo sapiens
caggtgccagggttccctcaggtgccgcactgaagtgtcgggccgaggcccaggtgcccagcaggcccctctgcaaaaattgctcatttgatgaaagagasataagtggctttctgatcagaaaagcaaggtggacaccacagcctggttctcagagctccacgaagaggtgacaggcacccgtgactgcacctgctgcct

SEQ ID NO: 349788 - DNA, 201 bp, Homo sapiens
gcataccccgaggagcccgtgggcgtggtgtgccaggtggacggtgtcccccaggtggtggagtacagcgagatcagtcctgagaccgcacagctacgtgyctccgacgggagcctgctgtacaatgcaggcaacatctgcaaccacttcttcacccgaggcttccttaaggcggtcaccaggtgtgcggcagcaggtggc

SEQ ID NO: 349789 - DNA, 201 bp, Homo sapiens
agatctggccctactctgccgcttctgtgccctgtagtgtccttctgccatcctgtcccacccagctgggtgtgctcagaagtggggacagagcccccagyggtgccatatctgatctgtttctttcctcccctctgctctcccgtgccccagggagtttgagcctttgctgaagccacacgtggctgtgaagaaggtccc

SEQ ID NO: 349790 - DNA, 201 bp, Homo sapiens; identical to SEQ ID NO: 74573

SEQ ID NO: 349791 - DNA, 201 bp, Homo sapiens
accgggacattgcccagaaccggcccaaaatggggcctggccccagccccaactggacactggaccccgaaccccgatgccggctctggtccgagccccgyctgcctgcagggccaggcgtactcgcggccggctcaccgcgcctcccttgcaggtacgtcatgaccagcgagttcactctggggcccacggccgagttct

SEQ ID NO: 349792 - DNA, 201 bp, Homo sapiens
ttggctctgcgacagccatgctggggaggggtcttccttcccggcaccaccgcaggtgcaggtagccttgtgcccagccagctccaggtcacacggtgacygtcggcacagcctcctggcccgacccttcaagttgtgctcagtgcactgagggaggcaggggctccccaactccctccccaacttatccacaaggttttg

SEQ ID NO: 349793 - DNA, 201 bp, Homo sapiens
tttatttacttttttgagatggagtctcgctctgtcgcccaggctgtagtgcagtggtgggatctcggctcgctgcaagctccaccctcccccggtttccrccattctcctgcctcagcctcctgagtagctgggactacaggcgcccgccaccacgcccggctcatttttttgtatttttttttttttttagtagagaca

SEQ ID NO: 349794 - DNA, 201 bp, Homo sapiens
ggaggcgagagaagcccagctccaggcccatgaggcgaaccacgtgggagccccagacagcgaccacgccccaggcgaaccaaggcccgccccgttgctayagctacgctccgagcacacctgggcaggcgctgccggacgcatgcgcaatgaacctgagggcagggcggagtcgcagcagttgtctgacgcagtcgccgt

SEQ ID NO: 349795 - DNA, 201 bp, Homo sapiens
ggggtccacgcgcccgggttcgcggctgccccgaggctgtgtggtcccgggttaggcgcctctttttctgggccttgatcgtcatttgtcacatggtacaycaactgggctgtctggttagtgaccagggctgccttaggcacaaggccggggcttcccccgcctccagcacgtcctagactcccagagcgatccctggcg

SEQ ID NO: 349796 - DNA, 201 bp, Homo sapiens
gctttcccctgcggggcgtccctggggcctcttcctcccttagctcaatggtcgattcctctgcccacgccagctggcgcgacccagagggtcctgggatytctcggggcggggcgcggagtggacagggcgggcatgggcccggggcctggagaagagcaggaacggggacgggagctcgagggagcaggccagggccag

SEQ ID NO: 349797 - DNA, 201 bp, Homo sapiens; identical to SEQ ID NO: 74575

SEQ ID NO: 349798 - DNA, 201 bp, Homo sapiens
ctctgctctcccgtgccccagggagtttgagcctttgctgaagccacacgtggctgtgaagaaggtcccgtatgtggatgaggaggggaatctggtaaagycgctaaaaccgaacgggataaagatggagaagtttgtgtttgatgtgttccggtttgctaagttagtagtagaactcatttattttccccttcttccttc

SEQ ID NO: 349799 - DNA, 201 bp, Homo sapiens
  misc_feature (1)...(201): n = A,T,C or G
tttgggtaccagcaagtgtcacagggggcagagaccagcagaaacctaaagatgacccctagaagagcaggaggccaggggaacagagttagacgagccangtgctaagcaggacgtcgctgccgggggagctctccagacacgcagaaatgccacagtcaggaccgtgggacgcagcggattcgcccaagggcaggagca

SEQ ID NO: 349800 - DNA, 201 bp, Homo sapiens
aagcccagctccaggcccatgaggcgaaccacgtgggagccccagacagcgaccacgccccaggcgaaccaaggcccgccccgttgctacagctacgctcsgagcacacctgggcaggcgctgccggacgcatgcgcaatgaacctgagggcagggcggagtcgcagcagttgtctgacgcagtcgccgtaggacgcagcc

SEQ ID NO: 349801 - DNA, 201 bp, Homo sapiens
agcccagctccaggcccatgaggcgaaccacgtgggagccccagacagcgaccacgccccaggcgaaccaaggcccgccccgttgctacagctacgctcckagcacacctgggcaggcgctgccggacgcatgcgcaatgaacctgagggcagggcggagtcgcagcagttgtctgacgcagtcgccgtaggacgcagccc

SEQ ID NO: 349802 - DNA, 201 bp, Homo sapiens; identical to SEQ ID NO: 193957

SEQ ID NO: 349803 - DNA, 201 bp, Homo sapiens; identical to SEQ ID NO: 74570

SEQ ID NO: 349804 - DNA, 201 bp, Homo sapiens
gctgcgcgagcactgccggcgggcggcggaggcctgcgcgcgcccccacggcccgccgcccgacttggccgcgcgcctgcggcccctgcccccagagcgcktgggcagggccagccgcagcgaccccgagacacggcggcgctgggaggaggaaggtaagcggggtgggaggccctgggggccggcagggggtcgtgccca

SEQ ID NO: 349805 - DNA, 201 bp, Homo sapiens
cccgttcctgagacggggagggaccgcccagactagaactgggagcgtagctgggggtccacgcgcccgggttcgcggctgccccgaggctgtgtggtccygggttaggcgcctctttttctgggccttgatcgtcatttgtcacatggtacaccaactgggctgtctggttagtgaccagggctgccttaggcacaaggc

SEQ ID NO: 349806 - DNA, 201 bp, Homo sapiens
ggcagggccagccgcagcgaccccgagacacggcggcgctgggaggaggaaggtaagcggggtgggaggccctgggggccggcagggggtcgtgcccacgkagcgggtgggaaccgaggccgcgctcggggaactgtagttctcctcgctactttgagacgtgtctcgcctcacgcgttccggcccccgagtcctggcgcc

SEQ ID NO: 349807 - DNA, 201 bp, Homo sapiens
tcacttggcagtgggatgtgtgctcagggtttggggtgtccagaggaagatgagcttgctgagacaggagctgtggggagccaggtgtgtagagctcagtytcctatcgggactgggggtgctgggggagggctctgggcaggtgctgcaaggagatattgacaagtggactttccctagcttgcccccaaatggagaccc

SEQ ID NO: 349808 - DNA, 201 bp, Homo sapiens
ttttttacaagcctgtttattttagagtatatgatacaatgatgataatggataaataagacctggaaaagcaagatgataagaaaaccaaggttgggttkgggcatgggggtgagctcaagagaacatgaggtacagaggctgtgagaccatttagttgctggagctaacttttaagatctttagctctgaatttcttga

SEQ ID NO: 349809 - DNA, 201 bp, Homo sapiens
agtttgaggctgtattgtgcctgtgaatagcaactggagtccaaccttggcaatgtagcaagatgtaagagtgagagagagagagagaagagagaagacargaaggaggagaagagaagaaggagaaggagaagaggagaggagaagagaagagagaaaggaagaacaagaaggagaagaaagagaaggaaagaacaaaaa

SEQ ID NO: 349810 - DNA, 201 bp, Homo sapiens
cttgagggcaggagtttgaggctgtattgtgcctgtgaatagcaactggagtccaaccttggcaatgtagcaagatgtaagagtgagagagagagagagaagagagaagacaggaaggaggagaagagaagaaggagaaggagaagaggagaggagaagagaagagagaaaggaagaacaagaaggagaagaaagagaagg

SEQ ID NO: 349811 - DNA, 201 bp, Homo sapiens
tcgcttgagggcaggagtttgaggctgtattgtgcctgtgaatagcaactggagtccaaccttggcaatgtagcaagatgtaagagtgagagagagagagagaagagagaagacaggaaggaggagaagagaagaaggagaaggagaagaggagaggagaagagaagagagaaaggaagaacaagaaggagaagaaagaga

SEQ ID NO: 349812 - DNA, 201 bp, Homo sapiens
tactcgggaggctgaagcaggagaatcacttgaacccgggaggcagaggttgcggtgagctgagatcgtgccattgcactccagcctgggcaacaagaccragacttcgtctcaaaaaaaaaaaaaagaggatttgtatattctccacccggacttatctgtgtcaacattttactctacatgcttcatcactcgtgcata

SEQ ID NO: 349813 - DNA, 201 bp, Homo sapiens
tgggggaagatgaattctggtttgacttgcttcaggggagaaggaggggtgggcaacagaagagcaggagaaggccagagaaagaagatttgcttctaagrccttccgatctcctttagttcaaagtacttagcatgccaaggtgccatactttggggtattgttttctgagccccaataacagaataagccttgtgctta

SEQ ID NO: 349814 - DNA, 201 bp, Homo sapiens
cgtgatggcagcagctgctccgggctacaaagaggcgatgctgccagcattgtgacttttagaaagggaaaccaaaaaaaaaagaaggaaagaaagaaatrgaaggatcttgagaactcacagtacactctacttgaaaagccggatggctacagacatttctaagacgtgggactttctcccagatcttcttactccata

SEQ ID NO: 349815 - DNA, 201 bp, Homo sapiens
ctctgtttctgctttgcagggtttggtttctaacctgactctcagttccaatatcctcacggactggacgatctttccactggacactgaggatgcagtgygcagccacctggggggctggggacaccgtgacagtggccaccatgatgaagcctgggcccacaactcatccaactacacgctcccggccttttatatggg

SEQ ID NO: 349816 - DNA, 201 bp, Homo sapiens
tacccattagcattcattccacactctccctcctctcagcccctggaaataatatactttctgtccctgtgggtttgccaattctgaacatttcgtataartgaaccacatatatacacctgtatgacttctttcatttagcccaatgtgttcaacgctcatccacgttgttgcacgtactagtgcttcattcctttttat

SEQ ID NO: 349817 - DNA, 201 bp, Homo sapiens
tagtgatttttattttggaagaatcatgttacctttttgttaaataaaatttgtactcaaatgatgatgtcactgtttttaatgtgcaggtattgaattayatggtctgacttaaatcataactagacttgagtgggctgaataaaccacttcactaacttgaagttcaaaaggatggaaaatagtcttggtttgatctgt

SEQ ID NO: 349818 - DNA, 201 bp, Homo sapiens
tttgatgcacagagttttaaagtttaatgcaggcccatttctctatttttgcttttattttggcatcatatccaagaaatcattgccaagttcaatatcaygtagcttttttccccatgttttcttctaggagtgttatagttttgggtcttacgtttaggtctttaacccatattgaattaatttttgtgtatggtataa

SEQ ID NO: 349819 - DNA, 201 bp, Homo sapiens
actgaactgtcagggctggaggtggtttggcagatgctacaaaggctatgccagattccttacacagtgctgtgtaaactgtggagatgctgcaagtgaargttacagatgggtgggcaatgtggttaggatgcttctggccataagtaatattaagagagacttcatttaggagagtggctttcataaaggatatgacag

SEQ ID NO: 349820 - DNA, 201 bp, Homo sapiens
cattggaaggtcataagtctatcctaagggctacgttctttttttgttttagatcaattctgaattctatactggctggctagatcactggggccaacctyactccacaatcaagaccgaagcagtggcttcctccctctatgatatacttgcccgtggggcgagtgtgaacttgtgagtgttcattgcctgaggggaggg

SEQ ID NO: 349821 - DNA, 201 bp, Homo sapiens
tcttccattgcgatttgccttctttatccagtcttttggaatgctgaacaaaaatgtttttggcacaaggcaggcgtgaaaacataaagttaataaaaatygaatgcataagctagagcagattatccacagattcttccatctccatatagattatcaccattgcctgcacctgttttccttctccagcctatctgatgg

SEQ ID NO: 349822 - DNA, 201 bp, Homo sapiens
tgtgactagaactctaagctgcctcgcaattgtgcttttctcgctctctcaaaacctaaccaaattatgtgtacgcattttttacaagcctgtttattttrgagtatatgatacaatgatgataatggataaataagacctggaaaagcaagatgataagaaaaccaaggttgggttggggcatgggggtgagctcaagag

SEQ ID NO: 349823 - DNA, 201 bp, Homo sapiens
tttttttcctaattggtcgtaacatagaacttgagtagagtcttagctgctaacattttgagcacttactagatgccagatctgtgcaaggttctagtcaygtattgactcagttaatcctcatgataacccatcgagttaggtacactttacaggtggagtcccatgggtaggaagtggcagagctcagatttacatgta

SEQ ID NO: 349824 - DNA, 201 bp, Homo sapiens
atttttgagatttatttacattattacaaataccagtagtttgttcttttttattgctgagtagtagtctatcatatacatatgccatagtttgctgaagsaggagaatcgcttgaacccaggagttcaagactgccatgagatatgattgagccattgcactccagcctgggtgacggagcaagaccctgtatccaaaaa

SEQ ID NO: 349825 - DNA, 201 bp, Homo sapiens
agcttacagaatggagacagttactctaaaacaaagacctgcaaattatggctgccacctacatttttttgtaagtaaaagtatattggaatcgccacacygtttatatatcatctgtggccgcttttgtactatagtggcagagttgagtagttgagatggagacctctatggctgcaacacctaaaatatttactctct

SEQ ID NO: 349826 - DNA, 201 bp, Homo sapiens
taacagggcattcatcatgaggtaataagcctatttatgactgtttggaagatcaacatctttaaaagtctctggtgcttaaggagcttacagaatggagrcagttactctaaaacaaagacctgcaaattatggctgccacctacatttttttgtaagtaaaagtatattggaatcgccacactgtttatatatcatctg

SEQ ID NO: 349827 - DNA, 201 bp, Homo sapiens
ggaggattgcttgaggccagcagttggagaccagcctgggcaacatagtgagatcctatctctacagaaaatttgaaaattattaactgagcatggtggcrcacccctgtggtcccatctacttgggaacagaggtgggaggatcgcttgagcccaggaggtcaaggctgcagtgagccatgatcatgctgctgcactcca

SEQ ID NO: 349828 - DNA, 201 bp, Homo sapiens
cctgaggcccgggccctacatctgtgcagagtgggaaatggtgagtgtggctagactgggctctacctggtgtgtgtgagctggcaggcagcagctctggrgcaaagggaattaaagcagacctgcattccagagagcatggggcctgggactgtacccagcacaggtgtcttttaccttgacaaggtgcccaggcagaga

SEQ ID NO: 349829 - DNA, 201 bp, Homo sapiens
ggaaaaatattatgctaagtaaaagaagccaaaactaaaaggctatgtattgtatgactccatttatatgaaatgttcagaaaaggcaaatccatagagayagtagcttactggttgcctagggctgagggtgggaatggagcgtgactgttaagtgggcatggggtttctattggagctgatggatatgctctgaaacta

SEQ ID NO: 349830 - DNA, 201 bp, Homo sapiens
cgctacatctcaggaagcattcactactcccgtgtgccccgcttctactggaaggaccggctgctgaagatgaagatggctgggctgaacgccatccagaygtaagtaggagggcatgtggctctcacctaggcctgaacacccactctggagagaagatacaactgtatttctcagggtggctattttattgctcagaaa

SEQ ID NO: 349831 - DNA, 201 bp, Homo sapiens
gtccttagtcaagtgacgcgaagcggccggcctgggcgccgactgcagagccgggaggctggtggtcatgccggggttcctggttcgcatcctccctctgytgctggttctgctgcttctgggccctacgcgcggcttgcgcgtaagtctgcgggacccgggtacggggaggcattgctaggggacaggctggcggggaac

SEQ ID NO: 349832 - DNA, 201 bp, Homo sapiens
tccatgtgttagcaatagtcctaatgaggccctttccccacgcttctttcttcttgactctgccaagtatccaggaaggggctgtgtgtgtcttggcaggyatgtgccctggaactttcatgagccctggccaggacagtaccagttttctgaggaccatgatgtggaatattttcttcggctggctcatgagctgggact

SEQ ID NO: 349833 - DNA, 201 bp, Homo sapiens
ctctgagcacccttcacggaacagacattataatggcttgttttccctgaactagggaggattacctgcttggctgctagagaaagagtctattcttctcmgctcctccgacccaggtaggttgttacagatgtcttgagaagatttataaaagcttcagcctaggtgcggtggctcacgcctgtaatcctgacactttgg

SEQ ID NO: 349834 - DNA, 201 bp, Homo sapiens
tctccatatagattatcaccattgcctgcacctgttttccttctccagcctatctgatggaatggtgcttccatgacatgtggtatttggaaggctcttasctctgatgtaatcagggtttgacccatagtcacctgaaatagttcttctgtttctctttgttctatgaactgaagggtctcagaagcccgtgttatgcaa

SEQ ID NO: 349835 - DNA, 201 bp, Homo sapiens
ttgtcatttccacgactgacctaccttctccctcttacaattttcaggcagcaacatcacagatgctttcctaagccagaggaagtgtgagcccaaaggayccttggtaagaatcgagggtgaggtgtgtgtttgcagctgttaagagagaaaagttacatgctgctgaaactgggcagtaggcccttgatgtttttggct

SEQ ID NO: 349836 - DNA, 201 bp, Homo sapiens
cacatatatacacctgtatgacttctttcatttagcccaatgtgttcaacgctcatccacgttgttgcacgtactagtgcttcattcctttttattgctgmatagtattcccttgtgtggatgtacagtattttatttatccattcattggttgatggacatttgggttatttgcacattttggttatagtgttgctttga

SEQ ID NO: 349837 - DNA, 201 bp, Homo sapiens
ccctttacacctgtcatagatggggcattgcagggaagccctggcattggaaggtcataagtctatcctaagggctacgttctttttttgttttagatcarttctgaattctatactggctggctagatcactggggccaacctcactccacaatcaagaccgaagcagtggcttcctccctctatgatatacttgcccgt

SEQ ID NO: 349838 - DNA, 201 bp, Homo sapiens
tgtcatagatggggcattgcagggaagccctggcattggaaggtcataagtctatcctaagggctacgttctttttttgttttagatcaattctgaattckatactggctggctagatcactggggccaacctcactccacaatcaagaccgaagcagtggcttcctccctctatgatatacttgcccgtggggcgagtgt

SEQ ID NO: 349839 - DNA, 201 bp, Homo sapiens
ctagactgatagttttctctcagcatactgactttgggcttttattgttgctgctgagaagtcagtttactgtactctgtcactctcttgaagataatctrtctttcctcttggacagcttctgagattttctctttatatttgacgctgtatagtttctctgtgatgaatctaagtgtgactttcttttcgtttatcccg

SEQ ID NO: 349840 - DNA, 201 bp, Homo sapiens
gttcttgtgctcagggtggacttcatggcctcctgcctggctctcacaggccacattgacccatgggagtgactcgactctgttgtgtagtctctgggtcyccagtacctgtcaaagagcctgacatacagccacctggttaatatttatcaaattattaaatgggcaatcgagacttggtatctgggattccactgggaa

SEQ ID NO: 349841 - DNA, 201 bp, Homo sapiens
attatgatcattgtaaggtcaatttttaaagtctaaccttttaaaaagttaggaatatgttgttgataaaatacctgttgtttttcctcattctgttgtaygattttcgtggttaatgcatcatgtcaagtattttgaggtgagaatactccacctaacttctctgattttatctcttttgtctgattttgtcttatctct

SEQ ID NO: 349842 - DNA, 201 bp, Homo sapiens
atattctgaaggactgctcgtgacaactattactgaaatgcacaaagaaccgtgtttcataacaaaagcagatgcatttcaggacttccagtcctctcacygaaatggtcacaggaaggaacacaggaaaagattttcttcaccaagaaaatttgttcagaagattttaaaatatttcccattctcttgtaatcaacagct

SEQ ID NO: 349843 - DNA, 201 bp, Homo sapiens
tcaggaatacttgcattgtataagatgagatctactttaggttagaacctgaggactgaacataggcattgctggtattggaagtgctcactggggggcgkctctgggttaagcagtgcatgtcagcatgtcaaccccctttacacctgtcatagatggggcattgcagggaagccctggcattggaaggtcataagtcta

SEQ ID NO: 349844 - DNA, 201 bp, Homo sapiens
gtacatgtttataggtgggaccaattttgcctattggaatggtaagagcactttaatatctgtagaaacttatgctagaatgtttctgttgattaatttgrggaggggtgtgcccacagacaattttattttcctttttttgtttatcctctcctaaattttcttttttttttctttttctttttcttttttttttgtaga

SEQ ID NO: 349845 - DNA, 201 bp, Homo sapiens
aagcaacatttctgattgctctgaaaagtatgattaaagcacaaattattatggaaaaataatggtttagaagtatagcattttggtatatttgttcattkcttttctgaaacattaattagctaaggtaaagatgaggattttgctatatgataatcaaactagtatcaatgaaaatcatcaatattaaaatgaaaagtt

SEQ ID NO: 349846 - DNA, 201 bp, Homo sapiens
aggttgcagttttaggtgcttggtggctgtaggctttcctgaaaaggtggagctcaaacaaaaattttaaggtggtgagagagccatgtggcatatctccrcctggacaagagcattccaggcagaatgcagccagtgagaacttgggaaggtatatggcatttttaaagactagcaaggaggccagtgtggctggagccc

SEQ ID NO: 349847 - DNA, 201 bp, Homo sapiens
attttctttcttgccttttttttttttttttgagacaatgtcttgctctgtcacccaggctgcagtgcagtggcatgaacacggttcactgcactctcaaycttctgggctcaagcagtcctcccacctcagcctcccaagtagctgggagcataggcgtgtgccaccaagcctgcttaatttttgtttgtttgtttgttt

SEQ ID NO: 349848 - DNA, 201 bp, Homo sapiens
agtaaatgggatagacagatgaaagcttaatatctgtattataatgagctaatatcactgatcagaatatcaagatctacatagaaaattgggtaaatgaygaccaggcgcagtggctcacgcctgtaatcccagcacttaggccgaggcgggcggatcacctgaggtcaggagtttgagaccagcctgaccaacatggag

SEQ ID NO: 349849 - DNA, 201 bp, Homo sapiens
ttagttgttttactcaggggtgttcagagagggtttataaggaggcagcatctgagccttcgttttcattcattttaagaatcttttataggtctctgagsaggttggacttccgaataggtatgtttgaaacctttttaagactactatcattcatagttttcatcaggagttagggagtagatggagaggactgaagga

SEQ ID NO: 349850 - DNA, 201 bp, Homo sapiens
ttttcgttgttgttattgtttttgttttttgagacagagtctctctctgtcaccaggctgagtgcagtgatgagatctcggctcactgcaacctccacctyctgggttcaagtgatcctcctgcctcagcctcctgaatagctgggactacaggtgcgggcaaccacgccagctaattttgtgtatttttagtggagatga

SEQ ID NO: 349851 - DNA, 201 bp, Homo sapiens
gccttccaaagtgctgggattacaggcgtgagccactgtgcccggctatgaccaaggatgctcttatggaaaagagtaaaggtttttttttttttttttttaggagacagagtctcgctctgtcgcccaggctggaatgcagtggcacaatctcggctcactgcaacctctgcctcccaggttcaggcgaccctcctgtgt

SEQ ID NO: 349852 - DNA, 201 bp, Homo sapiens
gtgtttgcacatggggacgagctgatgcccaagcaaaactaactgaaagtaattggggagctgtgtgtggtgatgcacatctgaagatccagcttctcggkaagctgaggcaggaggatcgcttgagggcaggagtttgaggctgtattgtgcctgtgaatagcaactggagtccaaccttggcaatgtagcaagatgtaa

SEQ ID NO: 349853 - DNA, 201 bp, Homo sapiens
tgtgttcaacgctcatccacgttgttgcacgtactagtgcttcattcctttttattgctgaatagtattcccttgtgtggatgtacagtattttatttatmcattcattggttgatggacatttgggttatttgcacattttggttatagtgttgctttgaacattgatgtacaaggatttgtttgaattcctgtttcagt

SEQ ID NO: 349854 - DNA, 201 bp, Homo sapiens
cccaggctggagtgcagtggggcaatctcggcttactgcaacctctgccttctgagttcaggcaattctcccacctcagcctcccatgtagctgggattasaggcgcatgccaccatgcctggctaatttttgtatttttagtagagacggggtttcgccatgttggccaggctggtctcaaactcctgacctcaggtgat

SEQ ID NO: 349855 - DNA, 201 bp, Homo sapiens
gctgcttttgtttcttttcagttaaagacagtgggagcagctctggacattctgtgtccctctgggcccatcaaaagcctttatcccttgacatttatccmggtgaaacaggtaggccctcaaaggtaatgcctcgccttttttctacttgcaaaagtgtgctttctgcactgccttgcagtgcccattctgaattcaggg

SEQ ID NO: 349856 - DNA, 201 bp, Homo sapiens
ggtgttggtaaaattacttaggtgaaacataaaaccatgttcattggacattgaccaaggatgccatggatgctcctttttttttttttttttttttttttgagagagagtctcattccgttgcccaggctggagtgcagtggggcaatctcggcttactgcaacctctgccttctgagttcaggcaattctcccacctca

SEQ ID NO: 349857 - DNA, 201 bp, Homo sapiens
aaacaatgtgatcactctgaacataacagggaaagctggagccactctggaccttctggtagagaacatgggacgtgtgaactatggtgcatatatcaacrattttaaggtaggacaaaccacactgtcaagactaaggtttaaggggtgacaacttagaagttgaagcccagtacagtggctcacacctgtaatctcagc

SEQ ID NO: 349858 - DNA, 201 bp, Homo sapiens
ccccacctcctaacccatcacatgggggctagaattttaacagatgagttttgggtggacacaaacattcagaccatagcagaggccttggagaatggctrggaaagacagtattggaggagggttgttggatctataggctgggaattcagggcagggatctgggccaggaatgtatgtagaagatcattgttgtataga

SEQ ID NO: 349859 - DNA, 201 bp, Homo sapiens
tgtatcccggtttgcttttcccatttccctggaatgcagagacatgtgaagcctttttccttccctccccagctcactgtgctctgtttctgctttgcagkgtttggtttctaacctgactctcagttccaatatcctcacggactggacgatctttccactggacactgaggatgcagtgcgcagccacctggggggctg

SEQ ID NO: 349860 - DNA, 201 bp, Homo sapiens
ctggttttcatttatgccaagcccagtgctcccagaatatccccacctgcatccagccccacacccctggggcttctatcataagctgtctgcttctccaytcttcctcatccattttcacttcccagtcactccgccttgtcgtttgaagacattggcatatcttccttcaccgccttctcctctccctcatgtcctgtt

SEQ ID NO: 349861 - DNA, 201 bp, Homo sapiens
tcccatttccctggaatgcagagacatgtgaagcctttttccttccctccccagctcactgtgctctgtttctgctttgcagggtttggtttctaacctgrctctcagttccaatatcctcacggactggacgatctttccactggacactgaggatgcagtgcgcagccacctggggggctggggacaccgtgacagtgg

SEQ ID NO: 349862 - DNA, 201 bp, Homo sapiens
ggccaaaatggcaaaacctcgcccctactaaaaatacaaaaaattagctgggcatggtggtgggcgcctgtaatcccagctactcaggaggctgaggcagraggattgcttgaaccctggaggcggaagttgcagtgaaccgagatcgtatcaatgcactatagcctgggtgacaaagcgtgactctgtctcaaaacaaac

SEQ ID NO: 349863 - DNA, 201 bp, Homo sapiens
caaagtttgcatatggaaaggtcactttggaaaaggtaagaaaaaaaaataacagaaactttgaaagtgagagatgggagtgagaaagtggaatttagtascagtgagtgaaagtgctgtgctggaggaattggttcgttatttttctgcgaatttgttttctgcaagcctaatggggtaaatgatgtttctgggaaaatg

SEQ ID NO: 349864 - DNA, 201 bp, Homo sapiens
agatatgccacacacaagttcagaggagggtgaagtaactaggaagtattaaatattaaggtgatataataatagcatgtctaatcttagttgaatgtaaytggcctctggttactacttttacttcttagttgttttactcaggggtgttcagagagggtttataaggaggcagcatctgagccttcgttttcattcatt

SEQ ID NO: 349865 - DNA, 201 bp, Homo sapiens
caaaaattagccaggcatggtgacacatgcctgctcaggaggttgaggcaggagaatcacttgaacctgggaggaggaggttacagtgagccaagattacrccactgcactccagcctaccagcctgggtgacagagtgagactctctcaaaaaaaaaaaaaaaaaaaaaaaaaaaaaaaaaaatcctaaccagtattata

SEQ ID NO: 349866 - DNA, 201 bp, Homo sapiens
agaaaatggccatcttcaggcagctgtccctaggcgcgaaggccaccctggctgctgtcactgtcttcgtgtccatgatcgcctcccgctcgtatctggcrgagagccttgagctcagggcctggcgttggctgcttcgcttgcagcttgccctgtttgtcaactcgctcttgctcattggctccctctacatttggcgca

SEQ ID NO: 349867 - DNA, 201 bp, Homo sapiens
ttgtggaaataacatgccacctcattgttatggctgccaaggctctttgtcgtatttaccttttttaggagttccccaaaatcacaggcattttgatagayctctgccctaaattatatacttacctccatctcaaagtcatgtcctaatttttatggtctgtggtttatacgttaaatggggacactgggggaaaagcta

SEQ ID NO: 349868 - DNA, 201 bp, Homo sapiens
cacttgaacccgggaggcagaggttgcggtgagctgagatcgtgccattgcactccagcctgggcaacaagaccaagacttcgtctcaaaaaaaaaaaaaagaggatttgtatattctccacccggacttatctgtgtcaacattttactctacatgcttcatcactcgtgcatagacttgtttcttctctctctctgtct

SEQ ID NO: 349869 - DNA, 201 bp, Homo sapiens
ttaggtggtgatgggcaatatatttcactgacatggactcctggggataatctcccagcaggctgcataagcctgtgctcagtggtgaaggcccccaggcrgttgtcttcatatgaatcttcaaggcatggcaaagctcatgacatttgcattttaaaaggtatttgctttggtgtgggtaaaactcaaccaaacatggtt

SEQ ID NO: 349870 - DNA, 201 bp, Homo sapiens
tgtgaccccatccttgctctgtagaatgccacccagaggatgtttgaaattgactatagccgggactccttcctcaaggatggccagccatttcgctacayctcaggaagcattcactactcccgtgtgccccgcttctactggaaggaccggctgctgaagatgaagatggctgggctgaacgccatccagacgtaagta

SEQ ID NO: 349871 - DNA, 201 bp, Homo sapiens
gaagcctttttccttccctccccagctcactgtgctctgtttctgctttgcagggtttggtttctaacctgactctcagttccaatatcctcacggactgkacgatctttccactggacactgaggatgcagtgcgcagccacctggggggctggggacaccgtgacagtggccaccatgatgaagcctgggcccacaact

SEQ ID NO: 349872 - DNA, 201 bp, Homo sapiens
gtggctacattaggatctcctcatttttccctgctcttttttcactcacaggttgaaaatgaatatggcagctactttgcctgtgattttgactacctgcrcttcctgcagaagcgctttcgccaccatctgggggatgatgtggttctgtttaccactgatggagcacataaaacattcctgaaatgtggggccctgcag

SEQ ID NO: 349873 - DNA, 201 bp, Homo sapiens
tcacaggttgaaaatgaatatggcagctactttgcctgtgattttgactacctgcgcttcctgcagaagcgctttcgccaccatctgggggatgatgtggytctgtttaccactgatggagcacataaaacattcctgaaatgtggggccctgcagggcctctacaccacggtggactttggaacaggttggtgtttgtag

SEQ ID NO: 349874 - DNA, 201 bp, Homo sapiens
ctttttacctagattcaccaattgttaacagtgttttaattgcctttttctctactgtgtatgtagtcaactgcttttctttttctaaccatttgagttaycagcaccatgtcactccacagcatacatcttttaagaaaaagaacattatcctgcagaaccacaatacaatgatcacacatgagaaatttaatattgatg

SEQ ID NO: 349875 - DNA, 201 bp, Homo sapiens
ccattctgaattcaggggccaaaatggtaagcaaatgcatcagatcccaggtaaatgaaccatgaatttccaggctctctttagcttgaagtgctgcgtgktgggctgatcatgcctatattttttgccccacttcttctcactcatacaggaggtagcccaacctgcttcaacataattctgtacaagttataaattgag

SEQ ID NO: 349876 - DNA, 201 bp, Homo sapiens
cagttaaagacagtgggagcagctctggacattctgtgtccctctgggcccatcaaaagcctttatcccttgacatttatccaggtgaaacaggtaggccytcaaaggtaatgcctcgccttttttctacttgcaaaagtgtgctttctgcactgccttgcagtgcccattctgaattcaggggccaaaatggtaagcaaa

SEQ ID NO: 349877 - DNA, 201 bp, Homo sapiens
ctgacctaccttctccctcttacaattttcaggcagcaacatcacagatgctttcctaagccagaggaagtgtgagcccaaaggacccttggtaagaatckagggtgaggtgtgtgtttgcagctgttaagagagaaaagttacatgctgctgaaactgggcagtaggcccttgatgtttttggctctggagtcagcagct

SEQ ID NO: 349878 - DNA, 201 bp, Homo sapiens; identical to SEQ ID NO: 74592

SEQ ID NO: 349879 - DNA, 201 bp, Homo sapiens
aggccccacctctcaatactaccacattggggattcgatttcaacatgagtttcagagggacaaacattccaaccatagcagatggatacaggcacactgrtcctcgtcccctgaggagctcagctgaggagacaactacatgcaggacaacttttatgagacttttacttcagaaggtacttgtcgagtcctgtatatcc

SEQ ID NO: 349880 - DNA, 201 bp, Homo sapiens
gaactcctgacctcaagtgatctgcctgcctcggcctcccaaagtgctgggaatataggcgtgagccgggtgtcacttttctggctggaaacctctgtggyctgtggcgcctttgcccgagttttgctcgggcccactgggttcgttctgcccactcggcctggcaggctgcactcggttcatgcttcctgcctggatccc

SEQ ID NO: 349881 - DNA, 201 bp, Homo sapiens
tggaacctgggaggtggaggttgcagtgagccgagattgtgccattgcactccagcctgggcaacaagagcgaaactccgtatcaaaaaaaaaaaaaaaawttttgggtaaatgacataagcaagtatggatacttgatgaaaatgtgagtatacactattttaagagtcttatactcatatcctttgacctagtcacccc

SEQ ID NO: 349882 - DNA, 201 bp, Homo sapiens
attttcctttttatgtgtggcccaatatacagactatgtgatttcagaatgaggaacaccagattttgaacctggacactatttcttcaaccttaagccarttgtgtaaattccctttatataaaagtagaggtagccgtacttacctcacagacttgtacagtttaaaaataaatggcactcaataaatgtttgttttct

SEQ ID NO: 349883 - DNA, 201 bp, Homo sapiens
cctggcgcagtggtagggtcgtgggcagccttgagaagacaaggaagctcgtgctcaggcctgccctggcagtgggagtgactgctgtgctcagcgtggcygggattctgaatgccgcgcagcccccggctgtgaaaactgtggaggtgcccatccatcagctgcctgcctcaatgaacaacctcaagatcgtgctcctct

SEQ ID NO: 349884 - DNA, 201 bp, Homo sapiens
cctgcctcagcctcctgagcagttagaactacaggtgtgcgccaccacacctgtctaatttttaatttttttgtagcgatggagtctccctatgttgcccrggctgctctcgaactcctgacctcaagcaatcctcccaccttggcctcccagagtgctggcattacaggcatgggcaactgcgcccagcctacaacattt

SEQ ID NO: 349885 - DNA, 201 bp, Homo sapiens
gttcctatctttattatttccttcctttatttgaagcttagctttttaatgcagcctttcttcttttctaatataaatatttaaggttataaatttccttsaagtactgctgtggctttatctcgtaagttttgatgtgcaatctatttcttactgtttgcttctaaacatatctattttgatttctcttcaccattgata

SEQ ID NO: 349886 - DNA, 201 bp, Homo sapiens
cctttatttgaagcttagctttttaatgcagcctttcttcttttctaatataaatatttaaggttataaatttccttcaagtactgctgtggctttatctygtaagttttgatgtgcaatctatttcttactgtttgcttctaaacatatctattttgatttctcttcaccattgatatgtgttttttaaattactggaaa

SEQ ID NO: 349887 - DNA, 201 bp, Homo sapiens
ttctaatataaatatttaaggttataaatttccttcaagtactgctgtggctttatctcgtaagttttgatgtgcaatctatttcttactgtttgcttctraacatatctattttgatttctcttcaccattgatatgtgttttttaaattactggaaataagtactttcctgtttttttgatttctagtctttttgcatt

SEQ ID NO: 349888 - DNA, 201 bp, Homo sapiens
ttgatctgcttcctaattttttgtcagttcagtctactatttagtgagagttgtcctcatgtatttccctttgtagctctgccagttctgaggttatgttrttaggtgggcaaattgagaattacatccttcagtacttaatagtaaagggattatataaccctctatttctaataaggctttttgcctggaagccttttt

SEQ ID NO: 349889 - DNA, 201 bp, Homo sapiens
ctggctaatttttgtatttttagtagagatggggtttcaccatgttgaccaggctggtcttgaacttctgacctcagatgatccatctgcctcagcctccygaagtgctgggattacaggtgtgagccaccatgcccggcctcaaattgtagtttttctagactgatagttttctctcagcatactgactttgggctttta

SEQ ID NO: 349890 - DNA, 201 bp, Homo sapiens
tgtctttcctcttggacagcttctgagattttctctttatatttgacgctgtatagtttctctgtgatgaatctaagtgtgactttcttttcgtttatccygcttggtagttttggaacttgtggcttggtatcttttttcactagtcctaaaaagtttatgccattatgtcttcaaatatttgtttctattagataattt

SEQ ID NO: 349891 - DNA, 201 bp, Homo sapiens; identical to SEQ ID NO: 74603

SEQ ID NO: 349892 - DNA, 201 bp, Homo sapiens
ggatgggggaagcaaacagaagtaacaatgattgagcacttaccagatacagggcactttatactaatgattccatttcctcgagataggtattattgttsctgtttatagctggtgaaactgaaatttgcccaaggccatatctttggtcagaggttcagctagtatttgaagggaagggaaggcatgcaggcagctgta

SEQ ID NO: 349893 - DNA, 201 bp, Homo sapiens
tctacctggtgtgtgtgagctggcaggcagcagctctggggcaaagggaattaaagcagacctgcattccagagagcatggggcctgggactgtacccagmacaggtgtcttttaccttgacaaggtgcccaggcagagaaacaggccagggtcagggcatgggctctcctcttggtggtcactcacatacctcagcttgc

SEQ ID NO: 349894 - DNA, 201 bp, Homo sapiens
gtgctagcattataggcataagcaacggtgcctgctattctttgatttttatttttatttattttattatttttttgagacagagtctcgctctgtcgccyaggctggagtgcagtggtgtgatctcagctcactgcaacctccgcttcccgggttcaagcgattctcgtgtctcagcctcccaagtagctgggattatag

SEQ ID NO: 349895 - DNA, 201 bp, Homo sapiens
tattttttttttaatttttggtagagacggggtttcaccatgttggccaggatgctttcgatctcctgacctcgtgatccacctgcctcagcctcccaaartgcagggattacaggcgtgagccaccgcacccagcctctattttctttcttgccttttttttttttttttgagacaatgtcttgctctgtcacccaggct

SEQ ID NO: 349896 - DNA, 201 bp, Homo sapiens
tggctggagtacagtggcatgatctcggctcaccgcaacctccacctctccggttccagggatgctcctgccccaatctcccgagtagctattttttttttaatttttggtagagacggggtttcaccatgttggccaggatgctttcgatctcctgacctcgtgatccacctgcctcagcctcccaaagtgcagggatta

SEQ ID NO: 349897 - DNA, 201 bp, Homo sapiens
ctttctttctttctttctttctttctttctttctttctttctttctttctttctttctttcttccttccttccttccttccttccttccttccttccttcyttccttccttccttccttctttctcgttctttcttttgacggagtctcgctctgtcacctggctggagtacagtggcatgatctcggctcaccgcaacct

SEQ ID NO: 349898 - DNA, 201 bp, Homo sapiens
cgccatgttggccaggctggtctcaaactcctgacctcaggtgatctgcccgccttggccttccaaagtgctgggattacaggcgtgagccactgtgcccrgctatgaccaaggatgctcttatggaaaagagtaaaggtttttttttttttttttttaggagacagagtctcgctctgtcgcccaggctggaatgcagtg

SEQ ID NO: 349899 - DNA, 201 bp, Homo sapiens
gaaaagggagtatttttacagaatcggtatttttccccatctcatctccacttgatatcaatcaaaacgtaccattggctgtttagttaaaaaaaaaaaaagtaatatacttgtgcacatttaccagttactttatgtacaataaaggaatggggaagggggaaatgaaagaatagagaaaactatactgtagtagtcagg

SEQ ID NO: 349900 - DNA, 201 bp, Homo sapiens
tatttttcttaaatccttttctaaccagcattatgggtttgtgctgtaccggacaacacttcctcaagattgcagcaacccagcacctctctcttcacccytcaatggagtccacgatcgagcatatgttgctgtggatggggtaagaatcgtctctgaactgtgcgttttgtcccagtgagggtggggatgagcagcctg

SEQ ID NO: 349901 - DNA, 201 bp, Homo sapiens
ccctatcacatctcaccatcgccttgacctcctgggctcgagcaatcttcctgcctcagcctcctgagtagctaagactaccagtgcctgccaccataccrgctaattttgtttgtttatttattttaaacaagaagtttaaacaacaagcttcttgacttgaaggaaaaactatctaggattcctttttttttttagact

SEQ ID NO: 349902 - DNA, 201 bp, Homo sapiens
  misc_feature (1)...(201): n = A,T,C or G
agcataaagaccctgatgttctcccctctgaggtaaaaggcacttcatgtgcattgcacagccaatgtttgcctctcttaagagggatgtacagaagactraaatgaggaaattagcctggtgttgcctttttttttttttttnnnnnnnnnnnnnnnnnnnnnnnnnnnnnnnnnnnnnnnnnnnnnnnnnnnnnnnnnn

SEQ ID NO: 349903 - DNA, 201 bp, Homo sapiens
ctgggcccacaactcatccaactacacgctcccggccttttatatggggaacttctccattcccagtgggatcccagacttgccccaggacacctttatcyagtttcctggatggaccaaggtacgtgtcttcatgggaagggtttgaattcaggcctaaacttttggttgttagtgtctgagaaagaatcacaaagagct

SEQ ID NO: 349904 - DNA, 201 bp, Homo sapiens
tagattagatttgcctttcccaggacttcatataaataggttcatgcagtatgaacccaattgtgtaaggcttctttctctcaacatttttgagatttatytacattattacaaataccagtagtttgttcttttttattgctgagtagtagtctatcatatacatatgccatagtttgctgaagcaggagaatcgcttga

SEQ ID NO: 349905 - DNA, 201 bp, Homo sapiens
ccctctttttctcccctcctaatgcagtagagaccaatggaaaagtgtgggatgtgttggaggtcagagggaggttcatcttggccaagtcttaaaggtgwcacacgcaagagttactgacccaggcgttctgctcaacgctttatagacactatctccgtagccatcaaaagaggcacctgtggtagatggatcattatc

SEQ ID NO: 349906 - DNA, 201 bp, Homo sapiens
agcctttttccttccctccccagctcactgtgctctgtttctgctttgcagggtttggtttctaacctgactctcagttccaatatcctcacggactggamgatctttccactggacactgaggatgcagtgcgcagccacctggggggctggggacaccgtgacagtggccaccatgatgaagcctgggcccacaactca

SEQ ID NO: 349907 - DNA, 201 bp, Homo sapiens
aagggctacatactctccagagctgcgtaacatttgatcatgtatgtgtatttgtatatatacaaacatgcatgtacaatacacatacaatataaaccatrattcattttatcagtctgcatttttatttgtgtcaacattttgctaggaaaatttttcagagagggttgaaagattataccattaacatattactatcag

SEQ ID NO: 349908 - DNA, 201 bp, Homo sapiens
actatctccgtagccatcaaaagaggcacctgtggtagatggatcattatctccagtttgcagatgagtagctggaggcttagatagctaagtaacttgtrcgaggtacagaagtgctcagtggcacatctacctgagccccagccgtgtcttgaaggcccatgtgaaaaagcaggcagcattgagaaccggtgaggaact

SEQ ID NO: 349909 - DNA, 201 bp, Homo sapiens
caagagaatgcagttctccaccctctttgtccctcattggctgaaggttgccctcaggggcatggactgcctggtgctcctggacttctgggctgaacccrttcccccagtgttggggcagaaaggcaaaaagacatgagatctgagtgtgagttgagacaatcagcacaaagcatactgagcttgcacaagaccattcac

SEQ ID NO: 349910 - DNA, 201 bp, Homo sapiens
tcaccatgttggccaggctggtctcaaactcttgacctcaagtgatctggccgcttccccctcccaaagtgctgggattacaggcgggagccaccgtaccyggcctctttgaggtttttgatgactgattcaatctttttaatagctattggtctgtatagattttctgtttcttcatgattcggtcttggtgggctgggt

SEQ ID NO: 349911 - DNA, 201 bp, Homo sapiens
ccttttcagcctcaggctctacccatcatctttttttttttttttttttttttttgagacagggttttgctctgttgcccagcctggagtgcagtggtgcratcacagctcactgcagcctcaacctcccaggctcaagtgatcctgctacctcggcctcccaagtagctgagactacaggggtgcaccaccatgcctggc

SEQ ID NO: 349912 - DNA, 201 bp, Homo sapiens
ccacacagtatttgtgaatgtgtcaaagggttcagacccccaaaagcccatctaatccatatgtccactcaaacacttgtacacaactgttcattgcaccrttatccataattgccaaaaggtggaaacagcccaaatgtccatcagctgaggaatgaataaacgaaatgtagtacatccatacaatggaatatgattcag

SEQ ID NO: 349913 - DNA, 201 bp, Homo sapiens
catctccagctgtgagaagctctaccttgaggcagtcaccttttaggctgtgtctggggcgcgcttctctgctctttctgccctccctgtcctcccacctyggcaggacactcggggttatgccttggctgtagccaaccttgaggtcagccactggctgggaacttaccttatgctttgttgtctttctgcataacttag

SEQ ID NO: 349914 - DNA, 201 bp, Homo sapiens
gggggtggaaatggttttgggatgaaactgttccacctcaaatcatcaggcattagttagattctcataaggagtgcacagcctatatccctcgcgtgcgmagttcacaatagggttcctgctcctatgagaatctgatgctgctgccgatctgacaggaggtggcgctcaggcagtaatgctcgctcacctctcactgtg

SEQ ID NO: 349915 - DNA, 201 bp, Homo sapiens
gggctgtgtgtgtcttggcaggtatgtgccctggaactttcatgagccctggccaggacagtaccagttttctgaggaccatgatgtggaatattttcttyggctggctcatgagctgggactgctggttatcctgaggcccgggccctacatctgtgcagagtgggaaatggtgagtgtggctagactgggctctacctg

SEQ ID NO: 349916 - DNA, 201 bp, Homo sapiens
gacaggaggtggcgctcaggcagtaatgctcgctcacctctcactgtgcggcccggttcctaacaggccgcagaccagtctgtggcctggggtttggggamccctgctatatgccaaacctgaaatgtcatgttctgccactgcagcagtgcttgtgctatttatctctctttcagctgggtgtggataagtctcctgtca

SEQ ID NO: 349917 - DNA, 201 bp, Homo sapiens
gatgtaaaataactatgaaataaaacaatgtataataaacggttgaaagaaattccttcttttaactgtttgttgcatcttgcttttgaaatttcctggcygacgcgatggctcacacctgtaatcctagccctttgggagaccgaggtggtaggatcacttgagctcaggggtttgagaccagcctaggcaacttaataa

SEQ ID NO: 349918 - DNA, 201 bp, Homo sapiens
ctgagtggtaggagtgtcttttgttattcataactagcctctttcaatcccacctgggtttgtgctaatgaggcgacttaggatggagcccctagataacyataggatagttacaagggcatgatggcacctgcagtcccagctacttggtgagaggtggggggattgcttctcctgacttgcgtgcccaaacttctcctg

SEQ ID NO: 349919 - DNA, 201 bp, Homo sapiens
ccctgagtcttgttgggaaggattggaggaatatttactgtgtggacttggggtggtaatgcaggatccttcctcaaggggatccatccaaccttccatcwaattttgttgactgtatgttagagaactggctcaaagctgggaattggatgaaggaatctcaattttccatgcagttgttgacatcagccttttgctcac

SEQ ID NO: 349920 - DNA, 201 bp, Homo sapiens
tggggggattgcttctcctgacttgcgtgcccaaacttctcctggttttcttccctctctttgctccttctcaggcttctctgtcagcttctatgttgcartcctcaggacttggtcctgggctctcttcttacacttttggggattgtcctcacagatgtgctggacatgcttacatttccttttccagctcagctctta

SEQ ID NO: 349921 - DNA, 201 bp, Homo sapiens
aacaaaagcttcacattttattactgataatattatataaatgtttaagattgtaatcaaaattggggaactatctctccagtttgttcatatatgagctrtaatttttggaagaaattttcacagacaggttctggccccatacatttcaaaccttgcttctccacaacccatgtacttccggggctgggtgcctttagg

SEQ ID NO: 349922 - DNA, 201 bp, Homo sapiens
accagcctgggcaacatagtgagatcctatctctacagaaaatttgaaaattattaactgagcatggtggcgcacccctgtggtcccatctacttgggaamagaggtgggaggatcgcttgagcccaggaggtcaaggctgcagtgagccatgatcatgctgctgcactccagccagagcaactgagcaagaaagaccctg

SEQ ID NO: 349923 - DNA, 201 bp, Homo sapiens
attcgaggaaaccatctaggaggctggaccatagtctcattgagaaactgggatggtggtatctaagatggagatgacatcaactatttgagagatgttcraagttggatcaataaattgtgacaatggattggacaggagggtttggggagagggatatgtctcggatgactcaggtctcaagcttgcagctgggcagaa

SEQ ID NO: 349924 - DNA, 201 bp, Homo sapiens
acctgtaattccagctactcgggagactggggcaggagaatcgcttgaatatgggagtcagaggttgcagtgacctgagatcacaccactgcactccagcrtgggtgacagagcaagactctgtctcaaaaaaaaaaaaaattaattgtggtaaaatatatataaaacaaaatttgccattttaaccatatttaaatgtaa

SEQ ID NO: 349925 - DNA, 201 bp, Homo sapiens
tgacagcagaaacaatgtttctatttgaaattgagctcctgcactggggtggaacagactggggaccaacatgaatggcctgttacacatcaggttctgtsctcctgcatcctggtctcatctggtcctcagggcaactctcataagtggtcttattgtctccatttttattgaggctcagggaacctatgtcacttgcca

SEQ ID NO: 349926 - DNA, 201 bp, Homo sapiens
cattttcttctccttccaggccagattatctttccaaaagttcaggtgagaggtagggtgatgggagagaatgcacagatcctcttgagactatagcccckattaaggcagcatggatatatgggagcccctatccttgagacacagctaatgtacttcaatatcaaaagaggtaaagctaagctctggtttctttattta

SEQ ID NO: 349927 - DNA, 201 bp, Homo sapiens
taagagtgagtctatgagcagatgcttataggagagtaggagatataagacatgtatttaaaaactgcaatatataatacagtgttaaatgctacttacarattcacttcttatatggtgagaattcacccggggaaatttctgtctccattttcttctccttccaggccagattatctttccaaaagttcaggtgagagg

SEQ ID NO: 349928 - DNA, 201 bp, Homo sapiens
agggaggcatcagctagacttgggtttgcatcttgtacccacgtggttaagagtgagtctatgagcagatgcttataggagagtaggagatataagacatktatttaaaaactgcaatatataatacagtgttaaatgctacttacagattcacttcttatatggtgagaattcacccggggaaatttctgtctccatttt

SEQ ID NO: 349929 - DNA, 201 bp, Homo sapiens
ccttggtaaactctaaggtgcctggtaactgctacctgtagaaagaaattccttcctctaaacgttgcatcctgagggtcacgtctgtgtctcccaacaastggttttaatgtgtcttctagttttctctctctacagtgctgagctcatggatcccaaagaacttgtcccagagctgcaccatcagtaataactagtggc

SEQ ID NO: 349930 - DNA, 201 bp, Homo sapiens
ggtggctacattaggatctcctcatttttccctgctcttttttcactcacaggttgaaaatgaatatggcagctactttgcctgtgattttgactacctgygcttcctgcagaagcgctttcgccaccatctgggggatgatgtggttctgtttaccactgatggagcacataaaacattcctgaaatgtggggccctgca

SEQ ID NO: 349931 - DNA, 201 bp, Homo sapiens
tgcttgtccagtgggggtgatacctgctagaatcacagctgtgagcttctgtagagagtggatggaaagagtccttggtaaactctaaggtgcctggtaastgctacctgtagaaagaaattccttcctctaaacgttgcatcctgagggtcacgtctgtgtctcccaacaagtggttttaatgtgtcttctagttttctc

SEQ ID NO: 349932 - DNA, 201 bp, Homo sapiens
ttttcactcacaggttgaaaatgaatatggcagctactttgcctgtgattttgactacctgcgcttcctgcagaagcgctttcgccaccatctgggggatkatgtggttctgtttaccactgatggagcacataaaacattcctgaaatgtggggccctgcagggcctctacaccacggtggactttggaacaggttggtg

SEQ ID NO: 349933 - DNA, 201 bp, Homo sapiens
ctaggtgaagggaataggagagtttttttgtactattcttacaacattctgtaagtttgaaatcactgcagaataaaaagttacaggctaggcatggtggyaagtgcctgtagtcctagctactagggaggatgaggtgggaagatcacttgagcccacgagttcaaggctgcggtgagctgtgattgtgccactgcaccc

SEQ ID NO: 349934 - DNA, 201 bp, Homo sapiens
aaacaggatataatcgaatttttaaaatatctagtttgaaatttcttgtcttttaactgatatatttatacattctcattcattgtacttcttgatatacrtagatgaatttcaattatcttattttataatttctattcgtttacctttttggctctttctttccctttattgctttcttttagattgaggttttttgtt

SEQ ID NO: 349935 - DNA, 201 bp, Homo sapiens
ccaggctggtctcaaactcctgacctcaggtgattcacccacctcagcctcccaaagtgctgggattacaggcgtgagccaccgtgcccagctatgaccarggatgcttttatggaaaagagtaaagttatgtaaaagtggctgcatcctggacatcccagggatgcaaagtggcactccctaggggagtgtgggccaggc

SEQ ID NO: 349936 - DNA, 201 bp, Homo sapiens
ggcaggcaaagggggtttcttcctttcctccttgtcctcctggtgtatagtggggttctgggggatctggagaccaccctttttgttcccaggcagccackgtattgacagtgggccataccatgcagtttaaaatgtatctttgagttgaaattttggtggtttccttattcttttttctctcttcactgtccttccaaa

SEQ ID NO: 349937 - DNA, 201 bp, Homo sapiens
ccccacgtgcccctagtttttaccatcttgtgtctgtactggttaagctaataggaaccacattttcctacatgaagatatcaagtctgaaacttgggtgygtctttgctctgcatggctgtgtcttcttcctttcttctggcctcaggtgcaaaccctcttttgatgccctctttttttcagtctctgcctctccttgaa

SEQ ID NO: 349938 - DNA, 201 bp, Homo sapiens
gtattccctgacgcggcggacatttttgcagcagaaatttctccatcactgtccagattctggccctggtgggcaggtctccatgacacctttagtccctytgttcaacattcttaaaccatggacctttttgtttgtttgtggccgggggaggtggtgagaaacgttacttgaagcttgatcattctttcaatttcattt

SEQ ID NO: 349939 - DNA, 201 bp, Homo sapiens
tctttcaccttagttaggcctatttctaagtattttattctttttgatgcttttatatatggaattttttgaaattccatttaggattgttcatttttagkgtatagagaagcaactgattttggtatgttgctttttgtatcctgcaactttgctgaattcatttattagttctaacagtttgtgtgtgtgtgtgtgtgt

SEQ ID NO: 349940 - DNA, 201 bp, Homo sapiens
tcctctttttcttctctttctcccaggtaagcatcacagtgattcatgagttcggtgtgtgagagcctttaaccttgggaactggacctttgtctttcccrttttaagtcctgcaagtgtctaaatgttttctttcagagtgtgacaaaggcagcattcaccctgagcttattgttgcttttaaaggagctcccaaaaaat

SEQ ID NO: 349941 - DNA, 201 bp, Homo sapiens
agaatttttatttgggatttgatgagaagtgatttatcttttatgctgttattttatgcatttgatggcttcagttctatttggacctgtcccaaaatatrgagaaaccataaagttatttaattttattactttaagactgaggaggaagcaaaaaagtgtgatttgcgtcagctgcagagccttttggggttctgaagg

SEQ ID NO: 349942 - DNA, 201 bp, Homo sapiens
ttgtatgttaaagcagatttagcccatgaacttggagacagttttgctgagcagaacttcatctcttggctttgctgtttgtttgccttgtttttttgttrgttttacttagttttgtttttggagctaacatccataacttttgctatgtatgatataatcccctgtatgaccctgggcaagtaacttaacccattcagg

SEQ ID NO: 349943 - DNA, 201 bp, Homo sapiens
gaagtattaaatattaaggtgatataataatagcatgtctaatcttagttgaatgtaattggcctctggttactacttttacttcttagttgttttactcrggggtgttcagagagggtttataaggaggcagcatctgagccttcgttttcattcattttaagaatcttttataggtctctgagcaggttggacttccga

SEQ ID NO: 349944 - DNA, 201 bp, Homo sapiens
ctgcccgccttggccttccaaagtgctgggattacaggcgtgagccactgtgcccggctatgaccaaggatgctcttatggaaaagagtaaaggttttttkttttttttttttaggagacagagtctcgctctgtcgcccaggctggaatgcagtggcacaatctcggctcactgcaacctctgcctcccaggttcaggcg

SEQ ID NO: 349945 - DNA, 201 bp, Homo sapiens
tgaagtaactaggaagtattaaatattaaggtgatataataatagcatgtctaatcttagttgaatgtaattggcctctggttactacttttacttcttagttgttttactcaggggtgttcagagagggtttataaggaggcagcatctgagccttcgttttcattcattttaagaatcttttataggtctctgagcagg

SEQ ID NO: 349946 - DNA, 201 bp, Homo sapiens
ggggtttcgccatgttggccaggctggtctcaaactcctgacctcaggtgatctgcccgccttggccttccaaagtgctgggattacaggcgtgagccacygtgcccggctatgaccaaggatgctcttatggaaaagagtaaaggtttttttttttttttttttaggagacagagtctcgctctgtcgcccaggctggaa

SEQ ID NO: 349947 - DNA, 201 bp, Homo sapiens
tctggagtgtgtagacaggcaatgactggtagctgttattattattgttgttattgcatcagaataagtatcctgggttgcaagaatacacaatcctttgyattgaatataataaatacttaccaggcatttactatgttctgggcattggggctgagaatggaacatatcttatccttaaggagctgacagtctggtgag

SEQ ID NO: 349948 - DNA, 201 bp, Homo sapiens
ggtacattgaactttaacagtttttggtgttggtaaaattacttaggtgaaacataaaaccatgttcattggacattgaccaaggatgccatggatgctcctttttttttttttttttttttttttgagagagagtctcattccgttgcccaggctggagtgcagtggggcaatctcggcttactgcaacctctgccttct

SEQ ID NO: 349949 - DNA, 201 bp, Homo sapiens
tatattctccacccggacttatctgtgtcaacattttactctacatgcttcatcactcgtgcatagacttgtttcttctctctctctgtctgtgtgtgtgttttctaaatcattggaggattgcatacatcacggcctttacctttaaatacttcgttatatgtttcataacaatatggagaagtattctctcttgtaacc

SEQ ID NO: 349950 - DNA, 201 bp, Homo sapiens
caccacggtggactttggaacaggttggtgtttgtagtaacagaaattgcagcttaaaatcagctttttactcagtcagttgctctgggcagctgttgttrtaagtgtcatgggcagattgagatttttcatgttttcatttttcaaggaacaggtagaatagaatacttgcacccctcagtaacagagggttatctgtag

SEQ ID NO: 349951 - DNA, 201 bp, Homo sapiens
gtatattctccacccggacttatctgtgtcaacattttactctacatgcttcatcactcgtgcatagacttgtttcttctctctctctgtctgtgtgtgtgttttctaaatcattggaggattgcatacatcacggcctttacctttaaatacttcgttatatgtttcataacaatatggagaagtattctctcttgtaac

SEQ ID NO: 349952 - DNA, 201 bp, Homo sapiens
agaggatttgtatattctccacccggacttatctgtgtcaacattttactctacatgcttcatcactcgtgcatagacttgtttcttctctctctctgtctgtgtgtgtgttttctaaatcattggaggattgcatacatcacggcctttacctttaaatacttcgttatatgtttcataacaatatggagaagtattctc

SEQ ID NO: 349953 - DNA, 201 bp, Homo sapiens
aagaggatttgtatattctccacccggacttatctgtgtcaacattttactctacatgcttcatcactcgtgcatagacttgtttcttctctctctctgtctgtgtgtgtgttttctaaatcattggaggattgcatacatcacggcctttacctttaaatacttcgttatatgtttcataacaatatggagaagtattct

SEQ ID NO: 349954 - DNA, 201 bp, Homo sapiens
tgggcaacatagtgagatcctatctctacagaaaatttgaaaattattaactgagcatggtggcgcacccctgtggtcccatctacttgggaacagaggtrggaggatcgcttgagcccaggaggtcaaggctgcagtgagccatgatcatgctgctgcactccagccagagcaactgagcaagaaagaccctgactcaaa

SEQ ID NO: 349955 - DNA, 201 bp, Homo sapiens
cccaattgtgtaaggcttctttctctcaacatttttgagatttatttacattattacaaataccagtagtttgttcttttttattgctgagtagtagtctrtcatatacatatgccatagtttgctgaagcaggagaatcgcttgaacccaggagttcaagactgccatgagatatgattgagccattgcactccagcctg

SEQ ID NO: 349956 - DNA, 201 bp, Homo sapiens
ctcctttgccagtaaagccagctgagcctctgttctgccctgttttatgggtttggatggttagcctgtggcaaactcttcgcttgtaggaagcctcttcycttggggcactggctctcacctctgttgattactcctgtgtccagatgtgtagcccaaataagtttttctaacacatatttttagagcattattcagcaa

SEQ ID NO: 349957 - DNA, 201 bp, Homo sapiens
cagaggctgcagtgagccaagagcatgccactgcactccagcctgggtgacaaagcaagactgtgtctcaaaaacaaaacaaaaacaaacaaacaaaaaaagtatgctgtttaatttccacatattttgggtttgtaaaaatatcttgtaattattaatttgtaacttaattcctctataaaacttctaaaatttctctct

SEQ ID NO: 349958 - DNA, 201 bp, Homo sapiens
gtggccctatcacatctcaccatcgccttgacctcctgggctcgagcaatcttcctgcctcagcctcctgagtagctaagactaccagtgcctgccaccayaccggctaattttgtttgtttatttattttaaacaagaagtttaaacaacaagcttcttgacttgaaggaaaaactatctaggattccttttttttttta

SEQ ID NO: 349959 - DNA, 201 bp, Homo sapiens
accaagctcactgaaggcactcctttgccagtaaagccagctgagcctctgttctgccctgttttatgggtttggatggttagcctgtggcaaactcttcrcttgtaggaagcctcttctcttggggcactggctctcacctctgttgattactcctgtgtccagatgtgtagcccaaataagtttttctaacacatattt

SEQ ID NO: 349960 - DNA, 201 bp, Homo sapiens
catctgaattcattccaacttatagttattatagttattataatactgctgtaaacacttgcatgtaagtttttatgtgaacttggcctcgaaaagtgctrggattacaagtgtgagccaccacagccatcctgttagaaatattttctactttcccatatgatttcttctttgaaccatagattattaaaaagtatgttt

SEQ ID NO: 349961 - DNA, 201 bp, Homo sapiens
tcatttttccctgctcttttttcactcacaggttgaaaatgaatatggcagctactttgcctgtgattttgactacctgcgcttcctgcagaagcgctttygccaccatctgggggatgatgtggttctgtttaccactgatggagcacataaaacattcctgaaatgtggggccctgcagggcctctacaccacggtgga

SEQ ID NO: 349962 - DNA, 201 bp, Homo sapiens
gctcatgacatttgcattttaaaaggtatttgctttggtgtgggtaaaactcaaccaaacatggttaacactttgacctcgaggatgaaccataaaaatayagggcagcgacctcctcttccctactgattcctgagaggggcagtggtgagtttatttttgtatgctgtcaaatcaacttaagacccattttaagagttt

SEQ ID NO: 349963 - DNA, 201 bp, Homo sapiens
tcacaaagagctgttagtgagatatcgtgtgatggttttgagtgtggcgtttcggacattcttcaggaggcggattgtggcagatcttcagggattcagtrgccagctcggaggtgctgccatctgcccccttgtcattggcttcctgtagtgaatgacaccatcctgcctcctccaagaagaatcatgaccccttttgat

SEQ ID NO: 349964 - DNA, 201 bp, Homo sapiens
ttagagataaaactggttagtatcataaagggcaatgaatgaaaaagcaacctttagagttgtcttctctgtatgacaatcatttgtttctctctcaggcmataatctacaaattaatctgtaacttcaaagttcttcccttaatcaatagtaaatagtaagtcaaacaaaatatctcccctggagaatgaaggaagcctc

SEQ ID NO: 349965 - DNA, 201 bp, Homo sapiens
ttttactcagccatttttaaattctcttgctttttccttatgtatacatgttcttcttttatttctttaaacatactagagatacttctgttatatatctytatttgatcatttcagtatgcagagtctttctttgtctcattctgccttctgttgtttctgtgacctcttgttcatgatgtcttgtttctgcgtgtgtgt

SEQ ID NO: 349966 - DNA, 201 bp, Homo sapiens
ctttgaattggtattgaaccctgtttgcggttgaccaactgacttcagtgctttctcttcctatttacttagcatattccacagccaatgatagcacctcrctaatcaaaatgacaagtcaggcatggtgactcacacttgtaatctcagcactttgggaggccaaagtggagggattgcttgagcccaggagtttgatac

SEQ ID NO: 349967 - DNA, 201 bp, Homo sapiens
gttgttgatctttttcacttcccattggccttcccctgtataagtcagcaggaagatggccccatctgagctcctacaggccaggatcaggccgtagtcaygggggacctagcatacagagttcacggaggagtcatatcctgaggggtcgtgggtcttctcccaggtgccgttttcctctttccagataatgactttcca

SEQ ID NO: 349968 - DNA, 201 bp, Homo sapiens
agtgtggctggagcccagtaaatgaaggggtaagaagtaggagaggctgtgcgcggtggctcacgcctgtaatccaagcactttgggaggccgaggtgggyggatcacgaggtcaggagatcgagaccatcctggctaacacagtgaaaccccgtctctactaaaaagacaaaaaattagccgggcatagtggcgggcgcc

SEQ ID NO: 349969 - DNA, 201 bp, Homo sapiens
cttcagtggggaggaggtgctgcttggaccatggcggccattggcaggcccagggaaaagcaccacaagttacccctctggtccatgagactagtggcccraaccccaggcttcgggccctccccagcttgaaggtggggcttcaccagggactcgcccccttccacccaggagcctgtctaccttctgccaccattcatg

SEQ ID NO: 349970 - DNA, 201 bp, Homo sapiens
attaccaaaagcacattctgtttaccgtgaaggaaaattgtgtgagcagaaatgactttttatttttaaataaatatatacagttgaagatagcaaatcakcatataactgaattaagtttatgtagaacacagttatatagaaaataagtttttaccgtgagttgaatttcttagtgttcaggtgggaaaacacccatat

SEQ ID NO: 349971 - DNA, 201 bp, Homo sapiens
tgcaactttgctgaattcatttattagttctaacagtttgtgtgtgtgtgtgtgtgtgtgtgtgtgtgtgtgtgtgtagtctttagggtttcctacatctragattatatcatctgtgaatcgatcattttacttctcctttctaatttgaatgccttttatttctttcttgcctagttgctctgactaggacttccaaaa

SEQ ID NO: 349972 - DNA, 201 bp, Homo sapiens
ggccagtgtggctggagcccagtaaatgaaggggtaagaagtaggagaggctgtgcgcggtggctcacgcctgtaatccaagcactttgggaggccgaggygggtggatcacgaggtcaggagatcgagaccatcctggctaacacagtgaaaccccgtctctactaaaaagacaaaaaattagccgggcatagtggcggg

SEQ ID NO: 349973 - DNA, 201 bp, Homo sapiens
tctatcaccagagattcattttgctcgtttttaggcagcaagttcctacaatatacactcctgtgtctggctgtcttgtaatagtttaaaattaatcaatrtctttactttctccatattgcatccctctttaacttactgtaactccaattacagccctcttgatttgtatgttattattgtcatgtattttaattctct

SEQ ID NO: 349974 - DNA, 201 bp, Homo sapiens
ccggaagcccctctaatgtccctctctagtcattgacacacatacccattcctgagctcacagctgtcctcacctctatcaccagagattcattttgctcrtttttaggcagcaagttcctacaatatacactcctgtgtctggctgtcttgtaatagtttaaaattaatcaatatctttactttctccatattgcatccc

SEQ ID NO: 349975 - DNA, 201 bp, Homo sapiens
ttaaagactagcaaggaggccagtgtggctggagcccagtaaatgaaggggtaagaagtaggagaggctgtgcgcggtggctcacgcctgtaatccaagcrctttgggaggccgaggtgggtggatcacgaggtcaggagatcgagaccatcctggctaacacagtgaaaccccgtctctactaaaaagacaaaaaattag

SEQ ID NO: 349976 - DNA, 201 bp, Homo sapiens
aggcccccaggcggttgtcttcatatgaatcttcaaggcatggcaaagctcatgacatttgcattttaaaaggtatttgctttggtgtgggtaaaactcarccaaacatggttaacactttgacctcgaggatgaaccataaaaatatagggcagcgacctcctcttccctactgattcctgagaggggcagtggtgagtt

SEQ ID NO: 349977 - DNA, 201 bp, Homo sapiens
cctcagcctccagagtagcggggactacaggcacacaccaccactcctggctaattttttttattatttttattttattttttattttttgttttttttttatttttattggagacggggtttcatcatgttggccaggctgatctcggactcctgacctcaaatgaagtctcgaaaagtgctaggatagacatctgaatt

SEQ ID NO: 349978 - DNA, 201 bp, Homo sapiens
gcctcagcctccagagtagcggggactacaggcacacaccaccactcctggctaattttttttattatttttattttattttttattttttgttttttttttatttttattggagacggggtttcatcatgttggccaggctgatctcggactcctgacctcaaatgaagtctcgaaaagtgctaggatagacatctgaat

SEQ ID NO: 349979 - DNA, 201 bp, Homo sapiens
tagccagtgtgtggctaagccgggatggttggcaagctgcaggtgggtgtcaacaatctatcaatccttctctctccgttcttcccgtctttggctgaagytgctattcttgttgtcactcagcccagtttaaggggttaatatcctgcgccttctctgcactaggtcagactgccccacctgtgtacaagcctgatttat

SEQ ID NO: 349980 - DNA, 201 bp, Homo sapiens
cagaatgaggaacaccagattttgaacctggacactatttcttcaaccttaagccagttgtgtaaattccctttatataaaagtagaggtagccgtacttrcctcacagacttgtacagtttaaaaataaatggcactcaataaatgtttgttttcttctttcatagtcaaataaatgaacaataattatttatttaccta

SEQ ID NO: 349981 - DNA, 201 bp, Homo sapiens
ttcttcttttatttctttaaacatactagagatacttctgttatatatctttatttgatcatttcagtatgcagagtctttctttgtctcattctgccttytgttgtttctgtgacctcttgttcatgatgtcttgtttctgcgtgtgtgttgtgattttgactgagctgaatttcttggaactttttgttgttgttgttg

SEQ ID NO: 349982 - DNA, 201 bp, Homo sapiens
caaatatttattatatcacagtttctgagggtaaaggatctaggaacagcttagatagatgttatgtctaagctactcctagggctatttttttatttctrtcagtttatgcagtcttaaaaatcagcattttcaaaataccattccatatttgtatgtatgacctccatcatttcttttgaaaaatcacctgtcactggt

SEQ ID NO: 349983 - DNA, 201 bp, Homo sapiens
acagctaatgtacttcaatatcaaaagaggtaaagctaagctctggtttctttatttaatgcatcatctgaaaaaagtaagtttccagtaaccaaagtgtrtaagaattatttctcactagaaaataactccgtccttatttgcaagagagaagaagataaactattttcctttttatgtgtggcccaatatacagactat

SEQ ID NO: 349984 - DNA, 201 bp, Homo sapiens
cccaggctggagtgcagtggtgtgatctcagctcactgcaacctccgcttcccgggttcaagcgattctcgtgtctcagcctcccaagtagctgggattayagacgtgcaccaccatgcccggctaatttttgtatttttggtagagatggggtttcaccatgttggccaggctggtcttgaactcctgacctcaggtgat

SEQ ID NO: 349985 - DNA, 201 bp, Homo sapiens
acccgggaggtggagcttgcagtgagccgagatcacgccactgcactccagcctgggcgacagagcgagactcggaaaaaaaaaaaaaaaaaaaaaaaaaaggaggagatgaggggtcagggatatagatggggaacagatcacatggagcattacaggccattataagactttggcttttactctgaatgtaatgggaat

SEQ ID NO: 349986 - DNA, 201 bp, Homo sapiens
cacaaatcaggtcatggcccacaattttacaaatattgccttaaatgccttaaagttcttttagtctaataccctggatagttatggatgaagagaggtasggttagagatgggacttatccaggtcactatgggattcagagcaatatctaggatggggcgtcaggctctggagttttaatccattgctttttgccctgt

SEQ ID NO: 349987 - DNA, 201 bp, Homo sapiens
aacccgggaggtggagcttgcagtgagccgagatcacgccactgcactccagcctgggcgacagagcgagactcggaaaaaaaaaaaaaaaaaaaaaaaaaaggaggagatgaggggtcagggatatagatggggaacagatcacatggagcattacaggccattataagactttggcttttactctgaatgtaatgggaa

SEQ ID NO: 349988 - DNA, 201 bp, Homo sapiens
gaacccgggaggtggagcttgcagtgagccgagatcacgccactgcactccagcctgggcgacagagcgagactcggaaaaaaaaaaaaaaaaaaaaaaaaaaggaggagatgaggggtcagggatatagatggggaacagatcacatggagcattacaggccattataagactttggcttttactctgaatgtaatggga

SEQ ID NO: 349989 - DNA, 201 bp, Homo sapiens
tgaacccgggaggtggagcttgcagtgagccgagatcacgccactgcactccagcctgggcgacagagcgagactcggaaaaaaaaaaaaaaaaaaaaaaaaaaggaggagatgaggggtcagggatatagatggggaacagatcacatggagcattacaggccattataagactttggcttttactctgaatgtaatggg

SEQ ID NO: 349990 - DNA, 201 bp, Homo sapiens
cagtgaaaccccgtctctactaaaaagacaaaaaattagccgggcatagtggcgggcgcctgtagtcccagctacttcggaggctgaggcagaagaatggmgtgaacccgggaggtggagcttgcagtgagccgagatcacgccactgcactccagcctgggcgacagagcgagactcggaaaaaaaaaaaaaaaaaaaaa

SEQ ID NO: 349991 - DNA, 201 bp, Homo sapiens
tggaagtgctcactggggggcggctctgggttaagcagtgcatgtcagcatgtcaaccccctttacacctgtcatagatggggcattgcagggaagccctrgcattggaaggtcataagtctatcctaagggctacgttctttttttgttttagatcaattctgaattctatactggctggctagatcactggggccaacc

SEQ ID NO: 349992 - DNA, 201 bp, Homo sapiens
aacgtgaagaattctttcagaagggcttcatgtcacctcttcaacgaatcttttcttggcagaattatcaacaagtagcagcagccatgagtgctactaaktgtatattgaatatcactctcctgcgtgcggagaatctcgcctcaaacaaaatggacaaagactttcccttcctagagcctgtgttatagctggaaatag

SEQ ID NO: 349993 - DNA, 201 bp, Homo sapiens
tcatcacagcgatgaaaaagcacggcatttttctgttgggaggaacaaattgaaggtgattatgattgtgttttaagcataatttgtatgtgaggtgacarcgtgactgtcactgctaggggttggagaatagacaaccacaaggccagggtgcctggggcagatgggccctccagtctgaggcttttgccagcttcattg

SEQ ID NO: 349994 - DNA, 201 bp, Homo sapiens
aagtgctcactggggggcggctctgggttaagcagtgcatgtcagcatgtcaaccccctttacacctgtcatagatggggcattgcagggaagccctggcrttggaaggtcataagtctatcctaagggctacgttctttttttgttttagatcaattctgaattctatactggctggctagatcactggggccaacctca

SEQ ID NO: 349995 - DNA, 201 bp, Homo sapiens
ctagtatttacaattcaaataagagattatggattttattgttttttaatggactatattttttagaatagttgtagccttatagcaaaattgagtggaargtacagagattttcctgtatctcctgattatggggttcttaattttgtttgattttatgtttgtttctctctctctcgctttttttttttttttttttga

SEQ ID NO: 349996 - DNA, 201 bp, Homo sapiens
tgtttcagagacatgtcccctgctctcctggttcaaataacatggtgatgttcatctctcagaccatgacagtccatgaatgcacagacagtccaggtctygtgtgatacagcagggcagtggacacagccccgggcaagagggagaatatactgctgtcctgcccactcacgaactgttttcaatcctttttatcagtag

SEQ ID NO: 349997 - DNA, 201 bp, Homo sapiens
cttctaccaggcagttagagtagacagagatcatcttcatgcaatcagggattaagctaatttgaaagtgggcttctgtcttcttgagggttggtccgctyctggttcactttcttaggggtctcaactgagagcttgaagtatttaccagggttctttctccattctgatctctgaagtccaatttttatcttctcagcc

SEQ ID NO: 349998 - DNA, 201 bp, Homo sapiens
aaccgggacatgattcttctgagacctcctgaaaagtgcacaaagtgtctccagaattatttgcctaaaaaacaagagaatgcagttctccaccctctttrtccctcattggctgaaggttgccctcaggggcatggactgcctggtgctcctggacttctgggctgaacccattcccccagtgttggggcagaaaggcaa

SEQ ID NO: 349999 - DNA, 201 bp, Homo sapiens
tgaacttctgacctcagatgatccatctgcctcagcctcctgaagtgctgggattacaggtgtgagccaccatgcccggcctcaaattgtagtttttctaractgatagttttctctcagcatactgactttgggcttttattgttgctgctgagaagtcagtttactgtactctgtcactctcttgaagataatctgtct

SEQ ID NO: 350000 - DNA, 201 bp, Homo sapiens
tctctgtgaatttgcctattctagatatttcatataagtggcatcataaaatattggtccttttgtatctggcttatttcacttagcacaatgttttcaasgtttgtgttgtaacgtgtcagaatttcatttctttttatggcttaatattccattgcatgcgtatatgatattttaattacctattcattttgttcatct

SEQ ID NO: 350001 - DNA, 201 bp, Homo sapiens
tccttttgtatctggcttatttcacttagcacaatgttttcaaggtttgtgttgtaacgtgtcagaatttcatttctttttatggcttaatattccattgyatgcgtatatgatattttaattacctattcattttgttcatctggtgatgaccatttcagttgtttccatcttttggctatttgaataatgctgcattga

SEQ ID NO: 350002 - DNA, 201 bp, Homo sapiens
tcaggcctgccctggcagtgggagtgactgctgtgctcagcgtggccgggattctgaatgccgcgcagcccccggctgtgaaaactgtggaggtgcccatycatcagctgcctgcctcaatgaacaacctcaagatcgtgctcctctcagacattcacttgggccccacagtgggcaggaccaagatggaaatgtttgtga

SEQ ID NO: 350003 - DNA, 201 bp, Homo sapiens
gttctcatgtgaccccatccttgctctgtagaatgccacccagaggatgtttgaaattgactatagccgggactccttcctcaaggatggccagccatttygctacatctcaggaagcattcactactcccgtgtgccccgcttctactggaaggaccggctgctgaagatgaagatggctgggctgaacgccatccagac

SEQ ID NO: 350004 - DNA, 201 bp, Homo sapiens
agatcgagaccatcctggctaacacagtgaaaccccgtctctactaaaaagacaaaaaattagccgggcatagtggcgggcgcctgtagtcccagctactycggaggctgaggcagaagaatggcgtgaacccgggaggtggagcttgcagtgagccgagatcacgccactgcactccagcctgggcgacagagcgagact

SEQ ID NO: 350005 - DNA, 201 bp, Homo sapiens
tttttagtagagacggggtttcaccatgttggccaggctggtctcgaactcctgacctcaggtgatctgcctgccttggcctcccaaagttctgggattayaggcatgagccactgcactcagcccctttgagcaaattttagcacatacagagaggctgtgtagacagacctaaacatggtccctgttttttaggagttt

SEQ ID NO: 350006 - DNA, 201 bp, Homo sapiens
tattcccttgtgtggatgtacagtattttatttatccattcattggttgatggacatttgggttatttgcacattttggttatagtgttgctttgaacatygatgtacaaggatttgtttgaattcctgtttcagttcctttgggtgtataccaagaagtggaacggctgtgtcatatggtaactctatgtttagagtttc

SEQ ID NO: 350007 - DNA, 201 bp, Homo sapiens
ctgtccctgtgggtttgccaattctgaacatttcgtataagtgaaccacatatatacacctgtatgacttctttcatttagcccaatgtgttcaacgctcwtccacgttgttgcacgtactagtgcttcattcctttttattgctgaatagtattcccttgtgtggatgtacagtattttatttatccattcattggttga

SEQ ID NO: 350008 - DNA, 201 bp, Homo sapiens
ctgttgattaatttggggaggggtgtgcccacagacaattttattttcctttttttgtttatcctctcctaaattttcttttttttttctttttctttttyttttttttttgtagacagtctcactctgtcacccaggctggagtgcagtggtacaatctcaactcactgcagcctccacctcccaggttcaagggatcct

SEQ ID NO: 350009 - DNA, 201 bp, Homo sapiens
ccttgaacgtagcagcctatctcctgaatcccttctttgctggtctctaccaggtggcccaggctacattcgtgtatgtcagcccaggcacagcctactaygggatacccatgaggctgggtagcagggccgagatcacagagctcatcctgcagcggtctccctgaactggccctgccctgtgcacctctgccctgccct

SEQ ID NO: 350010 - DNA, 201 bp, Homo sapiens
gtgtttgcagccagggtaaaaatgagtcagaccagaaggcttaaatccctgtctgagaacatttagggccctcaacactgttgtgttacagatacaggaarccaggtctgtgcttttattcatcgtcatgattcagtcagatatgcagatgtttctcttttggggggattagctgagccagtgccacctatgatggtttgc

SEQ ID NO: 350011 - DNA, 201 bp, Homo sapiens
ccaaggcaggaggatcacttgaggccaggagttcaagaccagcctgggtaaaatagtgagacctctacaaagaattaaaaacttagccaggtgtggtgacrtgcacctgtggtctcagctactcaggaggctgaggcaggagaattgcttgagtccagaagttggagattaaaatgacctatgatcatgccactgcactct

SEQ ID NO: 350012 - DNA, 201 bp, Homo sapiens
aaatttaaaaattagctgagtatgctgccatgcacccgtgttcccagccattcagggggcagaggcaggaggatcacttgagcctgggaggttggggctgyggtgagccgtgatcacaccactcactgcactccagcctgggcaaaaaagtgagactctgtctcaaaaaaaataaagatttctgtaaaagctgatttctgt

SEQ ID NO: 350013 - DNA, 201 bp, Homo sapiens
tactctaaaacaaagacctgcaaattatggctgccacctacatttttttgtaagtaaaagtatattggaatcgccacactgtttatatatcatctgtggcygcttttgtactatagtggcagagttgagtagttgagatggagacctctatggctgcaacacctaaaatatttactctctggtggttttttgtttgtttgt

SEQ ID NO: 350014 - DNA, 201 bp, Homo sapiens
tggggcaggagaatcgcttgaatatgggagtcagaggttgcagtgacctgagatcacaccactgcactccagcgtgggtgacagagcaagactctgtctcaaaaaaaaaaaaaattaattgtggtaaaatatatataaaacaaaatttgccattttaaccatatttaaatgtaaattcagtgccattagttatattcacaa

SEQ ID NO: 350015 - DNA, 201 bp, Homo sapiens
aatcgcttgaatatgggagtcagaggttgcagtgacctgagatcacaccactgcactccagcgtgggtgacagagcaagactctgtctcaaaaaaaaaaaraattaattgtggtaaaatatatataaaacaaaatttgccattttaaccatatttaaatgtaaattcagtgccattagttatattcacaatgttatacagc

SEQ ID NO: 350016 - DNA, 201 bp, Homo sapiens
gttgtgcactttgaagattttgacggatttttctgatgagcaggttgccaggcgggtgccatagtagtccatctgggcatcatgaatcatatccttatggsaggtatccacagtgttaattactgacaccatgataccagcgtgactgctctagggacgtggcagctcctggtggtgcctccccattccttaccacctttt

SEQ ID NO: 350017 - DNA, 201 bp, Homo sapiens
gcactttgggaggccaaggtgggaggttcacttgaggccaggaaatcaaggccagcttgggcaacatagtgagactgtctccacaagaaaatttaaaaatttaaattaggaaagaaaagtgttcaggaggtaaaattgataggatttggtgattgactgaacacagatgtgagaaagaatgaggagttgttgatttttcca

SEQ ID NO: 350018 - DNA, 201 bp, Homo sapiens
cactttgggaggccaaggtgggaggttcacttgaggccaggaaatcaaggccagcttgggcaacatagtgagactgtctccacaagaaaatttaaaaatttaaattaggaaagaaaagtgttcaggaggtaaaattgataggatttggtgattgactgaacacagatgtgagaaagaatgaggagttgttgatttttccag

SEQ ID NO: 350019 - DNA, 201 bp, Homo sapiens
tgagccaccatgcctggccctaaattttctaacatataaggattacctatgtaattttaaaaaataatatttcttacttttttttttttttttttttttttgagacgcagtctcgctctgtcgcccaggctggagtgcagaggtgcaaatcttggctcactgcaagctctgcctcccgggttcacatcattctcccaccgc

SEQ ID NO: 350020 - DNA, 201 bp, Homo sapiens
aatgccacccagaggatgtttgaaattgactatagccgggactccttcctcaaggatggccagccatttcgctacatctcaggaagcattcactactcccrtgtgccccgcttctactggaaggaccggctgctgaagatgaagatggctgggctgaacgccatccagacgtaagtaggagggcatgtggctctcacctag

SEQ ID NO: 350021 - DNA, 201 bp, Homo sapiens
actttgggaggccaaggtgggaggttcacttgaggccaggaaatcaaggccagcttgggcaacatagtgagactgtctccacaagaaaatttaaaaatttaaattaggaaagaaaagtgttcaggaggtaaaattgataggatttggtgattgactgaacacagatgtgagaaagaatgaggagttgttgatttttccagg

SEQ ID NO: 350022 - DNA, 201 bp, Homo sapiens
aaaggcccatctcagagcaagtggttatcagagggtcttggctggggccacgtccaccctgggatacctgctgtgggaactgggttgtgaagtgtggggcyagggcattctctgctcgggttggtgtggacactgctcatgcttcctctttccccagtgtttggcagcccattccttctctgtggagaaattcttttttgt

SEQ ID NO: 350023 - DNA, 201 bp, Homo sapiens
ctttgggaggccaaggtgggaggttcacttgaggccaggaaatcaaggccagcttgggcaacatagtgagactgtctccacaagaaaatttaaaaatttaaattaggaaagaaaagtgttcaggaggtaaaattgataggatttggtgattgactgaacacagatgtgagaaagaatgaggagttgttgatttttccaggt

SEQ ID NO: 350024 - DNA, 201 bp, Homo sapiens
tttgggaggccaaggtgggaggttcacttgaggccaggaaatcaaggccagcttgggcaacatagtgagactgtctccacaagaaaatttaaaaatttaaattaggaaagaaaagtgttcaggaggtaaaattgataggatttggtgattgactgaacacagatgtgagaaagaatgaggagttgttgatttttccaggtt

SEQ ID NO: 350025 - DNA, 201 bp, Homo sapiens
tttaaaaagtttacgaatttgtgttgggccacattcaaagccatcctgggctgcatgtggcttacaggctggggttggacaagcttgtgttaaacttttcytgttttccagattacctggcagctgtggacaagtggttgggagtccttctgcccaagatgaagcctctcctctatcagaatggagggccagttataacag

SEQ ID NO: 350026 - DNA, 201 bp, Homo sapiens
aaaacattccagggcaaaggaaaccagcttagaccgttccatgctctgagctgtgtctggcagttttcctgtttaggaagcagtgattgggggatctttcygacctggccggtaacttgggctaagatgctatcaaagcatttctttccaagtctggtgacacttcaaggcaagaaaatgagtgctaaattaactgagcat

SEQ ID NO: 350027 - DNA, 201 bp, Homo sapiens
tgtaagcagcaaatacttcctcttccaggatggtttcatgaccagtgaagtctctgtcctgggcatgcgtgctacagtctgttttacttcttgaaccccaratctgaaagtattgccagagggatcctctctgagagaaggatcattcatgaaaccttgtgggaggcaggactgtgcagataatgacggcagcatttaatt

SEQ ID NO: 350028 - DNA, 201 bp, Homo sapiens
tgagacggagtcttgctctgtcactgcgcaaggctagagtgcagtggcgcaatctcagctcactgcaacctctgcctccctgggttcaagtgattctcttrcctcagcctcctgagtaactgggattacaggcatgtgccaccacacctggctaatttttgtatttttagtagagacggggtttcaccatgttggccaggc

SEQ ID NO: 350029 - DNA, 201 bp, Homo sapiens
atgccaatgaggctcggtggggggctctcaagtgcctgatcctgccctgggctcagagccagcccagagggaagcaactgcacagccccacaggccctccytggcactgtccccccaaccccatctcagagctcagagggtacaagctccagaacagtaaccaagtgggaaaataaagacttcttggatgactgactcatt

SEQ ID NO: 350030 - DNA, 201 bp, Homo sapiens; identical to SEQ ID NO: 74641

SEQ ID NO: 350031 - DNA, 201 bp, Homo sapiens
gcctaccccctgtgcctagggtacctcatttcttttttgctgtcaccatttgacagctgaatcagggaagtgggaggaagaaagaggacgtggattgtgcrtgttgggggccgggaagggaagggcgtttgaaatgttacaaggtaaaaggaggcgtgcagcgagcatgaaccggctgggctgctggcccgcaaggagcct

SEQ ID NO: 350032 - DNA, 201 bp, Homo sapiens
agagcagtggaggcggggagggaggacactgtgctaggagggggtgaccctgcaaactggcagacccggagcaagcaccttctatttttcggaggcaggcrtgaggccccggagcctctccctccctcccctgctctccctacagggaagctactcccagcttgaggctttagctcagtgagcactcgggccctgtctcct

SEQ ID NO: 350033 - DNA, 201 bp, Homo sapiens
ttttcggaggcaggcatgaggccccggagcctctccctccctcccctgctctccctacagggaagctactcccagcttgaggctttagctcagtgagcacycgggccctgtctcctgctaaccctcctggagtgtcctctgcctgcatgggcggatcaaggtgctattagcgctattccaggccagggggaggagtagccc

SEQ ID NO: 350034 - DNA, 201 bp, Homo sapiens
gggaatcctctgaggagcaattcaagtacctgggacttttgcttgccttcccccacttcttttccccgaatcagcagcgtccatcctggttcccctgcccctcccaacccccacctggctttgggcactgctggaacccaggcaagcctgcctgaggcctggcctcaaagataatgaacttggggctttgctttactcctg

SEQ ID NO: 350035 - DNA, 201 bp, Homo sapiens
ctcctccccaacttctccccgacccgcagtgtctagccgggggtccagggaggatcgcatggtaacgggagtttggagactccgtctggctcagaagtttkcaggagcaggtgctcccgacaagagaggatgaggtgtaggggcacggcccactggggccttgggagagtggctctaagggctttgggtcgtcaacactga

SEQ ID NO: 350036 - DNA, 201 bp, Homo sapiens
gttctttgagaaagtcaggactttcccagtaggaccacagggatgtttgactggagccattcagccagcaccctgaccctccttcactcatggtctgtgtrtttctccttgcagaggggggatgatccagacggcagagcagtaccagttcctgcaccacactttggccctgtatgcaggccagctgcctgaggaacccag

SEQ ID NO: 350037 - DNA, 201 bp, Homo sapiens; identical to SEQ ID NO: 74640

SEQ ID NO: 350038 - DNA, 201 bp, Homo sapiens
agaattgcttgaacccaggaggtggaggttgtggtgagctgagatcgcaccatggcattccaggttgggcaacaagagcaaaactctgtctcaaaaaaaaattaaataccacgcaatgtgatgagagctgtgatggggatattatggggaccatagaaccaagtctcctaaaccagactttgaccagagaaagttttccaa

SEQ ID NO: 350039 - DNA, 201 bp, Homo sapiens
agaatacactgtgcggcagctcaccatccaggtaccacccccccggagccaggcccagtgggaagttgggccgcccacagcatctctgggactcaggctgkctcttcactaggagccaagggtttgctcttctaaaccatcttaaacccacatctatagcagaaagagaaacttgagcactgtcctcagcctctagtctaa

SEQ ID NO: 350040 - DNA, 201 bp, Homo sapiens
ggggagggctttgccgcttcctcctcccacccctgtggtgtcctagcttcctgttcttgataacaatcagcataggctcagagccgggccctctttccaayccccacctgccccctcctgtgtccccagggcccccactacccaccagtggaaacactgactggtgtggggggtgaggcagaggccagtctccaggtcact

SEQ ID NO: 350041 - DNA, 201 bp, Homo sapiens
tgaaggcagatggaaagctcgaggggcgggcatcctgtggttacacaattgaacactggcttcctttcccaaacatgctctgcaaatgacctctgcccttyctcgacccagtgtctcctgtctcctgacctgacagggcaggatcttcaggccaatgctgcggttttggcacagtaattttcggagctaacacccctgggc

SEQ ID NO: 350042 - DNA, 201 bp, Homo sapiens; identical to SEQ ID NO: 74651

SEQ ID NO: 350043 - DNA, 201 bp, Homo sapiens; identical to SEQ ID NO: 74643

SEQ ID NO: 350044 - DNA, 201 bp, Homo sapiens
aaggcctggcccctcacccattcccagggaacggggccttgggccccagaagggcacaggcgggaggcagccgacccctggtggcagcggcagcaggcacrggagggcagaatgcagctggggtgtgcgtgggtggcagcaaggaggggcggagggaggaagctggcttcctggagccttctcagccctcaaagacagacc

SEQ ID NO: 350045 - DNA, 201 bp, Homo sapiens
ctccctaaattccaggcaaggcccacagccttcttggtgctggatgcatgtcggagccacagggcctggctgggagtgggaagaggcaggcagctggaagragcagttgagttcaaggctgccctgttctggctgacaaagggagagggctgagccaggcatggtagctcatgcccaaaatcccagcactttgggaggctg

SEQ ID NO: 350046 - DNA, 201 bp, Homo sapiens
agaagaggaaacctatggacccttccagatccgcatccaggacatgaaagagtgcccagaatacactgtgcggcagctcaccatccaggtaccaccccccyggagccaggcccagtgggaagttgggccgcccacagcatctctgggactcaggctggctcttcactaggagccaagggtttgctcttctaaaccatctta

SEQ ID NO: 350047 - DNA, 201 bp, Homo sapiens; identical to SEQ ID NO: 74645

SEQ ID NO: 350048 - DNA, 201 bp, Homo sapiens
gagatcgtcaaaatgtccacagggaccaaaaggtggcctgcaacaggcttacagtaaggctggtaagaaatgtaaactcctcccatgccaattaaaacctrcctccagcagggcccccaaggggactggaaagcagagtactgctacctgcctccatctccagagccctatccccaaaatatagcacctgcaggtcccatt

SEQ ID NO: 350049 - DNA, 201 bp, Homo sapiens
ctgcgcctagtggcagaggtggaggagagcccggagacagccgcccaccccgggcctatcgtagtccactgcaggtgcgtggccctcccttcactgcagcytgtggactgtgctcccctcccctgccccctgggtctctcctggggaagggtctgagcagaaaagcatcaggcaagcctagtccttactcagacatgactc

SEQ ID NO: 350050 - DNA, 201 bp, Homo sapiens
ctggccagaccatcagacaccagaatcagctgggcccctgctgcgcctagtggcagaggtggaggagagcccggagacagccgcccaccccgggcctatcrtagtccactgcaggtgcgtggccctcccttcactgcagcctgtggactgtgctcccctcccctgccccctgggtctctcctggggaagggtctgagcaga

SEQ ID NO: 350051 - DNA, 201 bp, Homo sapiens
tagatgacccccccacagggtaattccagcccttgccctcctcaggcaccagagaagaaggtagacagtgccctccaccctgaccttggttctcatgcctygtctccaatccagtaccaggaagagcgccggtcagtaaagcacatcctcttttcggcctggccagaccatcagacaccagaatcagctgggcccctgctg

SEQ ID NO: 350052 - DNA, 201 bp, Homo sapiens
acatgtgcagggaggtcattaggggctcacgcaagaggaaggggaggcctagggggttttgaaataaagagagggcacgatagagaaagcagaacagagtrgagagaagactgtgggagggcgccaaggtgggaaacagaggggccgggcgtgggctgcgtggaagatgagtctgagctgagaggaagtcaaggttagata

SEQ ID NO: 350053 - DNA, 201 bp, Homo sapiens
cagccccagctcatacctctcagaaagttccctgagatatagccctgggaggctgtctatggccaaaatacgggatagggtgagcactctgcttgcaggtrtcaagctcagaagagccaggctccctgttgctgacctcccatccagtaggggtggaggatggggaggagataccagcccctctctgctgccctgtcacct

SEQ ID NO: 350054 - DNA, 201 bp, Homo sapiens; identical to SEQ ID NO: 74649

SEQ ID NO: 350055 - DNA, 201 bp, Homo sapiens
acttgagcactgtcctcagcctctagtctaatagggcagagccaataagccaaataggactaccgggaagtactcacccatctgtgtaaatggtcaggcgrggacaggcaggatccaggagcagggccaagggaaggagaggaggttaaaggagatgtggaaggccaggtgtggcggctcatgcctgtaatcccaacactt

SEQ ID NO: 350056 - DNA, 201 bp, Homo sapiens; identical to SEQ ID NO: 74642

SEQ ID NO: 350057 - DNA, 201 bp, Homo sapiens
cagcagtggcagatgaaggttaaaggccctgggatttgggggtgggaaagttgtgacgctgctcctgatatcttctgctgttgaagatgtccaccagcggrcttgtctatcttaccctggcttccattatggtagacccctgcctggatcatcagaggggccctctcccattattggtttttctcttagagccagaatcaa

SEQ ID NO: 350058 - DNA, 201 bp, Homo sapiens
agacccttagtaaacctcctctaatccccacccaggtcttggctgctgtgtacaaggccctgagtgaccatcatgtatacctggaggggaccctgctcaarcccaacatggtgaccccgggccatgcctgtcccatcaagtataccccagaggagattgccatggcaactgtcactgccctgcgtcgcactgtgcccccag

SEQ ID NO: 350059 - DNA, 201 bp, Homo sapiens
ggctatggcccattttcatttggggtagaagtgggcacaaagggagccaattggagggtctgggtaaggacagctctggtgaggcctgatgctgaactttraccactgggctgggttgtgaggtaggctgagaacctgggtctaagcagataaaaagaagagataacaagctgcgtgtgttctgtgtcaactggggaggct

SEQ ID NO: 350060 - DNA, 201 bp, Homo sapiens
gggttggcatccttgattgggcagcagatttatcagaagagctgtggcttcagggctgctcacctccccacccccaccctgcatctttccccagggctggraaggatgcctaccagggacaaaaggagatgtgggaactggagccctaagcttgctagctgtcagaaggactggtgccacttgatgcccaggactcatgcc

SEQ ID NO: 350061 - DNA, 201 bp, Homo sapiens
atgaaaaatgagaaggaaaaactcatgatcaagttccagagccatgtaagaatgtccatgccattccagggccatttcctaccatcgttaacaaatgcccygccatgtttcccctgtcctaccaagtttgctcttttatgcataggacttataaaatctgtttgctttctagagaaatatcctagaggagaaccttcggcg

SEQ ID NO: 350062 - DNA, 201 bp, Homo sapiens
gctgggccctctttcctacatcactgcagccccactggggccaacctctggtactgggtgggaataggcaataggcataggcaggcaggtttggagtacaraaaaggagaagctgcaggagcctgtgactggtatttgtgccactcctactccctacctgttcttccaaccttttcctctagaagctgagagaagagggtg

SEQ ID NO: 350063 - DNA, 201 bp, Homo sapiens
ggtgtgaaaataagcttgtgtaggaggggtagcaaggagaatcctgcctggattcaaccctctgcttgtacttcctctacaggttgacaagggtgtggtgsctctagctgggactgatggagaaaccaccactcaaggtataggatgggtgggcttgaggaccaaagaggtgttagatagttgatgctggtaaaagagggg

SEQ ID NO: 350064 - DNA, 201 bp, Homo sapiens
cagggctgcagcctcatctgtttgcggatcagaacccgagctgtgcttgtggctgcggctgctaactggctgcgcacaggtaaggccaggcaaggcgggasccactcaacatctccgcttcatttccttggctcttcccctgccatcctcgtcctgctacctgggactccgggatgtgccctttcgaccctttcctaacat

SEQ ID NO: 350065 - DNA, 201 bp, Homo sapiens
ggttgacaagggtgtggtgcctctagctgggactgatggagaaaccaccactcaaggtataggatgggtgggcttgaggaccaaagaggtgttagatagtygatgctggtaaaagaggggcagagtaatgaggttggcactgtgcttgcagggctggatgggctctcagaacgctgtgcccaatacaagaaggatggtgct

SEQ ID NO: 350066 - DNA, 201 bp, Homo sapiens
gtggctgtcactatttgaattaaatacttttgtttcccactgttaacttatctcagtgcattgagtgcttactcagttttctcttcacttactcacttacygggcgctgagcctcatgaggcagaaactattcttctttatctccctttttctttctttcttctttttttttttagaaagggttcactttgttgcccaggc

SEQ ID NO: 350067 - DNA, 201 bp, Homo sapiens
tctgccatcttgcctgggaatccaaaaacctattacttcttcctaagagctaggccggcacttctggtggctgcctctgtgtgtaataaatggtggcgatstgggttgtttctgtatggatcaaccattgtggattatgccaggcacagatattgagtcttaatgaataatcacaaatatagccaatctacttctatcaaa

SEQ ID NO: 350068 - DNA, 201 bp, Homo sapiens
acactattaagtttttgacagatacatgggagcttagtttgtgctgggaatgaaaaatgggggaattccaggcagaccccaagtcagcctttccatgctcttttttttttttttttttgagctctgttgctcaggctggagtgcagtggcacaatcatagctcactgtaacctcaaactcatgggctcaaatgatcctcct

SEQ ID NO: 350069 - DNA, 201 bp, Homo sapiens; identical to SEQ ID NO: 74685

SEQ ID NO: 350070 - DNA, 201 bp, Homo sapiens
ccatctatgctgatgagtcctaaagttccccagtcttccaaccaggtctactccaaacccatatatcctactgtcctggaaatctccagtttcatatgtaygtgatgttttccagctgcaattaaaaacccaaccaataaataggaaattaagtatccatgcatacagagcatccccaattagatgtcagctcgcattaag

SEQ ID NO: 350071 - DNA, 201 bp, Homo sapiens
atgtagtgtaccatctaactaaattacattcagtaacataaattgcatggttcaatgctaggcatagtaggtgctcttggtagctataactgttcattttrtatagcctattgtagattaaattgattgaattcgctgttttaataatttgaagtgaaaaagaaaatgcaatgaaatcttttcagtttggatgtccttaat

SEQ ID NO: 350072 - DNA, 201 bp, Homo sapiens
atttttgtgctatgaagaaaggtcttccaaacacacttgaatactttagtatttcaaagcatttttcttaaaagaatttctcctagctgagtgaattaatkggattacttaatgttattcttagaaatacctaagaatattgcagtttcacagttttatcaattcatattattcttttatttagttaacctgaaataatgt

SEQ ID NO: 350073 - DNA, 201 bp, Homo sapiens
tgcagacgggacagcctcccacgaccacgatagagttggtaggatagcggatgacggtccagctgtggatgttgtagaccctgggatggtgggtgggtgtmcgtgtgacgaggtaggagtagggcggctgcgggggcgcggcggggatggcgccgtagccgtgcgggcctcacgcgtagtcgccctggccggcctccaggt

SEQ ID NO: 350074 - DNA, 201 bp, Homo sapiens
caaacaagaaaaacttccaagtcataaaaattaaggaactcgtagcagttcttttaattatatttttcttcagttgatctactctcttaacctgtcctaastaatgaaaatgaaatgtctctatatatttaaacttttttcttaactctctagttcaagaatttgatttttttcccatcaagaccccgatgcactgagaag

SEQ ID NO: 350075 - DNA, 201 bp, Homo sapiens
ttatgttacccactctacttaccctctcaaaaagaagcagctctttcaaaattgaattcctggaattttaatattattattcttattattattattattawtattattattattattattggcagagtctcactctgtcaccagtttggaatgcagtgttgtgattgtggctcactgcagcctcaacctctcaggcccaag

SEQ ID NO: 350076 - DNA, 201 bp, Homo sapiens
gttgtggtataccaaagttttgtcatctaggaatcagttttgatactaggggctgcaagagcaataggttctgtgacagaactcctaagccagcattcccwccttggaagtgctgagataaagatatctcactgtaattcagaagtctaattgaattacagtgtctggctgacacttagttctacagtcggtggaacaata

SEQ ID NO: 350077 - DNA, 201 bp, Homo sapiens
ttaaggtttctgatcatatgcttaattaaaaatagaaaagtcacttggcatttgttccctgaaaaatcttaacttttaatactctcctttttttttttttwaaaaatagattggtggtacctttgccaaaccagtgataatgccacctgaagtagccattggggcccttggatcaattaaggtacatgtattagataactg

SEQ ID NO: 350078 - DNA, 201 bp, Homo sapiens
agatttgagaatttaaataaatgaataacaatttaatgcttttcaggctttcaaaaagcaatggtcaagactatgtctgcagccctgaagatacctcattktggttattgtgatgagattgaccttactgaactggttaagctccgagaagaattaaaacccattgcatttgctcgtggaattaaactctcctttatgcct

SEQ ID NO: 350079 - DNA, 201 bp, Homo sapiens
tatttttgtgctatgaagaaaggtcttccaaacacacttgaatactttagtatttcaaagcatttttcttaaaagaatttctcctagctgagtgaattaaktggattacttaatgttattcttagaaatacctaagaatattgcagtttcacagttttatcaattcatattattcttttatttagttaacctgaaataatg

SEQ ID NO: 350080 - DNA, 201 bp, Homo sapiens
taatttttgtataaggtgtaaggaaggggtccagtttcagttttctgcatatggctagccagttgtcccaacaccatttattaaatagggaatcctttccgcattgcttgtttttgtcaggtttgtcaaagatcagatgggttgtagatgtgtggtgttatttctgaggcccctgtgcggttccattggtctatctctctg

SEQ ID NO: 350081 - DNA, 201 bp, Homo sapiens
gccatgttggtcaggctggtcttgaactcctgacctcaggtgatccacccccgccccagcctcccaaagtgctggaattccaggcgtgagccaccataccyggccccaagtaggacatttaaattttgctttgccaacatgcaatatgttgactgtggccttgaataaaaatattacttttcgcaacatcagatagttaga

SEQ ID NO: 350082 - DNA, 201 bp, Homo sapiens
atcatgtggtttttgtcattggttctgttcatgtgatggattatgtttattgatttgcacatgttgaaccagccttgcatcctagggatgaagccgacttrattgtgatggataagctttgtaatgtgctgctggattcggtttgccagtgttttattgaggattttggcattgatgttcatcagggatattggcctgaaa

SEQ ID NO: 350083 - DNA, 201 bp, Homo sapiens
gttcagtggcattaagtacatttacattgtttgccaccatcaccaccatctgtctccagaactttttcattatcccaaactgaaactctgcacttactgartaatctctccatttccccagcctttggtaaccaccattctattttctgtctctgtgaattaattggactattctaggtacctcatgtaagtggaatcata

SEQ ID NO: 350084 - DNA, 201 bp, Homo sapiens; identical to SEQ ID NO: 74683

SEQ ID NO: 350085 - DNA, 201 bp, Homo sapiens
ctgaagttaagttttaccttgttaccagattcagaagaagatgttgttgaaactcctgcagtgtctcatgatgaacatacacaccaagagataaagggccraaaaacactggcaactcctgcagttcgccgtctggcaatggaaaacaatgtaagttctcttaatatttaagtctgagattgtataggaagtgtacatttg

SEQ ID NO: 350086 - DNA, 201 bp, Homo sapiens
aaattttttttcaactgaagttaagttttaccttgttaccagattcagaagaagatgttgttgaaactcctgcagtgtctcatgatgaacatacacaccargagataaagggccgaaaaacactggcaactcctgcagttcgccgtctggcaatggaaaacaatgtaagttctcttaatatttaagtctgagattgtatag

SEQ ID NO: 350087 - DNA, 201 bp, Homo sapiens
gaacattcaccactgtactagaaacaatacaattctgcgtttgatttttagtttttcagcccgtttagattgtccttgtgccaggtcatcacccaccttcmtaactttctgagaagacatataaccaagttgattaagaagtatttgctaacaaaggcaaataggagctgattgagagtgtaaatacctttcctctgggtc

SEQ ID NO: 350088 - DNA, 201 bp, Homo sapiens
ctgtcagtctttaatttaccaattcagacagattctgctatatgtatacatcactgatttcctaacagcagaatttgacaattaagtgctctcaaaaacatttttttttttgcttgcagaaatatatgctagtagcctgagatagtttttctaataacaggaatccagaactagagaataaaacaaccaaattagcattag

SEQ ID NO: 350089 - DNA, 201 bp, Homo sapiens
ttcattcatgtagcatgtatcagaatttcattaatttttaagggtaaatagtatactgttgtatataaatgtatgccatgttttgtttatacattcatccrtcaatgaatatttggatttttccattttttggctcttgtgcataatggtgttatgaacaaatgaatatttgatttataaatatctgttcaatagatatat

SEQ ID NO: 350090 - DNA, 201 bp, Homo sapiens
ctactcgggaggctgaggcaggagaatcgcttgaacccgggaggtggaggttgcagtgagccaagatcgtgccactgcacttcagcctaggtgacagagcragactccatctcttaaaaaaaaggaaaaaaaagaaaggttggacaatttgctcaatggttggtgacaggaccaaagttagaacttagatgacctgagtct

SEQ ID NO: 350091 - DNA, 201 bp, Homo sapiens
aattagccaggcatggtggtgcgtgcctgtagtcccagctactcgggaggctgaggcaggagaatcgcttgaacccgggaggtggaggttgcagtgagccragatcgtgccactgcacttcagcctaggtgacagagcgagactccatctcttaaaaaaaaggaaaaaaaagaaaggttggacaatttgctcaatggttgg

SEQ ID NO: 350092 - DNA, 201 bp, Homo sapiens
ggtataatttataaaactttttacacttattattctgtgaaatattccagtttagcagatgaagaaactaaacccaactagaaaggttggacaggctgggygcagtggctcacgcctgtaatctcagcactttgggaggccgaggtgggtggatcacgaggtcaagagatcgagaccatcctggccaacatggtgaaaccc

SEQ ID NO: 350093 - DNA, 201 bp, Homo sapiens; identical to SEQ ID NO: 74687

SEQ ID NO: 350094 - DNA, 201 bp, Homo sapiens
ctggacctcacttttgaacttactcttatatcttgcttggatgtataaaggcatcttgaattttaacatgtctaaaactgagctcctgctcctttcctcastgccccccaccatcagacctgctcctcctaaagtcgtcctctttcagtgaatggccaatctgctcagacactttgaagggcttctcatctcacatagaat

SEQ ID NO: 350095 - DNA, 201 bp, Homo sapiens; identical to SEQ ID NO: 74679

SEQ ID NO: 350096 - DNA, 201 bp, Homo sapiens
aatatgatctgtacttatgactgtttccataaaagtgtctcatttctttttcttttaggtatgtaaaagaaggagatacagtgtctcagtttgatagcatstgtgaagttcaaagtgataaagcttctgttaccatcactagtcgttatgatggagtcattaaaaaactctattataatctagacgatattgcctatgtgg

SEQ ID NO: 350097 - DNA, 201 bp, Homo sapiens
ccaaccccaactctgacacttccccacccttattccacactaaactacactagaagtctgttgaacaacttgagttatttgcacacacactgtgctttctstctcaactccagacctttgcacatgtatttcctctgctttaaagactcttgccttactccactgtggccttatctgcaacatacctcatccccggggtta

SEQ ID NO: 350098 - DNA, 201 bp, Homo sapiens
atgtaggattcagtactgtccatggttttaggcacccaccgggggatcttgaacgtgtccactgcacataaggagataagagaggaatacggtaatagttmtttttttaaaaaaatccttttttgataattttggtatgtaatagtttcttgacttctccctttctctccagattttatctgttataatctattcaataaa

SEQ ID NO: 350099 - DNA, 201 bp, Homo sapiens
ctttaaaaggtattgtaagtctgttaatctattttaccaaattgattattggtctctttttgtcattgggtcccaattaaaagtgatctttgtttttttgttttttttttttctattcctatttatttttagctcttgaggaaatgtaatcttttcaacgtgaaaaaaggtagcaagttcaacacaaaatagaaatctgaa

SEQ ID NO: 350100 - DNA, 201 bp, Homo sapiens
cccagatcctagggtttagctcaggctccgccctactccttggttggctgttgggtgggaggctcgtttcttccctccctattggtcgcccagggggaggygcgtttcccatctcctgataggccgcgccgaggagagtctctccagtttgcggcactgttgtcatttccggggtaagatggctgcagtccgtatgctgag

SEQ ID NO: 350101 - DNA, 201 bp, Homo sapiens
ataagacaaaaccaaaggtgggggggaaaaggcaatagcaaaaggaagagatgaaatgttgcaaaaaagatggaggatgtcccatcctttctcctctgggkaatgactcaaacattcaggtggcattatacatggttccacataagtcagtgacgttattccttttggaggggtaagaacgggtggggatgggcttttaat

SEQ ID NO: 350102 - DNA, 201 bp, Homo sapiens
gtgaatctgaaaaaagctcttaagtaaatttaaaaataatttgagtaaaaataactatttttatttttatttatttaatggatagtgggaatccatttaawttgagaaacgtctttataaacacataatgcatttttaaaagcaataaggtagaattaccttgtgttgatgatatagtggtgaaggactttgtcatacatc

SEQ ID NO: 350103 - DNA, 201 bp, Homo sapiens
aatagcaaaaggaagagatgaaatgttgcaaaaaagatggaggatgtcccatcctttctcctctggggaatgactcaaacattcaggtggcattatacatkgttccacataagtcagtgacgttattccttttggaggggtaagaacgggtggggatgggcttttaataacttacaggatttgagttggagttttagaagc

SEQ ID NO: 350104 - DNA, 201 bp, Homo sapiens
gacatgttcattatcttgattatggtgatggtttatgagtatatacatatttcaaagcctatcagattatatgtgtgtgtgtgtgtgtgtgtgtgtgtgtrtatatatatatatatacatatattttttttttttttttttttttggggggagacggagtcttactctgtcgccaggctggagtgcagtggcatgatgtcg

SEQ ID NO: 350105 - DNA, 201 bp, Homo sapiens
cattcaaattatgttatgtatccttgataaaatgttatgtaacccttaaatgtgtttaagtatgaagaccatttagcataacagaaaatagatatagtaaygtggaacattaggttattaagggcatcagatgaaataatgatttaacattttgctttgaaatctataaagcattttaataatttttttcttaataatata

SEQ ID NO: 350106 - DNA, 201 bp, Homo sapiens
ttaatttttgtataaggtgtaaggaaggggtccagtttcagttttctgcatatggctagccagttgtcccaacaccatttattaaatagggaatcctttcygcattgcttgtttttgtcaggtttgtcaaagatcagatgggttgtagatgtgtggtgttatttctgaggcccctgtgcggttccattggtctatctctct

SEQ ID NO: 350107 - DNA, 201 bp, Homo sapiens
aaggggaacaggatgatggccaggaagatgcccaggaaggtgaagcagtcctgcagccccccgaccctgcagacgggacagcctcccacgaccacgatagwgttggtaggatagcggatgacggtccagctgtggatgttgtagaccctgggatggtgggtgggtgtccgtgtgacgaggtaggagtagggcggctgcggg

SEQ ID NO: 350108 - DNA, 201 bp, Homo sapiens
gcattttcagcctttttatgctggtttttcctcatctttatggatttatctacctttgatctttgctgttggtgacctttggatggagtttttgcatggtygtcctttttgttgatgttgatactattcctttctgtttgttagttttccttctaacagtcaggcccctcttctgcaggtctgctggagtttgctgggggt

SEQ ID NO: 350109 - DNA, 201 bp, Homo sapiens
gtgccaggcgtccagggcacgcgtgatggagaggtgaagggatgcatgcaaaataaagggcagagaacggagcgagtcgaccagtctggagtggaaacccrctccctccccttacctggaagcgcttctgcagcgactcagccgtcctgctccatctgtaccccgaggcccagctagcgttttattgagcgccttccaggt

SEQ ID NO: 350110 - DNA, 201 bp, Homo sapiens
tgagcagggtttgattgtccctaatgtgaaaaatgttcagatctgctctatatttgacatcgccactgaactgaaccgcctccagaaattgggctctgtgrgtcagctcagcaccactgatcttacaggaggaacatttactctttccaacattggatcagtgagtaataatgttgaaatacataaaccattacttaaggt

SEQ ID NO: 350111 - DNA, 201 bp, Homo sapiens; identical to SEQ ID NO: 74688

SEQ ID NO: 350112 - DNA, 201 bp, Homo sapiens
gagccagcaggtgtccgtagatgaggagctgggctctgctgtccccacagatgaccggtggtttcctgagctgcatcttgggcttggtgctgcccctggcstatggcttccagcctgacctggtgctggtggcgctggggcctggccatggcctgcagggcccccacgctgcactcctggctgcaatgcttcgggggctgg

SEQ ID NO: 350113 - DNA, 201 bp, Homo sapiens
ccctgtcttccggagcgtgagtgaagcccgggtgaggtgttttcccacacgccgggggcccggagctgagaaggggcatggccagcatcacgcagctgttygacgacctgtgtgaggccctcctgccggctgccaagactcacctgggccagcgcagtgtgaaccggaagagggcaaagcggagcctcaagaaggtggcct

SEQ ID NO: 350114 - DNA, 201 bp, Homo sapiens
tccagagtgcccgtgctgcccaggccccgcactggaagagcctccagcagcaaggtcagtgtggccgggtgctaggctgcaggatcccacctcgggctccygtgcagtggctatgactccgaactgtccctagatgtgaccgctgtgccgatgagccccagcagccactccccagaggggaggcctccacctctgctgcct

SEQ ID NO: 350115 - DNA, 201 bp, Homo sapiens; identical to SEQ ID NO: 74716

SEQ ID NO: 350116 - DNA, 201 bp, Homo sapiens
agccatcggggaccctgaggtgagggccttgccttgccagggagggcttctggggtcctggggcccaggtcccccatcacacatggctctggttccagggrcaaatgcaggccacgccagagtgcttcgcccacctcacacagctgctgcaggtgctggccggcggccgggtctgtgccgtgctggaggtgactggggagg

SEQ ID NO: 350117 - DNA, 201 bp, Homo sapiens
  misc_feature (1)...(201): n = A,T,C or G
gcctaccccgagcctgccagcctcgaatacagagcctctccctatgcacctcgggtgggctcacaggcttgaggaagtgacagggtggccactcccaccangaatcccaggtccccgcctcccgcccccctgctcctgctggtgaccctgcctctcctgcctgcccatctgcatgcagcccagagtatgtatccctggtca

SEQ ID NO: 350118 - DNA, 201 bp, Homo sapiens
cgtggccatagcagctgcacatgccaagcagaaacacgggctacacaggtgtgtgccaggctggctgcaggggggtgggcccaggccacacagcaaggggyggcgcaggaggcgagagaacccagccagcaccttcccatccctggccgggctcctggaggtgggaggccctgcccctttgccaccagcgctgtctgtacc

SEQ ID NO: 350119 - DNA, 201 bp, Homo sapiens
gatcctggacttcggcctggccaggcaggcagacagtgagatgactgggtacgtggtgacccggtggtaccgggctcccgaggtcatcttgaattggatgygctacacgcagacgggtgagaagctgcccagagatctgggcctctcaggctgcaccatctgcttctccacttcttcacggacagccctgtggtggctgct

SEQ ID NO: 350120 - DNA, 201 bp, Homo sapiens; identical to SEQ ID NO: 74723

SEQ ID NO: 350121 - DNA, 201 bp, Homo sapiens
ggcaccgacctgggcaagctcatgaaacatgagaagctaggcgaggaccggatccagttcctcgtgtaccagatgctgaaggggctgagggtacgggcccygggggaggctgcagggaggcaggcagggcctcggggctgggcagaggagggccctgtggctctgagagggtgcgctgaagcctgccaaatcctctgcccc

SEQ ID NO: 350122 - DNA, 201 bp, Homo sapiens
gtggctatgactccgaactgtccctagatgtgaccgctgtgccgatgagccccagcagccactccccagaggggaggcctccacctctgctgcctgggggwccagtgtgtaaggcagctgcatctgcaccgagctccctcctggaccagccgtgcctctgccccgcaccctctgtccgcaccgctgttgccctgacaacgc

SEQ ID NO: 350123 - DNA, 201 bp, Homo sapiens
tccaggtcccaccgagtgtggatcagtgggaagacgaaggattccagtcagcgtccaacttgactcctgattcccagtctgagcccagcgtgaccccagaygtggacctgtgggaagccgcacttacctatgaggccagcaagcggaggtgctgggagcgagttggctggtgtgtgcccttctttgccttggcatgcagtg

SEQ ID NO: 350124 - DNA, 201 bp, Homo sapiens
ctgtgtggctggggaaggtgctcaggaggggatgggatgggcctggctcgccctcacctgggctccagcccctctctgtcgaccctccccactccggcctkgcctgtagtttgaccctgagctggtgctggtctcggcaggatttgactcagccatcggggaccctgaggtgagggccttgccttgccagggagggcttct

SEQ ID NO: 350125 - DNA, 201 bp, Homo sapiens
agcgctgtctgtacccaggatcctcgtcgtggactgggatgtgcaccatggccaggggatccagtatctctttgaggatgaccccaggtgagcaggggtgsggaaaccacccttccctgcagccccagtttttgggtgcacagcctggcctgggaaaatccaggggtgagatacagacatgtgctcaggggtcagcgttct

SEQ ID NO: 350126 - DNA, 201 bp, Homo sapiens
actgaatggagccttcctcagctggggtgtgggagaagggctgctggaggcaatgccaggtgggtctccagcacagaggctcagcagtcacagcacccctrcccatggccccgtgaatgctcttccacctctgcctctgcggtttgggctcaggagggtgagcagggccttacacttatgcacctgtgtcctggaaggagg

SEQ ID NO: 350127 - DNA, 201 bp, Homo sapiens
gggcctggctctgccgcacagatcggtggggagggcagggcaggggagtgccctgaaccagctccagcgccggaggccaactgcgcgcctcttctcggctyctcctgtagtgccatcctcacctggtggcttgaaatcggccaaggtgggagcatttacaccgcagaaatgacaccgcacgccagcgccccgcggccgcga

SEQ ID NO: 350128 - DNA, 201 bp, Homo sapiens
cagtggtatagcagccactccagcctctgctgcagcagccaccctggatgtggctgttcggagaggcctgtcccacggagcccagaggtaagcctcacttrgccatcctgagcctctgacggcaggacctgtgggcacccctatcctggctggccaagcacagagagttctgggaatggactctggacaacatgaacacct

SEQ ID NO: 350129 - DNA, 201 bp, Homo sapiens
gagctccctcctggaccagccgtgcctctgccccgcaccctctgtccgcaccgctgttgccctgacaacgccggatatcacattggttctgccccctgacrtcatccaacaggaagcgtcagccctgagggaggagacagaagcctgggccaggtgggcagggctggcctggggagaaggatggggccgcatctacacctg

SEQ ID NO: 350130 - DNA, 201 bp, Homo sapiens
gaccctctctcactccctgtcttccggagcgtgagtgaagcccgggtgaggtgttttcccacacgccgggggcccggagctgagaaggggcatggccagcrtcacgcagctgttcgacgacctgtgtgaggccctcctgccggctgccaagactcacctgggccagcgcagtgtgaaccggaagagggcaaagcggagcct

SEQ ID NO: 350131 - DNA, 201 bp, Homo sapiens
ctcatgttgtcctttgacttgagagtgggtggcctgggccccaaggccgaccgtttggaggagcttgtggaggagctggaagcagccccttgctgtccgcytttggaggtggggtctgttttggacctcctggttcagctggcagggagtggtccccctcaagttctgccgagaaaacgagactacttccttaacaacaag

SEQ ID NO: 350132 - DNA, 201 bp, Homo sapiens
gggaggccctgcccctttgccaccagcgctgtctgtacccaggatcctcgtcgtggactgggatgtgcaccatggccaggggatccagtatctctttgagratgaccccaggtgagcaggggtgcggaaaccacccttccctgcagccccagtttttgggtgcacagcctggcctgggaaaatccaggggtgagatacaga

SEQ ID NO: 350133 - DNA, 201 bp, Homo sapiens
gcctctggtccttcctgtctccctgctcctactccaggggccctgagattgggaggttgggaggccagagccagcaggtgtccgtagatgaggagctgggytctgctgtccccacagatgaccggtggtttcctgagctgcatcttgggcttggtgctgcccctggcctatggcttccagcctgacctggtgctggtggcg

SEQ ID NO: 350134 - DNA, 201 bp, Homo sapiens
ccccaatcatgtctccaccctcctcccagggcggctaccacctggagtcactggcggagtcagtgtgcatgacagtacagacgctgctgggtgacccggcyccacccctgtcagggccaatggcgccatgtcagaggtgcgaggggaggtagggcgggcagggccggggtgtgagaccaggtgtcacgactgttgtgtctc

SEQ ID NO: 350135 - DNA, 201 bp, Homo sapiens
ctgatctctggcccccgagctgtgttcctgacctcggtgcagacctggaccagctgaaggagatcatgaaggtgacggggacgcctccggctgagtttgtrcagcggctgcagagcgatgaggtaaggggtgagtggggagctgggtgggggtgggggcggacctgggccttggtgttggcccctcaccctttcttcccac

SEQ ID NO: 350136 - DNA, 201 bp, Homo sapiens
tgtgtggatcctgaagccagacccaggggcagggcctgatggggaggagtgttaggatctaccctagctctctgcatcctccaatgccagcaggtccctgsggggagggggcacgctgggcacgttgagacccctgtggtgaagtggtgagcgccagccagtccctggggggacggggcacattggacatgttgagacccc

SEQ ID NO: 350137 - DNA, 201 bp, Homo sapiens
cgggcaggtgggctgtgttggtgtctcctccctccccgtctcatcctgtccccctgcccacggagctgaccagggcttctatctcagtggacatctggtcygtgggctgcatcatggcggagatgatcacaggcaagacgctgttcaagggcagcgaccgtatcctccagccgcagggcggcaccaggggcgggtggggat

SEQ ID NO: 350138 - DNA, 201 bp, Homo sapiens
ggtgggggcagtgggggccctgatctctggcccccgagctgtgttcctgacctcggtgcagacctggaccagctgaaggagatcatgaaggtgacggggaygcctccggctgagtttgtgcagcggctgcagagcgatgaggtaaggggtgagtggggagctgggtgggggtgggggcggacctgggccttggtgttggcc

SEQ ID NO: 350139 - DNA, 201 bp, Homo sapiens
ccgcagctgtgaacctcctggagaagatgctggtgctggacgcggagcagcgggtgacggcaggcgaggcgctggcccatccctacttcgagtccctgcaygacacggaagatgagccccaggtccagaagtatgatgactcctttgacgacgttgaccgcacactggatgaatggaagcgtgagtggggggctcctggca

SEQ ID NO: 350140 - DNA, 201 bp, Homo sapiens
ttggcccctcaccctttcttcccacacaggccaagaactacatgaagggcctccccgaattggagaagaaggattttgcctctatcctgaccaatgcaagycctctgggtacggctggctagtgtgggggccaccgggtgctggagtgtggggcctcccgtggtctggcctgatgcaccttcccccgcagctgtgaacctc

SEQ ID NO: 350141 - DNA, 201 bp, Homo sapiens
tcgacgacctgtgtgaggccctcctgccggctgccaagactcacctgggccagcgcagtgtgaaccggaagagggcaaagcggagcctcaagaaggtggcstacaatgctcttttcacaaatctttttcaagatgagactcaacagctgcagcctgacatgtcaaaactaccagcgagaaacaagatcctcatgttgtcct

SEQ ID NO: 350142 - DNA, 201 bp, Homo sapiens
  misc_feature (1)...(201): n = A,T,C or G
aaggaggagtctgtggctgaacatcaggggcaaggaggcggctgccctatccatgttccatgtctccacgccactgccagtggtgagtgaccatgccacgnggcaaggcaggtgctggggagcccatggatgtgtacagctgctgtttgctggcattgtcatgatagcaggcctctggtccttcctgtctccctgctccta

SEQ ID NO: 350143 - DNA, 201 bp, Homo sapiens
aagcccaggagtttgaggctgtggtgagctacaattgcgccactgcacgccagcctggctacagaacgagaccctgcctctctaaaaaaaaaaaaaaaaaattatagacgtaagcatcttatttacagaaatggagtgattgaccttagtgtaagaagacgtgtggctgacagtagccgcagagacacaccgaatgaaggg

SEQ ID NO: 350144 - DNA, 201 bp, Homo sapiens
tgttccatgtctccacgccactgccagtggtgagtgaccatgccacgcggcaaggcaggtgctggggagcccatggatgtgtacagctgctgtttgctggyattgtcatgatagcaggcctctggtccttcctgtctccctgctcctactccaggggccctgagattgggaggttgggaggccagagccagcaggtgtccg

SEQ ID NO: 350145 - DNA, 201 bp, Homo sapiens
gtggccatagcagctgcacatgccaagcagaaacacgggctacacaggtgtgtgccaggctggctgcaggggggtgggcccaggccacacagcaaggggcrgcgcaggaggcgagagaacccagccagcaccttcccatccctggccgggctcctggaggtgggaggccctgcccctttgccaccagcgctgtctgtaccc

SEQ ID NO: 350146 - DNA, 201 bp, Homo sapiens; identical to SEQ ID NO: 74717

SEQ ID NO: 350147 - DNA, 201 bp, Homo sapiens
ctgtgaggggccagggcgaccctgacgtgacccaaatcctactctcacgccgtaggcctcccgggcaccatggccagagggcggctgccaacgggttctgygtgttcaacaacgtggccatagcagctgcacatgccaagcagaaacacgggctacacaggtgtgtgccaggctggctgcaggggggtgggcccaggccac

SEQ ID NO: 350148 - DNA, 201 bp, Homo sapiens
tggacgggcatgtgatggacgtgtgcctgggccccagggtgacgggtgggtggggcactgtgtggtactgaatggagccttcctcagctggggtgtgggasaagggctgctggaggcaatgccaggtgggtctccagcacagaggctcagcagtcacagcacccctgcccatggccccgtgaatgctcttccacctctgcc

SEQ ID NO: 350149 - DNA, 201 bp, Homo sapiens
tccaggctgctgtgcgtggccctgggacagctggaccggcctccagacctcgcccatgacgggtaggactctcaggtcttgcatatgtccagccatgcatrtggacgggcatgtgatggacgtgtgcctgggccccagggtgacgggtgggtggggcactgtgtggtactgaatggagccttcctcagctggggtgtggga

SEQ ID NO: 350150 - DNA, 201 bp, Homo sapiens
tgtaaggcagctgcatctgcaccgagctccctcctggaccagccgtgcctctgccccgcaccctctgtccgcaccgctgttgccctgacaacgccggatakcacattggttctgccccctgacgtcatccaacaggaagcgtcagccctgagggaggagacagaagcctgggccaggtgggcagggctggcctggggagaa

SEQ ID NO: 350151 - DNA, 201 bp, Homo sapiens
cacacctgccaggcagagcagttggggcagctaagttatgtccttaagagcaagagagctgcctggcaggctgtgtgattagtgccaggaagaaatgctcrctgggcatggggtgctgatgaaggagccttttccattcatgtctagaggaattggggtgctgatgaacacggaaccttttccgtccgtgtctggaggagt

SEQ ID NO: 350152 - DNA, 201 bp, Homo sapiens
gttctccgggaaaaaaaaaattgtgagagttatttaactctcagtcatcaaatttataattcagtgttcagtgacattagaatgtttaaatttacctttgkggtatttcttttcatataaatgggtaaagtttttttcaattaaaagcaaatgaacttcaaggttgagaatgaataattatgtttggtgaatttccagtta

SEQ ID NO: 350153 - DNA, 201 bp, Homo sapiens
aaattccacaaaatacttctgtgctctacaaatacaatttcagtcctcacagcaatttttaaacatgatcctcattataatggtaaaaactgctaatattyagtattccttctcaccttcttccttttagtaattgaattccctaattttagctatattcatgactgcccagctacaatctatatttcccagcttcccttg

SEQ ID NO: 350154 - DNA, 201 bp, Homo sapiens
gtttattttgctttactgaaaattttcaggaataataaaaaaaaaaagctctattcctatttttgtaagtaccattggttctccgggaaaaaaaaaattgkgagagttatttaactctcagtcatcaaatttataattcagtgttcagtgacattagaatgtttaaatttacctttgtggtatttcttttcatataaatgg

SEQ ID NO: 350155 - DNA, 201 bp, Homo sapiens
tggcgatgtttctgaatgttccagagaaggaaacattagattattttagccctagtgtgtgcatctgctgctgaattctttcctgcataataccagcatcsagtaaactgtaaagccaagggtgcagatggtagattcatttagagcaaaatcccttaatagacactccagcactgggaagtgttgtactgttaaacattg

SEQ ID NO: 350156 - DNA, 201 bp, Homo sapiens
aacagtaggggaggaaataattctctgctgtgtattgtatttttcaaataaaaatttaaaaattcaattgaaaactgaattttgactttgtaatatattgrtcttgatagggggtagaggaataaggaatgcttattaatgtgcatgaaagaattctcagagtgactgaagaatgtttggaaatggatcacaatggatcag

SEQ ID NO: 350157 - DNA, 201 bp, Homo sapiens
gaattataaatcatactgttctataataaaaattgggacatattaatgataataattataacaaacatttgttgaacatttaccatgtgtcaggcaccaaytgcttcacttttactaacttagttaatactttactagttcctttgtatttttaaagttatttatcattattatttatttaataattgataatttgtgata

SEQ ID NO: 350158 - DNA, 201 bp, Homo sapiens
ctgctataataatatacttggcctttttattctggcaaaatagtgtttcaaaggcattgctacaggagacagtattattgtttatgcactagaagaatctyaacatcttgtcttgctccagtctactggccactggcatgtatttgttttataaacttctgaattataaatcatactgttctataataaaaattgggacat

SEQ ID NO: 350159 - DNA, 201 bp, Homo sapiens
gtccctgacagtaaacttaaattttttatttatgtattttaagttttgcaggttctacttcatttttgtttaaggtataccaaatctaacccttcaattcrcccaaatgtcttgtgcatatttttgtagtatttaaaatttccagatttgtcttttacatattgattttagttccttacttgctagtcagggaattttaaa

SEQ ID NO: 350160 - DNA, 201 bp, Homo sapiens
tttcatagtgtttgaagttacttttcagttctctgactgttcttttcttgaactgagaatctttaacttcatataacatggacatgagccctttctactaytctggctgcccatatctgactgtacacaagatgtcttatgttcttaactgttgtcaccactactgaatgatgtattttgagtgtaccttgcaaatggagt

SEQ ID NO: 350161 - DNA, 201 bp, Homo sapiens
catccagaaactttttatggagtcaaggattctttcctttatcctatcttatttattttctctttcactgcttcctaacttttctgaagtttgtctgttayaactctctccttgccatctcactgtgtccccaaactctattcttctaatttcccctgttttctttagcccatcagcattgctttttcttgcacattctaa

SEQ ID NO: 350162 - DNA, 201 bp, Homo sapiens
taattatgaacagaatactgggtagcaaagtgagaaagagtcatcctgctcctccaacagctgagactaaggctgaggatgtgatttgaggtgcaagcagrcactaagcaaagagatgtgttttgacacctttgataacttaacatgccttaaacgaagtttttgttgtgaatggtagaatctggtaggcgtgggagaaga

SEQ ID NO: 350163 - DNA, 201 bp, Homo sapiens
ttcagagaaagaaggatgaggaaaagtgatttttttcaaagttatttgtatttgatttttttttttttttttgagacagagtctcattctgttgcccaagmtggagtgcagtggcacaatctcacctcactgcaacctctgcctcccaggttcaagcgattctcctgtctcagccccttgagtagttgggattacaggcgt

SEQ ID NO: 350164 - DNA, 201 bp, Homo sapiens
gagaaaaggatattcctatcccatataagctagcatgggagaaaaagataaatatttttatttaaaaataactctttttataataattatgaacagaataytgggtagcaaagtgagaaagagtcatcctgctcctccaacagctgagactaaggctgaggatgtgatttgaggtgcaagcagacactaagcaaagagatg

SEQ ID NO: 350165 - DNA, 201 bp, Homo sapiens
gacctttagttggaagtgagtgagtgcattacccatatgcagaaggaaaaagaagggcagctttggcaggcagctcttgtccccaacaatggtaccatcarcctctccctcctcacaaggatgtaccttgcagctcaggaggtggactcctaacgcgttccctgtaggcttttccacaaaccccaataaggtcagagattt

SEQ ID NO: 350166 - DNA, 201 bp, Homo sapiens
catgacctcacccagttcaaactcatgggtgcacataagcacgcatccaattaaccaacagttctggccagtttaacatcctaaatattccagtctgttcrtaactgcagctatgactctagttcaagatgtgatgatccagcactggcaactgattctcccaaagtgatattttaaaattcaagtgtactcctgtcacat

SEQ ID NO: 350167 - DNA, 201 bp, Homo sapiens
tgtgacctgattcaggtcctgtctccagcacttggcttaatgctctgctgtcactatcttgtaatttgtaatgatttttgaaaaacaggtctgtcattcaytttcattttgcactggaccctacaaattatatacccagtcctataacatgcaatcatgtaatccacccccaactccatagaggctccagaagcccctctg

SEQ ID NO: 350168 - DNA, 201 bp, Homo sapiens
gaattgaaatagctcaagttctctttcttcatttttacaattactatgctatcatgtctttttttttcctttttctttttgctttttttcaaaactactgkttaaatgcatcaccacaggggctggagacactaaatggagcaaaagccacaaatgattcccaccctctatgagcttactctccagatgaatatgagtaga

SEQ ID NO: 350169 - DNA, 201 bp, Homo sapiens
tcacactagtttattattttaagttttagacatgaataaaaactccaggtggtcacatagattggaagaattgaaatagctcaagttctctttcttcattkttacaattactatgctatcatgtctttttttttcctttttctttttgctttttttcaaaactactgtttaaatgcatcaccacaggggctggagacacta

SEQ ID NO: 350170 - DNA, 201 bp, Homo sapiens
atgaaattatcaccataatcaagtcagagaatgtttctgtgagtcccaaatgtttcagccttcccctttgtagtcatccctccttcaatctccaacttcgrgaaaccactgatttgtcttggttcctcgcgttttgccattctcaggatattatataagtggactcatgcattttgagtttttgagtctgacttatttgtt

SEQ ID NO: 350171 - DNA, 201 bp, Homo sapiens
gggagagagagaattttgtaaccatatacagaagatgatgatggctatactggaggaacacataaagggagacctgtctgaacttagcaatgcttgaaacrtcatcttaggggagatcttcaggaccatgagccaagtgaggacaagagagaagaatggtccagctggagaatccagctcatgcaacggttttgtttagca

SEQ ID NO: 350172 - DNA, 201 bp, Homo sapiens
acttagcaatgcttgaaacgtcatcttaggggagatcttcaggaccatgagccaagtgaggacaagagagaagaatggtccagctggagaatccagctcaygcaacggttttgtttagcaggcaagataagggcacgagggcaagaaacttgaggatgctgttaaagattgatcttatgatcaactgtagggtccagaagg

SEQ ID NO: 350173 - DNA, 201 bp, Homo sapiens
tgaggcaggagaattgcttgaacccgggaggcggaggttacagtgatctgaaatctcactaccgcactacagcctgggcgacagagcaagattccgtctcaaaaaaaaaaaaaaaaaacaagtgaaataaacaggtattttctgaaggtcttcttaacacttttatgcattgtgtaactctaagcatgacatataatgtgc

SEQ ID NO: 350174 - DNA, 201 bp, Homo sapiens
acgcaccattttcccaggcgttgtgcgggtttcttaaacctctcagctggtgcctcggaagagtttctggaagctccatctctactgcctcccctcccccscttttgattttacccccgccaggagcttctccagccccacagcgtccgccctgtgaggggtacaggtgccgctgtcccgccggctgccgccccgtccgcc

SEQ ID NO: 350175 - DNA, 201 bp, Homo sapiens
ttagccaggatggtctcgatctcctgactgtgatccacccacctcagcctcccaaagtgctgggattacaggcatgagccactgaaacctttttttttttwaaaaaaagccctctctatgcaaggcaagacaaatttttgttttgtttgtccctggatgaaaaactttatctgacctgaatttattggggttctttactta

SEQ ID NO: 350176 - DNA, 201 bp, Homo sapiens
tagccaggatggtctcgatctcctgactgtgatccacccacctcagcctcccaaagtgctgggattacaggcatgagccactgaaaccttttttttttttwaaaaaagccctctctatgcaaggcaagacaaatttttgttttgtttgtccctggatgaaaaactttatctgacctgaatttattggggttctttacttat

SEQ ID NO: 350177 - DNA, 201 bp, Homo sapiens
agccaggatggtctcgatctcctgactgtgatccacccacctcagcctcccaaagtgctgggattacaggcatgagccactgaaaccttttttttttttawaaaaagccctctctatgcaaggcaagacaaatttttgttttgtttgtccctggatgaaaaactttatctgacctgaatttattggggttctttacttatt

SEQ ID NO: 350178 - DNA, 201 bp, Homo sapiens
tctcctgtctttagtttctgactgtcttgcattcactggtactcaacttatgctcattggccatttcctccaggcaagaaatcaatgaaaaagaaaggaarattaggagatacctaagtgccttccctctactttccatttacgcctgtcttttctcgacagtgccaccacaatcatcaaattgtgtactcttcataataa

SEQ ID NO: 350179 - DNA, 201 bp, Homo sapiens
attagcataagtccagatgccagaaatgtaggtacctattcactgttttgttttgtttttagttgacacatttcccttatcgtacttatggtttttttttkttgttgttgttgtttttgagacagagtctcgctctgtcacccaggctggagtgcagtggcacgatctcagctcactgcaagctccgccttctgggttcat

SEQ ID NO: 350180 - DNA, 201 bp, Homo sapiens
tctctttgtgtgtgtgataaggagcatttgggataaatacacagcaggtctttgaattacatcgtttcattcaatatcatttctttctaacaccgatgagaaaaaaaaaaaaaaaaacactctctggctagggctgctgtctgtgtggagtttgcacattctccccatatctgcatggcttttctaccctgttttcctccc

SEQ ID NO: 350181 - DNA, 201 bp, Homo sapiens
ctctttgtgtgtgtgataaggagcatttgggataaatacacagcaggtctttgaattacatcgtttcattcaatatcatttctttctaacaccgatgagaaaaaaaaaaaaaaaaacactctctggctagggctgctgtctgtgtggagtttgcacattctccccatatctgcatggcttttctaccctgttttcctccca

SEQ ID NO: 350182 - DNA, 201 bp, Homo sapiens
aaatatggtataatagattaaaaaatggtacacctgtatagggcaattatcatgaaaggggtttgcaggactggaaattgctctggtgattcagagagtgwgacgagtgaatgtgaaggcctaggacattactgtacactattgtagacttcataaacactgtacatttaggctacactaaatttattttaaaaaataaag

SEQ ID NO: 350183 - DNA, 201 bp, Homo sapiens
atttctttctaacaccgatgagaaaaaaaaaaaaaaaaacactctctggctagggctgctgtctgtgtggagtttgcacattctccccatatctgcatggyttttctaccctgttttcctcccacctccctaagatgtacctattaggtgaagtggcatgtttaaatggtcccagtgtgggtgagtgtgatgtgcgcgtgt

SEQ ID NO: 350184 - DNA, 201 bp, Homo sapiens
cagcgttaacatcagtctgaatgggagtaacagcataatcaaagagagacaactgctttgcttcgttagtgagataaaaaaattttcaaaaaatgggggaraaaaggaaattgctaacattagtagagcatgatagactataccctctcaaggaacacatgactccatgaacaattgcattacccggagtctgagaataca

SEQ ID NO: 350185 - DNA, 201 bp, Homo sapiens
atatctgcatggcttttctaccctgttttcctcccacctccctaagatgtacctattaggtgaagtggcatgtttaaatggtcccagtgtgggtgagtgtratgtgcgcgtgttagtgcacctgctgtgggatggcatcctgtccggggctggttactgccttgtgccctgagtggctatgctaggatctggccatctgct

SEQ ID NO: 350186 - DNA, 201 bp, Homo sapiens
atgactttaaaaaaaatgtgtttctgaaggcaatgtagagattactctgaaagcattctggtttacttaagattttccatatttaaatgaaaactgatggyactggatttactgctaattggcacctccagcagcgttaacatcagtctgaatgggagtaacagcataatcaaagagagacaactgctttgcttcgttagt

SEQ ID NO: 350187 - DNA, 201 bp, Homo sapiens
ttggcagaaagaatagaaaccatttaaatataaaacttaattagatttaactgtggtaaaataaagtaacagaaactgtacaaaactataaaatttaagtwgaagatatataagaaaagaaaattatctaagatgacaaaatgagacaaattctagataataccagcaaaaatgttaaagtacaagactctccagatttca

SEQ ID NO: 350188 - DNA, 201 bp, Homo sapiens
ttactaaatagcccacattggatcaattggaagccagtccatataagataaggtggaaataaattactagctgttctatgactttaaaaaaaatgtgtttytgaaggcaatgtagagattactctgaaagcattctggtttacttaagattttccatatttaaatgaaaactgatggtactggatttactgctaattggca

SEQ ID NO: 350189 - DNA, 201 bp, Homo sapiens
aaatttaaaagaacagctatgcatctaatactggaaaattatttgatctggtacaacttttatggtgatatactatacaacagccaataatgatgaaaagkcttgggaaacaaataatccagaaatatatgactaaaaagaaaaacatctaactattgtaacctaagtatatgacattttaataaatcagtacttttagaa

SEQ ID NO: 350190 - DNA, 201 bp, Homo sapiens
attcaggatgaagactttgaagatattatgcatagatcacctaatctatctataaacccattaaagactagccaaatgttatcaggcttttggatctctckgaagacgaaaggccttcatatccaagattgttatttttactgacatcaagttatgtatctccaaagccctcatttatcctgttgaagggacaacttttat

SEQ ID NO: 350191 - DNA, 201 bp, Homo sapiens
gtataggaaacatggctccaacaaggatttggtcaggctcatggagaatctttgaaccaaaattgcaaattggaggtatcccatgtttcagaagattaggytcactcccaccatgcttagtcattggctaggaggagcctgtagaagtgtggcctcagcatggatacagtattggatccagaggagcgcagcagccggggc

SEQ ID NO: 350192 - DNA, 201 bp, Homo sapiens
aatacatgtggagaatttcccaatcacaagaaaggggttagatgctaagtagtgggaaaaaaattctttttacctttgcaacctggattaaggctggtccyctttttaaggctttatctcatctttttatttaaaattaatctgcacatcttcagtggtgcacctagcatatttgacacaaaagcaaatcacttttagcat

SEQ ID NO: 350193 - DNA, 201 bp, Homo sapiens
ggtgcctgtgggaggcaggaggggccctgctgcttctcagtcgatctcagttaacactgttcatcatctcaactctgtctagaaacagctttcattggttrgttcacagaagaaaggaagttttatcaaagaaaactgtgaagtgacaaagcttttagcatctccatctctggcttctgtgacctggaaatctcatatttt

SEQ ID NO: 350194 - DNA, 201 bp, Homo sapiens
tcctctagaaaggaagacttttacttttgcgtgttccctgtagtgtttctgagatgctagctctaccagatatttaggattgtccctggaatatatatttytaagctcaaataagtttggaaaacactggacaataaagttaacaattttctttaacagattgtcatgcttttggttcatacagggaaagtagttgggagg

SEQ ID NO: 350195 - DNA, 201 bp, Homo sapiens
aggctctggtaatttagtgtctggcaagggcctgctttctggttcatacatggtgtctagtcattgtgccctcacatggtggaaagtatgagctagctctrtgggctctgccctcaaaacctaagcactccacctcttaataccatcactttgcgagttaggatctcaacatataaatttgtgagggggatacacacattc

SEQ ID NO: 350196 - DNA, 201 bp, Homo sapiens
cactacctcctggaaggtacccccattgaaaagaaggcagccaaattttgagttatccccagagtgcagtgcctcacacacagtaagtgaaggaaacttgytagttgattttaattaaatgatgcataatatgaattaggaagatagttgaaaacgtgtgtgctccagaaattcctgtcttatgtcctattttccaggtga

SEQ ID NO: 350197 - DNA, 201 bp, Homo sapiens
ggagcatgagccagccctcacttggaggtataaggattcagggagtgcatgtccgtttacttgtagcaggtgatttcatgagactggtcagggattgtgtytggagtagaaacaatagggtgagccaaatgaaaagctccaggctgccatcatgtacttcttttcactggcaaatgagatatagctgccatcagaaggcca

SEQ ID NO: 350198 - DNA, 201 bp, Homo sapiens
ggctgctgagacaagggttaaataaacacaacccactagtgtctgtttgcccctctcttcttttgagacttattacctaattctgtacaggagcatgagcyagccctcacttggaggtataaggattcagggagtgcatgtccgtttacttgtagcaggtgatttcatgagactggtcagggattgtgtctggagtagaaa

SEQ ID NO: 350199 - DNA, 201 bp, Homo sapiens
catctctgtcactgtattttattgtccagagaaatcacaaggccagcccagattgttgggggtagagaaatagattccacctagagatgggaggtgcagcraagtcacactgtaatgaggagaatttactgggatgggaagaatttgtggcattaaacgatttatcccagtcttttcccagaatactggtggaaactctaa

SEQ ID NO: 350200 - DNA, 201 bp, Homo sapiens
gcctgtaatcccagcactttgggaggctgaggcgggcggactgcataagcccaagaattcaagaccagcctgggcaacatgatgaaatcccatctctaccaaaaaaaaaaaaaaaaaaatcaaaaattaactgggcatggttgcacatgcctgtagtctcatctactcaggaggctgaggcaggaggattgagtccaggag

SEQ ID NO: 350201 - DNA, 201 bp, Homo sapiens
tctatatcgaattgcattttctcagttcactggtttcaagtacccgtggggccactggaaataaaactgtgatgtattatttccacagttcttattgtttyaattcaatcatagtgcattatataactctgacaagtcatctttaccctgaagtcatgcctgagcttttgtaaggaaaactcaagaaaacttacagatgag

SEQ ID NO: 350202 - DNA, 201 bp, Homo sapiens
acaacagaaacatgtactttggaactgaagacatctcaaccatatgacaacatagattttttctgaactagcaaaaagaaagaaaggaaggaaggaaggaraggaaaaagaggtagaatttactgtttgctaccagacattggcaaagagccaccccactgattcaggtccctgataattctccccagatacagttgtcag

SEQ ID NO: 350203 - DNA, 201 bp, Homo sapiens
gtaagccagagacagcaaggagagccttcagactgtgatggaggtctgtcccctgtgcgtgagagggagaaagaaggaagactgggtgggaaacacttcaractaggttaggtagtctcattggggtagtgggattgtataggaaacatggctccaacaaggatttggtcaggctcatggagaatctttgaaccaaaattg

SEQ ID NO: 350204 - DNA, 201 bp, Homo sapiens
tttccaaaagctaggccacaatgaatagcctagacttggcttctatgtcctcactctagtgaaggaaacaatgaaaataaattataaccatacattgtggycagggttctcagatgaggaacaaggtgctttgagaacacacagaaggattgtgtatgttgtctaggacacctttcccccaccatttcccttttgcctgga

SEQ ID NO: 350205 - DNA, 201 bp, Homo sapiens
tgatgttcatgacggttttgtgctgaaacactctatatcgaattgcattttctcagttcactggtttcaagtacccgtggggccactggaaataaaactgygatgtattatttccacagttcttattgttttaattcaatcatagtgcattatataactctgacaagtcatctttaccctgaagtcatgcctgagcttttg

SEQ ID NO: 350206 - DNA, 201 bp, Homo sapiens
tgaggaaaagtcctgatttttctggaagacaagtatatctatctgaacattcattacatttggtttgtgaaaagaattaatcatctgtggaaactggcccrttgcatcccaacgtccactaaatattcaggttactagtaacttttttatgactgcttgtcatattaaaatatataagctaaaatatatatgagcagtgaa

SEQ ID NO: 350207 - DNA, 201 bp, Homo sapiens
aaagaggtagaatttactgtttgctaccagacattggcaaagagccaccccactgattcaggtccctgataattctccccagatacagttgtcagagacamtctaaggaagtccagtgaggaaaagtataggtcttccatactgtaagaaaaagaatgtcattctttctaagccatagatccaaaaggtcaggtaaatcct

SEQ ID NO: 350208 - DNA, 201 bp, Homo sapiens
ctgctgcaaatgtaagccttataggcaggctttgctgttatatttgaacttacatacaaatatattttttcccactttcactagagacaccttgggaaaasttgataataggaatgttggggtgtttcaaactaatgcagtctcatgaaatgcttgccagaattttgatgggtagtaaatagaaaacagccatatattcaa

SEQ ID NO: 350209 - DNA, 201 bp, Homo sapiens
taatttattgaatcctcgtagcattttcttaaagtacgtgatattattttacccattttataaatgaggagactcaaaaagtaaagtaactttctcagatycatagaaccacaaatttttctggtggcgatgtttctgaatgttccagagaaggaaacattagattattttagccctagtgtgtgcatctgctgctgaatt

SEQ ID NO: 350210 - DNA, 201 bp, Homo sapiens
taaccaatgtttgccagtggtgttgattgtgctgctataataatatacttggcctttttattctggcaaaatagtgtttcaaaggcattgctacaggagamagtattattgtttatgcactagaagaatctcaacatcttgtcttgctccagtctactggccactggcatgtatttgttttataaacttctgaattataaa

SEQ ID NO: 350211 - DNA, 201 bp, Homo sapiens
acatattttacaaagctaatgttcccaagcctctcactttgtcattcctttttctttttgcagaaccacatcactgccttcgcagaagtcacatgatatcraagcagatggtttttcactgcattggacatcatccctttttaccatccattcataacacccaaagtttgtttgattgcaagtgaagtttataaagttgtt

SEQ ID NO: 350212 - DNA, 201 bp, Homo sapiens
atttcagaaaatattaccatgtaaatatgtacatatgtagtctagtaaaagcaggcaaacacatatctttctgataaaaacatctcctttttattctactyacttggggcccaggtcagtataatttagtcaacttgaaaatttcggtagtctctgtttgcatggcagaaattctgcacatgttttatctgattcctgtga

SEQ ID NO: 350213 - DNA, 201 bp, Homo sapiens
attcaagaaatctcttggctacatgtttcacctctactagaatatgaagcactcagccttaaaacagggattgaaacttgagtgaatcagaagtcacaaartacttttcactcattgccatcacgtctaaatttgatgttcatatttgtatctgggtatgaattgcaaatatatctgcatataaatacgtgacctagccaa

SEQ ID NO: 350214 - DNA, 201 bp, Homo sapiens
gtattggccaccatcttagtggcaagagccaggcccccaggcagctatcctaggacctttagttggaagtgagtgagtgcattacccatatgcagaaggawaaagaagggcagctttggcaggcagctcttgtccccaacaatggtaccatcaacctctccctcctcacaaggatgtaccttgcagctcaggaggtggact

SEQ ID NO: 350215 - DNA, 201 bp, Homo sapiens
ttttctcatagaactaaccaaagtgtccttagaaattctattttttcctttagtcttgagagtattggccaccatcttagtggcaagagccaggcccccakgcagctatcctaggacctttagttggaagtgagtgagtgcattacccatatgcagaaggaaaaagaagggcagctttggcaggcagctcttgtccccaac

SEQ ID NO: 350216 - DNA, 201 bp, Homo sapiens
atacacaattcatcagtggggaagaggcctgtactggcaacccagatctcatcatgagagcccgaaaaacctttccatccaaagaagcagctctcagtgtstatgcagctatgtatctgaccgtaagtaaggattataaatttgttgtcttagtctgtattattgttaatttttccaatgtagaaattctttttctctgcc

SEQ ID NO: 350217 - DNA, 201 bp, Homo sapiens
attattttgcccgtataatagaaaaataagttttaacaataataaccaatgactttgaatttagaaaatgtttttggtattcaagtaaattggcaagttcyttagcaaaggaggaaaaaatatctacacacttagttctataccttcaggtaaccaaagcaaataaattttaaaactgtaaaaatcattaataacctataa

SEQ ID NO: 350218 - DNA, 201 bp, Homo sapiens
ctctctgttataaacaggaaaacccgttacaccaaacagcctagatttcaaaggtgtacaaatgaagaagacttgtgatttaggttcccatgcttggccakgagattttggaagaagttttattgagctcagttctctttaatttctcttcctctttcaaatttctgattttgataacctttactttgtatgattcaaaca

SEQ ID NO: 350219 - DNA, 201 bp, Homo sapiens
tttgaagatattatgcatagatcacctaatctatctataaacccattaaagactagccaaatgttatcaggcttttggatctctctgaagacgaaaggccktcatatccaagattgttatttttactgacatcaagttatgtatctccaaagccctcatttatcctgttgaagggacaacttttatatgaaaccttaaaag

SEQ ID NO: 350220 - DNA, 201 bp, Homo sapiens
gtattacaagaaaggttaccttcttcttataagcacagtctgctttgagctatttgtttgtttatggcatttaaagaaactcttggaaggagaacaaaagyctccaaagaacaaatagaaatctctctataataatacagcaatttgaggtataaaaataattattgagttcttactgtgctaaatactttatgtacagtg

SEQ ID NO: 350221 - DNA, 201 bp, Homo sapiens
ttctaaaatgttaccaggagttagtggaaaaactcagcatgctctgctcactcctgattcgtactaattttgtttttttctagtattaagtgggtcaagcytagaagataatgccccaaattgtagtcaatgagattccttttgtgtggtttaatatgcctaaattcaatgaaaatgaattttaatttctttacacacatt

SEQ ID NO: 350222 - DNA, 201 bp, Homo sapiens
ttccaatttcagctcattaacaagagatctgtaaaatctcaggaccaattcgaaaccaaatttgattatttctaatgacttggaaaaacttggaattattyttttaccctcagagagctatttgataatggaaatgttttcaatacaatcatgttatttctaaaagcagaaagaatatatggaataccttgtgacatctct

SEQ ID NO: 350223 - DNA, 201 bp, Homo sapiens
gacctgaatttattggggttctttacttattctgcttactgtgagtagccatctgttttgaggtagaaatgtgaatgtgttttattatagggtgcagcccrgaccacactggaggtatcaatgggcggtacatagatcatattaccccaaatctgaaaatgttctgaatgctgaaatacttctctacttgagggctcagat

SEQ ID NO: 350224 - DNA, 201 bp, Homo sapiens
aagtgccatatgtgcagtatatttattgggtcaggggggagtcatactggagataaatagtctccatgtaatatcagccatggctgcactttagggattargtaaatgtgtctgtgatgaaggagctgttattcataaccaaaccatcaatcggcctttgtgctgagggcagcagagttactgagcatattcagatcttaa

SEQ ID NO: 350225 - DNA, 201 bp, Homo sapiens
cacatgtcaaaaagttgatgtctataatatagaaaacatcctaattggtaaagttcatgaatagacaaatcattagagagcaaatacaattaggaaataartacatggaaaagtgttctgtgtgaccttgtatgaatgttatgaaggatcttttatgcaacattaagaagttgattcttatcctgtaagcaattgagtacc

SEQ ID NO: 350226 - DNA, 201 bp, Homo sapiens
agtgataagaagtgacgatagctccaaaatctagaaatattataatgaggatgtactattacagatgaaaattaccatgtttaattcccatggcaactgcmaaaaaaattatatggataggaatgttctgaaagagctcatggtgacccaaggaattgaactttacattgattgactcttttgtagattttataagattac

SEQ ID NO: 350227 - DNA, 201 bp, Homo sapiens
catgtttaattcccatggcaactgccaaaaaaattatatggataggaatgttctgaaagagctcatggtgacccaaggaattgaactttacattgattgastcttttgtagattttataagattacagtggtcatggtgaaatgtgaactggaatgtagtcagagtgatgggtggacagagagcttggattttgcagctag

SEQ ID NO: 350228 - DNA, 201 bp, Homo sapiens
atgtttaattcccatggcaactgccaaaaaaattatatggataggaatgttctgaaagagctcatggtgacccaaggaattgaactttacattgattgackcttttgtagattttataagattacagtggtcatggtgaaatgtgaactggaatgtagtcagagtgatgggtggacagagagcttggattttgcagctagg

SEQ ID NO: 350229 - DNA, 201 bp, Homo sapiens
ttcctccccaaggctgagggagaaaggatccttgactcctgtactgcatgtattaatagcatctttgttagagcatgggctctgtaactgaactgcttgartttgaatcccagcttcatcaccttttagccttaagtccatcgataagttacttaacctttctgtgtctcagttacctctgttgttgagtaccaatgtcat

SEQ ID NO: 350230 - DNA, 201 bp, Homo sapiens
atctgaagaattgatacaatgatggtttccctgtaggataattgttggaattaacacatcacagataaacttctcggcacatagtaggtgcttcacacaasttagttccctcccgcaacaatcatttctttaatgggatttttttttttaatttcacactaggatactcccatacaaagacttcatggatttaaaagttta

SEQ ID NO: 350231 - DNA, 201 bp, Homo sapiens
acaaacaacaaaaaattgtatagaaacaaagtgaccttcctgaaaatgctcatggtcttagcttctcacaatccattcagactgatgacataaaactacaycctccagctcttctgctcaggatctaagtggaggattccctagcaattcatggttatcattaagagataactgatgaatcttttcccattcattttagga

SEQ ID NO: 350232 - DNA, 201 bp, Homo sapiens
atataagaaaagaaaattatctaagatgacaaaatgagacaaattctagataataccagcaaaaatgttaaagtacaagactctccagatttcataaaggkgggactcattatcactgcttcattcttagcattgctaactaggaaaaatgttcaagcattttaaaaaataagttaccaagagtagtttaaaatgatttat

SEQ ID NO: 350233 - DNA, 201 bp, Homo sapiens
aatcattgtatctgaagaagatgataaatggggcaatagcaatattcagaaatatactttaaaggaaattttcttccaaataaatacctgaatctttaagmtggaagggttaaacagatacaaaacaactattgaaatatatatattggaattagatgtttctcagtgaaatttttgaatttcagtactggagaaagaacc

SEQ ID NO: 350234 - DNA, 201 bp, Homo sapiens
atagctatgaataagggataaaagtgtggtagagaggaaggttattatagttgaggaggttaacaaacttagaagacaaagtgcatggatacccatatccmccaaataccataaacacattagtattcatagacttccatgaaatttcatgtcaatacgtttgggaaacattgagttaaagtgaaacaaacaattagctgg

SEQ ID NO: 350235 - DNA, 201 bp, Homo sapiens
agtagaaccttcgaacacatactccatgtactttgctttttgcctctcttctgctcaccttcccctcctcaaaggacacagtgaatgaagcaagtgaatgmgttaaagaagcaaatcgcaaaataaacagggacaatattcgagattatgacatccacctatcttttcctgatgcaatgtaggctatgtcagaattgttgg

SEQ ID NO: 350236 - DNA, 201 bp, Homo sapiens
gacaaaatttggagcaagtaaaagattttacgacttttatctaaagtcacattcatgattatttcatagctataccaccagaggtagtttgatttgattaygcatggacattttgaaaaagttagcattcttgatattctaccatgccattattatttgttttctttggttactggtttgtaagactgattgaaaaccttc

SEQ ID NO: 350237 - DNA, 201 bp, Homo sapiens
gtcaagccacaaaacctgggcataggaagaaggaaactgaagattcagacagatcacaatattttgttgcttctttcaggagaaaaagggtctagagcatscctgatgcctgaggtgggtttggttatagagactgccacagaaaccagtagtgcatttaggaccaggaaaaccaagataaagatggcttcttggattatg

SEQ ID NO: 350238 - DNA, 201 bp, Homo sapiens
ctgaggaaactaactgtagaataaacttactattttagttaacatagttcaagtgggtttcttatagtagcagccaaatgacagtgactgagaaactgttytggcagaaatgctcaggacacaaatcggaaattccgcaaggtgaaatgtgctgagatgcaggcaagcaagaggtcagcattagaaagccactgggaagag

SEQ ID NO: 350239 - DNA, 201 bp, Homo sapiens
aggcatacaaagagaaactgagatgaaagacagtatgactccagggaaagagggagaatgaaatggtgacagctgttgcctggattcctgaggactttccrttcatgggcctaatccccaagctccctgcccttcaattctgaggaaactaactgtagaataaacttactattttagttaacatagttcaagtgggtttct

SEQ ID NO: 350240 - DNA, 201 bp, Homo sapiens
aattattattattatctgagagcagtaaacaattggagttttaactcaggaagttgggtgggggaagttaagagagaatatggttttgatgaggggttccrtggatatcacagtgagctgtgggggaaacagaactagggtgtgtgaattagacatacccttggaggaaagcagacacctaggcatatgcatttgatgaga

SEQ ID NO: 350241 - DNA, 201 bp, Homo sapiens
gtggcatgtgcctatagtcccacctacttgggaggctgagacaggagaattgcttgaacctggaaggaggaggttgcagtgagccaagagtgcgccactgyactccagcctgggtgacagagtgagacttcatctcaaaataataataataattattattattatctgagagcagtaaacaattggagttttaactcagga

SEQ ID NO: 350242 - DNA, 201 bp, Homo sapiens
actaaaaatacaaaaattaacctggtgtggtggcatgtgcctatagtcccacctacttgggaggctgagacaggagaattgcttgaacctggaaggaggargttgcagtgagccaagagtgcgccactgcactccagcctgggtgacagagtgagacttcatctcaaaataataataataattattattattatctgagag

SEQ ID NO: 350243 - DNA, 201 bp, Homo sapiens
tggctgtatttagttaaaggcatattgatttaatttagtgttggtgttataaacatacataaatgcataaataaaaatcaatgagccctgttatggagtaygtaaataataactgagaaatatgtttctgatgcctctttgtgtggattaggaaataaaactgaggaatttgaactctcccttaacatctgactttaatta

SEQ ID NO: 350244 - DNA, 201 bp, Homo sapiens
aatttccagacattttcatgatgcatttttaaatgggaaattaaagtttctaaaatgttaccaggagttagtggaaaaactcagcatgctctgctcactcytgattcgtactaattttgtttttttctagtattaagtgggtcaagcctagaagataatgccccaaattgtagtcaatgagattccttttgtgtggtttaa

SEQ ID NO: 350245 - DNA, 201 bp, Homo sapiens
tataaaagtattaatatgattttaaattagtatgtgtgtatcagatgccttaaaaatatttgcatggagaatctgttgtgaattctgtagcagagtcaaawttaaataagacacagtaacttaaaaaaataaaacatggaatttaattacacataaaaataaatgagtgcttccttacatatcttttgtatattttatttt

SEQ ID NO: 350246 - DNA, 201 bp, Homo sapiens
ataacccacatgttaactgtttgcaaatattaggggtttttttctttgaaatgtttcaatttgcttttaaaaataaacattacacactgcttgggtgatgsttgtatcaaaatcgcagacatcaccactaaagaacttactcatgtaaccaaacaccacctgttcccctaaaatctactgaaataaaaaataaattaaaaa

SEQ ID NO: 350247 - DNA, 201 bp, Homo sapiens
aataaaactgtgatgtattatttccacagttcttattgttttaattcaatcatagtgcattatataactctgacaagtcatctttaccctgaagtcatgcytgagcttttgtaaggaaaactcaagaaaacttacagatgagctactgaatttccagacattttcatgatgcatttttaaatgggaaattaaagtttctaa

SEQ ID NO: 350248 - DNA, 201 bp, Homo sapiens
ccaggttagtggttgtcctcttaagatcatcttcagcaaatttaatgagtcttgtgaaccctcccttcattatctgggtcaacaatgggaaccctgaggcytaggccagtggcctttgggacaccatccatgttatttcttacctcctttcttttctctctactgccccttattgacccttttcctacccaccagttgtca

SEQ ID NO: 350249 - DNA, 201 bp, Homo sapiens
ccctccaattgcacaggttgagaacgtttcatgatagccctttgaacattcccatactctcaggaaaatgacttcatgaaaggattatatgtaaaaactgmctatataataactaaaaatgcatttatgcattcattcacagccatttatgaatgtgaatgcctataggtgtgttatttaaatgtggctaaataacagcct

SEQ ID NO: 350250 - DNA, 201 bp, Homo sapiens
gcttgacaagacataataaaagcaaacttcacaatgacaaattagtagacacactgttagctccagtttcttttaatcttatttctcatgctgttgttcayagtattagagagaaatttcttcttggcttctgactggccttaaaaagaacacattatttaacttccctaaatctccatttcctcatttgtaaaatggaat

SEQ ID NO: 350251 - DNA, 201 bp, Homo sapiens
tcagcttttcatctctgcacttggttctttagtgtcattatctcatctggtcctcagaacagctcagtttcataatcctttattcttaattctgaaatcctttttttttttttttttttgagacggagtctcactctgtcgcccaggctggagtgcagtggcacgatctcaactcactgcaagctccgcctcccgggttca

SEQ ID NO: 350252 - DNA, 201 bp, Homo sapiens
tctgtcgctattgccaccttccctatacttccagtgaacaccttaccttacaaggccaacctcagaatgctggtgccttccaagtcacttccctgtctggkgaatgttgagctgagctctggatcccccttgagctcaagaccctccaattgcacaggttgagaacgtttcatgatagccctttgaacattcccatactct

SEQ ID NO: 350253 - DNA, 201 bp, Homo sapiens
ctggcatctcatcagccttcttgtttatctgtcgctattgccaccttccctatacttccagtgaacaccttaccttacaaggccaacctcagaatgctggkgccttccaagtcacttccctgtctggtgaatgttgagctgagctctggatcccccttgagctcaagaccctccaattgcacaggttgagaacgtttcatg

SEQ ID NO: 350254 - DNA, 201 bp, Homo sapiens
gaccatgattccttctccagaatccttagtgtcagatgtttttacagaattcaaaatattttatattttaggaatatgtatatttggttacacaagcagcwtctggagcaacaattgtaatcacagatgagtatttctgcagcaaaacatggagtataaattgcctcacaacagatcaggttttgccaccaaatgagtttg

SEQ ID NO: 350255 - DNA, 201 bp, Homo sapiens
acatcttcactggcatctcatcagccttcttgtttatctgtcgctattgccaccttccctatacttccagtgaacaccttaccttacaaggccaacctcaraatgctggtgccttccaagtcacttccctgtctggtgaatgttgagctgagctctggatcccccttgagctcaagaccctccaattgcacaggttgagaa

SEQ ID NO: 350256 - DNA, 201 bp, Homo sapiens
atgcttcagcagctctgatgatggagctgtaaaagatctgttttaagttcaagtaggagaactggcttggagttaatctgctgctgaggactaaagaaagrgcatttttatagattacaacagcagctaggttaatttaagaaaacaaaaagcagtgcccccataaacagtattgtattattcaactattggtaattttta

SEQ ID NO: 350257 - DNA, 201 bp, Homo sapiens
ggcattttacatcagtaactaaaaactcatgaatagtttctaagaccataccatgtcaaatcatatttcaccgcatagtaaagagcatacacagtgacttytaatgaagtaagcattccatttatactcttattataaaatcttctaggactatttccataggttttggttgttggaaaatgtattttagtctgactttag

SEQ ID NO: 350258 - DNA, 201 bp, Homo sapiens
gaaatactatattattcctgaataattttatgactgaaaatcattatcttttaaaaattttttcaattatttaagctgctctctaaggaggttccagtgcytcctcattggattgactgctgatatgttcagattgacaaaaggccctcagaaaaactcccccagggtaatttaaaaccctgtacttccttagggctcaca

SEQ ID NO: 350259 - DNA, 201 bp, Homo sapiens
tctatttccttattggagaccatcctggagacactatggagggccttcaaaatcaatcagaggatcgcagttctgtgaaaacattttgttgaaaaaatatwaaattttatttgactaaaactaggtaaataagcaatgactcaattcacagttttatgaaacaagcagtttatttttcatagttttgattaaagaagaaat

SEQ ID NO: 350260 - DNA, 201 bp, Homo sapiens
aataatcacaggaaacattttcttaaaataaccttcaagacccaatgaacgtgtgtatgagtttgtgttgaacacagaatttccctgtatattttattgcytttattcacataacaatgcatcatagatatgatttcagatccataaatataacagtcatatcaggcatactattaaaagctaatcttcaattatagctta

SEQ ID NO: 350261 - DNA, 201 bp, Homo sapiens
gagcatgaacacttttaaggcttttggttgaattcatatctgtatgttctctgcaacaatggagaacattgttcttcataacttttacaatcttataggcmaaaaataaataaagttctcatttcaatttatatttttgaatatttttcaataaacttattttgtatttttctttcgtactgaaacaaccagatgataaaa

SEQ ID NO: 350262 - DNA, 201 bp, Homo sapiens
aagatttccattcatgggaaatgacttcaaagagcacataagacaggcttttacacaaataagttttgattggattaattggatttgcataagttttatgrtatgagtgtactagagtcttgacttctttcgcttatgagagagaacttaaaggagtttgaaagagaaaacacataaaagtttgcaaaggaagcaggtaaa

SEQ ID NO: 350263 - DNA, 201 bp, Homo sapiens
gttatgtctggtgggcctaattttttttaatttggatttattaaagcataatttgcatcctgatacatccttccttggcgtatagctttatgagttttgaygaatgcatactttcatgaaattatcaccataatcaagtcagagaatgtttctgtgagtcccaaatgtttcagccttcccctttgtagtcatccctccttc

SEQ ID NO: 350264 - DNA, 201 bp, Homo sapiens
agaatcagcaatgttaaaaaaaagtgtaaaatgcataattctttattagtttatttcatctaattaatttttattctgcttgcctttggttaacagtttcrtgaacccactggtttcttcattagagtgatagaaattcttacccagtcccatggtgtgatctaaagttatcagaaaacagtatttgtcagagtcttttcc

SEQ ID NO: 350265 - DNA, 201 bp, Homo sapiens
aaatgaggagttttaatcaactcctggttctacaagaatttatcatgcacttggtccattatccacatcctccgattcttctctgtcaagtagtgttaggwtgcttatttagtaaatctaaagcattttaaaaagttaaaggaaaatgaaataactaagaagaagccaattttataggttaaagtattagtatataaaaca

SEQ ID NO: 350266 - DNA, 201 bp, Homo sapiens
catctttctttcacttttataaatcaaaccactgtcaaaaaattacaacaaatttggtttaaatatcttaattggcttttatttgtgattctagaattggrtaacacttcattctataaaacagagtgagttccaatgagctgagcagaggagtctggttatatagacataaaagggctgaggaaagaagaaacagaaaac

SEQ ID NO: 350267 - DNA, 201 bp, Homo sapiens
tgttaggttgcttatttagtaaatctaaagcattttaaaaagttaaaggaaaatgaaataactaagaagaagccaattttataggttaaagtattagtatrtaaaacaaggcatggatacaatttactgttgagttaccttatcatcagctgttatgatagtgaaattttatttataatcagattcgtaatatatgaaatg

SEQ ID NO: 350268 - DNA, 201 bp, Homo sapiens
agaaagtctagtccttttttttgggcctctgtatcattagctatctggttagcaaaggtttgaactccaactgggacaggatactgactcattgcttcccsaggcagctgtttctatgtaaaaatcaagtctgactattgggatgctccgccttccagtgaaataaagtctgtctttctgaatctcctcactgacctcaac

SEQ ID NO: 350269 - DNA, 201 bp, Homo sapiens
aatggttaaactaatttacattctaactagcagaatataagcattcccttttttctgcaaccttgccagcatctgttattttttgactttttaataatagycattctgactgatgtgagatggtatctcattgtggttttcatttggatttctctaatgattagtgatgttgagctttttttcatattgttggctgcaagt

SEQ ID NO: 350270 - DNA, 201 bp, Homo sapiens
agtgttactcagagtatcacggtttagtcaattgaatatatattccctgaatgcagtggcagggcacttacaggtgaccactgtacaacagaaacatgtaytttggaactgaagacatctcaaccatatgacaacatagattttttctgaactagcaaaaagaaagaaaggaaggaaggaaggaaaggaaaaagaggtaga

SEQ ID NO: 350271 - DNA, 201 bp, Homo sapiens
caatggcagaatcaccaaaggctgtgcatttcattttttgttatatacttttatcctaacatgttaattagtctttaaagattttactcatagtgattcartaccaggagtcaaaattttctcaaaccttttatcctcgatttcaatgttcctgcttcgatggaaaacttcgtgttctatcgtagatgatgatttcaatgg

SEQ ID NO: 350272 - DNA, 201 bp, Homo sapiens
ttaaagtaactttatcacatgtcctgtgatagttgacttcaaattgcctctgtcataatggtttgaaatgtgttagaccttgccccagataatgttttacatatatatatatatatatatatatatatatatatatatatatgtaaaataagttgctaaaatgtgttagaagccccaaatccagccttcatgtttgtgttc

SEQ ID NO: 350273 - DNA, 201 bp, Homo sapiens
taaagtaactttatcacatgtcctgtgatagttgacttcaaattgcctctgtcataatggtttgaaatgtgttagaccttgccccagataatgttttacatatatatatatatatatatatatatatatatatatatatatgtaaaataagttgctaaaatgtgttagaagccccaaatccagccttcatgtttgtgttct

SEQ ID NO: 350274 - DNA, 201 bp, Homo sapiens
caatagctttctctttgtgtgtgtgataaggagcatttgggataaatacacagcaggtctttgaattacatcgtttcattcaatatcatttctttctaacmccgatgagaaaaaaaaaaaaaaaaacactctctggctagggctgctgtctgtgtggagtttgcacattctccccatatctgcatggcttttctaccctgt

SEQ ID NO: 350275 - DNA, 201 bp, Homo sapiens
aggcaggagaatggcgtgaacccaggaggtggagcttgcagtgagcagagatcatgccactgcactccagcctgggtgacagtgcaagactctgtctcaaaaaaaaaaaaaaaaaaagagttgggaactctacttgctgtgtaatcttgaacaatctatttaagctctttaagcctcaattcccttattgacaaggttttg

SEQ ID NO: 350276 - DNA, 201 bp, Homo sapiens
tccgttttctctattgtaaaattgaggtaaatataagtactggcctcacaggattactgagtatgaaatgggttaacatgtgtaagtatcagagcagtgcycagctgtatacgtgttagctcctattaggctttccaaggctgtgttgattaatcaggaaacctctttaaagcacctagcaaactacttttgtttgttagt

SEQ ID NO: 350277 - DNA, 201 bp, Homo sapiens
atggcaaaagcatcgttttctctttctcatctcttcctgttcccctctcatgtatacttaccctccataactgaaattatcaagcttttccaagcacagtyttagacacacagacccagctccgaaggtcacaggccaagatggagacagttcagctccccctgccccagagtattgagacctgggatggattgtaaaagg

SEQ ID NO: 350278 - DNA, 201 bp, Homo sapiens
cgtcatacaaggagttactcaattagctgcatcactgaaacctgaagtgatgtgatagcctggccttgttattcatgtgggcagaactctttaacacattytctcagaatggcaaaagcatcgttttctctttctcatctcttcctgttcccctctcatgtatacttaccctccataactgaaattatcaagcttttccaa

SEQ ID NO: 350279 - DNA, 201 bp, Homo sapiens
tccaggccaggtacatttgaaactctgtagataatttattatgggattttctcactgatacaacatgtaagagttaagcatgtgtatgtatgtgtgggtgrgggtagtgtatgtgtgtgtataatacatttgtagtttcttgtatgaattcatttttatgttcctttcttctcacctctattatgcttccctcacccccac

SEQ ID NO: 350280 - DNA, 201 bp, Homo sapiens
aatgtattgaacttgctgccttcaaataacttgtgtcaataaaaacatgatggtcttttttgcttattatctaagcatcatagcatcctagatcaaaagcmaatagtcataataagaaaaacaggttagaaattctagatatattagcatacattcatagaaccaatgagaacattgctttggggcaggaagatgggagaa

SEQ ID NO: 350281 - DNA, 201 bp, Homo sapiens
agatttagaatcagacatgcctgtgtttgagtcttggttctactaattcttgtaatatggaatgaattatttgacctcattgattctcagtttccttatgrtatgtgttcattgtatagaagctaatgcttttgaacatcttaatttttctggtggggggagctgatttaattttcacaacagatctgtcattttgcatta

SEQ ID NO: 350282 - DNA, 201 bp, Homo sapiens
ccatagatgcctcctctttgaagaaacctagcacagcctctgatgcatagtaggtgcttaataaatatttgtgtttttttatttccatttatttttgtaayagcattgttttattattaataatagttcagtgttttctcaatttacacaaaaaaggatgtatattataacaagtgagtcaatgcatattacagactaata

SEQ ID NO: 350283 - DNA, 201 bp, Homo sapiens
aattaatatccatatagttttattaaggcaggtacagcaggccacaataaccactcctggctaatttgaaaatgctttttgaggaaatgattttttccatytaaacccaggcattattttttcttaggttgatgtgctcctaatcaattgaaccaaagggaattctctcttgccaaaaaaaaaaaaaaaaaaagggaaagt

SEQ ID NO: 350284 - DNA, 201 bp, Homo sapiens
caaatgaaggaactggaggtgtcagcatgatatgtaaatgtatgagagttttagcttgagtccaagtagaaattgaatggattaattgagatggtgacacrgaagagcaggaggaacacatggattttattttggatgtaaaggctgtgtggccttccaataggtagatatgagcatgttgagatgtcactgtttaatagg

SEQ ID NO: 350285 - DNA, 201 bp, Homo sapiens
aggaaacaatgaaaataaattataaccatacattgtggccagggttctcagatgaggaacaaggtgctttgagaacacacagaaggattgtgtatgttgtytaggacacctttcccccaccatttcccttttgcctggaactctcatgctcattcttcaggatctaaccatagatgcctcctctttgaagaaacctagcac

SEQ ID NO: 350286 - DNA, 201 bp, Homo sapiens
aaaagcaattgatgaaaagagacaaatgaaggaactggaggtgtcagcatgatatgtaaatgtatgagagttttagcttgagtccaagtagaaattgaatrgattaattgagatggtgacacagaagagcaggaggaacacatggattttattttggatgtaaaggctgtgtggccttccaataggtagatatgagcatgt

SEQ ID NO: 350287 - DNA, 201 bp, Homo sapiens
ggctaaatagcataagaaaagggtgaaagaagcatgaaaacaagagaaagaaaaaggttttccaaaagctaggccacaatgaatagcctagacttggcttytatgtcctcactctagtgaaggaaacaatgaaaataaattataaccatacattgtggccagggttctcagatgaggaacaaggtgctttgagaacacaca

SEQ ID NO: 350288 - DNA, 201 bp, Homo sapiens
tactgcatgtattaatagcatctttgttagagcatgggctctgtaactgaactgcttgagtttgaatcccagcttcatcaccttttagccttaagtccatygataagttacttaacctttctgtgtctcagttacctctgttgttgagtaccaatgtcatggaattgtttggattacctgattgagtgcatgtaaagcacc

SEQ ID NO: 350289 - DNA, 201 bp, Homo sapiens
tgttttaactcagttgtttgaaactgtgacctgatggaaatcatgtcatacacagagtttaggtatctaactcagccttcaaaagcctatttaacccatgwtgtacttaaaatatattattaatcgtggactaccatgaggtacagtgtttccacgagaaagcaggtggaacatcttgattcttgtcatatgtctggatat

SEQ ID NO: 350290 - DNA, 201 bp, Homo sapiens
aaaaaaaaaaaaaaagagttgggaactctacttgctgtgtaatcttgaacaatctatttaagctctttaagcctcaattcccttattgacaaggttttgamtatcaaattagttacaatatgtaaatgtcatctttggcccatagttgatactccataagagttcactacatcattaacattattgttattaagaaaataa

SEQ ID NO: 350291 - DNA, 201 bp, Homo sapiens
cctgcggtaaagtagtcaccatgacctcatcctgtgctgcttttttttttttttttggtgataccactctctgtgattcccaaggtccctgggagacttaractcaaccttctgtctttcctggagatatcctgtagcctcgtgagaactggggccctggcttgaaccaaaaactttttttttttttttttttgcattgac

SEQ ID NO: 350292 - DNA, 201 bp, Homo sapiens
tatatatatacacaaagccctaggaagctgcagaggaggcaaagaaacctcgctgagatttttctaacagcgcctagaaaccaccgccaggctccagcccygggctgggtcaaggaattcgagggatgcaggctgaacgcaccggttgaaactctgggcgccgcatcggcactttgcgccttggtgggctttgcgctcgga

SEQ ID NO: 350293 - DNA, 201 bp, Homo sapiens
aaaaaatattataggcaaagccaagagcatacaagtagccaaaatttcaaagcactggtgtcagatgcaactgtatttcagctctgcgggtccataacatyttcactggcatctcatcagccttcttgtttatctgtcgctattgccaccttccctatacttccagtgaacaccttaccttacaaggccaacctcagaatg

SEQ ID NO: 350294 - DNA, 201 bp, Homo sapiens
tttgttttttgttttgttttgttttattttgggatgagcctccttactctgtcacccagggggaagtatagtggcgcgatctcagctcactgtaacctccrcctcttgggttcaagcgattctcctgcctcagcctcctgagaagctgggattactggcgtgcaccaccatgcctggctaatttttgtatttttagtagag

SEQ ID NO: 350295 - DNA, 201 bp, Homo sapiens
gagcatacaagtagccaaaatttcaaagcactggtgtcagatgcaactgtatttcagctctgcgggtccataacatcttcactggcatctcatcagccttyttgtttatctgtcgctattgccaccttccctatacttccagtgaacaccttaccttacaaggccaacctcagaatgctggtgccttccaagtcacttccc

SEQ ID NO: 350296 - DNA, 201 bp, Homo sapiens
gtggcgcgatctcagctcactgtaacctccacctcttgggttcaagcgattctcctgcctcagcctcctgagaagctgggattactggcgtgcaccaccakgcctggctaatttttgtatttttagtagagatggggtttcaccatgttggccaggctggtctcaaactcctgatctcaggtaatccacccaccttggcct

SEQ ID NO: 350297 - DNA, 201 bp, Homo sapiens
gtcgaacagtactattcctggtaggtaaaactcaggtttttccagtttatactattaaggattaaatgtgcttggttttcttgcaagatgcactatccttytaaatttagtcatctaattaagatttccattcatgggaaatgacttcaaagagcacataagacaggcttttacacaaataagttttgattggattaattg

SEQ ID NO: 350298 - DNA, 201 bp, Homo sapiens
tagaattggataacacttcattctataaaacagagtgagttccaatgagctgagcagaggagtctggttatatagacataaaagggctgaggaaagaagamacagaaaacaaaaagcagattggttatttcacagtcacttctcttacacaggtcaaagcagagtggacttccttatcatgccagccagaactggcttgtt

SEQ ID NO: 350299 - DNA, 201 bp, Homo sapiens
tgacttgtattttctaaattgcataacaggtgtgttcacctgtataatacatgtcttcaatcttctcactataaattgaaaattaaagtgtaacatatacmcctatatattgctctataaatttgaggatatgatactgcagttctttcagaaaaacactgattgtaattaatgtgaagtcgaacagtactattcctggta

SEQ ID NO: 350300 - DNA, 201 bp, Homo sapiens
atgtgtatacaatgaggctatatggaataatctgttgttcctaggctatgtaccaatgtgtacagcttgttactatactcaaaactgtgacagttgtaacrcagtggtatttgtgtatataaacatatttaaacagaggaggtacagtaaaaatatggtataatagattaaaaaatggtacacctgtatagggcaattatc

SEQ ID NO: 350301 - DNA, 201 bp, Homo sapiens
gaggttgaagtcaagattcctttaccagcttgaagaggtaaacctgtaatacacaatttaacatcttaccctcactttctttatctgcaaaatggggcctytaaatctacctctctcgcacaagtaattctatttctgtgaccaattttagtttagtaaactaaagagaaaaaatataatattggtttagagttttaagga

SEQ ID NO: 350302 - DNA, 201 bp, Homo sapiens
gtgtggattctctccccaactcctcttccttttgttagctcattttatatgttaaaaaaaaagttgtttgagaaaggttattcatggcatcatttaggcttttttttttttttttttttttactttttagtaggatgatctcatcttcagcacgtgccttacagattgcagggcctgtctattccctggaaccacaactgc

SEQ ID NO: 350303 - DNA, 201 bp, Homo sapiens
agctcctcaaaaggctgaaagtcacagtgagcacagtttgctttaactgtaattgtcttctgaaattttaggttgtgtgcgtggtgaataatttcaaaggragacaagcagaaaatgagcatatacacatggataatctggcacagatgccaatgatcagcattcctcgagtagaaagtcctttggaaaaggtaacatctg

SEQ ID NO: 350304 - DNA, 201 bp, Homo sapiens
tatgtactgggcattttaaataagttatttcctctagaatctcctgcggtaaagtagtcaccatgacctcatcctgtgctgcttttttttttttttttggkgataccactctctgtgattcccaaggtccctgggagacttagactcaaccttctgtctttcctggagatatcctgtagcctcgtgagaactggggccctg

SEQ ID NO: 350305 - DNA, 201 bp, Homo sapiens
gcatgcaaagttgtttaggctgaagaaagcttggtaggttgaaggaactacaacaatgcctagactgggaaggtgtatagcacagaggtagctaggttcaraacataaagctgttgagtcaaaaatgtattacaatgatactgagaggttgaagtcaagattcctttaccagcttgaagaggtaaacctgtaatacacaat

SEQ ID NO: 350306 - DNA, 201 bp, Homo sapiens
tcatgaaagagaaggtttctgagaggaggtgatgttgctagtcacggaagtgaaggacgagtgttctcagcaaacagcatgcaaagttgtttaggctgaaraaagcttggtaggttgaaggaactacaacaatgcctagactgggaaggtgtatagcacagaggtagctaggttcagaacataaagctgttgagtcaaaaa

SEQ ID NO: 350307 - DNA, 201 bp, Homo sapiens
acaggtgaccactgtacaacagaaacatgtactttggaactgaagacatctcaaccatatgacaacatagattttttctgaactagcaaaaagaaagaaargaaggaaggaaggaaaggaaaaagaggtagaatttactgtttgctaccagacattggcaaagagccaccccactgattcaggtccctgataattctcccc

SEQ ID NO: 350308 - DNA, 201 bp, Homo sapiens
ttgggtctggctttgtatcttagtagctaatgaccttacacaagtcatataatctctctgtgccattgtgtccttatctatatgctgaatacaataaaatratgccatcatggggctgctggaaattatgaatctttttacattttttaaatttttttttcacttttatgggtacatagtagatttatatatttatggggt

SEQ ID NO: 350309 - DNA, 201 bp, Homo sapiens
tacaacagaaacatgtactttggaactgaagacatctcaaccatatgacaacatagattttttctgaactagcaaaaagaaagaaaggaaggaaggaaggaaaggaaaaagaggtagaatttactgtttgctaccagacattggcaaagagccaccccactgattcaggtccctgataattctccccagatacagttgtca

SEQ ID NO: 350310 - DNA, 201 bp, Homo sapiens
cagatgacttaagatcatctttctttcacttttataaatcaaaccactgtcaaaaaattacaacaaatttggtttaaatatcttaattggcttttatttgkgattctagaattggataacacttcattctataaaacagagtgagttccaatgagctgagcagaggagtctggttatatagacataaaagggctgaggaaa

SEQ ID NO: 350311 - DNA, 201 bp, Homo sapiens
tgccaaaagagttaaatgatcttaaggcccacttggggaaaatgataccctgaatgaggggattgatggtgtgcattgctaggctctggtcagaccaactytgaatattatgtactgatcttgacaacacagttttaaagtgggcattgataaaatagttgatactcaataaatatttgttaaatgagtgaattaatgttt

SEQ ID NO: 350312 - DNA, 201 bp, Homo sapiens
aacagaaacatgtactttggaactgaagacatctcaaccatatgacaacatagattttttctgaactagcaaaaagaaagaaaggaaggaaggaaggaaaggaaaaagaggtagaatttactgtttgctaccagacattggcaaagagccaccccactgattcaggtccctgataattctccccagatacagttgtcagag

SEQ ID NO: 350313 - DNA, 201 bp, Homo sapiens
ttatcaaatataggccagaatatacaacctgaattagcagaggagacttgatactgaatcacagcttggattatagctctataactttctcctgcctcagwtcagagttttcagagatcagagagagtttagggagcaagggaaaagaaatatatttaagcacctatgacttcgtgaagagagtggggatggtgggacaga

SEQ ID NO: 350314 - DNA, 201 bp, Homo sapiens
gtcacattttgcctctgtaattactatttcacattcctatatctttaatagtacatagcacatatattcataactttaaattttcactacttaagcatttmtatagtatggtatgtgctttttctttttttgttttttgttttgttttgttttattttgggatgagcctccttactctgtcacccagggggaagtatagtg

SEQ ID NO: 350315 - DNA, 201 bp, Homo sapiens
cttctaacatgcctgtagatgtggaaacaactgggttgggtttggagatgctggctggaggactccttgtctctagctgagtctatggctgcttatggccrtgtcagcatctgcacagcacaggacccttcagcagcccacttcagaatgctctttacacactctaaaaagccctaaaacttaggaccttttaactcttat

SEQ ID NO: 350316 - DNA, 201 bp, Homo sapiens
ggtgactcctctgtttgtccaagtgggctaacattagctaaaattggtcatgcatttcttatacaccagccactgtgttaggtgcatttaacccattgctycatttaatactccccaggatagtactttccttaatcatattggggactaacattaaatatatttattttataaatgagaaatagaagtttagtgagatta

SEQ ID NO: 350317 - DNA, 201 bp, Homo sapiens
taagcaatcccatagttggagatactgcctgaaggggatccatgcacatcctgaggatcaggaaattttgttacacaccagtaaacaattctgagtacttytaacatgcctgtagatgtggaaacaactgggttgggtttggagatgctggctggaggactccttgtctctagctgagtctatggctgcttatggccatgt

SEQ ID NO: 350318 - DNA, 201 bp, Homo sapiens
ctacacaaagcataggatcgattgttctgaataaataggtctaattccttaaataaagtaaccatttgcattttctctggcaattctgttaaaaccaacaragactgtctgatacaccttggcatttatagaagaccccacacgtcctcctactaagtagcctcttcaccactccagtctcaactgggaaaacttttaagc

SEQ ID NO: 350319 - DNA, 201 bp, Homo sapiens
atataaggatgaataggatttgatagaaaatgggatatttccagtagatctaagggaaattaatatccatatagttttattaaggcaggtacagcaggccmcaataaccactcctggctaatttgaaaatgctttttgaggaaatgattttttccatctaaacccaggcattattttttcttaggttgatgtgctcctaat

SEQ ID NO: 350320 - DNA, 201 bp, Homo sapiens
ttacatcacctttttgtaaaaacactttttcatcaatgttaggacatagagaaggatgtgaaaatattagaacatttttgaagcttaaacttgaatcaagrcatattacagatttccctttcatgtatctcactgtgagaggaaaagattcattactatgtgtggattctctccccaactcctcttccttttgttagctca

SEQ ID NO: 350321 - DNA, 201 bp, Homo sapiens
tggctatcttttctcttctccatggtgtttccaaccttaactgggaagagtcaaaggctgacttcaaaggtgacttgatagccaggacatgcagttatccraaggattgttcattcaccttactgcacctgggctaggagaaggtgaagaccacaacagcctacccataatcttctcacatgccttggcttccacacagtg

SEQ ID NO: 350322 - DNA, 201 bp, Homo sapiens
ctgggtctatgagactggcataggtcagcacatggagataatatatgaattatccattttaactgatgccatatagaaaatatagagaaaaaggctttatytggtaaaagaacaaaaatatttaaaaataaatataaggatgaataggatttgatagaaaatgggatatttccagtagatctaagggaaattaatatccat

SEQ ID NO: 350323 - DNA, 201 bp, Homo sapiens
ttttttgcttattatctaagcatcatagcatcctagatcaaaagcaaatagtcataataagaaaaacaggttagaaattctagatatattagcatacattyatagaaccaatgagaacattgctttggggcaggaagatgggagaaaaaaataaggaacaaattttgtgagttgactccattgtgatctgtttgttttagt

SEQ ID NO: 350324 - DNA, 201 bp, Homo sapiens
tttactatgctcacagactctgtaggtcagatatgtgaaaaaggcaaaatgtggctatcttttctcttctccatggtgtttccaaccttaactgggaagaktcaaaggctgacttcaaaggtgacttgatagccaggacatgcagttatccgaaggattgttcattcaccttactgcacctgggctaggagaaggtgaaga

SEQ ID NO: 350325 - DNA, 201 bp, Homo sapiens
ctcccagccagagtgtcactaagaaaaccatccctctcccctacccatagtatatgctgatccttcatctatggcctttccctgttctttcttcacggatwcctctcctttgtaattaacagataaggtgtgcattggcagtccttccagatgatcctcataggtcagactgcagtcaccccaacagcaaagcactgagct

SEQ ID NO: 350326 - DNA, 201 bp, Homo sapiens
ccaaacttagcataaaacaaccattttactatgctcacagactctgtaggtcagatatgtgaaaaaggcaaaatgtggctatcttttctcttctccatggkgtttccaaccttaactgggaagagtcaaaggctgacttcaaaggtgacttgatagccaggacatgcagttatccgaaggattgttcattcaccttactgc

SEQ ID NO: 350327 - DNA, 201 bp, Homo sapiens
tgcagccctgaactcctgggctcaggcagttctcccacttcagcctcccaaataaaatactatactttgcattcacactagtttattattttaagttttaracatgaataaaaactccaggtggtcacatagattggaagaattgaaatagctcaagttctctttcttcatttttacaattactatgctatcatgtctttt

SEQ ID NO: 350328 - DNA, 201 bp, Homo sapiens
attttaaagctataaatattcaatatgctattttatgtatcgactaaaatttgcacttacccagtaaaaatactatactttttttttttttttttgagacratcttgccctgtttctcaggctgcttaattatttgtacattcctcactgcagccctgaactcctgggctcaggcagttctcccacttcagcctcccaaat

SEQ ID NO: 350329 - DNA, 201 bp, Homo sapiens
atatatgcttcccacacaggagacaatacatgtggagaatttcccaatcacaagaaaggggttagatgctaagtagtgggaaaaaaattctttttaccttwgcaacctggattaaggctggtcccctttttaaggctttatctcatctttttatttaaaattaatctgcacatcttcagtggtgcacctagcatatttgac

SEQ ID NO: 350330 - DNA, 201 bp, Homo sapiens
tgtcctcttataatttaataaggaattatgtgctgtgttaattgtattactcttatctcatgggcattttgtttcaggttagagcgcagaatcaccatacktagcaaaatacaaggcaaatactatttgaacactatttttagattgattatgatatttatgacagtgtcaggcagaagagctcaagtttattgagccaca

SEQ ID NO: 350331 - DNA, 201 bp, Homo sapiens
ttttttttttttttttttgcattgactcaccacagttgaaactggttaacattcaaaaagcaaaaccaacaacaaactttacataaatccttaaaaaataktataggcaaagccaagagcatacaagtagccaaaatttcaaagcactggtgtcagatgcaactgtatttcagctctgcgggtccataacatcttcactgg

SEQ ID NO: 350332 - DNA, 201 bp, Homo sapiens
tttaaaaaatactttatgtccattttgattacatttaaattgcccttacatgtaacttaactttattagcctcattttactagttaataatcagtaagcaracacttcagtgaatctttccagctaccaaatgttgaaacataatttatgtactgggcattttaaataagttatttcctctagaatctcctgcggtaaagt

SEQ ID NO: 350333 - DNA, 201 bp, Homo sapiens
ataacattttataagtatgagtatataataaacagcctgaacttccctctattcatgtgcactaatcattatgagtatatcacattttacccaaatgaaayaatgtgtagactatgaatcaaaacatatttttgcattgacacattataatttaaaaaatactttatgtccattttgattacatttaaattgcccttacat

SEQ ID NO: 350334 - DNA, 201 bp, Homo sapiens
atacctttgccagccaaagaaatgacgttaacttagtgatctattgcaacctcttcgttttctaattgataaaactgagactcggagaactgtctgataaygtatagactcaggcatgttcaggatcaaaaaccatgtccctcactttttcttatcaccatttttacaaacaagacctctgttccacatcgtaaatgttag

SEQ ID NO: 350335 - DNA, 201 bp, Homo sapiens
gtaatgtgatatttagcaagaatttagccactaaagagataatcatagaaaaatatatatcacatttaaaaaatctgtttgtaggccggtcacaatggctyacacctggcctgtaatcaatcccagctctttgggaggccaaggcaggcagatcacttgaaaccaggagttcaagaccagcctggccaacatggagaaacc

SEQ ID NO: 350336 - DNA, 201 bp, Homo sapiens
atttttattttttatttttaaaattttattattattgtactttaagttttagggtacatgtgcacaacgtgcaggttacatatgtatacatgttttatgcrgagggttttctatttcagtggtagccccagtaagctattgttggattgccaagtgtatatgggacacaataatagacgataagctaggttaattaaggga

SEQ ID NO: 350337 - DNA, 201 bp, Homo sapiens
tttaccaagaataccttgtttattgtgtaagcaaacagtagcaaataatcttcctggtatgtttaattcattatttcttaaatatgattcacctgcattaraagcttctcgaatgcatttttgaagtgccaactcctaggccccattcttcatttactaaatcagaatctttaggggagggcttaggaatatgtattttta

SEQ ID NO: 350338 - DNA, 201 bp, Homo sapiens
taataaactttctacataccttatatccttctaatatttgcattatctctgaaagcaataattattattcttatctaacatttgggaacatgatggcttaraaagattaagtatcttctccaaggaccaaggctaagaatgttacacccagaattctccccctactctgtcatactctcaagtgtggtttttctattacag

SEQ ID NO: 350339 - DNA, 201 bp, Homo sapiens
aggaataagatctcttgtgcaacatggtgactatagttaataagaatgtagtgtatacttaaaaattgttaacagagtagattctaagtgttttcaccacaaaaaatgctaattatgtgaggtaatgcatatgttaaatagcttgatttaaccattacataattcacatatttcacaacattatgttgcacaccataaata

SEQ ID NO: 350340 - DNA, 201 bp, Homo sapiens
actttacataaatccttaaaaaatattataggcaaagccaagagcatacaagtagccaaaatttcaaagcactggtgtcagatgcaactgtatttcagctytgcgggtccataacatcttcactggcatctcatcagccttcttgtttatctgtcgctattgccaccttccctatacttccagtgaacaccttaccttaca

SEQ ID NO: 350341 - DNA, 201 bp, Homo sapiens
cattagtgtctagcactgtgcccttaactcagaaggcatttacataaatacattcatcataattataattattttattttcattatttgaatttatctgaragcaggctgggcacggtagctcgtgcctgtaatcctagcacgtcgggaggcagacgcgggtggatcacctgaggtgaggaattcgagaccagcctggcca

SEQ ID NO: 350342 - DNA, 201 bp, Homo sapiens
ctgggcacggtagctcgtgcctgtaatcctagcacgtcgggaggcagacgcgggtggatcacctgaggtgaggaattcgagaccagcctggccaacatggkgaaaccccatctctactaaaaatacaaaaattaacctggtgtggtggcatgtgcctatagtcccacctacttgggaggctgagacaggagaattgcttga

SEQ ID NO: 350343 - DNA, 201 bp, Homo sapiens
taccaagatatttggaaagtaacattgagcagattcagtaactggtcaagtataagaggtgtaaaggattaattcaagtttttagccttgtgaatctgcaytggggcggaggtgggtgttggggagtggggtggcatgttgcctttccttgaacgtgtccagagaagagatcaagtttggagtgggtgctggagggggcag

SEQ ID NO: 350344 - DNA, 201 bp, Homo sapiens
gtgtcttatttccattttaaggagaaagggacataggttaagtaatacatccaaggtcatacaactggtctgtgttctgaaacaagaatatgaatccttamtttccattttcaaagaaatatgttccatatttgtcactttagagctccaaatcataatcactgtgctgcatgatattataagattatattattaaaagtt

SEQ ID NO: 350345 - DNA, 201 bp, Homo sapiens
tctcaccaaataggcaagactagtctcttttaatttagttccactcaatgtcttctgatttaacattgaaccctggcttacttgaaaaaaaagtatagttaaaaaaagaaagaggaaaagggggtagaaagaaggatgaaagtgaagaggtatctcataatcttttattcacactggggtaaaagtaggtcaaacacctaa

SEQ ID NO: 350346 - DNA, 201 bp, Homo sapiens
aaataggcaagactagtctcttttaatttagttccactcaatgtcttctgatttaacattgaaccctggcttacttgaaaaaaaagtatagttaaaaaaaraaagaggaaaagggggtagaaagaaggatgaaagtgaagaggtatctcataatcttttattcacactggggtaaaagtaggtcaaacacctaatctcctg

SEQ ID NO: 350347 - DNA, 201 bp, Homo sapiens
tttttatttatttatttattattattatactttaagttttagggcacatgtgcacaatgtgcaggttagttacatatgtatacatgtgccatgctggtgcrctgctcccactaactcgtcatctagcattaggtatatctcccaatgctatccctcccccctcccccaaccccacaacagtccccagagtgtgatgttccc

SEQ ID NO: 350348 - DNA, 201 bp, Homo sapiens
agcagccagaaccacagccaagaccagacaacaggaagggtacgctgaggatacacacggctgtgactgcaggacccaggtatcgctggcaccaccacttytccatgcctccacctgcactgccaccactgtggctgccagtggtggggatgtttcacttcacccacttctttgcatcatttgcagagcatctggttgagt

SEQ ID NO: 350349 - DNA, 201 bp, Homo sapiens
tgtgcacaatgtgcaggttagttacatatgtatacatgtgccatgctggtgcgctgctcccactaactcgtcatctagcattaggtatatctcccaatgcyatccctcccccctcccccaaccccacaacagtccccagagtgtgatgttccccttcctgtgtccatgtgttctcattgttcacttcccacctatgagtga

SEQ ID NO: 350350 - DNA, 201 bp, Homo sapiens
atttatcctgttgaagggacaacttttatatgaaaccttaaaagttattttttcacatgtatcaatactgtgttcttgactaatttctttttgtataagtyatttaataaaaaaagcaatatgcaacaatatgcttagaattaaaactatttaaagaaattgatgctttcctaaatactgttaagcaaattacattgtacc

SEQ ID NO: 350351 - DNA, 201 bp, Homo sapiens
aggtgagctcctcaacaataactttgcaataattaaaactaccctaagtaactttggcttatatggcaaagtaactttggcagtaattgactgaaatgaayctttctaaactttacagtactaaagaaagcaaacttttaatttcctctgtaatttcaacagagatcagcaaataaatataaccaaagattgtccattact

SEQ ID NO: 350352 - DNA, 201 bp, Homo sapiens
cccagccatctcctgcttttgtgtcttctgatttgattattgacattcctaccctcgttacccaagcctgaaatctctgagtcattctcagctcctccctyttccacacccccgcatccagatgtctgattaattctgttggttccacatttgaaatacctctgaaatccagactcttcatatatgttattctactggttg

SEQ ID NO: 350353 - DNA, 201 bp, Homo sapiens
tggtacaacttttatggtgatatactatacaacagccaataatgatgaaaaggcttgggaaacaaataatccagaaatatatgactaaaaagaaaaacatmtaactattgtaacctaagtatatgacattttaataaatcagtacttttagaagtattactttgggatagttttaaaaggtcctgttggattttattccca

SEQ ID NO: 350354 - DNA, 201 bp, Homo sapiens
cccagggatgacaagcttgcatccattggctcctacctatcagcaagcacatgcctgctctgctccctcactatatgtcctattgccacccaagctccagktcccagaaaagcaagagttgggagaaaaagcctgtgaaataatttatcctctgtcccacattcccatggacatttatcccagaagcatagctaaacttct

SEQ ID NO: 350355 - DNA, 201 bp, Homo sapiens
catatgttcattagcataagtccagatgccagaaatgtaggtacctattcactgttttgttttgtttttagttgacacatttcccttatcgtacttatggtttttttttgttgttgttgttgtttttgagacagagtctcgctctgtcacccaggctggagtgcagtggcacgatctcagctcactgcaagctccgccttc

SEQ ID NO: 350356 - DNA, 201 bp, Homo sapiens
gtgctagccaactcttgtttatcttgtcagcatgatgtcttgtatataagtgatcaatgactaaactgggggacatccaaactatctctatctccttagtytaagttatggcagagagtgggagggttaatatagcactgacatcaactgtgatgtaaggaattgcctgtaccaggtgaatgtgaactgttcctcatcctc

SEQ ID NO: 350357 - DNA, 201 bp, Homo sapiens
aaaggttaatagattcaaattttcttatcaattagtcacttaagatttttattcacctttgcaaaagaatatttttaaagagtcaataaaatgttttgaartctttttagaagcttctgcacaagataggtgttcctgagtgggcttaatttgagagtcctcaattttagatgcactctgtaaagttctgtgttgttcacc

SEQ ID NO: 350358 - DNA, 201 bp, Homo sapiens
aatttagtgtctggcaagggcctgctttctggttcatacatggtgtctagtcattgtgccctcacatggtggaaagtatgagctagctctgtgggctctgmcctcaaaacctaagcactccacctcttaataccatcactttgcgagttaggatctcaacatataaatttgtgagggggatacacacattcagataatagt

SEQ ID NO: 350359 - DNA, 201 bp, Homo sapiens
atcaggaagactttgtaaaccaacctgaggctttatgacttgaattaaaaagcaatgtggaactgagaaatgacattacagaagcagtgcttcagaatggytgtgtttgattcaattccataaatatatattgaatacctagaatgcataaagtctctacatactgttataaactcctttggcagcttaaaaatggtctgg

SEQ ID NO: 350360 - DNA, 201 bp, Homo sapiens
ccatagttaaagatctgatttgagttcactatgataatggcacaactcatagggaaatatggtatttctgttgtgtaccatgttttaaaataaaaaccaamattatgactaataacagatcagatttttaggaatttcatacagtattttaggacactcattagtaatatacccataaatatcacttaaagaaaaatcact

SEQ ID NO: 350361 - DNA, 201 bp, Homo sapiens
atgcataaagtctctacatactgttataaactcctttggcagcttaaaaatggtctggtagagagtaaagagagaattaaaattgaaagaaactaaaggcragggaaagcttttaagaagatcaacacagaatcttgggcataaaatcaaaatccctagacagagtctcaggatttggatttggatttggatttagctggt

SEQ ID NO: 350362 - DNA, 201 bp, Homo sapiens
tctatggaatatgattgtaagagtatctggtaatgatgagtcccacccaatgtccaggagggatgaggtcctgctggcaagcatcacgggaagtgcttcaraggtgagtggtacttggggtgagtcttggagatggacatgatttgaacagggggagaagaagtgtcccagggaagggcaatagcagaagcaaaggcaaag

SEQ ID NO: 350363 - DNA, 201 bp, Homo sapiens
gagaatatttcacacactcatcattttgttttaaaaatctttaacatagtcacattttgcctctgtaattactatttcacattcctatatctttaatagtmcatagcacatatattcataactttaaattttcactacttaagcatttatatagtatggtatgtgctttttctttttttgttttttgttttgttttgtttt

SEQ ID NO: 350364 - DNA, 201 bp, Homo sapiens
tgtcaaacaagcaaatttgatgaagcatctgctatgtaatacatcaaaaatatttactgagcatgcactcatactgtgactgctatactattattatgacwactggtgccatgaccactattattagtcgattgatgtttcacctattagccttcagctaagtgttattgatgtagttgggggagagtacaaaagacattt

SEQ ID NO: 350365 - DNA, 201 bp, Homo sapiens
atgatttgaatcatacaggcgtatatatgtctataaatatatgtttgtacatacacataatatgctatgctaataaaggaaataccttcatgaaaagtcattttttttattgaatgtttcagatgtacatcaccaacacaatcaaagccaagggaaccagacttgctaagccagttctatgcttgggcttaatgtgtttgg

SEQ ID NO: 350366 - DNA, 201 bp, Homo sapiens
ctctccttctcaacaggtctttctcacaagggtcatcttccctgatggcatctcagagccgccttccaatagggtaatgacccaagctgcagggtatcttragacttaggttcctaagcttgttacacatctctgtcactgtattttattgtccagagaaatcacaaggccagcccagattgttgggggtagagaaataga

SEQ ID NO: 350367 - DNA, 201 bp, Homo sapiens
caaatggaaacattaaaaacacttaaacacttcaacagcttccccctgctaataatattgttgaggttgatctaaaatgaaaattcagataaaacaagaayggatacagtaagaataaaaagaaaaaaagacagttggactatctgtgcttggtgtttctagatgattaagaatgttatgctaagaattggccatttgtaa

SEQ ID NO: 350368 - DNA, 201 bp, Homo sapiens
atcttttatgcaacattaagaagttgattcttatcctgtaagcaattgagtaccttccaaaaaggacttccttaaagtccttccataaagggactttaagraagtgagtagtttaattcctaaatggcttgttcagagaggagaataagagagcagcatggaagaacaaaagaatcggaaaggctatcgtaagaatccagt

SEQ ID NO: 350369 - DNA, 201 bp, Homo sapiens
tcctcgggtcacttccaattctgaccttagatttttgaaaatgtcaaggaaaaagggtcagttacatttattggcctctgtttccgctatgtgttgctgcwttataaaccaccctagaccttaaaacaacaacaatctgttactgtcaggatacgtagggttgacttgcagttttcctgctagtcaatccttgcttctttc

SEQ ID NO: 350370 - DNA, 201 bp, Homo sapiens
gtattcataatgctggtttttatcaagtatgtgtcctctaaatatggcatacacaaatggaaacattaaaaacacttaaacacttcaacagcttccccctkctaataatattgttgaggttgatctaaaatgaaaattcagataaaacaagaatggatacagtaagaataaaaagaaaaaaagacagttggactatctgtg

SEQ ID NO: 350371 - DNA, 201 bp, Homo sapiens
atgaaatgacctcctcgggtcacttccaattctgaccttagatttttgaaaatgtcaaggaaaaagggtcagttacatttattggcctctgtttccgctaygtgttgctgctttataaaccaccctagaccttaaaacaacaacaatctgttactgtcaggatacgtagggttgacttgcagttttcctgctagtcaatcc

SEQ ID NO: 350372 - DNA, 201 bp, Homo sapiens
tttctagctgtattcataatgctggtttttatcaagtatgtgtcctctaaatatggcatacacaaatggaaacattaaaaacacttaaacacttcaacagyttccccctgctaataatattgttgaggttgatctaaaatgaaaattcagataaaacaagaatggatacagtaagaataaaaagaaaaaaagacagttgga

SEQ ID NO: 350373 - DNA, 201 bp, Homo sapiens
atctggggtttgggctcagccgagacagcacaaatagctgggcctctctccttctcaacaggtctttctcacaagggtcatcttccctgatggcatctcaragccgccttccaatagggtaatgacccaagctgcagggtatcttgagacttaggttcctaagcttgttacacatctctgtcactgtattttattgtccag

SEQ ID NO: 350374 - DNA, 201 bp, Homo sapiens; identical to SEQ ID NO: 74775

SEQ ID NO: 350375 - DNA, 201 bp, Homo sapiens
aatttttctgagtatattatcaataccagatacttattgacgtttataccataaaatctgattatattatcaaagtcatttcttttacaattgctctactmatgacttgaaataataattgaatacagtcaacaaatttgcttataaaataatacataaacttatgagcagttgagctatagaatacattagatgggggaa

SEQ ID NO: 350376 - DNA, 201 bp, Homo sapiens
gagttactcaattagctgcatcactgaaacctgaagtgatgtgatagcctggccttgttattcatgtgggcagaactctttaacacattctctcagaatgrcaaaagcatcgttttctctttctcatctcttcctgttcccctctcatgtatacttaccctccataactgaaattatcaagcttttccaagcacagtctta

SEQ ID NO: 350377 - DNA, 201 bp, Homo sapiens
ctgtctatgggctccttatgaaccttgcttgagtcattagggcaatttaacgatcaactcgacattcaagagaaacttcacagggatgtagcccaagcccrcattttactatggtctcatacaacttggacaagtaagggctggactgtatctgagatggccttcgggggtgagggaaaggcaaattttttctgaagccgt

SEQ ID NO: 350378 - DNA, 201 bp, Homo sapiens
cataaataatcaattcctgttctgtatccaacatgcttaatagattattatgccataatttccttttctgcaaattaagaataatagactttatgtaaggrtaacacaattagactggctaaaaaggcacttatgttcataaagtactgaagagttgctgagtacaagtgaaagctctcttattttttcttttgtaacatc

SEQ ID NO: 350379 - DNA, 201 bp, Homo sapiens
gtataatcatctgcaaataaacaattagtggatgtctttagggctaaatagcataagaaaagggtgaaagaagcatgaaaacaagagaaagaaaaaggttytccaaaagctaggccacaatgaatagcctagacttggcttctatgtcctcactctagtgaaggaaacaatgaaaataaattataaccatacattgtggcc

SEQ ID NO: 350380 - DNA, 201 bp, Homo sapiens
ccaaatgttgaaacataatttatgtactgggcattttaaataagttatttcctctagaatctcctgcggtaaagtagtcaccatgacctcatcctgtgctkcttttttttttttttttggtgataccactctctgtgattcccaaggtccctgggagacttagactcaaccttctgtctttcctggagatatcctgtagcc

SEQ ID NO: 350381 - DNA, 201 bp, Homo sapiens
caaatgttgaaacataatttatgtactgggcattttaaataagttatttcctctagaatctcctgcggtaaagtagtcaccatgacctcatcctgtgctgyttttttttttttttttggtgataccactctctgtgattcccaaggtccctgggagacttagactcaaccttctgtctttcctggagatatcctgtagcct

SEQ ID NO: 350382 - DNA, 201 bp, Homo sapiens
tgctcattcattaatctgatccctcactgtgacagtgtgaacacagcagtgagcaaaaaagagcatctttgcatttgtggaacttggaagagacacatcartcaaagtattactttaaatgatgtttaatttcatactaagtgctctgataaaaataatcacagctccatgtaagcaaaaagcaaacaaacaaaaacaaaa

SEQ ID NO: 350383 - DNA, 201 bp, Homo sapiens
taggagcaatctctaacagaataaggagtccgtttcatttacagaacgtctcaacaccttggatcaacaccattttgagacagagttagcaaataagcaamtacccaaagaaagctctcagacaagaagctgtccttggattaggcttctcactattaggggttcatgccagatgaaggaaaccttttgtgaactggatag

SEQ ID NO: 350384 - DNA, 201 bp, Homo sapiens
aagctctcagacaagaagctgtccttggattaggcttctcactattaggggttcatgccagatgaaggaaaccttttgtgaactggataggtaccccacayctggatgggaagttacctttggccaaaaccaaaagctgcctccaaggattgcacatactcctggaatagaagttagactgaactaatcagtagtcttcct

SEQ ID NO: 350385 - DNA, 201 bp, Homo sapiens
aactggagagggatgaaataaaaggaactatgtatatgcatggaatattttatagtttctaaaatatttccattttggtttattgtaaactgaaattcacacacacacacacacacacacacacacacacacacacacacaagcaagaagttaaaattatttgttttcttccccaggaatttatacatttggactgtttgc

SEQ ID NO: 350386 - DNA, 201 bp, Homo sapiens
tgaagattgaataagtaatttgttaataaaatgcttagaacattgccgtgaagagcaatcactcattaaatggtagctataattgatactagcagtattartattattcaattatcatcccacatttattttgtctcaatgaggacagaatatcttgagtgttaacagatgtaaagaaatgcaaaagtaagaaataattaa

SEQ ID NO: 350387 - DNA, 201 bp, Homo sapiens
ctgggtgcggtggctcacacttgtaatcccagcactttgggaggccaaggcaggtggatcacctgaggtcaggagttcgagggccgacatgacaaaacccygcctctactaaaaatacaaaaatcagctgggcatggtggcatgtgcctgtagtcccagctacttgggaagctgaagcaggagaatcgcttgaacctgggg

SEQ ID NO: 350388 - DNA, 201 bp, Homo sapiens
ctggagagggatgaaataaaaggaactatgtatatgcatggaatattttatagtttctaaaatatttccattttggtttattgtaaactgaaattcacacacacacacacacacacacacacacacacacacacacacaagcaagaagttaaaattatttgttttcttccccaggaatttatacatttggactgtttgcta

SEQ ID NO: 350389 - DNA, 201 bp, Homo sapiens
ttggtgctaagttgatcatggaggtttattttgctttactgaaaattttcaggaataataaaaaaaaaaagctctattcctatttttgtaagtaccattgkttctccgggaaaaaaaaaattgtgagagttatttaactctcagtcatcaaatttataattcagtgttcagtgacattagaatgtttaaatttacctttgt

SEQ ID NO: 350390 - DNA, 201 bp, Homo sapiens
acttcaggtccaatgctctgttggctgcagttgcccactgatttgatttatagcataaatgatggcattcctagcaggcaagggagagttaaaacatattragtatacatcaatatgttcttacaatatccacatgcttgttaatatataagtttagttacaaccaaacataaaaagaagaaaataatctatgtttaaaga

SEQ ID NO: 350391 - DNA, 201 bp, Homo sapiens
aagaataaaaagaaaaaaagacagttggactatctgtgcttggtgtttctagatgattaagaatgttatgctaagaattggccatttgtaagagattgccrtacgaggtaagtaaaacaaaataattgctactcttgaattctgcttttaagaaactgatttcaaaaacttcataaactccagttaatgatttgaatcata

SEQ ID NO: 350392 - DNA, 201 bp, Homo sapiens
gctgaggccggagaatcgcttgaattcaggaggcagaggttgcagtgagccgagattgcgccactgcactccagcctgggcgacagagcgagacttcctctctctctctctctctctctttcttcctctctctctctatctctcatatatacgtatatgtgtatatatatatgtatacgtatatgtgtatatatatatata

SEQ ID NO: 350393 - DNA, 201 bp, Homo sapiens
ttaagtcaaacccattgccaggtcatataatgtcagatttgctgtgtgtgtggagaattcttccattgacttaactaacaaagttttctgaaaggcaaagscaatgtgaaaaagttttgtgctttcattactgtcaagctttttctcagaggtcaccaatgacaacctccttgcttgaacatttacttctcttacttcttt

SEQ ID NO: 350394 - DNA, 201 bp, Homo sapiens
tatctgtaattgcagttatcaaactccttctaaattgaggatgcatttaaatcgaggagatttcttggtacttcttctgttgtattacaagaaaggttaccttcttcttataagcacagtctgctttgagctatttgtttgtttatggcatttaaagaaactcttggaaggagaacaaaagcctccaaagaacaaatagaa

SEQ ID NO: 350395 - DNA, 201 bp, Homo sapiens
ctcttggactctgtcagttgaataactgcattctcttctatgatcctttcatcatttaaacaagttgtgaaactcaaataactttatattatactttataktgtattttatttacatttccataactagacttgagcatctcaaagtcatgtggtgttatctgattcaagccaatttggtcatgcccagcttttaggttat

SEQ ID NO: 350396 - DNA, 201 bp, Homo sapiens
atctgtaattgcagttatcaaactccttctaaattgaggatgcatttaaatcgaggagatttcttggtacttcttctgttgtattacaagaaaggttaccttcttcttataagcacagtctgctttgagctatttgtttgtttatggcatttaaagaaactcttggaaggagaacaaaagcctccaaagaacaaatagaaa

SEQ ID NO: 350397 - DNA, 201 bp, Homo sapiens
aaggctctataaaggttaaacaaaatagtgcatgttcagcgaatttgtgacatgaatgactggaaaaagttccataaactatagtttgcttcctctcagtyccttttaccctacgtaagatttgtgttttgaaaatgtatttgcaggacaataagacaaagttgaggatagaagagatgggttatgcagaaccagggaaac

SEQ ID NO: 350398 - DNA, 201 bp, Homo sapiens
tctgtaattgcagttatcaaactccttctaaattgaggatgcatttaaatcgaggagatttcttggtacttcttctgttgtattacaagaaaggttaccttcttcttataagcacagtctgctttgagctatttgtttgtttatggcatttaaagaaactcttggaaggagaacaaaagcctccaaagaacaaatagaaat

SEQ ID NO: 350399 - DNA, 201 bp, Homo sapiens
ttattttttatttttaagataagaataggtaaagtatatttttaaaatatactatatatgcatggttaaatttaaaaaatttaatatatatttaatttttwaattttattttaatttcaggggttcatgtgcaggtttactatataggtaaacatgtgtcatggggtttgttgtctaaattatttcatcacccaagtgtta

SEQ ID NO: 350400 - DNA, 201 bp, Homo sapiens
tattatattttattatctgagtattttatagagaaaacacaaattataaagggtgataccaccaacctaggggaagggaaggaagtacttcctgtcctaaraagtggagggttggaggagagggaagggctgaatggcaaatgtgtccatgtaggtgagcacccttacgtcagaaacccaaagaaggcagttgatcactgg

SEQ ID NO: 350401 - DNA, 201 bp, Homo sapiens
gaatttccagttaacctcatataaattgttgaaacagacagacatgaaatgacctcctcgggtcacttccaattctgaccttagatttttgaaaatgtcarggaaaaagggtcagttacatttattggcctctgtttccgctatgtgttgctgctttataaaccaccctagaccttaaaacaacaacaatctgttactgtc

SEQ ID NO: 350402 - DNA, 201 bp, Homo sapiens
ttctcatcacttaggtcccacttgtaagtgagaacatgtggtatttggttttggttttctgttcctgcatgagtttgctaaggataatgaccaccagctcyatccatgttcctttagaggacatgatctcatttatttttacagctgcatagtattccatggtatatatgtgctacatattctttatccagtctaccattg

SEQ ID NO: 350403 - DNA, 201 bp, Homo sapiens
agtattttatagagaaaacacaaattataaagggtgataccaccaacctaggggaagggaaggaagtacttcctgtcctaagaagtggagggttggaggaragggaagggctgaatggcaaatgtgtccatgtaggtgagcacccttacgtcagaaacccaaagaaggcagttgatcactggataacagaaactccagaga

SEQ ID NO: 350404 - DNA, 201 bp, Homo sapiens
tcagtgacattagaatgtttaaatttacctttgtggtatttcttttcatataaatgggtaaagtttttttcaattaaaagcaaatgaacttcaaggttgaraatgaataattatgtttggtgaatttccagttaacctcatataaattgttgaaacagacagacatgaaatgacctcctcgggtcacttccaattctgacc

SEQ ID NO: 350405 - DNA, 201 bp, Homo sapiens
ataaattccacaaaatacttctgtgctctacaaatacaatttcagtcctcacagcaatttttaaacatgatcctcattataatggtaaaaactgctaatayttagtattccttctcaccttcttccttttagtaattgaattccctaattttagctatattcatgactgcccagctacaatctatatttcccagcttccct

SEQ ID NO: 350406 - DNA, 201 bp, Homo sapiens; identical to SEQ ID NO: 273026

SEQ ID NO: 350407 - DNA, 201 bp, Homo sapiens; identical to SEQ ID NO: 273027

SEQ ID NO: 350408 - DNA, 201 bp, Homo sapiens; identical to SEQ ID NO: 273028

SEQ ID NO: 350409 - DNA, 201 bp, Homo sapiens; identical to SEQ ID NO: 273085

SEQ ID NO: 350410 - DNA, 201 bp, Homo sapiens; identical to SEQ ID NO: 273046

SEQ ID NO: 350411 - DNA, 201 bp, Homo sapiens; identical to SEQ ID NO: 54317

SEQ ID NO: 350412 - DNA, 201 bp, Homo sapiens; identical to SEQ ID NO: 273047

SEQ ID NO: 350413 - DNA, 201 bp, Homo sapiens
agctcttcctccaaaatataggatcgcttttcctatcatcactgcctttacccttagctatctcaccatcaactcttgatactcttatccaggcttgggggctccccttatagtcttcaggtggcagtcaaggtgaacttcttaaaaaaaaatcagatcagatctcctccaaatattctccaaatggcttatggaaattca

SEQ ID NO: 350414 - DNA, 201 bp, Homo sapiens; identical to SEQ ID NO: 273066

SEQ ID NO: 350415 - DNA, 201 bp, Homo sapiens
tttagcaacagttgttttttcagatgttcccacctccacagtaatctttgtggaggcaagtgacaataaagtatacctacttattccaacatttaaaaaamaaaacaaacaaacaaaaaaaaaacagaaaaccctttgtatagtcaagcatgcaaggtttttttcttaattcaaaatcaaataatagaccaggacctacag

SEQ ID NO: 350416 - DNA, 201 bp, Homo sapiens; identical to SEQ ID NO: 273087

SEQ ID NO: 350417 - DNA, 201 bp, Homo sapiens; identical to SEQ ID NO: 273088

SEQ ID NO: 350418 - DNA, 201 bp, Homo sapiens; identical to SEQ ID NO: 273030

SEQ ID NO: 350419 - DNA, 201 bp, Homo sapiens; identical to SEQ ID NO: 273092

SEQ ID NO: 350420 - DNA, 201 bp, Homo sapiens; identical to SEQ ID NO: 273031

SEQ ID NO: 350421 - DNA, 201 bp, Homo sapiens; identical to SEQ ID NO: 273051

SEQ ID NO: 350422 - DNA, 201 bp, Homo sapiens; identical to SEQ ID NO: 273093

SEQ ID NO: 350423 - DNA, 201 bp, Homo sapiens; identical to SEQ ID NO: 273070

SEQ ID NO: 350424 - DNA, 201 bp, Homo sapiens; identical to SEQ ID NO: 273033

SEQ ID NO: 350425 - DNA, 201 bp, Homo sapiens; identical to SEQ ID NO: 273094

SEQ ID NO: 350426 - DNA, 201 bp, Homo sapiens; identical to SEQ ID NO: 273034

SEQ ID NO: 350427 - DNA, 201 bp, Homo sapiens; identical to SEQ ID NO: 273071

SEQ ID NO: 350428 - DNA, 201 bp, Homo sapiens; identical to SEQ ID NO: 273035

SEQ ID NO: 350429 - DNA, 201 bp, Homo sapiens; identical to SEQ ID NO: 273095

SEQ ID NO: 350430 - DNA, 201 bp, Homo sapiens; identical to SEQ ID NO: 273096

SEQ ID NO: 350431 - DNA, 201 bp, Homo sapiens; identical to SEQ ID NO: 273074

SEQ ID NO: 350432 - DNA, 201 bp, Homo sapiens; identical to SEQ ID NO: 273098

SEQ ID NO: 350433 - DNA, 201 bp, Homo sapiens; identical to SEQ ID NO: 273100

SEQ ID NO: 350434 - DNA, 201 bp, Homo sapiens; identical to SEQ ID NO: 273101

SEQ ID NO: 350435 - DNA, 201 bp, Homo sapiens
ggtgttttaaatcacaggccctattttgggggtgagaacaggttaattagccactattccattattccaggctgcacaaactacatagtaaagattatggyctaaggcttcaggatgtccaacagaatagttctgaaagtcaggggaagcaaacgctcttcaaagcgcccagaacaaatagccctttaggtcagttcttaa

SEQ ID NO: 350436 - DNA, 201 bp, Homo sapiens
caggaaactggccaggcacgttggctcacgcctgtaatcccaacactttgggaggctgaggagggtgggtcacaaggtcaggagtttgagaccagcctggmcaatatggtgaaaccccatctctactaaaaatacaaaaaattagctgggcgtggtggttggcacctgtagtcccagctactcaggaggctgaggcaggag

SEQ ID NO: 350437 - DNA, 201 bp, Homo sapiens
cagaatttaacctttaattaaattccctgtgtcataacctttcttagaaccctcttgccttaagcccacttctaacaaaagctggacctagttggcaggcstcagccaggccagtatggtagagaggagaaccctggcctaatcttcaaaaagcttgggtttgagtctcagctatgtcactagctaactgtatgatctcac

SEQ ID NO: 350438 - DNA, 201 bp, Homo sapiens
tctgtttgtaatcacaaaaatgttctagaaatggatagcacaattacaaccttgtaaatgtgcttaccatcactgaattgtacatgtagaaagtggttaaragggtaaattttatatatattttaccacaatttttaaaaatccttatacaaccatagctctcctgctacccacttactggatcatttaaatccaatatat

SEQ ID NO: 350439 - DNA, 201 bp, Homo sapiens
agaggataaaaacaatgatctacgggctgtagaacaatacacacgcggtggcagagtgtgagcaacacactgacctgtcaggtaatacaatctaaatccaycaactctgtaggtgcttacaattttaaatacacatatttgacagggacagacagacacacacagacacaatgtaaacatttgggtatggcaggagattgc

SEQ ID NO: 350440 - DNA, 201 bp, Homo sapiens
aaccatagctctcctgctacccacttactggatcatttaaatccaatatatagggtttttttattctacagattacattttttctgaaaaacctatttttstaaatagtattatcatactaaagctaaccttataaaaattgtatttcatctaacagaaatttgaaaaagtttcatcttaaatttatttgaataatttaat

SEQ ID NO: 350441 - DNA, 201 bp, Homo sapiens
caaggtcctaattctctttaattctgtaaagactgagagaggtcaggaagctgcagaagaaaagtttgaaggtagcaaaggttggttgagacttaaggagrgaagccatctccatagcataaaagtgcaaggtgaagcagcaggtactgatgtagaagctgcagcaatttatccagaaaatctagttaagataattgatta

SEQ ID NO: 350442 - DNA, 201 bp, Homo sapiens
taacattttataatatagtactgttgtttctccatttcaaagcaaatttatggcattctaatcaccaatgtttggttttaaaaacataaatagcacaattwaaaaaaaaatctatacctttgagtacaaacatacaatttattttgtgctgttataaaatcaggacatggcctgttttggaattccctacgtccttccttt

SEQ ID NO: 350443 - DNA, 201 bp, Homo sapiens
agataagcacttgaagcctcatttcaggttttccaaaaaaaaaaaaaaaaaaaaaaatgggtctactgaaaatatttaattggatacttagctagaggacttttttttttttttttaactttgtggactatgtcttttttggtgggggtggagggatttaaattgcatttttcttttgccttaaattgcctgaatggaggg

SEQ ID NO: 350444 - DNA, 201 bp, Homo sapiens
cattttgggatattattttctaagtcccaacactactattgattacacactaagggatttgtttaacattctggtataaggaggtaacaatcacaaaggcctctctatctccaatgtcatttagtctaggtttgaataaagactagggaatctggttaatgtataacatctcaacacaaaggtcaggaagcaacagacata

SEQ ID NO: 350445 - DNA, 201 bp, Homo sapiens
tggaggtggaagacagtgatattgatgattctgatgctgtgtaggcctagggtaatgtgtgcgtctgtgtcttagtttttaacaaaaaggcttaaaagttaaaaaaaaaagatataaaaaatctttttgttcacctgtacaatgtgtgttttaaactaaatatttctacaaaaatcaaagttttttcaaaaatttaaaagt

SEQ ID NO: 350446 - DNA, 201 bp, Homo sapiens
ttagcattcacaaacttatttaacaaatatttattgaatacctactaagtgttaggaatacagtagtaaataaaacagaaaaatctctgcccttatggagkctacattctagtggcgggataataaaccagataattaggtaaaatttataatgcgttagtgaaaacttgttaagaagaggaataaagcaaggcaagggaa

SEQ ID NO: 350447 - DNA, 201 bp, Homo sapiens
gatctaggcagaaatagctgggcaagtcactggcccatctactagctgtaaggaggcctagaaaggagtatctcacttctgctgtgagaaaggggctttgcctgcaaccacagctcatactctgggaaattgcttaaacaaattctagacaggaacaaaacaaagaaaaaaaaagaccacatggtccattcctgatccata

SEQ ID NO: 350448 - DNA, 201 bp, Homo sapiens
caagtttgaatttagcaaaggaatacaggatgcagtactcctgtccagcaggactcagatttctggtttctgattctagatctgacgctattccacttggrcaagcagttgcacctttctgaacctttttactcatctgtatacctgttcaatataacctacaggtaggtctatggtggaccgaaggcaaattatatttgg

SEQ ID NO: 350449 - DNA, 201 bp, Homo sapiens
ccagtccaaaatattagtagtgcctggcaataattggatttttggaattctaaacattgaaaagattcagagcaagtttgtaatttaggtttaagacaaadaggaaaattgtagagttatagaaccctgaaagacatttagtccagcctacccattttctagtaaggtaactgctagaaataaaaaaaaagtgacctgaag

SEQ ID NO: 350450 - DNA, 201 bp, Homo sapiens
ttcttctccaaatcatacttgtgtctgcctttgaaattattagtacttctttacccctggttgctcacttcattatagcattttagtcagtgtttagagatttttttttttaagtgaaactacttcttaattaaggaaggaaactagagctgttccttatgtagagtgagtgcctttatccatccctctctctgggaacgg

SEQ ID NO: 350451 - DNA, 201 bp, Homo sapiens
ggtcctgctaataaccagctctgtcaccttgcgtgaatcaacccctctgggccttagtcttctactgtgaaataaggaggcctggctgagattaggaatcttatttatttatttatttatttatttatttatttatttattttgagacagggtctcactctgtcacccaggctggagtgcagtggttcaatcttggctcac

SEQ ID NO: 350452 - DNA, 201 bp, Homo sapiens
gcttatcaaaattaaaagttctgagtcagtaattatcaggctaaatatagccgaaaaccttatttgtgaattgaaagtcaggctaaaggaattctccaggmaataaggcaaatatgagggaaaagaatcatgaaatgtcaagaatgagaggaaaaaaaataaaattttaaaaactgtagagtagattttcattagctttct

SEQ ID NO: 350453 - DNA, 201 bp, Homo sapiens
gtatccttgttccacttttgatagtatttacaccacagctctgtacaaaacataggcactaattaaatacataaattatttggccaggcatggtggctcaygcctgtaatcccagcactttgggaggccaaggtgggtgtatcacaaggtcaggagttcaagaccagcctggccaagatggtgaaaccccatctctactaa

SEQ ID NO: 350454 - DNA, 201 bp, Homo sapiens
gctaatagacagtagggaagcccagcaaggcctgtctagatttttcttggtctctctgagcatgcattcctttccttctggatgtggggtagggccctctstggaatgggggtcttatgacctaccgtcaaacaaggtagatcagataatttttttaatttaattaattaattttaaaaatagagatggtgtcttgctatg

SEQ ID NO: 350455 - DNA, 201 bp, Homo sapiens
tttgatggaagacaatttggaaagtgttgtaaggtccacggactctactcacaaagtctcccaaacttgcttgctgataggaatggacacgctggttacayaagctaatcccaggtgcccgatccccggaaattctgattcagtgtttcctaatggaccctgggagtctgcacctttaataacacattctaggctccaggt

SEQ ID NO: 350456 - DNA, 201 bp, Homo sapiens
gaggcaggagaattgcttgaacccaggaggcggaggttgcaggaagtggagatcacaccactgcacttcagcctgggtgacacagtgagaccccgtctccaaaaaaaaaaaaaaaaaaaattacccagggattgattgatagaaaatagaagaagactaacaactgggccttagggccttctattaataaatttcagatat

SEQ ID NO: 350457 - DNA, 201 bp, Homo sapiens
gcaagtttgaatttagcaaaggaatacaggatgcagtactcctgtccagcaggactcagatttctggtttctgattctagatctgacgctattccacttgrgcaagcagttgcacctttctgaacctttttactcatctgtatacctgttcaatataacctacaggtaggtctatggtggaccgaaggcaaattatatttg

SEQ ID NO: 350458 - DNA, 201 bp, Homo sapiens
taatattgatatattttatacttaaagagtattttaccaactcaaaattatgctccaaacaagaccacagtgaatcatgatgtgctgtcagcctgtttccrctcttgctatttgctccccaggtcatgacagtaccgttcaccctaggtaaaaacctgagagttatcccaaactctccagcgtcctaaatctcccttctca

SEQ ID NO: 350459 - DNA, 201 bp, Homo sapiens
tttcaaaaatttaaaagtttataaagtaaaaaaagttacagtaagctaaagttaatttattattgaagaaagaacaaaaatgttttcataaacttagtgtrggctaagtgtacagtgttcataaattctaccatagtgtacaggaatgtcctgggccttcacactcactcaccactcactgactcacctagagcaacttcc

SEQ ID NO: 350460 - DNA, 201 bp, Homo sapiens
ttaccttcatatgctctctcgggtcaccctcaactccgtgatctctgacctacaaaccaacccaggatgccaaagttcttagcccatatttggcgggggtsttttactggatcaggagtcaaattcagactactcaagttaaatacatcttttctatgcatttacttatttttcttatccatgagtttcctgaaaatatgt

SEQ ID NO: 350461 - DNA, 201 bp, Homo sapiens
attttgggatattattttctaagtcccaacactactattgattacacactaagggatttgtttaacattctggtataaggaggtaacaatcacaaaggcctctctatctccaatgtcatttagtctaggtttgaataaagactagggaatctggttaatgtataacatctcaacacaaaggtcaggaagcaacagacatac

SEQ ID NO: 350462 - DNA, 201 bp, Homo sapiens
aaaagctgtcagtcaaccacataagtgtatggttagaattacagatggtcaagtttggcaaaggaaacatttgagtcaatatagggtaagcaaagacccaytccttctatactcccttgcttcttcctttctttcttcctttcagcaaaatttagtgaatggctgctttgttctaggtgcagagtatacactgttctagaa

SEQ ID NO: 350463 - DNA, 201 bp, Homo sapiens
caggaggattgtttgaggccaagagttcaagaccaccctaggcaacatagcaagacctcatctctacaaaatatttaaaaatttttaaaaaattagccagkcatgatgacacacactgtagtctcagctactcaggaggtggaggcaggaggctcacttgaccccaggaggtcaaggctgtggtgagtcattatggtgcca

SEQ ID NO: 350464 - DNA, 201 bp, Homo sapiens
tggagcaggggagtagcaaaagaaatggtgagaaatgattggatgctggatgtattttaaggtagaacttagagattcttattctcaaaaaaaatgtatcttaataaaagagtaaaatggaagacaaaatccatcattttaatgactttattcagtaacaagtttaaattttcagtgaatatactgtcaagctaaataaca

SEQ ID NO: 350465 - DNA, 201 bp, Homo sapiens
ggagcaggggagtagcaaaagaaatggtgagaaatgattggatgctggatgtattttaaggtagaacttagagattcttattctcaaaaaaaatgtatcttaataaaagagtaaaatggaagacaaaatccatcattttaatgactttattcagtaacaagtttaaattttcagtgaatatactgtcaagctaaataacag

SEQ ID NO: 350466 - DNA, 201 bp, Homo sapiens
ttgacctagcaatcccattgctgggtatatacccaaaggaatgtaaatcattctgttgtaaagatacatgcacacatatgttcactgcagcactattcacratagcaaagacatggaatcaacccaaatgcccatcaatgatagaatggataaagaaaatgtggtacatatacactatgaaatactatgcagcaataaaaa

SEQ ID NO: 350467 - DNA, 201 bp, Homo sapiens
caacacttagaaccaagtaagttgggtttgcttcacattaatagtcttaactataaaaatattttggatttttatttttatttatttgttgtttttttttwaaacagagtctcactttgtcacccaggctggagtgcagtcgtgtgatctcagctcactgtagtctccacctcccaggttcaagcgattctcctgcctcag

SEQ ID NO: 350468 - DNA, 201 bp, Homo sapiens
aagaaacttaaaaagaggaagaaaaaaagaaaataactttttaaatttcatattatcattgaaattcaaggagatattccaaataaacaagaataatatgtttttttttttttttttttttttgagacagagtctcaccctgtcacccaggctagagtgcaatgatgtgatctcagctcactgcaacctccaacgcccagg

SEQ ID NO: 350469 - DNA, 201 bp, Homo sapiens
aatgtttttgctagtttgtagaaaaaaattttatttttattttattttatttttttgggacgggatctctctttgtcacccaggctggagtgcagtggctyaatcatggctcactgcagcctccacctcctgggttcaagtgatcctcctgtctcagccccccaagtagctgggactatagacgtgcaccaccacactggg

SEQ ID NO: 350470 - DNA, 201 bp, Homo sapiens
tccaactccattttctgttgttccctatgttgcttcttacgtaccaaaatacagttccccagatattccatgctatttcatgtctctcagctctgaacacrctgcttcctctggcaagaagacccttcaccaaccacacccacactattatacttagaaaattttatatcctgcacaagttagatcaggaatctcttcatg

SEQ ID NO: 350471 - DNA, 201 bp, Homo sapiens
aactcttgagctcaaatgatctgcctgcttcagcttcccaaaagtgctggaattacaggcatgagcctgtattttttaccttgcccttattttttgcctgrcccttattttttattttttaataatttttttttgaggcagggtctcactctgtcacccagattggagtgcagtggtgcgatctcgactcactgcaacctc

SEQ ID NO: 350472 - DNA, 201 bp, Homo sapiens
gcgtgactcaccatgcctggcctgttggtttcttaattttaaaactttggacaatacagaaatatgcaaaaaaacaggccaggcactgtggctcacacctstaatcccagcactttgggaggccaaggcgggcagatcagctgaggtcaggagttcaaaaccagcctggccaacatggtgaaaccccgtgtctaccaaaaa

SEQ ID NO: 350473 - DNA, 201 bp, Homo sapiens
cggcacccgtagttgtgaactttgacagcggctggtccccggaagttggacgcatgcgccgtttctctgcatggtgtgcgttctcgttctagctgcggccrcaggagctgtggcggttttcctaatcctgcgaatatgggtagtgcttcgttccatggacgttacgccccgggagtctctcagtatcttggtagtggctgg

SEQ ID NO: 350474 - DNA, 201 bp, Homo sapiens
actccagaagacatggtgccaagaaagtaacaggaatgataaataacgcgaagagtctgacgaaactgagaagaccagaagaactttcaaactgtgtgtakgtgtgtgtgtgtgtgtgtgtatgtttaaatcaaagataagcaaaggacaatgagtgctttgaatgcagaggagggagagatctctgtgagatagagtgtt

SEQ ID NO: 350475 - DNA, 201 bp, Homo sapiens
ctgcttttgatataaaagttgtatttatacgagggcatagatttattgttttcaaatgttctttgtgtcttctgagaaatatacaattacagtgccccccyacccccaacctgaaaccatgatattggtataacatggtcaaatggatatgtccattgtgggtttcttaatcttaggacatctgatattttttccaggtgg

SEQ ID NO: 350476 - DNA, 201 bp, Homo sapiens
atcccctctgaaatcaggctgttcttaatgcaaaatgcctcccttagattattattctgtattttcatttgaccttcaactttttctttcaggtgttgtgwaacggaccaggaacatgtgttcctatctgtgtatctgcccttctccttgggatactaggaataaagaaagtgatcattgtctacgttgaaagcatctgcc

SEQ ID NO: 350477 - DNA, 201 bp, Homo sapiens
cacactattatacttagaaaattttatatcctgcacaagttagatcaggaatctcttcatgaagcctgatttaccttatcaaagaataatgtattggctgrgcgtggtggctcacgcctgtaatcccaacaatttgggaggccaaggtgggaagatcatttgaacccaggaattccagaccagcctgggcaacataggaag

SEQ ID NO: 350478 - DNA, 201 bp, Homo sapiens
caggcgtaagccaccgcgcgtggccaattttttgtatttttagtagagacagggtttcaccatgttggccaagcaggtttcaaactcttgaccttcaggcratccacgtatcttggcctcccaaagtgctgggattacaggtgtgaaccaccgcacctggtccagtttattacttcttacttggtgctaacattatattta

SEQ ID NO: 350479 - DNA, 201 bp, Homo sapiens
aatcaggagtttgagaccatcctggccaacatggtgaaaccccgtctctactaaaactacaaaaattagccgggtatggtggcgcatacctgtaatcccarctacttgagaggctgaggctggagaattgcttgaatttgggttgtggaggttgcagtgagccgagatcgcaccactgcaccccaacctgggcaacagagt

SEQ ID NO: 350480 - DNA, 201 bp, Homo sapiens
tctctactaaaaaatacaaaaaaattagctgggcatggtcgcaggtgcctgtaatcccagctactcaggaggctgaggcaggagaatcgcttgaacccagkaggcagaggttgccgtgagccgagatcacgcctgggcaacagagcaagactccatctcaaaaaaataaaaaattattagtagatcacttctgttcagaga

SEQ ID NO: 350481 - DNA, 201 bp, Homo sapiens
acctggtagatgctcactttatggtgcttatgaaatgtcatgaagcaacatatgagtaagggagctgtgggtcctgctaataaccagctctgtcaccttgygtgaatcaacccctctgggccttagtcttctactgtgaaataaggaggcctggctgagattaggaatcttatttatttatttatttatttatttatttat

SEQ ID NO: 350482 - DNA, 201 bp, Homo sapiens
cacctattctagagcgtggggcatgtaggagttcaataaattttgaaagagtaaatctgggtaggagagagattaggaaaggagaagtcagagaagctatkaaaacctgatgatgaccatttacagcctttaggtgggctggaaaaagtagaataggaaaaaaacattgcataactgctccttggttaacttttgctccct

SEQ ID NO: 350483 - DNA, 201 bp, Homo sapiens
gtgaggatttcaaggatgaattttggaaggtcacagatattcagtccatagcaggaagtaattgggatcttcaggtttctaggctaatctagatgccttcstatttatcattcttttcttgagttgactttctgattatagtgaggccaggtcaacacacagtattctaaatatatggtcaggatggtttcttctgacttt

SEQ ID NO: 350484 - DNA, 201 bp, Homo sapiens
actttttactaaatatggaatgatattctggcttttttttcctcttctagtcaagaactatcttttctttgtagaatttaggaatggcaaaaggaactaaytcatttttgtggtattttctaaatccgtaatacacaaatgagtaggcacatggctgatagaaatatcagtatacaatagcttatagcttctttctttttt

SEQ ID NO: 350485 - DNA, 201 bp, Homo sapiens
gtgcttggcactattctaagggtgagggatacatcagctaacaaaacagacaaatatgcctgctctcatttagtttaccttggaactggtctgttcagctrtaaaggcatgttgaaacttgggcagctggcagatataacataaagtgcttagacttccatggctaacctgtctcccacttcttgaagtcattgcattcaa

SEQ ID NO: 350486 - DNA, 201 bp, Homo sapiens
caacttaaggcgaggctgcctgtctttctcctccctgatctgttccatgctgctgctggggccgcttgcgctacttctccccaccttccaggttccccccmccaggtacttacagggctttatcaatattggcccatgagatagctgacaacaagcagtcattgctgaactcatccctcatcactgttgtagaaaaataga

SEQ ID NO: 350487 - DNA, 201 bp, Homo sapiens
gactcttcaagatttgtgtttctttttaaatcagtgttgttaggacatttttctaggaatgtgtccattttatgtaaatttgctaatgtattgacataaawattttcataattgtattagtcatttttgcattgctataaagaaatacccaagaccgggtaatttaaaaagaagagaggtttaattggctcacagttctgc

SEQ ID NO: 350488 - DNA, 201 bp, Homo sapiens
tttggcagaagatctcatccatatcgctcggaacgcttcaggaataaaagggcatcgattcacacttggttctggtgagaagccaaaatccacattttcamcacaggcttgctcctccaaaaacacagagagcttcccagaaatcagaagatacaaattagaaatgttaatcacttatagttatataagtaacaggaaatt

SEQ ID NO: 350489 - DNA, 201 bp, Homo sapiens
ccatgtatcatggatttctttttctagtgtaaaacatacatgaagttaaatcagctgtagaaagcttatcgctgggattacaggcatgcaccactatgccyggctaattttgtatttttagtagagacagggtttctccatgttggtcaggctggtctcaaactcccgacatcaggtgatccacccaccttggcctcccaa

SEQ ID NO: 350490 - DNA, 201 bp, Homo sapiens
tgctagtttgtagaaaaaaattttatttttattttattttatttttttgggacgggatctctctttgtcacccaggctggagtgcagtggctcaatcatgkctcactgcagcctccacctcctgggttcaagtgatcctcctgtctcagccccccaagtagctgggactatagacgtgcaccaccacactgggctaatttt

SEQ ID NO: 350491 - DNA, 201 bp, Homo sapiens
ggacgggatctctctttgtcacccaggctggagtgcagtggctcaatcatggctcactgcagcctccacctcctgggttcaagtgatcctcctgtctcagscccccaagtagctgggactatagacgtgcaccaccacactgggctaatttttgatattttgtagtaacagggtctcattatgttgcccaggctggtctca

SEQ ID NO: 350492 - DNA, 201 bp, Homo sapiens
gtcctgctaataaccagctctgtcaccttgcgtgaatcaacccctctgggccttagtcttctactgtgaaataaggaggcctggctgagattaggaatcttatttatttatttatttatttatttatttatttatttattttgagacagggtctcactctgtcacccaggctggagtgcagtggttcaatcttggctcact

SEQ ID NO: 350493 - DNA, 201 bp, Homo sapiens
tcctgctaataaccagctctgtcaccttgcgtgaatcaacccctctgggccttagtcttctactgtgaaataaggaggcctggctgagattaggaatcttatttatttatttatttatttatttatttatttatttattttgagacagggtctcactctgtcacccaggctggagtgcagtggttcaatcttggctcacta

SEQ ID NO: 350494 - DNA, 201 bp, Homo sapiens
cctgctaataaccagctctgtcaccttgcgtgaatcaacccctctgggccttagtcttctactgtgaaataaggaggcctggctgagattaggaatcttatttatttatttatttatttatttatttatttatttattttgagacagggtctcactctgtcacccaggctggagtgcagtggttcaatcttggctcactac

SEQ ID NO: 350495 - DNA, 201 bp, Homo sapiens
cacagagatccaagcaagatctagagaaggaggtgagtcagcagcatatttcagaacacatggaagacctgggttcaggtcctggtgctgtcactttaggraagtccagattcctcatctgcaaagtgagaaagttggaatagtatgtcccttaaaaccctgagatgtcatgaggttaagagccagcatcttccccatcac

SEQ ID NO: 350496 - DNA, 201 bp, Homo sapiens
cacactctctctctctctctctctcaaggctgtttgtgttaacttttggtcatttgtaaaccttatccccaactaacatactactaaaatgtattctcaaraaatccacgtcaaacaagattggtatataaatctgcttgctatcattcagctatagcaaaatgtgtggtactttttttcctctgtggaaaataagccaaa

SEQ ID NO: 350497 - DNA, 201 bp, Homo sapiens
ggcctagtggatagaggaatacaaatatatatatatatttgtgtatatatatatgtgtgtgtgtgtgtatatatatgtatgtgtgtgtgtgtgtgtgtgtrtgtatatatatatatatatatatgtatgtatgtatgtatgtatgtatttctcagcccccgtaggatggattgagatccagtttagcagcctacagtgtcc

SEQ ID NO: 350498 - DNA, 201 bp, Homo sapiens
tgatttatctatgactgctgtttcttctccaaatcatacttgtgtctgcctttgaaattattagtacttctttacccctggttgctcacttcattatagcrttttagtcagtgtttagagatttttttttttaagtgaaactacttcttaattaaggaaggaaactagagctgttccttatgtagagtgagtgcctttatc

SEQ ID NO: 350499 - DNA, 201 bp, Homo sapiens
tagtggatagaggaatacaaatatatatatatatttgtgtatatatatatgtgtgtgtgtgtgtatatatatgtatgtgtgtgtgtgtgtgtgtgtgtgtrtatatatatatatatatatgtatgtatgtatgtatgtatgtatttctcagcccccgtaggatggattgagatccagtttagcagcctacagtgtccctca

SEQ ID NO: 350500 - DNA, 201 bp, Homo sapiens
cctcagcaaactaatgcaggaacagaaaactaaatactacacgttttcacttataagtaggagctgaacaatgagaatacatgggtacatatgggggaacmacacacattggggcctgttgaagggaggggttgggggaggtagagcatcaggaagaatagttagtggatgctggacttaatacctaggtaatggattaat

SEQ ID NO: 350501 - DNA, 201 bp, Homo sapiens
ggccttgtgggcatacagagtactatgggacatggccctgttctacaggaattaggaagctgagatggaaaggttgtttcactgtttcactaaaatatgtyttcttctatacgatagagaataagaaagagtcttacttctttggccaatagtgtgaaagagactggattatattgaagacaggtaaattttgcaggatat

SEQ ID NO: 350502 - DNA, 201 bp, Homo sapiens
ttaaaggaacatgataaacacccatgcttttttaaataaaatattataggtattgagattaggccacacaatttggtggaagtaacagccaaaaaaacttstatgatggaattctactgaattatttttatcacaataataacaatgacatgacatcttactggattcaaatgtagtttgtagtataggtccacagtccct

SEQ ID NO: 350503 - DNA, 201 bp, Homo sapiens
aaaaagttgtacccatgtatttacccagtgaatgtaaatgtctatttccccatactctcaacaacactggttatccactgtcgttgccaatcaggtaggcraaaatgacttgttttctgttgtgcttgttagccatctttttacatgtttatcattatttgtatttcttccatttggagttatctgtctgtctttgcccat

SEQ ID NO: 350504 - DNA, 201 bp, Homo sapiens
gcaccaggaactgtgctagaagttagaagttaagtgatttgccctgagtcacacagttggtaagcaagagagccaagacaacacagctctgcctggctccraagtgcatgggcttaaacatgcgctgtttgctgcatcctggttcttgacagagaaggacttattagaatcataagcagatcccctctgaaatcaggctgt

SEQ ID NO: 350505 - DNA, 201 bp, Homo sapiens
tttttttgagactcagtctcactctgttgcccaggctggagtgcagtgatatgatctcggctcactgcaacctccgcctcccgagttcaagcgattctccygcctcagcctcctgagtagcgggattatagacgcatgacaccacacccagctaacttttgtatttttagtagagatggggttttaccatgttggccaggc

SEQ ID NO: 350506 - DNA, 201 bp, Homo sapiens
gcctcccgagttcaagcgattctcctgcctcagcctcctgagtagcgggattatagacgcatgacaccacacccagctaacttttgtatttttagtagagrtggggttttaccatgttggccaggctggtcttgaactcctgacctcaggtgatccacccgcctcggtctcaaaaaatgctaggattataggcatgagcca

SEQ ID NO: 350507 - DNA, 201 bp, Homo sapiens
acccaggtgacatttttggcaggaattctcagctatgttcctgtccctgcctgctacctagctgctccctgcagttctcaactttcttggcaggaaaactraagagttttatgatcaccttaattcagaataattcaaccaataagtccaaacaatgtctggtaccccaccctctttgattctctgcatttccttgcaagc

SEQ ID NO: 350508 - DNA, 201 bp, Homo sapiens
tggtggtagttattagaattttaacatggattttagcacacttgcttataattaacatcacatttaaagttagtgtccctctatccagttttctttcataycttcccattgccagcacttcccccaaccaaagggagcctggttttgttttcagacccagctctctgtttcaaagacttacaccatagtgggccagcaggg

SEQ ID NO: 350509 - DNA, 201 bp, Homo sapiens
agaaaatgtgcggctttctcagcagctccagcaagtgttctgctaagtcttgtggtttctgactggactgtgtgctcttccctgaaccagtgactttcacyaggggaattcgatgctctgattggtcagactggagtcatacatcctctccttacagctgggtgtggagtcaggtctacacaagcacttaaattgagagcg

SEQ ID NO: 350510 - DNA, 201 bp, Homo sapiens
cttgcaagtattaaaaattcatatagaacttgctcaaacaaaaaaggaaatttttcaatactggcagtacggtgattgttaagacagaccatccccacccscctcctctgtcctgatctcactgcctgtgcagagggataacatttttgccttttggaaatattaggaaatacagttatatatttcagctctggaagccac

SEQ ID NO: 350511 - DNA, 201 bp, Homo sapiens
aaataaaaggaaaggaatttgtaatcaaattacgtgttttgcaatatgtacatacccaggcatgacaaaccaggaggcataatcaagtgcatagattctgwatatagaattaccatgagtaggacagctacaattcagaccagtccgggttcatcgtattgataactcaaaacctgtgagcagctttgttgcccatgatgt

SEQ ID NO: 350512 - DNA, 201 bp, Homo sapiens; identical to SEQ ID NO: 74779

SEQ ID NO: 350513 - DNA, 201 bp, Homo sapiens
taggattataggcatgagccaccacacccggccatgtatcatggatttctttttctagtgtaaaacatacatgaagttaaatcagctgtagaaagcttatygctgggattacaggcatgcaccactatgcctggctaattttgtatttttagtagagacagggtttctccatgttggtcaggctggtctcaaactcccgac

SEQ ID NO: 350514 - DNA, 201 bp, Homo sapiens
tcagtgcctcaaataccccatcttgtttgcaattaggcagaaactgtttcaataaacaggggcttcatatttgaattagaaaactcagaggtttaatattmtcaccatagtggttgagaatctcttccttaacaagattcggcttttagtcaggcaagttgtctcccagatcaactgctggattaaaacttgctgcccctg

SEQ ID NO: 350515 - DNA, 201 bp, Homo sapiens
aggccctctccttcatggtctttctaattccttgtttaccctgcccagaagtcattgagtagatgtatctttttcagttagcgcttactctttgatacttkgcaatttgatgacttatttttctccttgtataattttttatcttttttttttgagactcagtctcactctgttgcccaggctggagtgcagtgatatgat

SEQ ID NO: 350516 - DNA, 201 bp, Homo sapiens
aggggcattgcttttttatgaagattgtcagggaaagccttcttggggagatgacagccaacagcaaggaggctagagtgattagagtagactgagtaagyggggaggaacaggagatgagctccaagagggaacatagttgaggtcagagtataagaagccttttatttcacatgagacatgaagccactggaggatttt

SEQ ID NO: 350517 - DNA, 201 bp, Homo sapiens
ctaatgtggtgaaactctgtctctactaaaaatacaaaaattagccgggcgtggtggcacacgcatgtaattgcagctactcgggaggctgaggcaggagrgtcgcctgaacctgggaggtggaggttgcaatgagccgagatcacacaattgtattccagcctgggcaacaagcgtgaaactccacctggggggaggtga

SEQ ID NO: 350518 - DNA, 201 bp, Homo sapiens
tctccattatcttcacctttcaagtcatctcagccttttccggggttcttccttatttttaaggcattgatttttcataaccatttgcttacccttcacaktttagtttttcttactgtcttgcatcttctttgtcttcatatatgtgtcttgcccctttctcaccagtcttcttgatagcaagagctatgtcttatactg

SEQ ID NO: 350519 - DNA, 201 bp, Homo sapiens
aatgataaaagttggataaagggtaaactatagaccattgcttcataatggaattgcataattcaagtggggaatcataaatttggaaatgctggaagggttttttttttttttaagaaaaaagtgatttaaaggcaatgctaataaaataaaaataacccatgactaaaaatatatgctgaagcattttatctcactgga

SEQ ID NO: 350520 - DNA, 201 bp, Homo sapiens
ctactgctagtgctgattttatttttatacatgtattatctgcttttgatataaaagttgtatttatacgagggcatagatttattgttttcaaatgttcyttgtgtcttctgagaaatatacaattacagtgcccccccacccccaacctgaaaccatgatattggtataacatggtcaaatggatatgtccattgtggg

SEQ ID NO: 350521 - DNA, 201 bp, Homo sapiens
gaaaggcctttctaagaaagtggtattttacctgagttccaaaggataatgccttaaatatttgtcctccttctacttcactcccaacttagattttgccycacccacaaagtctttgtcttcatttagcttgagcaaattctctaaataactctgtgacatagccacccataccaaaggttagtgctgagttatatacca

SEQ ID NO: 350522 - DNA, 201 bp, Homo sapiens
tatacaattacagtgcccccccacccccaacctgaaaccatgatattggtataacatggtcaaatggatatgtccattgtgggtttcttaatcttaggacwtctgatattttttccaggtgggcataccactgagatcctgaggctgcttgggagcttgtccaatgcctactcacctagacattatgtcattgctgacact

SEQ ID NO: 350523 - DNA, 201 bp, Homo sapiens
ttgttcacatctctgtggtcactgctagatggagagttcctgccaacatggtgaaacccagtctccactaaaattacaaaaattagccaggcatggtggcrtgcacctgtaatcccagctactcaggaggctgaggcaggagaattgcttgaacacatgaggtggaggttgcagtgagttgagatcatgctactgcactcc

SEQ ID NO: 350524 - DNA, 201 bp, Homo sapiens
tggtggtgcacacctgtaatcccagctactcgggaggctgagacacgagaattgctcgagcccgggaggcggaggttgcagtgagcagagatggcaccackgcactccagcctggactacagagtgagactctgtctttaaaattaaaaattaaaaaaagaagccatagaaatcaaattattcactttatcaacaataaaa

SEQ ID NO: 350525 - DNA, 201 bp, Homo sapiens
caccacgctcagctaatttttgtatttttagtagagacggagttttaccatgttggccaggctggtctcaaacccctgacctcaagtgatctgcctgcctyggcctcccgaagtgctgggattacaggcctgagccactgcgccttgcccaaaataccacgttctttaagcacaccaagagtacagcaactttaggatctc

SEQ ID NO: 350526 - DNA, 201 bp, Homo sapiens
taaaagccatgttggaagatgcttatatatgcagccaccctaggtttactaatacttctctcctaaattagacagcaggcctgcctctgtttttccctatscagcacaccagtcggggtgtagagcatggtcacatgttgacaaccgacaagctgaaaagaatttaaaaagtgaaaaaacccatgggggctggctgagcat

SEQ ID NO: 350527 - DNA, 201 bp, Homo sapiens
atcacagactccatcgcttccaaaaacagtgtgtcaggatttactaatgaatttcagctctgtcctgctggaccaccattcaaggacatccgtccaaaccygcccctctcaagaagggcttatccacatgcacctgatttacaaacaaccttagttccccagtttggttcctcattttcttgaggcttcttctgaggcttt

SEQ ID NO: 350528 - DNA, 201 bp, Homo sapiens
ctctcaggcccaagtaatcctcctgcctcagcctcctgagtgtagctgagaccacaggtgcatgccacccagctaattttttttttattttttatggagayaagatctcaccctgttgcccaggctgatcttgaactcctgggctcaagtgatcttcccaccttgccctcccaaagtgctggtattacaagcatgagccac

SEQ ID NO: 350529 - DNA, 201 bp, Homo sapiens
tactgttttacacaggtcactcgtgtggctgtgttacaaatacaccaaaagcaaaaccaaggaaatcagttaggaggttgttgcagaaatcccagcaagarataatgtggcttgcatcaggagggccaggagtaagggaaaatagttggattctggatgtttttgaaagtggagttaacagaatttcatggcagaaaacag

SEQ ID NO: 350530 - DNA, 201 bp, Homo sapiens
tcaagcacaaagcgtgagattgggtgtctggggagcaaacctataccaaagaatgtaatcagtgctccccatgtggggaagaatgaaggtagtttgtatasgcaagaacagagatgctgaacaaaattacaatattttccatacaaaggccaacatacagatacaagatttggttggctactgtaagggccaaggggaaac

SEQ ID NO: 350531 - DNA, 201 bp, Homo sapiens
ctgttgaaactgctcttgatccttgatctggctcatctatgctcatgaccttgtatttatatcagtcctgtcctctttccgttttctaaacccataacatwttatttttagtatcttagacttcctgcttttagagaagtttatttattgatttgttaatcatccaacagacacatattgaacccctactggttggtgctg

SEQ ID NO: 350532 - DNA, 201 bp, Homo sapiens
cacatggaggcaagatggctctctttctgtcggggagagtccttgaaatgctggggtggtataaacaatatagacagtatatatgggaacctttccaactstaagattctctggtgctaagttttgtggaccttaggctggtaagatcatgtgacatagagcatgcccaatagatatgtgtagacaatcacaaacctcttg

SEQ ID NO: 350533 - DNA, 201 bp, Homo sapiens
cattatattgatttttgaactatttgaactcaaactgagtatgatttgaaaataaattaataatttaaaaacatccaaatcataaagctatttatgcattmattcattccacaaagatttattgaatgcctgctatgtgttaggcactgtgctacagatggacacagatgaaaaataactcctatacccaaggaatatacg

SEQ ID NO: 350534 - DNA, 201 bp, Homo sapiens
tatggcatcagagcagtcatagagagcttggatataaacttggaatttgctgggcatggtggctcacacctgtaatcccagcactttgggaggccaaggcrggggatcacttgagtccaggagtttgagaccagcctaagcaacatagtaagacctcatatctacaaaaataataataataataattaaattagctggcct

SEQ ID NO: 350535 - DNA, 201 bp, Homo sapiens
attcagaggctccaaggtgtgaatgtgcttgaggttttcaggatacagcaaggaggtgaggccagtgtggccagaggagtgaggcagtgaggagaggagtsgtgggatatggcatcagagcagtcatagagagcttggatataaacttggaatttgctgggcatggtggctcacacctgtaatcccagcactttgggaggc

SEQ ID NO: 350536 - DNA, 201 bp, Homo sapiens
cacaataacatggatgaattacagaaacactatgctgagtgaaagaagctagacatgagtacatactgtattatttcttttttcttttttttttttttaaracgtggtctcgctctgtcacccaggctggagtgcagtggcatgatcatggctcactgcagcctcaacctcccaggctcaagtgatcctcccacctcagcc

SEQ ID NO: 350537 - DNA, 201 bp, Homo sapiens
ttaaactacacagaaaagatcttttgagacattctaaatagtaatatatataatcctatctagtatagcaaagactggaccaaaaggccacttgatttttwtagttttgagatggagtcttgttctgtcgcccaggctggagtgcagtagcatgatctcaacctgactgcagtctccacctcccggactcaagctctcctc

SEQ ID NO: 350538 - DNA, 201 bp, Homo sapiens
gtaaactttaatcactgtggattgtgatttttcatatgttctaaaattaagttattttattgcttattgctttctacttttggtattatatttaatttagyagtgatatcatgattttattttcacttctaggtaaaaccaaatagtaaccaagttaatcttgcctcctgctgtgtgatgccaccagatttgactgcattt

SEQ ID NO: 350539 - DNA, 201 bp, Homo sapiens
cttgaacctcagaggcggaggttgcagtgagctgagattgcgccactgtactccagcctgggtgacagagcaagactctgtctcaaaaaaaaaaaaaaaaagaaagaaaaaccttctttttctttaggtactattagaccatggctctaatttcctaagtaagggaatattttatatataacagatattttgctgttattc

SEQ ID NO: 350540 - DNA, 201 bp, Homo sapiens
acttgaacctcagaggcggaggttgcagtgagctgagattgcgccactgtactccagcctgggtgacagagcaagactctgtctcaaaaaaaaaaaaaaaaagaaagaaaaaccttctttttctttaggtactattagaccatggctctaatttcctaagtaagggaatattttatatataacagatattttgctgttatt

SEQ ID NO: 350541 - DNA, 201 bp, Homo sapiens
tgggatactttgaaaacattagaaatatttgtttttatgatgtaagcatttattttctttgtgtcttccttcctatcagcctgttcagtccttggagttgmacagctggattctgtgatcattgcttcacctcctattgaagatggagttaatctttccttggagcatttacagccttactgggaggaattagaaaactta

SEQ ID NO: 350542 - DNA, 201 bp, Homo sapiens
cccgcaccctgcacctgcagacggggaacctgctgaactggggccgcctgcggaagaagtgcccgtccacgcacagcgaggaggtgagcgtggcgacactygccgcggggctcccggggcaggcctcgggcggggccgggcggttccggcaagggagaagcgcccgcgggcgagggagggtggcagggcctcgcgcgcacc

SEQ ID NO: 350543 - DNA, 201 bp, Homo sapiens
ttatgtatgttgaaggaaacaaaaaccttgtaggattaaaattggggtttgtatggtatttcctgttgctatcttttttttcctgcttatcaaattaatayattcttattgtagaagtacagaaaagtatatagactttgattaacagtttcaaaatgcattccttttgcagcttcatgattgtatccaaaaaaccttgaa

SEQ ID NO: 350544 - DNA, 201 bp, Homo sapiens; identical to SEQ ID NO: 74794

SEQ ID NO: 350545 - DNA, 201 bp, Homo sapiens
ctattgcagtgaggcaaatgagtaagcactcaattttggctttggaataccctaaataccctgactttagtcattacacattttatgcacttatctgtgcrtctatgtatgctttatcagtacacattctatgcatgtaacaatatcattgtacattctatgcatgtaacagaatatcacatgtgccccataaatatgtac

SEQ ID NO: 350546 - DNA, 201 bp, Homo sapiens; identical to SEQ ID NO: 74790

SEQ ID NO: 350547 - DNA, 201 bp, Homo sapiens
actttttttttctttagactttcctgtattttccctgactatacattagaatcacctggagatctttaaaaaactgcagatgtctaggctccactcaccaraagttaagaattaaataggctggggtacaggtgtagatactttttaaataactgcctgggaatttctaatattctggttcagattcatagcacacacatg

SEQ ID NO: 350548 - DNA, 201 bp, Homo sapiens; identical to SEQ ID NO: 74785

SEQ ID NO: 350549 - DNA, 201 bp, Homo sapiens
tcttctaacagtaattgttaccaacagctgatgatccagcctgtaccctcttctagcttcacttgaaaaaaactcaatccttttactagtaggaaaggaartaggaaaagattaaggttcctagtgttttattttcacatatctaaatgttgacatttagaatgtgtgctaatacattattgttatggcaaaatatattgc

SEQ ID NO: 350550 - DNA, 201 bp, Homo sapiens; identical to SEQ ID NO: 74786

SEQ ID NO: 350551 - DNA, 201 bp, Homo sapiens; identical to SEQ ID NO: 74797

SEQ ID NO: 350552 - DNA, 201 bp, Homo sapiens; identical to SEQ ID NO: 74787

SEQ ID NO: 350553 - DNA, 201 bp, Homo sapiens
aaagatcagttgttgccaggggttagcagggacggagggatgaataggcagagcacaggatttgtatgtcaatgaaactactgcatatgatattgtaatgrtggatacatgttattatatggttttctaaatccataaactatgcagcaccaagagtaaaccctaagataaactggacttgggtgattatgacatgtcaat

SEQ ID NO: 350554 - DNA, 201 bp, Homo sapiens
agaatccaagattaattaaagaaatggtttcaagaagagggtgaatactataaaaatagacttaccttcctgaattgaggaattcatcaggaaagcctcargtgtgcaaatgagccatccttccagagggaaatttcttagaattatcccacgatttgagccaaagcacttccgatagaatttttaacctctagttggttc

SEQ ID NO: 350555 - DNA, 201 bp, Homo sapiens; identical to SEQ ID NO: 74799

SEQ ID NO: 350556 - DNA, 201 bp, Homo sapiens
tatctcatgcagtagaaaagataaatcctgatgaaagagaagaaatgaaagtttctggtaaagtccagtcttttctgtttattttgttacatagcggaagygatagattttgttaggcattagaataagcctttctttgctcagacactaaatgtgggaaatacagaaattcttttttagcataattttacttaaactcca

SEQ ID NO: 350557 - DNA, 201 bp, Homo sapiens
ttaattaaagaaatggtttcaagaagagggtgaatactataaaaatagacttaccttcctgaattgaggaattcatcaggaaagcctcaagtgtgcaaatkagccatccttccagagggaaatttcttagaattatcccacgatttgagccaaagcacttccgatagaatttttaacctctagttggttctgctccttcca

SEQ ID NO: 350558 - DNA, 201 bp, Homo sapiens; identical to SEQ ID NO: 74789

SEQ ID NO: 350559 - DNA, 201 bp, Homo sapiens
ccttctccttttcagagctttcagagtttcttatggacaggaagacctagagaaagtatttccccttctccttgatgatagccagaatgaggacaagaaastattggagagacttagatgattcagaatgtaaattaaccagtgtagctactggaagctgtcaattcttctctttcaaaatgtgtctgattcatagccata

SEQ ID NO: 350560 - DNA, 201 bp, Homo sapiens
gagccatccttccagagggaaatttcttagaattatcccacgatttgagccaaagcacttccgatagaatttttaacctctagttggttctgctccttccvtttttactaatttttaagaaaatactatgacttataattgtatctggaatgattatcaactccttttcatccactgacttaaatttgattataaatatgc

SEQ ID NO: 350561 - DNA, 201 bp, Homo sapiens
attaaccagtgtagctactggaagctgtcaattcttctctttcaaaatgtgtctgattcatagccatattttatactttaacattaaaggtatttacttgyatttgatcctttacctttaagaactatttgctctgtagctgaaaccatcacacttaacaaactaacaaaaatcatgtttgtgttctaggcagatgtatta

SEQ ID NO: 350562 - DNA, 201 bp, Homo sapiens
gaggctaaagcaggtagatcacctgaggtcaggagtttgagaccagtctggccaacatggcgaaaccccatgtctactaaaaatacaaaaaaaaaaaaaaagccaggcgtggtggtacccgcctgtaatcccagctactcgggaggctgaggcaggagaatcacttgaacctgggaggcagaggttgcagtgagctgagat

SEQ ID NO: 350563 - DNA, 201 bp, Homo sapiens
gccttggtttccccccataaagagataatagaatctatctcatagggttagcatgtggattaactgagttaatacatgtaaagtactcagaaaagtacctsgcacatgaaaatagctaacattgattgagcgtttactgttaatgctattcaggtatcacagcagtttgggagtaggtgggtcctttagcactccgaaatc

SEQ ID NO: 350564 - DNA, 201 bp, Homo sapiens
ctgaactggggccgcctgcggaagaagtgcccgtccacgcacagcgaggaggtgagcgtggcgacactcgccgcggggctcccggggcaggcctcgggcgsggccgggcggttccggcaagggagaagcgcccgcgggcgagggagggtggcagggcctcgcgcgcacctgggctccgcccgcggtcagatgctgaggcca

SEQ ID NO: 350565 - DNA, 201 bp, Homo sapiens
tttgtttgttgttgtttcttttagaactgctttctgaagcaagtttccaagaagctcttcaggaaagcattcctgacattcaagcgcacgagtgggtgccrctgtggctactgcggtattcggtcattgtgaaaagtagaggaattatcaaatcaaaaggctacattttacaagctaaaagaaggggttcttaactgactt

SEQ ID NO: 350566 - DNA, 201 bp, Homo sapiens
ttcaaaagacagcagaagacaagaaataacacagatcagagcaggactgaaggagatagagacacaaaaaactcttcaaaaagtcaatgaagccaggagcyggttttctgaaaagatcaacaaaatagactactagcaagactaataaagaagaaaagagagaagaataaaatagatgcaataaaaaatgataaaggggat

SEQ ID NO: 350567 - DNA, 201 bp, Homo sapiens
atttgacatacagctgttgactcacaatgatccaaaaggtaaaactgatattttcattatagagattgatcataagcttttgtcttacaaaaaggtatttkttgatacataattttaaatgtggacagtgataaaaatacagtgttatctgaactattcttaatggttagttcaaaacctatatgccctcattttattttc

SEQ ID NO: 350568 - DNA, 201 bp, Homo sapiens
tatggataatagaaaattttataattaatcagaagcattaaattttatatttgttttaaatattgtgtttattataggagtttccagatgtcttggaatgmactgtatctcatgcagtagaaaagataaatcctgatgaaagagaagaaatgaaagtttctggtaaagtccagtcttttctgtttattttgttacatagcg

SEQ ID NO: 350569 - DNA, 201 bp, Homo sapiens
gtatattctgattttttcttttattttaatttttaaaatgttgatttcttgatgctcagagtcacacaccacagtttgtaaaacattgttcaaaggactarttctggtttctagtgttttatttagggtgcttcataacagtaggataaaactaaagaaactagaaaacatttcaggaaaacttgaaggaatggcatcata

SEQ ID NO: 350570 - DNA, 201 bp, Homo sapiens
gtttctatgtaaaagaactttgtaacacccagagctccaaattgggatgtactacttggaacagttccgcttcactgaagaaattaagtaaactgaacaawtcacttatttttgagaaaatgtacgtgttgggtcaagagttcagttaaatttcttacaaggtctcttctagttctaattttttaaaaaatgttatgacct

SEQ ID NO: 350571 - DNA, 201 bp, Homo sapiens
attttaataaacagcacaggtgaatctgaggtaggatttaccagccacacttattctctaataatttaatttgtttgtctttgagaaatgtagcatagttktgatatgaattctagtcagacagcctgggcttgactccaagttcctttgtttataaaccttatttttgtttctttatgaatgcctttttttttttttttt

SEQ ID NO: 350572 - DNA, 201 bp, Homo sapiens
gagtagctactacaggcttgcactactaggcccacatgatttttgtatttttagtagagacagggtttcaccatgttggccaggctggtcttgaactcctsacctcaagtgatttgcccccctcagcctcccaaagtgctgggattacaggcatgagccactatacctggcctatgaatgcttttgtgtctcaacagttag

SEQ ID NO: 350573 - DNA, 201 bp, Homo sapiens; identical to SEQ ID NO: 74802

SEQ ID NO: 350574 - DNA, 201 bp, Homo sapiens
tcaaatgtcagtttctgatgaaacaataaggaactgtgttccactaaatgtcagtatatggctactatcataaatgttaatgttcaaaaccctaaaacacrttttgaaatccaactcagtcaaaggctcacagcacattacttaggctactttaaaagtatggaaaaggacatgtgctggaaatactggttcccctgggca

SEQ ID NO: 350575 - DNA, 201 bp, Homo sapiens
atatgtatctgatttatatgtactaatattttctcattatccttgtaaattattcattaaaatacattcaaatagcctttgcttttttctgctgcactcargaaaaaaaaagttttggtttacaatgcttgtgattacaggctgggcgcagtggctcacgcctataatcccagcactttgggaggctaaagcaggtagatc

SEQ ID NO: 350576 - DNA, 201 bp, Homo sapiens
tccaatcttgaatttagaggaaattcagccttctaatttttttccttcagttttagtgttacttgtactcttgttaaactcatcgctggcatttgaaatasaaggctttttggaatttgttccctaaaatttattgcatttgtttagtggattatgtgagtggcacagaaatcctaagaaagagcttaacttttctctgca

SEQ ID NO: 350577 - DNA, 201 bp, Homo sapiens
caggattttatgtgaagctatatttctttaaagatggcagcattttcttctcaaaatgaggatcaagactatggtatctttacagtattaaaaataaactrtgctttggacctgcaaagaaatattcagatgtcataacctgaaaataacctctgaattttcccacactctaacaaatctccaaactgccaaatggatatg

SEQ ID NO: 350578 - DNA, 201 bp, Homo sapiens
cattaaaaaacttagaaagtaataataaactataaacacaatgctactgaagctcagctacaacaccacattctcagctctagtttggatagaacacaagwgttttaaattgcattgggtggaggccctggcaggaaggaagcatcggatattgctggaacatatctttgtttgagcaacagctaatgagaaaggtcacca

SEQ ID NO: 350579 - DNA, 201 bp, Homo sapiens
attccaatcttgaatttagaggaaattcagccttctaatttttttccttcagttttagtgttacttgtactcttgttaaactcatcgctggcatttgaaawacaaggctttttggaatttgttccctaaaatttattgcatttgtttagtggattatgtgagtggcacagaaatcctaagaaagagcttaacttttctctg

SEQ ID NO: 350580 - DNA, 201 bp, Homo sapiens; identical to SEQ ID NO: 74824

SEQ ID NO: 350581 - DNA, 201 bp, Homo sapiens
cagcagcctggcccaccgcatcgctgcccagaccctgctggtgagtgagggtggcccctggggaacatcgggaaggcccaggcctgtacctcttccagtgygcagggaaacagcaggctcgagaagctggggccaaggttgggggatgcaacgagggcaggccgcacagtggggaccgcaccacctccccccgtcaccagg

SEQ ID NO: 350582 - DNA, 201 bp, Homo sapiens; identical to SEQ ID NO: 74825

SEQ ID NO: 350583 - DNA, 201 bp, Homo sapiens
gtaagggctgggatctggcctggggagcctgaactgtccccgcctcacccctgcagaggaaaaacgtgcacatgaacgacaacgtcctgcactcggccttygaggtgggcgcccgcaaggtggtgtcctgcctgtccacctgtatcttccctgacaagacgacctacccgatagatgagaccatggtgaggggcagggcct

SEQ ID NO: 350584 - DNA, 201 bp, Homo sapiens
aatcggcgagggtggggacggggaggcgagtcctattggagggcgggggtggggcctagatctgtgggcggggcgcggcctgtggatgggcggtgagcgcmgcggcgtccgaggcaacaagatggcagctgcggagccgtctccgcggcgcgtgggcttcgtgggcgcgggccgcatggcgggggccatcgcgcagggcct

SEQ ID NO: 350585 - DNA, 201 bp, Homo sapiens; identical to SEQ ID NO: 74834

SEQ ID NO: 350586 - DNA, 201 bp, Homo sapiens; identical to SEQ ID NO: 74836

SEQ ID NO: 350587 - DNA, 201 bp, Homo sapiens
catgctgggtggtggtcacagacattcactggggatggagggctcagggcttggggaggcgctgacatcaggatggcctgtgaggagtagggctagtctgsgggagtcttgggcactggagaagtcggggtggtctagacacttgcaatgggagaggccctgggaccatgggaacgtgtggcatccagcaggaagggctgt

SEQ ID NO: 350588 - DNA, 201 bp, Homo sapiens
accgttgggctcaggccttggttctggccacccacggctactgctctgggcattgttcctgaaggtcctgagcccccaggctttgacacctatcccccccmaccaccatgccgcggctacaggtgtgtgcattctccgaggccctggctgaaggagccgtcaagatgggcatgcccagcagcctggcccaccgcatcgctg

SEQ ID NO: 350589 - DNA, 201 bp, Homo sapiens
cgtcatctttgccaccaagcctcatgtgctgccagctgtcctggcagaggtggctcctgtggtcaccactgaacacatcttggtgtccgtggctgctgggrtgtctctgagcaccctggaggaggtgagtgtcccttgggctaaggccttggtcccagtataggctctgctggccaggcttgggcggcaggcagcccccca

SEQ ID NO: 350590 - DNA, 201 bp, Homo sapiens
atgcgtgtgtgagtgcatgtccgtgagtgtgtgtatatgcacgtgtgtatatgtgaggctatgcgtgtgcatgtgtgtatgtgctcatgtgcgtttgcacrtgcgcttgtgtgtgcgtgtgcacgtgtggtgagtgcatgtatgtcagtgcatgtgtgtgcgtgtgtgtatgagtgcatgctcatgagtgcatgtgcacct

SEQ ID NO: 350591 - DNA, 201 bp, Homo sapiens
cgtggttgctccccaggcccactgggagctctgcttgtccccgggacttcactgccttggggatctttgaggccagcccctttgcagaccgttgggctcargccttggttctggccacccacggctactgctctgggcattgttcctgaaggtcctgagcccccaggctttgacacctatcccccccaaccaccatgccgc

SEQ ID NO: 350592 - DNA, 201 bp, Homo sapiens; identical to SEQ ID NO: 74827

SEQ ID NO: 350593 - DNA, 201 bp, Homo sapiens
ggagggaggatgctcaccctggcaggcggaggagctctgctgtggctcccctgggaatggcagaggttcaagggcaagctgcgggggctggggtggaggtkctcttctcgctgtggccttgacaaagcctccagtttgatacaaccaagtcggatgggcagtttaagaagacagccagtaacagcaagctgaggacctacc

SEQ ID NO: 350594 - DNA, 201 bp, Homo sapiens
cgcacgcgcgaccgggacccctccccgctcctccggcctctccgagcgcgagtaccccgccggccccgccccttacggccccgcccccagtttctctcagycaatgggcagtgaggggcggcatagccctttcgggccaataagcagcgagaggcggggttcccgcgccttgcgaacttgtagagtgcggacaaaaagccg

SEQ ID NO: 350595 - DNA, 201 bp, Homo sapiens; identical to SEQ ID NO: 74828

SEQ ID NO: 350596 - DNA, 201 bp, Homo sapiens; identical to SEQ ID NO: 74829

SEQ ID NO: 350597 - DNA, 201 bp, Homo sapiens
ccctctcctctccgtgccatcctatcccaccccttcaccaacccctcttccttttcctttctttccaggaaaagtggaagctcagcacatactggccagtrcaccaacagacaggaacctatgtcactttcaagtgagcatagagcccaggttcttcataccctcaggagcccaggatagctcttggctcctgtcccacta

SEQ ID NO: 350598 - DNA, 201 bp, Homo sapiens
gccaccgcagagctgtttctagcccccgcacggcctccccggcagtcggcactgaggtccctccatagtcggtggcctcctcctcgtcctctccgcccccmatggcagagggcagactggctggggccggaggcgctgcagggggcagggctgggcccacctcctccctgcagccctcgggcggacccccatcatcgtcca

SEQ ID NO: 350599 - DNA, 201 bp, Homo sapiens
tgagtgcgtccgtccgatggggtgcccgggctcagctcgggaggaggtgacccagtgcctctgacacctgctccttccccaaatctgcaggcagcggctcrgccctgacggtgtggggtacagggaatccgcggaggcagttcatatactcgctggtgcgtaaaggaaggcacagctctccccagagaacctgccctattg

SEQ ID NO: 350600 - DNA, 201 bp, Homo sapiens
cactggggatggagggctcagggcttggggaggcgctgacatcaggatggcctgtgaggagtagggctagtctgcgggagtcttgggcactggagaagtcrgggtggtctagacacttgcaatgggagaggccctgggaccatgggaacgtgtggcatccagcaggaagggctgtgatggagagggtgcgccgcttacatg

SEQ ID NO: 350601 - DNA, 201 bp, Homo sapiens; identical to SEQ ID NO: 74846

SEQ ID NO: 350602 - DNA, 201 bp, Homo sapiens
gctaggcctgcggtctggagtgggagcagccccgtgggaggtgtcctgccgcgagagtggggccgggggcgcgggcccagccaaccgggtctccgctccgstgggcgcagccggggccacgcctgtttgctcttacttttttgacgtggctgcgggaagatttgagtcacacgtggctaggtgccgcttccgtggccggct

SEQ ID NO: 350603 - DNA, 201 bp, Homo sapiens
gtgtggtccaggaaggggccatagtgatggcgcggggccgccacgtggggagcagcgagaccaacctcctgcagcatctgctggaggcctgtgggcggtgygaggaggtgcctgaagcctacgtcgacatccacactggcctcagtggcagtggcgtggccttcgtgagtattgcctcgtccatccccggccccaccctcg

SEQ ID NO: 350604 - DNA, 201 bp, Homo sapiens
tgggttgccggaccacgcactccaaccaggaggtgctgcagagctgcctgctcgtcatctttgccaccaagcctcatgtgctgccagctgtcctggcagargtggctcctgtggtcaccactgaacacatcttggtgtccgtggctgctggggtgtctctgagcaccctggaggaggtgagtgtcccttgggctaaggcct

SEQ ID NO: 350605 - DNA, 201 bp, Homo sapiens
gtgtggcatccagcaggaagggctgtgatggagagggtgcgccgcttacatggcccctgaggcttggtcctggtgtccctggcgcaggctctgggttgccrgaccacgcactccaaccaggaggtgctgcagagctgcctgctcgtcatctttgccaccaagcctcatgtgctgccagctgtcctggcagaggtggctcct

SEQ ID NO: 350606 - DNA, 201 bp, Homo sapiens
agaccgttgggctcaggccttggttctggccacccacggctactgctctgggcattgttcctgaaggtcctgagcccccaggctttgacacctatcccccmcaaccaccatgccgcggctacaggtgtgtgcattctccgaggccctggctgaaggagccgtcaagatgggcatgcccagcagcctggcccaccgcatcgc

SEQ ID NO: 350607 - DNA, 201 bp, Homo sapiens
agcagcctggcccaccgcatcgctgcccagaccctgctggtgagtgagggtggcccctggggaacatcgggaaggcccaggcctgtacctcttccagtgcrcagggaaacagcaggctcgagaagctggggccaaggttgggggatgcaacgagggcaggccgcacagtggggaccgcaccacctccccccgtcaccaggc

SEQ ID NO: 350608 - DNA, 201 bp, Homo sapiens
gcccgggcactttaggggtgggctcagcagaacctcagcagcctctgactcccttatctatttctgcaggagtggtctccccaacttcctagcagtcgccytggccctgggagagctgggctaccgggcagtgggcgtgaggctggacagtggtgacctgctacagcaggctcaggagatccgcaaggtcttccgagctgc

SEQ ID NO: 350609 - DNA, 201 bp, Homo sapiens
cagggacaggtggctgccccaccgccctcatcctgacccccagccccggtagagccctgactgggagctagccccaagcttctctttccttacctcctccstgcagctgtgtgagccgctcccatccctggcagagtctagagccttggcccagctgtccctgagccgactcagccctgagcacaggcggctgcggagccc

SEQ ID NO: 350610 - DNA, 201 bp, Homo sapiens
cctgagcatggcagggggaccctaggagcaggctgggcactgagccctcccctcctcctgccttgcagagctcaggccccggggcctccagcggcaccagyggagaccacggtgagctcgtcgtccggattgccagtctggaagtggagaaccagagtctgcgtggcggtgaggccccgggccagtgggttggggctgtcc

SEQ ID NO: 350611 - DNA, 201 bp, Homo sapiens
ccggggtttgggaatgggcagggaaggacagtgaggtactctgctgaagtttcagcggtgatactgcaggccgtggcagggaagtaagtggtggggctccytaggagctcccaagcagaaggtgagcacaggtgtccttgactgaggcggggcggggagcagggggacaccagggtgaatcaggaagacccgaggggtggc

SEQ ID NO: 350612 - DNA, 201 bp, Homo sapiens
caacttcctagcagtcgccttggccctgggagagctgggctaccgggcagtgggcgtgaggctggacagtggtgacctgctacagcaggctcaggagatcygcaaggtcttccgagctgctgcagcccagtgagtttcccggggaggaggtgtgcctggtgggagatccccggggtttgggaatgggcagggaaggacagt

SEQ ID NO: 350613 - DNA, 201 bp, Homo sapiens
actcccttatctatttctgcaggagtggtctccccaacttcctagcagtcgccttggccctgggagagctgggctaccgggcagtgggcgtgaggctggayagtggtgacctgctacagcaggctcaggagatccgcaaggtcttccgagctgctgcagcccagtgagtttcccggggaggaggtgtgcctggtgggagat

SEQ ID NO: 350614 - DNA, 201 bp, Homo sapiens
agggtagggtgcatgcaggtacttcctgggtgttctgagggtggctgaccccagcttttcctcccctttccccacagtgggatgatgagacggacatggcycagctggaggcctgtgtgcgctctatccagctggacgggctggtctggggggcttccaagctggtgcccgtgggctacggtatccggaagctacagattc

SEQ ID NO: 350615 - DNA, 201 bp, Homo sapiens
cagcctccacctacagctacctgggcggtgagtgtctggtgcggggcaaggcaagggccgggaaggaggagccccatcttggcccgaggtcccccaatccyaccgccttcctccccaggcttcgacagcagcagcaacgtgctagcgggccagctgcgaggtgtgccggtggccgggaccctggcccactccttcgtcact

SEQ ID NO: 350616 - DNA, 201 bp, Homo sapiens
tgcctggtgggagatccccggggtttgggaatgggcagggaaggacagtgaggtactctgctgaagtttcagcggtgatactgcaggccgtggcagggaartaagtggtggggctccctaggagctcccaagcagaaggtgagcacaggtgtccttgactgaggcggggcggggagcagggggacaccagggtgaatcagg

SEQ ID NO: 350617 - DNA, 201 bp, Homo sapiens
accatggcgttgggctattggcgcgcgggccgggcgcgggacgccgccgagttcgagctcttcttccgccgctgcccgttcggcggcgccttcgccttggycgccggcttgcgcgactgtgtgcgcttcctgcgcgccttccgcctgcgggacgccggtagtcccccgtccgcgcgacgagccccccacgcccggcagaaa

SEQ ID NO: 350618 - DNA, 201 bp, Homo sapiens
ccatggcgttgggctattggcgcgcgggccgggcgcgggacgccgccgagttcgagctcttcttccgccgctgcccgttcggcggcgccttcgccttggcmgccggcttgcgcgactgtgtgcgcttcctgcgcgccttccgcctgcgggacgccggtagtcccccgtccgcgcgacgagccccccacgcccggcagaaac

SEQ ID NO: 350619 - DNA, 201 bp, Homo sapiens
ggcccggctgaacgtgctggagaagagctcgcctggccaccgggccacggccccacagacccaggtgaatgctctccccacgcctgacactgcaggggacyacgtggccctgctggcttccacgtcgccctgtgggctggccccagcagcagtgatgagctggcagccaggatactggagtcctcaggtccccaggaaggt

SEQ ID NO: 350620 - DNA, 201 bp, Homo sapiens
gccgggcgcgggacgccgccgagttcgagctcttcttccgccgctgcccgttcggcggcgccttcgccttggccgccggcttgcgcgactgtgtgcgcttyctgcgcgccttccgcctgcgggacgccggtagtcccccgtccgcgcgacgagccccccacgcccggcagaaacccccacctatggccggtggaagtcctt

SEQ ID NO: 350621 - DNA, 201 bp, Homo sapiens
gcctgtgtgcgctctatccagctggacgggctggtctggggggcttccaagctggtgcccgtgggctacggtatccggaagctacagattcagtgtgtggwggaggacgacaaggtggggacagacttgctggaggaggagatcaccaagtttgaggagcacgtgagtgagccggccggggagaggaggggagaggagact

SEQ ID NO: 350622 - DNA, 201 bp, Homo sapiens
cagagttcctgggaggagggagttcttgccgacctcgcgttgtacacggctgcctgcctggaggaggctggctttgcagggacccaggcgacagcgctcaycctgtcctcagccctggaggcccggggcgagcggttggaggaccaggtcagccttcacccacttcatgccctacagaatcctgccggttcgggcaccaag

SEQ ID NO: 350623 - DNA, 201 bp, Homo sapiens
ctgtgtgcgctctatccagctggacgggctggtctggggggcttccaagctggtgcccgtgggctacggtatccggaagctacagattcagtgtgtggtgraggacgacaaggtggggacagacttgctggaggaggagatcaccaagtttgaggagcacgtgagtgagccggccggggagaggaggggagaggagactgg

SEQ ID NO: 350624 - DNA, 201 bp, Homo sapiens
tatccagctggacgggctggtctggggggcttccaagctggtgcccgtgggctacggtatccggaagctacagattcagtgtgtggtggaggacgacaagrtggggacagacttgctggaggaggagatcaccaagtttgaggagcacgtgagtgagccggccggggagaggaggggagaggagactggggaccctggccc

SEQ ID NO: 350625 - DNA, 201 bp, Homo sapiens
gttccccagagttcctgggaggagggagttcttgccgacctcgcgttgtacacggctgcctgcctggaggaggctggctttgcagggacccaggcgacagygctcatcctgtcctcagccctggaggcccggggcgagcggttggaggaccaggtcagccttcacccacttcatgccctacagaatcctgccggttcgggc

SEQ ID NO: 350626 - DNA, 201 bp, Homo sapiens
atccagctggacgggctggtctggggggcttccaagctggtgcccgtgggctacggtatccggaagctacagattcagtgtgtggtggaggacgacaaggwggggacagacttgctggaggaggagatcaccaagtttgaggagcacgtgagtgagccggccggggagaggaggggagaggagactggggaccctggccca

SEQ ID NO: 350627 - DNA, 201 bp, Homo sapiens
tggggctccctaggagctcccaagcagaaggtgagcacaggtgtccttgactgaggcggggcggggagcagggggacaccagggtgaatcaggaagacccraggggtggcccccaccctttctccacccacgcggcaggttccaggtgccctggctggagtcagtcctcatcgtagtcagcaacaacattgacgaggaggc

SEQ ID NO: 350628 - DNA, 201 bp, Homo sapiens
actgccacctccttcccccacccagggcactgccacccccttccccacccagggcactgccacccccttcacccagggcagtgccacctccttccccaccyagggcactggcacctccttccccacccagggcactgccacccccttccccacccagggcagtgccacctccttccccacccagggcagtgccaccccctt

SEQ ID NO: 350629 - DNA, 201 bp, Homo sapiens
cctccttcccccacccagggcactgccacccccttccccacccagggcactgccacccccttcacccagggcagtgccacctccttccccacctagggcastggcacctccttccccacccagggcactgccacccccttccccacccagggcagtgccacctccttccccacccagggcagtgccacccccttccccacc

SEQ ID NO: 350630 - DNA, 201 bp, Homo sapiens
ccttcccccacccagggcactgccacccccttccccacccagggcactgccacccccttcacccagggcagtgccacctccttccccacctagggcactgscacctccttccccacccagggcactgccacccccttccccacccagggcagtgccacctccttccccacccagggcagtgccacccccttccccacccag

SEQ ID NO: 350631 - DNA, 201 bp, Homo sapiens
tgcagctggtggccgtggggggccagccacgaatgaagctgaccgaggaccccgagaagcagacgttgcctgggagcaaggctgctttccggctcctgggytctgacggtgaggccctcccatcccccctgctgtccaccttcaaagcaccagggcccccgcttattcttgccccgtccacacagggtctccactcatgga

SEQ ID NO: 350632 - DNA, 201 bp, Homo sapiens
gaggcctgtgtgcgctctatccagctggacgggctggtctggggggcttccaagctggtgcccgtgggctacggtatccggaagctacagattcagtgtgyggtggaggacgacaaggtggggacagacttgctggaggaggagatcaccaagtttgaggagcacgtgagtgagccggccggggagaggaggggagaggag

SEQ ID NO: 350633 - DNA, 201 bp, Homo sapiens
ctcgaggtagcaggaagatttgcatcccagtgaaagcacaggccctgccggcgtgggagacagccctgtgctgaagcccgaagggcagtgaggagttcccyggctttgggtgggctgtggggagtcagatcccacactagaactacaaagccacaggcagggagggctttggtgtctgccttggagttgagggagttgctg

SEQ ID NO: 350634 - DNA, 201 bp, Homo sapiens; identical to SEQ ID NO: 74860

SEQ ID NO: 350635 - DNA, 201 bp, Homo sapiens
cttccgccgctgcccgttcggcggcgccttcgccttggccgccggcttgcgcgactgtgtgcgcttcctgcgcgccttccgcctgcgggacgccggtagtmccccgtccgcgcgacgagccccccacgcccggcagaaacccccacctatggccggtggaagtccttgcccccccgtggaaccccccatgtcccacgaccg

SEQ ID NO: 350636 - DNA, 201 bp, Homo sapiens
tgcgcgccttccgcctgcgggacgccggtagtcccccgtccgcgcgacgagccccccacgcccggcagaaacccccacctatggccggtggaagtccttgyccccccgtggaaccccccatgtcccacgaccggtctgtccccgcgctggtctcagcgcagttacctcgtttccagacgtgcagttcctggcctcggtgct

SEQ ID NO: 350637 - DNA, 201 bp, Homo sapiens
gcgctggtctcagcgcagttacctcgtttccagacgtgcagttcctggcctcggtgctgcccccagacacggatcctgcgttcttcgagcaccttcgggcyctcgactgctccgaggtgacggtgcgagccctgcccgagggctccctcgccttccccggagtgagtaggggtaagcgggcggcgcggcggccacggggtg

SEQ ID NO: 350638 - DNA, 201 bp, Homo sapiens
ctacagcgtgtggaggtgagcccgggcactttaggggtgggctcagcagaacctcagcagcctctgactcccttatctatttctgcaggagtggtctcccyaacttcctagcagtcgccttggccctgggagagctgggctaccgggcagtgggcgtgaggctggacagtggtgacctgctacagcaggctcaggagatcc

SEQ ID NO: 350639 - DNA, 201 bp, Homo sapiens
gctcccatccctggcagagtctagagccttggcccagctgtccctgagccgactcagccctgagcacaggcggctgcggagccctgcacagtaccaggttsgggggaggcccaccctgtcattctgccctgtgcgcccccgccctcaccctgcccaccgctcctgtcctctgctccctgcaggtggtgctgtccgagaggc

SEQ ID NO: 350640 - DNA, 201 bp, Homo sapiens
ctggaggcctgtgtgcgctctatccagctggacgggctggtctggggggcttccaagctggtgcccgtgggctacggtatccggaagctacagattcagtstgtggtggaggacgacaaggtggggacagacttgctggaggaggagatcaccaagtttgaggagcacgtgagtgagccggccggggagaggaggggagag

SEQ ID NO: 350641 - DNA, 201 bp, Homo sapiens
ggccctcgactgctccgaggtgacggtgcgagccctgcccgagggctccctcgccttccccggagtgagtaggggtaagcgggcggcgcggcggccacggkgtgctgggccgagcgcggagctgacttctctccccgcaggtgccgctcctgcaggtgtccgggccgctcctggtggtgcagctgctggagacaccgctgc

SEQ ID NO: 350642 - DNA, 201 bp, Homo sapiens; identical to SEQ ID NO: 74854

SEQ ID NO: 350643 - DNA, 201 bp, Homo sapiens; identical to SEQ ID NO: 74855

SEQ ID NO: 350644 - DNA, 201 bp, Homo sapiens
cccagtgcagctccaggcgtgccccaggcctgagtgggccacttgctccacaggccacacgtgctcttggggagatgctggctgtttcgggctgcgtgggwgccacgaggggcttctacccacatctgctgcttgcgctggtcacacagctgcacaagctggcccgcagcccgtgctcccccgacatgcccaagatttggg

SEQ ID NO: 350645 - DNA, 201 bp, Homo sapiens
ccagcccggcgggtcacgtgaggtttgaagggagcgctcctgtgtggcccatggtcccccccgctgtcattttttaacatccctattcctaccaacagcawgttcgtggcagtttaggtttaggttgttctagaagatgacgtgttttctctgccctgctcctcacctcctctgagtcctcaccgagggccttagcatctg

SEQ ID NO: 350646 - DNA, 201 bp, Homo sapiens
cccagtgagtttcccggggaggaggtgtgcctggtgggagatccccggggtttgggaatgggcagggaaggacagtgaggtactctgctgaagtttcagcrgtgatactgcaggccgtggcagggaagtaagtggtggggctccctaggagctcccaagcagaaggtgagcacaggtgtccttgactgaggcggggcgggg

SEQ ID NO: 350647 - DNA, 201 bp, Homo sapiens
cctgcaggtggtgctgtccgagaggctgcaggccctggtgaacagtctgtgtgcggggcagtccccctgagactcggagcggggctgactggaaacaacasgaatcactcacttttccccacagcttgtcctgtgttgtttgtgtcgtttgttcacccagcccacgggctgcgcctcccgggctgcggctgggctggagtc

SEQ ID NO: 350648 - DNA, 201 bp, Homo sapiens
gctggaggcctgtgtgcgctctatccagctggacgggctggtctggggggcttccaagctggtgcccgtgggctacggtatccggaagctacagattcagbgtgtggtggaggacgacaaggtggggacagacttgctggaggaggagatcaccaagtttgaggagcacgtgagtgagccggccggggagaggaggggaga

SEQ ID NO: 350649 - DNA, 201 bp, Homo sapiens
aggcctgtgtgcgctctatccagctggacgggctggtctggggggcttccaagctggtgcccgtgggctacggtatccggaagctacagattcagtgtgtsgtggaggacgacaaggtggggacagacttgctggaggaggagatcaccaagtttgaggagcacgtgagtgagccggccggggagaggaggggagaggaga

SEQ ID NO: 350650 - DNA, 201 bp, Homo sapiens
gggaccttttccctgtccttgggcctgctgtgtggggtgcatgaggcctcaggtgccactcacagactccggcctcctcaggacccagccccactcccgcrggaggtctgctgtgattctccatgccccctgacgccccaaagcctggccctcccgtgctccagcttctgcccccgagtttgtcagtttctgccggtgcct

SEQ ID NO: 350651 - DNA, 201 bp, Homo sapiens
cccccactcttcagggtgtaaggaggggctgggtgagggtggagctcccaggttggaagttccaggccccaggtaaccgccgtcttgggtggcctagtgaycctcaccctgggaccccctgactcttggctccccacagcctggtggccaccaacgcagcgcggcttcgcttgatcgcagggccagagaagcggctgctag

SEQ ID NO: 350652 - DNA, 201 bp, Homo sapiens
agcggttggaggaccaggtcagccttcacccacttcatgccctacagaatcctgccggttcgggcaccaaggtggtgggaggggcctggagagcgcagccwgaccctgccatcttcaggctgctcctgccaggcgggatcagggtgggggtggaggtggggtgcaggccagaggggaatggacggtggaggaggcctgact

SEQ ID NO: 350653 - DNA, 201 bp, Homo sapiens
gttctggtacaggatattttgatgatgctttggaagatttcaagaaggtcttagacttaaatcctggatttcaagatgctactttgagcttaaaacagacyattctagacaaagaagaaaaacaaagaagaaatgttgcaaaaaattattgatatttttaacttaatggaagtattgattcatgatccttacatctgcatc

SEQ ID NO: 350654 - DNA, 201 bp, Homo sapiens
tttggccctactactgaagaaacaacaaaaaacccttggtatggtttggctgtgtccccacccaaaatctcatcttgaattgtaatccccataatccccaygtgtcaagggagagaccaggtggaggtaattgaatcatggagctgtttccccgatgctgttctcgtgatagtgagtgaattctcacgagatctgatggtt

SEQ ID NO: 350655 - DNA, 201 bp, Homo sapiens
gacacaaagcgtttcagggtagacaaagcctactcagaacaccctaaacgcggagttttgctaagttgggacgctaaaaggcaagggaatgacaggaagtycgcaggctaattcgccattaagaaacagaaccgcggcttcttccacctccagcgtcatcggcccccaattcgctgtaacaaacggatagtgtctcgcagc

SEQ ID NO: 350656 - DNA, 201 bp, Homo sapiens
ataatatatagaaatactcggtttcttttctcttttccattttttgggttctggtacaggatattttgatgatgctttggaagatttcaagaaggtcttasacttaaatcctggatttcaagatgctactttgagcttaaaacagactattctagacaaagaagaaaaacaaagaagaaatgttgcaaaaaattattgata

SEQ ID NO: 350657 - DNA, 201 bp, Homo sapiens
tcatccctgactcagagcagaggcactaatgttctctgtgcagactatttgtcctgtgcagagaaaggttcaaggcagccaggggctgtgacctgttgagytggtggctggtcagagctacctggctgtacagcccaggaatggctgctaatttaaagctctttgggcaacctctagttccctcaggtgcagagccagttc

SEQ ID NO: 350658 - DNA, 201 bp, Homo sapiens; identical to SEQ ID NO: 74870

SEQ ID NO: 350659 - DNA, 201 bp, Homo sapiens
gtcgacacaaagcgtttcagggtagacaaagcctactcagaacaccctaaacgcggagttttgctaagttgggacgctaaaaggcaagggaatgacaggamgtccgcaggctaattcgccattaagaaacagaaccgcggcttcttccacctccagcgtcatcggcccccaattcgctgtaacaaacggatagtgtctcgc

SEQ ID NO: 350660 - DNA, 201 bp, Homo sapiens
cggatagtgtctcgcagcatcagacaacggacttggaaatcagtttgcgaccacgcatctgcgccttttctaggaaaagaggaaggcgggtccaacactgstaacggcagaaacatagttcacaagggccactgcaaacgccccgccagcagcggaaccgttatctcgcgagacgacggatccccataaggcacaaaccta

SEQ ID NO: 350661 - DNA, 201 bp, Homo sapiens
tatagctttagtcataaacctaatttccaaagtgtgtgtgtatatatatacacacactttatatataaaaaatatatatacacacactttatatatatataaaaaatatttttttttgcgaaagttagcaaatcctaaaaattcacatttgggttaggtaacttgaatgaattccattataataaatactatcattacaaa

SEQ ID NO: 350662 - DNA, 201 bp, Homo sapiens; identical to SEQ ID NO: 74868

SEQ ID NO: 350663 - DNA, 201 bp, Homo sapiens; identical to SEQ ID NO: 74871

SEQ ID NO: 350664 - DNA, 201 bp, Homo sapiens
tagttcacaagggccactgcaaacgccccgccagcagcggaaccgttatctcgcgagacgacggatccccataaggcacaaacctagcgccaaggttggcygtcaaggtagattccagggtgtggaagtggctttgtggtgccacctctaaccgctcggaggtcaacccccattctacaccgaaaactaggccttggctgc

SEQ ID NO: 350665 - DNA, 201 bp, Homo sapiens
tgttatttcagagctttcaaatgttgtaaaactaacgtggtaatcaaattttaaagttctgtgaaatttaggtttagagcttggaacaaaggaagtgtccytgagtttattttaggcttttgataggcgttatagatcacagcagagcactggggtgggaattggacctgggcgcaggagcaggggtgaccccattacttt

SEQ ID NO: 350666 - DNA, 201 bp, Homo sapiens; identical to SEQ ID NO: 74872

SEQ ID NO: 350667 - DNA, 201 bp, Homo sapiens
ggttaaacaaaaattgattttagctctttatttgtacgttttttcttcagcttggattttcagtgttgatgctgcatgttataggctgtgaagtttgacartacccaaaagagaatgaaagtggaaatgagaggaatttggtaacacggtgtttttaatgtgaactttttgtttaaagcaaatgcagccctgaggatttgg

SEQ ID NO: 350668 - DNA, 201 bp, Homo sapiens
gggctccacaaatgtgcagaaataccctaagaaagtaaaccctagatccaatgattcactggtcagaatgtcttttttagcaatagtcattgaaatgataygaaatttcttcagaatgatcaaccaatatttattgagcatcttctcagtagtaagcccttaacattctttcagatttcctaaattttgaaggggcttgtt

SEQ ID NO: 350669 - DNA, 201 bp, Homo sapiens
ttgtgggttcctcatactggagtgagccttggcaaaaatggtgtgtgtgtgtgtgtgtgtgtgtgagagagagagagagagagagagagagaggagacagragagaaggagaagaggggagaggggaggagggacagagagagagagaggtctcctacagagagcttggagctcaggctgctttgctcatttgagtgtaat

SEQ ID NO: 350670 - DNA, 201 bp, Homo sapiens
ctctgttgttattctccatttgttcattatatctatcttttctttgaaatccttgaaaatatttataatagctattttaaagtcctctgctaatcccgatrtctgggacatcttggcttctgttgatattgaatacttctttttttccccttaattaagggtttccttttcctgctttttcacatatctagtagattttta

SEQ ID NO: 350671 - DNA, 201 bp, Homo sapiens
ctgttacagatcctcagacaatgcttccttgaagaagacttgcctgtctaaactgccttcccatcccaatccctgttaccttctatcctttctctgctttrttttcatttgttatctctcttcttcccaagaatgtaagctccataagaacaggatcatattttgaatcccctagaaaagtgcctagtgtaatatttgttg

SEQ ID NO: 350672 - DNA, 201 bp, Homo sapiens
ccttgacctcccaggcttaggtgatcctcatacctcagcctcccgagcaactaggactacaggcccgtgccaccatgccgggccaagacggggtttggacrtgttgccccagctggtctccaactcctggcctcaagtgaccctcccgcctcggcctctcaaagtgctgggattataggcatgagccaccgcacctggcca

SEQ ID NO: 350673 - DNA, 201 bp, Homo sapiens
tttagcaatagtcattgaaatgatatgaaatttcttcagaatgatcaaccaatatttattgagcatcttctcagtagtaagcccttaacattctttcagayttcctaaattttgaaggggcttgttttccagcatttgactggatactctagtaagcacttattggatgtctagtgtgtccgaagccttgtgttagttgct

SEQ ID NO: 350674 - DNA, 201 bp, Homo sapiens
tcctgccccaaatcacaaaggtggagcctagaccttctcagtctccaccaactgtatttcggttagccacaatcctatctacccacatccaaatggacacygtggctctgcaacttctgtcaaaagggctctttggcaacaggaaaaacgtcatggctccattgtattgtagaggatgggaatgggtgttccggctaaatt

SEQ ID NO: 350675 - DNA, 201 bp, Homo sapiens
actgtggggtgacctacctttgaaataatgtattggttctagctgatttttatattgttagtcattaagttaggcttgatgagaaacagatataatctgakttggggattcaagtattatattgcatttctcctcacaactagagataaatttgccatggtttttctcttcataggctcatgccaaagtctggcatctcta

SEQ ID NO: 350676 - DNA, 201 bp, Homo sapiens
agcagtaagtgaggctcacaccggtcatagttagaggagtagggaatctaaacctaagtctcttctactccaaaccccaagttttatcagtatgtcacatygctactgtgggctgaattccttagcaggggttgtttcctccacctgcaatattcttccttttggtttgttcatcctctagagagagaagggatacgcatt

SEQ ID NO: 350677 - DNA, 201 bp, Homo sapiens
agaagtgagaacatgcagtgttcggttttctgtgaaacagaccttttaggtgcagatgactacaatttaaaatttttaaaacagacttcaaagtctaaatkaccatactttttaaaattggaaataactttaatataaaaaatcatgaaaaaaagtcaaaattatctgctttttttttcttatttttaacatgttggaaga

SEQ ID NO: 350678 - DNA, 201 bp, Homo sapiens
atgagattgaaccaacttttatcccaaattggtaccatgttaaatgtccttattttacctgtgcctgttatgggcctaacaatccaccaaaacaaacacartgtggggttactacgaccatcatgttgacaggatgagctgcaagattccagcagtgttggcaacatggctgcactggttcactcagacagagaggaagga

SEQ ID NO: 350679 - DNA, 201 bp, Homo sapiens
gatttcttagagacggtgccatgcctgggatgaccaccaagttaggatgctgtaaagagtaatcaaataagtttcaacagggttttggcatgaggtgagcmgttaatccaaatgatatctgaaatgctttctaatgctgcaagtgtattcctctgtaaaataatcaactacttaaaagacactctcacttgcattatgtca

SEQ ID NO: 350680 - DNA, 201 bp, Homo sapiens
tttcaatgtttggctattaaaaatagtatttagatgaatgttcttggccatacagttaatgacttcactgagtccttgtcaataactttattaaatcccawtcttaagacaacaagcctataagattaacataccaggaataattagaaagcattgcaagactatatgtaaccatctccctgttaatcatccttagttgtt

SEQ ID NO: 350681 - DNA, 201 bp, Homo sapiens
tacatggtaaacatatttgaatattagacatttcaattgttttcaatgtttggctattaaaaatagtatttagatgaatgttcttggccatacagttaatracttcactgagtccttgtcaataactttattaaatcccattcttaagacaacaagcctataagattaacataccaggaataattagaaagcattgcaaga

SEQ ID NO: 350682 - DNA, 201 bp, Homo sapiens
  misc_feature (1)...(201): n = A,T,C or G
taaggtcttggatagaggaccatcatagaaacacatagaacagacatttagtccatgctagggagagggaagatgtcaaggaatgcttcctggaggtggcnacatctaagctgagttttaaagtgggtgtaagagtgaaggaactgggaataggtaaaacataccttagagagctgcacctccaaagcatggaaggctaga

SEQ ID NO: 350683 - DNA, 201 bp, Homo sapiens
aatgatatacagaaaaggtcagttaccactttcttttatgattgcattaatttgcttcttttctctttttttctctagtcagtcttgctaaaggttggtckgttttgttgatttttttcaaagaaccaacttttgattttgttgattctataatttttctgctctgtattttgtgtatatccattctaatttttattagtt

SEQ ID NO: 350684 - DNA, 201 bp, Homo sapiens
tattttttgaagagcttgaaaagagtcgtgttaattcttctttaaatatttggtacaattcactattaaagccactagtcctgggcttttcttagtttgawagtttttgattactaattcaatctcttttacacctagattagattttgtattttttccttagccacttttggtaatgtgtgtgcttccgggaatttggcc

SEQ ID NO: 350685 - DNA, 201 bp, Homo sapiens
ccaagctgctgcctgttcacacatattcgtctaactgggtgtcagggaaagcagatatgagcccccttgcattggttaaatcctgagcaacttttaaggawctgcacacagagactactggctattttttgtggataaagttgtagatagttatttttgggaaattatttatgtgttctattaggtggttgttttgtggga

SEQ ID NO: 350686 - DNA, 201 bp, Homo sapiens
gtcaggctggtctcaaactcctgatctcatgatctgcccgccttggccccgcaaagtgccgggattacaggcgtgagccactgcgcctggcctctctctcrgactttctaccatcagtcagattgaatttgttaaattctgtcactgaccctaaacccaacaaaaggcaagagttatgtttatttagcacttcctctacct

SEQ ID NO: 350687 - DNA, 201 bp, Homo sapiens; identical to SEQ ID NO: 74895

SEQ ID NO: 350688 - DNA, 201 bp, Homo sapiens
ttgctttgaattacttcctcaggactgcccaggtgacgctaatgtttactctgcccttcacaggtagataccactctgtctcagtttaccgacctgaatgyttacctgtgggatgtccaccacagtaaaaggcttattaaagtggatggggttgtgaccaagaagaggaaatcctactgtgttgactttgctgccatccag

SEQ ID NO: 350689 - DNA, 201 bp, Homo sapiens; identical to SEQ ID NO: 74880

SEQ ID NO: 350690 - DNA, 201 bp, Homo sapiens
ttgaccctaagaatgtcacaaaaatgtttagcaactgtcaagattattacatacagagatgactattgtgttctcagatatgctgtatgtcttagttcatyttgtacagctataagagtagctgagactaggttatttatttatttatttatttattttttgagacggagtcttgctgtgttgcccaggctggagtgcagt

SEQ ID NO: 350691 - DNA, 201 bp, Homo sapiens
tctttttgaccctaagaatgtcacaaaaatgtttagcaactgtcaagattattacatacagagatgactattgtgttctcagatatgctgtatgtcttagytcatcttgtacagctataagagtagctgagactaggttatttatttatttatttatttattttttgagacggagtcttgctgtgttgcccaggctggagt

SEQ ID NO: 350692 - DNA, 201 bp, Homo sapiens
ttgctttccagaaagtgaatgagctggttccccaacccctcttgtgttagtttgagtcctgaaagaagtaaatgtcaagataggattagatgtacaagaamtttattggggaaagaattgtgaaggataaaggggaaggagctaggggaggcattgaacctttggatcatgatgtgtgtccaacaactatgaaggagagtg

SEQ ID NO: 350693 - DNA, 201 bp, Homo sapiens
tcagatttttgtaaaatgcttttcctgtgttaattgagataatcatatgggttttctccccctttactctattgatgtaatgcattacaacgatttttttwaatgtttacccatctttgcattcctggaataaatactagttgattgtgctgtataattcttaaaatatgctgctggatttgttttgttagtatttggttg

SEQ ID NO: 350694 - DNA, 201 bp, Homo sapiens
caattctccaaattgggggcggtctatttcacagcaataggtaactgacgtaaaaggaaaggaaacaatgaagtaattccagaaaatttcctatagctggwggacatgcattttcatattgaatgggaagaatggggtgggggggtcatacctctgtgttattgcagggtcctggctcctagggacctaggcacctcttca

SEQ ID NO: 350695 - DNA, 201 bp, Homo sapiens
aaaaataggtagtgggccctgctgctgggcttggcttgctgggcacacaaagtgagaagggcattgtgcctttctaggaaacatcccttgcaaagtcagtrcaggtgagacagtgtggccattcccaccacagcatgaggtcttttgaatggctgaagcgtcaggtgggaaaggatgaggagctgaagaagaaagcctggg

SEQ ID NO: 350696 - DNA, 201 bp, Homo sapiens
atgagaaactgacctggctgtagcaaaacagctaggctgggaagtgatgctgtttacatttatatgcgattctactggtcttcctgttactttgtagaagrctgtaaggcttggtgctcagagctagaaatgcaacttatttgatttgctaagaagtccaaagcaggtaggggtgccaagctgctgcctgttcacacatat

SEQ ID NO: 350697 - DNA, 201 bp, Homo sapiens
attacagtaaaatgtataaatgccttaagagaaataagtacttgcttaggaacctatttcaagaaaggagagataggttagcgttttggggaggtagtacrggagcagtcagggaaagcaatacttgtaagatcagaggctggcaatctttttctgtagagggctaagttttggactttgcagatcctacagtgtctgttg

SEQ ID NO: 350698 - DNA, 201 bp, Homo sapiens
gtggtacaagacatctttccagccctgtagaatatctattataaataaggaactattttttcaaggtgctcagaaatccaaaaaacatattagataggccrattttgagggcatttatttgtagagttatataggtttgattagagtctttcgtcaagaagaaaaatcattggcttaccaaacgagaagcattacacttta

SEQ ID NO: 350699 - DNA, 201 bp, Homo sapiens
ctatctggcatgggctgtgagggggctcctaacctagggggcctttttactccttcctggccagagctgccatttccaagtttctgcactgtcagaaaagrgggataaggtaagattcctgccctcatgtcacagattagtaggggagaggtaattgtcaaataattacagtaaaatgtataaatgccttaagagaaataa

SEQ ID NO: 350700 - DNA, 201 bp, Homo sapiens
tattgtctatttctcaaaagtagcatacgtcataatttcatgtgatttctaaaggagatctaatctcaaacttagttcttagagtaaaataaaaggttttrgcaatcatatacagcagtagactttaccttgaagatttaacaaaggtttgaaagcaaaatgctatgatactgaatatactaatgtttgagggcttgtgaa

SEQ ID NO: 350701 - DNA, 201 bp, Homo sapiens
agctgcaggggaggatgggggcatgggaggcaagcccgttgccctgtcagagcctcttggggatgctgctcttccccgcctgtcctctcttctctttgatktctcatcatgtggtcctctttcctctgccttttcctctcttcggtgtcccaagttcttccatagagacctgtgtccccttgttcccatcaggcctttatg

SEQ ID NO: 350702 - DNA, 201 bp, Homo sapiens; identical to SEQ ID NO: 74883

SEQ ID NO: 350703 - DNA, 201 bp, Homo sapiens
gtgtaagttatgaaatcttttttatttcatttgaaggaagtttttatttaaatacaaataaataagccctttattgtcacctactttggaaaagtccagakaaaacaatcttaagtaacaaaactccaaaattacaacatgattttcaaaaactaccctgacctttgtcttgcctggttgttacagtgtacttttaactaa

SEQ ID NO: 350704 - DNA, 201 bp, Homo sapiens; identical to SEQ ID NO: 74885

SEQ ID NO: 350705 - DNA, 201 bp, Homo sapiens
aaaaacccataccactggataatgcttgataatttctagagtcctttttttttgtattttggggcaggtaaattcattgagagacccagagagtttagctractttcctgtgggtaccaagggtcagagctggggtcaaaactcaggttttctgaacccctattcccagtgtacattccatgactccaggctgcctcccgc

SEQ ID NO: 350706 - DNA, 201 bp, Homo sapiens; identical to SEQ ID NO: 74887

SEQ ID NO: 350707 - DNA, 201 bp, Homo sapiens
gtattggttctagctgatttttatattgttagtcattaagttaggcttgatgagaaacagatataatctgagttggggattcaagtattatattgcatttstcctcacaactagagataaatttgccatggtttttctcttcataggctcatgccaaagtctggcatctctacaatacttctttccgtcccactcagggag

SEQ ID NO: 350708 - DNA, 201 bp, Homo sapiens
tttggtactatttgattttaaactatataaatgcatttattaatttaaagtaatttaaaaaacccataccactggataatgcttgataatttctagagtcmtttttttttgtattttggggcaggtaaattcattgagagacccagagagtttagctgactttcctgtgggtaccaagggtcagagctggggtcaaaactc

SEQ ID NO: 350709 - DNA, 201 bp, Homo sapiens
cctcactgtggggtgacctacctttgaaataatgtattggttctagctgatttttatattgttagtcattaagttaggcttgatgagaaacagatataatytgagttggggattcaagtattatattgcatttctcctcacaactagagataaatttgccatggtttttctcttcataggctcatgccaaagtctggcatc

SEQ ID NO: 350710 - DNA, 201 bp, Homo sapiens
ttcccttccatagtactgatgcatttttgttaaccattacctaattttgcttgagtctattatttctgaaattcacattatcttcccttttaaagttgagwaaattttcattcttcaagcgccttattttctataatctctcaaagtaactgatggctgttgcatgatcataagtgcaaattattttgctagaccacactt

SEQ ID NO: 350711 - DNA, 201 bp, Homo sapiens
ttaatactattacaatggcaattaaatttcaacatgagttttggaggggcaagcattcaaatcatagcaccatataatacaataaaaattttctgagctargtttggtaaatttattctaggaatccatgttgtctcctagttatcttcccttccatagtactgatgcatttttgttaaccattacctaattttgcttgag

SEQ ID NO: 350712 - DNA, 201 bp, Homo sapiens
tgagatattgaacccacttctatgataacagcattaattcattgatgaggacagagacctcattgcctaattggcctaaagtgagacctcttaaaggtctygcttaatactattacaatggcaattaaatttcaacatgagttttggaggggcaagcattcaaatcatagcaccatataatacaataaaaattttctgagc

SEQ ID NO: 350713 - DNA, 201 bp, Homo sapiens
tttattaacattttttgtttgaagtacagatgtcacgtcatccatgaaccggtatcattatagcttgataaaatactcaaactgaaagcagtgatgtacaytaattttaaatataatggttaagcaaatgttatttccatatctataagtgcattttatttgataattagaatgttagaatcagaaggaatttggaaaatc

SEQ ID NO: 350714 - DNA, 201 bp, Homo sapiens
tttcttgtaaatggaatattgtgcttgcagtctgctctcacacaatatctgggaaggagttttaaagagtgaggaagaacagtaaagattttcctaggcaratacgttatgtgacctttgttgatttccagagcacataatatcccaatttcatccagtggacaggaaaagagaggaagagggaaaaggtggcctctcaag

SEQ ID NO: 350715 - DNA, 201 bp, Homo sapiens
taagctattataacaaattcttttatttcattagcttttcaaaatgtggataactacacactcaacccaaggaatctacatttttccactgactgctaaaraccaatggaaataactctagtccccgtagcacctcactgtggggtgacctacctttgaaataatgtattggttctagctgatttttatattgttagtcat

SEQ ID NO: 350716 - DNA, 201 bp, Homo sapiens
aggaaagaaatacaatttttaataaaggcataagtggagaggtaaaatacatatttctggtttcaacgtgtccatattctttcttgtaaatggaatattgygcttgcagtctgctctcacacaatatctgggaaggagttttaaagagtgaggaagaacagtaaagattttcctaggcaaatacgttatgtgacctttgtt

SEQ ID NO: 350717 - DNA, 201 bp, Homo sapiens
attatcttatattctcaaaaatatcattgctctaaactagaattttattataattaatttgtgcaaaagttgtctttctttcaatgaatgttatctttttraggcataaaggaaattttaggtggaggaggagaatagaatacatgcttactgggaggacaagtaataataggtgagtaaaaacacacagcttattgaatt

SEQ ID NO: 350718 - DNA, 201 bp, Homo sapiens
tttaaaggaatttatttcctcacagttctgttggctgggaagtccaagggcaagtctctggcatctggtgagagacttcttgctgctttctcccatggtgraaggtgagagggcaagagagagacaaaaggaggctgaactcatccttttacaaggaacccatgcctgagatattgaacccacttctatgataacagcatt

SEQ ID NO: 350719 - DNA, 201 bp, Homo sapiens
ccttctgaattatcttatattctcaaaaatatcattgctctaaactagaattttattataattaatttgtgcaaaagttgtctttctttcaatgaatgttrtctttttaaggcataaaggaaattttaggtggaggaggagaatagaatacatgcttactgggaggacaagtaataataggtgagtaaaaacacacagctt

SEQ ID NO: 350720 - DNA, 201 bp, Homo sapiens
attggttattaaaatgttgatgtatgattattaaaaggcagcccatggtatgtctcttctgtatgaataagtatgtaaaaagtatgtaaagattactgtayagttcatgggtgggactgggctctctctagcctctgtccttcattctccctgccagtgccttttcccttgcagtgtcccttccctggctgcatactcaag

SEQ ID NO: 350721 - DNA, 201 bp, Homo sapiens
gaagagtggtctataattataaaaaattccattgtatgacttcagctacctgcaaaactgaccgagattaatgcattctttgtttgctttcactctttcaytccctgttcagcgcttattctacagaaaggtgcctggtagatttaggacatgactgttcataggcctcaaatgcggtcaaattaggaaagtcccctggtt

SEQ ID NO: 350722 - DNA, 201 bp, Homo sapiens
ctcctttttgaacacattgttttttgaaggttacggtcaagtccaagaaaaaattttaaaataggaaaagaattaatcaaatcatttcaaaatcatagcastgttttaacaatgccaattattttgagttgaagaaaagaaggaaaatgtaaactatgcattcaagtaatgtcaatgcaccttctcaggtgcaaaatgaat

SEQ ID NO: 350723 - DNA, 201 bp, Homo sapiens
tactactgaattcaatagtgcatttagtcagaaatagttaaaatatctcccaaacagcttgaatcactcctttttgaacacattgttttttgaaggttacrgtcaagtccaagaaaaaattttaaaataggaaaagaattaatcaaatcatttcaaaatcatagcactgttttaacaatgccaattattttgagttgaaga

SEQ ID NO: 350724 - DNA, 201 bp, Homo sapiens
aatccgttagaggaatgttggtacgcttatacagtggaatactaattggttattaaaatgttgatgtatgattattaaaaggcagcccatggtatgtctcytctgtatgaataagtatgtaaaaagtatgtaaagattactgtacagttcatgggtgggactgggctctctctagcctctgtccttcattctccctgccag

SEQ ID NO: 350725 - DNA, 201 bp, Homo sapiens
tgttaaggtaatccgttagaggaatgttggtacgcttatacagtggaatactaattggttattaaaatgttgatgtatgattattaaaaggcagcccatgktatgtctcttctgtatgaataagtatgtaaaaagtatgtaaagattactgtacagttcatgggtgggactgggctctctctagcctctgtccttcattct

SEQ ID NO: 350726 - DNA, 201 bp, Homo sapiens
cgcagtggctcacacctgtaatcccagcactttgggaggctgaggcgggtggatcacctgagatcaggagtttgagaacagcctggccaacatggtgaaaycccgtctctactaaaaatatggaaaattcaccagacgtggtggcaggtgcctgtaatcccagctacttgggaggctgaggcaggagaatcgtttgaacat

SEQ ID NO: 350727 - DNA, 201 bp, Homo sapiens
aagccaaacatccctgtcatctctttggtagtttattttcaaactttcaatcttattaaatttcatctccaatgtgcaaagataagaggaagtttaccgcwgatggtggtttattctttaaaactggacatcagctaaatgtgttaaggtaatccgttagaggaatgttggtacgcttatacagtggaatactaattggtt

SEQ ID NO: 350728 - DNA, 201 bp, Homo sapiens
taaccatctccctgttaatcatccttagttgttgcaacatcctaaatagtgaccttcccacactctgcctcataatatttaatctgtcaaatgtaccatcygcaaagggagtgaactggctcgtgaagaggtggtgaagctggttcaactcagtttaacagacaatgagggcctccgtgtgccagggagggagtgagggaa

SEQ ID NO: 350729 - DNA, 201 bp, Homo sapiens
ccaagttcttccatagagacctgtgtccccttgttcccatcaggcctttatgccagccctgcacaggtgcggggacagtggtaggggcgtctcactcccgrctcaactacattctcccagaaattgtctgcagtcaaacacaactcagcgtggacattgctcaccaaaggtatactgcttgggctgcacgagagattcagt

SEQ ID NO: 350730 - DNA, 201 bp, Homo sapiens
ccttctatggcatcctgcacaggacttcactttgctcagatgcctcctcccgcgctcttccctttatttaaccatttgtctccattttaccccttcgctakctggggtaatcctgttcccttcatctgtatctctgaaaatggcatcttgccctcccttggtgctcagaaggtggcttctggtttaccgaatagcctgatt

SEQ ID NO: 350731 - DNA, 201 bp, Homo sapiens
ttcaaatcccacctgttcttctggagccagctaacacgctcccttgggccccatgcctgaatgccatctcttccttctatggcatcctgcacaggacttcrctttgctcagatgcctcctcccgcgctcttccctttatttaaccatttgtctccattttaccccttcgctagctggggtaatcctgttcccttcatctgt

SEQ ID NO: 350732 - DNA, 201 bp, Homo sapiens
ctataagattaacataccaggaataattagaaagcattgcaagactatatgtaaccatctccctgttaatcatccttagttgttgcaacatcctaaatagygaccttcccacactctgcctcataatatttaatctgtcaaatgtaccatctgcaaagggagtgaactggctcgtgaagaggtggtgaagctggttcaact

SEQ ID NO: 350733 - DNA, 201 bp, Homo sapiens
cctacctccaggatgtgtccagaatcaaaccacttctccccttatctatgactacgatggaggtgcaagacaccatccaaccttgcctgggtaatgggaasagcctcactgctggggttcttatttctgccttgccccctgcagtgtgccatgatggatgctctacagggtgacattatgtgtggacaagacagagtcctt

SEQ ID NO: 350734 - DNA, 201 bp, Homo sapiens
tcacgtaaggaagtagggctaggagatattaatctgggcattgttgagcattagcatcagtgtgcaggtctcagcccatctgtctgcaatgtttgttgaarccatcacttcttgtcccttgaatccttcctcaacttggatttcaggctctggctctcccttgcttctcctctcagctccctggcgattccctcttagtct

SEQ ID NO: 350735 - DNA, 201 bp, Homo sapiens
aaccacactgtttatacattctcctgtgaatggacatttgtgttgttttcagttttctgctattgcgatttaagctactataagcatttttttttaattgygatggggtttcgctcttgttccccaggctggagtgcagtggcagcgatctcagctcactgcagcttctgccacgtgggtccaagcgattctcctgcctca

SEQ ID NO: 350736 - DNA, 201 bp, Homo sapiens
aaaagctgatagagaaaaatggcttccctcctttacctgaaaatcagcccctagaagggacatttccctgtgactttgcttggggagttgttgacaactayattcaagtaagtcagctgacaaaaccaatcagcagtctcaccaagccctatcactagtaagtagtgcttccttcctaggctgattgtcatggcacattgt

SEQ ID NO: 350737 - DNA, 201 bp, Homo sapiens
gaagaagacttgcctgtctaaactgccttcccatcccaatccctgttaccttctatcctttctctgctttattttcatttgttatctctcttcttcccaakaatgtaagctccataagaacaggatcatattttgaatcccctagaaaagtgcctagtgtaatatttgttgaatgaatatgatccctgcaattaaaagcta

SEQ ID NO: 350738 - DNA, 201 bp, Homo sapiens
agaagaaaaatcattggcttaccaaacgagaagcattacactttatttatttaagtaggaaacgctcagctgctcttgaaccatgatgcaagtgcccagcraagggtcatgttgctcttgtcccctcttccctttgcagccatcaagctggatggggtggatgtcatcgggtataccgcatggtccctcatggatggtttc

SEQ ID NO: 350739 - DNA, 201 bp, Homo sapiens
gtaattagtatgagcgatttgtctactgtatatatgctcaaattacatatactatgcacttttgagaaatactttacaagtttttctttcattaaaatgtrtttggggccgggcgcagtggctcacacctgtaatcccagcactttgggaggctgaggcgggtggatcacctgagatcaggagtttgagaacagcctggcc

SEQ ID NO: 350740 - DNA, 201 bp, Homo sapiens
gatgactggagattttgagtctccacccaggtttccccgagcatcagactggcatagacaaccgccttctccacgtggatgtctaatgggcatgtcacatygaacacatacatcccaaaccaaacccctgcttccccttctctattatgatgactttttactcttccagttgttggaccccgaatcttaactactcccctt

SEQ ID NO: 350741 - DNA, 201 bp, Homo sapiens
cattagcatcagtgtgcaggtctcagcccatctgtctgcaatgtttgttgaaaccatcacttcttgtcccttgaatccttcctcaacttggatttcaggcyctggctctcccttgcttctcctctcagctccctggcgattccctcttagtctcctttgcttgttcctcctcaccttgcctgtaaatagtggagggctcag

SEQ ID NO: 350742 - DNA, 201 bp, Homo sapiens
tcccattcttaagacaacaagcctataagattaacataccaggaataattagaaagcattgcaagactatatgtaaccatctccctgttaatcatccttakttgttgcaacatcctaaatagtgaccttcccacactctgcctcataatatttaatctgtcaaatgtaccatctgcaaagggagtgaactggctcgtgaag

SEQ ID NO: 350743 - DNA, 201 bp, Homo sapiens
aattgttattatagtgacttataggatcattttattataagataaagacttgcgtgctctctggtgctctggtgttttaaataatcaacatgttttagatmtttttgcccactcatggccctctgattaacttctcagttatatttttcaatgcttacacaaaaaatttgccaaacactaaccatccttcctagaaatgca

SEQ ID NO: 350744 - DNA, 201 bp, Homo sapiens
agctcttgaaacaaagttcttaatgtcccctgaaatcagcactagggactgtagttggggagttcagccccagcagtgcctctgagtctttgttctgtatrtgggttctaagaggattagaatcaagttggaaatacacgtgttcccatttcccaccttcaactcccctcaccgcctgagattcttgcaaacatttgtgca

SEQ ID NO: 350745 - DNA, 201 bp, Homo sapiens
aagttataaatccctccagatcaaagtgctactaaactctacttgctattttataacctttttctgttcagagtattttagaaacgtttttacatgttaaytgatattcttttgcattatcctgaataatggtatttctttagttatactatcatgtattaaaacattcatacatggtaaacatatttgaatattagacat

SEQ ID NO: 350746 - DNA, 201 bp, Homo sapiens
gttgaaagggttcctcacttatgacattgttagcctgataaaattaattgtaacacccttgtgcaaaatattttattaattttgacagcaggaaatattgmtatgccatggtaaagttgtctcaagtatttcttcctccttttttctccttagtgttcaaatttaggcaccattgttttggggattcatttataatcatgt

SEQ ID NO: 350747 - DNA, 201 bp, Homo sapiens
cagggtgagatgaagcagagacttttaataaccatcaagcaggcctgccatccaactgctatgagccattttccctttttgaattttatttttttaatctytagagcaatacatgtttatggtaggaaatgaaaaaaatatatagatgggtaaaatgaagtgaattataccacccacaatcctgctgtaaaacaggtttta

SEQ ID NO: 350748 - DNA, 201 bp, Homo sapiens
ttcaccggggtgtgaagaccgctttatacaatctcaaacaaagctagtcatagaaacacagaaacaactgcagggtgatatagattgttctaccacatctrtatttccacagtgctctctacagttgaaagggttcctcacttatgacattgttagcctgataaaattaattgtaacacccttgtgcaaaatattttatta

SEQ ID NO: 350749 - DNA, 201 bp, Homo sapiens
caggcagagaccatagggcaagttggagaacaggtgggcagggtgagatgaagcagagacttttaataaccatcaagcaggcctgccatccaactgctatsagccattttccctttttgaattttatttttttaatctttagagcaatacatgtttatggtaggaaatgaaaaaaatatatagatgggtaaaatgaagtga

SEQ ID NO: 350750 - DNA, 201 bp, Homo sapiens
gctattgttttagaatctgacctaaggtcagccactaattggccccagaggtctctctctcagatcacacggtccttttttcctcatcagcttggggaccycacccctcctcctggcagtctcctcctgtgcagaacccaacaaacacaaaattaagtcactctcaaacccacagcagatgagagcttctctggaagctcc

SEQ ID NO: 350751 - DNA, 201 bp, Homo sapiens
tgtgatttttgtgatttcatacttatgtatgtcttttcataaggatgttttagagcggtgattcttatactttttcaatccttttatggatctgaaaaacyctaaagaccaccagtgtatggctggtgatagaaaaactatgggaagaatggtctcactttttgaagaaaacataagcaagttatcagttcatactggaag

SEQ ID NO: 350752 - DNA, 201 bp, Homo sapiens
tcaatgtgcctgggacttggatttcaggcagagaccatagggcaagttggagaacaggtgggcagggtgagatgaagcagagacttttaataaccatcaarcaggcctgccatccaactgctatgagccattttccctttttgaattttatttttttaatctttagagcaatacatgtttatggtaggaaatgaaaaaaat

SEQ ID NO: 350753 - DNA, 201 bp, Homo sapiens
ttggatttgtttggaaacacattgtgatttttgtgatttcatacttatgtatgtcttttcataaggatgttttagagcggtgattcttatactttttcaayccttttatggatctgaaaaaccctaaagaccaccagtgtatggctggtgatagaaaaactatgggaagaatggtctcactttttgaagaaaacataagca

SEQ ID NO: 350754 - DNA, 201 bp, Homo sapiens
atgctagggagagggaagatgtcaaggaatgcttcctggaggtggcgacatctaagctgagttttaaagtgggtgtaagagtgaaggaactgggaataggyaaaacataccttagagagctgcacctccaaagcatggaaggctagataatcttagaacttcaagtggggttcaatgtgcctgggacttggatttcaggca

SEQ ID NO: 350755 - DNA, 201 bp, Homo sapiens
aagacttatttttaaatttagaattcagccacatattctgaacaaagtcagtactaaaaccatttctaaacacttttaattaaagccatagataatatggscagagcagtactgggttattgaggtgacttagtgctctgagctgctggtaatgttgtaataatggctaaattagattttatgtcagttccacaaaacctg

SEQ ID NO: 350756 - DNA, 201 bp, Homo sapiens
gctggagtggacctgaggttcatcacctgtttccttccacccaccatttaaaagcagcttatttgtgtgaaactttttgttgggttctgtgggggatacgwataggcaaatgacagggagcttataatttagccaaagagaaaatgtctatatgttctgtggaattcagagtattttcctcgacttccaaaattattttcc

SEQ ID NO: 350757 - DNA, 201 bp, Homo sapiens
tttgtacagagttttgtatcacaataaaatattttatgtacatgtataaacattttaataaaagtgtttaaatgtacaacttttggtacccaattctgatsacttgtgggcctactggaagacttatttttaaatttagaattcagccacatattctgaacaaagtcagtactaaaaccatttctaaacacttttaattaa

SEQ ID NO: 350758 - DNA, 201 bp, Homo sapiens
cttcttgtcccttgaatccttcctcaacttggatttcaggctctggctctcccttgcttctcctctcagctccctggcgattccctcttagtctcctttgmttgttcctcctcaccttgcctgtaaatagtggagggctcagggctctgtctagattcactccaggccattgctttgaatactgctgcatcccgatgactg

SEQ ID NO: 350759 - DNA, 201 bp, Homo sapiens
cttttcagctcagcaatactgctgtgtattgtgtgagcttcatttgcctcagccatacctagaacacaacccaaggcagaaagctggagtggacctgaggytcatcacctgtttccttccacccaccatttaaaagcagcttatttgtgtgaaactttttgttgggttctgtgggggatacgaataggcaaatgacaggga

SEQ ID NO: 350760 - DNA, 201 bp, Homo sapiens
ggggcgcgggcataaaggggcgcggcgcggggccccggagcctggctcccgcgcagcatgcccgccagcgccccgccgcgccgcccgcggccgccgccgcmgtcgctgtcgctgctgctggtgctgctgggcctgggcggccgccgcctgcgtgcggagccgggcgacggcgcgcagacctgggcccgtttctcgcggcct

SEQ ID NO: 350761 - DNA, 201 bp, Homo sapiens
ctttgtgtagatttcttctctccagtacgttgacctgcttcagagtcctcatcattgctttcttccttttcagctcagcaatactgctgtgtattgtgtgrgcttcatttgcctcagccatacctagaacacaacccaaggcagaaagctggagtggacctgaggttcatcacctgtttccttccacccaccatttaaaag

SEQ ID NO: 350762 - DNA, 201 bp, Homo sapiens
acctttggtattcatctcccagacctgtggctgcttctctttgctgagcctcacaaaatcttgtcctgtgcatggacagccacggatccttgggaaatctyatgcagacttctaggtccttcctttgtgtagatttcttctctccagtacgttgacctgcttcagagtcctcatcattgctttcttccttttcagctcagc

SEQ ID NO: 350763 - DNA, 201 bp, Homo sapiens; identical to SEQ ID NO: 74893

SEQ ID NO: 350764 - DNA, 201 bp, Homo sapiens
tgtgtgagagagagagagagagagagagagagaggagacaggagagaaggagaagaggggagaggggaggagggacagagagagagagaggtctcctacaragagcttggagctcaggctgctttgctcatttgagtgtaatccaggaggatgcaccttttctctcggacttgaagaccaactgctcagccttcacagctc

SEQ ID NO: 350765 - DNA, 201 bp, Homo sapiens
caaggaatctacatttttccactgactgctaaagaccaatggaaataactctagtccccgtagcacctcactgtggggtgacctacctttgaaataatgtrttggttctagctgatttttatattgttagtcattaagttaggcttgatgagaaacagatataatctgagttggggattcaagtattatattgcatttctc

SEQ ID NO: 350766 - DNA, 201 bp, Homo sapiens
tggaaaaaaatctctaagattatctaacataaatgatgtgaatttatatttttaaatcctaatggagacattcattttggcaatagtagaatgcattcatktaacacctttctcatttggagtcttgaggaacttgaattaatttttaaaaacccatttgtaaatgagaaactgggttataatatttgtaattacttaact

SEQ ID NO: 350767 - DNA, 201 bp, Homo sapiens
cggcatccggggcagcccgcggctcgggtacctggtggcgcacaacctcctcctggtgagtgcgaggggccaggcggagggccacgcaggggagacagagrgcctccacaggggccagggggaagtgtgggaactgagtctcccccagacgaggcttcacttggacacgtgtatgtggtcaccgggggaaactgagcagtt

SEQ ID NO: 350768 - DNA, 201 bp, Homo sapiens
attttccagacctacccaacctttggtattcatctcccagacctgtggctgcttctctttgctgagcctcacaaaatcttgtcctgtgcatggacagccamggatccttgggaaatctcatgcagacttctaggtccttcctttgtgtagatttcttctctccagtacgttgacctgcttcagagtcctcatcattgcttt

SEQ ID NO: 350769 - DNA, 201 bp, Homo sapiens
atagggagcctggtcaatattgtctctttttaaagggtgttgtatttagttctgccaagaagttaaattaccagatttacttgatgtggctttattctttsttagagctggtctattcctgctttgttcttacttctcaggtaatgaccttcctgagtttcagctggatgcctgaagtgctcagctgcatttttctactct

SEQ ID NO: 350770 - DNA, 201 bp, Homo sapiens
gatattatagggagcctggtcaatattgtctctttttaaagggtgttgtatttagttctgccaagaagttaaattaccagatttacttgatgtggctttaktctttcttagagctggtctattcctgctttgttcttacttctcaggtaatgaccttcctgagtttcagctggatgcctgaagtgctcagctgcatttttc

SEQ ID NO: 350771 - DNA, 201 bp, Homo sapiens
ttctttttttccccttaattaagggtttccttttcctgctttttcacatatctagtagatttttattatgctctgtgtgctatgaatgagatattataggragcctggtcaatattgtctctttttaaagggtgttgtatttagttctgccaagaagttaaattaccagatttacttgatgtggctttattctttcttaga

SEQ ID NO: 350772 - DNA, 201 bp, Homo sapiens
taatagctattttaaagtcctctgctaatcccgatatctgggacatcttggcttctgttgatattgaatacttctttttttccccttaattaagggtttcmttttcctgctttttcacatatctagtagatttttattatgctctgtgtgctatgaatgagatattatagggagcctggtcaatattgtctctttttaaag

SEQ ID NO: 350773 - DNA, 201 bp, Homo sapiens
tcgcttttcagttctagaattttcatgttttcttcagttgttgtttctctgttgttattctccatttgttcattatatctatcttttctttgaaatccttraaaatatttataatagctattttaaagtcctctgctaatcccgatatctgggacatcttggcttctgttgatattgaatacttctttttttccccttaat

SEQ ID NO: 350774 - DNA, 201 bp, Homo sapiens
tggctttttagagaaacctttaatatctttgtgagttttagggattacattatttattcttattattattccatttagaattaatattgttaatcccattmaaaaatttgtttatttcgcttttcagttctagaattttcatgttttcttcagttgttgtttctctgttgttattctccatttgttcattatatctatctt

SEQ ID NO: 350775 - DNA, 201 bp, Homo sapiens
cactttatatttatagtatatttcttgcacacagaatgtaattgaaacttacttttctaaaatctactttctttttttttttttgagatggagtcttgctstgttgcccaggctggagtgcagtggcacaatcttggctcactgcaatctctgcttcctgggttcaagcaattctcctgtctcagcctcccgagtagctgg

SEQ ID NO: 350776 - DNA, 201 bp, Homo sapiens; identical to SEQ ID NO: 74881

SEQ ID NO: 350777 - DNA, 201 bp, Homo sapiens
aagctggagtggacctgaggttcatcacctgtttccttccacccaccatttaaaagcagcttatttgtgtgaaactttttgttgggttctgtgggggataygaataggcaaatgacagggagcttataatttagccaaagagaaaatgtctatatgttctgtggaattcagagtattttcctcgacttccaaaattatttt

SEQ ID NO: 350778 - DNA, 201 bp, Homo sapiens
gagttgagattgtgccattgcactccagcctgggggacagagtgagaccaggtttttttaaaaaaaaagaaaaagaaaaaagaatcaccatatgactcagyattcctaattcctattacgggtatatatccaaaggaaatgaaatcggtatgccgaaggaatatgtgcattgtgttgtttactgtattaccattcacaata

SEQ ID NO: 350779 - DNA, 201 bp, Homo sapiens
gagttcccattgtcaaagaaagtatcttgaattaattttgttgtatgagatactttcattctgttttcaatgacctttctcggtgtgtatataggggttgsgggaagcgagaatagaaaaatttgagcttacctgaaaaagataaaacattctgcagattttgataaaagggcattttagctggggcttagatattgctgc

SEQ ID NO: 350780 - DNA, 201 bp, Homo sapiens
caaacactaaccatccttcctagaaatgcagtggactttgtatttagggaaattagtaacaggtgaatgctccattttgctgatgttgcaaacaaactgtyagttggtgtaaagtattaattttgctttcacatttcttttggtttggtgtttagtcattcttgtatcttatttagaagcgagttcccattgtcaaagaaa

SEQ ID NO: 350781 - DNA, 201 bp, Homo sapiens
ctcgacttccaaaatttggggctactagctagttggtaggaaggaattccagatccatttttcttctagatttttttcagactccatgtttcaaaatctaratggaaggtaagaaggaagcaaggagggcatcacatacgagagagacttataccccaaagtggatcattagcacattatgagataatatggtattattct

SEQ ID NO: 350782 - DNA, 201 bp, Homo sapiens
acttgagaaaaatgtatattctgatttttttaggtgggtggcatgttctattaatatatatgtctgttagctctagttgaattatagtgatgttcaaagcytccattttgttattaatataaccatgccagatttttaatgctgtccatttgcataatatgtctctttccattctttttcttttacatgatcactttatat

SEQ ID NO: 350783 - DNA, 201 bp, Homo sapiens
tatcctggaaaatgtatcatgtgcacttgagaaaaatgtatattctgatttttttaggtgggtggcatgttctattaatatatatgtctgttagctctagktgaattatagtgatgttcaaagcttccattttgttattaatataaccatgccagatttttaatgctgtccatttgcataatatgtctctttccattcttt

SEQ ID NO: 350784 - DNA, 201 bp, Homo sapiens
tttctctgttgttattctccatttgttcattatatctatcttttctttgaaatccttgaaaatatttataatagctattttaaagtcctctgctaatcccratatctgggacatcttggcttctgttgatattgaatacttctttttttccccttaattaagggtttccttttcctgctttttcacatatctagtagattt

SEQ ID NO: 350785 - DNA, 201 bp, Homo sapiens; identical to SEQ ID NO: 74888

SEQ ID NO: 350786 - DNA, 201 bp, Homo sapiens
tgcttttcttaatcatattaaggaagttcctttctagtcctagttttctgagtgtttttattatgaaagactttcagatttttgtaaaatgcttttcctgygttaattgagataatcatatgggttttctccccctttactctattgatgtaatgcattacaacgatttttttaaatgtttacccatctttgcattcctgg

SEQ ID NO: 350787 - DNA, 201 bp, Homo sapiens
ccgcctcggcctcccaaagtgctgggattacaggcatgagccaccacgcccggcccataaatgcttttcttaatcatattaaggaagttcctttctagtcstagttttctgagtgtttttattatgaaagactttcagatttttgtaaaatgcttttcctgtgttaattgagataatcatatgggttttctccccctttac

SEQ ID NO: 350788 - DNA, 201 bp, Homo sapiens
ttagtgggtgtgagtgctcgttggggttttaatttgcattttcctgatagtgttgatgttgaggacatttctatgtgtttactgagcattggtgaagattstcttgtgaaatatctattcaaatattttgctcatggtgggaaggggagttatttttcttttactactgataggtaggcttacgtatttatttcggatata

SEQ ID NO: 350789 - DNA, 201 bp, Homo sapiens
tatctccccagcggggagggtttagggttgtctgtgggacctgcctctgtctcatcatccatcaccattgtcctgctgatgggtgcagaggactgaggacragtggttggagttctccctgtgccggaccctgtagagagtccagagccctggctcccaaaggaggcatatttgtagggctcttttcgtgagggtccagag

SEQ ID NO: 350790 - DNA, 201 bp, Homo sapiens
ctctgcctggaatgcccttcccgtaccctctaccgcctctgcccaatcctccgggttctctgctccttccacacacccccatctcaggtcccagtcttttktagcattcttcactttttctgttacagatcctcagacaatgcttccttgaagaagacttgcctgtctaaactgccttcccatcccaatccctgttacctt

SEQ ID NO: 350791 - DNA, 201 bp, Homo sapiens
aagtggtctcagattagtagcctctgtacatggaaactagcttacctcccggcgagcatcccaagagaactaggaggaagtggtatggacttctttttttyttcttcttcttcttttcacttattcttgatatcatgtagcttcatttctatcagagcagtcacatgcccacagattcaagggggagggtccacagatccg

SEQ ID NO: 350792 - DNA, 201 bp, Homo sapiens
tgatccgcggttgagcctggctgtggaccagagcatctctgttggcctcgcttacacaagtggtctcagattagtagcctctgtacatggaaactagcttmcctcccggcgagcatcccaagagaactaggaggaagtggtatggacttcttttttttttcttcttcttcttttcacttattcttgatatcatgtagcttc

SEQ ID NO: 350793 - DNA, 201 bp, Homo sapiens
ctcactgcaacctccgcctcccgggttcaagtgattctcctgcctcagcctcctgagtagctgggattacaggtgcctgccaccatgttggtgaatttttstatttttagtagagacaggagtttcaccatgttggccaggctggtctcgaactcctgaccttaggtggtccacctgcctcggcctctcaaagtgctggga

SEQ ID NO: 350794 - DNA, 201 bp, Homo sapiens
attccagttttaaaaaatttgtgttttcttattcaaaaagcaatacatatttcgttacataaaagtcagaaaatcagagaagcagaagaacataataaatrcccactgtcctactcaatagagactataactgctatctctgtacaaatcctttaaaatcctgtcttatgtgtatttattttacatctgtacatatgattc

SEQ ID NO: 350795 - DNA, 201 bp, Homo sapiens
gcaggtgcctgtaatcccagctacttgggaggctgaggcaggagaatcgtttgaacatgggaggcagaggttgtagtgagctgagatcgcaccattgcacwccatcctgagcaacaagagcgaaactccatctcaaaaaaatgtattttgtacataactagaataatcaactggattgaaagttaatataaattttagaat

SEQ ID NO: 350796 - DNA, 201 bp, Homo sapiens
cacctgccgccatgcctggctaattttttgtatttttagtagagacggggtttcaccgtgttagtcgggatggtctcgatctcctgaccttgtgatccacycacctcggcctcccaaagtgctgggattacaggcgtgagccaccgcgcctggccctatttttttttttttaaaggaatttatttcctcacagttctgttg

SEQ ID NO: 350797 - DNA, 201 bp, Homo sapiens; identical to SEQ ID NO: 74902

SEQ ID NO: 350798 - DNA, 201 bp, Homo sapiens
aaatcccagttactagacttcccagtattaataattttggtatgccaggaatttttaaaacatttctaacaaattttttcagaaatcagaatgactgaaakgtataacaataggaaattaggaaatcaataagtaatcattgaaaagtgagtgattgaattagttggaacaatctatgccatccatcctgtgggggaaaaa

SEQ ID NO: 350799 - DNA, 201 bp, Homo sapiens
agtagagacggggtttcaccgtgttagtcgggatggtctcgatctcctgaccttgtgatccacccacctcggcctcccaaagtgctgggattacaggcgtkagccaccgcgcctggccctatttttttttttttaaaggaatttatttcctcacagttctgttggctgggaagtccaagggcaagtctctggcatctggtg

SEQ ID NO: 350800 - DNA, 201 bp, Homo sapiens
gattttgctcatttctgtattcttagcacttatatatccaacatataataggtgttggataatatttgttgaataaatgactaaataaatgtcttggcatragaattatgccatctacaaaaccgtcacttttaaaaaaaacaacaaagatttttgaacctgtagatccagccagaaagcaagaaatatcttcacctttcc

SEQ ID NO: 350801 - DNA, 201 bp, Homo sapiens
tgtttgtttttttgtttgagacggagtttctcttgttgcctgggctggagtgcagtggcgtgatctcggctcatcacaacctctgcctcctgggttcaagygattctcctgcctcagcctccagagtagctgggattacaggtgcctgccaccacaccgactaattttgtatttttagtagagacggggtttctcgatgtt

SEQ ID NO: 350802 - DNA, 201 bp, Homo sapiens
ggattacaggtgcctgccaccacaccgactaattttgtatttttagtagagacggggtttctcgatgttggtcaggctgctctcgaactcctgacctcagrtgatccgcccgcctcggcctcccaaagtgctgggattacaggcatgagccaccacgcccggcccataaatgcttttcttaatcatattaaggaagttcct

SEQ ID NO: 350803 - DNA, 201 bp, Homo sapiens
atcgatgacgggctgcatgctgaggacgaccagctgagggtgtattatatgcagaattacataaacgaagctctcaaaggtaaggagccctagctgcggcwatctcctgaaggttatgtcaccagagggcatgacacttgattaaatctccaacatcaacacacactgccacccttggaatggagggctatccattttgtg

SEQ ID NO: 350804 - DNA, 201 bp, Homo sapiens
actcccccagtcaggtggcggtagtgccctgggggttgcgcaaagtgctgaactggctgaagttcaagtacggagacctccccatgtacataatatccaayggaatcgatgacgggctgcatgctgaggacgaccagctgagggtgtattatatgcagaattacataaacgaagctctcaaaggtaaggagccctagctgc

SEQ ID NO: 350805 - DNA, 201 bp, Homo sapiens; identical to SEQ ID NO: 74884

SEQ ID NO: 350806 - DNA, 201 bp, Homo sapiens; identical to SEQ ID NO: 74886

SEQ ID NO: 350807 - DNA, 201 bp, Homo sapiens
ttccaaacatctctcagattgccctgttgttttgcttttcagtagtcatcacctttgtccagaaccttaattgtatctgcattttggcagtatcctgccarttttccacatccagctgttcacattctaatgcattctgcaatggatgattttgagcatatgactgatcatcactgtctcagaaatttatgctaatctatt

SEQ ID NO: 350808 - DNA, 201 bp, Homo sapiens
gcctgccaccacaccgactaattttgtatttttagtagagacggggtttctcgatgttggtcaggctgctctcgaactcctgacctcaggtgatccgcccrcctcggcctcccaaagtgctgggattacaggcatgagccaccacgcccggcccataaatgcttttcttaatcatattaaggaagttcctttctagtccta

SEQ ID NO: 350809 - DNA, 201 bp, Homo sapiens
aaaatctactttctttttttttttttgagatggagtcttgctgtgttgcccaggctggagtgcagtggcacaatcttggctcactgcaatctctgcttccygggttcaagcaattctcctgtctcagcctcccgagtagctgggattacaggcacctgtatttttagtagagacggggtttcaccatgttggtcaggctgg

SEQ ID NO: 350810 - DNA, 201 bp, Homo sapiens
tgtctcagcctcccgagtagctgggattacaggcacctgtatttttagtagagacggggtttcaccatgttggtcaggctggtcttgaactcctgacctcrtgatccacctgccttggcctcccaaagtgctgggattacaggcgtgagccactgcacccagcccctaaaatctgctttcatagcatctgtcttgtacttg

SEQ ID NO: 350811 - DNA, 201 bp, Homo sapiens
ctcccaaagtgctgggattacagtcttgagccactgtgcccggccagcatctttgaacatatcaatttgtaagttttatcttaatattgtacaagtctttkggggggcttatgttgtcatttctcttggtaaatacctaggtatgaacttgctagattatagagaaaatctatctttaattttataagaaactgtcaaata

SEQ ID NO: 350812 - DNA, 201 bp, Homo sapiens
atcattacatgataactcaaatagcagtcctgaaaaagtgcatttcaattcagatctctcttttttcttccttcacaattctcatttccgaaaaatgaaakaagccagaggatcctttatgaggagttacagtataacttatgcgtggctgtttcctgtgtttactgctactcagtgagaaatacgggagatgggagagtg

SEQ ID NO: 350813 - DNA, 201 bp, Homo sapiens
cacaagtggtctcagattagtagcctctgtacatggaaactagcttacctcccggcgagcatcccaagagaactaggaggaagtggtatggacttcttttytttttcttcttcttcttttcacttattcttgatatcatgtagcttcatttctatcagagcagtcacatgcccacagattcaagggggagggtccacagat

SEQ ID NO: 350814 - DNA, 201 bp, Homo sapiens
ttgagcctggctgtggaccagagcatctctgttggcctcgcttacacaagtggtctcagattagtagcctctgtacatggaaactagcttacctcccggcragcatcccaagagaactaggaggaagtggtatggacttcttttttttttcttcttcttcttttcacttattcttgatatcatgtagcttcatttctatca

SEQ ID NO: 350815 - DNA, 201 bp, Homo sapiens; identical to SEQ ID NO: 74891

SEQ ID NO: 350816 - DNA, 201 bp, Homo sapiens; identical to SEQ ID NO: 74894

SEQ ID NO: 350817 - DNA, 201 bp, Homo sapiens
aaaatatttagtaaaatatttgaaaagtaaggtcaaagcaatgctgtaaaagtagtacaagatgataaagaaatagaacacatttttgaaagggaaaaagmtttaaaggatattcataaagatccaacatcagactaatagaagttctggaaagagagaataaggaaatacaggtcaggaaatttgtaaagaaataatata

SEQ ID NO: 350818 - DNA, 201 bp, Homo sapiens
cgtttctaataatgcctcttggtttcagggacactttgtgagaaatttaggtgatgttggagagaaagagactgaaacagaagttttgttacttgaacacratgttccccatcagcctttttcacaggctgttcttagttttctgccaaagatgccctggagcattactgaaaaggtaagttgaaagtaatttgtagtgac

SEQ ID NO: 350819 - DNA, 201 bp, Homo sapiens; identical to SEQ ID NO: 74907

SEQ ID NO: 350820 - DNA, 201 bp, Homo sapiens
tagttttctgccaaagatgccctggagcattactgaaaaggtaagttgaaagtaatttgtagtgactttataaattattatatcctgcctagttttgtttratttctatatgtgtttttaaatatgtagacaccacgggccctcttttcctgcattttgttgggtatagcattcttaggaattatagaagaagtcatttgc

SEQ ID NO: 350821 - DNA, 201 bp, Homo sapiens; identical to SEQ ID NO: 74908

SEQ ID NO: 350822 - DNA, 201 bp, Homo sapiens; identical to SEQ ID NO: 74909

SEQ ID NO: 350823 - DNA, 201 bp, Homo sapiens
caaaaagcagaacactcttttctttccttgtttaattaatgttatttgagaatagaacctcacataaatgtatggttatggctaagtaatctgtggttctrtttttatcttttgcagaggattgacatggttccagagttgcttagctctaacttgtgttccttaaaatgtgacgtggacaggtatttctgcatggttttt

SEQ ID NO: 350824 - DNA, 201 bp, Homo sapiens
aggaaaccattagttacaaatcatacgtggtgtctctctgctccagtgcaggaaaaagaaatgtggttgtcatcaagaaaatacagctaaattgtttttgyatacatattactgatttcacaagagctattaatatgttgtagttgtgctttggaaataatttatttgtttatcatttcatgtcttctaggacatgaaaaa

SEQ ID NO: 350825 - DNA, 201 bp, Homo sapiens
tatatgagactactaggtttgtggcctttgttatgttgaacacgtagatgcttactaatttttatatttaaacttctactatgtaagataaattgtaaagrattagaacaaagcctcaaatgtaaggaagcaattaagaatgataaaatgtgttttgtttagataccctcacttaaaatagaagatacagtgttccatgta

SEQ ID NO: 350826 - DNA, 201 bp, Homo sapiens
gttattaattcaaaggttcgtttcatggctattaatctctaatttttaaactttttggtacttttttgaaaaaagctaaataaattttttaaagattcacrtgtacgtatatatacacatatataaaaatatttatatatttgaaaagagatgttatgtataattatatgtatatttacttaacctaaaatagaaaaaaca

SEQ ID NO: 350827 - DNA, 201 bp, Homo sapiens
tcttgtgaagtataattgtagctgcacgctattggccatatgtcagaagttgaaatggtagaggtgactgagtcttttttaaatttagctaaactttatcktattaaaactccattaggtacatttacccagtcaagcatattgacatccttttatttttatctttttaaggttggtgttcatattgctgatgtgagccat

SEQ ID NO: 350828 - DNA, 201 bp, Homo sapiens
atttacccagtcaagcatattgacatccttttatttttatctttttaaggttggtgttcatattgctgatgtgagccattttattaggccaggaaatgccktggatcaagaatcagccagaagaggaacaactgtgtatctttgtgaaaaggtaaatgtattgaatttaaaaatttaacagtcatggacacttaaggattc

SEQ ID NO: 350829 - DNA, 201 bp, Homo sapiens
ctgacctcgtgatccacctgcctcagcctctcaaagtggtgggattacaggcatgagctaccgtgcctggccaggaatataattctttgttgtgcttttarattcaagacctttgaactcagtgtgtggtctcaaaaatatgatattgcctattacgttatattacataaataatctatgatgagtatggtacttttattg

SEQ ID NO: 350830 - DNA, 201 bp, Homo sapiens
tttagtagatatggagtttcaccttgttggccaggctggtcttgaactcctgacctcaggtgatccagccgcctcggcctcccaaagtgttgggattacargtgtgagccaccatgcccagcctctagcttccttttaaatgttagcaacttgattctggactgatgtttgttcaggagttccatccttgtaatttgttgt

SEQ ID NO: 350831 - DNA, 201 bp, Homo sapiens; identical to SEQ ID NO: 74910

SEQ ID NO: 350832 - DNA, 201 bp, Homo sapiens; identical to SEQ ID NO: 74911

SEQ ID NO: 350833 - DNA, 201 bp, Homo sapiens
ttttgtctgtgtagctttgtattattaatatgtcagctttggaaaacaagtttcattgctttcagatttattgcataaaatcatagttctgtatatttaaygcatgtcatacacatggtttttttctcttctatgtagttttcttttattgtcttaatttgctcaaataaatgggtttaaatgcaaacagactgttagtat

SEQ ID NO: 350834 - DNA, 201 bp, Homo sapiens
gctgtggagcttctccccaagagtcagtgggtagcaccatcttctgtggttttacatgatgaaggtcaaaatgaagaagatgtggagaaagaagaagagasagaacgaatggtatgaatctaagcaggatttttttttgtctgtgtagctttgtattattaatatgtcagctttggaaaacaagtttcattgctttcagat

SEQ ID NO: 350835 - DNA, 201 bp, Homo sapiens
aaggggtatgtttttgttttgtttttgaaaagtaaaaatattaaaatagccactttggaatattaggcatatagttaccaaatttaaaaattggaatgtcrgtgggtaagctggatttggaatagttgtgttataaacaggagtggatgtcataggcttattgaaatgccattcctaaaggagttaactttctaaaataga

SEQ ID NO: 350836 - DNA, 201 bp, Homo sapiens
aagctacagcaaggcataaaatctggtacataccttcaaggaacatttagagctagcagggaaaattacttggaagctacagtatggattcatggcgacartgaagaaaataaagaggcaagtatataaataaattccttatacactaaaataaagatgatattttatatattatgaacacttaatggtaaatactatttg

SEQ ID NO: 350837 - DNA, 201 bp, Homo sapiens
cttccatgtttccttgtctttatgcatgtttcatatgtctatgttgcttcatggctcctgtcaactgcctgactttacaaataatgtattttttttttttwtttatttacttcaactcagttaaatcctttccatttcttgttcgtaagaaaagtatatttattgcatacatggaaaagaggaaactatagaaagggcaca

SEQ ID NO: 350838 - DNA, 201 bp, Homo sapiens
agggtgatattagctattgttgtttattgatttagttaagatgtaggaaacaagaatttttttgttaaatcagggtttaggcctctttccctgcctcttayttacattaaggtaattttggaattcaacatgcatatgcacttttctaatagatgaccaagggttaaaaatgggaatatactcaaattttttacttagagt

SEQ ID NO: 350839 - DNA, 201 bp, Homo sapiens
caactttcttgattcttatatctcaaacttcaatgttcttgtaaagaataccagtaaagcccttgtaggcttcttattgttagtacctccttgaaatccagaaatagcaacatcacttgtttttcagtgcagaaagacccaagtttaaaaccaattcaaaaatttatgactgtgtctttcactgatgagcttaaaacatta

SEQ ID NO: 350840 - DNA, 201 bp, Homo sapiens
ctggagtgcagtggtgtgatctctgctcactgcaacctccacctcccaagttcaagcgattcttctgcctcagcctcctgagtagctgggattacagtcaygcaccactatgccaggctaatttttgtatttttagtagagacagggtttcaccatgttggtcaggctggtctcgaattcctgacctcgtgatccacctgc

SEQ ID NO: 350841 - DNA, 201 bp, Homo sapiens
cttttttaaaagaataatttctatacttttgtcttttattggcttgcttgactataatttttctctttaatttttatgtagggctttgactctatcctctyctgaagttcgattccacatggacagtgaaactcacgatcctatagatctgcagaccaaggaacttaggtttgtaatttttttgatgggcattagataaga

SEQ ID NO: 350842 - DNA, 201 bp, Homo sapiens
catttttaatttaatttcaattttttgtttatttaaaaatttttaagacaatttaaataagttgtatgttattttacagttattcttcaaaagcaaaggartagtaagtgaagaagcctatattttatttgtaagaaagaatgccattgtggtattaattccaaagtatggtttagaagggacagtcttttttgaagaaaa

SEQ ID NO: 350843 - DNA, 201 bp, Homo sapiens
tttttagtagagacagggtttcaccatgttggtcaggctggtctcgaattcctgacctcgtgatccacctgcctcagcctctcaaagtggtgggattacargcatgagctaccgtgcctggccaggaatataattctttgttgtgcttttagattcaagacctttgaactcagtgtgtggtctcaaaaatatgatattgcc

SEQ ID NO: 350844 - DNA, 201 bp, Homo sapiens
caatcagaaaaaaaaaccgtcttttgccttctaaagtattaatactcatgggtagacataacattttaggtgttctatgaggaaaaatgatcaaaatgtgrtaagtataccttgctttttatgtcaaaatccattaataaatacatatcagacctgaagtagagccttgttttaagtgcacactacaaggcaagaaaggaa

SEQ ID NO: 350845 - DNA, 201 bp, Homo sapiens
ggtttagaagggacagtcttttttgaagaaaaggacaaaccaaacccacagcttatttatgatgatgaggtacggtatttctcatgtttgttttcttttcyggggggcactttttctttgagagttcataaatggtacctataaagcataaaattattttttgtaccctgaagaatttatcctgatatccaaatacatgcc

SEQ ID NO: 350846 - DNA, 201 bp, Homo sapiens
ataattgtagctgcacgctattggccatatgtcagaagttgaaatggtagaggtgactgagtcttttttaaatttagctaaactttatcttattaaaactscattaggtacatttacccagtcaagcatattgacatccttttatttttatctttttaaggttggtgttcatattgctgatgtgagccattttattaggcc

SEQ ID NO: 350847 - DNA, 201 bp, Homo sapiens; identical to SEQ ID NO: 74906

SEQ ID NO: 350848 - DNA, 201 bp, Homo sapiens
gtcgttagtgtagagggcttaaacttagattaattggcatgaagtccagttttccttcatagctttccttctttaacaattttgtataagtgcttttataraaacaaaccttttatttgaccttttctcaattctcctatttacaaaaagcagaacactcttttctttccttgtttaattaatgttatttgagaatagaac

SEQ ID NO: 350849 - DNA, 201 bp, Homo sapiens
aaatatgatattgcctattacgttatattacataaataatctatgatgagtatggtacttttattggattagatcagggcttctcaatcttggcattatakatattttgaactgaataatttttttgtggtggaaaggctgttttatacattgtagtatgtttaacagtgttcctagcctatttggcaggatcaccacccc

SEQ ID NO: 350850 - DNA, 201 bp, Homo sapiens
gctaccgtgcctggccaggaatataattctttgttgtgcttttagattcaagacctttgaactcagtgtgtggtctcaaaaatatgatattgcctattacrttatattacataaataatctatgatgagtatggtacttttattggattagatcagggcttctcaatcttggcattatagatattttgaactgaataattt

SEQ ID NO: 350851 - DNA, 201 bp, Homo sapiens
atatatacacatatataaaaatatttatatatttgaaaagagatgttatgtataattatatgtatatttacttaacctaaaatagaaaaaacatatacatrtaagtacctgagatataaacatagtctaaaaaagtccccagctgcgggcacgtgcttaaacatgtacagatgcacttaaatttacactaaaactcatttg

SEQ ID NO: 350852 - DNA, 201 bp, Homo sapiens
attaattggcatgaagtccagttttccttcatagctttccttctttaacaattttgtataagtgcttttatagaaacaaaccttttatttgaccttttctyaattctcctatttacaaaaagcagaacactcttttctttccttgtttaattaatgttatttgagaatagaacctcacataaatgtatggttatggctaag

SEQ ID NO: 350853 - DNA, 201 bp, Homo sapiens
gttttccttcatagctttccttctttaacaattttgtataagtgcttttatagaaacaaaccttttatttgaccttttctcaattctcctatttacaaaawgcagaacactcttttctttccttgtttaattaatgttatttgagaatagaacctcacataaatgtatggttatggctaagtaatctgtggttctattttt

SEQ ID NO: 350854 - DNA, 201 bp, Homo sapiens
gagactcctgtttcttctagcttccatttatgtatgtatgtatgtatttgaaacggagttttactctgtcacccacgctggagtgcaatggcacaatctcrgctgactgtaacctctgcctcccgaattcgaacaattctcctgtcgttcaagtagctgggattacaggtgcccaccaccacgcccagctaatttttgtat

SEQ ID NO: 350855 - DNA, 201 bp, Homo sapiens
catttatgtatgtatgtatgtatttgaaacggagttttactctgtcacccacgctggagtgcaatggcacaatctcggctgactgtaacctctgcctcccraattcgaacaattctcctgtcgttcaagtagctgggattacaggtgcccaccaccacgcccagctaatttttgtatttttagtagatatggagtttcacc

SEQ ID NO: 350856 - DNA, 201 bp, Homo sapiens
ggattttatgtagtgaaagtaggaggacatattgaaaaccatttttctatcatttataagaattatataacatacattttcttttttaggcatctctgacrtatgctgaagctcagttgagaattgattcagcaaacatgaatgatgatattaccactagtctccgtggactgaataaactagccaaaattctgaagaaaa

SEQ ID NO: 350857 - DNA, 201 bp, Homo sapiens
tttgttttcttttccggggggcactttttctttgagagttcataaatggtacctataaagcataaaattattttttgtaccctgaagaatttatcctgatmtccaaatacatgccagaaaatctacatttaattttgccaactaaactatggttttactcacaatttctcaccactatatgtcttctcatatgcaattgtt

SEQ ID NO: 350858 - DNA, 201 bp, Homo sapiens
aatcaagtaaaaatgcttgttttcatttcatttataaatagagtagtaaagcttctgtttttgagtgcaattttgttgttgttttttgacacagagtcttkctctgtcacccagcctggagtgcagtgatgcgatctcggctcactgcaacctccacctcccgggttcaagtgattctcatgcctcagcctctcaagtagc

SEQ ID NO: 350859 - DNA, 201 bp, Homo sapiens
ttctgtaggttagtaatttttcaattgatttataaagatctccctgaagggctgctatgaagaggaaaggattctgagatcccttccttatatgtcaggcyaagaaaaagtaatggtatatgaatgtggattggtggagcaggagagaatgattggaaatggtatttgtttgtaagaccactctcatgtcagtgtgtaaca

SEQ ID NO: 350860 - DNA, 201 bp, Homo sapiens
caaccatctccgcacccgcaaggaggacagaaccagcactcccacaagccgccggaagtcaactctcccggatgttccgaggagcggaaagcaacacacgytgtgaggtggcgtccagaaggaagccccgcctaggccacgggcggaaatggctcctcgccttgctttgccgcccctccccactctcgcccaatccccgcg

SEQ ID NO: 350861 - DNA, 201 bp, Homo sapiens
cttggcttaacttattcagtgtttttaaaacataaagtatttatgcccaacataaaacaggattttatgtttgacagagctatttacaaatgaatataggraaaattaactttatctttctttaagattgatgttcttgaggaccctgccatcaggaatgtaattgtgctacaaacagttcttcaagaagtgagaaatcgc

SEQ ID NO: 350862 - DNA, 201 bp, Homo sapiens; identical to SEQ ID NO: 74918

SEQ ID NO: 350863 - DNA, 201 bp, Homo sapiens
tctactaaaaatacaaaaattagctgggcatggtggtgtgtgcctgtaatcccagatacttgggaggctgagagaggagaatctcttgaacccgggaggcrgaggttgcagtgaacggtggtcatgccattgcactcaggcctgggtgacagtgtcaaactctgtctcaaataaataaataaataaatacatgtgtgaact

SEQ ID NO: 350864 - DNA, 201 bp, Homo sapiens
acaggcgtaagccactgtgcccagcttcatttttctataattcttattctcatttctttctatctttctctctctctcttttttttttttttttttttttktgcaatttactgaatcagaccatttgggagatgtaccaaaggatttaaaatttagactttgttcaacagtttaaaattcattccagaaaaaaacagcttg

SEQ ID NO: 350865 - DNA, 201 bp, Homo sapiens
caccatgaccagctaatgtttgtatgtttagtagagatggggtttcactatggtggccaggctagtcttgaactcctgacctcgtgatccgcccgcctcgkcctcccaaagtgctgggattacaggcgtgagccaccgtgccccgccctgcatagcctttcttatctgtgcagctgtgggcatgtcttaggcaagcccccc

SEQ ID NO: 350866 - DNA, 201 bp, Homo sapiens; identical to SEQ ID NO: 74963

SEQ ID NO: 350867 - DNA, 201 bp, Homo sapiens; identical to SEQ ID NO: 74966

SEQ ID NO: 350868 - DNA, 201 bp, Homo sapiens
gctacgtaacactagaggagaaacagatgttgaggtgaaaggatgtgttccattttggagcttggggtgcctataagtcatctaggtgatatctagaaggyagatgaatgtcgcatttgggtctcaccaaaggaatcagggtagatatgatagatttttttttttttttttttttttgagacggagtctcgctctgtcgcc

SEQ ID NO: 350869 - DNA, 201 bp, Homo sapiens
ttgaacctgggagggggagggtgtagtgagccaacatcatgccattgcactccaacctgggcgacaatagcaaaactctgtctcaaaaaaaaaaaagaaawatcataaggtggctcctcaaaaaataaaacaatttccacatgatccaataatttcactcgtggatatagggtatatacccaaaagaagtgaaaacaaaga

SEQ ID NO: 350870 - DNA, 201 bp, Homo sapiens; identical to SEQ ID NO: 74969

SEQ ID NO: 350871 - DNA, 201 bp, Homo sapiens
gttcaagcaattcccctgcctcagcctcctgagtagctgggattacaggcacgtgccaccatgaccagctaatgtttgtatgtttagtagagatggggttycactatggtggccaggctagtcttgaactcctgacctcgtgatccgcccgcctcggcctcccaaagtgctgggattacaggcgtgagccaccgtgccccg

SEQ ID NO: 350872 - DNA, 201 bp, Homo sapiens
ttattaattgaaaattggaaaactaaaaattagcttaattctctgatggcttttctaaatgatcgaagtatttacctcctgttgatttgagaatacgtaaygtttaaagggtatcaaggaagtttatttttagattcttagcatatattaataataacaaaagctaaagcttaagtttattaagcacataatacacaccat

SEQ ID NO: 350873 - DNA, 201 bp, Homo sapiens
tcccaagtagctgggattacaggcatgcaccaccatgcccaggtaattttttgtatttttagtagagacggggtttcaccatgttggccaggctggtttcraactcctgacctcaggtgatccaccagcttcagcctcccaaagtgttgggattacaggcgtgagccaccgcgcccggctactgaaatctctattttttaa

SEQ ID NO: 350874 - DNA, 201 bp, Homo sapiens
ataataaaaatcaacttgtaaaatacagacatgggctgggcgcagtggttcacgcctgtaatcccagcaatttaggagactgaggtgggtggatcacctgmggtcaggagttcgagaccagcctgaccaaaatggtgaaactccatctctactaaaaatacaaaaattagctgggcatggtggtgtgtgcctgtaatccca

SEQ ID NO: 350875 - DNA, 201 bp, Homo sapiens
cggaggttgcagtgaacggtggtcatgccattgcactcaggcctgggtgacagtgtcaaactctgtctcaaataaataaataaataaatacatgtgtgaaytattcccaagacacaagaagctagctctggttctgtctgtggacttggtggtctccatccttgccttgctacacacttgccctgcttcaaaagtccagtt

SEQ ID NO: 350876 - DNA, 201 bp, Homo sapiens
ggcgacaatagcaaaactctgtctcaaaaaaaaaaaagaaaaatcataaggtggctcctcaaaaaataaaacaatttccacatgatccaataatttcactygtggatatagggtatatacccaaaagaagtgaaaacaaagactcaaacagatgtttgtacacttgcgttcacagaagcattattcacgatagccaaaagg

SEQ ID NO: 350877 - DNA, 201 bp, Homo sapiens
gacggggtttcaccatgttggccaggctggtttcaaactcctgacctcaggtgatccaccagcttcagcctcccaaagtgttgggattacaggcgtgagcyaccgcgcccggctactgaaatctctattttttaatttttaaatccctattttcatttttaatgatatccctgttttttaaatccctattttttttctagt

SEQ ID NO: 350878 - DNA, 201 bp, Homo sapiens; identical to SEQ ID NO: 74965

SEQ ID NO: 350879 - DNA, 201 bp, Homo sapiens; identical to SEQ ID NO: 74964

SEQ ID NO: 350880 - DNA, 201 bp, Homo sapiens
caggcgtaagccactgtgcccagcttcatttttctataattcttattctcatttctttctatctttctctctctctctttttttttttttttttttttttkgcaatttactgaatcagaccatttgggagatgtaccaaaggatttaaaatttagactttgttcaacagtttaaaattcattccagaaaaaaacagcttgg

SEQ ID NO: 350881 - DNA, 201 bp, Homo sapiens
attgtccctttcccctagcaggctgcagtaacccctatttttgtgacttctaaagtgcagagatgacaggtgttcctggaggattttgaggttgaaaaggygtaggactcagggagatagaaattgctctacttgggggtttcaagacctgtaacggaaaagagttccatctccacctagctagggtgtgatgggggtgag

SEQ ID NO: 350882 - DNA, 201 bp, Homo sapiens; identical to SEQ ID NO: 74968

SEQ ID NO: 350883 - DNA, 201 bp, Homo sapiens
agactagggttcagtaacaattacatactcagtaattgtaattatgattaagactcaaattcaattctcttcacttgaactgctgggctcttttcatcatkccagccttcctcataagtcctcctccttataatattctcatttccacaagcatatttggatggaagtcagaatgaaagagtgaaaagggcattcagacga

SEQ ID NO: 350884 - DNA, 201 bp, Homo sapiens
cctgatactatttatgctttgtgtcatgcacggaaaacactgatttctaccatttttttaatctgttgagtacttactatgtaccaggtgctagtcttttwtttatttatttatttatttatttagagacagagtcttgctctgtctcccaggctggagtgcagtggcacgatctcagctcaccacaacctctgcctcctg

SEQ ID NO: 350885 - DNA, 201 bp, Homo sapiens
gaatagacatttctctaaagatttacaaatggccaataagcacatgaaaaatgctcaacacgactaatcattagggaaatacaaatcaaaagcacagtgcratactccttcacacacattaggatgacacttataaaaacaagcaggagccaggtgcggtggctcacgcctataattccagcactttgggaggctgaggca

SEQ ID NO: 350886 - DNA, 201 bp, Homo sapiens
gctcacttcagaaaatatgacattttttttctgcccttgattcctggcaaacgtccccatgagaaactaaatgttcattaacaaatatttattaagtatcstcatgtacaagacattaatccttcatcaattacataagcccaaagtaacagtgcaattttagacttcctgatactatttatgctttgtgtcatgcacgga

SEQ ID NO: 350887 - DNA, 201 bp, Homo sapiens; identical to SEQ ID NO: 74967

SEQ ID NO: 350888 - DNA, 201 bp, Homo sapiens; identical to SEQ ID NO: 74978

SEQ ID NO: 350889 - DNA, 201 bp, Homo sapiens
tcttcattgtaatgggttttatttctgacaagtagaaaggcgcataaacatgcttaagaaatgaaataggcagtaaataggaagctgctttttaatttttktaatttttttttgcagaaattctttcattagcatgaacgctattataatgtcaatacctgtttttaagtcttattttaaataattttacacattatcaaa

SEQ ID NO: 350890 - DNA, 201 bp, Homo sapiens
tcacttgaacccagcaggcagaggctacagtaagccatgattgtaccactgcacaccagtctgggtgacagattgagaccctgtctccaagaagaaaccaraaagatatttaaatcacattgcaatgcagtatgagaagttatataagaaaagcatgtggtcttacaggaataaataactgcaatacgtaacctaggagct

SEQ ID NO: 350891 - DNA, 201 bp, Homo sapiens
agaaaacagtacatgatgagtgcatgaaaaatagtttaaagaatgaaaaatgtgattttggagaattcaaaaacctaatcattccaccaagttatttaacmtccattaatcagatgcgtaaagacaaaaaaacagattatgaagtggtaattagagtttatttctctaatatgattgatttttaaaaagctgcttaactca

SEQ ID NO: 350892 - DNA, 201 bp, Homo sapiens
gctattaacactttttattttttaaagttttaggtggtctctggattatgaagactttttaaacagaaatgctaaactttgttaatatattttgccagcayacatagagtatttatttgtgtgccaggcactttgctacatgctttatacacattgtccctctaaattctctccacaattctataaggtatgtattatata

SEQ ID NO: 350893 - DNA, 201 bp, Homo sapiens
atgttcttcagccatttgctgtcaagaaataagatatgtcattaaaaataaatatactacaatcaagtagggtctgcttacctctatagaagaacatccaracaatcaaataaaagaaggaacttcatttctctatacattcaagcaagtgttttgtgcccatctggtgccaggcactgtcgtaggtgctggagtttcagt

SEQ ID NO: 350894 - DNA, 201 bp, Homo sapiens
tcaaaaataaatgcctagcaattatattcctggttctgttttacaaatatttcaaattttgaaatagttcccttttattaatatagttactaaggtaataygtattactatttatacaattgataattaactcagtccttacatcaacctttttgtattcataagtgattagaaaatgtttgttagattaatacgcattac

SEQ ID NO: 350895 - DNA, 201 bp, Homo sapiens
aatttgcatgctcatatacgtgtggttacttttgtagatggtattttaatagaaaaccctcatttatccaaacatccagagtatggggtttattgtaaaaygtgctgttttttttaacttctgttttttagatggaaagttcaagtaacaaataaaggatactacaacttaagaaaacccaaggtatgttgttagtgcctc

SEQ ID NO: 350896 - DNA, 201 bp, Homo sapiens
ttagttaggaagaataagttctgctattgcacagcttggtgactatagttaataataatgcatattttcaaattgctaaaagagaggttttttgtttttgwtttttgttttttttgtgtttttttgagacggggtctcatttgaccatgcagtggcgtgatcacggctcactgcagcctagacctctagggctcaagtgat

SEQ ID NO: 350897 - DNA, 201 bp, Homo sapiens
tagatttcttgagatttagccataattggttaacaagtgaagacttgtgtagatgaaatgtgccatgtaatttaaatgtgaaagactatactagttgtacytacacagatactggtgttttgttttattatgtaagagccgaagtaataagttacactgagtacttatccctaaatttgcatgctcatatacgtgtggtta

SEQ ID NO: 350898 - DNA, 201 bp, Homo sapiens
ggaattataaatgaggaggagtagacagaaaactgcagtgtttcctttgaagccttgtagaactatatagcttattaaagtggattgctttgatttatttwaaaaaaaaaattgaacgtaaaaaaatagagaaagtattgagagatcctttaaaatggttcctgtgcttaaaagtatttgtcagttatcatagtgcctgaa

SEQ ID NO: 350899 - DNA, 201 bp, Homo sapiens
gggatgggactgtagggtgggtcctggatgcagttgatgacatgaagattaaggtattagtctttaagaactactacagaaggacttctaagataaatatmctatacatatatatatatatatatatgggttttgttgttgttttgttgttgttgttgttttttcttgagatacagtctcgcactgtcacccaggctggag

SEQ ID NO: 350900 - DNA, 201 bp, Homo sapiens
aacactaattaaaggtgaacttagcacattgtggtttatgtgaacaagaaggaggcaatgtggtatagtagataaactataacttttttttttttttttttgagacagagtcttgctttgttgccgaagctggagtgcaggggcatgatcttggctcactgtaacctctgcctcccaggttcaagtgattctcctacctca

SEQ ID NO: 350901 - DNA, 201 bp, Homo sapiens
aaacactaattaaaggtgaacttagcacattgtggtttatgtgaacaagaaggaggcaatgtggtatagtagataaactataacttttttttttttttttttgagacagagtcttgctttgttgccgaagctggagtgcaggggcatgatcttggctcactgtaacctctgcctcccaggttcaagtgattctcctacctc

SEQ ID NO: 350902 - DNA, 201 bp, Homo sapiens
aagattgctgtaggctaaaaacagcatctgcaaaagacccagaggcatacatggcatatttgagtgagttcaggctggagcatagctttcaggaaggaaakacaagcgctgaggctagagagatggacagaagtcaaatcacagagtgtcatatttgcctggtattggatcttgtatttcatcatgggcattgaagggtta

SEQ ID NO: 350903 - DNA, 201 bp, Homo sapiens
attcagactttaaaaaaaaaaaaaaacaggaaaatctgtcattctcggcaacatagctgaacctagaggacattatgttaaataaataaaccagtcacagrcaaatattgtatgatgtcacttatatgtggaatctaaaaaatcaaactcaaagtcgagagtagaataatggttaccagaggctgtagagagtagtagagt

SEQ ID NO: 350904 - DNA, 201 bp, Homo sapiens
attgcttgaacccgagaggcagagggtgcagtgagccaagatcacgccactgtactctaccctgggcgacagagcaagactctgtctcaaaaaaaaaaaaatcaagaagtaatgatctgattatgttatttagaaatatagagataaataccagaagaaactacggaaagagctctgggagcaggaattataaatgaggag

SEQ ID NO: 350905 - DNA, 201 bp, Homo sapiens
tatggataatcaaagttacttgcatttttatgtcattttctatgtattgcaaaattgctttccagaaatttgtgctaagttgcactggtgattttttttttaagccagtataagatatgaaacactaattaaaggtgaacttagcacattgtggtttatgtgaacaagaaggaggcaatgtggtatagtagataaactata

SEQ ID NO: 350906 - DNA, 201 bp, Homo sapiens
gtatgttgcgcccttccgtgggtcagaccggcggcaaggtgaggcggcggcggcagcagcagccgccttgggctcctggacgcgctcccgaggtggggcgrgttggggagtggggattggagcgtgatggctggacgtcgccttctcggcgcggcaggtcccgggagacggggggacgaggcgcagtcccgccctcgggag

SEQ ID NO: 350907 - DNA, 201 bp, Homo sapiens
agccaggatggtctcgatctcctgacctcgtgatctgcccgactcagcctcccaaagtgctgggattacaggcgtaagccaccgcgcccagccagatatgrcagtcttatatgtattccttgcttgattccaaaaagaatctgtaatggttaatagcaacaacagagacattaattcagagaaacctagaactgataaaat

SEQ ID NO: 350908 - DNA, 201 bp, Homo sapiens
aagtgagatcactggcccttttcatccactcaacttcaagaatagtggcagagaggatttctctctggggaagctaacttgcccaagataaaaattaacasgtaccaatatttgagtgtcccgtagcaaaaggaccagatttttgcactgtagtcctataatgaagcttataccctagcaagagctgcttttggatgcaaa

SEQ ID NO: 350909 - DNA, 201 bp, Homo sapiens
gctaatttgtcccaatccaattctaagctgttgatatgtaaaatatacatgctatacttttctttaaacagtggtttacggctcatgcagctggtcactgwacactagcggctagagtgggatgaggaagaaacagaaacatggctcaagatccatgagataaaacgttcacttgaaaaaagaattccttaatcaatgaat

SEQ ID NO: 350910 - DNA, 201 bp, Homo sapiens
gatataccaaaataattgaactattttattttaaaattgtacctttttcaaattaagattttatgacttacatgccacctttgtcaatattcctgcaaggraaagggacattttaaatttttcaaacaatattgttttgacagtttttttaaatgtacaatctcttatttatctgagttcaacctgagatcacaagagaga

SEQ ID NO: 350911 - DNA, 201 bp, Homo sapiens
aagaatcagcgtgaagggtgggcttagggtattcattttgctatccttttgacttctctgaaagtttggaatttttcaaaataaaaagaaaaaagatgatmagctgttacccaatgacatgatgctaaagctgaaataccaagacattttagtaatgtcttatcttcccagtgagtttgaaatctaggttgttaaatacca

SEQ ID NO: 350912 - DNA, 201 bp, Homo sapiens
cactcactgtcccagaatgcgccgtgggaatcaggatttcatagagtggtgtagaggcctgctttaatctctgctgatgacctaaactcattttgaggaarcaagctaataaataaacatccctgagtttgtgcaagcgtggcagctttgcagtagtcatttgctgagacgatgcatccagcctccactcctcagccagcc

SEQ ID NO: 350913 - DNA, 201 bp, Homo sapiens
agaaagacagattttcaactcagtttaagtccaaactttctaataatttgatgtagcagtgtaatgggctgcattactagtgagttccttatgtgagtgtscgagcatatgctggatgacttatctagaataatgtagaagagaattaaacattgaatgggagcttaaattagttaatttctgaggttcccttccattctt

SEQ ID NO: 350914 - DNA, 201 bp, Homo sapiens
ttgtttcaacatagtcctcatagttacatatttaatgactaaaataattgaatggaaatagcattatttatccagtctctactgttgaaaggtaacactgkctctatgattgtactataaataatgccacagtgaatatttttatacatatttttaggcatttttgtctttcgaaatatttttctagggtcgttgacagaa

SEQ ID NO: 350915 - DNA, 201 bp, Homo sapiens
agtccagattttttaatctgagtaccccattttaaaaaaagaaataaaaccttgcaaaacacaccagaatacatccagtaaaggaaaatcaaggtgaaagrtcagagaaaaaaatcagtgtctattctgtgaatggttgaaagttatagaaagacagattttcaactcagtttaagtccaaactttctaataatttgatgt

SEQ ID NO: 350916 - DNA, 201 bp, Homo sapiens
taataataatcttttctgaaatttatgagaatttaataaatgataagtgttctgtcacaaattattgggggtagaaaagatggttttatgaatcgtgtcargacaagtgctcttgggggaggggagaaggttaactcttcataatacgccagatttattatgggtagattaatgcagtagtttgttttgttgttgttgttg

SEQ ID NO: 350917 - DNA, 201 bp, Homo sapiens
taaactagatcggtaagttacgtttccccaaaaagtagatttcttgagatttagccataattggttaacaagtgaagacttgtgtagatgaaatgtgccaygtaatttaaatgtgaaagactatactagttgtacctacacagatactggtgttttgttttattatgtaagagccgaagtaataagttacactgagtactt

SEQ ID NO: 350918 - DNA, 201 bp, Homo sapiens
atttcactgtgcagatagtgcatatattttatttgccaaatgttatggtaagtagtgataaaattatgttttattttttaacaaaaatgattgttttgtgrgttatcattgagattatggtttaaaattagttaatgcttgtttcttccttccctcaggtgcatttggtgccagaaaacagtacatgatgagtgcatgaaa

SEQ ID NO: 350919 - DNA, 201 bp, Homo sapiens
gaaacactaattaaaggtgaacttagcacattgtggtttatgtgaacaagaaggaggcaatgtggtatagtagataaactataacttttttttttttttttttgagacagagtcttgctttgttgccgaagctggagtgcaggggcatgatcttggctcactgtaacctctgcctcccaggttcaagtgattctcctacct

SEQ ID NO: 350920 - DNA, 201 bp, Homo sapiens
tgaaacactaattaaaggtgaacttagcacattgtggtttatgtgaacaagaaggaggcaatgtggtatagtagataaactataacttttttttttttttttttgagacagagtcttgctttgttgccgaagctggagtgcaggggcatgatcttggctcactgtaacctctgcctcccaggttcaagtgattctcctacc

SEQ ID NO: 350921 - DNA, 201 bp, Homo sapiens
atgtaaattatacctcagttttaaaaataaaagggatcgttaaaattgaatataattttactttgaaaaattaaccaaaaaacaaaaaaatacaaaaaaawtttaaagacaaataacccattgtgtagcaattagaagtgcaataactttgtccttccaatttgtattttttacactttcaatattatacagtttaagaaa

SEQ ID NO: 350922 - DNA, 201 bp, Homo sapiens
tttagaagacatcttggcagtttcttaaaaagataaatataaatttattatatcttctagcaagtcctctactaggaatctacccaagggaagtgaaaacwtttctcacaaacatttgcatgaaaatgttcacagcagcattattcatgatagctgaaaagcataaacagcccagctgttcatcagctgatgagttgataa

SEQ ID NO: 350923 - DNA, 201 bp, Homo sapiens
tcctgggaggcagaggttgcggtgagctgagatcatgccactgcactccagtctggtggacagagtgagaccctgtctcaaaaaaaaaaaaaaaaaaaaaagtgctgttagattaaactgccaaatatgttcaaaccttattgctccatttcactgtgcagatagtgcatatattttatttgccaaatgttatggtaagta

SEQ ID NO: 350924 - DNA, 201 bp, Homo sapiens
agaggcttctaccacatcactcagagagcagtagtatagagtcaccacatcactcagagagcagtagtatagagtggttctgaaaatagaaggagtgagcraaagaagctgtttgtcccctagatcacttcccctttccccaacttcacatggtcatttactaccctcctcaactcaggtagtagattggaggtttactcc

SEQ ID NO: 350925 - DNA, 201 bp, Homo sapiens
accgcctgtttcttttctggttaggtatcgtccttggagaagatggaagcggagaggcggccggcgccgggctcgccctccgagggcctgtttgcggacgrgcacctgatcttgtggacgctgtgctcggtcctgctgccggtgttcatcaccttctggtgtagcctccagcggtcgcgccggcagctgcaccgcagggac

SEQ ID NO: 350926 - DNA, 201 bp, Homo sapiens
attccagttgcgcaggttttgcgaaatgtaatggaagcagatggaattaaactagatcggtaagttacgtttccccaaaaagtagatttcttgagatttakccataattggttaacaagtgaagacttgtgtagatgaaatgtgccatgtaatttaaatgtgaaagactatactagttgtacctacacagatactggtgtt

SEQ ID NO: 350927 - DNA, 201 bp, Homo sapiens; identical to SEQ ID NO: 74982

SEQ ID NO: 350928 - DNA, 201 bp, Homo sapiens
aggagaattgcttgaactcaggaggtggaggttgcagtgtgccattgtactccagcctgggctacagagtgagactctgtctcaaaaaaaaaaaaaaaaaagttagccagtagtcccagctactggggagactgaggcaggaggattgcttgagcccaggagttcaaggctgcagtcagctgtgatcatgccactgcactc

SEQ ID NO: 350929 - DNA, 201 bp, Homo sapiens
gcagggtctcctttttaaaggctgaataatactccattgtacacagtatatatatatatatatatatatatatatatatatatatatatatatatatataatatacacacactgatttatgtcacagtttcttcattcatttatccatccagtagtctttgtcttggtagatatttggttcagatacatatcagcctttgc

SEQ ID NO: 350930 - DNA, 201 bp, Homo sapiens
aatggcagggtctcctttttaaaggctgaataatactccattgtacacagtatatatatatatatatatatatatatatatatatatatatatatatatatataatatacacacactgatttatgtcacagtttcttcattcatttatccatccagtagtctttgtcttggtagatatttggttcagatacatatcagcct

SEQ ID NO: 350931 - DNA, 201 bp, Homo sapiens
caaatggcagggtctcctttttaaaggctgaataatactccattgtacacagtatatatatatatatatatatatatatatatatatatatatatatatatatataatatacacacactgatttatgtcacagtttcttcattcatttatccatccagtagtctttgtcttggtagatatttggttcagatacatatcagc

SEQ ID NO: 350932 - DNA, 201 bp, Homo sapiens
tgtttttcttcccgaaatcttgatcctcgccatcatagtcactctatatgagttgatttgggcttcctcatggtggtacacagaagggggtattccacacrtgggtatacagaagttcctatgtcaagaagaagttattccactttagagaaagcaacagtcaggttggtgtgatcggaacagactgatttatgttaaatg

SEQ ID NO: 350933 - DNA, 201 bp, Homo sapiens
atgtagttgaatacattggtctgttactccttgcaggcagagaatggaggactgtggaaagtctcagccagtgggtgttggaaaagacagaaagggtttgrgcttgtgctaggtgatttggggaggacttttggaagctttgctctgaatcagatgttgtcaggaagcaggggtatgcttcctgattctatgagtgggtat

SEQ ID NO: 350934 - DNA, 201 bp, Homo sapiens
tgcaaatggcagggtctcctttttaaaggctgaataatactccattgtacacagtatatatatatatatatatatatatatatatatatatatatatatatatatataatatacacacactgatttatgtcacagtttcttcattcatttatccatccagtagtctttgtcttggtagatatttggttcagatacatatca

SEQ ID NO: 350935 - DNA, 201 bp, Homo sapiens
aaggaataggctatttagagttccttgtaaattcactaatcggtggtctttaagcttatttagtctaatggctttctgaggttgagctgatgcagttcatktaggaatgtgtggtgtttagatgatctcactcttttttccatttttatcatagtcctttgtaaacatgagactttgactctttaaatttaattttcactg

SEQ ID NO: 350936 - DNA, 201 bp, Homo sapiens
tcagagagggtggctggacccctctctggttccccagggtggcagtgtttctatggactaggctgggggctggcttgttttctttaatttcacaggtgctraatgtcacctgaatggattctcttcaactctagaatttataaggataaatgcatactatattgagaagaactaaacctatgaattacatccaattcattc

SEQ ID NO: 350937 - DNA, 201 bp, Homo sapiens
tttgcaaatggcagggtctcctttttaaaggctgaataatactccattgtacacagtatatatatatatatatatatatatatatatatatatatatatatatatatataatatacacacactgatttatgtcacagtttcttcattcatttatccatccagtagtctttgtcttggtagatatttggttcagatacatat

SEQ ID NO: 350938 - DNA, 201 bp, Homo sapiens
atttttatattatttataattacagaaatgttggtgaaaatagtttttaaatgcctgtaattccatctcaatttttttgtttatttcttttcatattctcrtatgttttatacagttgcaattatagtcatccctcaatatcttgagggaattagttccaggaccccccaccatgggtaccaaaatctgtgactactcaag

SEQ ID NO: 350939 - DNA, 201 bp, Homo sapiens
ctagattcattcacattttgcaaatggcagggtctcctttttaaaggctgaataatactccattgtacacagtatatatatatatatatatatatatatatatatatatatatatatatatatataatatacacacactgatttatgtcacagtttcttcattcatttatccatccagtagtctttgtcttggtagatatt

SEQ ID NO: 350940 - DNA, 201 bp, Homo sapiens
ataggcagctggaaatttgactgaattttaatctgggtagctactcttctttagacacagcattttgttcactcagttctcaaaacagtgttccattcctrtactgtcatagtaggtgatatgttttaatcaaatctgtttttaatacatacagttttagtaaggttgccccagggaaaatagacttcaaggtccataaaa

SEQ ID NO: 350941 - DNA, 201 bp, Homo sapiens
ttctagattcattcacattttgcaaatggcagggtctcctttttaaaggctgaataatactccattgtacacagtatatatatatatatatatatatatatatatatatatatatatatatatatataatatacacacactgatttatgtcacagtttcttcattcatttatccatccagtagtctttgtcttggtagata

SEQ ID NO: 350942 - DNA, 201 bp, Homo sapiens
tcttctagattcattcacattttgcaaatggcagggtctcctttttaaaggctgaataatactccattgtacacagtatatatatatatatatatatatatatatatatatatatatatatatatatataatatacacacactgatttatgtcacagtttcttcattcatttatccatccagtagtctttgtcttggtaga

SEQ ID NO: 350943 - DNA, 201 bp, Homo sapiens
tttttaacctcagaccaacttggctacagctatgccatcgatctgccaggtaactaacacaacttccaaatgggtgattcattcatcttctaaagaagctrgctttcttgctttctttctttataatgtaaaccaagacctttagccgaagctttcaggtctagttaagtttattgaccatttttctagcatatacgtatt

SEQ ID NO: 350944 - DNA, 201 bp, Homo sapiens
gttgaaaacttaactgtttttcttcccgaaatcttgatcctcgccatcatagtcactctatatgagttgatttgggcttcctcatggtggtacacagaagrgggtattccacacatgggtatacagaagttcctatgtcaagaagaagttattccactttagagaaagcaacagtcaggttggtgtgatcggaacagactg

SEQ ID NO: 350945 - DNA, 201 bp, Homo sapiens
aactacaaacaaaatttctattaaattttgtgtctcaacagaaaagagaaagcgaccaaggaactcccttccctgcatgtgctggtaaccatgagcctggraggctctactcaggtttttttcctttgttgtgtttatccatttctgcataacagattacgattacccaaacactcagtggcttgaaggtgaccatttcat

SEQ ID NO: 350946 - DNA, 201 bp, Homo sapiens
agatcagcagcattagattctcataagagtgcaaaccctatcatgaactgcacctgagagggccctaggttgcacactccttatgagaatctaactaatgyctgataatccaaggtggaacaatttcatcctgaaaccatctcccttcccatccaccaccccctggtccgtgaaaattgtcttcctcgaaaaccagtccct

SEQ ID NO: 350947 - DNA, 201 bp, Homo sapiens
cttgcctgatgggtgtgaagtagctttctggggctcctagatagattaaagcatagtcaggtgagcttcaagaaatcctgagacggaattagttggtagarttgttctttccttctaaaaaatgtttctttcctcatatttgcatagtagcaataaatgaaggggttgtcagaagtctgaattaatggtcccagcctctaa

SEQ ID NO: 350948 - DNA, 201 bp, Homo sapiens
caagtttggctggagcacatgagcccagataaagaagatggttttgccctcctgaaataaagccagaagtgatctcctttattgtgcactttgggtcatgygctaatgatgagggtttctgtaatactaatccccctaatgaaggcttctcccagcccttacacaagcccccaaggccccgtggcttggcaagccagagag

SEQ ID NO: 350949 - DNA, 201 bp, Homo sapiens
gtggtgtagaggaagtagagtatgtggattaggaactctcactttagaaccagacttcctgggttcaaattcttactctaccatatattagctgtgtgacyttaggcaagtcacttaacacttttgtgccttttattccccatctgtaaaacagggtaataatgttatgggttgaattgtcccccacaaaattcatatgtc

SEQ ID NO: 350950 - DNA, 201 bp, Homo sapiens
ttaaagtcttatttataaacatatttctcataattcttaaagtctttctatggtggtagaaaatttttttcttttttcttttttttagagccaggatctcrctgtgtcacctagggtagagtgcagtggcacaatcatggctaattgtaacctcaaactcctgggctcaagtgatcctcctacctcagcctcctgagtagc

SEQ ID NO: 350951 - DNA, 201 bp, Homo sapiens
atatttctcataattcttaaagtctttctatggtggtagaaaatttttttcttttttcttttttttagagccaggatctcactgtgtcacctagggtagartgcagtggcacaatcatggctaattgtaacctcaaactcctgggctcaagtgatcctcctacctcagcctcctgagtagctggaccttcagtcaagctga

SEQ ID NO: 350952 - DNA, 201 bp, Homo sapiens
aggtgttggaacagctgtggactggcccgctatctgtttttcttcctgaaatcttgagcctcgccatcatggtcactctatatgagttggtttgggcttcytcacagcatggctgcctcaggacagctggactgcttatttgatggttcagggctcaggcacaagataggaactgcaatacactttatgatttaaccttga

SEQ ID NO: 350953 - DNA, 201 bp, Homo sapiens
tttttttttttcttgagacagggtctcactctgtcactaaggctggagggcagtggcatgatctctgctcactgcagcctctgtctcctgggttcaagcgrttctcctgccttagcctcctgagtagctgggacaacaggcacacaccaccaagcctagctaatttttgtatttttagtagagccggggctttgccatagc

SEQ ID NO: 350954 - DNA, 201 bp, Homo sapiens
atattgactctgtccaggttgtatgctaagctttgcactgtatgcaaagtgtctgcatgacactgtcatcagcaaacacatagttagtaaacattgactcygtccaggttgtatactaaacctgagacttcaaaggtgaaaagtccttatcttagaccttaaggagttaggatcttgttaggggacatagatacataaata

SEQ ID NO: 350955 - DNA, 201 bp, Homo sapiens
catttgttgtgtctggaaagagatctccaggtaggtcaaaactatgcatttagttcttttaattttttaaaaaatttattgtatatatttaaggcatacartgtgaattttgatatacttatcttgatactcatacaagataagtgattagtgcactaaagtaaattaacatactcagcatcacatagagatatctctttt

SEQ ID NO: 350956 - DNA, 201 bp, Homo sapiens
ccttatcttagaccttaaggagttaggatcttgttaggggacatagatacataaataacaagttatagtatcatttgatcagtgctataaatgaggtacarggtacagtggtgaatggaggaatgaatacactgaataagtatttactgaaataagtacctccctttctccatatgagacaccctggggtgacaagctctg

SEQ ID NO: 350957 - DNA, 201 bp, Homo sapiens
ataggtcattgagcttcataaggggttgaataggtattactaagggaacatacaaaggcctgtgatgttggtgtaggaatgacattcgattttttttttttaattttaactttcaactttattttagatcctggggatacaagtgcaggtttgtgacatagatatattgcacagtgctagggtttgagatatgattgatcc

SEQ ID NO: 350958 - DNA, 201 bp, Homo sapiens
gctttctttctttataatgtaaaccaagacctttagccgaagctttcaggtctagttaagtttattgaccatttttctagcatatacgtatttagcaaaaygagcctttaaactaccaattaaacatcagaaagggactaatgagctgactcttgttttagaaaactgaaagttttaaatagatcttattaaatgaactat

SEQ ID NO: 350959 - DNA, 201 bp, Homo sapiens
tataggtcattgagcttcataaggggttgaataggtattactaagggaacatacaaaggcctgtgatgttggtgtaggaatgacattcgattttttttttttaattttaactttcaactttattttagatcctggggatacaagtgcaggtttgtgacatagatatattgcacagtgctagggtttgagatatgattgatc

SEQ ID NO: 350960 - DNA, 201 bp, Homo sapiens
taatgagctgactcttgttttagaaaactgaaagttttaaatagatcttattaaatgaactatctgcttttacacctgacttgacaattctctctgagttwattggattaataaaaaacctccctatggttctttgaaatttctaaccaatgaaataaaaatgaactagccacactgtacagggactagctggatttagag

SEQ ID NO: 350961 - DNA, 201 bp, Homo sapiens
tatctgcttttacacctgacttgacaattctctctgagtttattggattaataaaaaacctccctatggttctttgaaatttctaaccaatgaaataaaartgaactagccacactgtacagggactagctggatttagagattattccttgagggcagggctgggattagggtgaggaaagtacaacatttgccttgagc

SEQ ID NO: 350962 - DNA, 201 bp, Homo sapiens
gtgaccctgattgatttgcttggcccaaatttataatactgtacataagttaagacatatcattttttgttttgggggattttttttttttcttgagacasggtctcactctgtcactaaggctggagggcagtggcatgatctctgctcactgcagcctctgtctcctgggttcaagcgattctcctgccttagcctcct

SEQ ID NO: 350963 - DNA, 201 bp, Homo sapiens
aagtgcagttgaagttacaatattattaattaatccctcccttttaaatttatatctttgtgaagcataggttagcaaatgcctttaaaaaatatatttcmtttaggtcttaatgatctattcttttggatagtctatttcacctgaatggattgttgcttacaaattaaatatgtatcaggggctcccaatcctgaaagt

SEQ ID NO: 350964 - DNA, 201 bp, Homo sapiens
taatacaaaattttggaaagtcaaaattaatgcaaaaaattaaccatgaataatacatcatcaaaattttaaataaaggcagacttttgtttgtttttcayacccacatcgtcttataactgaatcagtcatttcccatttagcctataccacctgcgatggataggttcatgaaggctgacattgattggtctaccaaca

SEQ ID NO: 350965 - DNA, 201 bp, Homo sapiens
aattggcagttccagtgtccagcctaaatggcttgaatgtatttttctctcttctggtctcagcgaacatgcttgtcagctagtagttataacagattgaygggtgaggcaaaatacgcgaaagttctttttggttacataaatactgcattaggactaagtgcagttgaagttacaatattattaattaatccctccctt

SEQ ID NO: 350966 - DNA, 201 bp, Homo sapiens
ttgccctactggaactttgccactgggaggaacgagtgtgatgtgtgtacagaccagctgtttggggcagcgagaccagacgatccgactctgattagtcrgaactcaagattctccagctgggaaactgtctgtgataggtaatggctcctgtacctgcaatggcatccagagattgtcttttctgatgtctgagacatg

SEQ ID NO: 350967 - DNA, 201 bp, Homo sapiens
tagaaagcaatcaagatgatttcagagctcagtctctctctctttgacctgagtctttcaagcctggctgtagtgggacgcttgggcagagaattacctcraattaagttcaaatttatgaaagagcctaggtacagagggccttagatgccaggcagaaaccccaataagataccacctcatacccattgggatgactgc

SEQ ID NO: 350968 - DNA, 201 bp, Homo sapiens
agtgtttatgatttttttgtgtggctccattattattctgttagagatacattattaggtgggttttttccttggctgaaggtatattattacaggtttgkgattgggttgagggtatggcagtgggaagtaatttcatgcaagttaattaagagagcaaccacaaggcagccttaggtttatgaaagtcgtagaattatc

SEQ ID NO: 350969 - DNA, 201 bp, Homo sapiens; identical to SEQ ID NO: 74998

SEQ ID NO: 350970 - DNA, 201 bp, Homo sapiens; identical to SEQ ID NO: 74991

SEQ ID NO: 350971 - DNA, 201 bp, Homo sapiens
tggaggcttcatgactgattacaagtcaatcagttttacttgatacagaccagggcaatcttgggaatgtaattgaaccacatggagcttctgcttcccamtctgcaaagtgtgggtctcttgacctgatctggtggtgaaaatgttgttctcagtgaagtgactcttagtagattaggacaataggaaactggtctagag

SEQ ID NO: 350972 - DNA, 201 bp, Homo sapiens
agtttgtagtaaggatagtaggaatctctctctctctctctctctctctctctctaagagacagtctctctctgttgcccaggctgaaatgcagtggcatratcatagctcacggcagcctcaaacttctgggctcaagtgatcctcctgcctcagcctcccaagtagctaggactatagccacataccaccatgctcagc

SEQ ID NO: 350973 - DNA, 201 bp, Homo sapiens
tcatctttgtgttcgttgtttctaatgtgcttaatgttaaaattttatttttctttagtagtatgtgtaatatacatataaataaacaaaaagccacagcstttctttaaaggcacagaatgaataatgttttgggcctagttccagaactcaccattactttaggctattttcaaagagttttatgctgaagccaattca

SEQ ID NO: 350974 - DNA, 201 bp, Homo sapiens
tcggctcactgcaacctccgactccctggttcaagcaattctcctgcctcagcctcctgagtagccgggattacaggcatgcgcaaccacgcccagctaakttttgtatttttagtagagacagggtttcaccatgtttgccaggatggtctcgatctcctgacctcacgtaatctgcctgccttggcctcccaaagtgct

SEQ ID NO: 350975 - DNA, 201 bp, Homo sapiens
tgagcattatcacttgagctccgcctcctgtcagatcagcagcattagattctcataagagtgcaaaccctatcatgaactgcacctgagagggccctagrttgcacactccttatgagaatctaactaatgtctgataatccaaggtggaacaatttcatcctgaaaccatctcccttcccatccaccaccccctggtcc

SEQ ID NO: 350976 - DNA, 201 bp, Homo sapiens
cgggtgatcctcccacctcagtctcacaaagtgctgggattacaggtgtgggccaccatgcccagcccaatgatacactttcatttaacttttgcttttgyttcctaccctcaaatgacatttgaccctttacagagatattaacttgtatttaacatttttaacttgtatttaacaaagatacaattagtttttcaagag

SEQ ID NO: 350977 - DNA, 201 bp, Homo sapiens
atttcggaatacttgcattataccagttgagaatcccaaatccaaaaaattcaaaaatgctccaatgagcatttccttcaagtgtcatgttggcactcaaraagtttcaggtttagggggattttaggttttaaattttcagatttcagatactcaacctgtaaacacaactttttctttctctcctgttaaaccaaatca

SEQ ID NO: 350978 - DNA, 201 bp, Homo sapiens
atccagggccctatggttctgacctcattaaaccttaattacctctttctaggctctatctccaagtatagtcacattgtgggttagggcttcaacacacrgattttggggaaacacagttcagtccagatatagcatttataatgcattgtcaaaccatcagtttatagaagtttgtttttcttttcttttttctttttg

SEQ ID NO: 350979 - DNA, 201 bp, Homo sapiens; identical to SEQ ID NO: 74988

SEQ ID NO: 350980 - DNA, 201 bp, Homo sapiens
aacctcctactccaacttgagtgagctttacttgagaaagaagaaaagcagcacctgacatccaagagctggcctggtgaaatcaaccaggccttggtgtyccctgttggacataaacaatctcctagaacatcaacagcagacaaggccactctgatcatggtggatcaggacaaaaacaagactactccataactgtgt

SEQ ID NO: 350981 - DNA, 201 bp, Homo sapiens
atgtatttattttggtttcatctttagcttgctgtgtattttcttccttctctaaatcaatgaactgttctgtgtcatccctttttgtgggcgtggagtgracgcaggaggagacacgcctgcgatcctgggaggaaggagtgtgtgcatgagtctgctactgctgccgtaacaacatcccacagactaggcagcttaaac

SEQ ID NO: 350982 - DNA, 201 bp, Homo sapiens; identical to SEQ ID NO: 74983

SEQ ID NO: 350983 - DNA, 201 bp, Homo sapiens; identical to SEQ ID NO: 74985

SEQ ID NO: 350984 - DNA, 201 bp, Homo sapiens
ttggtgatctcccagataagccttcaagatgggtcaatttgttggagactctaaggttgaagctcttcctatttctatagtgccttacttatcctgagtaytttataaatattctttgaatgaataagtgaatgaataaactaatttcaaagtagaatgtttcattcagagcttctgacatctgttttaagatgtactgga

SEQ ID NO: 350985 - DNA, 201 bp, Homo sapiens
tccaaagatgacaatactttgactttagccgtaacagcagttcaagctgaaaaaaacccttatgaacttaattctgctttggcaggtcattaaatgaaatmttgaaaaccatacacaagagtattgtgaactagaagttaaagttttctaaaacaaaacaaagttaaaaggttcctattcaatacttgcatgctctgtata

SEQ ID NO: 350986 - DNA, 201 bp, Homo sapiens
tcttccaaacgacataaacccccttcctttccatctttctgttttgtgaactaggaaactttgccggctataattgtggagactgcaagtttggctggacyggtcccaactgcgagcggaagaaaccaccagtgattcggcagaacatccattccttgagtcctcaggaaagagagcagttcttgggcgccttagatctcg

SEQ ID NO: 350987 - DNA, 201 bp, Homo sapiens
gccagagctggggaaagagctccttctaaggaagagatgagactcttgacagagactcttagattaggctttgaaaggcaaaccaatgatggttttggtcrgaagcatattcaataaggctgatgtgctggtttattcttcacaccctctagtacatctagttatgaagactaaataaatatggcgtgggccaagcctgct

SEQ ID NO: 350988 - DNA, 201 bp, Homo sapiens
ttcaatctttcaactacaattttgccttttgtcagtttagacaattcttaactcagtctcttcacaattgcattcactatagctgaggaaattaagtcccrttagatcatattaataggaattaacactaattggtgaagggcagatctgactaattttgcacagcttttgaaatgatagtcattgctttcattgtgagca

SEQ ID NO: 350989 - DNA, 201 bp, Homo sapiens
caatgttaaatccaacatgaactttcatttgctcacttgacaaaggggtttatagtcctgcttggagagagagattcatacatcgttgaaaacttaactgyttttcttcccgaaatcttgatcctcgccatcatagtcactctatatgagttgatttgggcttcctcatggtggtacacagaagggggtattccacacatg

SEQ ID NO: 350990 - DNA, 201 bp, Homo sapiens; identical to SEQ ID NO: 74984

SEQ ID NO: 350991 - DNA, 201 bp, Homo sapiens
atgacaaaaatttcaataacatattggatatatattatccagcttttctaagttttttaagcatttgcttctatagaccttctctcaaaattatcatggtkttttagacgaatgaggagcaggttgctggtgtggttagcgtgattgaaaaccacactaacacagtaacttctttgttcaaaaccccaaaatacttctaga

SEQ ID NO: 350992 - DNA, 201 bp, Homo sapiens
ctctaaattctatggtgaaattctctgtagagagcttctctatagtctctgtagggataaattgaaacaaaaaagccactgagcttaattgtcaggaagarctgaattgcaggagactttgaatttgctattcaccttataaggcttacctgccagttggctttatgagaatatgccatttgcagctatgtcttttggctt

SEQ ID NO: 350993 - DNA, 201 bp, Homo sapiens
tgtacatttttacacacatatagtatacaaggctattatacaagtctatgtgggagaatgtgttcctgatataactcctccaaaatgcctgagaaatactytctgttttgcctgcccagggtgctataaaagaatggatagggaaatatagggagagaaaattatagcaccatccttgctgcgccctgcctggaagatgct

SEQ ID NO: 350994 - DNA, 201 bp, Homo sapiens
tacaaaaaaatataaaaaagtagccaggtgtggtggtatgtacctgtagaggtaggcctagaatttaagcacatctcaaaatcaccaaagaaaaacacatrtttcatgccctgctcccagagtttctggttcagtaggtgtaggctgtgtcttaacaacttgcatttctaaccaaatcccaaatgatgccagttaaggtgg

SEQ ID NO: 350995 - DNA, 201 bp, Homo sapiens
aggtatactggggctaggacttcggggacacggtttagctcattgcagtatacagtgtatttcatgtcctgtttctttgctgggaatgtgtctaggaaacyctctagtgcttagtccacttggagatataaacatttaagaggagaccatgggaggaaaattgactttctttgcctttgtgtaagcaccttcatcttctct

SEQ ID NO: 350996 - DNA, 201 bp, Homo sapiens
ttactgttcctttatattataatattgatacagattgagtatcacttatctgaaatgcttgggaccagaagtgtttgggattttgaattttttcagatttyggaatacttgcattataccagttgagaatcccaaatccaaaaaattcaaaaatgctccaatgagcatttccttcaagtgtcatgttggcactcaagaagt

SEQ ID NO: 350997 - DNA, 201 bp, Homo sapiens
ggcacctgcacacagggagaacactgcatgaggatgaagatagagatctacaaggcaaggaatgccaaagattgtcagcaaggcccgagaaggtaggagtraggtctggaacagattttccctcacagtgcttagaaggaaccagccccactgacatcttggtgttggacttccagctgcctagaagcgagacactgtctc

SEQ ID NO: 350998 - DNA, 201 bp, Homo sapiens
tagagtaggtccctaatctagtgtgagtggtgtccctataaaaagggaaaatttggacataggcacctgcacacagggagaacactgcatgaggatgaagrtagagatctacaaggcaaggaatgccaaagattgtcagcaaggcccgagaaggtaggagtgaggtctggaacagattttccctcacagtgcttagaagga

SEQ ID NO: 350999 - DNA, 201 bp, Homo sapiens
catgagccactgtgtgcagccttactagagcatttattgtatgttttatagccctcctgagagctacaatttcaattcctccttattattttcccctattsttttatctctccagattactaattgccttaggatcttgccttctcctttattatttacatttttcccttggtgaattctgatactttctataagttattt

SEQ ID NO: 351000 - DNA, 201 bp, Homo sapiens
catttctgaagtactcagtttctaataccaaaacgtagctatgtagccctcgagcagatgaaaggcaccaatgatacaaatttatttatttattattattwttttttttttgagatggagtctcactctgtggtccaggctggagtgcagtggtgcgttcttggctcattgcagcctccacctcccgagttcaagtgactc

SEQ ID NO: 351001 - DNA, 201 bp, Homo sapiens
tttgaggcaatttaatttgttaatctgattcatacctctgacatgtaataatacagacagtaaataggattgctgttgactgtgcaggagcctcacagttrtttaaatttcagtgtgatgaactcctttggtatatcagtttgatttctgtctcactttaaaacaaaagaagaaaactgccaggcatggtggctcatgact

SEQ ID NO: 351002 - DNA, 201 bp, Homo sapiens
ctgaaggacatactcaatggtcgatagattgatattatctaggaatcattttttttcctctctccatttcccagtaagataacacggttctttctaaaacrcttctcttcttatattttttgcattggtagattaagaagaaaaaactaaatcatgttaaattgatggaagatgctattaggaaaactaaattaaagaaat

SEQ ID NO: 351003 - DNA, 201 bp, Homo sapiens
tctcgatttttttttgtatgtgtgctgttagagcttgtatacaatgtatattgtgtacatttttacacacatatagtatacaaggctattatacaagtctrtgtgggagaatgtgttcctgatataactcctccaaaatgcctgagaaatactttctgttttgcctgcccagggtgctataaaagaatggatagggaaata

SEQ ID NO: 351004 - DNA, 201 bp, Homo sapiens
gagctttattgtcaaggaaaagtacaagcttagccacagcaatgtagagtttctgctgcttagctctttgcaacacagtcatgttggatgcttgagaaatyggtgacctgcccttccaagtcttaaaaattgggggctgggtaggacttggaatgagggggttgtctgttacaaacttcatgtatcaagtaggttcagctt

SEQ ID NO: 351005 - DNA, 201 bp, Homo sapiens
atacaaatctaagatggttctagcattgagttgagcaactctctcctagagttttcatgattgtttagtcaagaatggcctgagaggtagcttagtctctrtctagaatctcttctagcatcaccttggttctttctccaatccgtaatgtcaacttatgatgcatgttgaactggtcacttcttttaaagttgacctagc

SEQ ID NO: 351006 - DNA, 201 bp, Homo sapiens
ctcagtgtgagtcttttaaaacttgccttacaggtaagcatctgtctgtctttatcgatagataaggaggctcttttggctataaacctttatagttttcytgttatcactctgaggaattattgctttatgagagagtactctctcaagaggaaaagaaagtcctagtttctggtcatagctacgaattaaatttatatt

SEQ ID NO: 351007 - DNA, 201 bp, Homo sapiens
ttggctctatagatacagcccaggtaagatttaacattttaaaaaattctattctgtcatctctaatatgtttcccaattgtttcaggaccaggacgcccytacagggccatagatttctcacatcaaggacctgcatttgttacctggcaccggtaccatttgttgtgtctggaaagagatctccaggtaggtcaaaact

SEQ ID NO: 351008 - DNA, 201 bp, Homo sapiens
ttgtgtctggaaagagatctccaggtaggtcaaaactatgcatttagttcttttaattttttaaaaaatttattgtatatatttaaggcatacagtgtgarttttgatatacttatcttgatactcatacaagataagtgattagtgcactaaagtaaattaacatactcagcatcacatagagatatctctttttgtgtg

SEQ ID NO: 351009 - DNA, 201 bp, Homo sapiens
caagataagtgattagtgcactaaagtaaattaacatactcagcatcacatagagatatctctttttgtgtgtgtgtggtaagagtacctaaggtctactstcttggcaaatcaccagtacacaatacaacgttaactatagtctcagacctcgagttatttatcctacataactgcaactttgcacctttcagcctacat

SEQ ID NO: 351010 - DNA, 201 bp, Homo sapiens
cagagctgtggctcccccggcccccaggcttcactgccaacaccctgagcctgcataggtgtgcgttttgaggggcccatgcccagctagcagggacttcrtcttccacatcctgtacatttcctacagtgctcagaacagtgctccacgagcagggacatcatcagtgctttttctgtgactgagcttaattccatcaag

SEQ ID NO: 351011 - DNA, 201 bp, Homo sapiens
gcagggacttcgtcttccacatcctgtacatttcctacagtgctcagaacagtgctccacgagcagggacatcatcagtgctttttctgtgactgagcttrattccatcaagcgccatttcccaccataccttggaatagtagtggatggtatgtgaaaagagatttccgtcatcaagtaaatttagagaaggctgagttt

SEQ ID NO: 351012 - DNA, 201 bp, Homo sapiens
gggatcacttgaggccaggacttcgagaccagcctgagtaacatagtgaaaccctgtctctacaaaaagtttgaaaagttagcctagctgggcacggtggytcacgcctgtaatctcagcactttgggaggccgagacaggtggatcacctgaggtcaggagttcgagaccagcctgaccaacatggtgaccaaccagcct

SEQ ID NO: 351013 - DNA, 201 bp, Homo sapiens
tcactgcagcctctgtctcctgggttcaagcgattctcctgccttagcctcctgagtagctgggacaacaggcacacaccaccaagcctagctaatttttrtatttttagtagagccggggctttgccatagctggtctcaaactcctggcctcaagggatccacctgcctcaacctcccaaagtgctgggattacagacg

SEQ ID NO: 351014 - DNA, 201 bp, Homo sapiens
taaatggatgtcggtgtttcttcatatgtcctttatggccactgtctgtgtcctgttgggagaagggcaggaggggagggatgcagtgtggaagctcatgsctgtccaggccaagcacaaatccatttgctgacagccctacgtgcctcggattctgaacggcttggcctcggagaggacagcactgtctccgcagcagca

SEQ ID NO: 351015 - DNA, 201 bp, Homo sapiens
aaaaaaacagaaaaagaaaaaataaatgccatgctggagccttgtttggcctgcttgggtgctcatgccatctctttgggtaggttctggcccccagactytagctggggagccacatctgagagaataattgttccctctgagctcttggggacctaagatttggtctttctgtagttgaaggtcagtgcagagaacttg

SEQ ID NO: 351016 - DNA, 201 bp, Homo sapiens
agagagggggacctgggcagggaccctagctgggctgggtgggtattgttgcaacagtgttggctgagaagagagtcaccctctattgtgctgctgaaggkgaattttttttttttttttttttttttttttttttttttgagacaaggtctcactgtcacccaggctgaagtacagtggcataatcacaattcactgcga

SEQ ID NO: 351017 - DNA, 201 bp, Homo sapiens
ctgtacctggcacagttttggttctggggtcagagatgacaaactcctaccctgggagtccactgagcgaccataccaataggtcatggcctcagagccgygtggcccacggcccctgtgactctctctgctgtggacctttctcctagaacccgatcatcagccagttcttccccaccctcctgctctggtccttctcgg

SEQ ID NO: 351018 - DNA, 201 bp, Homo sapiens
aaggcggggtttttcagtctatgtgctctgattcatgaaaaatgagaagccacctaaaaaagtctaaaataggggatcagttacaaatattgatatactcmtaagccaaaatactgtacagtcattaaaaatggctggaacaggctgggggcattggctcatgcctgtaatcccagcactttgggagggtgagaaaggtgg

SEQ ID NO: 351019 - DNA, 201 bp, Homo sapiens
tctatgtgctctgattcatgaaaaatgagaagccacctaaaaaagtctaaaataggggatcagttacaaatattgatatactcataagccaaaatactgtmcagtcattaaaaatggctggaacaggctgggggcattggctcatgcctgtaatcccagcactttgggagggtgagaaaggtggatcacctgcggtaagga

SEQ ID NO: 351020 - DNA, 201 bp, Homo sapiens
tgcactcccccaccccatcctctctcgggctgctggggagcttggtgccagctggtactattattccgggtgttaatagtctgtgtgtttggagggtgttygttcacagagatcagttttgtttatcatcgcaagtttttgctgttatctgcagacagaagagcctgcaagtgacaaaggaagtgaggcagaggcccacat

SEQ ID NO: 351021 - DNA, 201 bp, Homo sapiens
ggtgttttctattataagaagaagattctgggactatggccgcattgccctggtgtcagaagcagacaggtaaagacatatcgcctaggctgtgagcatgygtgtgcgtacgtgtgagtgtgtatatgtgcgtgagtgtgtatatgtgcgtgtgtgcatatatgtgtgtatagtgtgtgtgtgtgtgtccctggaatgggc

SEQ ID NO: 351022 - DNA, 201 bp, Homo sapiens
aggacccctgagcacactcacctacggtgtcaggcttggtgcactggatgtgcatgtagccgctctccctcatcaggctgtagaataccttctccttgacrgggtacagcagctccacatccctctcagtgaggccaagaaacctcccgaaacgctgtcccaggaggagggtcagggtagagaagttgcttaaaaccaaag

SEQ ID NO: 351023 - DNA, 201 bp, Homo sapiens
agcccatgtttgtgtaacaggcggtgggggtgtgggcagcagccacggagtgggtgattctggctgaccccctcgagctgatgtggcctggccccactgcygggctcttccctgctgccctggacccatcctgttggcttcatgtgccagccttgccccaggggagatggaggcaccctcctttcagacatctgctctggg

SEQ ID NO: 351024 - DNA, 201 bp, Homo sapiens
cagctcagtggccctgccatcctcagagctcccctggagtcgggggaggccctgctgaccctgctcttgtccccagaggtggccggcaggttcctggcgtyggaggccagcacacacctgctggtgttcggcatggagcagcggctgccgcccaacagcgagctggtgcaggccgtgctgcggctcttccaggagccggtc

SEQ ID NO: 351025 - DNA, 201 bp, Homo sapiens
ctaaatggatgtcggtgtttcttcatatgtcctttatggccactgtctgtgtcctgttgggagaagggcaggaggggagggatgcagtgtggaagctcatscctgtccaggccaagcacaaatccatttgctgacagccctacgtgcctcggattctgaacggcttggcctcggagaggacagcactgtctccgcagcagc

SEQ ID NO: 351026 - DNA, 201 bp, Homo sapiens
gaaaggtcaacaacccagcctggagcagtgtttgctttggaaatgctgggccttgcagttagactgatggtacccaggaggggtatgtgtgtgtgaaagcrcagagctaggggacccagaggtccctgaggaggccctgggactcctgactccctccccgtccctaccctagaccaccccctttactttctcctctgtggc

SEQ ID NO: 351027 - DNA, 201 bp, Homo sapiens
ctgtctgtgtcctgttgggagaagggcaggaggggagggatgcagtgtggaagctcatgcctgtccaggccaagcacaaatccatttgctgacagccctaygtgcctcggattctgaacggcttggcctcggagaggacagcactgtctccgcagcagcagcagcagcagacctatggtgccatccacaacatcagcggga

SEQ ID NO: 351028 - DNA, 201 bp, Homo sapiens; identical to SEQ ID NO: 75006

SEQ ID NO: 351029 - DNA, 201 bp, Homo sapiens
gatcccctgagattgtcccacaatgcagccattctctgtggacactgccaggcacgcagaggtccaatgtctggctctcccggactccttgctgctggctyactgcccgatcagtccctgggaaacgcctgcctttggctctgccagcactggtgggaacctgcaagaaatttgagccctgaacgtctgccttgtcctgtt

SEQ ID NO: 351030 - DNA, 201 bp, Homo sapiens
cgaggctagaggaactttaggacttcttaagacagcagctgcagcaactctgtccctcctttgctccatgtcgccccctctggggatctgcccactgtgtyctggatgagccatccactctgaccatctgatcccctgagattgtcccacaatgcagccattctctgtggacactgccaggcacgcagaggtccaatgtct

SEQ ID NO: 351031 - DNA, 201 bp, Homo sapiens
ttggggcccaggtgaagtcctttgcttggggccctaccgtgagcccacaacctccagggtttctgtgggagagggctgctcccctagacccagcaggtccytgagccattggcaaagaggagagaggctggggccacaggtggtgctggccgaggaaggaggagtagggtcgcacagaggagcactgatggatggagaacc

SEQ ID NO: 351032 - DNA, 201 bp, Homo sapiens
gaggtcccagctctgacattctgtgagcagtgggagtgaggtgttgtctgtggctcgtggatggaccatcgtgaatacttggatgttcccttcttccctgkttgtttatcccggtgttttcctcttcctgcctttgtgtgcctttctccctctcctctgcctgtactctagatccgccagtggcttctgcaggagtgactt

SEQ ID NO: 351033 - DNA, 201 bp, Homo sapiens
gagagggcagacaggactggccacctgaccttacctctgtctcaggctgatagtatttgctagccacctccctgagttcatatcaaactttgtcaaaccaycctgggaagcctatttggcaagagacaagtaacttagaggcatgactggggctggagggagggggaagaggagccgcaggtgtttccctccgcagaggcc

SEQ ID NO: 351034 - DNA, 201 bp, Homo sapiens
gcaaactcattcctcagaaaaggggtatcttccccaagaaaagcctggagggcacttgtggggggaggtggcaggcggggggagaggggtgggtcattgcygctccagcaccgacaggaacttgcggatgtcctgggcgagcagctccggctcctcaaaggccgcaaagtggcccccacgaaccatgtaggaataggagat

SEQ ID NO: 351035 - DNA, 201 bp, Homo sapiens
tttgggaggctgaggcaggcagatcacgaggtcaggagttcaagaccagcctggccaacatggtgaaactccgtctctactaaaaatacaaaaattagccrggcttggtggcgggtgcctgtaatcccagctactcgggaggctgaggcaggagaatcgcttgaaaccggaaggcggaggtcgcagtgagccaagatcacc

SEQ ID NO: 351036 - DNA, 201 bp, Homo sapiens
agctgaaaggtctgagagagattgtgggtccccagagctctaccctaacctgggtgctcatcggagagggcagacaggactggccacctgaccttacctcygtctcaggctgatagtatttgctagccacctccctgagttcatatcaaactttgtcaaaccaccctgggaagcctatttggcaagagacaagtaacttag

SEQ ID NO: 351037 - DNA, 201 bp, Homo sapiens
tccggctcctcaaaggccgcaaagtggcccccacgaaccatgtaggaataggagatgagctttgggtacttgaacctcacccacttttcaggcgtgtgcartagctcaaaagggaaggcagagaagccagtgggcacatagaccttcatcctggaagtgaaagagccgacggaggggtgaggctgtggccctgcgcccctc

SEQ ID NO: 351038 - DNA, 201 bp, Homo sapiens
ccatgcccagctaatatttttgtatttttagtagagacagggtttctccatgttggtcacgtggatctccaactcccgacctcaggtgatctgcctgcctyggcctcccaaagtgctgggattataggcatgagccaccgcgcccggcccaggtgcatgttattttatatagcactaagaacaagaaaatgttgtcagcta

SEQ ID NO: 351039 - DNA, 201 bp, Homo sapiens
tccgcctttcccgggacgtgcgcgccaggtgtccggttccggaacggctcccagcctacgcagaccccagagcccccgaccccaagcagggggtgacgackcgggattgggtgggaggagagggtccgggcagcgcctccattccagccctgcgctccttgggaattcctggcggcttttcaggactttcctctccggctt

SEQ ID NO: 351040 - DNA, 201 bp, Homo sapiens
ctcagcctccagagtagctgagattacaggcatgcgccaccatgcccagctaatatttttgtatttttagtagagacagggtttctccatgttggtcacgyggatctccaactcccgacctcaggtgatctgcctgccttggcctcccaaagtgctgggattataggcatgagccaccgcgcccggcccaggtgcatgtta

SEQ ID NO: 351041 - DNA, 201 bp, Homo sapiens
catgacactgctatgagattgtgttcattaagtgtatctacctggcctgtaccaatagctgttctctttgctcttcaccacagacccatgaggtcagcctygctaccctcattgtgctcacaaaacaaaaaacaaaaacaaaaacccaggctcagatgctcagctccctcagggcttctgttgggccaaggctatgaacct

SEQ ID NO: 351042 - DNA, 201 bp, Homo sapiens
cgccaggagatgtacattgacctgcaggggatgaagtgggccgagaactgggtgctggagcccccgggcttcctggcttatgagtgtgtgggcacctgccrgcagcccccggaggccctggccttcaagtggccgtttctggggcctcgacagtgcatcgcctcggagactgactcgctgcccatgatcgtcagcatcaag

SEQ ID NO: 351043 - DNA, 201 bp, Homo sapiens
attgttgtaagatgcatgttttttttttttttcagaccgagtttcgctcttgtcgcccaggctggagtgcaatggcacgatctcggctcaccgcagcctcygcctcccgggttcaagcaattctcctgcctcagcctccagagtagctgagattacaggcatgcgccaccatgcccagctaatatttttgtatttttagta

SEQ ID NO: 351044 - DNA, 201 bp, Homo sapiens
acccgggtggcagagcttgcagtgagccaagatcaccccactgcacttccagcttgggtgacagagccagactctgtctcaaaaaaaaaaaaaaaaaaaaagaagaaaagcagtcacatatacgtattgcaaacacctcagatttatagcgcatggggtgtttttatgggggtactcgcaagaaaggatctgattaaaatg

SEQ ID NO: 351045 - DNA, 201 bp, Homo sapiens
ccaagagcggctctcagctcacagacctgggccctggtttccccaggtgcgtcttcctgcctgaccagggtgccttctttgtgaactatgtcatcgcctcrgccttcatcggcaatggcatggagctgctgcggctgccaggtctcatcctctataccttccgcatgatcatggccaagacggctgctgaccgcaggaatg

SEQ ID NO: 351046 - DNA, 201 bp, Homo sapiens
aacccgggtggcagagcttgcagtgagccaagatcaccccactgcacttccagcttgggtgacagagccagactctgtctcaaaaaaaaaaaaaaaaaaaaagaagaaaagcagtcacatatacgtattgcaaacacctcagatttatagcgcatggggtgtttttatgggggtactcgcaagaaaggatctgattaaaat

SEQ ID NO: 351047 - DNA, 201 bp, Homo sapiens
gaacccgggtggcagagcttgcagtgagccaagatcaccccactgcacttccagcttgggtgacagagccagactctgtctcaaaaaaaaaaaaaaaaaaaaagaagaaaagcagtcacatatacgtattgcaaacacctcagatttatagcgcatggggtgtttttatgggggtactcgcaagaaaggatctgattaaaa

SEQ ID NO: 351048 - DNA, 201 bp, Homo sapiens
ccttccacttagggaaggcctcatcatggctttatttatctcaaggaaggaagtttctgttaaagcagactgtgacaggtcatgccgtagtaagtggcatygttgagaacaaaagtcaatctcgagctttggcctgtttttagagcaaaagaaaatgaaagcatgtgtagtgacaatatggaatgctggaaataaactctt

SEQ ID NO: 351049 - DNA, 201 bp, Homo sapiens
gaaaaaaattttctgtaaagtgaagaaggatgctggttcctggggctgctctggggccagaccttaccctcctgctcggggccactgaaggcagagcagggcccgagactgggccttgtggtgttaccgctgccttgagagcaagagacagggctgacgtgcagaactaggcaggctccaggcaagcttggcgtcagcgct

SEQ ID NO: 351050 - DNA, 201 bp, Homo sapiens
agaattgcttgaacctgggaggcagagttgcaatgagccgagatcacgccactgcactccagcctgtgcaacaagagcgagacgctgtctcaaaaaaaaaaaaaaacaaaaaaaagaattagaagctgattcttagagcgtaccttcagcaggtggcctttctttaacgtagatctccttgttcacaaagatgccccatgg

SEQ ID NO: 351051 - DNA, 201 bp, Homo sapiens
gagaattgcttgaacctgggaggcagagttgcaatgagccgagatcacgccactgcactccagcctgtgcaacaagagcgagacgctgtctcaaaaaaaaaaaaaaacaaaaaaaagaattagaagctgattcttagagcgtaccttcagcaggtggcctttctttaacgtagatctccttgttcacaaagatgccccatg

SEQ ID NO: 351052 - DNA, 201 bp, Homo sapiens
agtgaatagcgccctggtggcctatcctcttcaagcagcctgtgcacagtgtccagagcacagaccagggtgtaggtgcgaataaacgtcttgagagcatmcgggggaaaaaattgttgaccccggggttcttagcatcacctttgcagaataagagagacgtgagctgagcatttgtatggacccacagggctagggtct

SEQ ID NO: 351053 - DNA, 201 bp, Homo sapiens
atgatgccagtcattcagtgggtccctctgtgtgttcctggctgtgaagacaccatccttgctgctggagttgaggggtgggggtggggggttaggccttrcctttattttctgcctgagggagaagtcacgggcagtttccacaccaggtgcggccccttcctcagcagggtgagggtaggtggtggcccctccctgccc

SEQ ID NO: 351054 - DNA, 201 bp, Homo sapiens
cctcccaggggctttctgctcctgcccagcctaggggcccctcctctccctccaagagcggctctcagctcacagacctgggccctggtttccccaggtgygtcttcctgcctgaccagggtgccttctttgtgaactatgtcatcgcctcggccttcatcggcaatggcatggagctgctgcggctgccaggtctcatcc

SEQ ID NO: 351055 - DNA, 201 bp, Homo sapiens
ctgggtgctggagcccccgggcttcctggcttatgagtgtgtgggcacctgccggcagcccccggaggccctggccttcaagtggccgtttctggggcctygacagtgcatcgcctcggagactgactcgctgcccatgatcgtcagcatcaaggagggaggcaggaccaggccccaggtggtcagcctgcccaacatgag

SEQ ID NO: 351056 - DNA, 201 bp, Homo sapiens
tccaggactcacacaccactgagctgtcatgtctctttagacccttcttggctgtgacagttcaaactttttaaaaagacttagagaacataacttttaacaaaaatagaaccatacatacattctattttagaatctctttttttttaacttaacaatgtatcctgggtgtcctcctatgttgccaaatttactcctatt

SEQ ID NO: 351057 - DNA, 201 bp, Homo sapiens
tgggaaacgcctgcctttggctctgccagcactggtgggaacctgcaagaaatttgagccctgaacgtctgccttgtcctgttgtcctgtgctccagggargacaggcgcgatgatggactccccgttcctggagctgtggcagtccaaggcagtgtccatcagggagcagctgggactcggggaccggcccaacgactcc

SEQ ID NO: 351058 - DNA, 201 bp, Homo sapiens
tgagtgagtatggagcccgtggggataggtgctgatgggtgagatcaaggagaaggcaggtcaggagcccggggcaggccagaggtactccaaagggggcyggctggtatctgaaggccccttgcagctagtgtgttgttgagctgtgggcatgaacatgccacaggcagacactgttttgccagggttttaagaaacacg

SEQ ID NO: 351059 - DNA, 201 bp, Homo sapiens
ctgttctctttgctcttcaccacagacccatgaggtcagcctcgctaccctcattgtgctcacaaaacaaaaaacaaaaacaaaaacccaggctcagatgytcagctccctcagggcttctgttgggccaaggctatgaaccttgttggcttcagactggttgctttagatactgagggctttcgtcatcctctgaagagg

SEQ ID NO: 351060 - DNA, 201 bp, Homo sapiens; identical to SEQ ID NO: 75005

SEQ ID NO: 351061 - DNA, 201 bp, Homo sapiens
tcatacacattgacaaaatgtcacctttttctgattaccaaatgatattttctttaaagtggaggatttttgggcctggtgtggtggctcacgcctgtaaycccagcactttggaaggctgaggcgggtggatcacctaaggtcaggagctcaagaccagcctggccaacatggtgaaaccccgtctctactaaaaataca

SEQ ID NO: 351062 - DNA, 201 bp, Homo sapiens
ggcaaaatgaaaactggtcaatgaaaactagttccagtatacacatcacctctgtgaactggatttctgcaagttggccaagtgcttccatctccctttcrgctctgcccgcagcttgaaaacgaccacgaccaccatttccaccctagtgtattcctgttctttctagaacacagatctgatcctgtctacctcctgctc

SEQ ID NO: 351063 - DNA, 201 bp, Homo sapiens
ccagacatgctcctcctccccagagctccacaaaccaaggctgattggttacgccccctcctgcttccccacatgaccctggaactaagtatctgtgcttytctgcagacaaagacccgtatagttttgggaggacaacaatagcaaacctacagactgagtgagtatggagcccgtggggataggtgctgatgggtgaga

SEQ ID NO: 351064 - DNA, 201 bp, Homo sapiens
tatcccaccaccaagtgcccttcgtggagcccaagactggccgtccccctgcctccagcctcagaggcccctgttctcggctcagccaggctcaccgctcwtgcttctgggtcatccagccctgtcccaggttctccttgtagaagcgctgggaggagatgatggtgcctgttgtccagtagagcatgacgttggtcagca

SEQ ID NO: 351065 - DNA, 201 bp, Homo sapiens
ggtcaggagcccggggcaggccagaggtactccaaagggggccggctggtatctgaaggccccttgcagctagtgtgttgttgagctgtgggcatgaacaygccacaggcagacactgttttgccagggttttaagaaacacggagggtcctgtggatctggagttcatttgtcaggacagggatggggacccctctgaag

SEQ ID NO: 351066 - DNA, 201 bp, Homo sapiens
tactgagggccgcccgggagccaggcacctggtccctccatgagggctttctccaaacacctcgacctttagtgttcccatccaagggcccctggggcacytgcaggcaaggctatacttatcccaccaccaagtgcccttcgtggagcccaagactggccgtccccctgcctccagcctcagaggcccctgttctcggct

SEQ ID NO: 351067 - DNA, 201 bp, Homo sapiens
gatgggtgagatcaaggagaaggcaggtcaggagcccggggcaggccagaggtactccaaagggggccggctggtatctgaaggccccttgcagctagtgwgttgttgagctgtgggcatgaacatgccacaggcagacactgttttgccagggttttaagaaacacggagggtcctgtggatctggagttcatttgtcag

SEQ ID NO: 351068 - DNA, 201 bp, Homo sapiens
aatcaggactcatatgaacaggcatatttctgagcatctgctgataccacgtacaggactaggtgtttgatgcttattatctcttgagcccctgctaagcygatgaggtaggcagtgggcagtttccttgctcgaggtcagaggcgggtaagctccatgacctgccctcaggtggaggccgctgcgctggattacactgtg

SEQ ID NO: 351069 - DNA, 201 bp, Homo sapiens
ttccctccaggggctcacatgcctgttgggtggaacgaagggagcacgagcaaacacgcatcaccatgcctcgggagggctgggtgcactgagtgaagcarggcaggctgggagggatgggaaggaccttgggaggcggggagccacgcatctcctatttccaaagtcctcctccaccctgctctcccatcaccacttaga

SEQ ID NO: 351070 - DNA, 201 bp, Homo sapiens
agtaaacaccactagagggtaattaacattgccgaccccctgaatagcgagcaatcatgcaccagtggatgatcaaaggttggtcttaggaccacatgagkaaacaagctatttaggtaaactcccccacattcctatgtatctgcaccctaagcttttaagagaattcagctgccttcagccaaaccctttactgaagct

SEQ ID NO: 351071 - DNA, 201 bp, Homo sapiens
aggcatgagccaccgcgcccggcccaggtgcatgttattttatatagcactaagaacaagaaaatgttgtcagctaagctaccatcaactataacgatagygtacacctcatttcagaggagttgaaatatggccggctgcggtggctgacgcctgtaatcccaacgctttgggaggctgaggcaggcagatcacgaggtc

SEQ ID NO: 351072 - DNA, 201 bp, Homo sapiens
accctatctctactaaaaatataaaaaattagccgggcatggtgtcaggcgcccgtagtcccagctacttgagaggctgaggcagaagaatggcatgaacycaggaggcggagcttgcagtgagccgagatcgcaccactgcactccagcctgggcaacagagactctgtctcaaaaaaacagacagacagacatacactg

SEQ ID NO: 351073 - DNA, 201 bp, Homo sapiens
cactgccgggtgcggtggctctcgcctgtaatcccagcactttgggaggcaaaggtgggcggatcacgaggtcaggagatcgagaccatcctggttaacawggtgaaaccctatctctactaaaaatataaaaaattagccgggcatggtgtcaggcgcccgtagtcccagctacttgagaggctgaggcagaagaatggc

SEQ ID NO: 351074 - DNA, 201 bp, Homo sapiens
ttagttacctctcatgtggtgtagggagccaggaggcggggggggcggggactgatgtgagtcttggttctcacctgctgccatattccattgaatctaaraagttattgttgtaagatgcatgttttttttttttttcagaccgagtttcgctcttgtcgcccaggctggagtgcaatggcacgatctcggctcaccgca

SEQ ID NO: 351075 - DNA, 201 bp, Homo sapiens
ttcatctctcataatactgcacaaactaattaaagctatttttttgctttaattattcaacttaatatttaacaccaattagatgtcaatggacgctctcmtaggcaggtttgcatgtctttgaattagtgaaaagtgaagaaatataatacattcaattcatttggttacaagttttctttttttcaatggggcccatgg

SEQ ID NO: 351076 - DNA, 201 bp, Homo sapiens; identical to SEQ ID NO: 75014

SEQ ID NO: 351077 - DNA, 201 bp, Homo sapiens
ctctggcagaccctccactctcgggcgcctcctgacatgtggcctgtgcggcagggtcctttgaactgggaagaggaggtgtacctgaaaatgcaccatcyttccccgtgatccctgctctgggatttgctaaagcctgaggtgatgatgaccttggactgttggagagaaacttttgggacatctgatgcctttacggca

SEQ ID NO: 351078 - DNA, 201 bp, Homo sapiens
agtccatgagctcctcaccacctcctcctcccagaaccaggccttccagtacgagtttggagccatgtatgcatggatgctgtgtgtcttcactgtcatcrtggcctacagcatcacttgtcccatcatcgcgccatttggtgagtggccctggagcctgtcccagggtacatgggtacatggacggctgattgcaccaaa

SEQ ID NO: 351079 - DNA, 201 bp, Homo sapiens
ttttattgcagtaagttttgggggtgggggaggggggacacataagagccagagggccctggagagcatgggtttgtgggaagtgtctgcactgcacaggycagggcggcagccgctgtggacagagagggcaggcacctgctgagcaggtttcgtggttttcctacaacatgactcacctgcctttgaaaatatgtcacc

SEQ ID NO: 351080 - DNA, 201 bp, Homo sapiens
cccgaggggcatctggagtgttggggccatgttggtgatatggacgtacttcacttgtgaaaattctcaccaaaatgttcacaagttcttttgaaggagargggatgtggggagggagaagaggttatatgagattgtctttaatgttttgtactttttgcatttttaagctttttgacaacatgtattttataatcagag

SEQ ID NO: 351081 - DNA, 201 bp, Homo sapiens
gatcccctgctagaagggctggagtcactctacacctcttccctgaccacctcttccctccaggggctcacatgcctgttgggtggaacgaagggagcackagcaaacacgcatcaccatgcctcgggagggctgggtgcactgagtgaagcagggcaggctgggagggatgggaaggaccttgggaggcggggagccacg

SEQ ID NO: 351082 - DNA, 201 bp, Homo sapiens
tgggagggatgggaaggaccttgggaggcggggagccacgcatctcctatttccaaagtcctcctccaccctgctctcccatcaccacttagagagcacaraagggtgtttgaggtggaacaagtccatgagctcctcaccacctcctcctcccagaaccaggccttccagtacgagtttggagccatgtatgcatggatg

SEQ ID NO: 351083 - DNA, 201 bp, Homo sapiens
ccgtccccctgcctccagcctcagaggcccctgttctcggctcagccaggctcaccgctcatgcttctgggtcatccagccctgtcccaggttctccttgkagaagcgctgggaggagatgatggtgcctgttgtccagtagagcatgacgttggtcagcaggtcgtccagggagaacttcctgggaacgcagaacacaaa

SEQ ID NO: 351084 - DNA, 201 bp, Homo sapiens
aatgtggtgcccagagtgaggactggttaggtgtccaatcaaaacatgatacccagggtgaggggctggttgggtgtggtgttgacagcctggctcctaasctagcccgagtgcaggtgtaacccttgtgaaggcctggtcaattgtcccatacatccctggagagaagatagtgcctttatcagctgtgcagggactgaa

SEQ ID NO: 351085 - DNA, 201 bp, Homo sapiens
ctcacgcctgtaatcccagcattttgggaggccaaggtgggcggatcacctgaggtcaggagttcgagactagcctggccaacatggcacaaccccatctytactgaaaatacaaaaattagctgggcgtgttggtgggcgcttataatcccagatagtcaggaggctgaggcaggagaatcgcttgaaccgggaggtgga

SEQ ID NO: 351086 - DNA, 201 bp, Homo sapiens
tgtgggtctgttctttgggatgagaggccagggcaggtgcaagctatgccttcactcctttgtccctgccttcctccttcctgtaccccagctacagcccygttgggaagaatgtgtcgttagtcacaaagcattgcagatgtgtctaagaaatgccacgctggggccgggcgtggtgctcacacctgtaatcccagcact

SEQ ID NO: 351087 - DNA, 201 bp, Homo sapiens
tggagccggcagtgggcgaggacccctgagcacactcacctacggtgtcaggcttggtgcactggatgtgcatgtagccgctctccctcatcaggctgtaraataccttctccttgacggggtacagcagctccacatccctctcagtgaggccaagaaacctcccgaaacgctgtcccaggaggagggtcagggtagaga

SEQ ID NO: 351088 - DNA, 201 bp, Homo sapiens
gacaccagatttcactcatttctttctttttttgttttgagacagggtctcatgctgatgcccaggctggagtggcatgatcttggcttactgcaaccccyacctcctgggctcaagccatcctcccatctcagcctcctgagtagctgggattacaggtgcccgccaccatgcctgcctaactttttgtatttttagtag

SEQ ID NO: 351089 - DNA, 201 bp, Homo sapiens
gaggataaaagacaaagagaagagaggtctccgctggcacagaaaccagcagcgagatcactctgccatcctttcccttggatccgtgggcacgtctcctkcttggggtgttttcttttccaacggtgtcttttgcctccttctctccctggccacagggacgcgtatcccacgtgtgaggtggttgatgtgcagctgtgc

SEQ ID NO: 351090 - DNA, 201 bp, Homo sapiens
tgctggccacacaacctctgtgggaggcatctcttgcagtgaagctgttggtcctcagttcagtgcccactgagggtaaccaggccccagctctgcacccscagctccctgcctgggatcccagccctgatggcaggtggtttccctctcagcaatgacctcctttggctgcacaccatctttgctgtcatttacctcttc

SEQ ID NO: 351091 - DNA, 201 bp, Homo sapiens
cctgccatgcaaagaaggctcatagagttgctttggaagtggattctttgtacagcctggaagaagacgctgtgtaaatgacatgctttgggggctccccyggccacagaaggagaaaactggagccttctgatttcctgttgtttactttccagaggctggagttgggtaggaaacctgagcataccggcacactggctt

SEQ ID NO: 351092 - DNA, 201 bp, Homo sapiens
gcacagtcagggtggagggagagagaagaccctgcacggtcaggctctggcaccccccagagcctagatattgagtcctgccacccttagtgcccccgccsccccttcatggtattgacagtaataagggctgacactggtttcacactcacactgtgctccaggtgcacagatgtcctcactcagccttcacaacctccc

SEQ ID NO: 351093 - DNA, 201 bp, Homo sapiens
ggatctgcccactgtgttctggatgagccatccactctgaccatctgatcccctgagattgtcccacaatgcagccattctctgtggacactgccaggcaygcagaggtccaatgtctggctctcccggactccttgctgctggcttactgcccgatcagtccctgggaaacgcctgcctttggctctgccagcactggtg

SEQ ID NO: 351094 - DNA, 201 bp, Homo sapiens
ttaaacaggcacaatcaaaaccatctcagtcagaagtcagagcgtggtacctgggagagaaccccgaggggcatctggagtgttggggccatgttggtgakatggacgtacttcacttgtgaaaattctcaccaaaatgttcacaagttcttttgaaggagaggggatgtggggagggagaagaggttatatgagattgtc

SEQ ID NO: 351095 - DNA, 201 bp, Homo sapiens
gctccacatccctctcagtgaggccaagaaacctcccgaaacgctgtcccaggaggagggtcagggtagagaagttgcttaaaaccaaagccatgttcaartgcaggcctttcacgtggctgaaggcagagagaggggccggggtgaggctgggctggtgtcaaggacagggagagaggagagatggcggaggaacaggcc

SEQ ID NO: 351096 - DNA, 201 bp, Homo sapiens
tcccagcctagaagtagcgccttcagggagtgggaaagagcagagtgccctgccccttctccctctgtagcacagaagtctggcttgtgtgaacctggaawtttctgagtccccagtggacccagagcctccaagtgtagcactccaagggtgggaaagggtggagcaagtcacctccccatctctggggacacagggagg

SEQ ID NO: 351097 - DNA, 201 bp, Homo sapiens
ttgatatactcataagccaaaatactgtacagtcattaaaaatggctggaacaggctgggggcattggctcatgcctgtaatcccagcactttgggagggygagaaaggtggatcacctgcggtaaggagttcgagactatcctggctgacatggtgaaaccccatctctattaaaaatacaaaaaaattagcagggcatg

SEQ ID NO: 351098 - DNA, 201 bp, Homo sapiens; identical to SEQ ID NO: 75012

SEQ ID NO: 351099 - DNA, 201 bp, Homo sapiens
acctgtatcccctctcccgctgcaggaagaacctctctatccagggcctccgctggtggctacagtggctgggcatcaacttcaccctcttcctggggctrtttttcctgaccacaccctccatcatcctgtccaccatggacaagtttaatgtcaccaaacccatccatgcgctgaatgtgagtaactgttctgcaaggc

SEQ ID NO: 351100 - DNA, 201 bp, Homo sapiens
aatcccagtaacaaacagcaggattgtggacacacacagtggagccctgatatgctgcagctggacagtgggagctgagcaggcagggcaccccccccccygcccgccggccaggactccaggccttcggtgttcagtcttgccatggcatcagtcattggttttgtatagggagcagagaaggttatttaatctggttag

SEQ ID NO: 351101 - DNA, 201 bp, Homo sapiens
catgggactctaggctctcatgcctgtggtctcagtgtcatctcgccttaggagcagcacagggtgggtcgggagaggggtgtggaaaggtgtccagccaytgccccaggcattgtgacactaggaatggactcacacaggacttcctgcctccttgcagacactggggcaggaggaaaggggaaggcatctgaggcagga

SEQ ID NO: 351102 - DNA, 201 bp, Homo sapiens
cctggtgtcagaagcagacaggtaaagacatatcgcctaggctgtgagcatgcgtgtgcgtacgtgtgagtgtgtatatgtgcgtgagtgtgtatatgtgygtgtgtgcatatatgtgtgtatagtgtgtgtgtgtgtgtccctggaatgggctaggggcttatgaagccctccatgtgggcaggacccacacatgacact

SEQ ID NO: 351103 - DNA, 201 bp, Homo sapiens
tccaggggctcacatgcctgttgggtggaacgaagggagcacgagcaaacacgcatcaccatgcctcgggagggctgggtgcactgagtgaagcagggcargctgggagggatgggaaggaccttgggaggcggggagccacgcatctcctatttccaaagtcctcctccaccctgctctcccatcaccacttagagagca

SEQ ID NO: 351104 - DNA, 201 bp, Homo sapiens
ccagtaacaaacagcaggattgtggacacacacagtggagccctgatatgctgcagctggacagtgggagctgagcaggcagggcacccccccccccgcccgccggccaggactccaggccttcggtgttcagtcttgccatggcatcagtcattggttttgtatagggagcagagaaggttatttaatctggttagtcag

SEQ ID NO: 351105 - DNA, 201 bp, Homo sapiens
ctcaccgctcatgcttctgggtcatccagccctgtcccaggttctccttgtagaagcgctgggaggagatgatggtgcctgttgtccagtagagcatgacrttggtcagcaggtcgtccagggagaacttcctgggaacgcagaacacaaagccccactctcagtgccacatgcagttgtgtgacaaagggcagccagaaa

SEQ ID NO: 351106 - DNA, 201 bp, Homo sapiens
cccagtaacaaacagcaggattgtggacacacacagtggagccctgatatgctgcagctggacagtgggagctgagcaggcagggcacccccccccccgcccgccggccaggactccaggccttcggtgttcagtcttgccatggcatcagtcattggttttgtatagggagcagagaaggttatttaatctggttagtca

SEQ ID NO: 351107 - DNA, 201 bp, Homo sapiens
agcgattcaccagccttggcctcccaaagtgctgggattacaggagtgagccatggtgcccggccaggggtggatttttattgcagtaagttttgggggtkggggaggggggacacataagagccagagggccctggagagcatgggtttgtgggaagtgtctgcactgcacaggccagggcggcagccgctgtggacaga

SEQ ID NO: 351108 - DNA, 201 bp, Homo sapiens
atcccagtaacaaacagcaggattgtggacacacacagtggagccctgatatgctgcagctggacagtgggagctgagcaggcagggcacccccccccccrcccgccggccaggactccaggccttcggtgttcagtcttgccatggcatcagtcattggttttgtatagggagcagagaaggttatttaatctggttagt

SEQ ID NO: 351109 - DNA, 201 bp, Homo sapiens
acagctccgtgagagaaagtcatcactcgcatttcctggcgaaggaagccaaggcacagagtggttaggctgcttgtctgaactgcgtggtgctgagaccytaactccagagcctgctcacataatccctgagccacactgcctctggtttcagccaggggctgtgtcatttcctttgtgctccagggtagaggtaaacag

SEQ ID NO: 351110 - DNA, 201 bp, Homo sapiens
tctccttgacggggtacagcagctccacatccctctcagtgaggccaagaaacctcccgaaacgctgtcccaggaggagggtcagggtagagaagttgctyaaaaccaaagccatgttcaagtgcaggcctttcacgtggctgaaggcagagagaggggccggggtgaggctgggctggtgtcaaggacagggagagagga

SEQ ID NO: 351111 - DNA, 201 bp, Homo sapiens
taatcccagtaacaaacagcaggattgtggacacacacagtggagccctgatatgctgcagctggacagtgggagctgagcaggcagggcacccccccccmcgcccgccggccaggactccaggccttcggtgttcagtcttgccatggcatcagtcattggttttgtatagggagcagagaaggttatttaatctggtta

SEQ ID NO: 351112 - DNA, 201 bp, Homo sapiens
ttgaaccgggaggtggaggttgcagtaagccgagattgcaccactgcactccagcctgggcgacaagagcgaaactccatctcaaaaaaaaaaaaaaaaamaaaaaaaaactattctgtataggtaatgaacgattttcaaaaatcttagatgaatcaatgagataacagccaaacactcactcaactggcatctactcaa

SEQ ID NO: 351113 - DNA, 201 bp, Homo sapiens
gccagggtctcaggaggagtatggcagggctctgtgcctggggtcagtggctggagcctgggattgggaggaaatgagactcaaaatgagactcacacagwtatgttgagcatcccaggggtcccagggcagcgttctaagcccccctatataggtagacttgtttcttctacaaagtgagaaatcctcctaggatccagg

SEQ ID NO: 351114 - DNA, 201 bp, Homo sapiens
cttgaaccgggaggtggaggttgcagtaagccgagattgcaccactgcactccagcctgggcgacaagagcgaaactccatctcaaaaaaaaaaaaaaaaacaaaaaaaaactattctgtataggtaatgaacgattttcaaaaatcttagatgaatcaatgagataacagccaaacactcactcaactggcatctactca

SEQ ID NO: 351115 - DNA, 201 bp, Homo sapiens
cttttaagccctgagcaggcatggccacatttattacaaagtccttatagtaatgccatacacacacacacacacacacacacacacacacacacacacacattatatgtatatatacacacacatgcatacatatatattttaatagactatctaaatactgaatggtagggatcatttgagttgaatgtggtatattca

SEQ ID NO: 351116 - DNA, 201 bp, Homo sapiens
gcttttaagccctgagcaggcatggccacatttattacaaagtccttatagtaatgccatacacacacacacacacacacacacacacacacacacacacacattatatgtatatatacacacacatgcatacatatatattttaatagactatctaaatactgaatggtagggatcatttgagttgaatgtggtatattc

SEQ ID NO: 351117 - DNA, 201 bp, Homo sapiens
aggggtggcatctccagccccggagggcggtgtgtctggggccggcctctcaggcccctcctttcccagcttcctcgggccaactccctgctcaccccgcyggaaggagagcctggtgggaacaccgggcccacccttggcgaggacggggcagttatggaacctctagcagccccgtacccttcttggaggatgcctctg

SEQ ID NO: 351118 - DNA, 201 bp, Homo sapiens
ccatccactacctgtccttccagaggcacatcatcttcctgttggtggtggtcagctttttgtccctgtgtgtcatcctgcctgtcaacctctcaggggayttgctgggtaatgaccctcctcacccttgtctatgttgtaatggggcagagtggcagtcctagggaaagggctcactgtggtagaccagaaccccaggag

SEQ ID NO: 351119 - DNA, 201 bp, Homo sapiens
ggaaagggtggagcaagtcacctccccatctctggggacacagggaggaggccagggtggtaggatggactgggactcttggctccacctcaggtctccayctgagggggagacaggaaacaggtgggggcctggggcctgggcatattcccaactttattctttttttttttttcttttttgagatggagtctcactgtg

SEQ ID NO: 351120 - DNA, 201 bp, Homo sapiens
agtttccttgctcgaggtcagaggcgggtaagctccatgacctgccctcaggtggaggccgctgcgctggattacactgtggtctgactgcaaagcccacrctgacatctttcacatctgcctttttatgatgcagcccttgcccccctgagctcttcccaaagcactgctttcccagcctagaagtagcgccttcaggga

SEQ ID NO: 351121 - DNA, 201 bp, Homo sapiens
taagatgcatgttttttttttttttcagaccgagtttcgctcttgtcgcccaggctggagtgcaatggcacgatctcggctcaccgcagcctccgcctccygggttcaagcaattctcctgcctcagcctccagagtagctgagattacaggcatgcgccaccatgcccagctaatatttttgtatttttagtagagacag

SEQ ID NO: 351122 - DNA, 201 bp, Homo sapiens
tccaacgggcccatccacagtccttccttcccctagtgtctggtaagtgtggggacaggaaggaggaggggtaggtggtggccttgaagtgttgggctggkgtgttccattgggtggtgccactgggggattttaaagggaagccaagaacatctgtgttccagaggtcactcttgtgacactctgttcagagtcagcagc

SEQ ID NO: 351123 - DNA, 201 bp, Homo sapiens
tcttgtgacactctgttcagagtcagcagccccatgactctggcatcacaacccccactacctccagccattgccaagtctcttagaaggttgagaaagtsacttggctgtctgtgggatgctcccatgttcttgggctttccactcattcatgcttcctgtgcttcgtgtgtgtgtgtgtgtgtgtgtgtgtgtgtgtgt

SEQ ID NO: 351124 - DNA, 201 bp, Homo sapiens
ttttttcaatggggcccatggagagaaagctaaaagattattaaaggtgattaagagccagttagttacctctcatgtggtgtagggagccaggaggcggsgggggcggggactgatgtgagtcttggttctcacctgctgccatattccattgaatctaagaagttattgttgtaagatgcatgttttttttttttttca

SEQ ID NO: 351125 - DNA, 201 bp, Homo sapiens
tgtgagggctgagaatcaaggtgaccaggcagcccctggggtcaggggcagaggaaggaggcctgtaggattggagcctccatgctggagggcacacagtscctgctggagcctggggcttcccaaattgagctggatcccaagagttcttgaagatagagatgaactttatttatttcaacatattcagtggaaatcata

SEQ ID NO: 351126 - DNA, 201 bp, Homo sapiens
caatccattaggcttgtttcctctcttttgcctcacctcttggtcagtgattgtaaacaatcaaacagcagcccacatcactttgcccagagctgccctgmgctttcatcagcttttgatctaagttttgtgatttgaccacgaagttgtcaggagattttagcaagagttccaggcatgtggtgtatattgtgaagtact

SEQ ID NO: 351127 - DNA, 201 bp, Homo sapiens
caccctcctgctctggtccttctcggccctgctcccctccattgtctactactctacactgctggagtctcactggaccaagtgagtgcccgggagccccraggccctgcccctaagaaggatatctctgaccgctcccttgtccacaccctaaccccccagctgctcaggcagtgggcacatggcaggggcctcactggg

SEQ ID NO: 351128 - DNA, 201 bp, Homo sapiens
gctggtttttttgggtgtttggccagtcaagaggcaagagccaagatgcttgatcttaagatggtgtctcttagatactttttagttaatgtccaaagcastatgtgagggctgagaatcaaggtgaccaggcagcccctggggtcaggggcagaggaaggaggcctgtaggattggagcctccatgctggagggcacaca

SEQ ID NO: 351129 - DNA, 201 bp, Homo sapiens
gtattgccaagttgagttctggagccatggccctgggtgaaagtcccacaggggctggggctgcagtgggatgggtgggggcggtcgtagcctatgcttcygaacaggcatcttcctccccagacagcagggcttggggcctcacctccaccctgccaggtttctggtagacactgtgggagctgacccactttgtgctat

SEQ ID NO: 351130 - DNA, 201 bp, Homo sapiens
ggacagcactgtctccgcagcagcagcagcagcagacctatggtgccatccacaacatcagcgggactatccctggacagtgcttggcgcagagcgccacrggcagtgtggctgctgccccccaggaggcctgaggctgggtgagctgctggctgggccaggctcaggggagcctgtggggtgagaagacaggtgaagcgg

SEQ ID NO: 351131 - DNA, 201 bp, Homo sapiens
atagctatgcctgtgattactaccgtgattgcagagctctcagcctgtcgtatctttaaggcccttgggaagggtcatctcaaggggttgagacatgtgamtggagagtacggactagaatagagcagctgcagttcccaagtgtcacctcctgttcccctctggcatccctggggtttttaaagaatcagaagctgggcc

SEQ ID NO: 351132 - DNA, 201 bp, Homo sapiens
gttacttagcttctgtgcacctcccctttctgctccggaaatggagatcataattcctatctcagagaattttggaatttggataaggccagaatactcayatagctatgcctgtgattactaccgtgattgcagagctctcagcctgtcgtatctttaaggcccttgggaagggtcatctcaaggggttgagacatgtga

SEQ ID NO: 351133 - DNA, 201 bp, Homo sapiens
ctggcttatgagtgtgtgggcacctgccggcagcccccggaggccctggccttcaagtggccgtttctggggcctcgacagtgcatcgcctcggagactgmctcgctgcccatgatcgtcagcatcaaggagggaggcaggaccaggccccaggtggtcagcctgcccaacatgagggtgcagaagtgcagctgtgcctcg

SEQ ID NO: 351134 - DNA, 201 bp, Homo sapiens
cagctccctgcctgggatcccagccctgatggcaggtggtttccctctcagcaatgacctcctttggctgcacaccatctttgctgtcatttacctcttcytcactgtgggtttcatgcggcaccacactcagtccattaagtacaaagaggagaacctggtgagtgaggcgggacttagggacatgtgctgggagggact

SEQ ID NO: 351135 - DNA, 201 bp, Homo sapiens
aggagggaggcaggaccaggccccaggtggtcagcctgcccaacatgagggtgcagaagtgcagctgtgcctcggatggtgcgctcgtgccaaggaggctscagccataggcgcctagtgtagccatcgagggacttgacttgtgtgtgtttctgaagtgttcgagggtaccaggagagctggcgatgactgaactgctga

SEQ ID NO: 351136 - DNA, 201 bp, Homo sapiens
cttacatagcgttactcataatacactaatcacaacaaagcaaaggtcctatgccactgcctcccactcctactcagtccccacttgccacatgtgtgcttggtaacctgagtagcctgggcctggctgttgctacatttccttgcagcatcctgaaagatttcaatgcctgcaagtgtcagagccttcagtgcaaaggtg

SEQ ID NO: 351137 - DNA, 201 bp, Homo sapiens
tcagcctggtggcatgtgcctgtagccccagctactcaggaggctgaggtgggaggattgattgagcccagaaggttgaggctgcagtgagccatgattgygccactgtacagcagcctgggtgacagagtgagaccctgtctctaaacaaaacaaaacaaaacaaaagccctctttgtattaaatttcaaaatttccccc

SEQ ID NO: 351138 - DNA, 201 bp, Homo sapiens
ctggagaggatcacagaggaagaacgccacgtccaggaccagcccctgggaatggccttcgtcaccttccaggagaagtccatggccacctagtgagtgtrggcacatccagaccccttcttggctgactccctgttcccctccagataactcactgtccctctcgagtggagatggtactgctgacccaccatccctggg

SEQ ID NO: 351139 - DNA, 201 bp, Homo sapiens
tctacaaaaaataaaaatcagcctggtggcatgtgcctgtagccccagctactcaggaggctgaggtgggaggattgattgagcccagaaggttgaggctrcagtgagccatgattgcgccactgtacagcagcctgggtgacagagtgagaccctgtctctaaacaaaacaaaacaaaacaaaagccctctttgtattaa

SEQ ID NO: 351140 - DNA, 201 bp, Homo sapiens
aagcagtccgggaaggctcccaggaccccatgctggaggacctgaaggctgggctgaggagctgacattttattctttcttcattcctttttttgtaatcytatttttttagagacagggtcttgctctgttgcccaggctagagttcagtagtgcaataatagcttactgcggcctcaactcctggacttaaggcatctt

SEQ ID NO: 351141 - DNA, 201 bp, Homo sapiens; identical to SEQ ID NO: 75015

SEQ ID NO: 351142 - DNA, 201 bp, Homo sapiens
tacaattgttgtctaagcaggaaggtggatatttggtctttcctactttgccatcatcccagaatccttctacatttcctttctttttggggcatttttaycttttgttttcaatttccatctggtgcccatatcctcattgcatgctttgattacttggtgcccatgtttgggcctgggtgctgattcagactatgtcac

SEQ ID NO: 351143 - DNA, 201 bp, Homo sapiens
cattatggtagtgaaaacatttctgctactggttggctagaaggtcttcatgtgttattgcctaatatcatttgaagtgtttaaaagggtactgtctatartcataatatcaatttagtctgtctagcactgtttccccataattgctttaaggacttcacataaatctgttaacatgagcgttcattccttctgcagtgg

SEQ ID NO: 351144 - DNA, 201 bp, Homo sapiens
acagtgccaggcacatagcccaagtgaaccatttgaggaggaaggacagcagtggaaagaagtctgagtcactggcatggttatccctaagttctagttartacctgtttgcaaaatcctgactgaggttagtacttgttttacttcaggtgcctggtactcaaaacaattaagccactgttttttgtatataagaacatg

SEQ ID NO: 351145 - DNA, 201 bp, Homo sapiens
ccacctggtctgtgtgtaggccctaatttacaattcttgcttcccaaataaaacattgaatttggagatttgtctctatattttaggtttacttcaacagytatgagatggctgcctcagctgaccctttcatcaagaagcaccatattctacggccaggtgtggtggctcacgcccataatcccagcactttgggaggcc

SEQ ID NO: 351146 - DNA, 201 bp, Homo sapiens
gaaataaattaaccctttattttctttgtttatttttaagaggaaggaaaagaccacctactttgtggcttggctgtgttttaagaaacaaaaaggctttsgattccatctttctattcctgttcccctatctagcccatctggcactgcttactgccttatttgagaaaaatgtaatggtttctgaaatactgcagtact

SEQ ID NO: 351147 - DNA, 201 bp, Homo sapiens
ccttgggctgatttattttcatagaatcttggagctgaaagaaacctcagacagacaatctcaagcatccttgttttttcaggtcagaatgttcagatagratatcaccccatgtcatacagtcttcagcagccaacctgcagcgtccagatctctctccacccctcctacctcacagggtcatcccgcatcctttcccct

SEQ ID NO: 351148 - DNA, 201 bp, Homo sapiens
tctctccctctctctttctttctactttgactgaataacctttgttgtcaatctatgttcagcttaccaattataatccttttcttcccattaactgatayattttataactttcagtatatttcagacatgaagacagtttgttcatcatgattaacaagtactggcagtgatcaattacagacagccaaaatcagtgta

SEQ ID NO: 351149 - DNA, 201 bp, Homo sapiens
aaacatgttgattatttttttgccttgatgaaaacaataatcctataaaatattaattgcctgctttagaaggaaaacttctgaactggaagcaactttcrttagctatagacctttaatgaaggcagaatttcttatataaaaaaggagctaggaaagtagaagtgtaaatagaaatatagtttatcaacattactatcc

SEQ ID NO: 351150 - DNA, 201 bp, Homo sapiens
actggaagcaactttcgttagctatagacctttaatgaaggcagaatttcttatataaaaaaggagctaggaaagtagaagtgtaaatagaaatatagttyatcaacattactatccacttctgatgtggacattaaagggatattaatcttttaagtccagagactctcctaggtaagtcttatgacccctcagcttaaa

SEQ ID NO: 351151 - DNA, 201 bp, Homo sapiens
atcttttaagtccagagactctcctaggtaagtcttatgacccctcagcttaaatctcttgcccagccctctcccctgaactcccaagttgtgtttctgtytgctgacttggcgtcactgatggatagctcagacctgtcatggcacaaaactgaattcctgaccattcccaaactgttctccccacggtcttcccaggtt

SEQ ID NO: 351152 - DNA, 201 bp, Homo sapiens
ccaggcgtagtggcacatgccattagccccagcttctcgggaggctgaggcaagagaatcgcttgaacccagcagacggaagttgcattgagccaagatcrtgtcatagcactccagcctgggtgacagagcgagactccatctcaaaaaaaaaaaaaaaaagaaaagaaaagaaaagaaaactaagctacagagaagtaa

SEQ ID NO: 351153 - DNA, 201 bp, Homo sapiens
aaatggcctgctgtaacaccaagaccagttttagctagtagctgctgggaccacctactgtgactctaagactggttttacctgctgtcgtcactcaccartcagagcttgtccacacccaaaagcttctctagtgccaatgagctttctttcaaaacaacacataacatttctctaataaaactcccaaccttccttttg

SEQ ID NO: 351154 - DNA, 201 bp, Homo sapiens
tgtatgagatcctcattaacaagtttaacaattcctggagactgaggcttttgtcaattatgacgagacttcccatttcctagaccatggtctccgttagyatttttgtgtgtgtagttactgttttgaatccatttccctctgtctttaaatgtttttcctttggtatttgaatttgtccttgtgaatcaccatgagtcc

SEQ ID NO: 351155 - DNA, 201 bp, Homo sapiens
gctgcctgcactctgccattcatagatcaggtcttctttttccttccccagaactgccctgagctgaaaccacctttcttctctccctatagcagtacatmtaccccacctacaccctgcatccactccacagccccttgtcttcttcagtccctctttccctgatgaccacagacctctccaagctgggcactgttctat

SEQ ID NO: 351156 - DNA, 201 bp, Homo sapiens
actttaaacttacttacttacctttaaaaagtacatgtactgatttagctttggagaatgctttcccattgtgtgcttgcctcgcgcctcaggttagagcygcctcagtggcgggccgtgcctcttatctggtgctatataatccaagaggctcctgccactctctccagctgtcagtagccagcaactgtgttgtgttgt

SEQ ID NO: 351157 - DNA, 201 bp, Homo sapiens
actgaatttcgatgtctttagtagggctgccctgcttcacagtctgacggtggtcatcatcttcatcgctcaggatgtcactctctttgatgagattgtcrgcaaaatctgccaagccggggtgtgggtatttcccgggagaagtgctcttggagtcctgcctgccctcagccgtggggcagccgctgctctgggtgccgc

SEQ ID NO: 351158 - DNA, 201 bp, Homo sapiens
cggggtgaacgtctgggtcctcggaaatcctcagtctctggaactgaatttcgatgtctttagtagggctgccctgcttcacagtctgacggtggtcatcwtcttcatcgctcaggatgtcactctctttgatgagattgtcagcaaaatctgccaagccggggtgtgggtatttcccgggagaagtgctcttggagtcct

SEQ ID NO: 351159 - DNA, 201 bp, Homo sapiens; identical to SEQ ID NO: 75018

SEQ ID NO: 351160 - DNA, 201 bp, Homo sapiens
ccggggtgtgggtatttcccgggagaagtgctcttggagtcctgcctgccctcagccgtggggcagccgctgctctgggtgccgctgctcaagctgccctygtcagagtccagcaaggttcccttgccagtctcaccggtccactcgttgctggaggaattcttcaggacttttaaagacctggatgaagctacagtgaga

SEQ ID NO: 351161 - DNA, 201 bp, Homo sapiens
tctccatttttaacaagcactctcagagggtctattgactacaccttgaaaaaaacctgctttaagcatttatgctaaacaaattaattgttttgtgtgatttttttttttaagtctgctaatagctatgcatgtcgtggcccattccttcaaaaataaataaaaataaataatggccagtaatgactcattggtatgact

SEQ ID NO: 351162 - DNA, 201 bp, Homo sapiens
ctgggactacaggcgcccgccaccacgcccggctaattttttgtatttttagtagagacggggtttcaccatgttagccaggatggtctccatctcctgacctcgtgatccacccgcctcagcctcccaaagtgctgggattacaggcgtgagccactgcgcccagcccagttttgtccacttttgacaactgggtttata

SEQ ID NO: 351163 - DNA, 201 bp, Homo sapiens
tgccaagccggggtgtgggtatttcccgggagaagtgctcttggagtcctgcctgccctcagccgtggggcagccgctgctctgggtgccgctgctcaagstgccctcgtcagagtccagcaaggttcccttgccagtctcaccggtccactcgttgctggaggaattcttcaggacttttaaagacctggatgaagctac

SEQ ID NO: 351164 - DNA, 201 bp, Homo sapiens
ccttacatagttctcattgtccctgatatatggctgtgtagcttctcaagtgtaagcctaatttttctccttgtacttaaaattattttagattaataagaaaaaaaaaaccactgtccttgtaaattctttgaccccttgtttttctcatactccatcaaaatgctttttaaaagctcaagggttagaggtttcctttta

SEQ ID NO: 351165 - DNA, 201 bp, Homo sapiens
ttctttcccttctatgagttgtactatcttaaactttcgtcatcattatttccatacatattttatccttacattgcagataaatacaccacacacacatacacacacacacacacacacacacacacacactcagagtaaatgataggagtagtcttttcaagattttatacaaatagcattatactgtacaaattttct

SEQ ID NO: 351166 - DNA, 201 bp, Homo sapiens
ttccaagccacatttaattttctctgaaaattcccacatggcaggaagatattgctctctgcagctttcaagtctctttcagggaacggtaaaatgacaaycttttaaaattagcactttttctataaatagagactaaatcacttataccaaataaagtcacatatgcatttttattaaagtaaatactaaaataataag

SEQ ID NO: 351167 - DNA, 201 bp, Homo sapiens
atagcccgcccaggagaagcctagtccacccggctctaaccccgctctcacaggcggaagccgccgaccacccagcctgcccttctcgcggcaggacttakcgcatgcgctctcagcacgccgggaatttcctgtccgcggtcatcgcttccggtgggataggtctgaccaatggggctgactccgaggcgggccttaggt

SEQ ID NO: 351168 - DNA, 201 bp, Homo sapiens
tttttctgtattaacatgcatgtgtgcaaagctttaaaaaccctcaactgctcaatttaactttttcctgaaaatgactaagaattcaaatttctgaaaaycttacgatctaagaacttattgccattgccatagtgaccaccaccaagatgtctctagataaaaatgagacttcagcactttttgcttttggatttcact

SEQ ID NO: 351169 - DNA, 201 bp, Homo sapiens
agtattgcctttggttttttgtttgtttgttttttgagacaagagtttcgctcctggtgcccaggctggagtgcagtggcgtgatctcggctcactgcaamctccacctcccaggctcaagcgattctcctgcctcagcctgacgagtagctggaattacaggcgcccgctaccatgcccagctaattttttgtattttta

SEQ ID NO: 351170 - DNA, 201 bp, Homo sapiens
tacctgttccagccctacaaatttaaagtgatttgacctaatcctaaaataatgttcttctgtcccagccttaggaaattaacagtatcagctatgaatakacgaatgtactgaccaagcatcttcagtgtgatgtctagtccgtttgataattatggtttattatgaattactatatttgtatgcatgttctatttctca

SEQ ID NO: 351171 - DNA, 201 bp, Homo sapiens
gatgctgctgcttcacagacaccaagggcgtggtttgtggaaaaggcctagttttaggaaggtcttttccctctgatcatccaggaactccagattaaatrtaacagaaaacctttatacaacaattgtcagttcttgttccatttgtgctttcttgaggattacacgtgcatctccctgaaattgtttaatctcttggga

SEQ ID NO: 351172 - DNA, 201 bp, Homo sapiens; identical to SEQ ID NO: 75016

SEQ ID NO: 351173 - DNA, 201 bp, Homo sapiens
atatttattgcaattgttttaaatagtcatatgaaaactgtaagcttatgtttacacctagattcgtatttctatatatttagatgttacaaaattaacayatattaacttaaaaataataagctgatacttgagtgtggccagtgagatcagaactcagaaaaaacacaactcaggttgtcttctctctgtactttgctg

SEQ ID NO: 351174 - DNA, 201 bp, Homo sapiens
tacctgggaaagttgtaacctcgaggcccgtgatgtcctaaagtggactgtcattagcttggtggaggtacttgaagagcaagcagacactggagggtggrgaaaccaagcatccggaggcactcatcttgctccgttgttttacccgacagtgaagtggctctcccaagcccctgtcctcctgcgttccatcttgtggtg

SEQ ID NO: 351175 - DNA, 201 bp, Homo sapiens
aaggaccacagccttgttgcagatccagaaagagccaagaagctgtttagttaagcccagtgatagtctgcttaagaaggcaggaaagtgtatttgtaaamgatttccatctacgataatctatccatagtccgctgtttaaagaggctcggcgtgagaggcacatatttctcattttctaaaacctcctcacatggcttc

SEQ ID NO: 351176 - DNA, 201 bp, Homo sapiens
ctcaagacagataataatgggttttttaaatgcttgctttctaccgagttgccctatctcttctttaaggacacacttgagaactaggaagcaaatatgamttctgagcagccaaaatcatatcacgaagtcctcacgtaagcacgtttccatctcacagaaagctgctgctgccaagaggctctcaggaatcactgggaa

SEQ ID NO: 351177 - DNA, 201 bp, Homo sapiens
ctgtcattagcttggtggaggtacttgaagagcaagcagacactggagggtggggaaaccaagcatccggaggcactcatcttgctccgttgttttacccracagtgaagtggctctcccaagcccctgtcctcctgcgttccatcttgtggtgcctatagcctgcaagatgccatatgcttcctgttcccaaccacccag

SEQ ID NO: 351178 - DNA, 201 bp, Homo sapiens
ccctgtcctcctgcgttccatcttgtggtgcctatagcctgcaagatgccatatgcttcctgttcccaaccacccaggtctgcccgtgatcatcccacttygaactttgaatccttcttatatgttgttctttaaagtcttactgattattccctgtggtctttttttttttttccactagcccttctgttgtcttaagtt

SEQ ID NO: 351179 - DNA, 201 bp, Homo sapiens
tctttcccttctatgagttgtactatcttaaactttcgtcatcattatttccatacatattttatccttacattgcagataaatacaccacacacacatacacacacacacacacacacacacacacacactcagagtaaatgataggagtagtcttttcaagattttatacaaatagcattatactgtacaaattttctg

SEQ ID NO: 351180 - DNA, 201 bp, Homo sapiens
tttaggcctaggcagggattagattttatctcagattttgctaagagtatttcttctggagactagcaggctgctagtaagaattgatagaattggctctktgtcactgggagaactggagttgaagggttacaggagatgagtcctggagaaggggaggcagggacaagggtgccaggaagctcaggggatgaaagggaa

SEQ ID NO: 351181 - DNA, 201 bp, Homo sapiens
ttctggagactagcaggctgctagtaagaattgatagaattggctctgtgtcactgggagaactggagttgaagggttacaggagatgagtcctggagaasgggaggcagggacaagggtgccaggaagctcaggggatgaaagggaaatggagagtccagtgagagaaggctggtgaggtgtagagagtggccagacaca

SEQ ID NO: 351182 - DNA, 201 bp, Homo sapiens
ctttcccttctatgagttgtactatcttaaactttcgtcatcattatttccatacatattttatccttacattgcagataaatacaccacacacacatacacacacacacacacacacacacacacacactcagagtaaatgataggagtagtcttttcaagattttatacaaatagcattatactgtacaaattttctgt

SEQ ID NO: 351183 - DNA, 201 bp, Homo sapiens
gttacaggagatgagtcctggagaaggggaggcagggacaagggtgccaggaagctcaggggatgaaagggaaatggagagtccagtgagagaaggctggygaggtgtagagagtggccagacacatgcctgacagttgggaccacttctctatacaaatcaggaggaggcgaggtaggcaggatagttcagagtttgtgg

SEQ ID NO: 351184 - DNA, 201 bp, Homo sapiens
tttcccttctatgagttgtactatcttaaactttcgtcatcattatttccatacatattttatccttacattgcagataaatacaccacacacacatacacacacacacacacacacacacacacacactcagagtaaatgataggagtagtcttttcaagattttatacaaatagcattatactgtacaaattttctgtg

SEQ ID NO: 351185 - DNA, 201 bp, Homo sapiens
ctgccattcatagatcaggtcttctttttccttccccagaactgccctgagctgaaaccacctttcttctctccctatagcagtacatctaccccacctayaccctgcatccactccacagccccttgtcttcttcagtccctctttccctgatgaccacagacctctccaagctgggcactgttctatggtgcgttttgt

SEQ ID NO: 351186 - DNA, 201 bp, Homo sapiens
ataatattcttggttaacaccagggcaaggtactttttatacttggcagtttagttcttttataaaatccagtttgaaaggtgtatcagcaaattatcttagaaaaagctatcaaataattgccttatgaatgtaatcagaacctctttcaattataaatctttaagtaaaacatggaaacaataatggaaaaaataaaga

SEQ ID NO: 351187 - DNA, 201 bp, Homo sapiens
tgaaattccagctatagtatctgataaagaattttaatagcattataggtttttcaaatgattttattttttatttttattttttttgagatggagtctcrctctgtcacccaggctggagtgcagtggagcgatcttggctcactgcaagctccacctcccgggttcacaccattctcctgcctcagcctcccgagtagc

SEQ ID NO: 351188 - DNA, 201 bp, Homo sapiens
gtagctttacatatcagcatttacttctcagtcctgcaaagtccactgtgggttgagtgattgcagtccatctttcttctttagaatgttttcatttatctttttttttttttaattttttaattttttttcttttttcttttttttttttttaattgatcattcttgggtgtttctcgcagagggggatttggcagggtc

SEQ ID NO: 351189 - DNA, 201 bp, Homo sapiens
cattcaatcttgaaaataatgacagttcagagtaagataaaatagttacctgttccagccctacaaatttaaagtgatttgacctaatcctaaaataatgytcttctgtcccagccttaggaaattaacagtatcagctatgaatatacgaatgtactgaccaagcatcttcagtgtgatgtctagtccgtttgataatta

SEQ ID NO: 351190 - DNA, 201 bp, Homo sapiens
tctgccaagccggggtgtgggtatttcccgggagaagtgctcttggagtcctgcctgccctcagccgtggggcagccgctgctctgggtgccgctgctcargctgccctcgtcagagtccagcaaggttcccttgccagtctcaccggtccactcgttgctggaggaattcttcaggacttttaaagacctggatgaagct

SEQ ID NO: 351191 - DNA, 201 bp, Homo sapiens
gttcccaaccacccaggtctgcccgtgatcatcccacttcgaactttgaatccttcttatatgttgttctttaaagtcttactgattattccctgtggtctttttttttttttccactagcccttctgttgtcttaagttatggctgtgtcttggctatttacatagtaacttcctcatcattttttcatctccactatct

SEQ ID NO: 351192 - DNA, 201 bp, Homo sapiens
gtcttgaacaccgtgagagtgttgaatgaagacccttttgtagacagtggccagcattgtttctgtgtctgtgcatgtggtcgtgacttagcttttgggcatatgataatcatcaggaactgagttgtacgtctcttcagtgtcctctgtatatcatgttgattacagttctcagttgtaatatctaatatctaagattta

SEQ ID NO: 351193 - DNA, 201 bp, Homo sapiens
tcttgaacaccgtgagagtgttgaatgaagacccttttgtagacagtggccagcattgtttctgtgtctgtgcatgtggtcgtgacttagcttttgggcatatgataatcatcaggaactgagttgtacgtctcttcagtgtcctctgtatatcatgttgattacagttctcagttgtaatatctaatatctaagatttaa

SEQ ID NO: 351194 - DNA, 201 bp, Homo sapiens
tgaccaatggggctgactccgaggcgggccttaggtctcgcaggttccgcccctgcgcgttcctttcggagcggcggtgaaggtcctgggtgaggtagggktggatggtgcttgccgcgtatcatggctgcctccggaaaactcagcacttgccgtctccctccgttgcccacgattcgagaaatcattaagttgttaaga

SEQ ID NO: 351195 - DNA, 201 bp, Homo sapiens
atttatatattggtttaaccaccatcaccattgcttagtgatgttctatgagatgaggttgcaaaaatatattacaaatacgtctactaagtcacggctgragtacttaggttttgagattttcatatttcattctatttagtcccacttcagaagttgaaaagagcagtaaatcacacccaaaaagttcattttcactta

SEQ ID NO: 351196 - DNA, 201 bp, Homo sapiens
cttgtacaaataaaacaatagacaaggaaactgaaaagttaagagaaatgaaattgggataggagtccttggttaacatgtaaggattaggtgagaatgtrtgtaaatccatcataatagataagatggtcagtggatgctaattccctccctgttaaaagactaaaccatttttggatggctgagaaactagtttccgca

SEQ ID NO: 351197 - DNA, 201 bp, Homo sapiens
atttcctgtccgcggtcatcgcttccggtgggataggtctgaccaatggggctgactccgaggcgggccttaggtctcgcaggttccgcccctgcgcgttyctttcggagcggcggtgaaggtcctgggtgaggtaggggtggatggtgcttgccgcgtatcatggctgcctccggaaaactcagcacttgccgtctccct

SEQ ID NO: 351198 - DNA, 201 bp, Homo sapiens
ctgaaaatgactaagaattcaaatttctgaaaatcttacgatctaagaacttattgccattgccatagtgaccaccaccaagatgtctctagataaaaatragacttcagcactttttgcttttggatttcactagcaatactgaagattctgaatgtgaaactagtattgcttattcagatattcaatgttcaataacta

SEQ ID NO: 351199 - DNA, 201 bp, Homo sapiens
tcagatattcaatgttcaataactatagaaaagtgctgcattcttatccagtctgttcttaggagtcggttggtttcaaatcagtttgaaaggaatttgcrtgggacagatggaaactacaatattagctaaatttaagctaagaaactttgtcatgataatcctgtgtgtgttaagggactggtacagttcaatggtgat

SEQ ID NO: 351200 - DNA, 201 bp, Homo sapiens
aactacaatattagctaaatttaagctaagaaactttgtcatgataatcctgtgtgtgttaagggactggtacagttcaatggtgatgtggtagcatattygattgccacttcatgttaatttaggtagagagttaaatagtcaaataaatattatacataaaggatcaattgattgggtaatggctgaatttttatagaa

SEQ ID NO: 351201 - DNA, 201 bp, Homo sapiens
gtctaccgaaaataagtggtgtctctatctgggaagtttagcactgagtggtccctgggggcctgtctgccatctctctgtgtcttgaagctgctgctgcrgcttatttttttcctcattcaaaaactaaaatattctaatgccatctattatctgctgactgactttactgatttggattgatttttaagccattgtgaa

SEQ ID NO: 351202 - DNA, 201 bp, Homo sapiens
ccatctctctgtgtcttgaagctgctgctgcagcttatttttttcctcattcaaaaactaaaatattctaatgccatctattatctgctgactgactttamtgatttggattgatttttaagccattgtgaaactgtgttttaaaattaagtgaccatcaagcacaggtctggtggatgtcattagagaacaggtgcagcc

SEQ ID NO: 351203 - DNA, 201 bp, Homo sapiens
ataggcctttttttccccagtgaggaatgtttcaatatgtaaaactactttgttttagaggtactaaattaatcataaaactgagtaaaagcagaaagaargtgatctattttaaggataccattttagtgatttctaagctaatagaattactttttaaagaaattgtaataatttataaaataccttctagctgaaagc

SEQ ID NO: 351204 - DNA, 201 bp, Homo sapiens
gtcatttgcgaatccagaatgtaccatcttccatgcctagagatgaaaccgaagtacgtggaaaggtctgtttatgaaaacaggctgttgacagcccatcytcctgttttacaaggatgagttgattgatcacactatgccacatatcatgccacagaatgataatatgtttgcttacaacgaaggtggacgtgggcgtgg

SEQ ID NO: 351205 - DNA, 201 bp, Homo sapiens
cactgaataatatcttagttataagtaatcagttaaattattatccccatgccttgattacctctggtgattaatgactgatcaggagactgctgatctgkaaagaggtataggaggaagtcgtgttattccattggagcactagaaaattctccagtgctatggaaacattggggtgttttccaactcatcaaacttgca

SEQ ID NO: 351206 - DNA, 201 bp, Homo sapiens
aaagaggtataggaggaagtcgtgttattccattggagcactagaaaattctccagtgctatggaaacattggggtgttttccaactcatcaaacttgcaytggacacctagggtttcttttcttgatgttgtcacattctgattgtgcatttctaggtttttaagtttttcgttgtttcttgttacatttttatgactga

SEQ ID NO: 351207 - DNA, 201 bp, Homo sapiens
tatgtacatttacataatttacacagtaaaaaaactcttcatccccctcaccacatttcttagtcttatttctcttgtgatctgagtttgctgtcattctyttggcctcagttcttcctaccacatctgctctgagaggaaacactatgtgactgtttaaaatctgttctttttttatgatcccaagaagaaagagaaaaa

SEQ ID NO: 351208 - DNA, 201 bp, Homo sapiens
tctcttcagttgcagtctttataaaatcctcaggcactttttaagagtgagaaccttgtttgctctattcttaaagctctgagtattacacttagttcagkcctgtgacggacaagacttcactgccaatgaggagagagcaaagacttgctagacctcaggtggcctctctcagggtggcttaaacataagcgcagcctg

SEQ ID NO: 351209 - DNA, 201 bp, Homo sapiens; identical to SEQ ID NO: 75022

SEQ ID NO: 351210 - DNA, 201 bp, Homo sapiens
aaataataatagctaatatttatggagagtttatcacagtaaatactttgtgatatggtttggctctgtgtcctcacccaaatctcctcttgtagctcccrtaattcccatgtgttgtgggagggactcagtgggagatgattgaatcatgggggtgggtctttcctgtgctgttctcatgatagtggatgggtctcacaa

SEQ ID NO: 351211 - DNA, 201 bp, Homo sapiens
cctgttgccatccacgtaggatgtgacttgctcctacttgccttccgtcatgattgtgaggcctcccccagccatgtggaactgtgagtctaaacctcttktgtaaattgcccagtctcgggaatgtctttatgagcagcagcatgaaaacgagctaatacactttgttttacagctttgttgagatacagttgatgctca

SEQ ID NO: 351212 - DNA, 201 bp, Homo sapiens
cccaagcaactaggattgttccccaaacctgtgattctcatttctgcccacacgagggctttggaaaagccccaagaggctcaggcccaacccagtggctyttatttaattttctgggatggagccccatccttgtatttttcaaatgctgtccatttaattctaatgaaaagttggggttctgaattttaaaaaaaatgt

SEQ ID NO: 351213 - DNA, 201 bp, Homo sapiens
gctaatacactttgttttacagctttgttgagatacagttgatgctcagtaaactgcacatacttaaagtgtacaaattactgaggatttgtctgtgtgtrtatgtgtgtgtgtgtgtgtgtgtgtgtgtatgtgtttgagacatggtctcactctgtcacccaggctggagtgcagtgacacaagcacaactcaacagct

SEQ ID NO: 351214 - DNA, 201 bp, Homo sapiens
gtgctttgtaatttgatcatgaagatcacaccatattcctatgcatcttctcaccttgtggatttcccttgctgctcaattaaaagtagaaaatgcccctccccccccccttttttttttaaagacagtgtcttgctctgccacccaggctggagtgcagtggtgtgatctctgctcactgcaacctccgcctcctgggct

SEQ ID NO: 351215 - DNA, 201 bp, Homo sapiens
taatacactttgttttacagctttgttgagatacagttgatgctcagtaaactgcacatacttaaagtgtacaaattactgaggatttgtctgtgtgtatrtgtgtgtgtgtgtgtgtgtgtgtgtgtatgtgtttgagacatggtctcactctgtcacccaggctggagtgcagtgacacaagcacaactcaacagctca

SEQ ID NO: 351216 - DNA, 201 bp, Homo sapiens
atataaatatataatttaatatatatataaatatataatttaatatatatatataaatatataatttaatatatatataaatatataatttaatatatatrtaaatatataatttaatatatatttatatatataaatatataattatgtatatatataaatatataatatataaataatataaaattattttataatttt

SEQ ID NO: 351217 - DNA, 201 bp, Homo sapiens
atctgatggttttataaggggcatttctcccttttgctcggcacttttccttgctgccaccatatgaagaaggacgtgtttacttccccttccaccatgaytgtaagtttcctgaggcctccccagccatgctgaactgtgagtcaattaaacatctctcctttataaattacccagtctcaggtatgtctttattagcag

SEQ ID NO: 351218 - DNA, 201 bp, Homo sapiens
aaaacatcaggtattgtgagagttttattttttttaatgctgatgagggctggattttgtggtattgggttgagtgttgggtttgttgtgacacatagatragattgcttgaggcttttattgttctggtggatccagggtagcttttaatttggggctcgttgagccccagtactacatcatgccctttctgaggaaggc

SEQ ID NO: 351219 - DNA, 201 bp, Homo sapiens
ggaggattgcttgagcccagagttcgagaccagcctgggtaacatagctccctatgttaccttgtctctacaaaaaataaataaaaaattagccaggtccrgtgctgcatgcctgtggtctcgactactcaggaggctgaggtgggaggatcacctgagcccaggagatcaaattacagtgagccgtgatcatgtcactgc

SEQ ID NO: 351220 - DNA, 201 bp, Homo sapiens
tgtgacggacaagacttcactgccaatgaggagagagcaaagacttgctagacctcaggtggcctctctcagggtggcttaaacataagcgcagcctggarttggtgactgcacagctcacagaggctctgtaccagggagctcgtggttccccagtgaggactcaagacagataataatgggttttttaaatgcttgctt

SEQ ID NO: 351221 - DNA, 201 bp, Homo sapiens
cagaaataccaaattgttttataagatgactgtgccatattacattcccaccagctgtatttcagagctcccattgctccacatgcttgctcagacttggyatggtcagtctttttaattttagccatcctagtgaatatgtaatggtatcctcttgtggtttttatttgcatttccctaatagataataatactggacat

SEQ ID NO: 351222 - DNA, 201 bp, Homo sapiens
ggcgggcagatcacttgaggtcaggtgttagagaccagcctgggcaacatggtgaaacctcgtctctactaaaaatacaaaaattagccaggtgtggtagygcacacctgtaatcccagctcttagggaagctgaggcaagagaattgcctgaatcccaggagcagaggttgcagtgagccaagattgcaccactgcactc

SEQ ID NO: 351223 - DNA, 201 bp, Homo sapiens
atgttaccatagttaatcataacatagacaaaactcaacaagtaagcaaaaagtggcttacagccaaagtgactttttagtccatacaaagtataagtacrgagatcagtggtagaagcaggcccactgacaactgtaagaagtaacagttgttacagtaacagaaagctataaaagacaaatataaacgcagaagaaaca

SEQ ID NO: 351224 - DNA, 201 bp, Homo sapiens
ggtcaggtgttagagaccagcctgggcaacatggtgaaacctcgtctctactaaaaatacaaaaattagccaggtgtggtagcgcacacctgtaatcccasctcttagggaagctgaggcaagagaattgcctgaatcccaggagcagaggttgcagtgagccaagattgcaccactgcactccagcctgggcaacagagc

SEQ ID NO: 351225 - DNA, 201 bp, Homo sapiens
taactattgaggccattattctaaagacaacagtaaccctaggtcatcaagaaaagggtgaaatttggtttagtgttcttggcctaaggaagaggattgtrccatatagcatccctatacattggcctaaggaagaaggttgtgtcgttggcatacctgtacgttgtgtacaatgtataatgataaaattaggataattag

SEQ ID NO: 351226 - DNA, 201 bp, Homo sapiens
tttgtccttttttttttttggacagagtctcactctgtcacccaggctggagtgcagtggcacgatcttggctcactgcaagctccgtctcccgggttcaygccattctcctgcctcagcctcccgagtagctgggactacaggcgcccgccaccacgcccggctaattttttgtatttttagtagagacggggtttcacc

SEQ ID NO: 351227 - DNA, 201 bp, Homo sapiens
ttttttttttggacagagtctcactctgtcacccaggctggagtgcagtggcacgatcttggctcactgcaagctccgtctcccgggttcacgccattctyctgcctcagcctcccgagtagctgggactacaggcgcccgccaccacgcccggctaattttttgtatttttagtagagacggggtttcaccatgttagcc

SEQ ID NO: 351228 - DNA, 201 bp, Homo sapiens
aaaaatgagacttcagcactttttgcttttggatttcactagcaatactgaagattctgaatgtgaaactagtattgcttattcagatattcaatgttcartaactatagaaaagtgctgcattcttatccagtctgttcttaggagtcggttggtttcaaatcagtttgaaaggaatttgcatgggacagatggaaacta

SEQ ID NO: 351229 - DNA, 201 bp, Homo sapiens
ttttagatatttgtagtatcatttaagatacgagtggttatgtgatttctgtttgtttttgctctgttcataaatttaaaatactgagaaagtctgaaaaygtacatttttaatacaattcaagttattttacatactaaaaaaaaataaagcaagctaattgacattttgacatcatgctgtaaccttccctctaaaagt

SEQ ID NO: 351230 - DNA, 201 bp, Homo sapiens
cacgccattctcctgcctcagcctcccgagtagctgggactacaggcgcccgccaccacgcccggctaattttttgtatttttagtagagacggggtttcmccatgttagccaggatggtctccatctcctgacctcgtgatccacccgcctcagcctcccaaagtgctgggattacaggcgtgagccactgcgcccagcc

SEQ ID NO: 351231 - DNA, 201 bp, Homo sapiens
atactatattagtccattcttttctttttttttttttttttttttttgaggccgagtctcgccgctctgtcacccaggctggagtgcagtggtgccatctyggctcgctgcaagccccgcctcccgggttcatgccattcaactgcctcagcctcccaagtagctgggactacaggcgcccaccaccacgcctggctaatt

SEQ ID NO: 351232 - DNA, 201 bp, Homo sapiens
atttggtcattcttaactgtgagcgagactggggaagtttgtatctggcttttcatcccccctggtgagctgtatccagcagggactcaggctggctttgkgggtgtcacagggctctagctgcacttctagtgaatttaatctccaggatttgagttgactgtgtgatactttcccaagcaactaggattgttccccaaa

SEQ ID NO: 351233 - DNA, 201 bp, Homo sapiens
ggtaagaaaaacatgtctagtatgtttagtatagtatagttttgtggtaaagacgcagacttcagcatcagactgcctgggtttaacttcagattctactrctagttgggtgactttgggtaggtaattttgtcctctgtgcctcagtttgctcttaggactcatatgaggattcagtgtatgcctgatacttagaaagca

SEQ ID NO: 351234 - DNA, 201 bp, Homo sapiens
ggaattacaggcatgagccactgttcccagccaagatcaaaaaaatatatatatatgtatatatacatatatatatacacacacacacatatatgcacacrtatatacacatatatatacacacatatatacacacatatacatatacacatgtatatatatacatatatatacacacatatatacacatgtatatatata

SEQ ID NO: 351235 - DNA, 201 bp, Homo sapiens
ggcaaagcagaaatgttctgaagaaagccagaaaatattttgctgacagttacattgagcaaatgttttaaaaattcattttcttgggccgggcacagtgrctcatgcctgtaatcccagcactttgggaggccgaggtgggcggatcacgaggtcaggagatcgagaccatcctggctaacatggtgaaaccccgtctct

SEQ ID NO: 351236 - DNA, 201 bp, Homo sapiens
tcaacactatttttttttttttttttttttttttgagacagagtctcactctgccgcccaggctggagtgcagtggcacaatctcggctcactgcaacctscaccttctgggttcaaatgattctcctgcctcagccttctgagtagctgggattacaggcgcccgccatcatgccccgctaagttttgtatttttagtag

SEQ ID NO: 351237 - DNA, 201 bp, Homo sapiens
ccaccatgcccggctaattttttttttttttgtatttttagtagagatggggtttcaccctgttagccaggatggtctcgatctcctgacctcgtgatccrcccacctcggcctcccgaagtgctgggattacaggcgtgagccaccacgcctcgcccaaatgattttatttttaatgaaaatactcaatacataataagg

SEQ ID NO: 351238 - DNA, 201 bp, Homo sapiens
acccaggaaaggaaggtaaatttatttatattatattagcttttagatatacagttgtacctgtcagggtgggaaaagttaacacttcaaattaagttaaygtcaaacagccaaatttacattgttctgttgtgttttagtcctaactactaattattaaatactttctatatattgacatcatgagacttaagctattag

SEQ ID NO: 351239 - DNA, 201 bp, Homo sapiens
acactcaccatgcattgctgtagctacaggggctataaaggtagataggaaatgggtcctgcccttaaggagcatatgtccttgcaggggaaattgagatrcagtttgtaagtgctgtaaagaggcagacgcacagtacagtgttgacacaaaggtggactaatccacaagccatgtttcttggtccagtgtctcctctct

SEQ ID NO: 351240 - DNA, 201 bp, Homo sapiens
ttccctctgtctttaaatgtttttcctttggtatttgaatttgtccttgtgaatcaccatgagtccatttttggaacaaatcagggtataaatctcttatmagatatgcctgaaaagttttatcttctgacaattaaagaatctccacagctggcagtagcttaaacactatcaaacagtgacattttttgatggtttcca

SEQ ID NO: 351241 - DNA, 201 bp, Homo sapiens
aatcaaaactctaagaatcagatatagagaatttcttttgtgatacaatgaggggcttacttacaaccactttcgggattttttcctgtgagagtctgctrtcccttctgtttctcaatcttttaactaactcaatcaagctttaatggcagaactttcactaccattgaactattacaatcctgttctgactagttgaac

SEQ ID NO: 351242 - DNA, 201 bp, Homo sapiens
tttagtgtctcttaaactattagagtctgtagtatgtagcttttaagttagaatttttttaattttgtgttttcatttcactgttaatgaaattatttacrtttacaagacaatgtcttttgcaatgcaaattcagaactaaaattgttttcatgacagaatacaacctgtttcttaagtttctcaagctagcttttctct

SEQ ID NO: 351243 - DNA, 201 bp, Homo sapiens
gagtctcactctgccgcccaggctggagtgcagtggcacaatctcggctcactgcaacctccaccttctgggttcaaatgattctcctgcctcagccttcygagtagctgggattacaggcgcccgccatcatgccccgctaagttttgtatttttagtagagacgaggtttcaccatgttggccaagctggtctcgaact

SEQ ID NO: 351244 - DNA, 201 bp, Homo sapiens
tgtaatgttctaatttgcatattcctactttgtactgtggtggagcatagtttatattatggtttatttggatttctcttatgtgagttgccttatatatwctattagctatttatcttatgattattgatgtacaggaatttcatctgtattctgaacactataaatttcaaatactttctcttagtctgtgacttacaa

SEQ ID NO: 351245 - DNA, 201 bp, Homo sapiens
ttgtcatgcacatgtgtgtgcatataacattttaaatagtgtaagactcattatatcaaaaaccaagatccttactcataggcctctatagttatggttaygaccattatccagaatctccaggctatttaagttttactaacgggttcttaggatagatattcgaatatttttagtggaagctttctaactctgttttag

SEQ ID NO: 351246 - DNA, 201 bp, Homo sapiens
aagacagaatttgatgactggaggtatcttataggttatcttcaaatttaaaacatttgtgctttcagggactttctctcctagtacaggtggccattatratgaaaaaaataaaaataaaaaaccagtgaccatgtagcttgatttcttcttgtcatgcacatgtgtgtgcatataacattttaaatagtgtaagactca

SEQ ID NO: 351247 - DNA, 201 bp, Homo sapiens
taaactaattcaaggctagtactctaactaaaccttctgcatacaagaagagaaagtcctagacgcacataattgcaacacaaggtaagataagctaagcrctaaaaatagaggttgggcagattcctgggtggttgagagagggagattaatgctcagaagaaatttactaacattcattacttattctcaatcaaaact

SEQ ID NO: 351248 - DNA, 201 bp, Homo sapiens
acctagcagataagaagaattttatagacaagaaaactggccgggcgtggtggctcacacctgtaatcccaacactttgggaggctgaggcaggcggatcrcctgaggtcaggaattcaagagcagcctggccaacatggtgaaaccttgcctctactaaaaatacaaaaattagccaggcgtagtggcacatgccattag

SEQ ID NO: 351249 - DNA, 201 bp, Homo sapiens
cagagggggatttggcagggtcataggacaatagtggagggaaggtcagcagataaacaagtgaacaaaggtctctggttttcctaggcagaggaccctgsggccttccgcagtgtttgtgtccctgggtacttgagattagggagtggtgatgactcttagcaagcatgctgccttcaagcatctgtttaacaaagcaca

SEQ ID NO: 351250 - DNA, 201 bp, Homo sapiens
caccacgcctggctaattttttgtattttttagtagagacggggtttcaccgtgttagccaggatggtctcgatctcctgacctcatgattcgcccgcttyggccttccaaagtgctgggattacaggtgtgagccaccgcgcccggcctcatttggtcattcttaactgtgagcgagactggggaagtttgtatctggct

SEQ ID NO: 351251 - DNA, 201 bp, Homo sapiens
ttgttctttggacatactgaagaccacctggtctgtgtgtaggccctaatttacaattcttgcttcccaaataaaacattgaatttggagatttgtctctrtattttaggtttacttcaacagttatgagatggctgcctcagctgaccctttcatcaagaagcaccatattctacggccaggtgtggtggctcacgccca

SEQ ID NO: 351252 - DNA, 201 bp, Homo sapiens
tataaaggtagataggaaatgggtcctgcccttaaggagcatatgtccttgcaggggaaattgagatacagtttgtaagtgctgtaaagaggcagacgcayagtacagtgttgacacaaaggtggactaatccacaagccatgtttcttggtccagtgtctcctctctggcttctgtgatcatcttgtttatcctccctct

SEQ ID NO: 351253 - DNA, 201 bp, Homo sapiens
taaatctttaagtaaaacatggaaacaataatggaaaaaataaagaactcttcagacacatgtaattgtatatgatagttttattggcattttaaactacyttgtagttgttaaagtattttacattctactttctttgtagggaaagttaagcataattctgatttttttttaatctaaaagtcccatttggcacccaaa

SEQ ID NO: 351254 - DNA, 201 bp, Homo sapiens
ccctgggtacttgagattagggagtggtgatgactcttagcaagcatgctgccttcaagcatctgtttaacaaagcacatcttgcaccgcccttaatccayttaaccctgagtggacacagcacatgtttcagagagcaccgggttgggggtaaggtcatagatcatgttttcatttatctttaagcagaaattactttag

SEQ ID NO: 351255 - DNA, 201 bp, Homo sapiens
aaataattgccttatgaatgtaatcagaacctctttcaattataaatctttaagtaaaacatggaaacaataatggaaaaaataaagaactcttcagacasatgtaattgtatatgatagttttattggcattttaaactaccttgtagttgttaaagtattttacattctactttctttgtagggaaagttaagcataat

SEQ ID NO: 351256 - DNA, 201 bp, Homo sapiens
atatggaacccacagatactgacggatgactgtataatgtacatggatgacttaataaagggcactcctgaatccccatgtacatggatgacttaataaasggaactcctgaatccccacccccaacatgggtaattaaatcactagtacctttgagaccccattgtattccttactctgattgcatctcctttccatccc

SEQ ID NO: 351257 - DNA, 201 bp, Homo sapiens
taattttaaatttatgtctagtgctttttgtgttttgttgaggaaacacttttatcttgagttcatgaagatattcttctgttatcttctagaagctttaygtttacctttcacatttatatctatagtccactcgggtttgatctctgtgtatagtgaagtagaagcaattttactatttttaacatatgggtcccaact

SEQ ID NO: 351258 - DNA, 201 bp, Homo sapiens
tttttgtgttttgttgaggaaacacttttatcttgagttcatgaagatattcttctgttatcttctagaagctttatgtttacctttcacatttatatctrtagtccactcgggtttgatctctgtgtatagtgaagtagaagcaattttactatttttaacatatgggtcccaactaacctagctccatttactcacaag

SEQ ID NO: 351259 - DNA, 201 bp, Homo sapiens
cttatacaacttctgacaccagatgtgtgggttttttccacaccaagcaatctccaattctccgaacaccagctgggtatcctgcagtttcattcaattcygacactgtccacatgtttttagtgttagatcccacaagttaagggccaagtcccacaagactgcgcctcacttcagatgacagtcacaaatctgggcctc

SEQ ID NO: 351260 - DNA, 201 bp, Homo sapiens
ctactatgtggcaaatcaggaagaagataattaacgtaactacagtgttggctgccatgaaccccttacatgagaaggtgacataaaatatgcaaaatggstattcaatgtagtatttcttcttaaggaatcgataattttgtgtaagttctaagaattgcctaaattctttcctcatccagtaaaatcaacaaaaagctg

SEQ ID NO: 351261 - DNA, 201 bp, Homo sapiens
gggaagcctcaggaaacttataatcatggcagaaggcaaaggggaagcaggcatggtttatgtggctggagcagtaggaagagagtggggaggtgctacayactttacaacaagcagttctcatgagaactcactcactgtcgtgcaagagggaaatctgcccccttgatccaatcacctttcaccaggcccctcctccaa

SEQ ID NO: 351262 - DNA, 201 bp, Homo sapiens
atatgattcgcatgttttcatctctacagcctggggatatatgctacaaagattgaattgaatgggtcaggttaatggattgggacacatattcccctgaygtttctggatgtgttctaagtgaaatatacttaaatacttaaataagatcttttttgaattgtgccagttggatattaaaatttgcaatgcattttgaat

SEQ ID NO: 351263 - DNA, 201 bp, Homo sapiens
tcctataacagactctcagaacaaacggaggagggcttaggtgcctccacatctggctgcccccatgtctctggcctcccccatgaccagactccttcagwtgggccgcacttgcagtctctgccagctgacaggccctcctgttcttagcatgcagtcttcaggtttctgccccagcccagccacactggaaccacaatg

SEQ ID NO: 351264 - DNA, 201 bp, Homo sapiens
taatacatatggaaattaatttttaaaatcctgttggacttttaattgaaattgcattgcatttatgaattaattgaaatatacctaattaattgcaaaayaaaaatgtttgagtgtttaaaagaataaattactaggttttacaaaaattatttgtcaagaacagccaatttcccaagggttctgaatactcaaggtttt

SEQ ID NO: 351265 - DNA, 201 bp, Homo sapiens
ttaagtataattttttcctcaataatccaaagcagattgtgagaaaacattgcttttgaataataagtgaaaaaaaaaatttagccatgtctatttatatrtttttctttgatgctattaatatccagtctgattttactcgtcactgaaattgtattcagaatatattgatggaatcatttcaggttgttttttcctctg

SEQ ID NO: 351266 - DNA, 201 bp, Homo sapiens
tattcagtatataaattgtacttcctccctcacctcagtgaagtctgctatgcctgcattcccatggcagaagtgttctgggttcactctagaaagtaaamcctccagggtaagcaggggtggtgcttgagctgcaaaggtataaggagggatgtgcagactcttaagtggttttttaaaaaaattttattatgacatata

SEQ ID NO: 351267 - DNA, 201 bp, Homo sapiens
taaattgtacttcctccctcacctcagtgaagtctgctatgcctgcattcccatggcagaagtgttctgggttcactctagaaagtaaaccctccagggtragcaggggtggtgcttgagctgcaaaggtataaggagggatgtgcagactcttaagtggttttttaaaaaaattttattatgacatataagtacaagagt

SEQ ID NO: 351268 - DNA, 201 bp, Homo sapiens
tatgcctgcattcccatggcagaagtgttctgggttcactctagaaagtaaaccctccagggtaagcaggggtggtgcttgagctgcaaaggtataaggasggatgtgcagactcttaagtggttttttaaaaaaattttattatgacatataagtacaagagtatacagccatcccttggtatccataggggattgattc

SEQ ID NO: 351269 - DNA, 201 bp, Homo sapiens
tactacccactatttgactgtgtaagatccttatctattcattctcatgttggtggaccatgaattagtttcatcgttctgtttttacaaacaaaactgtygtaaacatcccatactgtgtcagttggggcacatgggcaacatttctctagggtatttacctgggagtggaactgcaaatcttcaccactgcatagataa

SEQ ID NO: 351270 - DNA, 201 bp, Homo sapiens
atgagttcattttgctccatattcttgccagtactcactattgccagacttgtacatttttattaatctcagggtaatggaatgtcattgtgttttctttygtccttgctggtttgtagcaaaatggggcactattgtgtgtttactggcctttttgagttccttgtttttagtgcatgctttttgctcacctttcttttg

SEQ ID NO: 351271 - DNA, 201 bp, Homo sapiens
ctaatttggccgaaacaggaactcggttcttaagaggtaccaggcgatccttacacgttttctccagtggtaattcacactttatgtgacgcctgaagttytccctcagaatagaacgaatcaccttaacaatgttggttttgctttcactgtcactgggtggggggggagagaaaacagcagaagtgtccacagtgttca

SEQ ID NO: 351272 - DNA, 201 bp, Homo sapiens
ctccagtggtaattcacactttatgtgacgcctgaagttctccctcagaatagaacgaatcaccttaacaatgttggttttgctttcactgtcactgggtsgggggggagagaaaacagcagaagtgtccacagtgttcatcgtgcttccattccacgcccgcctgtgttcctgtgccttgcacctgctggaccaggctgc

SEQ ID NO: 351273 - DNA, 201 bp, Homo sapiens
acagcagaagtgtccacagtgttcatcgtgcttccattccacgcccgcctgtgttcctgtgccttgcacctgctggaccaggctgccagccagccacccarcagcagtgccatgtggcctcccgtacagaaggaggtgagaattgatcactcttaagattttgatatttatttaatcaacatagtctcctactagcggcct

SEQ ID NO: 351274 - DNA, 201 bp, Homo sapiens
agacatgaaacagactcctccagcaaaggaagcatggctcttggtttctctgtcccctcctaagcgagtacatttcattcctactgtggaagtgcagatcyccaaagcagacagaacacacgccaggaccatggtggctctcgcagcctgcacgtggatggggagggacagaatggagtgtttcagggcacagctgaacat

SEQ ID NO: 351275 - DNA, 201 bp, Homo sapiens
gcccgtgcagctgtacaatggctgttatgatgttggagtccacatccacattcaccttccagttgggcagcagagtggctgtgagcactccagagaccccrgataaggccaggatgaaagcaaggagctggagtcctgctgaggccatgatgttactgttaagtctgtcctcttagaaaatcctgatgtttaacaatgatg

SEQ ID NO: 351276 - DNA, 201 bp, Homo sapiens
ctctaggtaggtcactagattcctttgtgaatgaacagtgtgcatcaaagagccattaaaacaaaaaaaaccctaaatatgtgtgaaatgcagctcttagyatttctctggagcattgaatcatattatatgtaattataaaatactatcggaaaagggcactttacataccataatagtcattttataaagttcaatttg

SEQ ID NO: 351277 - DNA, 201 bp, Homo sapiens
ggggtgattcagaaaattaagtgtttaagcatctttcatttttcattatgcttgctaatttcttcatcaagtatttattgattgcttgttttatgtaggaycttctgctatagaatataacagtggttcaaaaatcccaacagccattggtagagcaaatgttcttatttttgtagtgcattatatatgacataattcaca

SEQ ID NO: 351278 - DNA, 201 bp, Homo sapiens
attatatatgacataattcacatttcttaggtgtacctcagttgatgttggaggaaaatattccccatgtttgctgtgtgtcatgtgtcagatagcccatycttttcaaatttgcctcaaaaagtccacctagtgttcagaaataatggaatgttgactctttttcatctaatcaggctggactaattatttgctaaaatt

SEQ ID NO: 351279 - DNA, 201 bp, Homo sapiens
tgctgtgtgtcatgtgtcagatagcccattcttttcaaatttgcctcaaaaagtccacctagtgttcagaaataatggaatgttgactctttttcatctawtcaggctggactaattatttgctaaaattcatttttgtctctctctagagacttgcagccaatacaggaagcaaacagcgtagtcgcctctctgttatgg

SEQ ID NO: 351280 - DNA, 201 bp, Homo sapiens
ttgtctctctctagagacttgcagccaatacaggaagcaaacagcgtagtcgcctctctgttatggctcagtacctctgcaatgttcgacacatctttacrattccaggacaagcttttgtccccaaaccagaggtaagtttctgcttatttgttgtagtatatcggaattaggacgtttgttcccctgaggatgtgtcat

SEQ ID NO: 351281 - DNA, 201 bp, Homo sapiens
ttcagtgaatgtatattgagcatttactgtttgaaaatgcgttgggtagcaaggggagtctacagggatatgagcctaatccgatacagagtctgccttcrgggagttcacagcctcatgaggaatagaaatttctcactggtccctaaaactctcaaatataaggtcttgcagagtgtcccttgcatcatgtatccttca

SEQ ID NO: 351282 - DNA, 201 bp, Homo sapiens
tatgagcctaatccgatacagagtctgccttcagggagttcacagcctcatgaggaatagaaatttctcactggtccctaaaactctcaaatataaggtcktgcagagtgtcccttgcatcatgtatccttcataaataacaagagatagcatggaaaaaaatgcattatgtgactatagatttagatatagattctagat

SEQ ID NO: 351283 - DNA, 201 bp, Homo sapiens
tgatctccatgctctttgctgccaccttcatacttctttgccatttggccagttagctgagcgttcaggtgactaggaagtcaggccatcttccccttacrtaacagacataattgtcagctttttctaaatcgagctcagggagcttgctatcggtgccacctcccttcagcatctcagacttcagagacattgcgaatg

SEQ ID NO: 351284 - DNA, 201 bp, Homo sapiens
ttgaattcatgataaataaatagaaaactaaatataacagggagtgaatcaagggaaatataccattattggaatgagaagtacaaaaatattatttggarataaataattattttgaaaacctaagaaaaaatgagagacatatataaaaataactacaaaacctaactgagaatctcaaggtcactgagataaatccag

SEQ ID NO: 351285 - DNA, 201 bp, Homo sapiens
taggcagaggaccctgcggccttccgcagtgtttgtgtccctgggtacttgagattagggagtggtgatgactcttagcaagcatgctgccttcaagcatytgtttaacaaagcacatcttgcaccgcccttaatccacttaaccctgagtggacacagcacatgtttcagagagcaccgggttgggggtaaggtcataga

SEQ ID NO: 351286 - DNA, 201 bp, Homo sapiens
tttctaaatcgagctcagggagcttgctatcggtgccacctcccttcagcatctcagacttcagagacattgcgaatgacttctcctagaataattagatycaagacagaatttgatgactggaggtatcttataggttatcttcaaatttaaaacatttgtgctttcagggactttctctcctagtacaggtggccatta

SEQ ID NO: 351287 - DNA, 201 bp, Homo sapiens
tacaaagaaataatcttttttcccctttaccattgaatcattgacaatgactaagcttcaattaacaaataaattgttagaaacaatagtgggcagtgttkcctagatttttatttacttgctaaaatatttgaatcacatatcataatttatattttaaaagcattctttaaaatatattttgacattcattaattgaaa

SEQ ID NO: 351288 - DNA, 201 bp, Homo sapiens
taaatagtgtccattaaattgtagatgaattaatgatatatccatgacatataaagaaaagattggaacttgagacatccactcttgacttttgaagagcrttttagaggcttccaaccctgcttgttcacagctattgaggccttgacctctgtgggagatagtcttgagtttggtgggtggatgggtccacagaagaga

SEQ ID NO: 351289 - DNA, 201 bp, Homo sapiens
gccctcaggagaaggggcatgagggtagcaggaaagggcaggggaagagctaagtaaacatattgttcctcctggaggagcttcagcctagaaccacggcrggaggagaagctgtgtagcacaaattgccccacgcgtctgtgttcccttgaggcaagggaccagcttattggaacctgtgccagccagtctttgcaggga

SEQ ID NO: 351290 - DNA, 201 bp, Homo sapiens
ataatgttttattatacagaaattaaaaattttaataaagtacagtagtttttgttgttattgttgttgaggagggcgtcttgctctgttgcccaggctgrtcttgaactcctggcctctggcagtccacctgttttggcttcccaaagcactggaattacaggcatgagccactgttcccagccaagatcaaaaaaatat

SEQ ID NO: 351291 - DNA, 201 bp, Homo sapiens
ggtattcttcaggagcgtcctggccattcttggccttatataaattttacatggaatttaaatatatatataatacatatggaaattaatttttaaaatcytgttggacttttaattgaaattgcattgcatttatgaattaattgaaatatacctaattaattgcaaaacaaaaatgtttgagtgtttaaaagaataaat

SEQ ID NO: 351292 - DNA, 201 bp, Homo sapiens
aaatttaccttctctgggattaaggccacaagaaaatatttattatttggaaaaaagctagctatgtctttgattcctttttttattgagggatgtttacrttttggcaaattaaacattttcatagcaatttacttcactttttttattatattgtaactattacatacaggggatttatttgtaatccagaaaagcact

SEQ ID NO: 351293 - DNA, 201 bp, Homo sapiens
tttgtagtttttcatagagacaggattttgccatattggccaggctggtcttgaactcatggcctccagtgacctacccgctttggcctcccaaagtgccrggattacaggctaaattttagttctaaaagaattctctgctgctttgaagtagttttaccatattagggcaaagcagaaatgttctgaagaaagccagaa

SEQ ID NO: 351294 - DNA, 201 bp, Homo sapiens
tttcaaatactttctcttagtctgtgacttacaaacatttataatgttttattatacagaaattaaaaattttaataaagtacagtagtttttgttgttaytgttgttgaggagggcgtcttgctctgttgcccaggctgatcttgaactcctggcctctggcagtccacctgttttggcttcccaaagcactggaattac

SEQ ID NO: 351295 - DNA, 201 bp, Homo sapiens
ctcctttctgaccctcacccgactccgggccaggctgctgctcagcctcggggtgaacgtctgggtcctcggaaatcctcagtctctggaactgaatttcratgtctttagtagggctgccctgcttcacagtctgacggtggtcatcatcttcatcgctcaggatgtcactctctttgatgagattgtcagcaaaatctg

SEQ ID NO: 351296 - DNA, 201 bp, Homo sapiens
taaagaggcagacgcacagtacagtgttgacacaaaggtggactaatccacaagccatgtttcttggtccagtgtctcctctctggcttctgtgatcatcwtgtttatcctccctcttggttgtatgagttgggcaaggagaggtgttaggagaaaaaaaatcagctttaatggacctagagaattaggaccaaggtaggc

SEQ ID NO: 351297 - DNA, 201 bp, Homo sapiens
gctgtcagaattctatctatttctgtgcagtagagaaccaaataacaaagcctaaggaaaaaaggcaaaaccaggattgagcgaaagaaagtaagtaaacraaaggcttccctttagagtaggagccaagaacacatctgagtatcccccttctccagcccccaagcagatgaggatgctgtaggctggaggagaaaagct

SEQ ID NO: 351298 - DNA, 201 bp, Homo sapiens
ggagaagctgtgtagcacaaattgccccacgcgtctgtgttcccttgaggcaagggaccagcttattggaacctgtgccagccagtctttgcagggagcarcggggcagtcacttcccagtagaggcagctccatctctgggagccattagcacccatcagtgccagcagctgggggtggctgccctggcccagtggaagg

SEQ ID NO: 351299 - DNA, 201 bp, Homo sapiens
gagaagctgtgtagcacaaattgccccacgcgtctgtgttcccttgaggcaagggaccagcttattggaacctgtgccagccagtctttgcagggagcaayggggcagtcacttcccagtagaggcagctccatctctgggagccattagcacccatcagtgccagcagctgggggtggctgccctggcccagtggaagga

SEQ ID NO: 351300 - DNA, 201 bp, Homo sapiens
attttttctctcttctttttgtttgtaactttagtctttcatctttatcagttgtttttatacttattatacctgcaattttataagttgcctcaaattcktttttaaagcccttgagtccaaaataaaaataaatataaaccaaaagccatttttataattaaagtagtaccagagtcatcctccttaaaaatcaggtaa

SEQ ID NO: 351301 - DNA, 201 bp, Homo sapiens
gtgaggattaaatgagagcatttattaaattcatagtttgttaaatagagcattttctgcgagtgcagatgcgggcttgaacttctaggctgtcaggattragtttacaggagaggtccgtgtgaatcctgaagggtgagcaggagctttggtagtgagggagtgaggctgggaggagtgcaggtggaggaatgaacacag

SEQ ID NO: 351302 - DNA, 201 bp, Homo sapiens
atatagcagatataaagataacttttactgtaggactaaaggctacatagactatgtaaacccagccacattcagcaaagtgagagaagaactattaatgrgatcaaagcagttctagcacattaatttgcatgaaatcattctttgcatcagaattctttttagtatgacacttgtgtataaaataacattttgaccact

SEQ ID NO: 351303 - DNA, 201 bp, Homo sapiens
ccaatggggctgactccgaggcgggccttaggtctcgcaggttccgcccctgcgcgttcctttcggagcggcggtgaaggtcctgggtgaggtaggggtgkatggtgcttgccgcgtatcatggctgcctccggaaaactcagcacttgccgtctccctccgttgcccacgattcgagaaatcattaagttgttaagactg

SEQ ID NO: 351304 - DNA, 201 bp, Homo sapiens
tcacagtttattttttcgttcacatgttgatttttattatttttttcatttcttgacattacacataataccataatgaacatttttatacctatcgcccrtgtaagtatgtatgtacgctgtgctctaggatatgttcttagagacctagagggtcatgaggttttacacagcttcagctctactgtatattgccaaatt

SEQ ID NO: 351305 - DNA, 201 bp, Homo sapiens
tagagattcctgcagacatgaaacagactcctccagcaaaggaagcatggctcttggtttctctgtcccctcctaagcgagtacatttcattcctactgtrgaagtgcagatccccaaagcagacagaacacacgccaggaccatggtggctctcgcagcctgcacgtggatggggagggacagaatggagtgtttcaggg

SEQ ID NO: 351306 - DNA, 201 bp, Homo sapiens
gggcggcagagcaagaccctgtctcaaaaaattgaacaaataagtagctgttttaagatccttgcctgctaatttcattacctctatcatttctgtactcytttagtgattgatttccccttcttgctataggttgcatttttctgtttctttgaaagcctgataatttctgacaaaacatcaggtattgtgagagtttta

SEQ ID NO: 351307 - DNA, 201 bp, Homo sapiens
ttttattttttatttttattttttttgagatggagtctcgctctgtcacccaggctggagtgcagtggagcgatcttggctcactgcaagctccacctccygggttcacaccattctcctgcctcagcctcccgagtagctgggactacaggcgcccgccaccatgcccggctaattttttttttttttgtatttttagta

SEQ ID NO: 351308 - DNA, 201 bp, Homo sapiens
gttagtacttgttttacttcaggtgcctggtactcaaaacaattaagccactgttttttgtatataagaacatgaggtcctttctaattgggaccagaatmatttcctggcccaaatgaagccggctattctgaacaattcagaagtagtgatggcagatctcaaaaatacataccagaaataaccacatcattagttgta

SEQ ID NO: 351309 - DNA, 201 bp, Homo sapiens
gatatttaaagtagatgttttggccaggcgtgctggctcacacctgtaatctcaacactttgggaggctaaggtgggaggattgcttgagcccagagttcragaccagcctgggtaacatagctccctatgttaccttgtctctacaaaaaataaataaaaaattagccaggtccagtgctgcatgcctgtggtctcgact

SEQ ID NO: 351310 - DNA, 201 bp, Homo sapiens
ctgccactctctccagctgtcagtagccagcaactgtgttgtgttgttttcaaatgagggttaaaaagtgtcatgatttgcagaatttaagtaaaattctkatttttctgtctgtctgtcttcccctcagaatgttattccctgaagcgcagcgcttggaaagcacgggcaggctgttagagttggcagacatagacccta

SEQ ID NO: 351311 - DNA, 201 bp, Homo sapiens; identical to SEQ ID NO: 75024

SEQ ID NO: 351312 - DNA, 201 bp, Homo sapiens; identical to SEQ ID NO: 75026

SEQ ID NO: 351313 - DNA, 201 bp, Homo sapiens; identical to SEQ ID NO: 75028

SEQ ID NO: 351314 - DNA, 201 bp, Homo sapiens; identical to SEQ ID NO: 75030

SEQ ID NO: 351315 - DNA, 201 bp, Homo sapiens; identical to SEQ ID NO: 75031

SEQ ID NO: 351316 - DNA, 201 bp, Homo sapiens; identical to SEQ ID NO: 75036

SEQ ID NO: 351317 - DNA, 201 bp, Homo sapiens; identical to SEQ ID NO: 75037

SEQ ID NO: 351318 - DNA, 201 bp, Homo sapiens
tcttggctcactgcatcctcaacctcccaggctcaagtaatcctcagcctcctgagtagctgagactataggcatgtaccaccatgcccggctaatttttstattttttataggaaggtttcatcatgtttctcaggctggtctcaaactcctgggctcaagtgatctgcctgccttggcctctcaaattgctgtgattac

SEQ ID NO: 351319 - DNA, 201 bp, Homo sapiens; identical to SEQ ID NO: 75038

SEQ ID NO: 351320 - DNA, 201 bp, Homo sapiens
cttttcactgctaaggagtattgcacagtattgcacagtttgtttaaccattcacctgttgctgaatatctggactgattccaggtttggttatcacaaayaaatatgctaataacatatatgtacaggtttttgtataaacataaggtttctctttttttatttgtcagttctgctacggatttgtcaactttattgatc

SEQ ID NO: 351321 - DNA, 201 bp, Homo sapiens; identical to SEQ ID NO: 75023

SEQ ID NO: 351322 - DNA, 201 bp, Homo sapiens; identical to SEQ ID NO: 75025

SEQ ID NO: 351323 - DNA, 201 bp, Homo sapiens; identical to SEQ ID NO: 75027

SEQ ID NO: 351324 - DNA, 201 bp, Homo sapiens; identical to SEQ ID NO: 75029

SEQ ID NO: 351325 - DNA, 201 bp, Homo sapiens; identical to SEQ ID NO: 75032

SEQ ID NO: 351326 - DNA, 201 bp, Homo sapiens; identical to SEQ ID NO: 75033

SEQ ID NO: 351327 - DNA, 201 bp, Homo sapiens; identical to SEQ ID NO: 75034

SEQ ID NO: 351328 - DNA, 201 bp, Homo sapiens; identical to SEQ ID NO: 75035

SEQ ID NO: 351329 - DNA, 201 bp, Homo sapiens
ggtcatgaaatcaactatgtcagccacaaccagaatgtttctacaaagatatagaccaaactagaatccaaaatatcactgggcattgcaaatagcaagartatgtattatataatttttgttgcatttttatgtatatgtgtgcgtatccaattacctaaaattggatgatggttagaagtgctggaaaactctgttctt

SEQ ID NO: 351330 - DNA, 201 bp, Homo sapiens
tcctaatgaggcacttaaaatcttaccttttaagtatattgcttgattattgtgaattatgtttgcagtgtgacaaatatttttaaaaaacaaaggatttycatggagggaaatcaaatcaggaataaatgtatgggtgtgaaatcctttcattgctacaataataggataatttatgtaatacctcaagcatccaaatct

SEQ ID NO: 351331 - DNA, 201 bp, Homo sapiens
aagtaaatctttaattaataaaagtttttaaggccaggtgcagtggtttgtgcttgtaatcccaccactttgggaggcaaggcaggaggattgcttgaggscaggagtttgatagcagcctgggcagtacattgagatcccgcctctacaaaatcaaaaaattagccaggcaaggtggtgcgtgcctgtcgccccagctac

SEQ ID NO: 351332 - DNA, 201 bp, Homo sapiens
ttctcacaagcacaaggctcctgcactgcccttgtttactggtaaggacatctgaacaagcgagagggcaggtgccgatgcacacagcagtgagggaggarcaagagcaaaactctgttctctcgcagccattatgcactgccttctggtccaggccagaactaccacctcccacacagcccaagttaaaacagtcacccg

SEQ ID NO: 351333 - DNA, 201 bp, Homo sapiens
acaaaaatagctcttggtccattattctaatatttcttctgtttgaatctacagtccattgctttgggggtgttttatggttatgtttctcaaattattaktttttgcctctgagcttttttcccctgcaactgttcgctattctaacacatcaagcagtgtgaataggagaatggccagatccctgtccttaacaaccca

SEQ ID NO: 351334 - DNA, 201 bp, Homo sapiens
cttttttgttttgtttactgaccagtataattcaaaccagatctgcctatgacttcacatttttaataatatattgaagtgtttttcatgcatcttttgayctttgtattgttcttgggcaaatgagatgtgttttttttagagacaggctctctgaagcctctaacttctaggtagtcttcctgcctcagcctcctgagc

SEQ ID NO: 351335 - DNA, 201 bp, Homo sapiens
tgaccagtataattcaaaccagatctgcctatgacttcacatttttaataatatattgaagtgtttttcatgcatcttttgatctttgtattgttcttggscaaatgagatgtgttttttttagagacaggctctctgaagcctctaacttctaggtagtcttcctgcctcagcctcctgagcaccttggactacacatgt

SEQ ID NO: 351336 - DNA, 201 bp, Homo sapiens
tgtgatttcgtgtgtcccttgattcaaaataaagctttggaatcaggcaggcttagatatgagtctgtgactctaaacaagtaagtggcagtttcatcaawagaatggagatgttcacacctagcccatggagctgttttaagggtttaaatgaaatataaagtacttagcacaataaatgagcattattattattcttat

SEQ ID NO: 351337 - DNA, 201 bp, Homo sapiens
caggctggtctcaaactcctggcctcaagtgatccttctgcctcagcctcccaaagtattgggattacagatgtgaaccaccacacccggccggtcattayttttacatgtctaaatagtccttgggtctgggcatggtggctcatgcctgtaattgcagcactttgggaggccgaggcagaggattgggaggttcgggag

SEQ ID NO: 351338 - DNA, 201 bp, Homo sapiens
ttcttttccttccttccttccttcctctctctccctccctccttccttccttctctctttctctctttctctttctctttctctttctctctttctttctytttcctgcattttccatctatgttcctctaggattgatcttggagaaaggaggcagagataagagtcaaaccaattcaacataatggtccccaaataaat

SEQ ID NO: 351339 - DNA, 201 bp, Homo sapiens
aaagtttgtttcagaagtaacagaagttcttttggccaggagtctgtgattaggcctggctggacagggcttctctcgtaagttctttttcttctctatcycagccagcctgaaagggcaaaacaagacacaaatagttgcattttctccagtctgccttctctgagcgctcccagctaaatccttaatgtgttcagaccc

SEQ ID NO: 351340 - DNA, 201 bp, Homo sapiens
tcttttccttccttccttccttcctctctctccctccctccttccttccttctctctttctctctttctctttctctttctctttctctctttctttcttyttcctgcattttccatctatgttcctctaggattgatcttggagaaaggaggcagagataagagtcaaaccaattcaacataatggtccccaaataaatt

SEQ ID NO: 351341 - DNA, 201 bp, Homo sapiens
ctgcatactttaaaagagattgatttcagagtgtgtgatttcgtgtgtcccttgattcaaaataaagctttggaatcaggcaggcttagatatgagtctgwgactctaaacaagtaagtggcagtttcatcaatagaatggagatgttcacacctagcccatggagctgttttaagggtttaaatgaaatataaagtactt

SEQ ID NO: 351342 - DNA, 201 bp, Homo sapiens
tgttactaaacagcagagctagggaacacatgaagcaaaactgatataactgaaaggagaaatagaaaaatctaaaattatagttggagacctcaacactrctctttttttttttgagatagggtgtcactcctgtcacccaggctggagtgcagtggtgccgtctcagctcactacaatctctgcttcccgggttcaagg

SEQ ID NO: 351343 - DNA, 201 bp, Homo sapiens
gaaattccttctcttaccctctcgttttacagtaatgacccagtaagagaaatgacctgttgcatacaaaggctttcacttaccgaacatgtctttactgrgtaagaatcagtgtaactcactcaggtgtggtgtttcggttgccttgttaagatcagacacagttggcgggcgcggtggctcacgcctgtaatcccagca

SEQ ID NO: 351344 - DNA, 201 bp, Homo sapiens
ccggcggcctcacggacgaggccgccctcagttgctgctccgacgcggaccccagtaccaaggtgggcacaggaccgaagggaacggctcccccagctcckctgggccgggaccgggccgcattctatccaaccccatcccgccgccgctgcaggtccgccggcctcgggcggacgggagtgtgatgggaagagggataat

SEQ ID NO: 351345 - DNA, 201 bp, Homo sapiens
gtcctttctatagttgaaaacttaatatttttgtagcaggggttaggccaattatgtaaagtagcatataaacgtggtaagatttcaaagatgttacttgyttttcagaatatctattccctaggacattgtagctatgttttccttccttttgtagcaattggggcactgaagatgatgagacccagagttaccacaatg

SEQ ID NO: 351346 - DNA, 201 bp, Homo sapiens
ttgccttgttaagatcagacacagttggcgggcgcggtggctcacgcctgtaatcccagcactttgggaggccaaggcgggcggatcacgaggtcaagagrtagagaccatcctaacacggtgaaaccccgtctctactaaaaatacaaaaaaatgagctgggcgtggtggcgggtgcctgtagtcccagctactcgggag

SEQ ID NO: 351347 - DNA, 201 bp, Homo sapiens
gcactccagcctgggcgacagagtgagactccgtcacaaaaatatatatatatttaatatccaaatcttctccccaataagaaaggaatttgcttcactcygtcctcattgtgtcactattacctagagtgggatagtattgattttattttttaaagataataataaatatatcacggtgtttgatcactttttcttcat

SEQ ID NO: 351348 - DNA, 201 bp, Homo sapiens
ttctaggtagtcttcctgcctcagcctcctgagcaccttggactacacatgtgtgccaccacacccagctagtttttgtttgtttgtttttggtagaggcrtagaggcaaggtctcactatgttgcccaggctggtctcaaactcctggcctcaagtgatccgcccgcctcggcctcccagactgctgggattataagcat

SEQ ID NO: 351349 - DNA, 201 bp, Homo sapiens
cctaagaagtcactggatttttatactagagttcttggaatgacgtaagtcaagtacttattggcaccttaatgtttaaatatatagctttgcaaatctakagagtgttttcagacccatcttaaagtttgtttcagaagtaacagaagttcttttggccaggagtctgtgattaggcctggctggacagggcttctctcg

SEQ ID NO: 351350 - DNA, 201 bp, Homo sapiens
cacaggcacatgccaccacacccagctaattgttttatttttttgtagagatgagttcctgctatgttgcccaggtttgtctcaaactcctgagctcaagygattctttcaccttggcctcccaaagcactgggattacaggcgtgagccactatgcccagcctttttagcatcttttggatttttctgttcttttattta

SEQ ID NO: 351351 - DNA, 201 bp, Homo sapiens
ttttaagggtttaaatgaaatataaagtacttagcacaataaatgagcattattattattcttattattgttcttgtccagtacctgtatttactgtctcyttagtctcgttaaaatcatactttggccatttgtcctttctatagttgaaaacttaatatttttgtagcaggggttaggccaattatgtaaagtagcata

SEQ ID NO: 351352 - DNA, 201 bp, Homo sapiens
ctaggacattgtagctatgttttccttccttttgtagcaattggggcactgaagatgatgagacccagagttaccacaatggcaattcagaccctcgaggwttcggtaagtttgcctgtttttatgtgatatatgtagatttgtgtgattttgtattatgtatataattatgattttaataaacctaaaacattaatgtcc

SEQ ID NO: 351353 - DNA, 201 bp, Homo sapiens
aatactaaaaacaactttgtatacataaatttgacaacttgaattggaccaattcctcatccaatatgaactaatatgatgagtcctataacttaaggcarttgaatttatgattaacaaacttccaaagaagatttgtccagacccaggtgatttcactggagaattctgccaaatgtaaaagaagaattaacatcaatt

SEQ ID NO: 351354 - DNA, 201 bp, Homo sapiens
accccacacttccaacctccaccctgttctgcttctggggtgctgactccagcagtaattttggaatttgccataaaggaaaataaaaaacctcaatgaasgctgggtgcagtggctcatgcctgtaatcccagcactttgggagagcgaggtgggcagatcacctgaggttagcagttcgagaccagcctggccaacatg

SEQ ID NO: 351355 - DNA, 201 bp, Homo sapiens
gctagcacatacacttctgccttgatctccagtctctcaatcaagatgacagtattgcaggcttcagctggctgctatagtcaatgccaaccacaaacctrttaagtattagtaaatgattactgttttttggtgtcgattattcttaactgattagactgtatatgagctgatattgattaattttaaataatttataat

SEQ ID NO: 351356 - DNA, 201 bp, Homo sapiens; identical to SEQ ID NO: 75039

SEQ ID NO: 351357 - DNA, 201 bp, Homo sapiens
caaaaatagctcttggtccattattctaatatttcttctgtttgaatctacagtccattgctttgggggtgttttatggttatgtttctcaaattattatkttttgcctctgagcttttttcccctgcaactgttcgctattctaacacatcaagcagtgtgaataggagaatggccagatccctgtccttaacaacccac

SEQ ID NO: 351358 - DNA, 201 bp, Homo sapiens
ctatgtatctcaggctggtctcaaactcctggcctcaagtgatccttctgcctcagcctcccaaagtattgggattacagatgtgaaccaccacacccggscggtcattacttttacatgtctaaatagtccttgggtctgggcatggtggctcatgcctgtaattgcagcactttgggaggccgaggcagaggattggga

SEQ ID NO: 351359 - DNA, 201 bp, Homo sapiens
aggtcatatttttccatttaagcaaacagctctgacatactagactctcaatctcagttttgaattcctgggagaaagactctcgcagagcttgggttgcytaggatagtatttaaaagggtttgtatgacccaagcatctgggtcttttggttgtgggggtaagccatgctaccagctcccttcagcacctccctatttt

SEQ ID NO: 351360 - DNA, 201 bp, Homo sapiens
tcaccagccgggtttctttctttctttccttttcttttcttttcttttcttttccttttcttttccttccttccttccttcctctctctccctccctcctkccttccttctctctttctctctttctctttctctttctctttctctctttctttctttttcctgcattttccatctatgttcctctaggattgatcttgg

SEQ ID NO: 351361 - DNA, 201 bp, Homo sapiens
taccagctcccttcagcacctccctattttctttttcttctttaaaataagacaatttctgtaactactgaactggtagtgtggtatcatgaaggtgaggsaaatgcctgatacctaaaagatgcagccagtcccacagtttatttcaggagggctggtatttgcaatgtgtgcaagataacattttagtcattatgaaaa

SEQ ID NO: 351362 - DNA, 201 bp, Homo sapiens
gatttcaaagatgttacttgcttttcagaatatctattccctaggacattgtagctatgttttccttccttttgtagcaattggggcactgaagatgatgmgacccagagttaccacaatggcaattcagaccctcgaggattcggtaagtttgcctgtttttatgtgatatatgtagatttgtgtgattttgtattatgt

SEQ ID NO: 351363 - DNA, 201 bp, Homo sapiens
acagcagcacctaggttagtgtttgagagaataaggaaggacatctttagaatttagtccttgcttgcacctccctccagggactgcagtgctccctcctragactgagaaccagtgctgggaggacagatctcccccatgaggcctgccagctaaagtctgtgtgattgtgtgtggtcgggcctgacagatcatacataa

SEQ ID NO: 351364 - DNA, 201 bp, Homo sapiens
aatagctcttggtccattattctaatatttcttctgtttgaatctacagtccattgctttgggggtgttttatggttatgtttctcaaattattatttttygcctctgagcttttttcccctgcaactgttcgctattctaacacatcaagcagtgtgaataggagaatggccagatccctgtccttaacaacccacatga

SEQ ID NO: 351365 - DNA, 201 bp, Homo sapiens
gatcattttcttaaaaataagcccttcttgtttttatatccatttaacaatttgtagcaaaggatttataagcctctattttatcaataaattcactaacrttgaatatatcttactttttttgccacgtatagactttttaaagtgaattttaatattctttatgtgtatgtgtttaggcagatacagtacatagttctc

SEQ ID NO: 351366 - DNA, 201 bp, Homo sapiens
acaattgcccaataaaatgaaatacttagatataaatctaataaacatttacaggacacatatgctgaaaacagcaatggcgatgcaaaaagtcatagatytaaataaatggagagatttattgtgttcatgattggaagactcagcacagtaaggatatcaattctccccaaatcaatatacatgtttaacacactcctt

SEQ ID NO: 351367 - DNA, 201 bp, Homo sapiens
taatatttcttctgtttgaatctacagtccattgctttgggggtgttttatggttatgtttctcaaattattattttttgcctctgagcttttttcccctrcaactgttcgctattctaacacatcaagcagtgtgaataggagaatggccagatccctgtccttaacaacccacatgatctcaggacaatgggctggata

SEQ ID NO: 351368 - DNA, 201 bp, Homo sapiens
ggtcatatttttccatttaagcaaacagctctgacatactagactctcaatctcagttttgaattcctgggagaaagactctcgcagagcttgggttgccyaggatagtatttaaaagggtttgtatgacccaagcatctgggtcttttggttgtgggggtaagccatgctaccagctcccttcagcacctccctattttc

SEQ ID NO: 351369 - DNA, 201 bp, Homo sapiens
gatgcagccagtcccacagtttatttcaggagggctggtatttgcaatgtgtgcaagataacattttagtcattatgaaaagtatgacttttcatactttyctgacaataagaatttttaaaatttaaaactgtaaacaaaataatgtacttcattaaaatgcaaagtaaatctttaattaataaaagtttttaaggccag

SEQ ID NO: 351370 - DNA, 201 bp, Homo sapiens
acaattgtgtttgtatcttgttacagaaagcacaattaatgttggtaataaatggtaaaagtgaaagatgtttaatataaatatttttccataggattttytattgcagcagaccatgctacgagtgaaggatcctaagaagtcactggatttttatactagagttcttggaatgacgtaagtcaagtacttattggcacc

SEQ ID NO: 351371 - DNA, 201 bp, Homo sapiens
tataggttggaaaggaagaaatcaaactgtccttatttgaagatgacatgattgtctacatagggaataataagtaatttacagaaaactcccagaattcrtaaatgagttcagcaaggttgcagggtacaaaataaacatacagaaatcaatcgcgtttctatatactagcaaagaacacacaggcaccaaaaattaaaa

SEQ ID NO: 351372 - DNA, 201 bp, Homo sapiens
ggcaaagggcaaaagcagaactactgataagggtctatgttcagcagtgcacgtattgtcttgataaacatcttaaacaacagaaaacagggttcgagagyagagaagcggtctgaccacaaatttactagggtgaagttttttccccaccctagtaagcctgagggtactgcaggagacgagggcgtatctcagtcctta

SEQ ID NO: 351373 - DNA, 201 bp, Homo sapiens
tccctaaaatcgctgtttttctgttgtttttcaaggtgcgccgatttcatattgttcaaacacagttttacaatcaatttgtacagttaacacaattatckcagtggtcctgaggtgatgtacatcctcagcttacgaagataacaggattaagagattaaagacaggcataagaaattataaaagtattatttgggaact

SEQ ID NO: 351374 - DNA, 201 bp, Homo sapiens
taaaatcgctgtttttctgttgtttttcaaggtgcgccgatttcatattgttcaaacacagttttacaatcaatttgtacagttaacacaattatcgcagyggtcctgaggtgatgtacatcctcagcttacgaagataacaggattaagagattaaagacaggcataagaaattataaaagtattatttgggaactgata

SEQ ID NO: 351375 - DNA, 201 bp, Homo sapiens
atgactatatttagatttctctagactctagtggaagacctttggaaaggccatgccaaccgtgcttgtactgctagaagcactttatgtttcctttttgrgtgaaatggatttatgtgagtgctttaaacaaatagcaatacttatagactgaaataaaatgaaacttcaaataagactatgtttaatttgtaaaccttt

SEQ ID NO: 351376 - DNA, 201 bp, Homo sapiens
caaagctctctagtaatacttctagagaaataagtatcttcatcactagaagcaaatttgagattttgtagggagaaaacacaaagtcaaacaacgttttwatcattgttgtagctttttgaccagttttgattcatcctgaaaatagacatattgtaaccaaatacactcatatcccattgtgggaggcagttgtataaa

SEQ ID NO: 351377 - DNA, 201 bp, Homo sapiens
actttccatttgctatatggcaataacagccatttgctcttattgattatgaacaaagtcatctttgaataatctaaagaaaatcatatatgcattctcakgccaccttactccttgccaaataatcctataccatttaaagtcatttaaggttcaggacttcagttatctttcttaaaacctcaggattcataattcatt

SEQ ID NO: 351378 - DNA, 201 bp, Homo sapiens
tctttacattgtttatctgcatactttaaaagagattgatttcagagtgtgtgatttcgtgtgtcccttgattcaaaataaagctttggaatcaggcaggsttagatatgagtctgtgactctaaacaagtaagtggcagtttcatcaatagaatggagatgttcacacctagcccatggagctgttttaagggtttaaat

SEQ ID NO: 351379 - DNA, 201 bp, Homo sapiens
ttaaatgaaatataaagtacttagcacaataaatgagcattattattattcttattattgttcttgtccagtacctgtatttactgtctctttagtctcgktaaaatcatactttggccatttgtcctttctatagttgaaaacttaatatttttgtagcaggggttaggccaattatgtaaagtagcatataaacgtggt

SEQ ID NO: 351380 - DNA, 201 bp, Homo sapiens
ttccttttcttttcttttcttttcttttccttttcttttccttccttccttccttcctctctctccctccctccttccttccttctctctttctctctttytctttctctttctctttctctctttctttctttttcctgcattttccatctatgttcctctaggattgatcttggagaaaggaggcagagataagagtca

SEQ ID NO: 351381 - DNA, 201 bp, Homo sapiens
taccacacccagctaatttttctattttttgtagaaatggggtctcactatcttgcctaggctggtcttgaactctggggctcaagcaatccagccacctyggcctcccaaagtgctgggattacaagcatgagccaccaagcccagccaacgctcctctttcaacaattgatagaactagacagaaaattaacaaggaaa

SEQ ID NO: 351382 - DNA, 201 bp, Homo sapiens
gttaaaacagtcacccggccccatcctcacccattctccccagctgtcaccagccgggtttctttctttctttccttttcttttcttttcttttcttttccttttcttttccttccttccttccttcctctctctccctccctccttccttccttctctctttctctctttctctttctctttctctttctctctttcttt

SEQ ID NO: 351383 - DNA, 201 bp, Homo sapiens
tgcactgccttctggtccaggccagaactaccacctcccacacagcccaagttaaaacagtcacccggccccatcctcacccattctccccagctgtcacyagccgggtttctttctttctttccttttcttttcttttcttttcttttccttttcttttccttccttccttccttcctctctctccctccctccttcctt

SEQ ID NO: 351384 - DNA, 201 bp, Homo sapiens
gggctggggagatcattcggccctaccagtttttctcagtttctcacaagcacaaggctcctgcactgcccttgtttactggtaaggacatctgaacaagygagagggcaggtgccgatgcacacagcagtgagggaggagcaagagcaaaactctgttctctcgcagccattatgcactgccttctggtccaggccagaa

SEQ ID NO: 351385 - DNA, 201 bp, Homo sapiens
aaatagctcttggtccattattctaatatttcttctgtttgaatctacagtccattgctttgggggtgttttatggttatgtttctcaaattattattttttgcctctgagcttttttcccctgcaactgttcgctattctaacacatcaagcagtgtgaataggagaatggccagatccctgtccttaacaacccacatg

SEQ ID NO: 351386 - DNA, 201 bp, Homo sapiens
agctgggactacaggcaaatgccaccatgtatggctaattttttattttttgtagagacagggtcttactatgtatctcaggctggtctcaaactcctggsctcaagtgatccttctgcctcagcctcccaaagtattgggattacagatgtgaaccaccacacccggccggtcattacttttacatgtctaaatagtcct

SEQ ID NO: 351387 - DNA, 201 bp, Homo sapiens
gcggcgccatcgcgccattcctagttaaggcggcacagggccgaggcgtagtgtgggtgactcctccgttccttgggtcccgtcgtctgtgatactgcagygcagccatggcagaaccgcagcccccgtccggcggcctcacggacgaggccgccctcagttgctgctccgacgcggaccccagtaccaaggtgggcacag

SEQ ID NO: 351388 - DNA, 201 bp, Homo sapiens
gagtgcaatggcacggtcttggctcaccgcaacctctgcctcctgggttcaagtgattctcttgcctcagcctcccgagtagctgggattacaggcatgcrccaccgtgcctggctaattttgtatttttagtagagacggggtttctccatgttggtcaggctggtctcaaaatcccaacctcaggtgatccgcctgcct

SEQ ID NO: 351389 - DNA, 201 bp, Homo sapiens
ttttatttttatttatttatttatttattttttgagacagagtcttgctctgttgcccaggctggagtgcagtggcgcgatctcggctcactgcaagctcygcctcccggattcactccattctcctgcctcagcctcccaagtagctgggactacaggcgcccgccactacgcccagctaattttttgtattttttgtag

SEQ ID NO: 351390 - DNA, 201 bp, Homo sapiens
aataactgctctactccaactaaactccatagagaaaactgtggcctcagtcccacccatgccagcaaaagctgagtggggagcctagattttcacccaascagatgtaatgagctgcccagccttcccctgccaaggtgatgtgggggaaggctgggtagggagccaggactttcatcctgccaggctttcccctcttgc

SEQ ID NO: 351391 - DNA, 201 bp, Homo sapiens
ccttcttgtttttatatccatttaacaatttgtagcaaaggatttataagcctctattttatcaataaattcactaacattgaatatatcttactttttttgccacgtatagactttttaaagtgaattttaatattctttatgtgtatgtgtttaggcagatacagtacatagttctcttaataataaagttaaagtctg

SEQ ID NO: 351392 - DNA, 201 bp, Homo sapiens
cctatgccttgatagattgggtaggattccagcagagtacatgggaaggcattctgatgaaggaaacatcttagcaaaaatgtgttttgatacggggggarcccaccccaatatttcaacgtaggttctttctattttccataagtattggccagctgagaaataaagagtacaaagagaggaattttacagctgggctgc

SEQ ID NO: 351393 - DNA, 201 bp, Homo sapiens
acaagtaccataatttcagctaaatgttactatatttacagaattgatgaattacagaagttttcatttttgtatttcaaatatttacagatgcatttttmatgatattttttcactgatttttcctcctgcttattccattaaaataggcttactacatatagctcttctttttagtaaaacttgaatattaagttatgt

SEQ ID NO: 351394 - DNA, 201 bp, Homo sapiens
accataatttcagctaaatgttactatatttacagaattgatgaattacagaagttttcatttttgtatttcaaatatttacagatgcatttttaatgatwttttttcactgatttttcctcctgcttattccattaaaataggcttactacatatagctcttctttttagtaaaacttgaatattaagttatgttgatta

SEQ ID NO: 351395 - DNA, 201 bp, Homo sapiens
tttctatagttgaaaacttaatatttttgtagcaggggttaggccaattatgtaaagtagcatataaacgtggtaagatttcaaagatgttacttgctttkcagaatatctattccctaggacattgtagctatgttttccttccttttgtagcaattggggcactgaagatgatgagacccagagttaccacaatggcaa

SEQ ID NO: 351396 - DNA, 201 bp, Homo sapiens
tctcaggctggtctcaaactcctggcctcaagtgatccttctgcctcagcctcccaaagtattgggattacagatgtgaaccaccacacccggccggtcawtacttttacatgtctaaatagtccttgggtctgggcatggtggctcatgcctgtaattgcagcactttgggaggccgaggcagaggattgggaggttcgg

SEQ ID NO: 351397 - DNA, 201 bp, Homo sapiens
aattaaggactatcaggtgagacaagacatgagcatagcataagtcttactttttaaaacaggagatacatgtattttaaacgatattttagaaccataccaataaagcaataatttttaggaacttaactttttaaaacaggaactttttctcaagatcatgcaagtgttcacaagaggcacatggagttaacagactat

SEQ ID NO: 351398 - DNA, 201 bp, Homo sapiens
tcgcttgaagctcgggaggcggagcttgcagtgagccaagattgcgccactgcactccagcctgggtgacagagcgagactccatcttaaaaaaaaaaaaagttttcttacagtagttttcttaattaaatttggagaatgacacttcccctccccccgaaaaaaaccttattatttctattgtccaccttttgataaggc

SEQ ID NO: 351399 - DNA, 201 bp, Homo sapiens
agcataaagatatctcagagagctgctatgaggataaaatgacatgtattatgttctctaaactatgaagagtgatacaattcaaggttgtatttcagctktggggatcagggcacacatcaaaaagatggtggtgatgggcctatgccttgatagattgggtaggattccagcagagtacatgggaaggcattctgatga

SEQ ID NO: 351400 - DNA, 201 bp, Homo sapiens
caattatacacaaccccttccagaaaactgaagacgggagaacacttcccaattcatttgataaagctaatattaccctgataccaaaaacaaatgaagayagtacaagaaaactacagaccaatatctccaatgaatataaatgtaaaaacccttgacaaaatgttagtaaacagaattcaacagtatatatagaaagaa

SEQ ID NO: 351401 - DNA, 201 bp, Homo sapiens
tgagccgagatcgctccactgcactccagcctgggtgacagagctagactctgtctcaaaacaaaacaaaacaaaacaaatatatatatatatatatatakatatatagagagagagagagagagagagagagagctgaatgaaaatgaaaaagggatcatagctaaacagtgcaaagggggaaatgtatagcactgactg

SEQ ID NO: 351402 - DNA, 201 bp, Homo sapiens
acaaagatcacaaggcaaagggcaaaagcagaactactgataagggtctatgttcagcagtgcacgtattgtcttgataaacatcttaaacaacagaaaasagggttcgagagcagagaagcggtctgaccacaaatttactagggtgaagttttttccccaccctagtaagcctgagggtactgcaggagacgagggcgt

SEQ ID NO: 351403 - DNA, 201 bp, Homo sapiens
tctattttccataagtattggccagctgagaaataaagagtacaaagagaggaattttacagctgggctgccggggggtgacatcacatatcagtaggacygtgatgcccacctgagtcttagaccagcaagtttttattaagggtttcaaaaggggagggggtgtaagaacagggagtaggtacaaagatcacatgcttc

SEQ ID NO: 351404 - DNA, 201 bp, Homo sapiens
ttttagtagagacggggtttcaccatgttgatcagtctgtttctcgagctcctgacctcgtgatccgcccgtctcagccccccaaagtgctgggattacargcgtgagccactgcacctggccaagaatatgaattcttgaggactcttgatattccagttgttttccagaaagattgtaagataaggatatgatagacta

SEQ ID NO: 351405 - DNA, 201 bp, Homo sapiens
acttgaacccatgaggtggaggttgcagggagccgagatcatgccactgcattccagcttgggtgacagagtgagactttgtccaaaaaaaaaaaaaaaaaccctcaatgaattaaattcagtttgatcacttgatacatttatgctatatgtaaagaagatggtaagtactttggggatactgggataaacaagatgagg

SEQ ID NO: 351406 - DNA, 201 bp, Homo sapiens
attttatccttttttaaaaaaactgagcaacaaataatgttgggtgcagcttggttggaaatatattatctcataattccataggctagaggtccgacttrggtctgtcccactgtattgacaggactgtgttccttactcagaggctctggggaagaatctgcatctaaatccatttagattgttccctgaattcagttt

SEQ ID NO: 351407 - DNA, 201 bp, Homo sapiens
agagtcaacttgctctccgcgcagcgattggctggaagtcagcggtctcccgcccgcggcgccatcgcgccattcctagttaaggcggcacagggccgagkcgtagtgtgggtgactcctccgttccttgggtcccgtcgtctgtgatactgcagtgcagccatggcagaaccgcagcccccgtccggcggcctcacggac

SEQ ID NO: 351408 - DNA, 201 bp, Homo sapiens
tggcgggtgcctgtagtcccagctactcgggaggctgaggcaggagaatggcatgaacccgggaggcggagcttgcagtgagctgagatcgtgccactgcmctccagcctgggcgacagagtgagactctgtctaaaaaaaaaaaaaaaaaaaaattcaggcacagtaaccgctgtttattccagtgaagtcatcagtgtc

SEQ ID NO: 351409 - DNA, 201 bp, Homo sapiens
agtttctatatttatatatattatagattttttaaggtagtttttaaaaatcttttttgttttgtttactgaccagtataattcaaaccagatctgcctakgacttcacatttttaataatatattgaagtgtttttcatgcatcttttgatctttgtattgttcttgggcaaatgagatgtgttttttttagagacaggc

SEQ ID NO: 351410 - DNA, 201 bp, Homo sapiens
tactaaaaatacaaaaaaatgagctgggcgtggtggcgggtgcctgtagtcccagctactcgggaggctgaggcaggagaatggcatgaacccgggaggcrgagcttgcagtgagctgagatcgtgccactgcactccagcctgggcgacagagtgagactctgtctaaaaaaaaaaaaaaaaaaaaattcaggcacagta

SEQ ID NO: 351411 - DNA, 201 bp, Homo sapiens
ccgtctctactaaaaatacaaaaaaatgagctgggcgtggtggcgggtgcctgtagtcccagctactcgggaggctgaggcaggagaatggcatgaacccsggaggcggagcttgcagtgagctgagatcgtgccactgcactccagcctgggcgacagagtgagactctgtctaaaaaaaaaaaaaaaaaaaaattcagg

SEQ ID NO: 351412 - DNA, 201 bp, Homo sapiens
agcaaatctttgtcacccagtagccatccctgtaaaaccaaagatagtttaggcataaaagacaccttatttttattgttctaaatttaaagcatgataarggaaagacaaaattaaggactatcaggtgagacaagacatgagcatagcataagtcttactttttaaaacaggagatacatgtattttaaacgatatttt

SEQ ID NO: 351413 - DNA, 201 bp, Homo sapiens
tgaaaacagcaatggcgatgcaaaaagtcatagatctaaataaatggagagatttattgtgttcatgattggaagactcagcacagtaaggatatcaattmtccccaaatcaatatacatgtttaacacactccttatcaaacttttttagacagagacagggttattctagattgaaaggcaaaaaaactagaataacaa

SEQ ID NO: 351414 - DNA, 201 bp, Homo sapiens
cacacaggcaccaaaaattaaaaaatacattaccatttacaattgcccaataaaatgaaatacttagatataaatctaataaacatttacaggacacataygctgaaaacagcaatggcgatgcaaaaagtcatagatctaaataaatggagagatttattgtgttcatgattggaagactcagcacagtaaggatatcaa

SEQ ID NO: 351415 - DNA, 201 bp, Homo sapiens
agcctggttcagtatacaaaaatcagtcagtataatccaccatattaagagggtaaagaagaatcacatgatcatatcagttggtacagaaaaggcatttracaaaattcaacactcattcattattttttttaagttcagaaaaaaataggaatgggggcatttctttaacttgataaagagcttctcttgaaaagttag

SEQ ID NO: 351416 - DNA, 201 bp, Homo sapiens
gtgatttcgtgtgtcccttgattcaaaataaagctttggaatcaggcaggcttagatatgagtctgtgactctaaacaagtaagtggcagtttcatcaatrgaatggagatgttcacacctagcccatggagctgttttaagggtttaaatgaaatataaagtacttagcacaataaatgagcattattattattcttatt

SEQ ID NO: 351417 - DNA, 201 bp, Homo sapiens
atggccagatccctgtccttaacaacccacatgatctcaggacaatgggctggataagcctaggccagagattcctaggcacctagaaatgagacttaaayttatttcaccttccacaaaacacctcttcaggttggatcttcccacttcatccctcagggaagagtattagtaggagacacttccgatagtgttattccc

SEQ ID NO: 351418 - DNA, 201 bp, Homo sapiens
tcagtcttgaaaatactcttctattttctttttgcatatgatgttgctgttgaaaaatctgtcaattcatgttcctttgtatattcttctgttttattctrgaagctttttatattatttctttgtcactgcctgcattctgggagatttcctcaaactggaataccaattagctaattttctcccaaatgtatctgttct

SEQ ID NO: 351419 - DNA, 201 bp, Homo sapiens
gggaaactgagactcagagagattgaatggtatgtccaaaaccacagaactggtaggtggcacatcttcttactcccagcaaagtatcctttctactggtytcttattcattctggatcccaggtttcccagagctccacgttatctctatctgggaggtagtgaggacccaaggctcagaaaaaggggcacagaaggggc

SEQ ID NO: 351420 - DNA, 201 bp, Homo sapiens
agagagattgaatggtatgtccaaaaccacagaactggtaggtggcacatcttcttactcccagcaaagtatcctttctactggtttcttattcattctgkatcccaggtttcccagagctccacgttatctctatctgggaggtagtgaggacccaaggctcagaaaaaggggcacagaaggggcaacgttctgagcatt

SEQ ID NO: 351421 - DNA, 201 bp, Homo sapiens
ctgtgtggtactctgctcacataaaataagacactttatagtggtgaacagtagtcaaaacagatttctgagggtgccctctgagaatataaaatttaacytttagaattccttgaagattttgttagtgtatgtactatcactgtaattataaacccaacatagattctacagactaaccggcagcttaaaatttaaccc

SEQ ID NO: 351422 - DNA, 201 bp, Homo sapiens
gggattaagtcatatggccaaagcttgttgatggagtaggatgtgaaccccaggactgtctgactccaaatcatcacactgcatccaaaaaaccagagagrattctttttatatttactgaataagagtttttcatttactgcctgtttcccctgttagtatttaacctctatgaggacagcactttgtctttttcactgc

SEQ ID NO: 351423 - DNA, 201 bp, Homo sapiens
gagtgatggtggagacaatgtcctagtagggtgaccaaaatgcacacctcagtccaaattctcctctccttcagataaacccttctggattttttaatgctttttttttttttttttttttgtcactgatgttaccacagacaagacctatttatagtaagagtgaatgcatttctgaagtactgacctggaagagctacc

SEQ ID NO: 351424 - DNA, 201 bp, Homo sapiens
acttatcattctttcctgtccttttgtctccttgacctacagagaacggctgcctgccaacttctttaaattccagttccggaatgtggagtacagttccrggaggaacaagaccttcctctgctatgtggttgaagcacagggcaaggggggccaagtgcaggcatctcggggatacctagaggatgagcatgcggctgc

SEQ ID NO: 351425 - DNA, 201 bp, Homo sapiens
gctttccaacacagagggagggtaggtcaagaacagaattagactatgtttgttcagctgaacatgctttgggggtcccagagcaatggatcctgaagggwtaagtccactgatataacttacatttgtccagggctttataatcacaacatagtttcatgaacatgagaccattcaacactcagcacaaaggtaggagag

SEQ ID NO: 351426 - DNA, 201 bp, Homo sapiens
aatgcaatcattaatttaattaaaaagtgtttatgcttttgacctccattattacgaatttcagttcaccaataagtcaatagttgttacgcactctgctyccttctggatcttcattaaggctgctggccatgatactgagtcgctatttccagaatttaagtgtttcttcagctatgagaagggaaaaggaagtaaaaa

SEQ ID NO: 351427 - DNA, 201 bp, Homo sapiens
gattaaaaggtgctctagccagggcaaatcaggtaagtggtttccaaaactcacgttgatttaaaagttcttgcacccctccaaatttcttcttaaagagracagctatcccagcgcccatgcgacaatcctcactgatacagtgggctaaagagtctgttttcgggcatgcaaaaaggtctcctttcacataagtgatct

SEQ ID NO: 351428 - DNA, 201 bp, Homo sapiens
agccaatttgcaattgcatgctgggccaaattcacactggcctaaattcatactttcagctgagctatagggagctccagaaggaaaagagggaccacacrgcagctactgtttaagcttccaagctatttgagtagccatgaatacttgccagggttccacctgataatccatcatataggtggccctggattagacttg

SEQ ID NO: 351429 - DNA, 201 bp, Homo sapiens; identical to SEQ ID NO: 75055

SEQ ID NO: 351430 - DNA, 201 bp, Homo sapiens; identical to SEQ ID NO: 75059

SEQ ID NO: 351431 - DNA, 201 bp, Homo sapiens
cctgtccttttgtctccttgacctacagagaacggctgcctgccaacttctttaaattccagttccggaatgtggagtacagttccgggaggaacaagacsttcctctgctatgtggttgaagcacagggcaaggggggccaagtgcaggcatctcggggatacctagaggatgagcatgcggctgcccatgcagaggaag

SEQ ID NO: 351432 - DNA, 201 bp, Homo sapiens
gtaattttgaaattccccaaatggactggtatttaacttgttttaagccagacctgctttcatgttttcaaacaaatggctacactttgaaggagaccaayaattgctgtgtgaaaatacaatacgggaacattttccttatgttgagaagacctcagtagaattcatggaggatgtcgaatgcaggaatggggataatat

SEQ ID NO: 351433 - DNA, 201 bp, Homo sapiens
acatggaaacttgggtggatacattttggtgatgggtgggggtgagggaatcctgcagggaaataagtcaagtttactcatatctttggcatctgctgctyatccctaggcagccaaggccctgggataccagggattcccctgcagcccagggagtctgttgacttctttggggaaagagaagaggtggagacaggcaat

SEQ ID NO: 351434 - DNA, 201 bp, Homo sapiens
tgccaagactgtaatcttgcatggacatcatttttattgttttccttctcaagaacctgtaacaattctctactgcctcccgaatcaaggccaaactttcragaaccttcataatacttcctttactgtacctatccaattttagcagtcttataatgttctcagctgttttatttacatcttctctgtccagctgcaatc

SEQ ID NO: 351435 - DNA, 201 bp, Homo sapiens
aactggccctgaaaaaaaaaggaattggccccatcttaccaagtaatatatatatcgcccatctctcttcagaacagccacttctccagatttcttttctragaaaaagttatttaatagtagaaatgaaaaagaaaaccaaacactgatctctaaagattttaaaatgtttacagatctgagtttacctcagaactagaa

SEQ ID NO: 351436 - DNA, 201 bp, Homo sapiens
ggttctagaaacaagaacttatcattctttcctgtccttttgtctccttgacctacagagaacggctgcctgccaacttctttaaattccagttccggaaygtggagtacagttccgggaggaacaagaccttcctctgctatgtggttgaagcacagggcaaggggggccaagtgcaggcatctcggggatacctagagg

SEQ ID NO: 351437 - DNA, 201 bp, Homo sapiens
ggattcccctgcagcccagggagtctgttgacttctttggggaaagagaagaggtggagacaggcaatagtagaattaatggtgccataggtatctcttgsggcaggcagagagattacatttttaaaaaggaaaacattgaatctttctagctggtactcatctcctcctctcttgacatttttcatctctcctattaaa

SEQ ID NO: 351438 - DNA, 201 bp, Homo sapiens; identical to SEQ ID NO: 75054

SEQ ID NO: 351439 - DNA, 201 bp, Homo sapiens
gtggttcttaggctctctgtcagacaagacagggaatgaactgggggagggtttcttgaggacagcagctcagggtgtatgacgatccagcaacactagayttaggtaagaattcccctggctcatgcctgcttctggacacagcacgttttagtagagctctggggcacgagagctggttgtctccccagctttccaacc

SEQ ID NO: 351440 - DNA, 201 bp, Homo sapiens; identical to SEQ ID NO: 75056

SEQ ID NO: 351441 - DNA, 201 bp, Homo sapiens
ggtggttcttaggctctctgtcagacaagacagggaatgaactgggggagggtttcttgaggacagcagctcagggtgtatgacgatccagcaacactagrtttaggtaagaattcccctggctcatgcctgcttctggacacagcacgttttagtagagctctggggcacgagagctggttgtctccccagctttccaac

SEQ ID NO: 351442 - DNA, 201 bp, Homo sapiens
ctgctccctagaagagtgcagccttgggttaggctgtggaaattcaggatggttatattaggcgtcagggacagctacaaccctgcagcagtgagagtgcrccagtgggcccggcaggggtggtaggggacccagcagcaaattctcttggcttctcagggtgacaccttgggctctctaatcagggagaggtaggaggag

SEQ ID NO: 351443 - DNA, 201 bp, Homo sapiens
tcaccctagctgggcctgggaagtgtgagagggatgcacatttataatgcttcagagatgtttcatcaaaggtagctgtgcgcagccctgggaataggctraacttgaacttgggctctgaagacctgaactcaaagcccgtgtgatcttatacaaatcacttcacctttctcagccacaagtccctaacttgcaaaatga

SEQ ID NO: 351444 - DNA, 201 bp, Homo sapiens
ctcccgccctccagaggggtgtctggtgcccgagccctgttgtttgtgtaccttgtctcagtagtgaccagaggggcaggcaggcctgggctgtgtctctrgggcaacgtactgttggggtcccagctgtccctgcacataaagcaccgactccatcaatgcacccctgaggtatcctctttcagggagtgagaatttaaa

SEQ ID NO: 351445 - DNA, 201 bp, Homo sapiens
tgcgaagcccttttctttgtaatctgaacacaaaggattcaaactttcatcatcccaaaatgatagccaaagaaaagtcatcacattcccccaacatcccrataattaaaagagtaagcacatttttatagaattagtctagagcaaggatgacaaatgtcatattgccctttccacactgttatgggagaccttcaagaa

SEQ ID NO: 351446 - DNA, 201 bp, Homo sapiens
tttatatttactgaataagagtttttcatttactgcctgtttcccctgttagtatttaacctctatgaggacagcactttgtctttttcactgctttatcyttagcacctagctcctgataggtactcaatacgtatttgttgaataaatgaatgacctaatgaataagaaccttttgggtggttcttaggctctctgtca

SEQ ID NO: 351447 - DNA, 201 bp, Homo sapiens
ctgtgagtctacaaaattgcccaagatggccatgttgtctagttccctggagaaattccagacttctactacctctgttctcctggtttccccccaggacstagctatttcggtctgtgagaggcctaaagaatctcatctgacctttttgctccttctagaagaccaagaaacccattcagaaatcaagcaagtttagtc

SEQ ID NO: 351448 - DNA, 201 bp, Homo sapiens
tggggaggatctggagaacctggacgaccctgagaagctgaaagagctgattgagctgccgccctttgagattgtcacagggtaagcctcagatgtgggtyagggttctgctccctagaagagtgcagccttgggttaggctgtggaaattcaggatggttatattaggcgtcagggacagctacaaccctgcagcagtga

SEQ ID NO: 351449 - DNA, 201 bp, Homo sapiens
tgattctggtgccttctccaatcccagcctcagactctgggagacccttggccccctcccctcttcattggccaaggctgctcaaagccctggacacctcrcgtttatatcaacagagcagttgctagaggaagcagcctcccgccctccagaggggtgtctggtgcccgagccctgttgtttgtgtaccttgtctcagta

SEQ ID NO: 351450 - DNA, 201 bp, Homo sapiens
ttttccattcccccaccccagcacccgctgtcactcaattaaaaaaagatagagggagagagcctgggggaggggcaggaggccttggctataaagcctgyggctaagtggggaaagcacgaagcctggcctgctgggtccttttcccgtcatccccagccagatttagctgctgacagctgcttgggactctgccgccag

SEQ ID NO: 351451 - DNA, 201 bp, Homo sapiens
gttccaacatgctcaggcattgcctggaggaactgggacccaaagaaaagggtctacagactgcaaggagggggctgtgtgcagggtacctctgtcttatscagattatgccatctccaggaataaaactaagtagtcttcttcctcttccctttctattcctgtagtggaagacccttctaaatcctgagcaaagaataa

SEQ ID NO: 351452 - DNA, 201 bp, Homo sapiens; identical to SEQ ID NO: 75062

SEQ ID NO: 351453 - DNA, 201 bp, Homo sapiens
ccagactggtttcgaactcctgacctcaggtgatccgcccgccttggcctcccaaagtgctgggattacaggcgtgagtcaccgctcctggccagatgtctttttttttttttgagatagagtcttgctctgtcacccaggctggagtgcagtggtgtgatctcagctcactgcaacctccgcctcccaggttcaggctat

SEQ ID NO: 351454 - DNA, 201 bp, Homo sapiens
agtggcttttaacctattcaccacaaacaattttggaacatcaccccagaagaaaactccaacccactggcagtcattccccattcttctctatcctccascccctggcaactggtaatctactgtctgtctctatggatttgcctattctgtacattttacataaatcatctggcatggggccttttgtgccttattcct

SEQ ID NO: 351455 - DNA, 201 bp, Homo sapiens
cggtgcttaggggagtgagctgcaggagttccaggtcagcagccgtgccaggtgtttgttgctgggcccttaagagtagcacactcccactgtccctgccrtcgtccaggcacctgcttcagctttacacgcacacccctttcccacaggctcagatttgctcaatttggtttgtacctgaggtctcatgtttctgggtgg

SEQ ID NO: 351456 - DNA, 201 bp, Homo sapiens
cagtgtggtggcaaatgcctgtaatcccacttgggaggctgacgcaggagaatcgcttgagctggagaggcagaggttgcagtaagccaaaaccgtaccaytgcactccagcccgggcaacaagagcaaaattccatctcaataataataataataatgtagtgagacaagaatgggcagctccccaacagaaaagatttt

SEQ ID NO: 351457 - DNA, 201 bp, Homo sapiens
aatttttaacaaggtaaattaacaaatggcagtagaactatggcaaagcatggtctccatgggtcaaaatggtacctggcactacctcaatatatcactgktttttttttgtcctgagacggagtctcactctgtcacccaggctggagtgcagtggcacgatctcagctcactgcaacctctgcctcctgggttcaagca

SEQ ID NO: 351458 - DNA, 201 bp, Homo sapiens
caagaccagactgaccaacatagagaaaccccatctctactaaaatacaaaattagcccagtgtggtggcaaatgcctgtaatcccacttgggaggctgasgcaggagaatcgcttgagctggagaggcagaggttgcagtaagccaaaaccgtaccattgcactccagcccgggcaacaagagcaaaattccatctcaat

SEQ ID NO: 351459 - DNA, 201 bp, Homo sapiens
gatcctaacttcctgttacgttctatattgacggtcatgttcttttttcctgaggacttcagctggttcaaggtatggctagacagcaaaaggcatggcaycctcccctgctgaggcttccctgtggttgggggactctgatggtgggcagtgtttactccaggccaccccagaaggccatgcagtcagggcctccctcac

SEQ ID NO: 351460 - DNA, 201 bp, Homo sapiens
acctgcccgccaacgtcagcttcgtgctggtgcccttcaaggtcctggaccttctgtggatcgccagcgccttgtccacggggcagatccgattgtgagcytcttgctggcctgggtagaatatgggtgacaggaccatcttgggcagagtcttctaggggccagattgtaggattcctttcattgaacattttggccaag

SEQ ID NO: 351461 - DNA, 201 bp, Homo sapiens
cttccacctctcgggttcaagcgattctcctgtgtcagcttcccgagtagctggattaccattttacattctaacgttcaatttttaacaaggtaaattawcaaatggcagtagaactatggcaaagcatggtctccatgggtcaaaatggtacctggcactacctcaatatatcactgttttttttttgtcctgagacgg

SEQ ID NO: 351462 - DNA, 201 bp, Homo sapiens
gagtcctgctctgttgcccaggccggagtgcagtggcatgatctcggctcactgcaagctctgcctcccgggttcacgccattctcctgcctcagcctccygagtagctgggaccacaggcgcccgccaccatgcctggctaatttttttgtgtttttagtagagacggggtttcaccatgttagccaggatggtcttgat

SEQ ID NO: 351463 - DNA, 201 bp, Homo sapiens
cccttcaaggtcctggaccttctgtggatcgccagcgccttgtccacggggcagatccgattgtgagcttcttgctggcctgggtagaatatgggtgacargaccatcttgggcagagtcttctaggggccagattgtaggattcctttcattgaacattttggccaagaggggctggtgagaagggagggcctaagttgg

SEQ ID NO: 351464 - DNA, 201 bp, Homo sapiens; identical to SEQ ID NO: 75060

SEQ ID NO: 351465 - DNA, 201 bp, Homo sapiens
cgggtggatcacctgaggtcaggagttaaagaccagcctggccaacatggtgaaaccccatctctactaaaaatacaaaaaattagctgggtgtggtggcrcatgcctgtaatcccagctactcaggaggctgagacaggagaatcgtttgaacccaggaggcggaggctgcagtgagccaagatcacgccactgcactcc

SEQ ID NO: 351466 - DNA, 201 bp, Homo sapiens
cggggacagaggttgcagtgaaccgagatcatgccatttcactctagcttgggtgaaagagcaaaacttcatctcaaaaaaaaaaaaaaaaaaaagggaaggggggggtcaaatggtcagttgtggtgtccctaccccactgataacataggagccctttggagggatttgcctggtacaaagtaggcctccatacctgca

SEQ ID NO: 351467 - DNA, 201 bp, Homo sapiens
gtgtgagcctgtagtcctagctaattgggaggctaaggcaggaggatcgtgtgagcccaagagtttgaggctgtggtgagctatgatggcaccactgcackccagcctgggcaacagagcaagaccctatctcaaaaacaaaaacaacagatggcactgggggtgactccaattgtagacatatccaagtttggaaccaat

SEQ ID NO: 351468 - DNA, 201 bp, Homo sapiens
atgtctcggaggcattcagcattccatgtaagaccttcctcatgttgggaaatggtgcaagtgggagggtgagcaggttggagtggaccctgtccaggacmccggagccacctgagggtatccatatcctccaactgctgataccccaatgggagggagatgggatgggagctggtcttagaggggcctctcccctcccca

SEQ ID NO: 351469 - DNA, 201 bp, Homo sapiens
gggtttcaccatgttggccaggctggtcgtgaactcctgacctcagctgatccacctgcctccgcctcccaaagtactgggattacaggtgtgtgccaccrtgcccagcctcaagccaacctttcgccttagcgtcttgactttctgggaccacaggcatgcgctaccacgcttaatttttttattttttattatagagac

SEQ ID NO: 351470 - DNA, 201 bp, Homo sapiens
ctcccgggttcaagcgattctcccacctcaccctcctgagtagctgggattacagacatccgccaccacacccagctaattttgtattttcagtagagacrgggtttctccatgttggtcaggctgctctcgaactcccaacctcaggtgatccgcctgcctcagcctcctgaagtgctgggattacaggtgtgagccacc

SEQ ID NO: 351471 - DNA, 201 bp, Homo sapiens
gcctgagtccctagggtagcactgaggggtctgtgccagaggctgataccagggtgttgcagtgcgggtgacttcagttaaccaagcagggtggtgaagcrgcccattctcagacaggtcaaggacaggcctcgctgcttttgagttgttggggagggaggggctttcggtaactggccacctgcgcccacccccacccct

SEQ ID NO: 351472 - DNA, 201 bp, Homo sapiens
tgtgatgaggtgggtaggcccgtggtgtgggtggtgggaacccatggaacagaggagtgcaggccttctcgggtcttagcaggctaacagaggaatgtgcktctgtaggcagaatccatgtggccttggtttcccccatctctaggctgtaaagtatagatatgcctttcccaaacgtttctgctttcatgattctaccaa

SEQ ID NO: 351473 - DNA, 201 bp, Homo sapiens
gccctggataaagaggcctgtgcccagacacaggatagtgagggcagaggaggggaggccggggcccctccttcttcacacacctctccccttcctcgttwcccatcttcccctcccttccacagatgctgcagccccagttcaagtcacacaacaccaatgaggtgctggagaagctgttccagatagtgcctggcgaga

SEQ ID NO: 351474 - DNA, 201 bp, Homo sapiens
tgggctggccgagggcccaggagcatcagggcaggtctgtttggctgtcctcaagggaaagcagcttgttattctcagggggcatgagggtgcagctgatwttcacagtctagggcttggtctggttgaatgcatataggattcttgctgccttagctacccacagggttttggtgctgtgtgacccggggcaagtcatta

SEQ ID NO: 351475 - DNA, 201 bp, Homo sapiens
tatccacgacaggtggacagagcatcacgggcggtacccttccacggggatgctggtgcttttctttgccctgcatgtgtgtgatgaggtgggtaggcccrtggtgtgggtggtgggaacccatggaacagaggagtgcaggccttctcgggtcttagcaggctaacagaggaatgtgcttctgtaggcagaatccatgtg

SEQ ID NO: 351476 - DNA, 201 bp, Homo sapiens
ggctggtctcgaactcctgacctcaggtgctccgcccgcctcagcttcccactgttgggattagaggcgtgagctactccgcccagctagatgtagtcttwtttattttattttattttattttattttattttattttgagacgaggtttccctcttgttgcccaggctggagtgcaatggcgagatctcggctcactgc

SEQ ID NO: 351477 - DNA, 201 bp, Homo sapiens
ctgtaagtcaggtttccccaacctttgttcctacccaagttcagttaaacacaaagcaccagcgatttgatgcaggcagtgaattggaacctgagtttcarggggaagtgaaagtttctgtgggcctgtgtggagtccctaggctacacaagaaaagatggcagcaaccaaagggaatgaggctgtgtgggaaagtaaagg

SEQ ID NO: 351478 - DNA, 201 bp, Homo sapiens
agatggagtctcgttctgttgccaggctggagtacagtggtgtgatctcggctcactgcaacctctgactcctgggttcaagcgactctcatgcctcagcstcccgagtagctgggattacaggcacgcaccaccacagccagctaatttttgtattgttactagagacggggttttgccatgttggccaggctggtctcg

SEQ ID NO: 351479 - DNA, 201 bp, Homo sapiens
agagagtggccgctggtagacagccaacagtgtctgctacagacggcaaaacacagagacaaaaaaaaaaaaaaaaaacaggatctaaatgggcttttaatttttttttttaagagaaaactagaattgttgaccacattaccaaggaagaataagaatagagaattttattgttaagccacaccaaatttctgccttgtt

SEQ ID NO: 351480 - DNA, 201 bp, Homo sapiens
catttataaggcagatacagacccaggtagggttactgaggaacccagagatacactgtgggtcacacagtggccctgggactcctgattccagtgccaayggagtggctgctaaaccagttgctgctaatagcctgaattatggctgctgttcattgagtgcttgctgccagccaggcatggtgctagatgctctcaggt

SEQ ID NO: 351481 - DNA, 201 bp, Homo sapiens
gctgggattataggtatctgccaccatgcccggctgatttttgtatttgtagtagagatggggtttcttcatgttggccaggctggtctcgaactcctgayctcaggtgctccgcccgcctcagcttcccactgttgggattagaggcgtgagctactccgcccagctagatgtagtcttttttattttattttattttat

SEQ ID NO: 351482 - DNA, 201 bp, Homo sapiens; identical to SEQ ID NO: 75061

SEQ ID NO: 351483 - DNA, 201 bp, Homo sapiens
gtggcttttaacctattcaccacaaacaattttggaacatcaccccagaagaaaactccaacccactggcagtcattccccattcttctctatcctccagsccctggcaactggtaatctactgtctgtctctatggatttgcctattctgtacattttacataaatcatctggcatggggccttttgtgccttattcctt

SEQ ID NO: 351484 - DNA, 201 bp, Homo sapiens
gcggaggattgagtcaaaggtggtgttggagaaaggggctagagaggtgctgggggcaggcagggacctggggcctcttttcagtcaaagcctccgggggrgtacagggcactctgggacctctggccagtaacacactcccgcctcgtctttgggacggatgtttggaagctggttggccaccccttccttgcctggtgg

SEQ ID NO: 351485 - DNA, 201 bp, Homo sapiens; identical to SEQ ID NO: 75063

SEQ ID NO: 351486 - DNA, 201 bp, Homo sapiens
cagtgctggcccagcctgtgtgcctggtcctgtagctcaggtgttccatttcccctgcagaacctcagggtccccatctgccgagatgcctgaccctagcrggtgccacacgattcaggagacacagacgcacaggtctctgacaggcatagacaagtagaagctgctcagtctagcctgaatctctgcccctaaacccct

SEQ ID NO: 351487 - DNA, 201 bp, Homo sapiens
agaacccgttccaccagtggccagggctgccttgcaatgaagagcagggctgaggcccggcaagtgcttcactgagtggtgctgatcaaagtactccattaaaaaaaaaaaaaaaaaaaaggaggaatttgcaagggctgcaaagggaaggtggtgtccccatgtgagtccatgtccttaggccaggcctgggggctcctg

SEQ ID NO: 351488 - DNA, 201 bp, Homo sapiens
agccaccgcacccggcctgtttgtttgtttttgagcctgagtcttgctctgttgcccagcatgtagtgcaatggcatgatcttggctcactgcaacctctrcctcctgggttcaagcgattctcgtgcctcagcctcccgagtagctgggactacaggcatgggccaccatacccggctaatttttgtatttttagtacag

SEQ ID NO: 351489 - DNA, 201 bp, Homo sapiens
gaggcaggcagattacctgaggtcgggagttcgagactagcctggacaacattgtgaaaccctgtctctactaaaaatacaaaaattagctgggcgtggtkgtgggtaactataatcccagctactcgggaggctgaggttgcctgaacccaggaggcggaggttgcagtgagccaagatcatgccattgcacttcagcct

SEQ ID NO: 351490 - DNA, 201 bp, Homo sapiens; identical to SEQ ID NO: 75064

SEQ ID NO: 351491 - DNA, 201 bp, Homo sapiens
cgtctgctggtctgaggaactggatggcagtggataagctgggcttgttggtgtgagcctgtagtcctagctaattgggaggctaaggcaggaggatcgtktgagcccaagagtttgaggctgtggtgagctatgatggcaccactgcactccagcctgggcaacagagcaagaccctatctcaaaaacaaaaacaacaga

SEQ ID NO: 351492 - DNA, 201 bp, Homo sapiens
agacggagtctcgctctgtcgcccaggctggaatgcagtggtgcgatcttggctcactgaaacctccgcctcctggattcgagtgattcttctgcctcagsctcctgagtagctgggactacagacatgcgccaccaggcctggctaatttttgtttttagtagagttggggttttgccatgttggccaggctggtctcga

SEQ ID NO: 351493 - DNA, 201 bp, Homo sapiens
ctgtaaagcggggataataatattaatctacctttagggttcccatgttaaatgagaacatatatgtaaatgcatagcacacacagtgcctggaacataawgttagagttcagtgaatattatatacttctgtagccattattattacctttatttatttatccttttttttttttttttggagacactctcactcactct

SEQ ID NO: 351494 - DNA, 201 bp, Homo sapiens
ctggtaaaatgaatattctcctgtagcactgatgggaggctacatgggtttacctttcttggaaaggaatgggcagttttaagaactttaaaaagtgttcrtatcctttggaggaatactcaagaaaggcatgcagatgtatatgttcacggtaatttccccagagcgaacaattgcaagcagtctattcgacaatgaaag

SEQ ID NO: 351495 - DNA, 201 bp, Homo sapiens
tgaagagacacagctcctgtgcagatgtgcacgaagggacccattattcttgtcttttctgtctcttccctcacagagagtggtttttcctcctgtctcaygaggtgctcaaccctatgtattgtttatttgaatatgccggaaagaacaattactgcctgcagatcaaccccgcctcctccatcaacccggaccacctca

SEQ ID NO: 351496 - DNA, 201 bp, Homo sapiens
aggaggctgagccaggaggatcgtttgagcctaggaggcagatgttgcagtgagctgagatggcaccactacactccagcctgggcaacagagtgagaccytgtgtcaaaaaaaaaaaaattacagcaaaagtatatatctcataagttgtcataaggcataaattacagacacaccttcaagatattatgggtttgtttc

SEQ ID NO: 351497 - DNA, 201 bp, Homo sapiens
tttccagactatcacaataaagtgaatatcacaaaaaagcaagtcacatgaattttttggtttcccagtgcatataaaagttatgtttacactatactatrgtccataaaaggtacaacagcattatgtctaaaaaatgtatacactttaattaaaaaatactttattgctaaaaatgctaacaattatctgagcctttag

SEQ ID NO: 351498 - DNA, 201 bp, Homo sapiens
agagtttgaggctgcaatgagctatgatcgtgccactccagcctgggcagcagagtgtgaccctgtctctaaacaaacaagtgaatgacaacaacaaaaastgtcaacatatgcattgactaaaagttgtttaatgccccttgacttttattgccaagggaatcatctttctagctatagagaaaattgctttggataagt

SEQ ID NO: 351499 - DNA, 201 bp, Homo sapiens
gggcaaggggagaatctggggagaggggatgtggtgtttgtgtgtgtgttggggggtggtggctggccacgggcagggaggtggcagttcatgcaaagtgrtcccagctgcccctagcttagggctgatcccgccctgcccagcccatcattcagggtaagccgctatcattagtggttaagtgtttctgaaagtattctc

SEQ ID NO: 351500 - DNA, 201 bp, Homo sapiens
gctctattgcccaggatagagtgtagtggtgtgagtgtgatcacagctcactgcggcctcgacctccccagctcaaatgattctcccacctcagcctcccrcatagctgggatcacaggcacttgccactatacctggctaatttaaaataattttttatggagacgaggtctccctgtgctgccaggctgggtttgcact

SEQ ID NO: 351501 - DNA, 201 bp, Homo sapiens
cccaaagaccagtcatgttttccgtgtctcggtaggtgacttacaatagttgggtctcacggggtgatgaatgacagtgtaactggcaaatcttgtgtcarcaaagccatgatgggcacctggaactggaggaaacaatttcttaagctagaacagcggtgggcgaggaatacttgagcatttcactcttttagagaggaa

SEQ ID NO: 351502 - DNA, 201 bp, Homo sapiens
catcccccaccagagtggtacatttgttagaatgatgagcctgcattgacacatcattgtcactcaaagtccaaaatgtatattaggtttcactctttaattttttttttttttttttggacagagtctcgctctgtcattccactggctggagtgcagtggctcaatctcagcttactgcaacctctgcctcccaggttc

SEQ ID NO: 351503 - DNA, 201 bp, Homo sapiens
tcagcttactgcaacctctgcctcccaggttcaagtgagtctcatgcctcagcctcctgagtagctgggattacaagcattcaccaccatgcccagctaattttttttttttgtatttttagtagagatgaggtttccccatgttggccaggctggtcttgaactcctggactcaagtgatccgcgtgccttggccctcac

SEQ ID NO: 351504 - DNA, 201 bp, Homo sapiens
aaatttttgatgaagccacaaaatgctttttaaaaaaaggtttcacattttatttatttatttatttatttatttatttatttatttatttatttatggasacggagtcttcctacattgcctgggccagtctcaattgatcctcctgcctcagcctcccaaagtgctgggattacaggcatgagccactgcacctagcct

SEQ ID NO: 351505 - DNA, 201 bp, Homo sapiens; identical to SEQ ID NO: 351494

SEQ ID NO: 351506 - DNA, 201 bp, Homo sapiens
ggcagagccgagcctggctgtctcagccatcaccctgcatttgtctgggtgctattttggcccacgatgtgtggtttcagcatctgggccagcttttcatyacaatatgatcccatcttttatgggttgagtgagttctccaagagaggaaactgccaaagagaggagttgcctcagatgttgaggccttttcttccttta

SEQ ID NO: 351507 - DNA, 201 bp, Homo sapiens
cctcctcccagcaccccatctcctatcgcgtggcctgttaaacccacactgcagactttccagggcgtgggtcttggtgactgtgtctgctggatattggsccttagagtcccctgtccctcccgcccctgcctgctgtggaagggagagtggcaggctggcccgatgctctgtcttcccagatcatgaacatgaaaccct

SEQ ID NO: 351508 - DNA, 201 bp, Homo sapiens
ggaatggagccgtaaattgcgcttgcagtgaccagaaggggcccattttaactctaattgtgcctttcccggttcacttctccttttacccgccctctcctttttttttttttttctaatccacatttgagtggggaggaagaattgaggggggtgcaggtgggagtaggtttatttattggcgcttctctgggtggtgga

SEQ ID NO: 351509 - DNA, 201 bp, Homo sapiens
acagagagtggtttttcctcctgtctcacgaggtgctcaaccctatgtattgtttatttgaatatgccggaaagaacaattactgcctgcagatcaacccygcctcctccatcaacccggaccacctcacctactttcgctttataggcagattcatcgccatggtaagggggccccaggggtctgcctagttccctcctc

SEQ ID NO: 351510 - DNA, 201 bp, Homo sapiens
tgatagatatgtaatgatatctcattgtagttttaatttgcacttcccgaagaacttatgatgttgagcatctttttttgtgcttattttccctctgtagrtcttctttggtgatgtgtctgttcaaatcttttttttagtcggggtttggctctgtcgtgtaggctggagtgcagtggcgtgatctcggctcactgtaac

SEQ ID NO: 351511 - DNA, 201 bp, Homo sapiens
gtcctgtcatttttttggacagtgtctttagaagagcaggagtttaaaatttttgatgaagccacaaaatgctttttaaaaaaaggtttcacattttatttatttatttatttatttatttatttatttatttatttatttatggagacggagtcttcctacattgcctgggccagtctcaattgatcctcctgcctcagc

SEQ ID NO: 351512 - DNA, 201 bp, Homo sapiens
tcctgtcatttttttggacagtgtctttagaagagcaggagtttaaaatttttgatgaagccacaaaatgctttttaaaaaaaggtttcacattttatttatttatttatttatttatttatttatttatttatttatttatggagacggagtcttcctacattgcctgggccagtctcaattgatcctcctgcctcagcc

SEQ ID NO: 351513 - DNA, 201 bp, Homo sapiens
ggcatccagacctccccagcctagttccacaaggtaccaacttccgtaagccttgaagagctaagtaagtcatccgggccgggtgtggtggctcatgcctstaatcccagcactttggaaggccaaggcgggcagatcacttgaggtcaggagttcaaaaccagtctggccaacatggtgaaacgccatctctactaaaaa

SEQ ID NO: 351514 - DNA, 201 bp, Homo sapiens
cctgtcatttttttggacagtgtctttagaagagcaggagtttaaaatttttgatgaagccacaaaatgctttttaaaaaaaggtttcacattttatttatttatttatttatttatttatttatttatttatttatttatggagacggagtcttcctacattgcctgggccagtctcaattgatcctcctgcctcagcct

SEQ ID NO: 351515 - DNA, 201 bp, Homo sapiens
ctgtcatttttttggacagtgtctttagaagagcaggagtttaaaatttttgatgaagccacaaaatgctttttaaaaaaaggtttcacattttatttatttatttatttatttatttatttatttatttatttatttatggagacggagtcttcctacattgcctgggccagtctcaattgatcctcctgcctcagcctc

SEQ ID NO: 351516 - DNA, 201 bp, Homo sapiens
tgtcatttttttggacagtgtctttagaagagcaggagtttaaaatttttgatgaagccacaaaatgctttttaaaaaaaggtttcacattttatttattwatttatttatttatttatttatttatttatttatttatggagacggagtcttcctacattgcctgggccagtctcaattgatcctcctgcctcagcctcc

SEQ ID NO: 351517 - DNA, 201 bp, Homo sapiens
acacccagagcctatctgcaggagggtctggaagtcttctaggccctgcagtgcgtcagggcgggcatatgggatagaagagggtgggaatgtctgatacrgtggggctgagaccagactcagggactgacgaagaggactgttgcaggaactggtgaggttacaattgatgactagccttgggcagtagcgaatagagag

SEQ ID NO: 351518 - DNA, 201 bp, Homo sapiens
gcctgaccaacatggagaaaccccgtctctattaaaaatacacaattagctgggcgtggtggtgcatgcctgtaatcccagctcctggggaggctgaggcrggagaatcgcttgaacctgggaggcaggaggttgcagtgagccgagatcgtgccattgcactccatcctgggcaacaagagcgaaactccatctcaaaaa

SEQ ID NO: 351519 - DNA, 201 bp, Homo sapiens
tgagccaccgcgcccagcctaagttttgtatttttagtagagacggggtttcaccatgttgaccacactggtcttgaactcctgacctcaggtgattcacytgcctcggcctcccaaagtgctgggattataggtgtgaaccactgcgcccagcctaaagaacctgttttgtaaatgatattgttatacaaatgtcaggtg

SEQ ID NO: 351520 - DNA, 201 bp, Homo sapiens
ataaaaattaaatctgacagcaaagaccttggatgataagaagacagcccctgtaagccaaagggaagttcaagtttggttatatggtgagtggagattayaagcatggacctgtgaatcagacagctctgggtttgaatccccccaccatgtgaccttggccgaatgacttagcctcttgataaggtggagataatcatc

SEQ ID NO: 351521 - DNA, 201 bp, Homo sapiens
tgcaaaaactgttaaacagaagagctactatgggtgaaccaggttgactcagaggctcttggttaggcctgtggacatgtacagccctggagggaaccttyctaactagatttgcagctgcataaacagtcagatccgagtagtgttgattggagggtcttctgccctggcatgccatgggggctctgcttttgttctttt

SEQ ID NO: 351522 - DNA, 201 bp, Homo sapiens
aggaaggtttgaaggggctagtgagatagtggttcaggccgtgggcaatgggaagcgaggctgctttggtctgcaggccctgtatctgttttttctcagcrctcagcccactttggggacccagtgctcattatcaatgagccaactgtgtgtacatggcttagataaactccaagtgtgtcccttacagtctttgcagct

SEQ ID NO: 351523 - DNA, 201 bp, Homo sapiens
cgtgccaccatgtctgcctaattttttgtatttttagtagagacggggtttcaccatgttggccagggtggtctcgaactcttgacctcaggtgatctgcycgccttggcctcccaaagtgctggaattacaggcgtgagtcaccgtgcctggctagtgttgccaacctctattgaggagctttggtaaagataaaaaaga

SEQ ID NO: 351524 - DNA, 201 bp, Homo sapiens
gagcgaaactccatctcaaaaacaaaacaaacaaaaaaacaaaatacgtgaatccatgtggccagtccattgggcctggaacaggggcctggggtgccccrctgggctggacattaagcctttagttactgggtcatgaggcgacggaggactcctgggaggggcgagagctcagtacaatggctctgttatctaccaatg

SEQ ID NO: 351525 - DNA, 201 bp, Homo sapiens
gctagggaaggctgctcactttgagatcaggattgggaagccacctggcacatggccatgtagtagagtccttataaatttcagttcatcttccttttctkcccattcttcctttcagcaaagcatggtgaaactcatgggcttggggggcagagctgagtttgaatcccattgaagagttacatagtttctctgagcctc

SEQ ID NO: 351526 - DNA, 201 bp, Homo sapiens
gctgaaacaaaccttctattaaccaattttctccctcaagctctctgccctcaacacatacacatgtgcacacacacacacacacacacacacacacacasacatacacacacagatatacacacatacacacacaccagcttgctgagggctgcctgcctttccctttggaactcatttgtgctcattccacttttgagg

SEQ ID NO: 351527 - DNA, 201 bp, Homo sapiens
gacgaagcaaggttcccctggtgcttatgaccgcagttttcggtggaagtatcaccagttccgtttcctctgccatgtgagttctggtactggggctcccrtggcagttggggttattgagttatttcagtgtgagttcccggcacagcagcaggtatcggaatgtttgtgtcttaggcgggcgcaagacacttgtctaac

SEQ ID NO: 351528 - DNA, 201 bp, Homo sapiens
tggctgaaacaaaccttctattaaccaattttctccctcaagctctctgccctcaacacatacacatgtgcacacacacacacacacacacacacacacayagacatacacacacagatatacacacatacacacacaccagcttgctgagggctgcctgcctttccctttggaactcatttgtgctcattccacttttga

SEQ ID NO: 351529 - DNA, 201 bp, Homo sapiens
ccatggtgaaaacaattttgaaactacagatggagccatgatctcaacagacctagtccctggggagcaagattgaaccaccgattcacttaatcatggcygtccctgcataggaaacccacaggaaacttgtatgagaatgggtccttttatccgggagcaataagtattggacctagtagctcagggtgaatgcatcca

SEQ ID NO: 351530 - DNA, 201 bp, Homo sapiens
ctggtcttgacctcttgacctcaggtaacctgcccgcctcggcctcccaaagtgctaagatcacaggcatgagacaccgcgcctgcccccaaccccccccttttttttttttttttaattgagacagagtctggctctgtggcccaggctggagtgcagtggtgtgaacacggctcactgcagcctctatctcctgggctc

SEQ ID NO: 351531 - DNA, 201 bp, Homo sapiens
aggctgaggcgggcagatcacttgaggtcaggagtttgagaccaggctggccaacatggtgaaaccctgtctctactaaaagtacaaaaattagccaggcstggtggtgtgtgcctataatcccagctactcagaaggctgaggcaggagaattgcctgaacctgggaggcggaggttgcagtgagctgagatctagccac

SEQ ID NO: 351532 - DNA, 201 bp, Homo sapiens
aagggaatttaccaggtaaagaaaggcagatttattaaagtgaaaacacgttgcaagaaagcaatgggcagcacagcagagaaggggctgtctgcaaagargcaggagatggagggaagttttacagggttgtgctggagggggctatgtggggattgatgcatctgagggctgtttgtgattaatcatttctcagaacga

SEQ ID NO: 351533 - DNA, 201 bp, Homo sapiens
ggattgctggtggctgctcagtccaatgccatccatgcagggctgggtttttggccatgagataataagtgacctctccgtgctgcagaactgttctcacracttgggtcatgcttcttgggtgcatgtcctcaaagtccctcatgggctctgcagagacaaagccacactttgaggacccagcctccaaccaccaaggtc

SEQ ID NO: 351534 - DNA, 201 bp, Homo sapiens
tccacatctggtccttctaccacttatcattagtgagatgggtggagtggctatataaacataaactccctttggaatcaaatcagtgagttgcttttgakcgactttgagtcccttaggactattatgtgtcacaggcagaaagggaatttaccaggtaaagaaaggcagatttattaaagtgaaaacacgttgcaagaa

SEQ ID NO: 351535 - DNA, 201 bp, Homo sapiens
tccttggctgaaacaaaccttctattaaccaattttctccctcaagctctctgccctcaacacatacacatgtgcacacacacacacacacacacacacasacacagacatacacacacagatatacacacatacacacacaccagcttgctgagggctgcctgcctttccctttggaactcatttgtgctcattccactt

SEQ ID NO: 351536 - DNA, 201 bp, Homo sapiens
gaaaattttatttttattttattttgagacaggatcttactctgttgcccaggctggagtgcagtggcacaatcacggctcactgtaaccttgacctgccwgggctcgggtgatcctcccatgtctgcctcccaaacagctgggactacaggtgggtgccacctcgcctggctaatttttgtagagacaggggttttgcta

SEQ ID NO: 351537 - DNA, 201 bp, Homo sapiens
aaacaaaccttctattaaccaattttctccctcaagctctctgccctcaacacatacacatgtgcacacacacacacacacacacacacacacacagacayacacacacagatatacacacatacacacacaccagcttgctgagggctgcctgcctttccctttggaactcatttgtgctcattccacttttgaggagga

SEQ ID NO: 351538 - DNA, 201 bp, Homo sapiens
gaagtgtctacctagactgctttatgacttttctctttcttccgtttaaattattcagtttcccttagcttatcttgtgactgcttatcttgacgaactgwaactaggtagggtgcctgagaggtctgtgttatgttccttagaactgtgacctggatcatgattttgagattgaatacttgtgttaaagcctgttcatct

SEQ ID NO: 351539 - DNA, 201 bp, Homo sapiens
tgtaaatgcatagcacacacagtgcctggaacataatgttagagttcagtgaatattatatacttctgtagccattattattacctttatttatttatccttttttttttttttttggagacactctcactcactctgtcacccaggctggaatacagtgacgtgatcttggctccctgaaacctctaccttctgggctca

SEQ ID NO: 351540 - DNA, 201 bp, Homo sapiens
ctacaggcatgcaccggtagtgcagctagttttgtttattttttgtagaggcagggtctcattatgttgcccaggctggtctcaaactcctgggctcaagygatcctcccgccttggcctcccaaagtgttaggataacaggcgtgagccactgtgcccagccacctttattgttgagagtagttttatcgccccatgttg

SEQ ID NO: 351541 - DNA, 201 bp, Homo sapiens
agtccaaaactagaggggctattaaaggtcttgtttccaataaatggcaggagaagggaatatgatgacttaggtaggaaacacttctgtccttttcacastgacttatgtctgtctgctttctactttgaacccccaggacgcacagacattcgggtgcttcagccagaacaaccccagcaaccggcgagcaaagccccg

SEQ ID NO: 351542 - DNA, 201 bp, Homo sapiens
taaaaagtcttgtctttctataaagacaataaaaagaaatgtctttttttttttttgagacggagtctcaccctgtcgcccaggctggagtgcagtggcgygatctcggctcactgcaagctccgcctcccgggttcatgccattcttctgcctcagcctcctgagtagctgggactacaggcgcccactgccacgcccgg

SEQ ID NO: 351543 - DNA, 201 bp, Homo sapiens
tttttaatgggttttggccacatccatcagaggaatcatgatctaaggcagttatagccttataaaatgtatttggtttttttggggcatgttttttgggkttttttttttttttcgttttttgtttttgagatgcagtctcactctgttgcctaggctggaatgccgtggcatgatcttggctcactataacctacacct

SEQ ID NO: 351544 - DNA, 201 bp, Homo sapiens
tattaattgacacttgcctattcatacatcagtaccacattgttttaattgctgtagctttgtagtatgttttaatactttagaaactccccctacacacrcacaccactcttttacaaactcctcctacacacacacacacacacacacacacacacacacacacacacattcttcttctttagaatgttcatggctatt

SEQ ID NO: 351545 - DNA, 201 bp, Homo sapiens
gccacctcattggttaaaaagtttaacctcgttgcgttttctcatttactagttgcttaactatttcttttttcttgtgtctcttttcatagtatttgatyatttgtccttccgagatttagaagtttattttagaggtttatataagttcttagtatattctaggtacaatttttaaaaattgtagtgaaaaacacataa

SEQ ID NO: 351546 - DNA, 201 bp, Homo sapiens
ttataggggtgagccactacgcccggcctaatttttgtatagatggggttttgccatgttgaccaagctggtctcgaactcctggcttcaaatgatccacstgctttggcctccgaaagtactgggattacaggcatgagccaccgcgcccagcctaagttttgtatttttagtagagacggggtttcaccatgttgacca

SEQ ID NO: 351547 - DNA, 201 bp, Homo sapiens
gtaatgtattgttagaacttaatttctgctgactatgagttgtgatggggtggattgactcctgaggttctttcaagctttcatgttctaagaatgtgcgmacacacacacacacacacacacacactcatttactcctactttttgagggcagaagaagggtactcgtgagtattcgtgggcacagaaggcttgtccatg

SEQ ID NO: 351548 - DNA, 201 bp, Homo sapiens
agcaataactaaaaagagccggaacatctgccacaggggggcatctgggagccctgggactcatctttgactttttctttctttctctcccagtggtgtcygcaaagcccaaggtgcataatcgtcaacctcgaattaactcctacgtggaggtggcggtggatggactccccagtgagaccaagaagactgggaagcgca

SEQ ID NO: 351549 - DNA, 201 bp, Homo sapiens
tttaatactttagaaactccccctacacacacacaccactcttttacaaactcctcctacacacacacacacacacacacacacacacacacacacacacmttcttcttctttagaatgttcatggctattcttgtgtatttagttttcctaataaattttagaataaattcatctagctctgaaaaaagtcatagtgttt

SEQ ID NO: 351550 - DNA, 201 bp, Homo sapiens
aaagtatgatttgtgcatcttcagtgaatgatgaacccacaacagccactgatcccgaagaaccttccgttgttggtgtgacgtccccacctgctgcaccyttgagtgtgaccccgaatcccaacacgacttctctccctgccccagccacaccggctgaaggagaggaacccagcacttcgggtacacagcagctcccag

SEQ ID NO: 351551 - DNA, 201 bp, Homo sapiens
acgtgaatccatgtggccagtccattgggcctggaacaggggcctggggtgccccactgggctggacattaagcctttagttactgggtcatgaggcgacrgaggactcctgggaggggcgagagctcagtacaatggctctgttatctaccaatgtgtcatgtttctgtactttaacaaccaggccagcagcatctgggc

SEQ ID NO: 351552 - DNA, 201 bp, Homo sapiens
agattccctgtggcacctccgactttttctacctatggtacccaaggtgactctttttaggtgttcctacaccattgagctcatagagcgttcattattakctagagggttacagggtcagctttgagaggggaaaggatatatgtgggtgtctgcctgttttggttccccctccccaagatgtcagcagtttagtttaaa

SEQ ID NO: 351553 - DNA, 201 bp, Homo sapiens
gtcccacacacacagaggcacattattttgccctggcagccagcacgccactgtggtttcttacataacggagggcgttgtgtttggactgccgacttacytcagctctgccatttcacaccatgctttttctcccgcagccattggctgccccgtctgtttcctgcctccgagtggaattaattgaggagggatgttttc

SEQ ID NO: 351554 - DNA, 201 bp, Homo sapiens
atgttcacggtaatttccccagagcgaacaattgcaagcagtctattcgacaatgaaagaatagttaacatatacctattatgggcttgtattgcagtcayttaagagtgacttatgggggtgaagaatttttaaagaattgaataaataaaagatgaaaatctggaaggcaatttaccaacgataaattggtgatgatga

SEQ ID NO: 351555 - DNA, 201 bp, Homo sapiens
caaggacgacagccttgtaagagttcttggatgtttgtttgtggggacactctaagagatgttggaatttggagcttctctgctaagttataaaccaggcrctgccattgaatttcattccaaactcaacttcagcactagccaaagagtcttacccaaggagttttaacactgagctgctcaaaactatttgtgagaaaa

SEQ ID NO: 351556 - DNA, 201 bp, Homo sapiens
aggtaacctgcccgcctcggcctcccaaagtgctaagatcacaggcatgagacaccgcgcctgcccccaaccccccccttttttttttttttttaattgaracagagtctggctctgtggcccaggctggagtgcagtggtgtgaacacggctcactgcagcctctatctcctgggctcgaggaatcctcccacttcagcc

SEQ ID NO: 351557 - DNA, 201 bp, Homo sapiens
ccaaagtgctaagatcacaggcatgagacaccgcgcctgcccccaaccccccccttttttttttttttttaattgagacagagtctggctctgtggcccasgctggagtgcagtggtgtgaacacggctcactgcagcctctatctcctgggctcgaggaatcctcccacttcagcctcttagttgagaccacagatatgt

SEQ ID NO: 351558 - DNA, 201 bp, Homo sapiens
atcctcccatctcagtctctggagtagctgggactataggtgtgttactaatttaattttttttctttttttttttttttagagatggtatctcactatgytgcccaggttgggtgttgactttgtatcaaatatctattaagcagccattggaatgattatatgatttttcttctttaaattactatattaatttctaca

SEQ ID NO: 351559 - DNA, 201 bp, Homo sapiens
aagagaaatacctaggaggtgtaattaagcaggactgcatggctggctaatgagacaaggtgaagggtaaggagggaggggggtactcccagattcctctrctgtgctgtcattcatggagacaagagacgcaagaggcggggagctaatgaagatgtcactttaaaaccacatctcccatggtggtcggctttggtgttc

SEQ ID NO: 351560 - DNA, 201 bp, Homo sapiens
gacctagtccctggggagcaagattgaaccaccgattcacttaatcatggctgtccctgcataggaaacccacaggaaacttgtatgagaatgggtccttytatccgggagcaataagtattggacctagtagctcagggtgaatgcatccatttgctcatcagtcactcttaagcagtgttcagaccacaggtaagcaaa

SEQ ID NO: 351561 - DNA, 201 bp, Homo sapiens
acctctccaacgtcttgaagaacaatgggggcaaaagtacgtatgatgaagggggtgccgacgtgattcttgggtggggatgggaggacctggcagatcamcctggtattgcaatttcccccaggactaggggctgcagtacctctgttctccttggatgctgtctttggagttttgggaaggctgagggctcctctctgc

SEQ ID NO: 351562 - DNA, 201 bp, Homo sapiens
aagtccaagtgtgcccggtggggctctcaggtttgggggagatgcccaccagagccaaagagggtggaagggctgactgggcctccagtcactgttctgtrcaagatttcaactgaaataaagagtgcaatcgtgcttcttagaagtggaaattcaccacagcagagtacttttagttaaacatgtggcttgaacatgtgt

SEQ ID NO: 351563 - DNA, 201 bp, Homo sapiens
ggcgaggcaggtggatcacctgagatcagaagttcgagaccagcctggccaacatggtgaaacccccgtctctactaaaaatataaaaaattagccaggcrtggtggtgcttgcctataatcccagctactcgcgaggctgaggaaggagaatcgcttgaacctgggaggcagaggttgcagtgaactgagatcacaccat

SEQ ID NO: 351564 - DNA, 201 bp, Homo sapiens
ttgcggaatagcaggaaagaacagagaaacaggcaataggaaatcattagaaaagaaaattgccagaactcaagtatccagattcaaacagctcaccacaygcctagcccagaggataaaaaaagactcaccccaaggctcatctgattgaatttctgagtgccaagagacagcctcagaaacttccagagggaaaaaaca

SEQ ID NO: 351565 - DNA, 201 bp, Homo sapiens
aaacgtctaatcccagcactttggggggccaaggcaggaggatcgtttgagtccaggagttcaagaccagcctgggcaacacagtgagacactatctcttmgaaaaacaaaaaattggccccgcatggtggtgcgtgcctgtagtcctagctacttgggaggctgaggtgggaggatcacttgagctgggaggtcgaggct

SEQ ID NO: 351566 - DNA, 201 bp, Homo sapiens
agaatgaatgggatgcaagacacagggaacttaaccccgaggccatggaatctcccaggaggaggagaagggaaggcaagtcaggtcaaggacacagagcrggtgtgagatggacacacaactgtccccgtcagatgagggagagatgtggccgagagaggaaggccactgccaggccacctgtcccgtctgagaatctgg

SEQ ID NO: 351567 - DNA, 201 bp, Homo sapiens
gggatgcaagacacagggaacttaaccccgaggccatggaatctcccaggaggaggagaagggaaggcaagtcaggtcaaggacacagagcgggtgtgagrtggacacacaactgtccccgtcagatgagggagagatgtggccgagagaggaaggccactgccaggccacctgtcccgtctgagaatctggggatgcatc

SEQ ID NO: 351568 - DNA, 201 bp, Homo sapiens
ctttttgacaacaccccccttccccgcaggatatgagaatgcctggtccactgcagtccatccccagggacctcgaagcagaatttggctggagggggtgygggggggattctaatgtaaacagtgaccctgaagccctggagccagttcccccttctttcccctgtctccccttctgtcttgctgccccacccccagccc

SEQ ID NO: 351569 - DNA, 201 bp, Homo sapiens
ggaagttctcacctccagaaaaaagaaaaaagttgttacaagtaaggaaatgtacttatagtattctacattgtcatccaaaccctgaatattgatttaayggtgagtttccatattgagaggacgaggggaggagatagttgagggatggaatgcaatacctatatcctcatccctcatctttggtagtggaaagtccat

SEQ ID NO: 351570 - DNA, 201 bp, Homo sapiens
ggggcagagttttatttaatcttgtgagagtcactgggagcagaagaaagcagtttttgcgggaaccagcatgtgttgggtttcatttattggttaggccrgcagaagacggtaaacgttggtttggtggtgttgacagatggtgtgaaactgggagggggtgcgctcgacaacaaagatggagaggtgcatcctgggaag

SEQ ID NO: 351571 - DNA, 201 bp, Homo sapiens
aggaaatgtacttatagtattctacattgtcatccaaaccctgaatattgatttaacggtgagtttccatattgagaggacgaggggaggagatagttgarggatggaatgcaatacctatatcctcatccctcatctttggtagtggaaagtccataagcgatagcaaatatggcaaaaatcaagaaataatgagccagg

SEQ ID NO: 351572 - DNA, 201 bp, Homo sapiens
ggctgaggcgggcagatcacttgaggtcaggagtttgagaccaggctggccaacatggtgaaaccctgtctctactaaaagtacaaaaattagccaggcahggtggtgtgtgcctataatcccagctactcagaaggctgaggcaggagaattgcctgaacctgggaggcggaggttgcagtgagctgagatctagccact

SEQ ID NO: 351573 - DNA, 201 bp, Homo sapiens
tggggagggaggttcagatatgtggttttgtaaggtgtggcgtggacggaccccgtggaaatcctcataaaggctgattccctcttggtaattattaaacrgccctgaactgaaggccatagctcctggctggactgaactgaagggaactgaaatattcagtgtggactaaacacttaactagacagaagctattcagca

SEQ ID NO: 351574 - DNA, 201 bp, Homo sapiens
ctcagctcactgcagcctccccttcctgggctcaagcgattctcctgccttagcctcccgagtagctgggactacaggcacacgccaccacacccagctawttttttctatttttagtagagacagagttttgccatgttggccaggctggtcttgaactcctgacctccagtgatccacctgccttggcctcccaaagtg

SEQ ID NO: 351575 - DNA, 201 bp, Homo sapiens
gagatactgggcaaggtgacgacccacgagctgaaggagggcggcgagagcatccgggtcacggaggagaacaaggaagagtacatcatgtgagtctcagrcgccgggggctccgctccaggggtggcgtggagatctagtgggttgcagagaaagatgggcccccacctgtggcccatcggtcactgtggatgccatttg

SEQ ID NO: 351576 - DNA, 201 bp, Homo sapiens
gctggggttttaccatgttggccaggctgatctcaaactcctgacctcaggtgatccacccgcctcagcctcccaaagtgttgggattacaggtgtgagcyaccgtgcccagcccaaatttgctattttatatggatggggtttgtggcactgcaaaacaatggcaatattaatatatcaaagatcactggtcacagatct

SEQ ID NO: 351577 - DNA, 201 bp, Homo sapiens
gaacccaggaggtcaaggttgtagtgagctatgatcatgtcactgcactccatcctgggtgacagggctagaccctgtctcaaaaaaacaggttggtcctrtggtagtgggttatcagaacttattaacattagtgtcactaaagtttgtatacaacccctgaatgctaaatttggctttaaaaaaggaaaaaaaaagaac

SEQ ID NO: 351578 - DNA, 201 bp, Homo sapiens
cttataatcatgcagtagcaactaagaaataaaacaaagtgttggattgggtggggcgggtggggagggaggttcagatatgtggttttgtaaggtgtggmgtggacggaccccgtggaaatcctcataaaggctgattccctcttggtaattattaaacagccctgaactgaaggccatagctcctggctggactgaact

SEQ ID NO: 351579 - DNA, 201 bp, Homo sapiens
tctctttatctatgaatgtccaagatagcatcttcttgcaatagaaggctctttcgtcaacattgaaaagctgttgtttcgtgtggccaaccccgtcaatkatcttagctagatcttctggatagcttgctgcagcttcttcctcagcattttcttcacttggacttttacgctgtgtttgagggatctttccttaaacct

SEQ ID NO: 351580 - DNA, 201 bp, Homo sapiens
cccaggaggtcaaggttgtagtgagctatgatcatgtcactgcactccatcctgggtgacagggctagaccctgtctcaaaaaaacaggttggtcctgtgrtagtgggttatcagaacttattaacattagtgtcactaaagtttgtatacaacccctgaatgctaaatttggctttaaaaaaggaaaaaaaaagaactga

SEQ ID NO: 351581 - DNA, 201 bp, Homo sapiens
ttaatgtttctctatccccctctttcatgtgaagcatgtggcatcaggttgccttgctttgctctcagtgacagtaaattagatcacttggttatcatggkgacagccagaggtctcaaatagaacagaggagggttatgttctcaaaagtttagtttaaagaaaaaaggccctctctctcctcattggctatttaaattt

SEQ ID NO: 351582 - DNA, 201 bp, Homo sapiens
tgacctatttactggtctctgaattcctctagttgatcgaccttgaaattcagagatcctgttaaacctcgtttgttgtcattggtgttgagaatgacacsaggtcatcggtgttgcagcagccaggctgcaacaggaaatcggatgcattttggcccatcacacgtggtagacattcagtgctagttagttactggtgag

SEQ ID NO: 351583 - DNA, 201 bp, Homo sapiens
tccagatacccacgtgacttcccccatcctttagtctttgctcaattgtcaccttcccagggaggtttttcttctctaccccacatcctctcccagcttarcattcttcatcccccttcttttattttttcctattgcacttgccaccttcttttttaaatttttttatttcattaaaaaatttttttttagttttttttt

SEQ ID NO: 351584 - DNA, 201 bp, Homo sapiens
ttgggtgcatgtcctcaaagtccctcatgggctctgcagagacaaagccacactttgaggacccagcctccaaccaccaaggtccagaaggtggggccagsccttcacccttttcttcccgtgtttccaggatgatccaggaaccagctctgcccccaggatgggagatgaaatacaccagcgagggggtgcgatactttg

SEQ ID NO: 351585 - DNA, 201 bp, Homo sapiens
atgggccttgcctatagagcactgggaccctgaatcaagagaaataagggtggtcctggttggtgagtccgttatgtactgaaatgaggacatgagtgccyaatccaccttcctttctttccctcctcctaagggcagatgccccatccatgcttagaggctcccctttcctgccttcccaggaacccttcttgatcttcc

SEQ ID NO: 351586 - DNA, 201 bp, Homo sapiens
aaaataattttctaagaggactcctacattttgctctgcaaagaacatttaaaaggaggtttgttctttggaaggtgtttataaacatggctttgataccwggcaactgagagaggcggttgtggccgctgcggttccctgagggcacagagcatgggtgatctgttggagccaggcagggcctgggcaggggattaatgg

SEQ ID NO: 351587 - DNA, 201 bp, Homo sapiens
gttgaggttcctttggtctcttccccactccaattcccctgctccctcctcccctaccctagagggaacttctgttctgaacttggtgtggttccttcccrtcgtacttttatacttttaaacgtttgtgtgtccacaacaacaacgtatacagttgttttgtgtaagttcaagtgtacaccaaagacatcgtactaaggc

SEQ ID NO: 351588 - DNA, 201 bp, Homo sapiens
tggtatcagctgagagctgttggaaagaaaaggtccttttagccacaagtctcaaaaagtaaacacggaggccctgcaacgaatgttccaacaatcctgcmccctgtgtcactgagtgctggctgagaggctgccttgtggagcctcacctgaagagagaagaaaagctctctgtcaggattcccttcccctggtccaggc

SEQ ID NO: 351589 - DNA, 201 bp, Homo sapiens
tgtcttaggacatattagaattattagaagatctctgggaaacaaaaggcgcatgggaggccaagatttagagtgttgatgcattccgccgtaccctatgyccagcctgtccctaaaggcagagtgcttcttattcggcagggcttcgtgagaatgccgccaagttatccaaaaccaaaggatgagagaggcttccaagag

SEQ ID NO: 351590 - DNA, 201 bp, Homo sapiens
gcctggaaacatgcaggtttggagctggatcttctcgatgcagacacttctgctctcgggtagttatttaagaggttgtgtcaaccctgttatacctgcarggtaccacttagtcaatgagcactgcagtccagtgtgccagaagggccttctggtccttctgattggagagatcatttagtgaagcttccacacatttgt

SEQ ID NO: 351591 - DNA, 201 bp, Homo sapiens
cttatagtattctacattgtcatccaaaccctgaatattgatttaacggtgagtttccatattgagaggacgaggggaggagatagttgagggatggaatrcaatacctatatcctcatccctcatctttggtagtggaaagtccataagcgatagcaaatatggcaaaaatcaagaaataatgagccaggcttggtggtg

SEQ ID NO: 351592 - DNA, 201 bp, Homo sapiens
tctacattgtcatccaaaccctgaatattgatttaacggtgagtttccatattgagaggacgaggggaggagatagttgagggatggaatgcaatacctayatcctcatccctcatctttggtagtggaaagtccataagcgatagcaaatatggcaaaaatcaagaaataatgagccaggcttggtggtgcacacctgag

SEQ ID NO: 351593 - DNA, 201 bp, Homo sapiens
ctggtttcatccctgggaggagaattgacatgaggagactgaagaaaggcctgggtgtggggagagagctgtggcattcaattgaatgaagggtgacagcyggtcatgaaggtgaggcactctagcaggcagaatccagacaaaatctgggaactgactgtgggtcctaggaaccacttgaggggaaaccatttttaggga

SEQ ID NO: 351594 - DNA, 201 bp, Homo sapiens
cagtcacttcctcaccttacattactaatctttaaattaacatagcaccagctttccttagggctgacaaagacaaattgttcattttctgagaaatcgcwtgaacccctgaacatctttgctcttcctaggacgaagcaaggttcccctggtgcttatgaccgcagttttcggtggaagtatcaccagttccgtttcctc

SEQ ID NO: 351595 - DNA, 201 bp, Homo sapiens
ttcgggtccaaaataatagccagtggcccccaggaccacatgcttcctcagtcatattcagaaaggatgagcaactattatttttcctagatttgctagcrgatgtcctgagattggctgtggctggctcaacatacatcacatgtgcacttctggtccaggcaaccatgcaactctgaggttgggaacagagtcagcttc

SEQ ID NO: 351596 - DNA, 201 bp, Homo sapiens
tggctgctcagtccaatgccatccatgcagggctgggtttttggccatgagataataagtgacctctccgtgctgcagaactgttctcacgacttgggtcrtgcttcttgggtgcatgtcctcaaagtccctcatgggctctgcagagacaaagccacactttgaggacccagcctccaaccaccaaggtccagaaggtgg

SEQ ID NO: 351597 - DNA, 201 bp, Homo sapiens
agtggcttacgcctgtaatcccagcactttgggaggccaaggtgggcggatcacctgaggtcaggtgttcgagaccagccttaacatggagaaaccccgtstctactaaaaatacaaaacattagctgggcgtggtggtgcatgcctgtaatcccagctactctggaggctgaggcaggagaattgcttgaacctgggagg

SEQ ID NO: 351598 - DNA, 201 bp, Homo sapiens
tcccatctgaattgctagagcagcctctaaattgttctctccattggccttctctctcttccaatccatctggcctgttcccctcagagcagtcttcaaaygttactgtcattgcatccatttactggctcaaaaccttttgtggtctttacctaaagagtaacatttaaattttctttttccttttctttcttttttttt

SEQ ID NO: 351599 - DNA, 201 bp, Homo sapiens
acgcattaggaaccttgtctaagatgggaggcaaaagctgagaggtcgaaagtactttgatggggatgggatctgttcctttctatagttacggttatttytcttgagacagagtctcgctctgttgcccaggctggagtgcagtggcgcgatctcggctcactgcaacgtccacctcccgggttcaagcaattctcctgc

SEQ ID NO: 351600 - DNA, 201 bp, Homo sapiens
ggtttcaaactaactgcctaaacagtctcctataccgtgtccctgtgggaaccctcccagttccacctgctggagtctccatcccattagagggtccacartgagctggaggtggggaagcccagctgcaaagcctctttggtagggagacgtgggactcccaagttggctgattatattttctcagagcactttagatgc

SEQ ID NO: 351601 - DNA, 201 bp, Homo sapiens
gaagtgatcctcccacctcagccccctcaagtagctgggactacaggcatgcacagtcacacctggctaattttttgtatttttagtagagatggggtttwgccatgttgcccaggctggtcttgaactcctgggctcaagcaatccacctgccttggcctcccaaagtgctgggattacaggtgtgagtcaccacaccca

SEQ ID NO: 351602 - DNA, 201 bp, Homo sapiens
gatagtgggcacccagcaaatgttacttgaacctcctgggttcaagtaatcctcttgtctcagcctcctgagtagctgggaccataggcacacgccactgygcccagctaattttttttttttttttcagatagagtctaactctttcacctaagctggaatgcagtggcgcgatgttgggtcattgcagcgttcgcctcc

SEQ ID NO: 351603 - DNA, 201 bp, Homo sapiens
gtctgcctcaacacacaccttctccagttcctctaaattctggttcttagtttttctgccatgtttccctttcccaactcctagtgtgctaatgttgcccrtgatcatcgtgtatcttttcgtttgcttgcttcaccgttgcagtttctttttgccgtcttgtgtcgtgttcctgctgggacccactgaagatgcctggca

SEQ ID NO: 351604 - DNA, 201 bp, Homo sapiens
cttgcccaaagctttgattccaagagatcagtggccctgcggggcctggctgatgtgctcggtggggagtcctggggctttctaactcatgctagggaggrggccagggtagaatcttcttagacactgtgtttcttaaagacactgccatcacctttgcccaaaccaccatctgctcttgcctggattaccacagtgacc

SEQ ID NO: 351605 - DNA, 201 bp, Homo sapiens
actggtccatgggctccatagtcacaggacgaggaaatgtggttagcaggaaggagccttcactgcgtctgtccagagctttcccagcagctggcttccckgagaactcaacaatgccttttcctgagggccttcctcgatcatccacaatgactacagccctctctacctggccaaacacagaaaaggcttcttccagca

SEQ ID NO: 351606 - DNA, 201 bp, Homo sapiens
aagatgcctggcacagccttgcacattgtgctgttgtgacgggactatcacacggccgacaatttctggggcatctctctctgcagtattgaaacagattrttttgactgggcgcggtggctcacgcctgtaatcccagcactttgggaggctgaggcaggcggatcacttgaggtcgggagttcaagaccatcctggcca

SEQ ID NO: 351607 - DNA, 201 bp, Homo sapiens
acttgaaaataactgcatatatcattctcatctactcttgcgtctcccaagaataagacatgctcatataaaaccaaagtaaattttttttttttttttgmgacagagtcttgctctgttgcccaggctggaatgtggtggcacgatcctggctccctgcaatctccgcctgccgtgtttaagtgattctcctgccttagc

SEQ ID NO: 351608 - DNA, 201 bp, Homo sapiens
gaaagtactttgatggggatgggatctgttcctttctatagttacggttatttttcttgagacagagtctcgctctgttgcccaggctggagtgcagtggygcgatctcggctcactgcaacgtccacctcccgggttcaagcaattctcctgcctcagcctcccgagtagctgggattatagttgcgccaccactcctcg

SEQ ID NO: 351609 - DNA, 201 bp, Homo sapiens
gtcttgaactccgggctcaagtgatcctcctgcctcagcctcccaaagtgtttggggttacaggtgtgagccaccacaactggctagggctctggaatttytgaaagatgggaacaaaagggaagatgtttcccctggatgatgggacaggttagattctaaccaaaatctttttagaaggttgcagttccctgtttttca

SEQ ID NO: 351610 - DNA, 201 bp, Homo sapiens
tgcgtctcccaagaataagacatgctcatataaaaccaaagtaaattttttttttttttttgagacagagtcttgctctgttgcccaggctggaatgtggkggcacgatcctggctccctgcaatctccgcctgccgtgtttaagtgattctcctgccttagcctcccaagtagttgggattacaggtgtgtgccaccatg

SEQ ID NO: 351611 - DNA, 201 bp, Homo sapiens
caaagtgctgggattacagacgtgagccaccgtgcctgtgcataaaaccatagtactactattgaacctaaaaacattaacaataatttcaaacatcatcwaatattcagtttgtatgcaaatttctccatttatcccaagagtatttttttcaaaccaaggtttagtcacaattcacgcatggcatttgttggttttctt

SEQ ID NO: 351612 - DNA, 201 bp, Homo sapiens
aaggtgatccgcccgcctcagcctcccgaagtgctgggattataggcgcccgctggcttttactctgagttagacggtgtcttagttcattttgtgtttcyataactggataatagaaacgggataatttataaagagactaggtaatttataaagaaaagagatttattctttgtatttgagtctgggaagtctaaggtg

SEQ ID NO: 351613 - DNA, 201 bp, Homo sapiens
aggtactggatcttggcataatagaggagggagaccctccttgacttaaaaaaaaaaaaaaaagcccacaataatcaacacttacgattgcatagtttcarggggctagatttggcagcagcttagctgggcagcctggccagggatctctcccgaggctgcattcaggatgtggactaagctgtagggttaggctctgct

SEQ ID NO: 351614 - DNA, 201 bp, Homo sapiens
tcaaacaaacaaacagacaaacagagggatgacattcaaagcctgagacagaatgaggtaactgagaagaggtagaacattgattgcttgaggttgaggayggggcaggagccaaccaagaaggctcaggtggggcaggaggaggatgaggcaggactggtatccccagagctgagggaaaaaagcagttaaagaacaaaa

SEQ ID NO: 351615 - DNA, 201 bp, Homo sapiens
tatttttcttatcagcccttgtccctgtttaattaatttatttcatttgttgactgtctccttcaatagagtgtaagatccacagtaagagatttttgtcrctttggtcactgttaactaccccagccagtagaacagtgcctgacacatagtgggccctcagtaaatagtgcctgaacgaaagaatattgcttcgggttc

SEQ ID NO: 351616 - DNA, 201 bp, Homo sapiens
gacagagtctcgctctgtcgcccaggctggactgcagtggcgctgtctcggctcactgcaatttcttcctcccaggttaaaacagttctcctgtctcagcsttccaagtagctgggattaccagtgtgtgccaccaggcctggctaacttttttgtttgtttgtttttttgagatggagtctcgctctgttgctcaggctg

SEQ ID NO: 351617 - DNA, 201 bp, Homo sapiens
ggctggcttcaaactcatgacctcatgatctccccgcctcggcctcccaaagtgctgggattacgggcgtgagccaccgtgcccagcctcctatagttcaraattctttcctgcagtccttcagtgctcctccttggaaaaaaccagtattgtttcttgtgtgtctcttccaagatacaccaaaagggatgcatttttgta

SEQ ID NO: 351618 - DNA, 201 bp, Homo sapiens
accatgcccagctaattttttttttttgtatttttagtagagatgaggtttccccatgttggccaggctggtcttgaactcctggactcaagtgatccgcrtgccttggccctcacatgtatccaccattactctgtcatacagagtagtttcactgccctgtgcttcatctattcatctctccctcccgtccccagccca

SEQ ID NO: 351619 - DNA, 201 bp, Homo sapiens
tttttttttttggacagagtctcgctctgtcattccactggctggagtgcagtggctcaatctcagcttactgcaacctctgcctcccaggttcaagtgartctcatgcctcagcctcctgagtagctgggattacaagcattcaccaccatgcccagctaattttttttttttgtatttttagtagagatgaggtttccc

SEQ ID NO: 351620 - DNA, 201 bp, Homo sapiens
cccacaccctcaacttctcaaagttgcagccggggcccttttcctggctttggtatcagctgagagctgttggaaagaaaaggtccttttagccacaagtytcaaaaagtaaacacggaggccctgcaacgaatgttccaacaatcctgccccctgtgtcactgagtgctggctgagaggctgccttgtggagcctcacct

SEQ ID NO: 351621 - DNA, 201 bp, Homo sapiens
aaaagtgaaaagcatgcaaatttatatcatataaatttacgtgactaagacctggagaaacagataatgtgtatttatgtttaggtttgatgaagagtggrcaatcgtggagaaatacgattggacaaaaggggtatgattgactggtaatacactgggggaaatttaacaagtcctatttgttcagattcttctctgtgt

SEQ ID NO: 351622 - DNA, 201 bp, Homo sapiens
tttttttagagcacttttaggttcccccaaacatatatactctcttccccactatcaacatcccccaccagagtggtacatttgttagaatgatgagcctrcattgacacatcattgtcactcaaagtccaaaatgtatattaggtttcactctttaattttttttttttttttttggacagagtctcgctctgtcattcc

SEQ ID NO: 351623 - DNA, 201 bp, Homo sapiens
ttccgggtcacttgattgcttttcctatccacttaccttaatattgctcccatgtcttaggacatattagaattattagaagatctctgggaaacaaaagrcgcatgggaggccaagatttagagtgttgatgcattccgccgtaccctatgcccagcctgtccctaaaggcagagtgcttcttattcggcagggcttcgt

SEQ ID NO: 351624 - DNA, 201 bp, Homo sapiens
tgacaattttcctggacgggccaactgttgatctgggaaatgtgcctaatggcagtgccctgacagatggtgagtgccgccctgctcctcaggactgtgcygggacagggtggggctgggcgggggccaggaggtgctgagagcttggttcttactaggccatcttggtttgattcccactcagcctggcccatagctagc

SEQ ID NO: 351625 - DNA, 201 bp, Homo sapiens
cgaggcaaaatgtgaagatgtggagaaagcattcccagagaagccagcaaaggtgaaatgaaagcttctaatttagagaatcttaacttggggtgcattckctttagcccatccatgttgccttttgtaccccacagtggagaacatgcagctgaccctgaacctgcagacggagaacaaaggcagcgttgtctcaggcgg

SEQ ID NO: 351626 - DNA, 201 bp, Homo sapiens
ggtggatgggccgtgggtcttgagcagctgtacctgacagacagtgtacccatttattttaaagtaaacacagcactgtttttccagtttttcagctggargataaataaaactactgaaccttggaacttgagtcagtgggagaagagaagaaatttttaaaaagttgctcttcagttaaaaacaactttaaatttattt

SEQ ID NO: 351627 - DNA, 201 bp, Homo sapiens
tcatgagcggtgggcctcctcccttattgctccgtgaggatggagtgttctggtggatgggccgtgggtcttgagcagctgtacctgacagacagtgtacscatttattttaaagtaaacacagcactgtttttccagtttttcagctggaggataaataaaactactgaaccttggaacttgagtcagtgggagaagaga

SEQ ID NO: 351628 - DNA, 201 bp, Homo sapiens
taccttgcataccaaatgtggggtcgtttgtttgtttgtttgtttttgacaaggtcttgctctgtcgtctaggctgcagtgcagtggtgtgatcataggtmactgtagcctcgaactcctgggctcaagcgatcctcttgcctcagcctccagagttgctggaactacaggcatgcggtcctgtgcctggctactgaacct

SEQ ID NO: 351629 - DNA, 201 bp, Homo sapiens
ccagctacttgggaggctgaggcaggagaatcgcttgaactcgggaggcagaggttggttgtggtgagctgagatcatgccactgcactccagccagagasacagagtgagactccatctcaaaaaaaaaaaaaaaaaggtaaaagaaacagattattttgtggctcttagggtgtggactccaaattgcattatcgagaa

SEQ ID NO: 351630 - DNA, 201 bp, Homo sapiens
atggctcatggcagcctcaaattccaaggctcaagtaatactcctgcctcggcctcccgagtagctgggactacaggcgcatgccactatacccaggctatttttttttttttttttggtagagatgagggtctcactctgttgcccatgcggatctcaaactcctgggctcaagcgatcttcccgccttggcctcccaaa

SEQ ID NO: 351631 - DNA, 201 bp, Homo sapiens
agggttcttttttggtttttctgtaaaaatcaaaacaaaaaacagagacttttgagaggagcagatgccacctaaagtcccactgcattccctgcaaagcrctcaaatgtggaagccagtcattggcatttttattttttattgattgattgattttttcaccagtggctttttgtaacctctgtgttctgctgtgtttct

SEQ ID NO: 351632 - DNA, 201 bp, Homo sapiens
gtttcactatgttggccaggctggtctcgatctcctgacctcgtgatctgcccgcctcggcctcccaaagtgctggattacaggcatgagccaccgtgccyggcctatatttatttttagttgtgataaaatacacatgatgtaaaattaatcacgttaataatttttaggtgtatagtttagtggtgttaagtacattca

SEQ ID NO: 351633 - DNA, 201 bp, Homo sapiens
aagatattttgacactgcctaactcccaaatggatttgtttcagatctgtgaccgtatggttggaatgatccaccctaacaaatctttctttgcagctgasatgttggaggactttggtctaattttgactaatagaagccacctttttatttctgacatagctgtgaaagaggccagagggaagcagatacgagagttga

SEQ ID NO: 351634 - DNA, 201 bp, Homo sapiens
agtgattctcctgcctcagcctcccaagtagctgagattacaggcactcactaccacacccagataatttttttatttttagtagagattgggtttcactrtgttggccgggctgatctcgaactcttgacctcatgtggtccacccacctcggcctcccaaagtgctagaattacaggcatgagccaccacgcccagcca

SEQ ID NO: 351635 - DNA, 201 bp, Homo sapiens
aaagaggccagagggaagcagatacgagagttgaatgccaggtggtgactctggaaacgcatcgctgctagttattatcgccgtgtagatttctcctcgcscttggtagccgcctcttacctatcccaagtccttgatgtgatttgctgacagtgagttaagggatggacatccatgacttaggagagatgataggcttca

SEQ ID NO: 351636 - DNA, 201 bp, Homo sapiens
tgatgagggcaggggaagttagatatcaaatgagtaaacacacagataattacatagctgtgattgtaacaaaagctatcagtgaaaaccacagggtgctrtgagattcctgtactttgttgggggagatctcatctaagttgcggggtcagggaaggtttctctgaggaagctgagacttggaggatgaggagtttagac

SEQ ID NO: 351637 - DNA, 201 bp, Homo sapiens
aggatcacttggggaatttttaaataacacagctgtccctggcccaccccagaccaattaaatgggaatctctgagggtagggtttggtggtcagtgttgtttttttttaatgctccccagataattcagatgtctagaaaggatggagaaccactgctccaaggcatttgatccttcattaaggataatttaacctaact

SEQ ID NO: 351638 - DNA, 201 bp, Homo sapiens
caccaggtaagcacagctgatggagacttgaaaacagctctcgaatgctaagtgtggaaatatttgagatagaaatggaggagccgtggtcagagtcgatrctgttaatgaacgatcagaaaaaaacccacaaaactgtcatagtctagaattaagaggaagaacattctggctaaaggccagggctccttctgaatctca

SEQ ID NO: 351639 - DNA, 201 bp, Homo sapiens
ctggctaaaggccagggctccttctgaatctcagatccttggggatctgtgttggctgccccagggctgtggctggggccggctccccagggctcaccgasaatgaacaggaagaacagccagaccaagtgagagtgatcggcagcttgctaacccagcctgctggtgtccctctctgctgccccaggagagaccccgcat

SEQ ID NO: 351640 - DNA, 201 bp, Homo sapiens
ggaatatgattttagccaatacccgcagcatcttaaaagatccctctgaggacagctgtcagcttctccagatttggttgttttgtgggcttatgaggttrtggtgactggcaagtggcgggagcaagacaagatggacgtttggatcttttttccgtacctttattagaagcagagatgccatttccccattctcttttc

SEQ ID NO: 351641 - DNA, 201 bp, Homo sapiens
tggtggtagctctgtaacagctctgggcacctcctgttctttctttcctttggctttcttttatttattttttatttacaaaatagagatgaagtctcgcygtgttgcccaggctggtctcgaactcctgggctcgagcgatcctcctgcctcagcctcccaaagtgctgggattacaggcgtgatccaccgtgcccagcc

SEQ ID NO: 351642 - DNA, 201 bp, Homo sapiens
catccacctatttctggctcttgttaacatttttttgccaaatttgttttatctatatgttattatagtatatggctgggtgtattttttttcctgagccrtttgaaggtaaattgcagatatcatgacactttaatccccaaaacttcaccctattcttctaaaaagtcacttgaaaataactgcatatatcattctcat

SEQ ID NO: 351643 - DNA, 201 bp, Homo sapiens
acttgagcatttcactcttttagagaggaaggaatacttgagtatttcactctttagagagtgatgccttctcagctttggtgctagtaactacatcttartcttttagctgagttggaaagtttgtctcaaacacacccatataacttaatttggggctcaaagtcagattcagctattaacaagtttggatctaaattc

SEQ ID NO: 351644 - DNA, 201 bp, Homo sapiens
actcagacccagcacccaggaggtgggaacctcagggaaaggacaccggctctccgtgtttgaatctgatgttctttctttcttctcatgtggcagagaaragacaggacaatggacgggtgtattacgtgaaccataacactcgcacgacccagtgggaggatccccggacccaggggtaaggacttgggctgagagggg

SEQ ID NO: 351645 - DNA, 201 bp, Homo sapiens
ccatctaagtaactattcattctgcactcacatggaacctgttgccattcagcaggaaatatttttgcaaatattatccaaaggctgtctctttgcctccytaaaagccccctttccactttgctgttgcaggtatgaaggtcactgtgcacacatgcttatgactgtaggcggtggccaaggagtctattggataaaggt

SEQ ID NO: 351646 - DNA, 201 bp, Homo sapiens
gctctccgtgtttgaatctgatgttctttctttcttctcatgtggcagagaaaagacaggacaatggacgggtgtattacgtgaaccataacactcgcacracccagtgggaggatccccggacccaggggtaaggacttgggctgagaggggggccgggctgggctgggtctctgtgcagctccagcactgggcaggtgg

SEQ ID NO: 351647 - DNA, 201 bp, Homo sapiens
tagaaacataatgttgaacaagagaagcaggtcatagaaaacagtaccatagtaggatgtcatacgtagaaagttgaaaaatgcaaagccaaacaatacaygttgtatggataccttcagaggcagtaaaactataaaaaatggatggggctgggtgtggtggctcacgcctgtaatcccagcattttggggaggtcgagg

SEQ ID NO: 351648 - DNA, 201 bp, Homo sapiens
tgcatttaatttgctttttgattcataaaatttttcattaatagggattaacataagggatcttagttaagaagctgtcagctgggcgcagtggctcagcrtgcaggctgggtgtaatcccagcgctttgggaggctgaggtgagtggatcacctgaggtcggaagttcaagaccagcctgaccaacatggagaaacccca

SEQ ID NO: 351649 - DNA, 201 bp, Homo sapiens
tcagtgtgagttcccggcacagcagcaggtatcggaatgtttgtgtcttaggcgggcgcaagacacttgtctaacccggagctggctgtctctaggaagckagttttcattcctagggcacatgctattgcctcctggcccagcaggctggggaatgcctgttcatacagacaggagaacagatgaccacttgaggctcga

SEQ ID NO: 351650 - DNA, 201 bp, Homo sapiens
acagttcaggagaacaagatagtttaaaaactaccattagttgagttgccttaggaaagaaagagtcccaatagaagtaaagatttctaaaatattctttyatttttaaagtctgtaaataatggatttccagcgtttagtgctttaacccctgttaactaaaagccccaaggctcaatttataattatttataatctttc

SEQ ID NO: 351651 - DNA, 201 bp, Homo sapiens
aaaattctagatatcaatcctgattccaagcgaagcttgggctactcaacaatatcaccaaggaattggcttttctcccatttttctgctctgccatccamtgggtcaacttcctattgtcttcgggtccaaaataatagccagtggcccccaggaccacatgcttcctcagtcatattcagaaaggatgagcaactatta

SEQ ID NO: 351652 - DNA, 201 bp, Homo sapiens
aagagtgactttctcctctaattactgaggatgaacgtcttttcctgtgacttaggtctttgcagccagtgtccggctcacctcggaggctgacagcaggrccagtgtggtgcgtgctgcccactccggcgaggctatgggctgagcccagttccagccgccaaatgcaagccgttgtttcattttgccctgatcgagttg

SEQ ID NO: 351653 - DNA, 201 bp, Homo sapiens
ttgtttgtttgtttttgctgggtgaaatctgccgtgttttttttagagcacttttaggttcccccaaacatatatactctcttccccactatcaacatccyccaccagagtggtacatttgttagaatgatgagcctgcattgacacatcattgtcactcaaagtccaaaatgtatattaggtttcactctttaatttttt

SEQ ID NO: 351654 - DNA, 201 bp, Homo sapiens
attggtgaattgattttctttggtgatggtccttgagtcactcttggacatttcaatagagctatatttcccctacatttatttttaggtaccattacttrttgtccttatctctaggaaccttatgttctagcagacaaggcaggtgccagccgtgtcttcaaaagccaggcgtctctaaccttggactgccttggaagt

SEQ ID NO: 351655 - DNA, 201 bp, Homo sapiens
ccttgactgtggagaaaaatcccttaactggactgatcggtgtttggggtgctttggtgcttggagaaaaacatgtgtcattcactcattcaacacatatrtatgtaattgtattctggtatgcactaggtcttagaccaggccctagccagatggcagtgggccaaattcacatggtctccactgcttcaggtttacagt

SEQ ID NO: 351656 - DNA, 201 bp, Homo sapiens
tcaatgagcactgcagtccagtgtgccagaagggccttctggtccttctgattggagagatcatttagtgaagcttccacacatttgttgatgttcagctyggggatcccttacgcagatagctgccccacatggctccctggaccaaagaaagatcattagtatctcagagattggcagcaactccaatgcgagagagta

SEQ ID NO: 351657 - DNA, 201 bp, Homo sapiens
tgttaccagtacagctgaagcttccatgaactctctgatctcattccctgtatacagtgatacatggaacttgggacatgcatttaaactgctatacggtrttctgttacatgaacagataaaaatttatccatttacttgtttcttgacagctagaaagaatggctgcagtaggccaggcgcagtggctcacgcctgtaa

SEQ ID NO: 351658 - DNA, 201 bp, Homo sapiens
ggctgaggcagggaattgcttgaacccgggaggcggaggttgcagagccaagattgtaccactgcactccagcctgggtgacagagtgagactccgtctcaaaaaaaaaaaaaaaaaaaaaaaaatcaagttgtggtttataggcactggggtggcataatttaattggcagtgttttttttcttagtgttatgtttaata

SEQ ID NO: 351659 - DNA, 201 bp, Homo sapiens
accatgttggccaggctggtctcgaactcctgacctcaagtgatctgcccaccttggccttccaaagtgctgggattacaggcataaaccaccgcatctgkcccaagatatcttattatgtatgtgcaaatataccaaaatctgaaaaaatctgaaatccaaaacacttccagtcccaagcatttcaaataaatacttatg

SEQ ID NO: 351660 - DNA, 201 bp, Homo sapiens
ttcaccatttttctcaacatgtcgttttgcagttttacatttggtttgcttgaacctgggtttgggaaggtccattcattggttgttctatctctgaggcyccccacttccaccctgcttttttgtgtgtgtgtgtgaaagcaaatttgttaagaaagtaaaggaaggcagggcgcagtgacttacacatgtaatcccaga

SEQ ID NO: 351661 - DNA, 201 bp, Homo sapiens
gtttttggccatgagataataagtgacctctccgtgctgcagaactgttctcacgacttgggtcatgcttcttgggtgcatgtcctcaaagtccctcatgrgctctgcagagacaaagccacactttgaggacccagcctccaaccaccaaggtccagaaggtggggccagcccttcacccttttcttcccgtgtttccag

SEQ ID NO: 351662 - DNA, 201 bp, Homo sapiens
gtgagttccctgcccccttgccccaccgcgctgataggagggacgtctctgggtgggaagcaggtactgatggcctttattttgtctgccagtgtggcccstgagctcttgtccagcctctataagagcttgtggagaggaatgtcctctgggttccctggggacagttctagaaccttctccttgagtcaaggagctgtc

SEQ ID NO: 351663 - DNA, 201 bp, Homo sapiens
acagcaggaactggcttcgccattgggtcggcctcgcatgtcatctttgatgcttcctgtaaattagccacatgagtgatgaaggtcttcctttctaacagggcctatgcctttccactgtgtgtctcatgctacccttgactttatttttcagatgggaacagcgagagctgcccaacggacgtgtctattatgttgacc

SEQ ID NO: 351664 - DNA, 201 bp, Homo sapiens
caaaaccaaaggatgagagaggcttccaagagagggaagactgtccaagttcaaggagaaggggtttggttccctgtctgccagggacagaaagttctttccacatgtgtctcctggtcccgagagctttcaaaaggggatgtattctgctccaagaaagaatcacctcccagtaaagtagccatgaagggctcctgtata

SEQ ID NO: 351665 - DNA, 201 bp, Homo sapiens
tctcgctctgttgcccaggctggagtgcaatggtgcaatcttggctcactgcaacctccacctcctaggttcaagaaattctcctgcctcagcctcccaarcagctgggattacaggtgcccgccaccacacccggctaatttgttatatttttagtagagatggggtttcaccatgttggccaggctggtctcaaacttc

SEQ ID NO: 351666 - DNA, 201 bp, Homo sapiens
cgcgatctcggctcactgcaacgtccacctcccgggttcaagcaattctcctgcctcagcctcccgagtagctgggattatagttgcgccaccactcctcsctaatttttgtatttttcatagagacgggggtctcaccatgttggccaggctggtctcgaactcctgccctcaagtgatccgcatgcctgagcctcccaa

SEQ ID NO: 351667 - DNA, 201 bp, Homo sapiens
attgtttgaaccccagcggcggaggttacagtgagctgagattgcaccactgcaccactctagcctggacgacagagcgagactccatctcaaaaaaaaamaaaacaaaacctcattggttttagatcagttggaagatgagttggaagtttgtgcagggagttagattcacacacacacacacacacacacacacacaca

SEQ ID NO: 351668 - DNA, 201 bp, Homo sapiens
atggtgcccgaaaccagtggcaggccgacgccctcctcccagcaccccatctcctatcgcgtggcctgttaaacccacactgcagactttccagggcgtgrgtcttggtgactgtgtctgctggatattgggccttagagtcccctgtccctcccgcccctgcctgctgtggaagggagagtggcaggctggcccgatgct

SEQ ID NO: 351669 - DNA, 201 bp, Homo sapiens
attgaatttctgagtgccaagagacagcctcagaaacttccagagggaaaaaacagagtacctagaaaggatcaggaaccaagagtgccatccttcttctcagcagctgtagagcaggaccttcacaattccgatggaaaatgatttcctgccgggcacagtggctcaaacgtctaatcccagcactttggggggccaagg

SEQ ID NO: 351670 - DNA, 201 bp, Homo sapiens
cctgctcacattccctcccaaagctctcatgcatcttcaggaatgggcacagtgtggcattcaaaatacgtgaacccgccaggcgcggtggctcacgcctrtaatcccagcactttgggaggctgaggcaggtggatcacctgaggtcgggggttcgagaccagcctgaccaacatggagaaaccccgtctctattaaaaa

SEQ ID NO: 351671 - DNA, 201 bp, Homo sapiens
ttgaatttctgagtgccaagagacagcctcagaaacttccagagggaaaaaacagagtacctagaaaggatcaggaaccaagagtgccatccttcttctcagcagctgtagagcaggaccttcacaattccgatggaaaatgatttcctgccgggcacagtggctcaaacgtctaatcccagcactttggggggccaaggc

SEQ ID NO: 351672 - DNA, 201 bp, Homo sapiens
tgaatttctgagtgccaagagacagcctcagaaacttccagagggaaaaaacagagtacctagaaaggatcaggaaccaagagtgccatccttcttctcagcagctgtagagcaggaccttcacaattccgatggaaaatgatttcctgccgggcacagtggctcaaacgtctaatcccagcactttggggggccaaggca

SEQ ID NO: 351673 - DNA, 201 bp, Homo sapiens
tggagaaaccccgtctctattaaaaatacacaattagctgggcgtggtggtgcatgcctgtaatcccagctcctggggaggctgaggcgggagaatcgctygaacctgggaggcaggaggttgcagtgagccgagatcgtgccattgcactccatcctgggcaacaagagcgaaactccatctcaaaaacaaaacaaacaa

SEQ ID NO: 351674 - DNA, 201 bp, Homo sapiens
aagaatgtggcctggagctgtacttcatccaggacatggagatactgggcaaggtgacgacccacgagctgaaggagggcggcgagagcatccgggtcacrgaggagaacaaggaagagtacatcatgtgagtctcaggcgccgggggctccgctccaggggtggcgtggagatctagtgggttgcagagaaagatgggcc

SEQ ID NO: 351675 - DNA, 201 bp, Homo sapiens
gcaggggcttggctccagaaaccagaaagagctgtcatcctatgtataattaatgtgttgattcttttatacgtatgggttttgttgttgtcgttatgaartacagcatacaaaaaaaaatagcgattacagatattcttagtacatgtctgtgtgcatatgtacgtatacaaattttttgtggaggtgaaatttgtataa

SEQ ID NO: 351676 - DNA, 201 bp, Homo sapiens
cggatgtgaacagcacggatgcagatagagcagggcttgatgagcttgaggggagcttgtgagcttcctatatgctaactcagattccagttatggaaatrgactcactaaacctactttttcatgggtttcttgattttgagcaatgcctccaaaggcagcaggaagacatactggaagagaaagggcctctgtagagcc

SEQ ID NO: 351677 - DNA, 201 bp, Homo sapiens
ggagtcccgtcccatgttgagcaattgccaaggaccttgtcccaaggcctgactgggaggctctggctacctcctgccctcatctgctcctctcttccctygctccactccagctgccctggcctccctgccattccccagacatgctaggcatgctctctcacctagcacctctgggcttgctttttcctctgcctagaa

SEQ ID NO: 351678 - DNA, 201 bp, Homo sapiens
gtggtggacacctgtaatcccagctactcgggaagctgatgcatgagaatcacttgaacctgggaggtggagactgcagtgagctggaccgtgccactgcwctgcagtgagctggaccgtgccactgcactccagcctgggcgacagagcagtggcttccagtacattcacagtgttgtgcacctggcaccactatctaat

SEQ ID NO: 351679 - DNA, 201 bp, Homo sapiens
agcccttctcctgtagccagactggttgtgctacagcaggaatcaggtcacttccttgctcaaaaccctgtaacggagtcccgtcccatgttgagcaattkccaaggaccttgtcccaaggcctgactgggaggctctggctacctcctgccctcatctgctcctctcttcccttgctccactccagctgccctggcctcc

SEQ ID NO: 351680 - DNA, 201 bp, Homo sapiens
gtatgttttctctcgccctctggcgtcctggctggcagtgcggacagctcagagggagggggaaacctagtctcttcctggaagcacgtcagtgggatggrgaagagctgtggcctctgcatcctggggccgagcccatctgtgggtggagccggaggatcctgctttgggaagggacgtctctgctgacgtcggcgtgtt

SEQ ID NO: 351681 - DNA, 201 bp, Homo sapiens
ttcaccatgttggccaggttggtctcgaactcctgacctcaggtgatccgcccacctcggcctcccaaagtgctgggattacaggcatgagctgccttgcycggcctatgatatggagagtcttttcatatgcttatattccatctgtatatcttctttggcagggtgtctgttcaggtcctttgcccattttaaaaatct

SEQ ID NO: 351682 - DNA, 201 bp, Homo sapiens
tcctgacctcaggtgatccgcccacctcggcctcccaaagtgctgggattacaggcatgagctgccttgcccggcctatgatatggagagtcttttcatawgcttatattccatctgtatatcttctttggcagggtgtctgttcaggtcctttgcccattttaaaaatctggttgttcatgttcttattgttgagtttta

SEQ ID NO: 351683 - DNA, 201 bp, Homo sapiens
ccacaggggggcatctgggagccctgggactcatctttgactttttctttctttctctcccagtggtgtccgcaaagcccaaggtgcataatcgtcaacckcgaattaactcctacgtggaggtggcggtggatggactccccagtgagaccaagaagactgggaagcgcattgggagctctgagcttctctggaatgaga

SEQ ID NO: 351684 - DNA, 201 bp, Homo sapiens
tgaggcgggcagatcacttgaggtcaggagtttgagaccaggctggccaacatggtgaaaccctgtctctactaaaagtacaaaaattagccaggcatggkggtgtgtgcctataatcccagctactcagaaggctgaggcaggagaattgcctgaacctgggaggcggaggttgcagtgagctgagatctagccactgca

SEQ ID NO: 351685 - DNA, 201 bp, Homo sapiens
gcccggcttccatgctgcacacagctgggagcaattatgcctctggtttgagctgtgctgctccctctgggtggccacaccaccccctccctccgaccaaycaaccaaagaagtgcttcatctcgagttggaagtatgtcacccccgccccccaccaccaacaaggaaggaccctctttgtccctttcccagtgacaagtg

SEQ ID NO: 351686 - DNA, 201 bp, Homo sapiens
aataagatgggatggggaggaagggactatcctgtttattccgaatgacactagagttatttctctaaaagcaagaagtctggctttatttctagattttyttttttattcttcaaggatcttaatgacagtcacttcctcaccttacattactaatctttaaattaacatagcaccagctttccttagggctgacaaaga

SEQ ID NO: 351687 - DNA, 201 bp, Homo sapiens
gaagaagggtactcgtgagtattcgtgggcacagaaggcttgtccatgctaggatatctagccttcatatttttctgtttccaaatctgaactcaaggtayagcacaaactttctttttttcaactttaagttccggggtacgtgtacaggatgtgcaggtttgttacatcggttaaacatgcgccatggtggtttactgc

SEQ ID NO: 351688 - DNA, 201 bp, Homo sapiens
tcaaataagatggtgaacatgaagccctcactgattggtgggtgttacacctggtaagtgatattttccgagtggttgtgaaggggccctaaaggaagggmatgcttctgaaccgggaggtgaagtcccttcttcgcagctctgatcatggttggggccagttttcactgcctctcctggttatcagtttggtgtggagga

SEQ ID NO: 351689 - DNA, 201 bp, Homo sapiens
ggggggggtgcgttctgatagaataacaaacagaggataccaaggaaattttttaaaaaccctttaacgaaagagagccaacattgcatgaaggctgagattttttttaaaaggcaaggattcagaaaagggctgatcagtattttctgatcctagttcagtgctagtcagggagactgtcagtaaagacctttttggtct

SEQ ID NO: 351690 - DNA, 201 bp, Homo sapiens
ccagctgtcctggcccctcccttaacaccccatggtccaggcacctgcaatgtgaaggcctgactggagcccctgagccctagccagtgtggtgcaaggcytgtggccctgctgcaggcaggcatggtggggctatcagagccctggcctcctagggctgactgtcgtgcttccccactctcaatagcttcaaccgtctgg

SEQ ID NO: 351691 - DNA, 201 bp, Homo sapiens
ccaggtaagcacagctgatggagacttgaaaacagctctcgaatgctaagtgtggaaatatttgagatagaaatggaggagccgtggtcagagtcgatgckgttaatgaacgatcagaaaaaaacccacaaaactgtcatagtctagaattaagaggaagaacattctggctaaaggccagggctccttctgaatctcaga

SEQ ID NO: 351692 - DNA, 201 bp, Homo sapiens
cagagtgagaccctgtctctagaaaagatttttaaaaatctattatatgaatttcctaatagtaattatcttagaatttctagaatatacctagttgctcaagatagactattccttgaaaattttgttagaattgtttgttaatattttatattggggttttccatctatattcgttagtggtaatttgtctgtagcttt

SEQ ID NO: 351693 - DNA, 201 bp, Homo sapiens
gcccaccctgagccttggggaagaggaggagctgcaggtggggagtcccagggctgccgtctcagctgcctggcgcccctgtgccacccactgtatccttktgctggaacatccggtggtagctgagcctggccttcctgtctgtgtgaaggagacagcaaagtgatggccgtgagccatagtatagagaaccataggcag

SEQ ID NO: 351694 - DNA, 201 bp, Homo sapiens
ttccagctgtcctggcccctcccttaacaccccatggtccaggcacctgcaatgtgaaggcctgactggagcccctgagccctagccagtgtggtgcaagscctgtggccctgctgcaggcaggcatggtggggctatcagagccctggcctcctagggctgactgtcgtgcttccccactctcaatagcttcaaccgtct

SEQ ID NO: 351695 - DNA, 201 bp, Homo sapiens
gctgaggcgggcagatcacttgaggtcaggagtttgagaccaggctggccaacatggtgaaaccctgtctctactaaaagtacaaaaattagccaggcatsgtggtgtgtgcctataatcccagctactcagaaggctgaggcaggagaattgcctgaacctgggaggcggaggttgcagtgagctgagatctagccactg

SEQ ID NO: 351696 - DNA, 201 bp, Homo sapiens
gcttccccactctcaatagcttcaaccgtctggatcttccaccctacaagagctacgaacagctgagagagaagctgctgtatgccattgaggagaccgarggctttggacaggagtaaccgaggccgcccctcccacgccccccagcgcacatgtagtcctgagtcctccctgcctgagaggccactggccccgcagccc

SEQ ID NO: 351697 - DNA, 201 bp, Homo sapiens; identical to SEQ ID NO: 75095

SEQ ID NO: 351698 - DNA, 201 bp, Homo sapiens
gtttcccgcagctacctctgcttttcctataaaaactattggtgaattgattttctttggtgatggtccttgagtcactcttggacatttcaatagagctrtatttcccctacatttatttttaggtaccattacttattgtccttatctctaggaaccttatgttctagcagacaaggcaggtgccagccgtgtcttcaa

SEQ ID NO: 351699 - DNA, 201 bp, Homo sapiens; identical to SEQ ID NO: 75096

SEQ ID NO: 351700 - DNA, 201 bp, Homo sapiens
ctctgtgtcctgccagtggttttaccctatggtaggttacgtcatgctgttctaccacagggtagaaccacggacaggataccggggcaccctctgcgtcracggactcctcgtctgcccagccacaaacagcccagcagctggggactggcccccttgggacatccccttgctggtttagctcaagcccaaaaggactct

SEQ ID NO: 351701 - DNA, 201 bp, Homo sapiens
aatacagttttatttttatatggccatactcatttattttcatattgtctgtggctactttcatgctacgatggtatgttaagtagttagaacagagatcwtatggtcagcaaaacctaaaagatttacgatttggctctttgcagaaagtttgccagtccctggctgtaggagatggtttgaaggcaagagcagttcaca

SEQ ID NO: 351702 - DNA, 201 bp, Homo sapiens
agattttattccatgggttataacttatttctggtgtaattttttttttttttttttgagatggagttttgctcttgttgcctaggctggagtgcaatggygcgatcttcgctcaccgcaacctccgcctcctgggttcaagcgattctcctgccttatcttcctgagtagctgggattacaggcatgtgccaccacaccc

SEQ ID NO: 351703 - DNA, 201 bp, Homo sapiens
aataaggaagggaatgtattggctcatgtaactgaaaattctagatatcaatcctgattccaagcgaagcttgggctactcaacaatatcaccaaggaatkggcttttctcccatttttctgctctgccatccactgggtcaacttcctattgtcttcgggtccaaaataatagccagtggcccccaggaccacatgcttc

SEQ ID NO: 351704 - DNA, 201 bp, Homo sapiens
gtaacttaacaacgtgaatgactcttaaaagtattaggctaagcttaagaagccagacatagaagcttatgttctatatgattccatttatataacatccyggaaaaggcaaaattctagggacagaaatccaatctgaagatgtgggggcattggaggagggattgactgcaaaggggcacaaggaaattttgggagcaa

SEQ ID NO: 351705 - DNA, 201 bp, Homo sapiens
gaggggggtactcccagattcctctactgtgctgtcattcatggagacaagagacgcaagaggcggggagctaatgaagatgtcactttaaaaccacatcycccatggtggtcggctttggtgttcagcagggtttatggaacattggtactgcctggctctggggcagagtcatttctctgaaagtgcacccataggagg

SEQ ID NO: 351706 - DNA, 201 bp, Homo sapiens
tctgtaggtcataagtccaggatcacacggctgacttttcccttcagggtctcacaaggccaaaatcaaggctctggcaggacaacattcttatctgcatrcactggggaagaattcatatcaaaggtcattcagggctgggcacagtggctcacgcctgtaattccagcactttggcaggctgaggtgggcagatggctt

SEQ ID NO: 351707 - DNA, 201 bp, Homo sapiens
atagagaggagacaagagaaatacctaggaggtgtaattaagcaggactgcatggctggctaatgagacaaggtgaagggtaaggagggaggggggtactsccagattcctctactgtgctgtcattcatggagacaagagacgcaagaggcggggagctaatgaagatgtcactttaaaaccacatctcccatggtggtc

SEQ ID NO: 351708 - DNA, 201 bp, Homo sapiens
gaagagactgcaagaccaagccagagttctcattacattctgggttctgggtaagaccctgccagagtgtgagtgttggggggccgcggggaggtggagtragcagagtcagcattggtgccccaacaggaataccagtgttcactgttggcctagctgggtagaagagactttctgttgttaggctctggctaaggttgg

SEQ ID NO: 351709 - DNA, 201 bp, Homo sapiens
gctggtcttgacctcttgacctcaggtaacctgcccgcctcggcctcccaaagtgctaagatcacaggcatgagacaccgcgcctgcccccaacccccccyttttttttttttttttaattgagacagagtctggctctgtggcccaggctggagtgcagtggtgtgaacacggctcactgcagcctctatctcctgggct

SEQ ID NO: 351710 - DNA, 201 bp, Homo sapiens
agtgccataaagggaacaattaggatgttatgagagaatgaaaggaaatttactgtagcctgggagatgagggacatttggactgagatttggcctaggartttggccacctgggtggaaagtccaggaagagaatgccgggcaagtagatcagcaaagggtctgactctcccttggtaggggtctagagaggtattttga

SEQ ID NO: 351711 - DNA, 201 bp, Homo sapiens
tcccaaactggtctcaagccatcctcctgcctcggcctcccaaagtgttgggattacagggatgagccactgtgcccagcccaggaaatgtttcctgaatraatgaacaagaaacagagaaaaagtttgtaaactggctttgtaaaaatgaggctattttctctagaagagttcatacaaccctcaggagaccaaaacttt

SEQ ID NO: 351712 - DNA, 201 bp, Homo sapiens
tttagagtaaattacaaacctcgtgtttctttcatccctaaatactgatgtgtctggttcctaaaggagaaggatactacagtacaattaacaaaactaakaaatttcccgtttttgcagtgttgttaatctaattcagatttcccagctgtcacagtccaggacctcatgcaagatgcagtgtttagttgtcctgtgtct

SEQ ID NO: 351713 - DNA, 201 bp, Homo sapiens
tgagcactcttctcagctaagcccaacatacggcctggaagtagattggacaagtcaccatttactataccttctctctcaaggtgagtttttttagtctratgaaattgccacctttgagaaggttgctctgtactctagggtgcgcaaaaggaaattgtttgtcttccggaagtctttctgtaatttagaatggacttg

SEQ ID NO: 351714 - DNA, 201 bp, Homo sapiens
gaagggacgtctctgctgacgtcggcgtgttttaccttggatcacaggtagcaacggaccacagaagttttgcattgacaaagttggcaaggaaacctggytgcccagaagccacacctggtgagcctgctggttttagtgggaggtcggggggcctcagacccgatgagctcctgggacagcccagtgggtgtagcagct

SEQ ID NO: 351715 - DNA, 201 bp, Homo sapiens
ttggacctagtagctcagggtgaatgcatccatttgctcatcagtcactcttaagcagtgttcagaccacaggtaagcaaagagtgatcactgtgaaacargaggattgaggaggcctcacagagggaagtggctccaactcttgcaagaagatgatccaggttggggggacagtggaggtggctgcctgcatatgggaag

SEQ ID NO: 351716 - DNA, 201 bp, Homo sapiens
tgcccccttgccccaccgcgctgataggagggacgtctctgggtgggaagcaggtactgatggcctttattttgtctgccagtgtggcccctgagctcttktccagcctctataagagcttgtggagaggaatgtcctctgggttccctggggacagttctagaaccttctccttgagtcaaggagctgtcccctgtcact

SEQ ID NO: 351717 - DNA, 201 bp, Homo sapiens
agtagacacgggatttctccatgttggtcagacaggtctggaagtcccgacctcaggtgatccactcacctcggcctcccaaagtgctgggattacaggcrtgagctaccgcgcctggcccttgttttgtttttttgagatggagtctcgctgtgtcacctaggctggagcgcagcagcaggatctctctcagctcactgc

SEQ ID NO: 351718 - DNA, 201 bp, Homo sapiens
cgcttacaagcaaagcctctatgagcttttgcatacaggcttttatgcaaacatgttttcatttctcatgggtaaatacctaggagaggccaggtgtggtrgctcatgcctgtaatcccagcactttgtttgggaggccaaggagggtagattgcttgatctcaggagttcgatatcagcctgggcaacatggtaaaaccc

SEQ ID NO: 351719 - DNA, 201 bp, Homo sapiens
tttggacaggcattaatgacttgctgtacttttcaaagtcatgttttgtaaaactttttgctgtcgcccaatacatgtagtgtaacattgtagataccatsttagcctattaagtgaaaaacctagcaagtataaataaaattctcattcttagttgatctttaaagtatgatttgtgcatcttcagtgaatgatgaaccc

SEQ ID NO: 351720 - DNA, 201 bp, Homo sapiens
tactgggcaaggtgacgacccacgagctgaaggagggcggcgagagcatccgggtcacggaggagaacaaggaagagtacatcatgtgagtctcaggcgcygggggctccgctccaggggtggcgtggagatctagtgggttgcagagaaagatgggcccccacctgtggcccatcggtcactgtggatgccatttgcatt

SEQ ID NO: 351721 - DNA, 201 bp, Homo sapiens
ccccacctgtggcccatcggtcactgtggatgccatttgcatttgccttgatggtggctgctggtgggcggtcatgtgatggcgcgagctgggggaaccaragccgaggtccttagttaccgactcccagctgtgctttttcgccatgtgggagacttcaagcctgcagcgtggaatttctttgaagtggcatcaagctga

SEQ ID NO: 351722 - DNA, 201 bp, Homo sapiens; identical to SEQ ID NO: 75088

SEQ ID NO: 351723 - DNA, 201 bp, Homo sapiens
ctccccagctgatgctgtgcggcatgcaggagatagacatgagcgactggcagaagagcaccatctaccggcactacaccaagaacagcaagcagatccastggttctggcaggtgggtcccgggcccaggccttggcagggacatttgggccatcaaccaaaggaaacgggtcctgaggaggcctcacgcgcaaggacct

SEQ ID NO: 351724 - DNA, 201 bp, Homo sapiens
ccaaaacccaaattaggagtatatgttttttgtaacaaatagctgggttccagccagtcacaggcaggcagctgatcagaccacgcccaaataaggcagaygcccagctgtagctgtttagatgatttctctaccttgcttccgtgttcagcctctaaagacttgccgctcacactgcttggcagcgctctctgagcctct

SEQ ID NO: 351725 - DNA, 201 bp, Homo sapiens; identical to SEQ ID NO: 75092

SEQ ID NO: 351726 - DNA, 201 bp, Homo sapiens
caagtgatctgcctgccccagcctcccaaagtgctgggattacaggcttgagccaccgtgcccagccaaaaatttttgttaaaacatcaccttgtcttcaraagaaacttttctgcgaaatcaggttaccattagtgtagggttatatttgtacagttctagaaacttcttccattcctcttgagcctgtggcacaggggc

SEQ ID NO: 351727 - DNA, 201 bp, Homo sapiens
gtagctgggattacaggcacgcaccactacacctggctaattttgtatttttagtaaagacagggtttcatcatgttggtcaggctggtctcgaactcccraacttgggtgatccgcctgcctcggcctcccaaagtgctggactaaaagtctgcttgggattaggaaggggcaactgcttggttgaactgggtggggagg

SEQ ID NO: 351728 - DNA, 201 bp, Homo sapiens
actagaactgtgaattaaactcggagtgcctgaccacaccccctcttaatccacgtgcttaaaaaccctattgccagagacttaggtactggatcttggcrtaatagaggagggagaccctccttgacttaaaaaaaaaaaaaaaagcccacaataatcaacacttacgattgcatagtttcagggggctagatttggcag

SEQ ID NO: 351729 - DNA, 201 bp, Homo sapiens
cagcttttaaggttagtattggaatcagagaagaattgacacataaataagtcttgtttgggaaaagaaggtgtaaagtccgtgtacttcaactctgccasaaaagaatgttacttaccctctaagaataggtaatatctcatttatactaggtgttcaaattcccaagtgattattgaatcttaggattgagtgtctcct

SEQ ID NO: 351730 - DNA, 201 bp, Homo sapiens
gtcctccacaaatagaatgtaaggtctatgggggcaggcgttttgtgaattttgttcacttttgtgtacctacaacacaaaaccatgaatacatgcatatacacacacacacacacacacacacacacacacgacgttgaaagagtgactttctcctctaattactgaggatgaacgtcttttcctgtgacttaggtcttt

SEQ ID NO: 351731 - DNA, 201 bp, Homo sapiens
tcctccacaaatagaatgtaaggtctatgggggcaggcgttttgtgaattttgttcacttttgtgtacctacaacacaaaaccatgaatacatgcatatacacacacacacacacacacacacacacacacgacgttgaaagagtgactttctcctctaattactgaggatgaacgtcttttcctgtgacttaggtctttg

SEQ ID NO: 351732 - DNA, 201 bp, Homo sapiens
tgattctcctgcctcagccacccaagtagctgggattacaggcacatgccaccatgcctggctagtttttgtatttttagtagagatggggtttcaccacwttgcctaggtgggtcttgaactccagcgctcaggcgatctttctgccttggcctcccaaagagctgggattacaggcgacaaccaccatgcccggcctag

SEQ ID NO: 351733 - DNA, 201 bp, Homo sapiens
gtccccagttgtagtgtaaccctttcattttatttttaaaaaatttttaatgttttttgagacagagtctcactccatcactcagtccggagtgcagtgayatggatctcagctcacagcaacctctgcctcctgggttcaagtgattcttgtgcctcagcctcccaagttagctgggattacagatgtgtgccaccacac

SEQ ID NO: 351734 - DNA, 201 bp, Homo sapiens
tgaccacaccccctcttaatccacgtgcttaaaaaccctattgccagagacttaggtactggatcttggcataatagaggagggagaccctccttgacttaaaaaaaaaaaaaaaagcccacaataatcaacacttacgattgcatagtttcagggggctagatttggcagcagcttagctgggcagcctggccagggatc

SEQ ID NO: 351735 - DNA, 201 bp, Homo sapiens
tcccttgccttggcattaacggcctctgaagatttaaaagatctgtaatctcggagacttataaagcctaaccgtctccggtgagctctaaatagatcatyaactgtgtctgcagacagcctatcccagaaaggaaagaaaaataaactcaggcgggtgtgagtccactgtgaacacttcaggaagtcctgggagggccgg

SEQ ID NO: 351736 - DNA, 201 bp, Homo sapiens
gttgacatgtaagatattagggatgatagcgtagcaaactagggtttgcaggctgaatccagcctgccatctgcttttttgttggtgttcttgtttgtttstttgtttttgctgggtgaaatctgccgtgttttttttagagcacttttaggttcccccaaacatatatactctcttccccactatcaacatcccccacca

SEQ ID NO: 351737 - DNA, 201 bp, Homo sapiens
ggacaacgagaagaggatccggctgctgcagtttgtcaccggtacctgccgcctgcccgtcgggggatttgccgaactcatcggtatgttttctctcgccytctggcgtcctggctggcagtgcggacagctcagagggagggggaaacctagtctcttcctggaagcacgtcagtgggatggggaagagctgtggcctct

SEQ ID NO: 351738 - DNA, 201 bp, Homo sapiens
gagtcttgctctgtcgcccaggctggagtgcagtgccacgatctcggctcactataaactctgcctcccaggttcaagcaattctcctgtctcatcctccrgagtagctgggactacaggcacatgccaccatgcccgactaatttttgcatttttagtagagacggggtttcaccatattggtcaggctggtctcaaact

SEQ ID NO: 351739 - DNA, 201 bp, Homo sapiens
attgagctcatagagcgttcattattatctagagggttacagggtcagctttgagaggggaaaggatatatgtgggtgtctgcctgttttggttccccctycccaagatgtcagcagtttagtttaaatgttttcttctaagttataggaatgatctgcttggatgtaatgaatcaggtatttgtttttcaggaatgtcac

SEQ ID NO: 351740 - DNA, 201 bp, Homo sapiens
cagaaggtgaagcagaggacagaaagatactgagtgcacagcctccgtggcctggccagaaccacaccatagtcagtggcctcttatcagaaaggaatgcyggtcagttgctgtgtggaaaccacaaaagggaaggcagcgtgaggccattggttgaaatcagcagtgaacaagtcttttgagagggttgatttttgttcg

SEQ ID NO: 351741 - DNA, 201 bp, Homo sapiens
ttgctgtgtggaaaccacaaaagggaaggcagcgtgaggccattggttgaaatcagcagtgaacaagtcttttgagagggttgatttttgttcgacactgwggaaagaaagacttatggtggctagggaaggagggggtgtaacgaggtgtctctgacctcgcatctcatcatggctgggaattaaggtttttaaggtttc

SEQ ID NO: 351742 - DNA, 201 bp, Homo sapiens
ttttaaggtttctctggcgtcttcttggccaagagggggtccattcagttggttgaggagcttaggattttattattatttctcagtattgtggactgtcytgtcatttttttggacagtgtctttagaagagcaggagtttaaaatttttgatgaagccacaaaatgctttttaaaaaaaggtttcacattttatttatt

SEQ ID NO: 351743 - DNA, 201 bp, Homo sapiens
ctcagtattgtggactgtcctgtcatttttttggacagtgtctttagaagagcaggagtttaaaatttttgatgaagccacaaaatgctttttaaaaaaakgtttcacattttatttatttatttatttatttatttatttatttatttatttatttatggagacggagtcttcctacattgcctgggccagtctcaattg

SEQ ID NO: 351744 - DNA, 201 bp, Homo sapiens; identical to SEQ ID NO: 75143

SEQ ID NO: 351745 - DNA, 201 bp, Homo sapiens
ctctccagatctatcagaaattccagaccccagataagagttatattctagggtggtaaggcatgagaagaagaatgaggaatgaagggtgggtggggacrtgctcttactaatgacgctccatggcagcaggtgctcagttgttccttttctcctggggtggaggtggatccagatccagacttgagtgtggtcggctag

SEQ ID NO: 351746 - DNA, 201 bp, Homo sapiens
tgaaaccgcatctctacaaaaaaaatacaaataataaaaattagctgggcatggtggcttgtgcctgtagtcccagctacttgggaagctaaggtggaagkatggcttgaacccaggagttcgaggctgcagtgagctatgatctgccactgcactccagcctgggtgacagcgagaccctgtctctgaaaaacacataca

SEQ ID NO: 351747 - DNA, 201 bp, Homo sapiens
actgcattccagcttcagcgacagggtgagaccttgtctcaaaacaaaaaaacaaaacaaaaacacacaaaaccaaaaccaaaacacacacacacacacasacccacacacccacccatgggtggacaggaaatccctcgatgaaaaggtgatgttcaagtaatgatctgaaggaaggtcaggcatggtggctgacgcctg

SEQ ID NO: 351748 - DNA, 201 bp, Homo sapiens
cacacacccacacacccacccatgggtggacaggaaatccctcgatgaaaaggtgatgttcaagtaatgatctgaaggaaggtcaggcatggtggctgacrcctgtaatcccagcacttcaggaagccaaggaggaaagattgcttgagcccaggtgttcgagaccagcctaggcaacatggcaaaacgctgtctctacaa

SEQ ID NO: 351749 - DNA, 201 bp, Homo sapiens; identical to SEQ ID NO: 75142

SEQ ID NO: 351750 - DNA, 201 bp, Homo sapiens
agattctggaatttttttttttttttgtacaggctagagtgcagtggcatgatctcagctcaccacagcctcgacctcctgggctcaagtgatcctcctgyctcagccccccaagtggctcggactacaggtgcatgccaccatgtccagctaactttggtatgttttgtaaagatggggtttcaccatgttgcccaggct

SEQ ID NO: 351751 - DNA, 201 bp, Homo sapiens
cccagcacttcaggaggctgaggtgggaggattacttgagctcagaaatttgaggatgcagtgagccatgatcgtgctactgcactgcaaactggcatgasagcaagattctgactcttaaaaaaaaaaaaaaaaaagaataattaaataccctgcctgcttgtctgctttaagtaccttacttgagccaaagatcagttt

SEQ ID NO: 351752 - DNA, 201 bp, Homo sapiens; identical to SEQ ID NO: 75144

SEQ ID NO: 351753 - DNA, 201 bp, Homo sapiens; identical to SEQ ID NO: 75145

SEQ ID NO: 351754 - DNA, 201 bp, Homo sapiens
aggcaaatggatgttttctggtggggtaccgggagggagcagttgcatttgaagaatgaactatggatttcattgatgtgctttttttaaagaaaagtaawataacaaaagaaaaatccttgaagagtatttttattcccacctcttgtaatgttcagggaacatgagtgacatttggactcccaaacaaaagaagggagg

SEQ ID NO: 351755 - DNA, 201 bp, Homo sapiens
acatttcagattggttgtgaaggttattaaatgggacagtgtaaataaatatttctcacccacaaaaggtactcattaaatattgtatatacacagcttgkgtgcaagtatattttaaacttggatggatactctgaatgatttcaatgcatttttggataatatccagttatttttacttctttaagaacattttttaaa

SEQ ID NO: 351756 - DNA, 201 bp, Homo sapiens; identical to SEQ ID NO: 75146

SEQ ID NO: 351757 - DNA, 201 bp, Homo sapiens
tagctatcggcaaagatttcatttgcctcctgagaggtctggatctcagcccagagggccctcctgtgagctcagagacctcagcatttgttgagtggtcmccactcttcagagccatgagtttcagcttcttcggtgtctctccacccaaaatttcaatttaataattttcagttcctcccttaattccctcaatctagg

SEQ ID NO: 351758 - DNA, 201 bp, Homo sapiens; identical to SEQ ID NO: 75147

SEQ ID NO: 351759 - DNA, 201 bp, Homo sapiens; identical to SEQ ID NO: 75148

SEQ ID NO: 351760 - DNA, 201 bp, Homo sapiens
cttgtccctatggtgcgtggtgtttcaggagcagactcatgattcatttaaatgcatttgtttccatttaagtcggccaaagactgaggtcgactcagctycccgcttgtggagccgttcctgtacttaaacacaggaatggaagcaggcctgagttcttcatagagcaaacaaacctgtcccttctcctagccaagctca

SEQ ID NO: 351761 - DNA, 201 bp, Homo sapiens
taatcccaacactttgagaggccaaggtgggtggatcacctgaggtcaggagtttcagactagcctgaccagcatagtgaaacactggctctactaaaaayacaaaaaattagccgggcatggtggtgcacactggaatcccagctacttgggaggctgaggcagaggaatcgcttgaacctgggaggtggaagttgcagt

SEQ ID NO: 351762 - DNA, 201 bp, Homo sapiens
aaaatttaccaaaaacattgtggttctcagaggtttgggaatctggaattgcaaatagagagataatgggtgcataacatctgctccttctggaagatgtsttgctttccatattccccacagtcccaatgtctaagaccagcctgaccccagtgcattttcccttgtccctatggtgcgtggtgtttcaggagcagactc

SEQ ID NO: 351763 - DNA, 201 bp, Homo sapiens
aaccaggtgagcttggtggctcacacctgtaatcccaacactttgagaggccaaggtgggtggatcacctgaggtcaggagtttcagactagcctgaccarcatagtgaaacactggctctactaaaaacacaaaaaattagccgggcatggtggtgcacactggaatcccagctacttgggaggctgaggcagaggaatc

SEQ ID NO: 351764 - DNA, 201 bp, Homo sapiens
agatgggccagaaccctgggagttcaaagctagaggtggcgactcactgattgataggatgtgggatgtaaaaggaagagagaagctgggatgacgccagrgttttcaacctgagcaaactggaaggatggaattgccgtcagctgccacgtgtgttctgggaaagtatgactttcatgtctgtttaaattaattgaaatc

SEQ ID NO: 351765 - DNA, 201 bp, Homo sapiens
aggagcttgagtccagccactgtctgggtactgccagccatcgggcccaggtctctggggttgtcttaccgcagtgagtaccacgcggtactacagagacyggctgcccgtgtgcctggcaggtggagccgcccgcatcagcggcctcggggaatggaagcggagaacgcgggcagctattcccttcagcaagctcaagct

SEQ ID NO: 351766 - DNA, 201 bp, Homo sapiens
aaaggctgtggctgagaaagagatgtacttatttatcggggaccttaggcgagtcacatcaggcctcccgccctgctcccaaacctcccatggctcccatytgactcagagtaaaagtccaagttctcatggtggcctgtagtacagtttgtgggatggtccttctcactgctctgtccccctcgcttacatcactgcagc

SEQ ID NO: 351767 - DNA, 201 bp, Homo sapiens
cttcagcggagcctggggcaggatctttgaatccacacaccagtggttccaagtcaaagacaagagccttcctcttaagtggaacaaataaagttataaaygagctcaggtgaggttctaccacccaatgagtctgctgaaaatttaccaaaaacattgtggttctcagaggtttgggaatctggaattgcaaatagagag

SEQ ID NO: 351768 - DNA, 201 bp, Homo sapiens
attatgagagctataattcaagatgagatttgggtggggacacagacaaaccatatcaacacacagtatgaagacctttgtgcccgacttcttttatttcrcataataattaagtcacccatgttattatatttatcagtaggttgtgcctttttattccattgtatgggtgtcctaaagggtgttcatgcattcactagt

SEQ ID NO: 351769 - DNA, 201 bp, Homo sapiens
ccacaatttagttttagaatacttcctacaccccaaaagctccctgtgttcactgacaggtaatccctcttcccactcacagctctggcaactattaatcygcatttgtctctgcaggcttgaatgttctagatattcacatacatgtgtagacatatgtattagtctattctcatgctactaataaagacatatctgaga

SEQ ID NO: 351770 - DNA, 201 bp, Homo sapiens
gagtgtgtgcaggggaactgccctttataaaaccatcagatcttgtgagatttattcactgtcacgagaacagcacaggaaaaacccagccccatgattcmattacctctcaccgggtccctcccacgacacgtggggattatgagagctataattcaagatgagatttgggtggggacacagacaaaccatatcaacaca

SEQ ID NO: 351771 - DNA, 201 bp, Homo sapiens
actatacaggttgccaggacaacggaatgtcagagctcatgtgctccattttgagctcatattgtcttcattggaaacaggtcaacaaggagggcaagtgrctttttcaaccaagtctggaatactgacggggcttgtccagcctgagaccagtcacttcggaacagagtaattctcctccccaaaagcaatcaatagatc

SEQ ID NO: 351772 - DNA, 201 bp, Homo sapiens; identical to SEQ ID NO: 75158

SEQ ID NO: 351773 - DNA, 201 bp, Homo sapiens
tggctcccatctgactcagagtaaaagtccaagttctcatggtggcctgtagtacagtttgtgggatggtccttctcactgctctgtccccctcgcttacrtcactgcagccccccactttgtgtctagtggacatctggcaccgttctgccacaggacatttgcacttcctgccccctcttccggaatgagctgccccag

SEQ ID NO: 351774 - DNA, 201 bp, Homo sapiens
taccactgggccacctgccctgaaacccaggattatatcatggcctctggggacaaccgggggaccccagtgggtcaataccagcaagagaggccaaggacatccagtccagcaacttccagactaattttttccttagctatacaaactgttattcaaacaacatatttttaattgattatgtaatatttttacaagagg

SEQ ID NO: 351775 - DNA, 201 bp, Homo sapiens
gtggtgggcaggcaaggagaggaggcttggccaaaggctgtggctgagaaagagatgtacttatttatcggggaccttaggcgagtcacatcaggcctccygccctgctcccaaacctcccatggctcccatctgactcagagtaaaagtccaagttctcatggtggcctgtagtacagtttgtgggatggtccttctcac

SEQ ID NO: 351776 - DNA, 201 bp, Homo sapiens
gaggaggaaactgaggcacagagaggggaagtcacttgcccaaggtcaacaggcgggagtctctgccaggctgatgatggagaaggatcgggataacaagsggttctgtccccaagttgggaaggcggcactatcctttgatcgggagccccccattctgcttccagccctctcaccaccctgccaggaacaagaggtagg

SEQ ID NO: 351777 - DNA, 201 bp, Homo sapiens
tgccctagaccggtggctcccttttttttttttaggcagggtcttgctctattgcccaggccggcgtgcaatggcacaatcagggctcactgcagccctcracctcccaggtgcaagcaatcctcccacctcagcctcccaagtggctggaactatgggcacaaaccatcacacctggctaattttgtttactttttatag

SEQ ID NO: 351778 - DNA, 201 bp, Homo sapiens
tatagtcagtcccttcccactactcagacctcagctgaaaatcatctactcaggggggtccgtgggggacggtagaagcctggaggaggagcttgagtccrgccactgtctgggtactgccagccatcgggcccaggtctctggggttgtcttaccgcagtgagtaccacgcggtactacagagaccggctgcccgtgtgc

SEQ ID NO: 351779 - DNA, 201 bp, Homo sapiens
tctcgttacttctcccctcttcctctgcctgtccctctcactgtgtggatggaatgactgttcactatcatcatcaacagcatctactgtgtgttgtgcayagtacactgccaccggctctgagctaaacacgctacacgtgccaccatctctgcaaatcctcccaccagccccgggagctgtagtcatggggactaaatt

SEQ ID NO: 351780 - DNA, 201 bp, Homo sapiens
ggaaaaaaacaaggtaccgaacagtactcatggtttgctactgtctatgaaggcaaagcaaactatacatagggaaacatatacagcatatatatatatawgcatagaaaagtacatttctatgattttctatgcatgaaatatctctgaacacattggggggaaatgctaatcatgttgactgcctgtgcaaaagaaaac

SEQ ID NO: 351781 - DNA, 201 bp, Homo sapiens
ccttctggcagccccagaatgtgaaggctccaggtgaaagcccagccctggaggtcacctgcccaaggtcaacaggcgggagactccactaagctgatgayggaggaggatagagatgatgaggggatatgaccccatggtgggaaggcagcactatcctttgatgatgtccccttcactcaagccaggacccctcgccaa

SEQ ID NO: 351782 - DNA, 201 bp, Homo sapiens
aggcttccagtcagtgtggctcaaaaccaaccagtcctcctggggcttgaacacaaggcggcagcctcgttaatgtggaggcgttgggacccatactggaragccaagttctcgttacttctcccctcttcctctgcctgtccctctcactgtgtggatggaatgactgttcactatcatcatcaacagcatctactgtgt

SEQ ID NO: 351783 - DNA, 201 bp, Homo sapiens
tattgacatacatcgccgtaacccactcactttgctactatttggtatcccattgtatggaaataccatatggatccattctcctgctggaagtttaggtyggttccaagcttctgtgattacatacaatgttttaagaaacaattctcacacacgtcttcgtgtttatatttgcatttccacttacctaggagtggagtt

SEQ ID NO: 351784 - DNA, 201 bp, Homo sapiens
cactggacctatgtgataattgaacccttcagtatccatccccctcctggtaactgcaccccagttttgagtcaacaagaaggaaggaagcccagcgcagscctgaggggaaccagagagtcagtgcccatctcagcaggatagggagggtagtctgaggtcaccatcagctgtggatgtgtgatggatcagagttagtct

SEQ ID NO: 351785 - DNA, 201 bp, Homo sapiens
ttgaacctgggaggtggaagttgcagtgagccgagattgctccactgaactccagcctgagcaacaggaacaaaactccgtaaagaaaaaaaaaaaaaaaagaatcattttcaaaagtgactacaccattttacattcccatcagcacatagaggattacagtttctccacatccttgcaaaaacttgatatcgccaggtt

SEQ ID NO: 351786 - DNA, 201 bp, Homo sapiens
ccatccattctccaagacccccggtgccaaaatcaaaattttacacaacccattgttttaaatgtagcccaaagaagcagactcttagctatgtagagccygcctgctttatatatcctgagaaactgcacccagcatctgccagccacagattttttttttaaaaccttggactatagaagaccccaggcagctgctgtc

SEQ ID NO: 351787 - DNA, 201 bp, Homo sapiens
cctcttcctctgcctgtccctctcactgtgtggatggaatgactgttcactatcatcatcaacagcatctactgtgtgttgtgcacagtacactgccaccrgctctgagctaaacacgctacacgtgccaccatctctgcaaatcctcccaccagccccgggagctgtagtcatggggactaaattcttcccattttacaa

SEQ ID NO: 351788 - DNA, 201 bp, Homo sapiens
ggatgtgtgatggatcagagttagtctgcagccacatgaagggcagcagggtgtgtggccacagcagaagagaggcttccagtcagtgtggctcaaaaccmaccagtcctcctggggcttgaacacaaggcggcagcctcgttaatgtggaggcgttgggacccatactggagagccaagttctcgttacttctcccctct

SEQ ID NO: 351789 - DNA, 201 bp, Homo sapiens
tctcactatattgcccaggctgatcttgaactcctgggctcaactgatcctcccacctcagcctcccacagggctgggattacaggtgtgagccactacasctggccagtggctcccttctgatcactggacctatgtgataattgaacccttcagtatccatccccctcctggtaactgcaccccagttttgagtcaaca

SEQ ID NO: 351790 - DNA, 201 bp, Homo sapiens
atctgcagacctcccacatggcagccagtgcccaccagaggcactttgcacaaagaagacatttctcagctaatttttattctaatttctgaaagaacagsccaggcaacctagatagtcattagcactgaagaaagaaacatctcatcccagctcctaacccctcagacttagctgaaaaatgacagcagcctctggcaa

SEQ ID NO: 351791 - DNA, 201 bp, Homo sapiens
gctccaagtctcccatttctagcggcatctgcagacctcccacatggcagccagtgcccaccagaggcactttgcacaaagaagacatttctcagctaatytttattctaatttctgaaagaacagcccaggcaacctagatagtcattagcactgaagaaagaaacatctcatcccagctcctaacccctcagacttagc

SEQ ID NO: 351792 - DNA, 201 bp, Homo sapiens
ccaacagaataagactaaatttaacgtaggccagcaatttatttgctcctattttctctctggtgcctgcatgaatgaggctgctggatcagacctcctcsccagctgggccattgttgatacagttacatgaggggctccagcaggacggtgaggctccaagccagcccccaaaaggccaaagctcagtgcaggacccag

SEQ ID NO: 351793 - DNA, 201 bp, Homo sapiens
catttaaatgcatttgtttccatttaagtcggccaaagactgaggtcgactcagctccccgcttgtggagccgttcctgtacttaaacacaggaatggaarcaggcctgagttcttcatagagcaaacaaacctgtcccttctcctagccaagctcaccccagcaatgccaccaggaacccctaatgtcctctccagcgca

SEQ ID NO: 351794 - DNA, 201 bp, Homo sapiens
tccctatggtgcgtggtgtttcaggagcagactcatgattcatttaaatgcatttgtttccatttaagtcggccaaagactgaggtcgactcagctccccscttgtggagccgttcctgtacttaaacacaggaatggaagcaggcctgagttcttcatagagcaaacaaacctgtcccttctcctagccaagctcacccc

SEQ ID NO: 351795 - DNA, 201 bp, Homo sapiens
agaatttgcaggagaactcccctttataaaaccatcggatttcatgagacttattcactatcacaagaacagcatgagaaagagccattttcatgattcarttacctcccaccaggtcctccccatgacacataggaattatggcagctacaatttgagctcccctgtggggacacagccaaaccatatcaccttcctaat

SEQ ID NO: 351796 - DNA, 201 bp, Homo sapiens
aagctgttaagaatcttgtttcagttcacacatctaatatgggatagatctgggattctgatctaaatgacttcaattatccattgactaatatttattartcacttcctgtgtaccaggcactggtaaacaccagaagtaaaacagtagataaaatgggatgccagcttcgaggagcttatagtctaaagacgaatacaa

SEQ ID NO: 351797 - DNA, 201 bp, Homo sapiens
gcgctcattgcaagtcctaaactttaggagaagggattttgttttctcttcacattgcctacaaccctttaccaattgaaaagatgatttggggccaggcrtgatgactcatacctgcaatcccagcactttggggggccgaggcaggtggatggcttaaggtcaggaatttgagaccagcctgggcaacacggtgaaacc

SEQ ID NO: 351798 - DNA, 201 bp, Homo sapiens
tttggggccaggcgtgatgactcatacctgcaatcccagcactttggggggccgaggcaggtggatggcttaaggtcaggaatttgagaccagcctgggcaacacggtgaaaccccttctctatgaaaaataacaaaacattttaaataatttaaaaaaaaagattattttattcctttttacagccctttacgaagcagg

SEQ ID NO: 351799 - DNA, 201 bp, Homo sapiens
gaggcaggtggatggcttaaggtcaggaatttgagaccagcctgggcaacacggtgaaaccccttctctatgaaaaataacaaaacattttaaataatttaaaaaaaaagattattttattcctttttacagccctttacgaagcaggatctgcaacaaatttctcaggaaacgggctgagcaacacatgagggatatcac

SEQ ID NO: 351800 - DNA, 201 bp, Homo sapiens
agcaggatctgcaacaaatttctcaggaaacgggctgagcaacacatgagggatatcacccacaaacagtgatgagtagttattgttgcaaaccataattkagttgcccgagtctagtgtgcctttcttctttcttttgccacttgggtaattctcaccttctcagggaacatcttccactttcccccaaattgatggcag

SEQ ID NO: 351801 - DNA, 201 bp, Homo sapiens
gcaggatctgcaacaaatttctcaggaaacgggctgagcaacacatgagggatatcacccacaaacagtgatgagtagttattgttgcaaaccataattgwgttgcccgagtctagtgtgcctttcttctttcttttgccacttgggtaattctcaccttctcagggaacatcttccactttcccccaaattgatggcagc

SEQ ID NO: 351802 - DNA, 201 bp, Homo sapiens
tttgtaggtcttaaggacttgctttatgaatctgggtgctcctgtattgggtgcatatatatttaggatagttagctcttcttgttgaattgatccctttrccataatgtaatgatcttttttgtctcttttgatctttgttggtttaaagtctgttttatcagagactaggattgcaaccccttgcagaagaaatttcta

SEQ ID NO: 351803 - DNA, 201 bp, Homo sapiens
tctcaggaaacgggctgagcaacacatgagggatatcacccacaaacagtgatgagtagttattgttgcaaaccataattgagttgcccgagtctagtgtrcctttcttctttcttttgccacttgggtaattctcaccttctcagggaacatcttccactttcccccaaattgatggcagcttttttttccccccagttt

SEQ ID NO: 351804 - DNA, 201 bp, Homo sapiens
gatagttagctcttcttgttgaattgatccctttgccataatgtaatgatcttttttgtctcttttgatctttgttggtttaaagtctgttttatcagagrctaggattgcaaccccttgcagaagaaatttctaagcagcaaagcattcaagaggtgacttgggtgctgttaaaggcattcagttttataaagaaagcag

SEQ ID NO: 351805 - DNA, 201 bp, Homo sapiens
tctttgttggtttaaagtctgttttatcagagactaggattgcaaccccttgcagaagaaatttctaagcagcaaagcattcaagaggtgacttgggtgcygttaaaggcattcagttttataaagaaagcagagcataaaagttcagaaaatttgcagcctaacagtgcgacagaaaagaaaatcccatttgctgaggag

SEQ ID NO: 351806 - DNA, 201 bp, Homo sapiens
gggactgtcagggaggcatgactagttttgaaatgtgaggacataatagttgggtggaggcaggggtggaatgacatggtttggttttgtctcctctctcaaaaaaaaaaaaaaaaaaatttccaggcatggtggctcacccctgtaatcccagcactttgggaggctgaggcgggcaaatcacttgagggtcaggagttc

SEQ ID NO: 351807 - DNA, 201 bp, Homo sapiens
cgctataaacagatctgttgtcctttaggctttgtttttccatttatagagcacaggcagagtagatgtaacataaattttaaggccttaggattttttgratgataaatgagcattggcttcaacttaaagataccagctgcactggcctctaataagagagccaacctgtcctgagaagctttgatgccagacattgac

SEQ ID NO: 351808 - DNA, 201 bp, Homo sapiens
cttcaacttaaagataccagctgcactggcctctaataagagagccaacctgtcctgagaagctttgatgccagacattgacatctcttctctagctaggraagtcctagatggcatcttttttcaatagaagactgttttatctacattgaaaatctgttatttggtgtagccacctttatcaatgatcttagctagatt

SEQ ID NO: 351809 - DNA, 201 bp, Homo sapiens
agttttcctgaaattgattttgttttccttttaattaagtaatatttatcacctcctggtttttgtacattgattgtggtgtatggggttacaggagagcracagacgattcccaggtaagaagggaggaacagttattgtctttctaagctctgttagtctcttttttatataaattcatatatgcatgctttaatgcaa

SEQ ID NO: 351810 - DNA, 201 bp, Homo sapiens
tcaatgatcttagctagattttctgagtaacttgctacagcttctccattagcatttgctgtttcaccttgtacttttatgttacggagatggctttttcyttaaatgacatgaaccaacctctgctagttttgaacttttctgcagttttcttacctctctcaaccttcatagaattgaagagagttagggccatgttct

SEQ ID NO: 351811 - DNA, 201 bp, Homo sapiens
ctgttcgtagaaatgtagtgtgtgtcacctggggttatagtgcatgtgagtggggagtcacttaatgtctgttcctttttgtctcctttctccagctatayctgcaggcccgcttcacttggcgaggagcccgcctgctccggcccctcctgcagttcaccttgatcatgatggccttctacacgggactgtctcgcgtat

SEQ ID NO: 351812 - DNA, 201 bp, Homo sapiens
gcatgcaaaaggagcaacagccatggtctttacgctcacatggtggagctctattaagagctacagtttttgaactctgaaaacagggatgactcaacacratccatgcccttgagtagctagctcagtctagaaggggaaatatgacacagcatttaaagcgtcacgtatcaaagcctacggcctaacactaagatggaa

SEQ ID NO: 351813 - DNA, 201 bp, Homo sapiens
atcttagctagattttctgagtaacttgctacagcttctccattagcatttgctgtttcaccttgtacttttatgttacggagatggctttttctttaaaygacatgaaccaacctctgctagttttgaacttttctgcagttttcttacctctctcaaccttcatagaattgaagagagttagggccatgttctagatta

SEQ ID NO: 351814 - DNA, 201 bp, Homo sapiens
tcttagctagattttctgagtaacttgctacagcttctccattagcatttgctgtttcaccttgtacttttatgttacggagatggctttttctttaaatsacatgaaccaacctctgctagttttgaacttttctgcagttttcttacctctctcaaccttcatagaattgaagagagttagggccatgttctagattag

SEQ ID NO: 351815 - DNA, 201 bp, Homo sapiens
tgcctaaggtaatagacaagattcagacaggtttttctggctacaacgttgttgcttctttcaccacctcttgctctatcttttcccaaaaatctatcctwatttttcttcatatttcctctccataacagttaaatatttgtaaatatgtgggcagttgagctctttttcaccagaaaagacaggaagaggagctgtctt

SEQ ID NO: 351816 - DNA, 201 bp, Homo sapiens
cgcagccttcctggggagcctttgcgccgcccaggcccgaagcccccgccctccccgatcccaccgacttcttggcctgtacttgagtgggtctgggcgtrcttaagcgttcgtgggcaactgttaaaccagctcagtaaaagtcgtctccacgttggaagcccgggcggaatcccgcggaaggtgtgggttcgtcctttt

SEQ ID NO: 351817 - DNA, 201 bp, Homo sapiens
tagacttttaagggttaggattacaagaagccaagtccgcctggttcataatgatgatttatggctgtgttgtcgactccctgacccttctgtacaagggratagagaaaatacataatttgttgctcattcactctaaaatctgtcaaggctgccccagaagccatgtggtcctggagtcatgtgtctgctaaatggctt

SEQ ID NO: 351818 - DNA, 201 bp, Homo sapiens
atcttgagagaaagacagatatgccttaggaagggtgggagagaatttagacacgtggtctgttttagggtcaactctcacttgggtcattcctgtcattsaacagcccagaggaaaaccaaactaaaagaacagcaaggccaggcgtggtggctcacgcctgtaatcctagcactttgggaggctgaggcaggtggatca

SEQ ID NO: 351819 - DNA, 201 bp, Homo sapiens
gagatggctgctgttaacattattattaggaatttgaggtactgcaaaatgttcttttcatctccttgttttcccttgagtgaaggaaacattttactttkcaatttactatcttaagactgtgacactaaaaatggaagttttagagatgggacattagagctgaaaagaatccctgaattgtaatcaaaccccgtctcc

SEQ ID NO: 351820 - DNA, 201 bp, Homo sapiens
tgcttcagacagttttctctatgtaccagtgaccacaaaaaaaaaaaataagtattgtatgactacaatgttacataactatataccacggatatgtgcgrtaataaaaagagcaagaataccaaacatgagtaatttccctcatttgtagcaagattctggttcaaaaactgagaaatatttcttgttcaatattgtaca

SEQ ID NO: 351821 - DNA, 201 bp, Homo sapiens
ccacggatatgtgcgataataaaaagagcaagaataccaaacatgagtaatttccctcatttgtagcaagattctggttcaaaaactgagaaatatttctwgttcaatattgtacattagtaatggatcccaaaactttaaaagcatctatgactaacatttatcctgcatatgcttctgctattctcactagaccatatt

SEQ ID NO: 351822 - DNA, 201 bp, Homo sapiens
gtagtcccagctacgtgggaggctgaggcaggagaatggcatgaacccgggaggcagagcttgcagtgagccgagatcgcgccactgcactccagcctggrtgacagagcgagactccatctcaaaaaaaaaaaaaaaaaaaaaagaaataccttaagattaatgcagacatgtaagggaaacaatgccagaattttcctg

SEQ ID NO: 351823 - DNA, 201 bp, Homo sapiens
ttgaggcaggaggaccacttgaggcctggagtttgagaccaggctgggcaacaaagtgaggctaggactatagtcccagcaacttgggaggctgaggtggwgagatcccttgagcccaggagttccaggctgcagtgagctatgattgtgccacagaactccagcctgagtgacagagtgagaccctgtttccaaaaaaaa

SEQ ID NO: 351824 - DNA, 201 bp, Homo sapiens
ggttagaatgcctatagctagattatactgggtaagctgtattaaaacctttagatttttaaaaaagtgtagtcaagtatattctgataatttttgaacargagagtgacacgatatgaattataaacttaaagatggctctagatggttgtgtggaagagagtctaaggggtcaaaagtgtaaacaaaaaaactaattta

SEQ ID NO: 351825 - DNA, 201 bp, Homo sapiens
gaataataagctgtcttgattttaggtttaattttcctaaggctattaatggagttgagggacctttacttatgattttgccataaatttgttgttgcagytgtgcttgccctagctgtgaaatccaaggatttattattaattaataatcccttttactgaacaattctaccaaatgataacgtttgcatctgagagttt

SEQ ID NO: 351826 - DNA, 201 bp, Homo sapiens
gagcattgacagtatagtcagacacatccacgaatctcatcaaatcatacaagcctgaaggggaggtattcctctaactggttttatagatgagacagtcrttgtgcagagagattgaggggcttgctcaggatcttgggactagaaaatggtggagcttgtaggctatgacccaaccaacacctatgctctttcctccaa

SEQ ID NO: 351827 - DNA, 201 bp, Homo sapiens
aattggctaaaacaaagggtccacagggcccatgcaagtccaaagcccactagggcagtcagtaaaacttaaagctccaaaataatctcctttgactccawgtctcacatccaagtcacactgatgcaaggggtgggctcccaaggccttgagcagctcagcccctgtggctttgcagggttcacgccctgcagcagcttt

SEQ ID NO: 351828 - DNA, 201 bp, Homo sapiens
gtggaaacaggatatgtcttagggccagacagttctgggttccgatcctggccccatcacttggtagcttataacctggatcaagtgttgtagtaaacttsagtttcctcacctgtaaaatggagacaatgatttctactttacaggtgtccggagagaaaaaaatacctcacagacagtgggctctttgacatgaatata

SEQ ID NO: 351829 - DNA, 201 bp, Homo sapiens
tgaacctgggaggtggagcttgcagtgagccgagatcgtgccactgcactccagcctgggcgactcagcaagactttttctcaaaaaaaaaaaaaaaaaaraattttttattgtctaacatgctagatacaaaagaattatcctatgaacaacaccctcaaggcttttaccttctcaaggagaagacttgtacccatgaaa

SEQ ID NO: 351830 - DNA, 201 bp, Homo sapiens
atttgaacctgggaggcagaggttgcagtgagccgagattgtgccattgcactccagcctgggcaacaagagtgaaactccatctcaaaaaaaaaaaaaawgttcaagtccaaagtctcatctgaggcaaggcaagtgtctttcacctatgaatctgtaaaatcaaaggcaaattagttattccaagatgggtggtacagg

SEQ ID NO: 351831 - DNA, 201 bp, Homo sapiens
atttctccctagaaaatgggtttttctcttctgtcacatggtcaggatgcaaatttttcaaacttttatgctctgcttcccttttaaacctaagtttctcrtctccatctgagaccacctcagcctggacttcattgtccatatttctatcagcattttggtcaaaaccattccacaagtctctgggactttctagacttc

SEQ ID NO: 351832 - DNA, 201 bp, Homo sapiens
aataggaggaaagatgaagagtttcaccaccacgagttaccacaattttaacccagaatcaaagttttgaagtttaggagacattggaacacagtggaaasaggatatgtcttagggccagacagttctgggttccgatcctggccccatcacttggtagcttataacctggatcaagtgttgtagtaaacttcagtttcc

SEQ ID NO: 351833 - DNA, 201 bp, Homo sapiens
ccacctcagcctggacttcattgtccatatttctatcagcattttggtcaaaaccattccacaagtctctgggactttctagacttccaaacatcttcctrtctttttcagaggcttccaaactgttcctacctctgcctgttacccagttccaaagccacttgcatattttcacgttatctttatagcaatgccccactc

SEQ ID NO: 351834 - DNA, 201 bp, Homo sapiens
tcaagtataaaagactctaggacagtgcctgatagttggaggtcttgactgtgttgaattaaccctgtcacaaggtacaaataggaggaaagatgaagagwttcaccaccacgagttaccacaattttaacccagaatcaaagttttgaagtttaggagacattggaacacagtggaaacaggatatgtcttagggccaga

SEQ ID NO: 351835 - DNA, 201 bp, Homo sapiens
acttccaaggctctgatatggcttggctctgtcctcactgaaatctcatctcgaattcctatatgttgtgggagggacctggtggtaggtaattgaatcaygggggcaggtctttcccatgctgttctcatgttagtgagtaagtcttatgagatctgatggttccataagggggagtttccctgcccaagttcactcttt

SEQ ID NO: 351836 - DNA, 201 bp, Homo sapiens
aattaaatggtctttcagaactgcagaggtcatcaagtataaaagactctaggacagtgcctgatagttggaggtcttgactgtgttgaattaaccctgtyacaaggtacaaataggaggaaagatgaagagtttcaccaccacgagttaccacaattttaacccagaatcaaagttttgaagtttaggagacattggaac

SEQ ID NO: 351837 - DNA, 201 bp, Homo sapiens
atccatgtaagatgtgacttcctcctccttgccttctgctgtgattgtgaggcttccccagccacttggaactatgagttctccattaaacctctttcctktgcaaattgcccagtgttgggtatgtctttatcagccacgtgaaaacggactaatacagtaaattggtaccagtagagtgaggcactgctgaaaagatac

SEQ ID NO: 351838 - DNA, 201 bp, Homo sapiens
gctaaattggcttagcagaattcttgctaaaactgggctcttgaagacatgcccaaggacaggacctagtgggtcagaggagtctgactagagttaggtcragaaaaaagtgttttgttgcattctactgtaagaaccagaaaataaggagtcaaataaatatataatgtaaggttagtgttaagtgctgtgaaggaaaag

SEQ ID NO: 351839 - DNA, 201 bp, Homo sapiens
agattctggatattagccctttgtcagatgggcagattgcaaaaattttctcccattctgtaagttgcctgttcactcttatggtagtttcttttgctgtrcagaagctctttagtttaattagatcccatttgtcaattttggcttttgttgccattgcttttggtgttttagtcatgaagtccttgcccatgtctgtgt

SEQ ID NO: 351840 - DNA, 201 bp, Homo sapiens
tgtcctgaaggtattgcctaggttttcttccaggatttttatagttttaggtttaatatttaagtctttaatctatcttgaattaatttttgtataagatrtaaggaagggattcagtttcagctttctacctattgctagacagttttcccagcaccatttattaaatagggaatcctttccccatttcttgtttttgtc

SEQ ID NO: 351841 - DNA, 201 bp, Homo sapiens
tctcaggaatgtagttttacagttggtttatgctcatcaggatcaaaaaagtcacacttaccattttgtcaatacatctgttttaatatgtagtgttttcycttcccactcttttttaaaaatgtcatctattagttgaaacattgaattattttaactgttgaatatcccgatcttgttggatttatctcaataattatt

SEQ ID NO: 351842 - DNA, 201 bp, Homo sapiens
agtttcagctttctacctattgctagacagttttcccagcaccatttattaaatagggaatcctttccccatttcttgtttttgtcaggtttgtcaaagawcagatggttgtagatgtgtggtgttatttctgagggctctgttctgttccattggtctatatctctgttttggtaccagaaccatgctgttttggttact

SEQ ID NO: 351843 - DNA, 201 bp, Homo sapiens
gtacttttatgttacggagatggctttttctttaaatgacatgaaccaacctctgctagttttgaacttttctgcagttttcttacctctctcaaccttcrtagaattgaagagagttagggccatgttctagattaggctttggctcaagggaatgttggagttgatttcttatttagatcactaaaacgtttcctatat

SEQ ID NO: 351844 - DNA, 201 bp, Homo sapiens
gtggtgaatatcccttgattgtctcaggaatgtagttttacagttggtttatgctcatcaggatcaaaaaagtcacacttaccattttgtcaatacatctsttttaatatgtagtgttttcccttcccactcttttttaaaaatgtcatctattagttgaaacattgaattattttaactgttgaatatcccgatcttgtt

SEQ ID NO: 351845 - DNA, 201 bp, Homo sapiens
aacatctttgttctgccagtagtcattcacgagcacgttgttcagtttccgtgtagttgtgtggtgttgagtgagtttcttaatcctgagttctaatttgkttgcactgtggtctgacagacagtttgttttgatttctgctgttttacatttgctgaggagtgctttacttccaactatgtggtcaattttggaataagt

SEQ ID NO: 351846 - DNA, 201 bp, Homo sapiens
aggaactaaaattaccatgtatcttttagactcatgtgctggatgccaagaaatattaaagaatataagacacaaatacaaatcctgaataatgagttgakctataaatgcactaaaaaatcaagttgtaagtatgtgaaaattaaacctcaaatattacaaaagggtgaggaaaagggatccccatttattgttaggtgc

SEQ ID NO: 351847 - DNA, 201 bp, Homo sapiens
tccccctcatttcccaagttcccacaggaacctgggaataggttgtgcccagaggttagaacggaaactgcagcaagataactctgaggggacaatgcccmgttgacgtcatttcaactactttgcttcagctagaggtggttttttttttaatcttccatttttcttcaggttactcttctactccaccctgtctagtgt

SEQ ID NO: 351848 - DNA, 201 bp, Homo sapiens
ttgttcattatcttttgttctttttcctctctgagcttcactttgggtgtatttcagttgactatgtcttcaagtttacccgcctttccttctgtagtatstaatctgttaagcccattcagtgaattcttttatttagaatattgtgttttagtttccattttactctttttagaatttttttttctgtattatgtttgt

SEQ ID NO: 351849 - DNA, 201 bp, Homo sapiens
taagcatttagcagcacaatccatgatccatattcagggtgtgtattagtccattttcacaccactgataaagacatacctgagactgggtaatttgtaaygaaaaagaggtttaatggactcacagttccacgtggctggggaggcctcacaatcatggcagaaggtgaaaggcatgtcttacatggcgacagacaagag

SEQ ID NO: 351850 - DNA, 201 bp, Homo sapiens
caccagaggaggtgggaaactctgcagtcagtccgagaagcccttagaccctcccccagggcttttatgttgagctgcaggaagttctggagttgggcaargagactggactccccggtgtacccagtgctgtttttttgttcatgcagcctgtgattcatagcttccctggggtgttggggagaatcacatttgggtcag

SEQ ID NO: 351851 - DNA, 201 bp, Homo sapiens
gtgtccatctgtcccaggaaggacaaactcatgtcttcagcactgccacaggtctatctttaggccatcagccacctcccctccgctctcttcccttctcytgcctctccaagtgctttgatttgtagtcggaagttcctcttgtccacttgcctcttccccctcatttcccaagttcccacaggaacctgggaataggtt

SEQ ID NO: 351852 - DNA, 201 bp, Homo sapiens
agcaggcaacggcctcagtgtgatcttttttgtcagtattcttattttttcctcttaagtttttccaataatacatttttataatttcaaaatgattatamagtagtctgctgtcttccatgtctgcttatttgaaatagtgttccacgtagttgaggattcagtcctagacacttatggctaagaatgattctgggatct

SEQ ID NO: 351853 - DNA, 201 bp, Homo sapiens
ctgaaactttggggttgttttaccttcaaatattctaaaataagtcctgagtaggacattaatgcaagaccactaaactaatatactgtactagacaccaytggtattatcagtaaccaattatttcaagtctttgctcacagtcaccttcttggtgaaccctaccctggccaccctatttaagttgcagtttcttttttt

SEQ ID NO: 351854 - DNA, 201 bp, Homo sapiens
ttcagtctatattttgaataggtggtccaaattgggaccattgctagctctgcattttaggtgaactgatgaacatttctgatcctcagtttttccatttrtaagatgggtagaacagtacctactcataactctgtactgtaggtaagatgtataaactttttatcacagagttctttttttttttttttgaaacaagat

SEQ ID NO: 351855 - DNA, 201 bp, Homo sapiens
gcaatgtcatccatacatacattttctggtcctaccctggaggggtggtatttccaaactcttcatttaggtatggtatcgtccaaggagctcttggaagagatactctctacaaaacatgttttttatttgtttgtttgctttcctcttcaatggagggaagaaaaaagttaacttttggagggctctcctgctaggtgc

SEQ ID NO: 351856 - DNA, 201 bp, Homo sapiens
cagtggcttactcctgtaatcccagcactttgggaggcagaggcaggaggattacttgagctaaggagttcgagatcagcttgggcaatatagtgagaccytgtctctacaaaaaaatcaaaaattaaccgggcgtggtggtgcaagcctgtagctgtagcccagcttcttgggaggctgaggcaggaggataccttgaga

SEQ ID NO: 351857 - DNA, 201 bp, Homo sapiens
gcttctctggttagtggctgcggatgcagctccttcattaaatgcagtacatggaacttctaccagtagcctcttccccacaaatgacccacattgttgtwaagttagcaaccactgacaggaagtggcagaatgcgtctcagccacacagcagatttcattagacactctcccaaagtagctgtttgggtcaatttggcc

SEQ ID NO: 351858 - DNA, 201 bp, Homo sapiens
acacacacacacacacacacatacacatatatacatataaatatatttggttgtatatttttgttgttacaaaggggcttaaaacacccaactatattagygctttgatcttttcttctgtgcatatttgtgtctgtatatttcataaatagaaaattaggacactcctttgcaaatactgaatattctcctgtgttgttg

SEQ ID NO: 351859 - DNA, 201 bp, Homo sapiens
ccccccaaagctaatattctaacctgtttattatatttattcactgttggtcttatgtttgaacaaaatgattttgtttatctccaaaaagcaataaggcrtcaggaccatgtattctgttatagaggcacatagctacttgttttcaggggtgctttgccattaaaaccatggcaacattttcaaagtgacttattgatc

SEQ ID NO: 351860 - DNA, 201 bp, Homo sapiens
gggtttccctgccttgcctttccccttgaatgaggtccgtgtgtgccaaggcacttcctgctttcagccgctttgatagaattcagagcgagaaggtgctragaggtcagacatagctcagaggagcacaagctgtttgaaaaaagaacattttgatttcaacttattgaaaaagcacaattaggaattgggaaaaacagc

SEQ ID NO: 351861 - DNA, 201 bp, Homo sapiens
aaaccaaaccccaaacccagaaagccatttttgatttctctggtgttcgcttgattaacatgggctgtgaaatggttttctgcagttcacattgtgcgcarggatacctgtgtacatctgtggataatatgtatatactgtaagtgcttccctccccctcacattatattatagagtttccattctgaggtgaggctaccc

SEQ ID NO: 351862 - DNA, 201 bp, Homo sapiens
acagggagggagggtggagagtggggctttgccagagttcgcaaaggcctatgggttcccaaagccacactcaagtattcctcaggcctttgaacaattcygggggccttgctctcccctcttgtccttccaattagattccagttggggattcttccacttcttttcaaggccacttccacaaagggggagctgtcgtgg

SEQ ID NO: 351863 - DNA, 201 bp, Homo sapiens
gattccagttggggattcttccacttcttttcaaggccacttccacaaagggggagctgtcgtggaagctgatatttccatgaaaaccttccatttctcaggcaaacataccaggcagctgtcatggcaataccatggtgaaggggaataatgttatttggcatttcgccctttaaaaaagtgtatgtgtgggggtgggtg

SEQ ID NO: 351864 - DNA, 201 bp, Homo sapiens
ccacttcttttcaaggccacttccacaaagggggagctgtcgtggaagctgatatttccatgaaaaccttccatttctcaggcaaacataccaggcagctstcatggcaataccatggtgaaggggaataatgttatttggcatttcgccctttaaaaaagtgtatgtgtgggggtgggtgggaggaggaggatgggcaga

SEQ ID NO: 351865 - DNA, 201 bp, Homo sapiens
aaataggatttagcaattgcttagttattaattagaagaacaatgaagcaatttgggatgacttacagatttctggaatgatacagaaatcttgtggatgrattgatcattcaaaaacagttcgtagcctatcacctccttccttaaaagtgttcaataatttaacataacctaaagattagtgtttaaaactctttagct

SEQ ID NO: 351866 - DNA, 201 bp, Homo sapiens
acaagaacagcatgagaaagagccattttcatgattcaattacctcccaccaggtcctccccatgacacataggaattatggcagctacaatttgagctcycctgtggggacacagccaaaccatatcaccttcctaatgtacttccttgaaactcaaggaagtagtgggttccagtttgaaaattactggtctacagaga

SEQ ID NO: 351867 - DNA, 201 bp, Homo sapiens
cagcaaagcattcaagaggtgacttgggtgctgttaaaggcattcagttttataaagaaagcagagcataaaagttcagaaaatttgcagcctaacagtgygacagaaaagaaaatcccatttgctgaggagaaattcaagctgcctgcataaatttgcataagtaacgaggagccaaatgttaatacccaagacaatggg

SEQ ID NO: 351868 - DNA, 201 bp, Homo sapiens
ccacctctttcatcagcctgacctcgatgtgagacataaagtcaaaggagatcattttggagctttaagatttgactgccctgctgaatttcagacttgcwtggggcctgtagcccttttgttttggccaatttctcccatttgggatggctgtatttacccaatgccagtacccccattgtatgtaggaagcaactaact

SEQ ID NO: 351869 - DNA, 201 bp, Homo sapiens
gatttgactgccctgctgaatttcagacttgcatggggcctgtagcccttttgttttggccaatttctcccatttgggatggctgtatttacccaatgccrgtacccccattgtatgtaggaagcaactaacttccttttgattttacaagctcataggcagaagggacttgccttatcttggatgagactttggactgta

SEQ ID NO: 351870 - DNA, 201 bp, Homo sapiens
gcatgcgccaccatacccagctaatttttttgtatttttagtacagaaggggtttcaccatgttggccagacgggtctcaaacccttgacctcaggtgatmcacctgccttggcctcccaaagtgctgggattacaggcatttgccaccatacccagctaatttttttgtatttttagtacagaaggggtttcaccatgtt

SEQ ID NO: 351871 - DNA, 201 bp, Homo sapiens
ttttgaactgctttaaaattcctgcctgcacctgttatttctggatgatttatattagcttatttttctcctgattatgggtcacctttatttcttttccttttttttttttttttttttgacagagtctcgttctttgtccaagttggagtgcagtggtgcgatctcagctcactgcaacctccgtctcccggttccagt

SEQ ID NO: 351872 - DNA, 201 bp, Homo sapiens
tcatagctccactaggcactgccccagtggggactctgtgtgggggctccaaacccacctttatccttttcactgccctagcagaagttcttcatgaggaytctgcctctgttgcagacttctgcccggacatccaggtgtttccctacctcctctgaaatctaggcacaggttcccaaagctcagctcttatcttctgct

SEQ ID NO: 351873 - DNA, 201 bp, Homo sapiens
tggagtgcagtggtgcgatctcagctcactgcaacctccgtctcccggttccagtaattctcatgcttcgttctcctgagtaattgggattacaggcatgygccaccacgcctggctaatttttgtatttttagtagagacaggttttcaccatgttggccagggtagtcttgaattcctggccccaagggagttgcctgc

SEQ ID NO: 351874 - DNA, 201 bp, Homo sapiens
tttactttctagttttttcccccatttttcaaataaaaatagtatttgccatagctgcttgataagcattgtggacacattttggaattttaaagtgatamagacacttgtattaggttggtgcaagagtaattgaggtttttgccgttacaaaaacccctggactacattacttaaatggcaaaaaccacttactcttgc

SEQ ID NO: 351875 - DNA, 201 bp, Homo sapiens
tatagcaatgccccactctttgcggtacacatttcctgtattcatcactttcacactgctataaagaataactgagactgggtaatttatgaaggaaagakgtttaattgactcacagttctgcatggctggggaggcctcaggaaacttacaatcatggtgggaggcaaaggagaagcaaggcacattttacatggtggc

SEQ ID NO: 351876 - DNA, 201 bp, Homo sapiens
tttctcatttgtttccctttccttgggggtcagagatttgttatgcttaatgtccaaattctgaaaacaattgtttcatatattttgtccattcttctaawtttttttaatggcagtagggcaagtccaatactagctatcccattatgatggaagtggaagttttgtagagtaagtgttttgatagatatgggcacataa

SEQ ID NO: 351877 - DNA, 201 bp, Homo sapiens
catcaatcatgaatattttccttttgtatttaatatagcaaagtggactaaaaaaggatgcttaattaaggtataggcagtgatttgaacattgtaatttmttaattacagtgtaattgtaaagtgacggttatgaaaactatatagcagtgagggggtgtttataatatgttacatgaaaacatcagaaggtaaacattt

SEQ ID NO: 351878 - DNA, 201 bp, Homo sapiens
aatcatgaatattttccttttgtatttaatatagcaaagtggactaaaaaaggatgcttaattaaggtataggcagtgatttgaacattgtaatttcttarttacagtgtaattgtaaagtgacggttatgaaaactatatagcagtgagggggtgtttataatatgttacatgaaaacatcagaaggtaaacatttgtac

SEQ ID NO: 351879 - DNA, 201 bp, Homo sapiens
atattaattacatagtcaatccttttcatgtcttacattaagtacccattcctagttatgtaagctaacatgtacaggtaatgaaatggacaattcctcaygaataatgaattagaggcttgcagcttatacatagttttgttctcaaaattctcttttttccagacgtttctcttatctcatcctctttgtcctgtcttt

SEQ ID NO: 351880 - DNA, 201 bp, Homo sapiens
agggtcttgcctcaatgttgatggctgctgactgaccagagtggtggttgttgaagggtggggtggctgtggcaatttcttttagggagaccagaatgttkactgcattggttgactcttcatttcatgaaagatttctctgtagcatgttatattatttgatagcattttacccacagaagaacttttaaaaaaaatttg

SEQ ID NO: 351881 - DNA, 201 bp, Homo sapiens
ttttcaaagtttttgctttttattatttatttatttatttttgctttttaaaagcctctcaacaaactctccttattcccatgtgactgaggatgaaacaktctcagattaaacagacttctcaaggtcacgcattgtcagtgccaacattcaaaagaaggctaggtcaggttcttgaacatccttgtgaaattattcttc

SEQ ID NO: 351882 - DNA, 201 bp, Homo sapiens
tatgggatacatagagtcatcatttattattatttactttaaatagtgagagaggggcagcatggtatagtgcaaaaaagacacttagagtcagaagcttyaggttccacgttggccagtgccactatcgagttgcattgtgtggatgagtcggttttctgtgtgtctcagtttttttccacctgcaaaatgactgtgtgg

SEQ ID NO: 351883 - DNA, 201 bp, Homo sapiens
gcttcatgtattccctataatcctgtgttccagcttcactgttttttaaaaatttgcagtttgtcatacatacatacttactctttgaacttgatttcactttttttttttcagacatggtctcgctttgtcacccaggctggagtgcagtggcacaatcttggctcactgcagtctccacctcctgggcttgagggatcc

SEQ ID NO: 351884 - DNA, 201 bp, Homo sapiens
ccctaaggaagaaggtgacaagatgagaagatggacacacagatggaaaaaacatggccaggtgtcctgagctgataattaaatgaaattttaaaaatatwgagtctaagagatagcttgatgctgttcttgcctccagtctcagctttgctgtattagctgagtgaccttgggcaaatgttttctattttgtgaatgata

SEQ ID NO: 351885 - DNA, 201 bp, Homo sapiens
tattttgaatgcacaggtattctcattgataactacctttatccatattagtctccttgcttcctggaagcaacacacagaaatctgtattccagcctttrtttatgctctttcctctgctaacgcacccgctccttcttctctgcctatacgaagagtttccattctttaagctggtttctgctcaccctaccccctcac

SEQ ID NO: 351886 - DNA, 201 bp, Homo sapiens
ctaatgatgaatggggagaggtttcagtccttgaatcttctggagtagatgttgggcaggtgcagttctagaaatacaatgtatactctgtatagaggtarccgagttgaagggattattaacactatgtttgaggggctctgggggaaggcttctgaaagtggtaacatcacggttgtttggacaggcaaattagcagaa

SEQ ID NO: 351887 - DNA, 201 bp, Homo sapiens
acagatgggagagttaaatgacgtactcaaagactacagctacaaaaaattcaggttcagcctgtgcctggctgatttcaaaccccctttccatctcgcaracttacagttcaggaaggctaacctgtccaaatgaactgctcaaggggataggcagttagcttatcttgcctactctggatcaaatgtaagctgctgatg

SEQ ID NO: 351888 - DNA, 201 bp, Homo sapiens
gagagcatcaagtacccactgaaaactggtgagacaataaatgacgctgtgctctgtgccgtggggatcgtcattgccatcctcgcggtaagtgtccagaytctgctatggtggatcctgtctgacttcttcctgtattgtcatattatagaatgtctgagccaacagagacttataccaagtagaagccaactttctctg

SEQ ID NO: 351889 - DNA, 201 bp, Homo sapiens
gcagctgcccagtttgtgagtggctcccctccttagctccagttaaaagtacctaaagatagaatatctggtggcttcacagttccatggaaagtcagccrgacccagcgtccctttctggcctacttctctgtggccttatcactattcttcatttctagtctttgtaaaatcaggctcatactccttacccggaaagga

SEQ ID NO: 351890 - DNA, 201 bp, Homo sapiens
ggaggtgcagcaataaagtgaccaggaaagtgtctagcggtagctaatgttaattcccacctccctccaacccaccgcccatttttgctgatgcctactayttcagcagagccaagagctgccaaacattcgttcaatttttatctgaaggtctgcagattttggggtgttttctggagctgttctttataaatgagcatc

SEQ ID NO: 351891 - DNA, 201 bp, Homo sapiens
ttaaaataagaaaggtccacaagacacctgggaaaaccagccctttcattttgcacatgaagaaaatgaaccccagagagcagatgaggaagtgtgatcckgtgatcaaactggtagttggtggcagagctaagactgatggtaataataacataaagttattacttaactcccagacttgcttgtgcagtcttactgata

SEQ ID NO: 351892 - DNA, 201 bp, Homo sapiens
aagactgatggtaataataacataaagttattacttaactcccagacttgcttgtgcagtcttactgatatcagacatttcttcattgaaccaatgactartgttgacttactttccctgccaggatattgacagagctgatccaccttggaccacttgaggcttccattacccagtaggcaaaaagaacggccacacaga

SEQ ID NO: 351893 - DNA, 201 bp, Homo sapiens
aattggctataccaattggcattcaaatgacatggcattcaaatgacagcaaggagtatttcaaattcatttactggattagtcagtaaataggtattgcrtgccagctggctgccaggtcatgtgctgagggcatcctcagtgctctcactttagtaatgcccctgtggaagttcttgtcacattgttgatgggtggtta

SEQ ID NO: 351894 - DNA, 201 bp, Homo sapiens
acctcagtctcagcatgtctaaaaagccaactcagcccgggcaacatagggagaccctgtctctacaaaaataaaaaaattagctgggcgtggtggcacgygcctgtaatcctagctacaccagaggctgaggtgggaggatcgcttgagcctgggaagtcagggctgcagtgagccgtgatcacaccactgcactccagc

SEQ ID NO: 351895 - DNA, 201 bp, Homo sapiens
aatcctgttagagtgggttacatggctaagtaaatcctttgttggagagatttaagtcttgaaggatatttaagtcttgaaagataaataggagttgtttwaattcagatgttaaagacattacttcatggagttgttaggaagatcaaatgtgatgatttatgtaagagctcagaaatactttgcatggatgggactatt

SEQ ID NO: 351896 - DNA, 201 bp, Homo sapiens
tttgcacacttctaagaccagtagcaattaattactttaaatagaagccctgtcacttacaagcaacataaatatttgtattttgaacctctaagtaatarttgtgttgaccattctggccttaagtgatttaaaaaaatcagtgagtgatattttaacagggaatatgtttataaagaaagggagggtcaggtcatagag

SEQ ID NO: 351897 - DNA, 201 bp, Homo sapiens
taccttatagttttgttactatgtgaaacatctatgatactttgttgattaagaagttcatttaaacacaattatttaattgtcataaaagaaagattatyattcccattttatagatgataaaacttagtttttccctttctgatttgcccagggctaaaaagtggcagagtcagaactcatatccagttctgacttgtc

SEQ ID NO: 351898 - DNA, 201 bp, Homo sapiens
cactcactagattcttttttttttttttttttggtcatgctttgcaaaaattttgtaatgcaccttttattacgaatacatttaaactccaggctattgcrttcagagtttgatgaaattagttacctagcacatgtgtgatacacagtgaaagttcagttaacttgagccagtgccattcccttgattgttctgaacagt

SEQ ID NO: 351899 - DNA, 201 bp, Homo sapiens
tggtcatgctttgcaaaaattttgtaatgcaccttttattacgaatacatttaaactccaggctattgcgttcagagtttgatgaaattagttacctagcrcatgtgtgatacacagtgaaagttcagttaacttgagccagtgccattcccttgattgttctgaacagtgcctttttcatcagaggccatgagatttgct

SEQ ID NO: 351900 - DNA, 201 bp, Homo sapiens
cacaataaggtttgagaaatacccccactctttgctcattaaacctgcagactctgttcaggtgtgcttcccccaagccacactcctccggggcttggctsggagcatgctgggtgcagacatcggtaacctcttagcttaatgtaccaaaattgcatgcataaagatctgtatcaagactgtcagattctcaggggcaga

SEQ ID NO: 351901 - DNA, 201 bp, Homo sapiens
agtgagttagttctcacaagatctgatagttttataaggagcttcaccaccccctccacttgctctgcacttctccttgctgccaccatgtgaagaaggaygtgtttgcttccccttaagccatgattagaagtttcctgaggcctccccagccctgtggaactgtgagtcaattaaacctctttcctttataaattactc

SEQ ID NO: 351902 - DNA, 201 bp, Homo sapiens
tagattctatcaccctttctcaaatttagatgctatcagataatccagaggtcagcctcccgagtagctgagattacaggcgtgtaccaccacaccaggctatttttttttttttttgagatggactttcactcttgttgcccaggctggagtgcaatggcgcgatctcggctcactgcaacctccacctcctgagttcaa

SEQ ID NO: 351903 - DNA, 201 bp, Homo sapiens
aatctttgacaaacctgacaaaaacaagcaatagggaaaggattccctatttaatacatggcgttgggaaaactggctagccatatccagaaaactgaaastggaccccttccttacaccttatacaaaaactaacccaagatggattaaagccttaaacgtaagacctcaaatcataaaaaccctagaagaaaacctagg

SEQ ID NO: 351904 - DNA, 201 bp, Homo sapiens
accaaaagcaatggcaacaaaagccaaaattgacaaatgggatctaattaaactaaagagcttctgcacagcaaaagaaactatgatcagagtgtacaggaaaaaaaaaagaaagaaagaaaagaaaaaagaaaaaaggtttgtatttcattcttcaataagaagtgtttcaaaaaaaatgtatagttatactttgttaaa

SEQ ID NO: 351905 - DNA, 201 bp, Homo sapiens
tttatagttttcaaaaaattttaaacttttccaaccattatttctctactccactgagatttgaattacatgcatgttacactgcttgatattatccacargtcattgtaattgttcattatcttttgttctttttcctctctgagcttcactttgggtgtatttcagttgactatgtcttcaagtttacccgcctttcct

SEQ ID NO: 351906 - DNA, 201 bp, Homo sapiens
tatagttttcaaaaaattttaaacttttccaaccattatttctctactccactgagatttgaattacatgcatgttacactgcttgatattatccacaggycattgtaattgttcattatcttttgttctttttcctctctgagcttcactttgggtgtatttcagttgactatgtcttcaagtttacccgcctttccttc

SEQ ID NO: 351907 - DNA, 201 bp, Homo sapiens
attaagtcttcacaaccaccctatatgaaaaggaacagttatctctagttacatacggggaaactgaggcacagagtcacaggattgaaatccaggagatgtggttccacagtcgtgcagtctttttcattttagtattctcaaaatctagcgtagtacccggtgttggatgttaagatcttaaacaaacaaacaacttgt

SEQ ID NO: 351908 - DNA, 201 bp, Homo sapiens
taagtcttcacaaccaccctatatgaaaaggaacagttatctctagttacatacggggaaactgaggcacagagtcacaggattgaaatccaggagatgtggttccacagtcgtgcagtctttttcattttagtattctcaaaatctagcgtagtacccggtgttggatgttaagatcttaaacaaacaaacaacttgttt

SEQ ID NO: 351909 - DNA, 201 bp, Homo sapiens
ccccaattttacatttaggaggcagacatgaaaatatgccttagccttcaggtctggaaccttaaaacaaacaaacaaaaaccagtgtgcataggaatatrgaaagaacatatccggaacagtcagccagtaataccttgtgtcagatgcaaggggctatggagagaaatgatttgcaagcctaattagacctgctcccca

SEQ ID NO: 351910 - DNA, 201 bp, Homo sapiens
tattttctaatagtatcactatgtggaaaaggctggaaactgaagataagtgtcttattcttagccatccggcctaaccacccatctgagacttgaagctrgttaggatccctgtaaacaattcctgatggaattgtctactctttattagggtatgggatgttgtgctgttttgggggattgcattaaaaaacaggattt

SEQ ID NO: 351911 - DNA, 201 bp, Homo sapiens
tctgaggatcttagctagtgcaggagatttatgggaaaggaataattatgatgttagacagagggggccctcaaccttcccatctattaaatgaaaacaartgacattaagatctcttacagttctaaactttcatcaggatattactgttatgcacctaactccattctgagtaagatttatgatgccaacaaatatctg

SEQ ID NO: 351912 - DNA, 201 bp, Homo sapiens
tgtccttcaacctcagaagagccattgggccccttggagctatactttgcttttctataaattggtcacaacggttcaccaatgccataggcttgttttgrttgtcaaatcatgtgatattgtgtgtgtgataagtgagaatcatccttcatatgtctgtagtgttgtacagtttacagcgtggcttttatgtgcacgctc

SEQ ID NO: 351913 - DNA, 201 bp, Homo sapiens
ccatctcgagcaggcaaataacaccttaatacaaactgtcataggccaaggcaggtggatcacttgaggtcaggagtccgagaccagcctggtcaacatgrtgaaaacctgtctctactaaaagtataaaaataagctgggcttggtggcacgtgcctgtaattccagctacttgggagactgaggcaggagaatcgcttg

SEQ ID NO: 351914 - DNA, 201 bp, Homo sapiens
tccactacatctgtgcaattaccaagaccaccaacagagagaggccacattaatccttcaactgtgttgtcccctgatcagatggctacagagttcttctragaccttcttatccctgggggaacagtgggagggggcatctatttgtgatttaacaacacaggcatggagattgcactaaattttcatctgttccctttc

SEQ ID NO: 351915 - DNA, 201 bp, Homo sapiens
aaataaataaaaagttggtcatatctaaaaatactttcacagcaacatgtagactggtatttgacgaaatatctaggcaccatagcctggccacaagtackcccctagttctatctggaaaatgctaattcttcctgctcatttagagcagtgaccctatcttcccttctcagggtcagcataaacccagctacattatgc

SEQ ID NO: 351916 - DNA, 201 bp, Homo sapiens
atccctgggggaacagtgggagggggcatctatttgtgatttaacaacacaggcatggagattgcactaaattttcatctgttccctttctccaccacccrcactcactctcatgtcctggaagaagtgagaacagcagcaattcttccttagttaggtacagctcttagggattcatgactatttgaaaaacgtatcaat

SEQ ID NO: 351917 - DNA, 201 bp, Homo sapiens
tacataataggttgctggaagacggggccaggtcttttcctctgggcacatggtaggtacttaaacaccaggcggacatttctccaggaagcattccgtasctgtctcctcccccaccttccaaaggtcacagagaaccctgggcccacctctgtggctgcagtcactgtgctgattgtcatgtctgtttacttgtatatt

SEQ ID NO: 351918 - DNA, 201 bp, Homo sapiens
tgtgaacatctgtctctctggagacatacatactactgcctagtaggacttctaagagaaagccagctcgatgccattgggaacagcacaggaattagaasgaggaagccccagcttcagtgatggtcttcttgctgtctcatttttatcagagtgattcactgccctctctggccttcatcatactcatttatataagtg

SEQ ID NO: 351919 - DNA, 201 bp, Homo sapiens; identical to SEQ ID NO: 75162

SEQ ID NO: 351920 - DNA, 201 bp, Homo sapiens
tagtagctaatgtttactaacacttatcaccacctacatgctgcactttttaaaatctttgtctatctcctctcccactcctctatacacatacaagaaartaatatccatgaagacaagaatatatttattttgttctctactgtatccccagtgcctaaaatagtgcggagcccatggctggtactctatttgttgcat

SEQ ID NO: 351921 - DNA, 201 bp, Homo sapiens; identical to SEQ ID NO: 75163

SEQ ID NO: 351922 - DNA, 201 bp, Homo sapiens
ttcgcctcgtctgtagaggtgaggtattcaggctgcctttcacaacccaaatttcattaaatagacttttaagggttaggattacaagaagccaagtccgsctggttcataatgatgatttatggctgtgttgtcgactccctgacccttctgtacaaggggatagagaaaatacataatttgttgctcattcactctaaa

SEQ ID NO: 351923 - DNA, 201 bp, Homo sapiens
aactgtaaggggtataactgtattataaatattataaactgtaaagcattatacacttcaccctgcatgagctaatgttagaatcattttcattttacctrtggggaaaaccagttctatccagttaagtgagcttgcctcagttttctcatctgtaaaatgggactaatgatagcaactccacctacttcagtgagttgt

SEQ ID NO: 351924 - DNA, 201 bp, Homo sapiens
gtaatcagtaattggtggattattttcagtagtgataaatctcctctaagcatcatatcatagatacagtatgaaaatcaagaaagatttgagaaggatcktcaggctcagagaagacagcacaggctgactggaggaaattcacaaacactgaagggcatcgtactacaagtttcttagttgttagactggtattctatt

SEQ ID NO: 351925 - DNA, 201 bp, Homo sapiens
cgtgccaagcaggagtctgtgacctctgctctgcttgtgccacatgacagaactcttccccacgaatcagggccgctgtcccagggaatgccaggaaggascaaagttctcttcttactcacaactatggctgtattgaatggtttttgaaacacagagacatcacctgaggttaagaggattgataaaaaagcagcatgt

SEQ ID NO: 351926 - DNA, 201 bp, Homo sapiens
attttcatctgttccctttctccaccacccacactcactctcatgtcctggaagaagtgagaacagcagcaattcttccttagttaggtacagctcttagrgattcatgactatttgaaaaacgtatcaatacggaggtgatgatatgctccatttgaagtcataatgcttaggaggccgagaaatactttctgtgagggg

SEQ ID NO: 351927 - DNA, 201 bp, Homo sapiens
cctgatcagatggctacagagttcttctgagaccttcttatccctgggggaacagtgggagggggcatctatttgtgatttaacaacacaggcatggagaktgcactaaattttcatctgttccctttctccaccacccacactcactctcatgtcctggaagaagtgagaacagcagcaattcttccttagttaggtaca

SEQ ID NO: 351928 - DNA, 201 bp, Homo sapiens
agtgccactatcgagttgcattgtgtggatgagtcggttttctgtgtgtctcagtttttttccacctgcaaaatgactgtgtgggattatgtctattattrccattaaacatgcggtgaccgatttctagtagaggcttgacgttagagacttgacatatgctgaatgtctaccctatgcatctactctgctgagctcttc

SEQ ID NO: 351929 - DNA, 201 bp, Homo sapiens
tggggcttttccaggtccttttctaccatgccattctttctctttgcttggtatgtgctatttacttccttttttttttttttttttttttttttttttgkgaaacggagtcttgctttgtcacttaggctggagtacaatggtacgatcttggctcactgcaacctccgcctcccaggttcaagtgattctcctgcctca

SEQ ID NO: 351930 - DNA, 201 bp, Homo sapiens
ccacccatctgagacttgaagctggttaggatccctgtaaacaattcctgatggaattgtctactctttattagggtatgggatgttgtgctgttttgggrgattgcattaaaaaacaggatttgggatgtgggagagattaggttaaaatttagaaagtggggagaaaacgatccacaagtcctagagtgtatttggtag

SEQ ID NO: 351931 - DNA, 201 bp, Homo sapiens
ttggtacagttttggtaattagtagcattaataatagtatctatcaattttataattgaaagcacctgaacaattttataattaaaagcacctgaataaatgatggtgatgagtcatttccacaaatatgcattgagcacctttaatgcaccaggttctgtgctgggtgtcgaggtctaatgatgaatggggagaggtttc

SEQ ID NO: 351932 - DNA, 201 bp, Homo sapiens
tggtacagttttggtaattagtagcattaataatagtatctatcaattttataattgaaagcacctgaacaattttataattaaaagcacctgaataaatgatggtgatgagtcatttccacaaatatgcattgagcacctttaatgcaccaggttctgtgctgggtgtcgaggtctaatgatgaatggggagaggtttca

SEQ ID NO: 351933 - DNA, 201 bp, Homo sapiens
gttattttgcaaaacagatattagccccatgtgtcagtaatctacagtcatttgtaccttaacataaaatgccaaagcacagtaatatattcttagtgtaaaaaaaaaaaaaaaaaattcaaggctgggggtggtggctcacacctgtaatcccagcattttgggaggccgaggtgggaggatcacttgagctcaggagtt

SEQ ID NO: 351934 - DNA, 201 bp, Homo sapiens
ctacattcacctatactgtccctccctgaaccacccagaccagtttttaaatttggcctttcctgaagtgaaacttttttttttcttttgaggcagggtcycaaaaacccaagtcatttttgacactagcataaaaatgttgctttttttctaaaggtaaattaatttatcattattgatgctttaaactataccacctaa

SEQ ID NO: 351935 - DNA, 201 bp, Homo sapiens
catagtaaaagtaggcagtgttggatacttatcatcgatttttctcttgtttcttcatcttgagtttttgggtgtttttgtttgtttgtttgttttttgtttttttttttttttttttttttttttagtgtttggccttccttctcctgcataagtgattatggcaaattgcacacacacaccccaacaggcactagggaa

SEQ ID NO: 351936 - DNA, 201 bp, Homo sapiens
atagtaaaagtaggcagtgttggatacttatcatcgatttttctcttgtttcttcatcttgagtttttgggtgtttttgtttgtttgtttgttttttgtttttttttttttttttttttttttttagtgtttggccttccttctcctgcataagtgattatggcaaattgcacacacacaccccaacaggcactagggaag

SEQ ID NO: 351937 - DNA, 201 bp, Homo sapiens
agtaggcagtgttggatacttatcatcgatttttctcttgtttcttcatcttgagtttttgggtgtttttgtttgtttgtttgttttttgttttttttttkttttttttttttttttagtgtttggccttccttctcctgcataagtgattatggcaaattgcacacacacaccccaacaggcactagggaaggccagaac

SEQ ID NO: 351938 - DNA, 201 bp, Homo sapiens
ttctgatcctcagtttttccatttgtaagatgggtagaacagtacctactcataactctgtactgtaggtaagatgtataaactttttatcacagagttctttttttttttttttgaaacaagatctggctctatcacccagactggagtgcagtggtgcaatcttggcttactgcaacctccgccttctgggctcaagtt

SEQ ID NO: 351939 - DNA, 201 bp, Homo sapiens
aaaagataaggaagggaattccacgcagaaggaataccatgaagacatggcgatgggtgagaacatgatatgttttgtgaccctagaaatgcagaacaacraaacttgggggataatggggagaggtgacctcaatgaatagtagcctcattctccctttcagcttcaaaattggatggtttctgggaatggggtcccctg

SEQ ID NO: 351940 - DNA, 201 bp, Homo sapiens
atcatagactgaatgtatgagactgaatattaagactgaaaatacccttttaagaagtcatttttgcccattcattctgttttgttcctttgtccttctgyttctttatttattcagtcatttcgcaataaatatttattgagttcttcccgtgaagtaggcactgtgctaaattttggggatacagtggtaaataaagac

SEQ ID NO: 351941 - DNA, 201 bp, Homo sapiens
ttaatgtgaggtgacagtgggggatgggtgtttgcactgaagggtaaccctttgctgactgtgcccttctgagctttgctctcagcaggaggacagcccgygggggcctgctgttgtggttccttcttggcgccactgccctaattggagtcccctgcacccccagttaaaaaaattaaaaggttgggggatccttactag

SEQ ID NO: 351942 - DNA, 201 bp, Homo sapiens
tcaggtcaaacagcagaaacccttctgctaatcccctgccccttcctgccttttctcaggagtattacggtagatgtttccattcagtcctctggaagcaytcgtgatatcaaatccaacacttatagcagcaagctagcaatttttgtttagtaaaaaccagaggtggaatatgaatataacagtttggaagaatctgga

SEQ ID NO: 351943 - DNA, 201 bp, Homo sapiens
aaaaagcagcatgtatggcacaaaggccaccacttgaggtgccaagaaacacagaatccattttccagtctgccagataacctcctgagccaagcctttayggactccctgttaattgagttgtaatcttcgctgacatttgctgagagcccaagcactcagagagaaggtagcaaagctggagttgaccccagacagcct

SEQ ID NO: 351944 - DNA, 201 bp, Homo sapiens
ccttgacctcaggtgatccacctgccttggcctcccaaagtgctgggattacaggtgtgagccaccaagcccggcccctttaacatttcttgttgtgcagktctattggcaataaactttctcagcttttatttgtctgaatctatattttaccttaacttttatttatttttattttttaaattttattttatgaatatc

SEQ ID NO: 351945 - DNA, 201 bp, Homo sapiens
tagctgccgcttatggttacttagtaaaaactcctgttgctaaatggctcaaatggatgtctgtgtgtttattttgccatctaatacaaagcataaatttytcttactccagtagctcatcaaacccttgaatctttcatcataagcacattgaggcaggaactatgcctgtgccatcctcacacctttgcaagtggcact

SEQ ID NO: 351946 - DNA, 201 bp, Homo sapiens
aatttttcttactccagtagctcatcaaacccttgaatctttcatcataagcacattgaggcaggaactatgcctgtgccatcctcacacctttgcaagtrgcactcaataaatgtttctcaagtattgttcagactcagtgaggtcacatccccaggaggaaaaaggacgctgggaatgagtgatacgagatttgtcatt

SEQ ID NO: 351947 - DNA, 201 bp, Homo sapiens
tgaggccctggctctaccctcatctcaggctcttctaaagagcttttgtattctaaagaggatttttccatcagagaggtaggagctgtaggaaccccgarggcagataagcagccctcactctagataaggtatgctgggggagcttactgagggaatcctgtacacagcccacatcaaaggaaggctgagaatggcctg

SEQ ID NO: 351948 - DNA, 201 bp, Homo sapiens
atctcccaccgggtccctcccacaacacatgggaattactggagctacaattcaagatgagatttgggttggaacacagccaacccatatcagtgtgtcasgttttttgtttttttttttcaccaggactactgttgcattcatgtgggatatttattatgctgtattatgcaatattcctgggtcccaatcactatgtac

SEQ ID NO: 351949 - DNA, 201 bp, Homo sapiens
gccccatccagaacccggttctgattagagggcaagagtgacagacgtggagggtggaggggcccagagctggaaattgaaccatcatcctgctgcttgcwgtcctgagccttctcctgctgaatgtcaggtttgtttaaaacagcaagagaggccttgactgagttggatgcccctgctcccattcagatggtccccaca

SEQ ID NO: 351950 - DNA, 201 bp, Homo sapiens
agattctatcaccctttctcaaatttagatgctatcagataatccagaggtcagcctcccgagtagctgagattacaggcgtgtaccaccacaccaggctwtttttttttttttttgagatggactttcactcttgttgcccaggctggagtgcaatggcgcgatctcggctcactgcaacctccacctcctgagttcaag

SEQ ID NO: 351951 - DNA, 201 bp, Homo sapiens
tcggctcactgcaacctccacctcctgagttcaagcgattctcctgcctcagccacccgagtagctgggattacaggtgcctcagccacccgagtagctgrgattacaggtgcccgccaccacgcccagctaattttttgtatttttagtagagacggtatttcaccatgttggccaggctggtcttgaactcctgacctc

SEQ ID NO: 351952 - DNA, 201 bp, Homo sapiens
atacttcaatgcaaaaatggatataaagaacccaacacattgtgagtgtgcattcaatagtggctgtattatccactgtgttttttttttttgcagcccaraagtcttgtatttattttattttatttttttaacatctactatgccatgagttcatacgttccagcagcaggctccttccccttggttctcacaaagttg

SEQ ID NO: 351953 - DNA, 201 bp, Homo sapiens
ctcttattggtagttctttgaacagtgaaagaaaagcctggaaaatggcattcatgaagcagctactatgtgccaggcactgtgctagaggttgtgtgtgygttgatctcctttagtcatcaccacaactcattttactgtgggaaaaaactgggactcagggaaatggagtgggaaccagaggaagtgctggatctgggg

SEQ ID NO: 351954 - DNA, 201 bp, Homo sapiens
ttctttttagagcagtacccattcccttagatgtctacagcatcacctttctcatagattctcatatacgtggccaaataaacaactccatgttttctaamaggcctagagaacatctatcgggtgcctctcctctttccctttgtgtttgtcattttggtgaattactggaagatggcagttccagctgaaaggccactg

SEQ ID NO: 351955 - DNA, 201 bp, Homo sapiens
tgtctacagcatcacctttctcatagattctcatatacgtggccaaataaacaactccatgttttctaacaggcctagagaacatctatcgggtgcctctyctctttccctttgtgtttgtcattttggtgaattactggaagatggcagttccagctgaaaggccactgtgtttttggtggtcttccctagttccaagat

SEQ ID NO: 351956 - DNA, 201 bp, Homo sapiens
catcgtaaaccaggcacacaatcaacagcttgaatttggggagggggaagggaggctagtagaattctttccaacctttaaaagaaaaacagtccatttgscagtagtttcttaaaggtggactaaggatctttgtgtttgaaaactgaaaaatgaaaggtctagttttcctgtgtgctccaaattgacagttgtgggttt

SEQ ID NO: 351957 - DNA, 201 bp, Homo sapiens
gattagatagtgctttcctatagttccggagaaacacaagccaagaaattactgcaataattgttatctcttgtccagtgctactgtgtatggggatacaygtgaaaaatgtggatgcatttcacccttgaaaccccaagagctagatattcttagggttttcagtttagcacagggttaaaagcacatgccctggttcag

SEQ ID NO: 351958 - DNA, 201 bp, Homo sapiens
gatattgtgtgtgtgataagtgagaatcatccttcatatgtctgtagtgttgtacagtttacagcgtggcttttatgtgcacgctcttctttgcacctggdagtaatcctgggaggttgattcttacagctaactcaaccggggctcaaggatattaagtgactctctcataactaagtagtggcatggccagaccaggag

SEQ ID NO: 351959 - DNA, 201 bp, Homo sapiens
aggagaatcgcttgaatccagggggtggatattgcagtgagccaagatcatgccactgcactccagcctgggcgacaggatgagaccacgtatcaaaaagaaaaaaaaaaaaagctacataataggttgctggaagacggggccaggtcttttcctctgggcacatggtaggtacttaaacaccaggcggacatttctcca

SEQ ID NO: 351960 - DNA, 201 bp, Homo sapiens
ctgtgacatcatagctaccctttaccttgtcgttgattcttcatttagtatttcttttctatagttaagttcttgtctctcccttaaaaaaaaagatacacacacacacacacacacacacacatacacatatatacatataaatatatttggttgtatatttttgttgttacaaaggggcttaaaacacccaactatatt

SEQ ID NO: 351961 - DNA, 201 bp, Homo sapiens
accatcatcctgctgcttgcagtcctgagccttctcctgctgaatgtcaggtttgtttaaaacagcaagagaggccttgactgagttggatgcccctgctsccattcagatggtccccacaacaaaggaacggaatggcagtggaggagaccagtgtggtttagagatgcaaatcatcacgcgttatggagaaagcagaca

SEQ ID NO: 351962 - DNA, 201 bp, Homo sapiens
gcaaagctggagttgaccccagacagcctgacacagagctggcactccaagacccaggctttggcaggtctcctctcatctctccaccccttcacctcccrgcatgtcaaacatttcaatattttccaacacctgagtttctgtattagatacctgtcccctttgatggaacacagttccagtgtcacctcatctctgatg

SEQ ID NO: 351963 - DNA, 201 bp, Homo sapiens
gagtcccatctattcccttctgatttactccagggctgcctgggcacaggggaatggatgaaatgagctcccaaacctcttctggccctgcagaagtctarctctttgcccagtaatgtgaccttgaggtaatctgatcttgccactgctggcccccactcttaggcaggcagaaacatggatgtgggagagagaaggaag

SEQ ID NO: 351964 - DNA, 201 bp, Homo sapiens; identical to SEQ ID NO: 75161

SEQ ID NO: 351965 - DNA, 201 bp, Homo sapiens
caaatgatgtatctcaggggagaaaaaagagactccatgttttcaaagtttttgctttttattatttatttatttatttttgctttttaaaagcctctcarcaaactctccttattcccatgtgactgaggatgaaacagtctcagattaaacagacttctcaaggtcacgcattgtcagtgccaacattcaaaagaaggc

SEQ ID NO: 351966 - DNA, 201 bp, Homo sapiens
tatgatctgcatttaaattcccaaatttaaaacaaaccaaacaaaacaacgcacttcagactcttttggaaacctttgaaaggaacttgatttctgtgtgmtttgaaagtatatattgcaatcaaggtattggtggtaagtgtgtttttgaggtttgtcacaaattaacaaaattatatgcctaaagagttttgcagagaa

SEQ ID NO: 351967 - DNA, 201 bp, Homo sapiens
aacttgatttctgtgtgctttgaaagtatatattgcaatcaaggtattggtggtaagtgtgtttttgaggtttgtcacaaattaacaaaattatatgcctraagagttttgcagagaaatgcaaatcattgtaagcgccttgtcataataagtagtgtgctttggttcctgtttatgtatccctaaaacacataatacact

SEQ ID NO: 351968 - DNA, 201 bp, Homo sapiens
tgccttgcagccccttctaggcactactaggggcgggcatccagacatgggcaacctggaagcccaacaggtgaacttatgatgttagagatcacagctartggataacatcttcctcttttctactgcctcccccactaagtgggcagtcctgagatacagtgtattctgattcttaggagcacggcacttggcagcaac

SEQ ID NO: 351969 - DNA, 201 bp, Homo sapiens
tattgcaatcaaggtattggtggtaagtgtgtttttgaggtttgtcacaaattaacaaaattatatgcctaaagagttttgcagagaaatgcaaatcattrtaagcgccttgtcataataagtagtgtgctttggttcctgtttatgtatccctaaaacacataatacactattacattgacacgaaggaaaccattctca

SEQ ID NO: 351970 - DNA, 201 bp, Homo sapiens
attggcatcatgtaaacagcttgatagtagattttcaggactgggaaggaagagaactaatctttgttaaatacctgccttctgatatttcatcctcacarcttttcaaagtggatattggcatcctctttttagagttgaggctcagagaaattaggcaacttgctgaagatcacatagagtgtcagtggcaaaactggt

SEQ ID NO: 351971 - DNA, 201 bp, Homo sapiens
tataaagcaaaacatttttaaaaaccactcctagtttcatcatccagaaaagataataactttaatatttagatattgtatcagtctgttttcacactgcsataaagatactacccgagactgagtaatttatgaaagaaaaaggtataattgacttacagttccaaatggatggggaggcctcaggaaacttacaatcat

SEQ ID NO: 351972 - DNA, 201 bp, Homo sapiens
ggccatttaaatgttgggaggtatcagttatgtaagaatgatgtgctgttgttgtcacacacaataagtcaatcttaaaaaggcatttatccctgctgatrttatagtttttatacagaccaatttaatgaactggatgtcattttgatgtgtgaattttggtaagtttgtttgccagaaattctaattacttaattacct

SEQ ID NO: 351973 - DNA, 201 bp, Homo sapiens
atctagaccactgggcagatgactgcccaagattgacagtgtgcatcaatggtttgtagagatggtgatcacctgctgtgtgtaggtaggtgccgggtgawacctcccttatagcaagcaggctttgtggtaggcaccttggcctataagctgatgtgtaaaatacagatcttgcctttggatcttatggtttaaagggaa

SEQ ID NO: 351974 - DNA, 201 bp, Homo sapiens
tgacgtactcaaagactacagctacaaaaaattcaggttcagcctgtgcctggctgatttcaaaccccctttccatctcgcagacttacagttcaggaagkctaacctgtccaaatgaactgctcaaggggataggcagttagcttatcttgcctactctggatcaaatgtaagctgctgatgttacatgtaccacatttc

SEQ ID NO: 351975 - DNA, 201 bp, Homo sapiens
tgtgacatcatagctaccctttaccttgtcgttgattcttcatttagtatttcttttctatagttaagttcttgtctctcccttaaaaaaaaagatacacacacacacacacacacacacacatacacatatatacatataaatatatttggttgtatatttttgttgttacaaaggggcttaaaacacccaactatatta

SEQ ID NO: 351976 - DNA, 201 bp, Homo sapiens; identical to SEQ ID NO: 75160

SEQ ID NO: 351977 - DNA, 201 bp, Homo sapiens
gttcatgcctgtaatctcagcactttgggaggccaaggcaggagaattgcttgagcccaggagttcaggatcagcctgggcaacatagtgagaccctgtcwatatatatatatatatataaatgattaaaaaaggctgtaaattccccgggggagagattttttggtctcttcattcactactatatcctacttcccaaaa

SEQ ID NO: 351978 - DNA, 201 bp, Homo sapiens
ttctctagcccagaggccttcatgcagatgaggaagtgaatgcagataagccagaatgtcagcagtagactagaagaggtcaagatgattagactttcagsttttgtccagctctacttaccctttcagggcacctaggactttactaaagcccctctgggtattctgatctgggaaagtgtgttttggtctagaataggg

SEQ ID NO: 351979 - DNA, 201 bp, Homo sapiens
ccgcttcttggaaaatgcctcctcttccctctgtgaccttgggagtgactcacacagaccctaaactcagtgttcattggagaagaggaggttatctgaaggctgagccctctctcagcctgaggccctcgtacatcgagtcacagacttcctagggataacttgggatggaccacatactgatttgccccaaatgaatgg

SEQ ID NO: 351980 - DNA, 201 bp, Homo sapiens
atttacaatgtaaagatggtttggaaaggggtgataaatctctttccctgccttttactcactcacctgtgaacatgcaagaacagggactcaatcttacytatcatttttctccaaatgcctgacacccagccttgtgctcagtgggacctcatggtccagaatggcttggaatcgcagcactgagagattcatttcatt

SEQ ID NO: 351981 - DNA, 201 bp, Homo sapiens
atgctcacaaattcccagtgccaaaagccgctgaaagccctttattgaggtcaaaaaataatgattgcagttggataatcccatctagttaaaaaaaaaayggctgccaaagatggcttttctttagatagcacttactgtacttagggcatgagggtgagccaggtcccaaggctttctcctccaaagagggttattcct

SEQ ID NO: 351982 - DNA, 201 bp, Homo sapiens
gctcatttagagcagtgaccctatcttcccttctcagggtcagcataaacccagctacattatgctgtcactccacatagctattgactttgatgttcagrcccagtagcactgtagaggacaagtctcccacagagagtgctagctcttagtaaggagaggcaggccacttctgcggttctaaaggtttagctaaggcta

SEQ ID NO: 351983 - DNA, 201 bp, Homo sapiens; identical to SEQ ID NO: 75165

SEQ ID NO: 351984 - DNA, 201 bp, Homo sapiens
ttatttgctaaacggacctaacaggattcttgctgaaggcaggccagggtgatcagctattacccagggaatggtgtgggggtgagaaatttggttagacrtcaagagtgatcaggtagtgagggtggggaattttggctaaattggcttagcagaattcttgctaaaactgggctcttgaagacatgcccaaggacagga

SEQ ID NO: 351985 - DNA, 201 bp, Homo sapiens
aaataaaggtcaatatttcacttataattctggatttgcaacaaagtatttttaataaacaactgtctctattctggagagaaggcaggttaattaaatcmcatgtgactaattaacaaaaaagaaaacaaatgaaagttccatacttaactattcttactagttacttaactcgaataaagtataacatttcaaaagcag

SEQ ID NO: 351986 - DNA, 201 bp, Homo sapiens
ttaagagaatactattatgggcctagcccccttcaaagagataagtagatacacgtgacaatacttgaaaccctttaaaggaaatgtaataaataattttgagatgttatttttagcaggtaccctagtaacaaatattatacttaatccattttcattttgtggctgagtacatttctaaattgcttcaatatgagtcaa

SEQ ID NO: 351987 - DNA, 201 bp, Homo sapiens
gagagttaaatgacgtactcaaagactacagctacaaaaaattcaggttcagcctgtgcctggctgatttcaaaccccctttccatctcgcagacttacakttcaggaaggctaacctgtccaaatgaactgctcaaggggataggcagttagcttatcttgcctactctggatcaaatgtaagctgctgatgttacatgt

SEQ ID NO: 351988 - DNA, 201 bp, Homo sapiens
agtaacaaatattatacttaatccattttcattttgtggctgagtacatttctaaattgcttcaatatgagtcaacattataattttcagtgcagctgagaaaaaataaaacgttttggatcagacttccttcatgagcaaatgcattaattggaataacaaaggttgtttgctttgctgtataaacattatggatctgac

SEQ ID NO: 351989 - DNA, 201 bp, Homo sapiens
gcagatgactgcccaagattgacagtgtgcatcaatggtttgtagagatggtgatcacctgctgtgtgtaggtaggtgccgggtgatacctcccttatagmaagcaggctttgtggtaggcaccttggcctataagctgatgtgtaaaatacagatcttgcctttggatcttatggtttaaagggaattcaagacaagtac

SEQ ID NO: 351990 - DNA, 201 bp, Homo sapiens
gagatgtaaaagaacaacttgaccctctgtggctagcaggaacttagaggtgcaggtgcctttcaagatggcaggcccttactgggtgttctgtgaacatmtgtctctctggagacatacatactactgcctagtaggacttctaagagaaagccagctcgatgccattgggaacagcacaggaattagaaggaggaagcc

SEQ ID NO: 351991 - DNA, 201 bp, Homo sapiens
acagtatagtggatgtgaaagtgctttgaaagctgtaaagtactaagccaatattattaaagcagatcagagtataggaaagtttgtccttcagactcagyggtggaagatgagttctcagtctctgaaagagattgttaggctgctgtgcaaaaatattacttttcttgggataatttacaaatagagtggaatgttaaa

SEQ ID NO: 351992 - DNA, 201 bp, Homo sapiens
tttactgcaatgatgagagcatcaagtacccactgaaaactggtgagacaataaatgacgctgtgctctgtgccgtggggatcgtcattgccatcctcgcrgtaagtgtccagactctgctatggtggatcctgtctgacttcttcctgtattgtcatattatagaatgtctgagccaacagagacttataccaagtagaa

SEQ ID NO: 351993 - DNA, 201 bp, Homo sapiens
agagggaatgaataactttatgaattggggaaatgaattcctagtttggttaaaagcatattctataccttatttcctgttcaataaatggagcattttcrtggaaaaaagccaaaagttttatgaatagtcccttactttttcccatctgttagaaacatttttcaaatataaattaaaaatgaatccctacaagaattt

SEQ ID NO: 351994 - DNA, 201 bp, Homo sapiens
aataacttagatgggacagaaactctgttttaccctaataaaatagaacttaaggcttagtaaatgcttcagacagttttctctatgtaccagtgaccacaaaaaaaaaaaataagtattgtatgactacaatgttacataactatataccacggatatgtgcgataataaaaagagcaagaataccaaacatgagtaatt

SEQ ID NO: 351995 - DNA, 201 bp, Homo sapiens
aaccagatttctccatcccatgtttcagaatcccagatttttcccaaccaagattctgacattagcataacagacttctttggttaagtgtttttgagctrggcaattctaactattcaatcttgaatctggttttcagctttttctgctactcactacaggagataagagcctctttctaacaaggctctcttgccgtca

SEQ ID NO: 351996 - DNA, 201 bp, Homo sapiens
tctcaccacacacacaaaaagattcgtatacaatatgtttgttaattagcttgacttatagccattccacaatcaatatatttcaaaacatatacatactraatatatacaatttttatttgccaatgaaataaaaaattttaaaacagtaaaaaaaaattctgtttggggataagtaattaaggattagtcaaacattta

SEQ ID NO: 351997 - DNA, 201 bp, Homo sapiens
acaccattggtattatcagtaaccaattatttcaagtctttgctcacagtcaccttcttggtgaaccctaccctggccaccctatttaagttgcagtttcttttttttttttttttttgtaattttttttaaatttttttttttttttttttttttttttagaagcagggtctcgccatgttacccaggctggtctcaaac

SEQ ID NO: 351998 - DNA, 201 bp, Homo sapiens
gaaaagcagtggcaggtttcctgaccctttctgggaaagtcaaagtgcaggaacctcaataggctttggtggttgcattcttcccctttgaaagggacaargccatattatcttgagagaaagacagatatgccttaggaagggtgggagagaatttagacacgtggtctgttttagggtcaactctcacttgggtcattc

SEQ ID NO: 351999 - DNA, 201 bp, Homo sapiens
ctccacgccccccacttccttcttcgtcagctcctccactttggccgcgtagcccctcatggcgtccatcttggacgcccctttgttcgcgctccacgccycccacttccttcttcgtcagctcctccactttggccgcgtagcccctcatggcgtccatcttgcacgcccctttgttcgcgctccacgccccccacttcc

SEQ ID NO: 352000 - DNA, 201 bp, Homo sapiens
tggtgaaaccctgtctctactaaaaatacaaaaattagccgggcatggtggcacacgcctgtaatcccagctactcgggaggctgaggcaagagaatcgcytgtatctgggaggcggaggttgcagtgagccgagatcgcaccattgtgttccagcctggatgacgaaagcaaaactccgtctcaaaaaaaaaaaaaaaaa

SEQ ID NO: 352001 - DNA, 201 bp, Homo sapiens
tttcgcccaggctggagtgcagtggcgcaatctcggctcactgcaagctccgcctcctgggttcacaccattctcctgcctcagcctcccgagtagctggkactacaggcgcccgccaccacgccctgcttattttttgtatttttagtagagatggggttttactgtgttagccaggatggtctcgatctcctgacctca

SEQ ID NO: 352002 - DNA, 201 bp, Homo sapiens
gggaatacacacatgagccaccacgcctgtctaatcttttttttttttttttttttttttgagacagagttttgctcttgtctcccaggctagagtgcaayggcgccatctcggctcactgcaacctccgcctcccaggttcaagcaattctcctgtctcagcctcccgagtagctgggattacaggcgtgcgccaccacg

SEQ ID NO: 352003 - DNA, 201 bp, Homo sapiens
gaggcaaatctttatgtattgacatggtaacattaagtggagaaaaacaaggaacagaataatttgtaaattataccaccatttgtgtaaaaaaaaaaacrtagatgcgtgcagtgcttctagaaggatacacaggaaactgtggactagttgtctctggggtgagagtaggatagagactcagtttttactttattcctt

SEQ ID NO: 352004 - DNA, 201 bp, Homo sapiens
gagaaaaacaaggaacagaataatttgtaaattataccaccatttgtgtaaaaaaaaaaacatagatgcgtgcagtgcttctagaaggatacacaggaaastgtggactagttgtctctggggtgagagtaggatagagactcagtttttactttattcctttagtatataatatttgaatttttctaccacatacgtgta

SEQ ID NO: 352005 - DNA, 201 bp, Homo sapiens
atttcttcttctaaaaatctgagtgcgcgctgtttctctctctcacatcctctccagatttcttctaaaaatctgagtgcgcgctgtttctctctctcacrtcctctccagatttcttcttctaaaaatctgagtgcgcgctgtttctctctctcacatcctctccagatttcttctaaaaatctgagtgtgcgctgtttc

SEQ ID NO: 352006 - DNA, 201 bp, Homo sapiens
gcttgtggaaccaaaacattattgttaaggctttgtattattcatttatttttatttgtatctgtatgtatatatatgagacggggtcccactctgttacrcaggctgaactcgaattcctgagctcacgtgatcctctggcctcagcctccaagtggctgtgactataggtgtgaccactgggcacggcttaaggcttcc

SEQ ID NO: 352007 - DNA, 201 bp, Homo sapiens
gtttgtccttactaaacaacgaaagggatgcttgtggaaccaaaacattattgttaaggctttgtattattcatttatttttatttgtatctgtatgtatrtatatgagacggggtcccactctgttacacaggctgaactcgaattcctgagctcacgtgatcctctggcctcagcctccaagtggctgtgactataggt

SEQ ID NO: 352008 - DNA, 201 bp, Homo sapiens
agagacggggtttcaccgtgttagccaggatggtctcgatctcctgacctcgtgatccgcctgcctcggcctcccaaagtgttgggattacaggcgtgagycaccgcgcccagccacattctctgattcttaatataacctgcaaggttgatagcatcagcctttgcaaatgaggaaaccgaggctaagaatgagtaagtc

SEQ ID NO: 352009 - DNA, 201 bp, Homo sapiens
cttcaacacttaaaagctttcttaggttcagccgggcgcgatggctcacccctgtaatcccagcaccttgggggaccaaggcgggtggctcacctgaggtyaggagtcccagaccagcctgaccaacatggtgaaaccctgtctctactaaacacaaaaaattagccaggcacggtggtgtacgcctgtaatcccagctac

SEQ ID NO: 352010 - DNA, 201 bp, Homo sapiens
caccgcatccaaccttaagtgcttcatatacattctctgattttttttttttttttttagacggagtctcgctctgtcgcccaggctggagtgcagtggcrtgatctcggctcacggcaagctccgcctcccgggttcacaccattctcctgcctcagcctcagcctcccgagtagctgggactacaggcgcccaccacca

SEQ ID NO: 352011 - DNA, 201 bp, Homo sapiens
cagattctcactgtgttgcccaggctggcctccagtgatccttccagctcggccccacagaggtttaatttttatttccctgatgactaatgatattgagyaccttctcatgtgcttattagccatttacttatttttgtgaattttatgttcaagtcttttgtccattctttaataatttttaatatttcatgatgaaaa

SEQ ID NO: 352012 - DNA, 201 bp, Homo sapiens
acatttctaggcactttgattaaatgtaaggaaaccttgatagtttgcttatttttgttttgtttgttaaaaaagcaagaacaggtcaccttaaataggtwgctagctggcagacccaggtaacatcaagatttctgtggctagatctttagaattagaagacgttatctttggtgttaaatgaatcagacttcactggca

SEQ ID NO: 352013 - DNA, 201 bp, Homo sapiens
tgcccccatgctgagtctgtagaatgttcagtgctccttgtttatcatccggtgctcagcaaaagaaagatccgtctgttccagtgtgggaggctagactwggctgtgtgggactcgtggagagatggtgtttctctgcctcactggtgatttaaagggtgttgatggtgtttttttgttgataggtgattgatcctttgc

SEQ ID NO: 352014 - DNA, 201 bp, Homo sapiens
tccatcttggacgcccctttgttcgcgctccacgccccccacttccttcttcgtcagctcctccactttggccgcgtagcccctcatggcgtccatcttgsacgcccctttgttcgcgctccacgccccccacttccttcttcgtcagctcctccactttggccgcgtagcccctcatggcgtccatcttggacgcccctt

SEQ ID NO: 352015 - DNA, 201 bp, Homo sapiens
tccatcttggacgcccctttgttcgcgctccacgccccccacttccttcttcgtcagctcctccactttggccgcgtagcccctcatggcgtccatcttgsacgcccctttgttcgcgctccacgccccccacttccttcttcgtcagctcctccactttggccgcgtagcccctcatggcgtccatcttgcacgcccctt

SEQ ID NO: 352016 - DNA, 201 bp, Homo sapiens
ttgtgatcatgtacttggatgtactgttgtttgttgtagggaatcacgctcgcttctagccaggctgtcagcaacgccaggaagctggagtggccactgayggaagttgcagaaggtgtttttgaaaccgaggccccgggaggatataagttctatttgcagaatcgcagtctgcctcagtcaggtaattataccagaacc

SEQ ID NO: 352017 - DNA, 201 bp, Homo sapiens
tctctctcacatcctctccagatttcttctaaaaatctgagtgcgcgctgtttctctctcacacatcctctccagatttcttcttctaaaaatctgagtgygcgccgtttctctctctcacgtcctctccagatttcttctaaaaatctgagtgcacgctgtttctctctcacacatcctctccagatttcttcttctaaa

SEQ ID NO: 352018 - DNA, 201 bp, Homo sapiens
gagagggccgggcgcggtggctcacgcctgtaatcccagcacattgggaggccgaggcgggcggatcacctgaggtcaggagttccagatcagcctggccmacatggtgaaacaaaaacaacaacaaagagctaaggagaaacagaagctaattccaaagacgcttattcggccctctgtgcataatacaaaaaccagcgg

SEQ ID NO: 352019 - DNA, 201 bp, Homo sapiens; identical to SEQ ID NO: 75187

SEQ ID NO: 352020 - DNA, 201 bp, Homo sapiens
agcaaaaagattgaggcaaatctttatgtattgacatggtaacattaagtggagaaaaacaaggaacagaataatttgtaaattataccaccatttgtgtaaaaaaaaaaacatagatgcgtgcagtgcttctagaaggatacacaggaaactgtggactagttgtctctggggtgagagtaggatagagactcagttttt

SEQ ID NO: 352021 - DNA, 201 bp, Homo sapiens
tctctctcacatcctctccagatttcttctaaaaatctgagtgcgcgctgtttccctctcttacgtcctctccagatttcttcttctaaaaatctgaatgygcgctgtttctctctctcacgtcctctccagatttcttcttctaaaaatctgagtgcgtgctgtttctctctctcacgtcctctctagatttcttcttct

SEQ ID NO: 352022 - DNA, 201 bp, Homo sapiens
aaaatctgagtgcgcgctgtttctctctcacgtcctctccagatttcttcctctaaaaatctgagtgcgcgctgtttctccctctcacgtcctctccagayttcttcttctaaaaatctgagtgcgcgctgtttctctctctcacgtcctctccagacttcttcttctaaaaatctgagtgcgcgctgtttctctctctca

SEQ ID NO: 352023 - DNA, 201 bp, Homo sapiens
tccagatttcttcctctaaaaatctgagtgcgcgctgtttctccctctcacgtcctctccagatttcttcttctaaaaatctgagtgcgcgctgtttctcyctctcacgtcctctccagacttcttcttctaaaaatctgagtgcgcgctgtttctctctctcacgtcctctccagatttcttctaaaaatctgagtgcgc

SEQ ID NO: 352024 - DNA, 201 bp, Homo sapiens; identical to SEQ ID NO: 352014

SEQ ID NO: 352025 - DNA, 201 bp, Homo sapiens
cgcgtagcccctcatggcgtccatcttgcacgcccctttgttcgcgctccacgccccccacttccttcttcgtcagctcctccactttggccgcgtagccyctcatggcgtccatcttggacgccccttttttcgcgctccaagcctcccacttggccctggctctcacgtctgaggccggagggccggggatgtcgcagt

SEQ ID NO: 352026 - DNA, 201 bp, Homo sapiens
ctccacgccccccacttccttcttcgtcagctcctccactttggccgcgtagcccctcatggcgtccatcttgcacgcccctttgttcgcgctccacgccycccacttccttcttcgtcagctcctccactttggccgcgtagcccctcatggcgtccatcttggacgccccttttttcgcgctccaagcctcccacttgg

SEQ ID NO: 352027 - DNA, 201 bp, Homo sapiens
gtttctctctctcacgtcctctccagatttcttctaaaaatctgagtgcgcgctgtttctccctcttatgtcctctccagatttcttctaaaaatctgagygcgcgctgtttctctctcttacgtcctctccagatttcttcttctaaaaatctgagtgcgcgctgtttctctctctcacgtcctcttcagatttcttctt

SEQ ID NO: 352028 - DNA, 201 bp, Homo sapiens
ctccagatttcttctaaaaatctgagtgcgcgctgtttctccctcttatgtcctctccagatttcttctaaaaatctgagcgcgcgctgtttctctctctyacgtcctctccagatttcttcttctaaaaatctgagtgcgcgctgtttctctctctcacgtcctcttcagatttcttcttctaaaaatctgagtgcgccc

SEQ ID NO: 352029 - DNA, 201 bp, Homo sapiens
ctaaaaatctgagcgcgcgctgtttctctctcttacgtcctctccagatttcttcttctaaaaatctgagtgcgcgctgtttctctctctcacgtcctctycagatttcttcttctaaaaatctgagtgcgccctgtttctctctctcacatcctctccagatttcttctaaaaatctgagtgcgcgctgtttctctctca

SEQ ID NO: 352030 - DNA, 201 bp, Homo sapiens
ttacgtcctctccagatttcttcttctaaaaatctgagtgcgcgctgtttctctctctcacgtcctcttcagatttcttcttctaaaaatctgagtgcgcsctgtttctctctctcacatcctctccagatttcttctaaaaatctgagtgcgcgctgtttctctctcacacatcctctccagatttcttcttctaaaaat

SEQ ID NO: 352031 - DNA, 201 bp, Homo sapiens
cgcgccgcgttcgagttctcggaggggagggggcgttagccccgcgcagccgccggcgtcgccgccatggacctaggtgggtgccgcggctccccggcccmgggctgcgtccagcaatgcgccaccagagcggtgctgccccgtcgcgtctcctcctgtcgcgcacgctcgcgcgggcccggaccgaaacgtcccccgcgt

SEQ ID NO: 352032 - DNA, 201 bp, Homo sapiens; identical to SEQ ID NO: 75186

SEQ ID NO: 352033 - DNA, 201 bp, Homo sapiens
gatcttcaggatttccgatgaccaactacaagtcagggctcccgctcctgcttccttgggtttgatagtctgctacagtggctcatggaactaagggaaaygctggaaacacttacttacatttactggtttatcataaagagtacgagtcagaaatggctggacagaggagatacacagggcagggcatggggagtgggt

SEQ ID NO: 352034 - DNA, 201 bp, Homo sapiens
ggagtgtactggcatgatctctgctcactgcaacctctgcctcccgggttcaagcaattctccttcctcagcctcccaagtagctgggattataggcgccygccaccacgctcagcttttttttttttttttttagtatttttattaacttttaaaaattatttgttttttgagacggagtcttgctctgtcgcccaggct

SEQ ID NO: 352035 - DNA, 201 bp, Homo sapiens
acattccatcaaactattgcccagaaatgtactgatttacacttgtattacatgattgtgattttcccctctacactaacacagttaacactgccaacttktaacattatttgcacattagttaacaaaggattttatgtgaattctaatttctttgttgtttgggggcgtcgggttgaaattttttttttttttttgaga

SEQ ID NO: 352036 - DNA, 201 bp, Homo sapiens
taacctttataaatgaagttaacatgaaggttgttcccatagtttcttcacagtgattcaatatttatatagataaacagaagaaaataagtgataacctyaccacccagatattaccttgtttatatttggggatatatctcttcagaagtggaattgcttaatccaagagattgaatggatttaatgcaagatcttttt

SEQ ID NO: 352037 - DNA, 201 bp, Homo sapiens
catcttctttttctaataacccagcgtttgagcacgatttagtccttgcactttgaccctgcaattctactcctaggaattattttacagatgtgctcaayatacatcggcacaaagaagtgtgtgcaaggttatctgctgcagcattgtctgtaatcacaatgtgtaagaatttcagtgtcctatagattagagacatat

SEQ ID NO: 352038 - DNA, 201 bp, Homo sapiens
tacctacatacgctcttgtaataggagagctgggaactccacccaaaaccatacaaaaagttagtctgtgtatttggacgcctccccagcactcagtcacygagtttctcctttccaacagcagtcactctcatgcagtttaagtgatttattgatgtctcggctaagcttgcgacagtttcaggacatttcagccatcaa

SEQ ID NO: 352039 - DNA, 201 bp, Homo sapiens
gcgtcgccgccatggacctaggtgggtgccgcggctccccggccccgggctgcgtccagcaatgcgccaccagagcggtgctgccccgtcgcgtctcctcytgtcgcgcacgctcgcgcgggcccggaccgaaacgtcccccgcgtcggggcgggtctaggggtcccggggtggccttggcggggggtggtccgggtcccg

SEQ ID NO: 352040 - DNA, 201 bp, Homo sapiens
ctgagtgcgcgctgtttctctctctcacgtcctcttcagatttcttcttctaaaaatctgagtgcgccctgtttctctctctcacatcctctccagatttyttctaaaaatctgagtgcgcgctgtttctctctcacacatcctctccagatttcttcttctaaaaatctgagtgtgcgccgtttctctctctcacgtcct

SEQ ID NO: 352041 - DNA, 201 bp, Homo sapiens
ggagagggccgggcgcggtggctcacgcctgtaatcccagcacattgggaggccgaggcgggcggatcacctgaggtcaggagttccagatcagcctggcyaacatggtgaaacaaaaacaacaacaaagagctaaggagaaacagaagctaattccaaagacgcttattcggccctctgtgcataatacaaaaaccagcg

SEQ ID NO: 352042 - DNA, 201 bp, Homo sapiens
atttcttctaaaaatctgagtgcgcgctgtttctctctcacacatcctctccagatttcttcttctaaaaatctgagtgtgcgccgtttctctctctcacrtcctctccagatttcttctaaaaatctgagtgcacgctgtttctctctcacacatcctctccagatttcttcttctaaaaatctgagtgcgcgctgtttc

SEQ ID NO: 352043 - DNA, 201 bp, Homo sapiens
gtgcgcgctgtttctctctcacacatcctctccagatttcttcttctaaaaatctgagtgtgcgccgtttctctctctcacgtcctctccagatttcttcyaaaaatctgagtgcacgctgtttctctctcacacatcctctccagatttcttcttctaaaaatctgagtgcgcgctgtttctctctctcacgtcctctcc

SEQ ID NO: 352044 - DNA, 201 bp, Homo sapiens
ctctcacacatcctctccagatttcttcttctaaaaatctgagtgtgcgccgtttctctctctcacgtcctctccagatttcttctaaaaatctgagtgcrcgctgtttctctctcacacatcctctccagatttcttcttctaaaaatctgagtgcgcgctgtttctctctctcacgtcctctccagatttcttcttcta

SEQ ID NO: 352045 - DNA, 201 bp, Homo sapiens
ccagatttcttcttctaaaaatctgagtgtgcgccgtttctctctctcacgtcctctccagatttcttctaaaaatctgagtgcacgctgtttctctctcwcacatcctctccagatttcttcttctaaaaatctgagtgcgcgctgtttctctctctcacgtcctctccagatttcttcttctaaaaatctgagtgcgcg

SEQ ID NO: 352046 - DNA, 201 bp, Homo sapiens
cagatttcttctaaaaatctgagtgcacgctgtttctctctcacacatcctctccagatttcttcttctaaaaatctgagtgcgcgctgtttctctctctyacgtcctctccagatttcttcttctaaaaatctgagtgcgcgctgtttctctctctcacgtcctctccagatttcttctaaaaatctgagtgcgcgctgt

SEQ ID NO: 352047 - DNA, 201 bp, Homo sapiens
tctctcacacatcctctccagatttcttcttctaaaaatctgagtgcgcgctgtttctctctctcacgtcctctccagatttcttcttctaaaaatctgartgcgcgctgtttctctctctcacgtcctctccagatttcttctaaaaatctgagtgcgcgctgtttctctctcttacgtcctctccagattttttctaaa

SEQ ID NO: 352048 - DNA, 201 bp, Homo sapiens
cgcccctttgttcgcgctccacgccccccacttccttcttcgtcagctcctccactttggccgcgtagcccctcatggcgtccatcttggacgcccctttkttcgcgctccaagcctcccacttggccctggctctcacgtctgaggccggagggccggggatgtcgcagtcgccctgggtggcctgtttgtacaagccgt

SEQ ID NO: 352049 - DNA, 201 bp, Homo sapiens
tgatcccctcagctctgcagctcctttgatcatctcttctccattctgcagcatcagtctcttctttccagtgagttattctcgccagcgtgcaaacaggygctgaaagctcccatcctttaaaaaccttttactgaccccatatctcctctccagatttctccttctaaaaatctgagtgcgcactgtttctctctctca

SEQ ID NO: 352050 - DNA, 201 bp, Homo sapiens
ccacgcacgtcctttcatttaagccactcgtaaacgtttattgagccccgcccttgtggagcttaccgtctaccggaaaagacggtaaataaaatgttatrtaatgctttctagttaatatttgtgttttccggtttggagcctttgatgtagataaaatcagcgtattcagagttctgcttctagcaaggctggtctgaa

SEQ ID NO: 352051 - DNA, 201 bp, Homo sapiens
acgtaactctgtgactgaccttaaacagttgacttaaattctttgaactttagtcttcttatccaaaaatttcagaaaataagaggatctatctcataagwttgttatggtttatagagcttggcaaattactgacataatagtagatgcacaattaacgttaaagcaggcaatgtatagaaaatacagtctttatacatt

SEQ ID NO: 352052 - DNA, 201 bp, Homo sapiens
ataagccagggaggtagggaacacaccactaaggaagacttgaaaggtgcaagagcgcggtttagtgtatagacggtgcaatagacggggatctgaattcrtcaggtcatttttaaaatatctgctattttcagggtactacgttgagttttggcaacaaaggtgcaaatgaccctgatatatatcctccattagagctca

SEQ ID NO: 352053 - DNA, 201 bp, Homo sapiens
ccatgagcactgcccacagctgctttctgtaccatctgaggtcatctcatccttaagagaacttttaggaccagacaggaatgctcatctctctgtgcccrgtagttctctgggggtggcctgaggctgacttgtctgtagtcactgagttcatttacttttattttctaggccttatgatgggaaatggagtaaaacaat

SEQ ID NO: 352054 - DNA, 201 bp, Homo sapiens
aaacttaacgcttgcagctagctccaccatccattttttctctccagccttagtgatatttcagtgcttaaaataatagagagccccatggtgctaagaarcttttgttctttggaatggaaatccccttgggcatttctggttgacaatgtggtcagaccttctgtccggctggcattcatctttcctttgaattaccca

SEQ ID NO: 352055 - DNA, 201 bp, Homo sapiens
ttagccaagcgcgattagtttagattgtacgacctgaccccggccaatggggaaagggtagaggggcaggacttgtgtcaggaacaaaggctctcgtgccyctttgttcaggtgtgctctcatgacaactggccaaggaggcacccctctgcacagaagtaaaattgctttgctaagaatcctttgttcgagtgttctatt

SEQ ID NO: 352056 - DNA, 201 bp, Homo sapiens
tctctcacgtcctctccagatttcttcttctaaaaatctgagtgcgcgctgtttctctctctcacgtcctctccagatttcttctaaaaatctgagtgcgygctgtttctctctcttacgtcctctccagattttttctaaaaatctgagtgcgcgctgtttctctctcttacgtcctctccagatttcttcttctaaaaa

SEQ ID NO: 352057 - DNA, 201 bp, Homo sapiens
cagatttcttcttctaaaaatctgagtgcgcgctgtttctctctctcacgtcctctccagatttcttctaaaaatctgagtgcgcgctgtttctctctctyacgtcctctccagattttttctaaaaatctgagtgcgcgctgtttctctctcttacgtcctctccagatttcttcttctaaaaatctgagtgcgcgctgt

SEQ ID NO: 352058 - DNA, 201 bp, Homo sapiens
ttctaaaaatctgagtgcgcgctgtttctctctctcacgtcctctccagatttcttctaaaaatctgagtgcgcgctgtttctctctcttacgtcctctcyagattttttctaaaaatctgagtgcgcgctgtttctctctcttacgtcctctccagatttcttcttctaaaaatctgagtgcgcgctgtttctctctcac

SEQ ID NO: 352059 - DNA, 201 bp, Homo sapiens
taaattagggaggcaacttcaggagcgtcgggaacacatttctctgcactctcatacaacacctgtgggacacaaagggattctccagctctctaacaccagccggctgtcctgttatttaattgattctgactctacctggagttaatgtcagatcctgcaagttaagggctcagtcccagaagattttccgccacgtca

SEQ ID NO: 352060 - DNA, 201 bp, Homo sapiens
ttctctctctcacgtcctctccagatttcttctaaaaatctgagtgcgcgctgtttctctctcttacgtcctctccagattttttctaaaaatctgagtgygcgctgtttctctctcttacgtcctctccagatttcttcttctaaaaatctgagtgcgcgctgtttctctctcacatactctccagatttcttctaaaaa

SEQ ID NO: 352061 - DNA, 201 bp, Homo sapiens
tctctctctcacgtcctctccagatttcttctaaaaatctgagtgcgcgctgtttctctctcttacgtcctctccagattttttctaaaaatctgagtgcrcgctgtttctctctcttacgtcctctccagatttcttcttctaaaaatctgagtgcgcgctgtttctctctcacatactctccagatttcttctaaaaat

SEQ ID NO: 352062 - DNA, 201 bp, Homo sapiens
ggagtgcagtggcatgatctcagctcactgcaacctccgcctcctatgttccagtgatcctcccacctcagcctccctagtagctggaaccataggcgtgygccaccatgcctggctaatttttgtattttttctagagatggggtttcaccatgttgcccaggctggtttcaaacttcctgggctcaatcattcgatcca

SEQ ID NO: 352063 - DNA, 201 bp, Homo sapiens
ttttagtagagacgggtttcaccgtgttagccaggatggtctcgatctcctgaccttgtgatccacccaccttggcctcccaaagggctgggattacaggygtgagccaccgcgcccggcctactcaacatggttttgagattccaccatgtaattgcatatcacagctcttttttttttaattgctgactgatactcaat

SEQ ID NO: 352064 - DNA, 201 bp, Homo sapiens
acgggtttcaccgtgttagccaggatggtctcgatctcctgaccttgtgatccacccaccttggcctcccaaagggctgggattacaggtgtgagccaccscgcccggcctactcaacatggttttgagattccaccatgtaattgcatatcacagctcttttttttttaattgctgactgatactcaattttatgaatat

SEQ ID NO: 352065 - DNA, 201 bp, Homo sapiens
tgtcacttggggcaggtgtgctcacagtggccagcccatcttgaacttgtgcttgtcacttggggcaggtgtgcttacagtggccaacccatcttgaactycatcatcatacctgctttcatcatttcctggcttatccttatgttactatattttagatttgagggcagggaataagggagaaatggataggaactggca

SEQ ID NO: 352066 - DNA, 201 bp, Homo sapiens
gtgtgcacagccacccacagcgcgcacaacacatgggcctgcccagggcaacggcaccgtcaacagcgtgtgccctcgctcagggccctcccggtactacscttcccagtgtgcagggttcccagacgtgtgtcctctcatacattgcatttcctccctaagctgcacggggcaacaccgtgttaggtcccgcgcatctgc

SEQ ID NO: 352067 - DNA, 201 bp, Homo sapiens
tgcgggcctgtgtgcacagccacccacagcgcgcacaacacatgggcctgcccagggcaacggcaccgtcaacagcgtgtgccctcgctcagggccctccyggtactacgcttcccagtgtgcagggttcccagacgtgtgtcctctcatacattgcatttcctccctaagctgcacggggcaacaccgtgttaggtcccg

SEQ ID NO: 352068 - DNA, 201 bp, Homo sapiens
ctcgtaacgccacaaggaataatgggttagtgattacccagtgtatctttttttttttttgtcttgttctgtcacccaggctggagtgcaatggcgcgatstcggcccactgcaacctccgcctctcgggttcaagggattctcttgcctcagcctccgcagtagctgggattacaggcgtctgccaccatgcccgggtga

SEQ ID NO: 352069 - DNA, 201 bp, Homo sapiens
cctgcgggcctgtgtgcacagccacccacagcgcgcacaacacatgggcctgcccagggcaacggcaccgtcaacagcgtgtgccctcgctcagggccctsccggtactacgcttcccagtgtgcagggttcccagacgtgtgtcctctcatacattgcatttcctccctaagctgcacggggcaacaccgtgttaggtcc

SEQ ID NO: 352070 - DNA, 201 bp, Homo sapiens
cttgattgtttcctttttattttccaggctgtgtggatgcctgggagcccaaagtgctccgggcgggtatgggcgcacatttccggatgcccattatcaayaatctggaatgggaaaccgtgcccaattacctgccccctgacactcgggtctatgtggctgacaactgtggcctttatgcccaggctgagatgtctaata

SEQ ID NO: 352071 - DNA, 201 bp, Homo sapiens
ccacgaagggcgccacgggccgtgacgtcactagccgccgacggcgcgctttcgtgacgcagcccgggtctcagggaacatggcggcgctggtgagaccckcgaggtttgtcgtgcgaccgttgctgcaggtggtccaggcttgggaccttgacgcgaggcgctgggtccgggcgctgcggcggagcccagtgaaagtggt

SEQ ID NO: 352072 - DNA, 201 bp, Homo sapiens
ccgctggtttttgtattatgcacagagggccgaataagcgtctttggaattagcttctgtttctccttagctctttgttgttgtttttgtttcaccatgtkggccaggctgatctggaactcctgacctcaggtgatccgcccgcctcggcctcccaatgtgctgggattacaggcgtgagccaccgcgcccggccctctc

SEQ ID NO: 352073 - DNA, 201 bp, Homo sapiens; identical to SEQ ID NO: 75204

SEQ ID NO: 352074 - DNA, 201 bp, Homo sapiens
gtgcaggcgctgttacatcctctgtgtcttattctccgtttaaaatctggtttgcctggttcgtctatcccgaggtttgacaaatgaacttctaaaataaytcgtcaggagaagacttgcgctaacaagctgtgcgggggagggtgggaggccatgcagtcactgcgaggccccaccctcggccactctcccagcccgccc

SEQ ID NO: 352075 - DNA, 201 bp, Homo sapiens
gtctatcccgaggtttgacaaatgaacttctaaaataactcgtcaggagaagacttgcgctaacaagctgtgcgggggagggtgggaggccatgcagtcaytgcgaggccccaccctcggccactctcccagcccgcccgtggtgaggagccgcccctgggaaaggccaggcgtcgcaggctgctgccggggttgcctctt

SEQ ID NO: 352076 - DNA, 201 bp, Homo sapiens
tttgggaggccgaggcaggagggtcacttgagcccaggagttcaggaccatcctgggcaacatagtgagacctcatctctacaaaaaaaactacaattagytgggtgtggtggggtgtgcctgtactcagtcccagcaacttgggaggctgaggtgggaggattgcttgagcctgggatgtcaaagctcatcacatgtcaa

SEQ ID NO: 352077 - DNA, 201 bp, Homo sapiens
cgcgatctcggcccactgcaacctccgcctctcgggttcaagggattctcttgcctcagcctccgcagtagctgggattacaggcgtctgccaccatgccmgggtgatttttgtatttttagtagaggtggggtttcaccatgttggccaggctgacgtcgaacttgtgacctcaggtgatcctcctgcctcggcctccca

SEQ ID NO: 352078 - DNA, 201 bp, Homo sapiens; identical to SEQ ID NO: 75202

SEQ ID NO: 352079 - DNA, 201 bp, Homo sapiens
ccagctacttgggaggctgagacaggagacttgcttgaatgtgggaggcggaggttgcagtgagtcagatcgtgccactgcactccagcctgggtgacaaragtgaaactcttgtctttaaaaaaaaaaaaaagaaatgcaggaagggaacagggaacaaggctggggagggaggagccgacggctgcagcaagctccggc

SEQ ID NO: 352080 - DNA, 201 bp, Homo sapiens
acatcgattatggaaaagaaatagatgccaattttaacacttggtttctggttctttatgtaatgatattgagttcccaaattgctgagtatatgagccaytcctgagtcttgacttctgaatcctatgaaaggaatgacgtcagcagctctgaatcctaatgtcattgtgatccgtttcccttagattcccttagcctca

SEQ ID NO: 352081 - DNA, 201 bp, Homo sapiens
cgctggtttttgtattatgcacagagggccgaataagcgtctttggaattagcttctgtttctccttagctctttgttgttgtttttgtttcaccatgttrgccaggctgatctggaactcctgacctcaggtgatccgcccgcctcggcctcccaatgtgctgggattacaggcgtgagccaccgcgcccggccctctcc

SEQ ID NO: 352082 - DNA, 201 bp, Homo sapiens
cgggcggatcacgaggtcaggagtttgagatcagcctggcaaacatggcgacaccctgtctctactaaaaatacaaacattagcccggcgtggtggcgtgygcctgtagtcccagctacttgggaggctgagacaggagacttgcttgaatgtgggaggcggaggttgcagtgagtcagatcgtgccactgcactccagcc

SEQ ID NO: 352083 - DNA, 201 bp, Homo sapiens
gttgtgtagggaagagccacttttttcagttgaagtctgagttcttatgggccatgaccaaggctgctgcttcctcaaaaggcacgaagggggccgcgtgyggtggctcacgcctgtaatcccagcactttgggaggccaaggcgggcggatcacgaggtcaggagtttgagatcagcctggcaaacatggcgacaccctg

SEQ ID NO: 352084 - DNA, 201 bp, Homo sapiens
aaaaaacgagccacatttgacaaggaaaacactgcttggccgagagacgaacattgtcaggatgttggccacgctcccgcgcctttgtgtggtggcgtagstgtcacagtggcgtctgccaggaggtggcaggcgacacctccaaaaccaccccagtgctgaagggcggggctgcgattttttcctggatttaaatcgttg

SEQ ID NO: 352085 - DNA, 201 bp, Homo sapiens
taaaaaacgagccacatttgacaaggaaaacactgcttggccgagagacgaacattgtcaggatgttggccacgctcccgcgcctttgtgtggtggcgtasctgtcacagtggcgtctgccaggaggtggcaggcgacacctccaaaaccaccccagtgctgaagggcggggctgcgattttttcctggatttaaatcgtt

SEQ ID NO: 352086 - DNA, 201 bp, Homo sapiens
ccgcttttaagaagggtttgagctggaaaacaggttttgttttgttttgttttttgtttttgagatagtgtctctgttgcccaggccggaatgcagtggcrcgatcttgcctcactgcaacctccacctcctgggttcaagcaattctcttgcctcagcctcctgagtagctgggattacaggcatgcgccaccatgcctg

SEQ ID NO: 352087 - DNA, 201 bp, Homo sapiens
ttaaaaaccaaacagaaggaaaggtggtcttttctaccactcttggtttgctctttcagaagcagcccatgctttaagcatgtgtccattcatgtcccctyccctcttctctaattgtatgttcattctcatcccagaatgtgcctttttatgggaagatatatggtatttgtgggtatcaatgttaatcttttcaaaggt

SEQ ID NO: 352088 - DNA, 201 bp, Homo sapiens
taaagaaggtgagtgacatgtaggatgcacccagtgttgtgttgaggaactaacatgcggtccaagaaaactaggccttcttcccgagatctttttgttaktgtttcttccaagatgcctatggtgacagaggtgctccatttcccaactaatgtcagaatgagaccaaaccaggaaacagtttattctgaatttctgagt

SEQ ID NO: 352089 - DNA, 201 bp, Homo sapiens
agccaggaggatatttctcagaggctgctaggtctgtttgtccttgtctcagaaaatagacactctgcttattttggttatcatactctgcctgctatcayacagagtaaggctataggataggacagaaattttttttgttttattcctatggaaagaatatcttttttttcctcaaaagttttgattttagtgttgatg

SEQ ID NO: 352090 - DNA, 201 bp, Homo sapiens
ttcttcatttgaaattccttcaataaaaacacagtcaccattcttcatcttcttgggaaatggcctgctctcgagcctctggagaagcccctctaacagcycagcccaaaaaagtgcaacaaatttacatgacacgggaaaagcaacatctattgttcttagagtctgactcccttggcccagctggaaaagtctccccac

SEQ ID NO: 352091 - DNA, 201 bp, Homo sapiens
taatcccagctacttgggaggctgaggcaggagaattgcttgaacctgggaggcagaggttgcagtgagccaagattgtgccactgcactacagcctgggygacaaagcgggactccgtcacaaaaaataaataaataaaataaagtctgttttattaattgccaagaaatttgaaatgatatagacacttacttatcttt

SEQ ID NO: 352092 - DNA, 201 bp, Homo sapiens
ctttattgaggggaataattgacaaataaaacttatatatacttaagatgtacaaagtaatgttttgatatatgtatacaccatgaaatgattacctaatyaagctaattaacatattcatcacctcacataatttagtcttttggcgtgtgtgatgagaatacctgagatgtactctagcagatttcaagcatacagtac

SEQ ID NO: 352093 - DNA, 201 bp, Homo sapiens
catttaaaattttcctaactattgtaagtagatttgggttcagctaagtacatcagtgaatcggattggtgtgtaatgaaaccataagacatgggtcccarcttcagaatgcttcacatttggttgtggaaacaggtcacatgtatcatgttaagtaatggagataaaaagtttgcaattaactttttttagtgatttctt

SEQ ID NO: 352094 - DNA, 201 bp, Homo sapiens
cagaccgatttattgccttctgtggacctcattcaagagccagacttgaaagtggtatgtgaaattatggcattaatctcattttgttattgaaaatatcyatcctatattttcttttgaaagagttacaccaagcttgaccaagtgttaattattatttaagcatacttggtcacttcagtagatcattctgactggatt

SEQ ID NO: 352095 - DNA, 201 bp, Homo sapiens
tcagcgccgtgggtagggggtcacgctcactgtcctgctgtattatgtcgtcctagctttagcttttccacattgattttgggcattttgtcttccaagcrgttggcgcagcctgcccttacgtcctagcctccctgtgtctatccgtttattgggggagaaatggatccccctgagcaaagccttccggattcctcccca

SEQ ID NO: 352096 - DNA, 201 bp, Homo sapiens
ctggtaaatagtcattttaggatgagcgcaaataacaccacagatctgggtttttccacagtgacactgttgacgttttgtcatggaggctatcttgtgcrtcgtagcatgtttagtggcctccgtggcttctgcccactagatgctggtaaaatccccacacccactctaattgtcaaaactcagaatgtcttcagacat

SEQ ID NO: 352097 - DNA, 201 bp, Homo sapiens
ttaaaatttggttggcagtgtactttttacaaaataaaaacatcttgttcctgatgtctgtgatatttattgttctttcaagttctcatttgaaagtaacwttactttcttggcactgctttgcaatttatgacattgatctttttatatccaatccataatgcaatactatcattacaaattctgaattctgcaaagcct

SEQ ID NO: 352098 - DNA, 201 bp, Homo sapiens
gatgccaaacgctttacggatgctggcttcgatcaccatgatcttttctttgcggatggcagcacccctactgatgccattgtcaaagaattcctagatayctgtgaaaatgctgagggtgccattgcagtacattgcaaaggtatgtttctaggggtggttaaagaatagtatacagtatgagtatatgaatatgtagaa

SEQ ID NO: 352099 - DNA, 201 bp, Homo sapiens
aaattggataataccagaccgatttattgccttctgtggacctcattcaagagccagacttgaaagtggtatgtgaaattatggcattaatctcattttgktattgaaaatatctatcctatattttcttttgaaagagttacaccaagcttgaccaagtgttaattattatttaagcatacttggtcacttcagtagatc

SEQ ID NO: 352100 - DNA, 201 bp, Homo sapiens
atatacaaggccaattaaagtatcttcagatacagagttcagattactttttattgggcttttgggggaaggcttgaggcctgtcctcagcaagtggcaarctggtcccttccttctcaacgtgtttttccctccattattgttttcttaatttaaaaagcagtgcatgcacacttctaaaaagtcaaacattatcaaatg

SEQ ID NO: 352101 - DNA, 201 bp, Homo sapiens
aggaggccacgggatgtcagtgttgtcagaagatgggttacataccacacggattacatacatatgccatcaagtgctccatttggatcattggaaatgtrctttggaatagcagtatttacataagagttgtgaatttcatttatttgtaaatatgatggaaaagatttattttttgaagagtcacattttgtttggcac

SEQ ID NO: 352102 - DNA, 201 bp, Homo sapiens
agtttccaacaacaacagataatctggtaggaagaagttgttcatgtatctttctggaaagctctattttgatgttatttaaatgctctaggaagcaaacmaacctctggctggaaggggactattttcgtcagaagttaaaggggcaggagaatggacaacacagagcagccttctccaaacttctctctggcgttgatg

SEQ ID NO: 352103 - DNA, 201 bp, Homo sapiens
ggtaaatagtcattttaggatgagcgcaaataacaccacagatctgggtttttccacagtgacactgttgacgttttgtcatggaggctatcttgtgcgtygtagcatgtttagtggcctccgtggcttctgcccactagatgctggtaaaatccccacacccactctaattgtcaaaactcagaatgtcttcagacattg

SEQ ID NO: 352104 - DNA, 201 bp, Homo sapiens
aaaatttaggctgtgtgattaagcataaacagaattcttgcatattcattcaagttaaacaaaaaaccaaatatacttactaggtgtatttttttttttttaagacggagtctcactttgttgcccaggctggagtgcaatggcgcaatctcagctcactgcagcctgtacctcccaggttcaaacagttctcctgcctca

SEQ ID NO: 352105 - DNA, 201 bp, Homo sapiens
gctatcagagggcaacccgctctggtccccttccacgctgcggaagctttgttcttttgctcttcacaataaatcttgctgctgctaaaaaaaaaaaaaaatcctatcagattgcaagccctaataacggaagggtccagctttaatgtaagggagctccaggggagtaaaggttatagtcacctttccctgtgacttctc

SEQ ID NO: 352106 - DNA, 201 bp, Homo sapiens
ttaatctttggagagacatcctatattcctttcaggtaaatataagaatgatgtggtagattcaggtaatcagatccttgccagaaatatcttgatagttrtttctgaaaaaagaagatctggtaaatagtcattttaggatgagcgcaaataacaccacagatctgggtttttccacagtgacactgttgacgttttgtc

SEQ ID NO: 352107 - DNA, 201 bp, Homo sapiens; identical to SEQ ID NO: 75243

SEQ ID NO: 352108 - DNA, 201 bp, Homo sapiens
ttgcagtgagccaagattgtgccactgcactacagcctgggtgacaaagcgggactccgtcacaaaaaataaataaataaaataaagtctgttttattaaytgccaagaaatttgaaatgatatagacacttacttatcttttttcccctttgaaatgcttatttagatggaaaaattagaatgtaacctatcagagttct

SEQ ID NO: 352109 - DNA, 201 bp, Homo sapiens
acggcaagctctgcctcccgggttcacgccattctcctgcctcagccttctgagtagctgggactacaggcacccgccaccacgcctgcctaattttttttgtatttttttagtagagacagggtttcaccatgttaaccaggatggtctcgatctcctgacctcatgatccacctgcctgggtctcccaaagtgctgtga

SEQ ID NO: 352110 - DNA, 201 bp, Homo sapiens
ctcctaagctgcatctctgtgcttacgcctcatgtatttgtctattcacttttaacaaatggaaacggccatttccttaaattgagtgtgctactgcacamtattgctgcccagcaaattactgcaaaactttgtgacctaaaacaacagtacgaattgtcttagaccatgtctatgagttaggcatctgggagttgctta

SEQ ID NO: 352111 - DNA, 201 bp, Homo sapiens
atggcaccattgcactccagcctgggcaacaagagggaaactctgtctcaaaataataataataataataataataataataataataataataataataaatgcaagcttcacgaggccttttcaaggaaatgtttaaggaaaccaggtaaagataagtatgcaattaaggacttggaagttgtgtgatttttatgaaag

SEQ ID NO: 352112 - DNA, 201 bp, Homo sapiens
gatgcctcctaagctgcatctctgtgcttacgcctcatgtatttgtctattcacttttaacaaatggaaacggccatttccttaaattgagtgtgctactrcacactattgctgcccagcaaattactgcaaaactttgtgacctaaaacaacagtacgaattgtcttagaccatgtctatgagttaggcatctgggagtt

SEQ ID NO: 352113 - DNA, 201 bp, Homo sapiens
gatggcaccattgcactccagcctgggcaacaagagggaaactctgtctcaaaataataataataataataataataataataataataataataataataaatgcaagcttcacgaggccttttcaaggaaatgtttaaggaaaccaggtaaagataagtatgcaattaaggacttggaagttgtgtgatttttatgaaa

SEQ ID NO: 352114 - DNA, 201 bp, Homo sapiens
caagggttggttctttaagaagaataacaaaaatgataaacctttagctagaatgatgaagtataaaaggaagaagactcaaattactaaaattagaaatraaaatggcattaccactgatactacagaaataaagctgatcagtacgtaaaaatgatcagtattgtaggacaacaaattggatagtctacatgaaatgga

SEQ ID NO: 352115 - DNA, 201 bp, Homo sapiens
agatggcaccattgcactccagcctgggcaacaagagggaaactctgtctcaaaataataataataataataataataataataataataataataataataaatgcaagcttcacgaggccttttcaaggaaatgtttaaggaaaccaggtaaagataagtatgcaattaaggacttggaagttgtgtgatttttatgaa

SEQ ID NO: 352116 - DNA, 201 bp, Homo sapiens
ttttctaggtgtatatcagatacagcatcattgctggacgattagctgcaaatgaatgtgatggtagaaatgagataaccagagagtttgaagatccttcyctacctagtgactctttgtcctcttggccacagcccacacccgaggcactagttctttcactgtcgtcactgtcttcagtgagtgtaggcagaatttcac

SEQ ID NO: 352117 - DNA, 201 bp, Homo sapiens; identical to SEQ ID NO: 75238

SEQ ID NO: 352118 - DNA, 201 bp, Homo sapiens
aagctgtgccacatcgaaacctaaatctcatgtggccacaggtctgggacggcggccaggcagcctgtgtggccctcggtcctgccagggctctgtgtggcaccttctcattcccttccctgagtctggagagggaggtgagtgggcttctctacctcccacttcctgttagagctataaatccatgctaacctttctctt

SEQ ID NO: 352119 - DNA, 201 bp, Homo sapiens
ttaatttccatataaaagaagcacttagaagacgccgcccacttcctttgaaagctgttcagtggaaagtaatctgatcatgacaatactttcttgggggkcccctgatatttagtattctgaaattggataggaaactgttttcttatttgcatccttgttcttaaaagctttcttttggattttaggcaatgcagtatg

SEQ ID NO: 352120 - DNA, 201 bp, Homo sapiens
ccttaactcatattttaagaatttcttctcttgtctcctcttggacttggaagttatgaaagaatgcaaaagttccttgcaagatctcttccaaagaaaarttccattgcaaccaactctggtactttgtggtttcactgagtattttcacatagctgagaaagatttaaaaatcaagctgatttcactcttcagaattag

SEQ ID NO: 352121 - DNA, 201 bp, Homo sapiens
tattacatatagttataattaatttccatataaaagaagcacttagaagacgccgcccacttcctttgaaagctgttcagtggaaagtaatctgatcatgrcaatactttcttggggggcccctgatatttagtattctgaaattggataggaaactgttttcttatttgcatccttgttcttaaaagctttcttttggat

SEQ ID NO: 352122 - DNA, 201 bp, Homo sapiens
caaattgagattcctgtctcatggcaatttgtaaacagcttttccgctaaagcaaatgagtttgaagtccttcagagactcagtcttgagtagagaggttrtggggagaatacatttaaaaacgaattgtgctggtcttccccttgcagaaagcagaaaatggagatttaaattggataataccagaccgatttattgcct

SEQ ID NO: 352123 - DNA, 201 bp, Homo sapiens
ccagagcgggcataggaaggggttgccctgagtaccagtccccggccggtagctgcggggggtgtgcgggaggtgaagcctgctgagactgagaagccaastcccgctaacgttgtgcccttcccaggagagggcctcgccgaggacggatggggctgggaacgggtgggcctatacatagtttctgcccgttattgttta

SEQ ID NO: 352124 - DNA, 201 bp, Homo sapiens
gtggctcatgcctgtaatcccagcactttgggatgccaaggtggatggatcacgaggtcaagagattgagagcatcctggccaacgtggtgaaaccccgtytctactgaaaatacaaaaattagttgggtgtggtggcatgcgcctgtagtcccagctacttgggagggtgaggcaggagaatcgcttgaacctgggaggt

SEQ ID NO: 352125 - DNA, 201 bp, Homo sapiens
ctcctgtgggtttatgtacaagttgatgccacatggcaggcactccttaccttacaaatggctttgagctcccaaagttatgtaattcagccctctgggaytgggcacagttttgtaaagaaagtgttcaggccaggcgcggtggctcacgcctgtaatcccagcactttgggaggctgaggcaggtggatcatgaggtca

SEQ ID NO: 352126 - DNA, 201 bp, Homo sapiens
cagtcgccgctgcccgctcctctcccgttagcagctgttgtgacgctggtgagctgctcagttaatagcaggacgctggcctcagcgccgtgggtagggggtcacgctcactgtcctgctgtattatgtcgtcctagctttagcttttccacattgattttgggcattttgtcttccaagcggttggcgcagcctgccctt

SEQ ID NO: 352127 - DNA, 201 bp, Homo sapiens
gtggtgcaatcgcagctcacctcaacctccacctcctgggttcaagcgattctcctgcctcagcctcctgagtagctgggattacaggcgcgcgccaccahgcctggctaatttttgtatttttagtagagacagggtttcactatgttggtcaggctggtcttgaactccagaccttgtgatccacccgcctctgcctcc

SEQ ID NO: 352128 - DNA, 201 bp, Homo sapiens
taaaattaatgctgtccaggagaagtgtaaaaatgcacagtcgccgctgcccgctcctctcccgttagcagctgttgtgacgctggtgagctgctcagttratagcaggacgctggcctcagcgccgtgggtagggggtcacgctcactgtcctgctgtattatgtcgtcctagctttagcttttccacattgattttggg

SEQ ID NO: 352129 - DNA, 201 bp, Homo sapiens; identical to SEQ ID NO: 75209

SEQ ID NO: 352130 - DNA, 201 bp, Homo sapiens
tgataagtttataaataagaaatcactctttttaagtcttgttgctgtcgtttttaaactactagtgaacaaacaacaaccccttgacgtatgtattgaamattttttggcatatttgtttccagttttatattggccttttgactttgtttatggttgtattttggaccacagaagcttatttttctatagttaatatat

SEQ ID NO: 352131 - DNA, 201 bp, Homo sapiens
caatctcagctcactgcagcctgtacctcccaggttcaaacagttctcctgcctcagccttccaagtagctgggattacaggcgcatgccaccacgcccarctaatttttttttgtattttagtagagatagggtttcactgtgttgcccaggctggtcttgaactcctgagctcaggcaatctacctgcctcggcctccc

SEQ ID NO: 352132 - DNA, 201 bp, Homo sapiens; identical to SEQ ID NO: 75211

SEQ ID NO: 352133 - DNA, 201 bp, Homo sapiens; identical to SEQ ID NO: 75205

SEQ ID NO: 352134 - DNA, 201 bp, Homo sapiens
atattattattttttatgtttaagcagtttttatagctgtaagaatggcttaccttgtaagcatttatgttgaaaatgatgatactaattaaatttaagartatattaactcagcaatctgtgagaagaattctaaactgcattaaatttgagattgcctctacagttatgataagagctcagggactttgttatttaatg

SEQ ID NO: 352135 - DNA, 201 bp, Homo sapiens; identical to SEQ ID NO: 75239

SEQ ID NO: 352136 - DNA, 201 bp, Homo sapiens
tctgagatagattaaccttttgggtgttttcttctttacttctcttagtcaactacgattgccacatattctgactcaagagcatcatgcactacatagagttattcttctcaaactgttccaagtggcaaagatgttctgaatgggtggagcagttgcaaataatgcttaggcactttgtggttgaatgatcattcccag

SEQ ID NO: 352137 - DNA, 201 bp, Homo sapiens
aataccgaagtagtgattccaagttagaaagtagtgatccctaagaacagttggagaaacatatggtttgttctatagctgtaagcggtaattttgaagcwattttgaaagcattctttccctttaagaaaaaaatagtttcttactgaaatgactttttaggatgtcttgaaaaacgtagtgaaattcatctagaaactt

SEQ ID NO: 352138 - DNA, 201 bp, Homo sapiens; identical to SEQ ID NO: 75240

SEQ ID NO: 352139 - DNA, 201 bp, Homo sapiens
ttctgagatagattaaccttttgggtgttttcttctttacttctcttagtcaactacgattgccacatattctgactcaagagcatcatgcactacatagagttattcttctcaaactgttccaagtggcaaagatgttctgaatgggtggagcagttgcaaataatgcttaggcactttgtggttgaatgatcattccca

SEQ ID NO: 352140 - DNA, 201 bp, Homo sapiens
ggaaagtgcttaaaacagtatcggggcatatctttcaattcgctactttgtcatatattttaggtcattttctctagataattggggaaagaatgactgayagcagattacagtccctcagtttctgatatttttggtacctgcagcataattttatgcacaggtaatggtgtaaacatttaaaaagaggtcacgtaaact

SEQ ID NO: 352141 - DNA, 201 bp, Homo sapiens
ttaagaaaaaaatagtttcttactgaaatgactttttaggatgtcttgaaaaacgtagtgaaattcatctagaaacttacaaggttgatgctagccatcamatgcatgctgcaatttgctgaaatgtcttgatccaggggagctaaacttttacaaaaataggtttgtttagaagtcatatcactacatgaaaaatcacca

SEQ ID NO: 352142 - DNA, 201 bp, Homo sapiens
atggtggctcatgcctgtaatcccagcactttgggatgccaaggtggatggatcacgaggtcaagagattgagagcatcctggccaacgtggtgaaacccygtttctactgaaaatacaaaaattagttgggtgtggtggcatgcgcctgtagtcccagctacttgggagggtgaggcaggagaatcgcttgaacctggga

SEQ ID NO: 352143 - DNA, 201 bp, Homo sapiens
actaggaaccatcactttctgctgcagctgccaaaccaaacctaaggtccggggctctggagtgctttgtacctaattcttcatattgtgggggctggggrgagaaatgctcaggttctttccttagcatcttttttttttttttttaaatgagacagagtctcactctgttacccaggctggagtgctgtggtgcgatct

SEQ ID NO: 352144 - DNA, 201 bp, Homo sapiens
agtaaatttaaagtattgagttgaaatctttaaacagcagtagaaaaaaaaatagagcacccttttggggtcctttcatccctacctgcaacgtagcaggkttaccagttcctactggtttgtcatcatctctgcggcacatgggaacttgaccttccattttcatgttccttggcatccaggatgaagactccacccaaa

SEQ ID NO: 352145 - DNA, 201 bp, Homo sapiens
gattgttgagtaaatttaaagtattgagttgaaatctttaaacagcagtagaaaaaaaaatagagcacccttttggggtcctttcatccctacctgcaacrtagcaggtttaccagttcctactggtttgtcatcatctctgcggcacatgggaacttgaccttccattttcatgttccttggcatccaggatgaagactc

SEQ ID NO: 352146 - DNA, 201 bp, Homo sapiens
ggttctttctttgtgcctcttttgggactttgtcctgtgttcacatcaccctacctgttatccacctacagcttacaaaagaaaggcaaattatgtatagkttttaagaattggagttagccaagctgtagcctggagcttttatcctactgaatattattcataatatcatactaaatagtattcatttctgtttggagg

SEQ ID NO: 352147 - DNA, 201 bp, Homo sapiens
aatgctgagggtgccattgcagtacattgcaaaggtatgtttctaggggtggttaaagaatagtatacagtatgagtatatgaatatgtagaaacagaccrtattcatttagtttatgtgtcagaacatgaaactgcctttatttttagagtgccgtgaaacctttgatttcagatgaaaagtatagtaacttattttcat

SEQ ID NO: 352148 - DNA, 201 bp, Homo sapiens
tggcctgacatgtaatttttaatgatgacagtgatgaggtcaacaataaaaatgacatgataagccaaatcagccatttccaaattgattagcagtactcygcacacagcagatgctcagtagaggctctaatatttggtcacagatgtatccaggtgaccatttggaagtatagtcattggaaagagcttctgcccttcc

SEQ ID NO: 352149 - DNA, 201 bp, Homo sapiens
gatgacagcagccgagaccattgcgtgggtcaggatctgcagacctggctcggtgattgggcctcagcagcagtttttggtgatgtaagtagtagcctacrtctgtagttcccagggaacatgtggggttggaatctgatggggagtggaatttcctttagtttccaacaacaacagataatctggtaggaagaagttgtt

SEQ ID NO: 352150 - DNA, 201 bp, Homo sapiens
tagaacccaaaacttgttactaaccagttcccttgtttaaatgcatacgaaggatattttccaggttgcctcatactgtgctcattatatgcttcctatcytgatcaagagtcggctttggaaaaacactgttagcctgcaagttgactttttagaagcagtgtaattttgaataggtaatacatcgtacaatgcaaaagc

SEQ ID NO: 352151 - DNA, 201 bp, Homo sapiens
agtcactccacctccttagagctagttgaccctggtagtgctaacctcacagggtataatgagctgaatacaatacgcgacactaaactctccatcatcgytggttatcattgtcatttgagtgggtaatgctgctgccgcttctttgttaatcagtactttgatgaacagttcttcctctgctccccgtgttctttccta

SEQ ID NO: 352152 - DNA, 201 bp, Homo sapiens; identical to SEQ ID NO: 75214

SEQ ID NO: 352153 - DNA, 201 bp, Homo sapiens; identical to SEQ ID NO: 75206

SEQ ID NO: 352154 - DNA, 201 bp, Homo sapiens
tcttgctggggagtggggaatgatcattttcaagtcctatgacagtaggcaaaatggactctttaggccagagaaagccctgaaagaaatagtggtacaaytggaaattggaaattgtgctgaaaatgggaaggggatatggctggttcttaacagcgcctgctgcattccattacgttattgttattttttttttcctct

SEQ ID NO: 352155 - DNA, 201 bp, Homo sapiens
tcggcctcccaaagtgctgggattacaggtgtaagccaccgcacccggccccaatacagaatttaaaataactgtcttaaacatgttcagtgagctaaaasagaattcagacaactaaatgaaatcaggaaaatgatgcctgaagaaaaatggtaaattttatgtatattttactccaatttttaaacataattaaaacaa

SEQ ID NO: 352156 - DNA, 201 bp, Homo sapiens
ttgcgtgaatctgggaggtggaggttgcagtgagctgagatctcgccactgcactccagcctgggggacagagcaagactctgtctccaaaaaaaaaaaaacagagagagaaccctcaagattacgcacacacacacagagcccctgctagaattaataaatgagttcagcaaagaagtagcagcatatacaatcaacagg

SEQ ID NO: 352157 - DNA, 201 bp, Homo sapiens
ggctgaggcaagtggatcacctgaggtcaggagttcaagatgagcctggccaacgtggtaaaaccctgtctctactaaaaatacaaaaattagcagggcawggtggtgcacacctgtaatcccagctacttgggaggctgaggcacgagaatcacttcaacctgagaggcggagattgcagtgagctgagatcgtgtcatt

SEQ ID NO: 352158 - DNA, 201 bp, Homo sapiens
aaaaaaagcaaaccccaaaacctaggctttgtatcaggtgagaatcctgggttattgtactcaaaactaccactgaggagtgtggttcctgagaagttaaraaacgttcccaataatcagtagttactttctgggaccaaaatgaaccccttttttctggggacacagtcagtagagacagtcgataaggttgctaatgca

SEQ ID NO: 352159 - DNA, 201 bp, Homo sapiens
cttgaacctgggtggcagaggttacaatgagccgagatcgcaccacagcactccagcctgggcaacagaatgagaccccgtctcaaaaaaaaaaaaaaaaaagaaagagaaaagtctatgtatgaacccaagaaagaaaaagagtatggagaagtgggtgttttaactgggacatttggtcctattacttggccagtcact

SEQ ID NO: 352160 - DNA, 201 bp, Homo sapiens
gtgttgtcttctccaaagtatttgtcattagaaacttacagcaagcgtatactttttagcatgtcagtatttttattatgttgccctccttgtctttgatractgcctgtggacgctgtgtaaactttctggtaaaaatccttttttttccccctgtagtctctccatttcaaggactaaaacagtcttgcgttaagtaaa

SEQ ID NO: 352161 - DNA, 201 bp, Homo sapiens
caacacaagttcatctcagacccatcatgcagaaacctctcattgcttctgttttaatggtaatttgtctaattgtaaaaataccgaagtagtgattccamgttagaaagtagtgatccctaagaacagttggagaaacatatggtttgttctatagctgtaagcggtaattttgaagcaattttgaaagcattctttccc

SEQ ID NO: 352162 - DNA, 201 bp, Homo sapiens
cctcagcgccgtgggtagggggtcacgctcactgtcctgctgtattatgtcgtcctagctttagcttttccacattgattttgggcattttgtcttccaascggttggcgcagcctgcccttacgtcctagcctccctgtgtctatccgtttattgggggagaaatggatccccctgagcaaagccttccggattcctccc

SEQ ID NO: 352163 - DNA, 201 bp, Homo sapiens
agcagtttttggtgatgtaagtagtagcctacgtctgtagttcccagggaacatgtggggttggaatctgatggggagtggaatttcctttagtttccaayaacaacagataatctggtaggaagaagttgttcatgtatctttctggaaagctctattttgatgttatttaaatgctctaggaagcaaaccaacctctgg

SEQ ID NO: 352164 - DNA, 201 bp, Homo sapiens
attaatctcattttgttattgaaaatatctatcctatattttcttttgaaagagttacaccaagcttgaccaagtgttaattattatttaagcatacttgrtcacttcagtagatcattctgactggattttaactttcttttcttttgttttttacagttataatcaaattggtatttaattcccagtccagatactgtt

SEQ ID NO: 352165 - DNA, 201 bp, Homo sapiens
agcccctctaacagctcagcccaaaaaagtgcaacaaatttacatgacacgggaaaagcaacatctattgttcttagagtctgactcccttggcccagctrgaaaagtctccccacaggtgtgcagtgcagctccgcggtgctgggaaacagggctctttcaagacagcgcagggaaatcttccgggtcatctgggttggg

SEQ ID NO: 352166 - DNA, 201 bp, Homo sapiens
ttttctcaagggagagttacagattgtgtcttgtacaattcagagttaatcaaaggagaactacactctgtgtcccctgagtaggttactttcaactctgwttcttgataagagcatttcactgagtagttgatgacttttttttttttttgagatggagtttcgctcttgttgcccaggctggagtgcagtggcgcgatc

SEQ ID NO: 352167 - DNA, 201 bp, Homo sapiens
tatctgatgatgttcaatgtatgtacttttgttgcttgtttttttggtgtcatgtggaagaaaccattgcccagtccagggttaagaaagtttctgcctakgttttctgctaagagttttatattttagctcttgtatttatggtgtgaggtaggtctaacttcattctttcttttggtgtgtgtggatatccagttgccc

SEQ ID NO: 352168 - DNA, 201 bp, Homo sapiens
aaagcgagaatttgaaagatatggtgggaatgacaaaatgtaagtttctttgtaaatgctattttcactttaagatggtgtcagcacgtggtatgaatctrttatgtgttaatatttagttaactttatagtactgtgctgttattcttgtgagaagctgatcctgggacttttatgaaccactctttctgatttggagat

SEQ ID NO: 352169 - DNA, 201 bp, Homo sapiens
ctaacttcattctttcttttggtgtgtgtggatatccagttgcccaagcaccatttgttgaaaatacttttcattctccattgaattgtctttggcaccayggttggaaaaaaaaaatcagttgaccgtaaatgtgagggtttatttctggactctgaattctttgctctcaatctatatttctgtcttttgttttctttt

SEQ ID NO: 352170 - DNA, 201 bp, Homo sapiens; identical to SEQ ID NO: 75262

SEQ ID NO: 352171 - DNA, 201 bp, Homo sapiens
ggtggaggagtcccagggcaccccggaagaggagtctccagccaagtagggcattttgttcattccccattgtggtgttggttctcttcttaatgatttcttttttttttttgagatggaacttgctttgtcacccaggctggagtgcaatggcacaatcttggctcactgcaacctccacttcctgggttcaagcgattc

SEQ ID NO: 352172 - DNA, 201 bp, Homo sapiens
tatggacctctagtgtcttgtcccctctgtgctctcccagtcctccctccctctcttttcattatgtagcttagataccggctccgtctccagcacccttycaagttctgtttttctggggttttttttgagacagagtttcactcttattgcccaggctggagtgcaatggcgcgatcttggctcactgcaacctccacc

SEQ ID NO: 352173 - DNA, 201 bp, Homo sapiens
tttaccagtttttattatatccactccttcctagaccaggtgataggtttgatcgagacagaccgttgagaggacgtggaggcccgagagggggtatgcgyggcagaggcagaggtggccctgggaacagagtttttgacgcttttgaccagagaggaaagcgagaatttgaaagatatggtgggaatgacaaaatgtaag

SEQ ID NO: 352174 - DNA, 201 bp, Homo sapiens
gacaagactactacacacattgctgaaactctgggtctgttttctcattgaaaaatggagagggctgaatttagataatctttcgagattataaagattcwataattctgtccaataaacatgtataggtattaaagaaactcaaggtgacaccctttttcactatcagatgagcaaagatcaaattttatcatattcaag

SEQ ID NO: 352175 - DNA, 201 bp, Homo sapiens
ggctgaggaacaatgtgagttttgtaccatgtttgggtattatctattccaaaaataattttctaagggcaggcagaaaaagagaagccagaaagtcaggmagattggtggccaggagtgtcatatgacactggggtcaaatgacatgaagacaaaagttgctattgggcttaaagaggtcttcagctgcccttggccgtt

SEQ ID NO: 352176 - DNA, 201 bp, Homo sapiens
taatttgtaatggaaagcttttcttagaataagactaatttcttaattaataaatagagataaattttatgtatgtatacatatacttcatacatttcttwataaagtgagtaagaaatttatttcttagtaaatcggcttgaggtcatgaaaatgatgtatgcgaaggagttatgtgctacttttgattagtgagaagaa

SEQ ID NO: 352177 - DNA, 201 bp, Homo sapiens
ctcctgacctcaagtgatccatccgcttcagcctcccaaagtgctgggattacaggtgagccaccgcacctggcctttcttgatgatttctaagagctctwcacagactgggaatctcaaccccttatcctatcacagagggctgaccttaatgtatgaatgactggtgatcaaactaattaataattagttcagacaacc

SEQ ID NO: 352178 - DNA, 201 bp, Homo sapiens
tcctgacctcaagtgatccatccgcttcagcctcccaaagtgctgggattacaggtgagccaccgcacctggcctttcttgatgatttctaagagctcttmacagactgggaatctcaaccccttatcctatcacagagggctgaccttaatgtatgaatgactggtgatcaaactaattaataattagttcagacaacct

SEQ ID NO: 352179 - DNA, 201 bp, Homo sapiens
ctgactcctccccacacctctggtcctcactcagtgtttccatccaactgtacaaaccagaaacctacgagtcatccttggaacttctgtcttcttgaccstcctctttccaaaacccagtccttccctctgctctggtgattgtacccctaaataccgagcatcaccactcaccagcgtcgtctaagccattgttatctg

SEQ ID NO: 352180 - DNA, 201 bp, Homo sapiens
cggggcggggcccagaggtcgcgtgacgtgacagcagccggtcggtgattgggtctccaggcgcgccgtgtcggaaagggggcgcacccgcgcgcgctgaytggctgtctggcgcagcggggcggacggcggcggcgccgcgggggcgggcgccggtaggggccggacagggtagggcccggagggcggtggcggcggagc

SEQ ID NO: 352181 - DNA, 201 bp, Homo sapiens; identical to SEQ ID NO: 75263

SEQ ID NO: 352182 - DNA, 201 bp, Homo sapiens
actatgaggacgattcccatgttttccggaaacccgccaatgacatcacatcccagctggagattaattttggtaacctccctcgtcctgggcgtggagcyagaggaggcacccggggaggccggggaaggatcaggagggcagagaactatggacccagagcagaagtggtggtaggtgtctgtattgacggtttggcga

SEQ ID NO: 352183 - DNA, 201 bp, Homo sapiens
gtgattcaagccaccattctttccagtatactataaccatgattttcttttagaatttttttctggagagaccttagacctttaatttaccagtttttatyatatccactccttcctagaccaggtgataggtttgatcgagacagaccgttgagaggacgtggaggcccgagagggggtatgcgcggcagaggcagaggt

SEQ ID NO: 352184 - DNA, 201 bp, Homo sapiens
tttctaggtacggcttacacactgtgtttttgtaagactgcttttgtgaactgtagcttatttagtaaaatgtacccatggctgtcacagttattgggagrtgcctgtaattataggtgagcttagttggtcatatactttctaggatatagggaaagcatgatttaatagtaacatcctattaaaaagtagactgtgggc

SEQ ID NO: 352185 - DNA, 201 bp, Homo sapiens; identical to SEQ ID NO: 75257

SEQ ID NO: 352186 - DNA, 201 bp, Homo sapiens
ttagaatttttttctggagagaccttagacctttaatttaccagtttttattatatccactccttcctagaccaggtgataggtttgatcgagacagaccrttgagaggacgtggaggcccgagagggggtatgcgcggcagaggcagaggtggccctgggaacagagtttttgacgcttttgaccagagaggaaagcgag

SEQ ID NO: 352187 - DNA, 201 bp, Homo sapiens
aattagctgggcgtggtggcgggcgcctatagtcccagctactggggaggctgaggcaggagaatggcgtgaacccgggaggcggtgcttgcagtgagccragatggcgccgctgtactccagcctgggcaacagagcaagactccatctcaaaaaaaaaaaaaaaaaaaaaaaaaaaatatatatatatatatatatata

SEQ ID NO: 352188 - DNA, 201 bp, Homo sapiens
attttctgcactagtacaaatgaagtcaaaatatagacatgggccctggggttatatctttcttctgataaatccaacattggtgatttacctttttttcyttttttttgagacagagtctccaggctggagtgcagtggcatgatctcggctcactgcaacctccgcctcccgggttcaagtgattctcctgcctcagcc

SEQ ID NO: 352189 - DNA, 201 bp, Homo sapiens
gttaaggagcctgtccttggtgatactatgctgctttcaacgtggcttgttgaaactgcagctgataagcagggcattcgtgcctctgatatggggcattygtgcctctattcttgaatgaggtgcattccagtcaacagcttcaagctgatactgctgaaggaggctgtaacttgtaactaatctgaattacactatatg

SEQ ID NO: 352190 - DNA, 201 bp, Homo sapiens
acacctgtaatcccactactttgggaggctgaggcgggtggatcacctgaggtctggagttcgagaccagcctggccaacatggtgaacccccatctctaytaaaactacaaaaaaatgacctgggtgtggtggcaggcacctgtaatcccagctactcaggaggccgaggcagtagaatcacttgaaccagggagttgga

SEQ ID NO: 352191 - DNA, 201 bp, Homo sapiens
gctgagggaggagaatcacttaaacctgggagggaggttgcactgatccgagattgcaccactgcactccagcctgggcgacagagtgagactcagtctcaaaaaaaaaaaaaaacccaaaaaaccaaaaaaacaatgttttctccttcttaaacatacaaaggcattggtatgaatgtatttgtgtgactagagagggtc

SEQ ID NO: 352192 - DNA, 201 bp, Homo sapiens
tatcatataccactcataaatgtttcacagtgttatacctgctactcttttttaataacataactggaataccattactccattaaattttttttaatatmcttgatatcattaattccaagacacttcttcagtttccctgattgtcttcaaaactttttaaaaagataatttatttgtttgaaataatattgaaatata

SEQ ID NO: 352193 - DNA, 201 bp, Homo sapiens
tagatggcttcaaacatagactttgcttaagatgtttaaagcattaaaactaaaggggagtaaagcaaggtgacaggacagaggaaaagaccagagtctcrgccgggcacggtggctcacgcctgtaatcctggcactttgggaggctgaggagaccagcctgaccaggttagagaaacgtcgtctctactgaaaatacaa

SEQ ID NO: 352194 - DNA, 201 bp, Homo sapiens
ccggcgcgggcggccggagggagtcgcagaaggagcgcaagagcctcccggcgcccgtcgctcagcggcccgatagccccgggggcggcctgcaggcgccsggtacgcggggacagcgggggtagcggaccacggctcggcccgctgtgagactggggtcccgggggccggtttcaggaggaggggcccgggaacagtagg

SEQ ID NO: 352195 - DNA, 201 bp, Homo sapiens
atatggatatacactttcatttctcctgggtaaatacctaggagtggaatggttggaccaaatggtatgcgtatatttcactttgtaagaagctgctgaaytcttttccaacatccttgctagaacttgctatggtcagtttttataactttcagtcattttaataggtacatatctcattatgggtttttgttgtcatcg

SEQ ID NO: 352196 - DNA, 201 bp, Homo sapiens
tgctggactgagtggacaaaaagagatgccctcaagtactggctgactcttgggcaagttgccaaatagcagtgtttggttcatattcaggaagttataaytgcaagtctatatatctcatagaatagcaggaaaatctgttttcaaagtaaaaatataagcactacaaactttaaaaacaaaaaccttggccaggcgctg

SEQ ID NO: 352197 - DNA, 201 bp, Homo sapiens
agtcgcagaaggagcgcaagagcctcccggcgcccgtcgctcagcggcccgatagccccgggggcggcctgcaggcgccgggtacgcggggacagcggggktagcggaccacggctcggcccgctgtgagactggggtcccgggggccggtttcaggaggaggggcccgggaacagtagggagagttgagggtcctggtgg

SEQ ID NO: 352198 - DNA, 201 bp, Homo sapiens
tgtttcagatggtaaaagatgactatgaggacgattcccatgttttccggaaacccgccaatgacatcacatcccagctggagattaattttggtaacctycctcgtcctgggcgtggagccagaggaggcacccggggaggccggggaaggatcaggagggcagagaactatggacccagagcagaagtggtggtaggtg

SEQ ID NO: 352199 - DNA, 201 bp, Homo sapiens
tacctaggagtggaatggttggaccaaatggtatgcgtatatttcactttgtaagaagctgctgaactcttttccaacatccttgctagaacttgctatgrtcagtttttataactttcagtcattttaataggtacatatctcattatgggtttttgttgtcatcgtttttttttttttctttttttagagacaagatct

SEQ ID NO: 352200 - DNA, 201 bp, Homo sapiens
gaagtcgtgggctggtggagtgttgcgtcgctgcttagtgatgtggcagcatggtggccaccgcactccacctcaacacggggaggggttgtgtcttatgyttggcacttgctgcttaaagtctttgtttaatcattaaacctgtttatgttaaacagaaacaagtagtgaatcacatttcaaggaaaataaagttaaaca

SEQ ID NO: 352201 - DNA, 201 bp, Homo sapiens
gggcggcctgcaggcgccgggtacgcggggacagcgggggtagcggaccacggctcggcccgctgtgagactggggtcccgggggccggtttcaggaggargggcccgggaacagtagggagagttgagggtcctggtggccgccgaaggtaggaggagaggggcaggggtcacaccccttccagctctcgccagcctcgt

SEQ ID NO: 352202 - DNA, 201 bp, Homo sapiens
gtgagccaccgcgcccggcctgttttttccccttaaacacttttgagatataattctcgtactatagcactcaaatctctaagtatataggccaggtgtgrtggttcagatctgtaatcccaacactttgggaggcagaggcaggaggatagcttgaggccaggagttcaagaccagcatgggctacatggagagaccccg

SEQ ID NO: 352203 - DNA, 201 bp, Homo sapiens
taggttttctgctaagagttttatattttagctcttgtatttatggtgtgaggtaggtctaacttcattctttcttttggtgtgtgtggatatccagttgyccaagcaccatttgttgaaaatacttttcattctccattgaattgtctttggcaccacggttggaaaaaaaaaatcagttgaccgtaaatgtgagggttt

SEQ ID NO: 352204 - DNA, 201 bp, Homo sapiens
gatctcgggggcggagacatgcccgttaatcccagcgccgtttatgacattgcttccgtgggaaaacacgttctctgcctgggtagaatagaaatccatgrcagctggctgtgacaagactactacacacattgctgaaactctgggtctgttttctcattgaaaaatggagagggctgaatttagataatctttcgagat

SEQ ID NO: 352205 - DNA, 201 bp, Homo sapiens
gctaagagttttatattttagctcttgtatttatggtgtgaggtaggtctaacttcattctttcttttggtgtgtgtggatatccagttgcccaagcaccrtttgttgaaaatacttttcattctccattgaattgtctttggcaccacggttggaaaaaaaaaatcagttgaccgtaaatgtgagggtttatttctggac

SEQ ID NO: 352206 - DNA, 201 bp, Homo sapiens
attgttcattaagaaaaggaattgaaacttgaggtattgacagatgcacagagcagttagagtgacagtgcatcttctgctcaccctgggactatgcgggkactgtacacatactgtgtattaactgtatttcatttttctcaagggagagttacagattgtgtcttgtacaattcagagttaatcaaaggagaactacac

SEQ ID NO: 352207 - DNA, 201 bp, Homo sapiens; identical to SEQ ID NO: 75264

SEQ ID NO: 352208 - DNA, 201 bp, Homo sapiens
acatactgtgtattaactgtatttcatttttctcaagggagagttacagattgtgtcttgtacaattcagagttaatcaaaggagaactacactctgtgtyccctgagtaggttactttcaactctgtttcttgataagagcatttcactgagtagttgatgacttttttttttttttgagatggagtttcgctcttgttg

SEQ ID NO: 352209 - DNA, 201 bp, Homo sapiens
tgagactctatctctaaataaatagataatgctaaaatctttggtttatttgacattgaaatgttgcagcttaagttggaggcaaattttctgcaatgttktataatatatatattttttacaacaaaaccatgttttttcattaacatcccttgttatttctgagtggccttcccaaagggcaagtttagctctaatgtt

SEQ ID NO: 352210 - DNA, 201 bp, Homo sapiens
tactcaggaagctgaggcaggaggatcatttacacccaggagtttgagggtaccgtgcagtaaagtatgattgagccactgcactccagtctgagtgacascaagactgtctaaaaaaaataagaaggaatttgtggcatcagcagttcggagaagaggggcactgttttacagtgggaaggaacattctgagggtgctgg

SEQ ID NO: 352211 - DNA, 201 bp, Homo sapiens; identical to SEQ ID NO: 75287

SEQ ID NO: 352212 - DNA, 201 bp, Homo sapiens; identical to SEQ ID NO: 75288

SEQ ID NO: 352213 - DNA, 201 bp, Homo sapiens
ccagatttaatgagagggaaaatagacttcagctcttgatgggaggagtatgcaggatgggagacatgatggcagaggtgggacaggcaggcaaggttgctgagtccccttgctgcctcctcaggcccacttgggcctgcttttcccaaatggcagctcctctggacatgccattccttctcccacctgcctgattcttca

SEQ ID NO: 352214 - DNA, 201 bp, Homo sapiens
gagaaacggacacagctagccaggtgaacagccagtgcggagggacagaggcagctatggtaggagacggggcggggagcctcaccgcaggccgtggcggragaaggggcccacggcggcccgggcgtcgcgctccacggcgcaggcgaaggcacgcgcgggggcctccagccaagtgcagccacccacaccgcgctccag

SEQ ID NO: 352215 - DNA, 201 bp, Homo sapiens
tttactaaaattacaaagaattagcaaggcgtggtggcggatgcctgtagtcccagctactggggaagttgaggcaggagaatcccttgaacccaggaggkggaggtttcagtgagctgagattgtgccactgcactccagcctgggcgacagagtgagacgccatctcaattaaaaaaaaaattcagacttgatcaaatt

SEQ ID NO: 352216 - DNA, 201 bp, Homo sapiens
cctcagcctctccagtagctgggattacagacatgcaccaccaatgcccagctaattttgtatttttagtagagatggggtttctccatgttggtcagackggtctcgcactcctgacctcaggtgatctgcccgcctcggcctcccaaagtgctgggattacaggtgtgagccaccacactcagcctacaggtgacttct

SEQ ID NO: 352217 - DNA, 201 bp, Homo sapiens
gagcaagatacagtttttcactctcatgttacagttgagttccatcttgccatatttttataattcttgtgaaatttaccttgtgtttatcatccctactktatttttttatttttttattttttcgagacagagtttcgctcttttcgcccaagctggagtgcagtggtgcgatcttagttcactgcaacctctgcctcc

SEQ ID NO: 352218 - DNA, 201 bp, Homo sapiens
tgctagttagatccaaactaggatccagctcttcaggtcagccatgagtcctgtctgtggtgtcctacagccagctaggaacacaccacaaggacgtgccrtgtagcagcagtccaagtcagacaaccagaagacaccttgacttcctctgtggctgccagagagctgtatggtggtcttccctgcttcacagcagtgaca

SEQ ID NO: 352219 - DNA, 201 bp, Homo sapiens
cagagtacccattcaaaccaccgaagatcacatttaaaacaaagatctatcacccaaacatcgacgaaaaggggcaggtctgtctgccagtaattagtgcsgaaaactggaagccagcaaccaaaaccgaccaaggtaagacatgtgcctgtgtcttcctcggagggggtctttgggggtgctgctctggggtgggggctt

SEQ ID NO: 352220 - DNA, 201 bp, Homo sapiens
ctcagagcaaagctgtttagaggaagactacagcatagcagttaaaagctcaggttctggagtttcaatcctgggcctgccatgtcttagctgagtgaccstgggcaagttactttacctctctgtgccttagttacttcgtccgtgtgtgaaggttaaatgagttaatatataccaactgcttagaagagtgcctggcat

SEQ ID NO: 352221 - DNA, 201 bp, Homo sapiens
gggagccgctgtcggcccctcagcccggcccggggcgttcacgccactctccgcccggagcttggccgcgtccccctgtcgcggaggccgcggtccgatcygagggcgtcgttaatgtgagagcccggttgggaggctccaaaccgggcgccttcggggaaggcccgagcgccggagcccctgcccggagcccgcgccgcg

SEQ ID NO: 352222 - DNA, 201 bp, Homo sapiens
gagccagtttcctgaggggagataaagagctggggttcgttctaggcggagcagtgcttggtagagctagacattgaacttggagccacagtctctgagcmttccctccgtccctgggaacgtttcctttcttttgttccctaagggctagagaggacattaactttataaaactggagtggaagtgggcacaaaagaaca

SEQ ID NO: 352223 - DNA, 201 bp, Homo sapiens
aggttgcagtgagccaagtttgcaccactgcactccagccagggcgacagagtgagactccatgtcaaaaaaaaaaaaaaaaaaaagatttctggagtgcrtgccttgctttctaatgttactgaaattactctgaatctatatcctcatctctcaggtgccctcccaagtgctctcctccccagactacccctgacggac

SEQ ID NO: 352224 - DNA, 201 bp, Homo sapiens
gagaagtcccaggttcaactccagtgccaactactctgtgagcccgtgctcccacatcccccttcagaatgtgttgtttcctcctttgtgtgaccacagckctttctttatatttctctttgagcacttgtcacaatctctttgtgttacagacttgtctttcctgtactgggttctgagatcccgaagggcagggatctt

SEQ ID NO: 352225 - DNA, 201 bp, Homo sapiens
agggttttaccatgttggccaggctggtctcgaactcctgacctcaagtgatctgtccgcctcagcctaccaaagtgctgggattacaggcttgagccacygtgcctggcctgatgcactaaagttttaaattttttaatttaatttttatttttagagaaggggtcttgctctgtcatccaggctggagtgcagtggctc

SEQ ID NO: 352226 - DNA, 201 bp, Homo sapiens
acagtgaaaccctgtctctactaaaaatacaaaaaaaaattagccgggcgtggtggtgggcgcctgtagtcccagctactcgggaggctgaggcaggagamtggtgtgaacccgggagtcggagcttgtagtgagccgggattgcgccactgcactccagcctgggtgacagagcaagactctgtctcgaaagaaaaaaaa

SEQ ID NO: 352227 - DNA, 201 bp, Homo sapiens
agggccccggacacgcggtgagcggacatgtgccggccgcaagtgctcaggcccacgaaggcgtctgtccacctgtggggggcgggacatcagaggtgggmccaggccgggccatggccaagggctaggtaggctagggaagggacggcggggtgggagggggtaactggggtggcggcagcggtcgacgccagactcgct

SEQ ID NO: 352228 - DNA, 201 bp, Homo sapiens
gctaaatgttagttgaaatgagagaattgcattagaaggccatgaggcttatgtttagattttcagtatattgaattacatttaagtcatgatttagtggycaggcacggtggctcatgcctataatcccagcacttaggaaggctgaggcaggaggatcacttgagcctaggaatttgagaccagtctgcccaacatagt

SEQ ID NO: 352229 - DNA, 201 bp, Homo sapiens
cgttcgaatcaaaacgggccaaagtttataataataatttggtactttggatcttgaatgcagcagggtgctttctcgctaattggcaccttttggtgagkaacacatgctaaattggcttagtacttttgccagtggatttgccaaggtcctctgtagcccaccccgccagcatctgtgagtcggcggctgggtagtgct

SEQ ID NO: 352230 - DNA, 201 bp, Homo sapiens
gtccgatctgagggcgtcgttaatgtgagagcccggttgggaggctccaaaccgggcgccttcggggaaggcccgagcgccggagcccctgcccggagccsgcgccgcggaaccgccccgccctgggccgcagcgcgccgggcttgcagctccgcttggcccggccgcagctcgggagtctgggaggttcgggctaggaaa

SEQ ID NO: 352231 - DNA, 201 bp, Homo sapiens
tttataaaactggagtggaagtgggcacaaaagaacagtcagaggacttcagacctctcctcatctcttaagctagtgacaccaccattcaccagataagrggtcggttaatggctttctttcctaccctactcccaggtgcagtcgtccattaacccttgtggatttaaatttagaaagatttctggagtgcaggccggg

SEQ ID NO: 352232 - DNA, 201 bp, Homo sapiens
ggagtgtagtggcaagatctcggctcactgcaacctctgcctcccgggttcaagcgattctcctgcctcagcctcctgagtagcagagattacaggcgccygccaccacgcctggctaattttttgtatttttagtagagaccgagtttcaccacgttggccaggctggtctcgaactcgtgaccgcgtgatccacccgcc

SEQ ID NO: 352233 - DNA, 201 bp, Homo sapiens
ccccaagctcactcaggaattcacacccgcctggtttcttgaagtgtgctgggtccttccctctgctccctactccccaccacggcagagaataggctttytaagatgctgcgatcccgttctgctgcccgtaataaaaatgctctcagacactggttagtcgtgtgggtttcttccttcctgggagcgggcagtgccagg

SEQ ID NO: 352234 - DNA, 201 bp, Homo sapiens; identical to SEQ ID NO: 75286

SEQ ID NO: 352235 - DNA, 201 bp, Homo sapiens; identical to SEQ ID NO: 75283

SEQ ID NO: 352236 - DNA, 201 bp, Homo sapiens
agggcgcaaagctgcacgccatcctgggcaagctgggcccgcagcgtgggcgcggtgaggacgcgcagctcatgcagccgctcccaagagcaagagaaagygtcggggccttcaccgcagccgccggtgggaggcacactggggtagccggggtgcgccatcagctcggctgtcagggtgtggcccgctagggtaccttcc

SEQ ID NO: 352237 - DNA, 201 bp, Homo sapiens
aagcacattagctgtaaatcagttgtaaagccagagttttgttcccggattagctgcctcttgcctgtgccatttctgagactgtgttaaccccccatgcsttgtccttctcttggcagtaatccagtccctcatagcactggtgaatgacccccagcctgagcacccgcttcgggctgacctagctgaagaatactctaa

SEQ ID NO: 352238 - DNA, 201 bp, Homo sapiens
agactgttttttttttcttttaaaggaagaaaaattattgatacaagttgataaacagtcttttcagtacatagggtggtaataaagtgattttcgttggygaaaagttggggcttagtgcatggaacagtgccttaggcatagcaatctagcaaatgttgaatgatcaaattaattacatcttaaagaactttagatttc

SEQ ID NO: 352239 - DNA, 201 bp, Homo sapiens; identical to SEQ ID NO: 75284

SEQ ID NO: 352240 - DNA, 201 bp, Homo sapiens
gtggctgtcgctctagggtgataaggtagggagtgtagccttgggtcctgagtagagtcacatcttggcactcgttttgtcaaattcagggagtcctgagstttgcagatctgtagacacagagaaaaggagtgtgtctgtgctcctgctctttcctgacttccctgcgcctggcctgatggatcagcaggaccttcttct

SEQ ID NO: 352241 - DNA, 201 bp, Homo sapiens
acatttattacgtttaagatatttctatattctttgctacagcagtaaatgtgagagccacatttctttgcagcttcacactgcacacacactgcacacastgtgcacattagagagccacagagacgttcctcctgagccagactccaaccacttccagagttttcttgggaacggcacatagatctgtaggcatctgag

SEQ ID NO: 352242 - DNA, 201 bp, Homo sapiens
catttattacgtttaagatatttctatattctttgctacagcagtaaatgtgagagccacatttctttgcagcttcacactgcacacacactgcacacacwgtgcacattagagagccacagagacgttcctcctgagccagactccaaccacttccagagttttcttgggaacggcacatagatctgtaggcatctgagt

SEQ ID NO: 352243 - DNA, 201 bp, Homo sapiens
cactgtgcacattagagagccacagagacgttcctcctgagccagactccaaccacttccagagttttcttgggaacggcacatagatctgtaggcatctragtcttagctcctcctgtgactctctccctctggccccatgcatctcctcctgtcccaccttagttaatggttcacttgtctactcagttgctcaaggaa

SEQ ID NO: 352244 - DNA, 201 bp, Homo sapiens
aatggttcacttgtctactcagttgctcaaggaaaaaacgccagcggagcccttctcggctcttcctcccttgtctagtcacctggcggattctgctgaaytatgccttcagtctctcttctctgcctgtcttctctccatccccactcccactcccaatgccactgccactcccactgcctcagttcaggccatccctgt

SEQ ID NO: 352245 - DNA, 201 bp, Homo sapiens
aaagctcaggttctggagtttcaatcctgggcctgccatgtcttagctgagtgaccctgggcaagttactttacctctctgtgccttagttacttcgtccrtgtgtgaaggttaaatgagttaatatataccaactgcttagaagagtgcctggcatatagtaagtgtgagctacttgtagatattattgggaataaccaa

SEQ ID NO: 352246 - DNA, 201 bp, Homo sapiens
gcaaaggtgttttcgggacaggttggggccagtctgcctggacataccctcatcactgagagcccattctcttacctgtggtactctcttattctgtaggktggagaaagagttactgagacagctgtgtgaatgtttgtttaaaaatgttggctgggggccaggcgcggtggctcatgcctgtaatcctagcaccttggg

SEQ ID NO: 352247 - DNA, 201 bp, Homo sapiens
aagaagagggttcatttcagattcggtggctgtttgggttttgtttgttttggtttttaacacttccagggctgtgttgattatagttttctgtatttcaytttcttgtcagattttgtccctactttcctagcataggtaggcagagcggggaacattctcttttgacagcccttatcccagcaggcacatctgcaacca

SEQ ID NO: 352248 - DNA, 201 bp, Homo sapiens
tgaacccaggaggcagaggttgcagtgagccaagatcatgccactgcactctggcctgggcaacagagtaagactccatctcaaaaaaaaaaaaaaaaaawgaaaaggaaaaagaaaaatgtttacttggctgggcgtggtggctcatatccgaatcccagcactttgagaggtcaaggcgggtggatcacttgaggagac

SEQ ID NO: 352249 - DNA, 201 bp, Homo sapiens
aaccaaagcaggtgctaatgtcaaagggctcatgggctaatgtcagggctcatgtgatgctccatctttctgagaggagaccacctgactcacggtgaggragagggtgtaactcagaggttgaatagcctctgaacccgtctgagatggcttataaaaaagtgtttcacaccagcacgcctctcattaagaacagtcagc

SEQ ID NO: 352250 - DNA, 201 bp, Homo sapiens
caggttcaggctgttctcctacctcagcctcccaagtagctgggattacaggcatgcatcatgactcctggctaatttttgtagttttttgttttttgagmcggagtttcactattgttgcccagcctggagtgcaatggcgcgatctcggctcactgcaacctctgcctcatgggttcaagtaattctcctgcctcagcc

SEQ ID NO: 352251 - DNA, 201 bp, Homo sapiens
ccgggcctggtggtgggcgcctgtaatcccagcaatttgggaggctcagccaggagaatcgcttgaaccggggaggtggaggttgcggtgagctgagatcrtgccattgtgttccagcctgggcaacaagagcaaaactccatctaaaaaaacaaaacaaaacaaaacaaacaaaaaaacttattcctactatttacttcc

SEQ ID NO: 352252 - DNA, 201 bp, Homo sapiens
tatagaaggttgaatcctttgcaggtgaactttttaaattttaattttttttttcttctgaggtggagtttcactcgttgcccaggccggagttcaatggmgcgatcttggctcactgcaacctcctgcctcctgggttcaagcgattctcctgcctcagcctcctgagtagctgggattacaggcgtgtgccaccatgct

SEQ ID NO: 352253 - DNA, 201 bp, Homo sapiens
taaggttcatgccttgtgcttggtgaaaaattaagtgtttggaaccaagtccaggtctttactggatctctaaaatatttcattctgtgacttggggtgtkgttttgctatccaggatccttagaggtttggtctttaagcctgtattcgttccttccctgatatgtggtacctaactacatctctctcagcccacttccc

SEQ ID NO: 352254 - DNA, 201 bp, Homo sapiens
cttgtgcttggtgaaaaattaagtgtttggaaccaagtccaggtctttactggatctctaaaatatttcattctgtgacttggggtgtggttttgctatcmaggatccttagaggtttggtctttaagcctgtattcgttccttccctgatatgtggtacctaactacatctctctcagcccacttcccaccagggtgact

SEQ ID NO: 352255 - DNA, 201 bp, Homo sapiens
gtgtgagggttacctggggagattttgaacagttttctaggcctcattgtagaccccaaaaagaagcaaaagaggaactttgttaactgctttgccaagaygcaggtgtgtacatctgagctgtgtgactgagcactggctatatacagcagtgtcctgttctcccatctcctctcaggacttgagtccgtggccttctgc

SEQ ID NO: 352256 - DNA, 201 bp, Homo sapiens
caaaagaggaactttgttaactgctttgccaagacgcaggtgtgtacatctgagctgtgtgactgagcactggctatatacagcagtgtcctgttctcccrtctcctctcaggacttgagtccgtggccttctgctggggcccagggcccatctctcctgttagtgcttgcaaagctgttaagtaaccatccctctctgcc

SEQ ID NO: 352257 - DNA, 201 bp, Homo sapiens
tgccaagacgcaggtgtgtacatctgagctgtgtgactgagcactggctatatacagcagtgtcctgttctcccatctcctctcaggacttgagtccgtgrccttctgctggggcccagggcccatctctcctgttagtgcttgcaaagctgttaagtaaccatccctctctgccatgcttcacactttgccctggagtgg

SEQ ID NO: 352258 - DNA, 201 bp, Homo sapiens
gaagctgtagaggatgttgggaaattggggtgggttggtcacagtgcctggcatctgtctcagggtaagggcttgggaggctcaagtgcagagtcgtatcyggatgccagcaacaccctgttgagaaactttctactatggtatgctcatcattctctgaagatgtcagggcctgtttgtttgtttgcctgtttctctcac

SEQ ID NO: 352259 - DNA, 201 bp, Homo sapiens
gttccagggtgaaggcatagaactggtacggtgtcacttctgtggattcttttggtcaggcaagtccagatttaatgagagggaaaatagacttcagctcttgatgggaggagtatgcaggatgggagacatgatggcagaggtgggacaggcaggcaaggttgctgagtccccttgctgcctcctcaggcccacttgggc

SEQ ID NO: 352260 - DNA, 201 bp, Homo sapiens
cctgagttttcttctaagagttttatagttttagctcttaaatttggatctttgatccatttatatgtagatttttttttttttttttttttttttttttkgagacaggctctcgttctgttgcccaggctggagtacagtggcatgatcatggctcaccacagcctcaacctcccaggctcaagcgatcctcccacctca

SEQ ID NO: 352261 - DNA, 201 bp, Homo sapiens
aaccacacaaaacctatagaatgtgcaacaccaagtatgagccctaacataaactagggaagctgagtggtaatgatgtgttaaggtaaaaggttcattgrtggtaacaaatttgcccctctggtgagggatgctgatagtgggaaaagctgtgtgtgttcaggggcagggggtatttaggaattctctgtcctttcctct

SEQ ID NO: 352262 - DNA, 201 bp, Homo sapiens
agcaggtgctaatgtcaaagggctcatgggctaatgtcagggctcatgtgatgctccatctttctgagaggagaccacctgactcacggtgaggaagaggktgtaactcagaggttgaatagcctctgaacccgtctgagatggcttataaaaaagtgtttcacaccagcacgcctctcattaagaacagtcagcggccgg

SEQ ID NO: 352263 - DNA, 201 bp, Homo sapiens
agcctgggtgatagagcgagactctcgaaagaaaaaagagaaaagtttacttttcccaacaaagttgaatagctttttttttttttttttttttttttttkggagacggagtctcactctgtcacccaggctggagtgcagtggcaccatctcagctcactgcaacctctgcctcccatgttcaagccattcctcctgcct

SEQ ID NO: 352264 - DNA, 201 bp, Homo sapiens
gacctggcccacagtggggaacaggggaggttggtcagtcctggacaatcagtgaagacctttagcagatttcaccaaccaaaagtcatgcaggaaagtgygcgcgcgcgcgtgtgtgtggtatgtgtgtgtgtgtgtggtgtgtgtgtgtgtgtcttactctgttgcccaggctggagtgcagtggcacaatcttggctc

SEQ ID NO: 352265 - DNA, 201 bp, Homo sapiens
tcagtaattcctggagtccttgccgagtcatgtctgttaacccatcgtgcctggggagtggcagtccttccaggccaggttgcccaggaaagccctgcacytcaggttctggccacaaagagttctgaggctcctcccttacctgtagactgagagggtggggctagggccagggaggctctcaggagatggatgcacgtg

SEQ ID NO: 352266 - DNA, 201 bp, Homo sapiens
gtttgggacaggtgatgggaaggagtatactcaattattgcaacatttgggaccttttaaggtatttactagaaaactctgaggcaggccaggcgtggtgrctcacacctgtaatcccagctctttgggaggccgaggtgggcggatcatgaggtcaggagttcgagaccagcctggccaacatagtgaaacccccgtctc

SEQ ID NO: 352267 - DNA, 201 bp, Homo sapiens
cagcctgggtgacagagtgagagcgagactccatctccaaaaaaaaaaaaaaaaattagccaggcgtggtgacaggcacctgtaatcccagctacttgggrggcaaaaaaacaaaacaaaacaccccccccctttttttaaagcacattccatggaaggctacaacattgcatatctttttgggttgaaggtacattgaca

SEQ ID NO: 352268 - DNA, 201 bp, Homo sapiens
catctccaaaaaaaaaaaaaaaaattagccaggcgtggtgacaggcacctgtaatcccagctacttggggggcaaaaaaacaaaacaaaacaccccccccytttttttaaagcacattccatggaaggctacaacattgcatatctttttgggttgaaggtacattgacattttattctttgacaatgaagctccctggat

SEQ ID NO: 352269 - DNA, 201 bp, Homo sapiens
acggggtttcaccatgttagccaggatggtctcgatctcctgacttcatgatccacccaccttggcctcccgaagtgctggtattacaggcgtgagccacygtgcctggcctgatttttgcattttttagtagagacggggtttcatggtgttggccaggctggtcgtgaactcctaacctcaggtgatccgcctgcctca

SEQ ID NO: 352270 - DNA, 201 bp, Homo sapiens; identical to SEQ ID NO: 75281

SEQ ID NO: 352271 - DNA, 201 bp, Homo sapiens
ccttaagggacgtgcatggtataccctgtccttagccaagaatcttactctagtatcttgagccaaggtcaaaaaagccaaacacagcattggaactgtawttatagaaaatccttcccaccccagattcctttttcctcccaaagccccagcttcccatccacccaccaacctggtcattaagcacatgtttgagcacca

SEQ ID NO: 352272 - DNA, 201 bp, Homo sapiens
aggctttcagttcactaggggaacaccagttatgtaatgctgatcattggctgtgagaatcaatgtttaagactgttttttttttcttttaaaggaagaaraattattgatacaagttgataaacagtcttttcagtacatagggtggtaataaagtgattttcgttggtgaaaagttggggcttagtgcatggaacagtg

SEQ ID NO: 352273 - DNA, 201 bp, Homo sapiens
ctcatgcaaaggcctccctctggtttcacgctggcaggggctatggagcagtgggctaagatcttactagggcaaaggtggaggctggctggtagaatccmagtgtgcttgggctgaggctctggggagctatccaggccaaagtttcaccttggagacggtaagcaacagccagggctgctcttgtccctgtgtatacca

SEQ ID NO: 352274 - DNA, 201 bp, Homo sapiens
agctgggactacaggcgcccgccaccatgcccggctaattttttttgtatttttaatagagacggggtttcaccatgttagccaggatggtcttgatctcstgacctcgtgatccgcccacctcggcctcccgaaatgctgggattacaggcgtgaaccactgcgcccggcatgattggcattttgggctaaatagtttct

SEQ ID NO: 352275 - DNA, 201 bp, Homo sapiens
caggctgctctcaaactcctgtcctcaagtgatccacccgcctcagcctcccagagtgttgaagcgttggaattacaggtgtgagccactgtgcccggccttttttttttttttttttttttaagataggttctcgctctgtcgcccaggctggagttggagtacaatggtgtgatcttggctcacggcaacctctgtctc

SEQ ID NO: 352276 - DNA, 201 bp, Homo sapiens
aggctgctctcaaactcctgtcctcaagtgatccacccgcctcagcctcccagagtgttgaagcgttggaattacaggtgtgagccactgtgcccggccttttttttttttttttttttttaagataggttctcgctctgtcgcccaggctggagttggagtacaatggtgtgatcttggctcacggcaacctctgtctca

SEQ ID NO: 352277 - DNA, 201 bp, Homo sapiens
taagtattcatatcagagagtgaggtgaaaactcctgagcgtgcccctaacgaagtactcagcctgtccttagcccagtgaggtttctaaaatgctaatgyggtagtaattctcctgttacagggccatttctaatcatgggaaaggaaggggagccacctatttgtgctcttaggcgactgtggctcaatttccagccct

SEQ ID NO: 352278 - DNA, 201 bp, Homo sapiens
gctggtctcagtagacatccctgtggcagggaaagcttcagctttgttagttcactgggtgaaaaaggttagccacagggaaaggatgctgctgtggagtygccaccaagctaggcagaagtgacaacagtgcacaggacccttcagtccatctgaagcctggcatgaagaaggagcagcatgctagttagatccaaacta

SEQ ID NO: 352279 - DNA, 201 bp, Homo sapiens
caggagaatggtgtgaacccgggagtcggagcttgtagtgagccgggattgcgccactgcactccagcctgggtgacagagcaagactctgtctcgaaagaaaaaaaaaaaaaagaacagtcagcataagaaaacctaagcttcctgaaggattctccacgagttttacacaggcagttcccgtcgtgcccatttgtcctg

SEQ ID NO: 352280 - DNA, 201 bp, Homo sapiens
accttgacttcctctgtggctgccagagagctgtatggtggtcttccctgcttcacagcagtgacatgaaacggtgacttctgtgggatgaaggactctgsgtctttacttgggaagggaaaacatgaagtggaatggggttttaggattcttgaaaggttgccatgggaaaggaagattagatttgaccacagggttaga

SEQ ID NO: 352281 - DNA, 201 bp, Homo sapiens
ggaggctgaggcgggcggatcatgaggtcaggagatcgaaaccatcctggttaacacggtgaaaccccgtctctactaaaaacacaaaaaattagccgggygtggtggtgggtgcctgtagtcctagctactcgggaggctgaggcaggagaatgatatgagaggcagagcttgcagtgagccgagattgcgccactgcac

SEQ ID NO: 352282 - DNA, 201 bp, Homo sapiens
tcggttctctttgtgttctcttattttccacaaggctacattggaccccttcatagcatggtggtctcagggttccagggtgaaggcatagaactggtacrgtgtcacttctgtggattcttttggtcaggcaagtccagatttaatgagagggaaaatagacttcagctcttgatgggaggagtatgcaggatgggagac

SEQ ID NO: 352283 - DNA, 201 bp, Homo sapiens
aactggtacggtgtcacttctgtggattcttttggtcaggcaagtccagatttaatgagagggaaaatagacttcagctcttgatgggaggagtatgcagsatgggagacatgatggcagaggtgggacaggcaggcaaggttgctgagtccccttgctgcctcctcaggcccacttgggcctgcttttcccaaatggcag

SEQ ID NO: 352284 - DNA, 201 bp, Homo sapiens
gcctgggcgacagagccagactctgtctcaaaaaaaaaaagacaagtggataaaaagtctgtcctagaatttagacatggattgaaaaggtgttttttgattttttttttttttttttttttctgagacagggtctcactcttgccgaggctggaatgcagtggtgtaatcatagctcactgcagcctcaaactcctgggc

SEQ ID NO: 352285 - DNA, 201 bp, Homo sapiens
gtacggtgtcacttctgtggattcttttggtcaggcaagtccagatttaatgagagggaaaatagacttcagctcttgatgggaggagtatgcaggatggsagacatgatggcagaggtgggacaggcaggcaaggttgctgagtccccttgctgcctcctcaggcccacttgggcctgcttttcccaaatggcagctcct

SEQ ID NO: 352286 - DNA, 201 bp, Homo sapiens
ccaccacaccccgctaatttttgtatttttagtaaagacggggtttcaccatgttggccaggatggtctcagtctcttgaccttgtgatccaccctcctcrgtctcccaaagtgctgggattacaagcgtgagccaccacgctggccttcatgcagtttttaataaaccatttcataacttcataataatgttttggtttt

SEQ ID NO: 352287 - DNA, 201 bp, Homo sapiens
gccgatcgccgccctgctagaggccctcccctcacctgcgggccagctccgccgcgctctccgtggccgcaccgttgaccagcagggacacgctggtcacrgccccggccagaaaggcctccacgataccctcatcgcgtcgcgggcagtaaccaaagtcgtccgcggtgaccaccaggcgcatgcgagggcgggacatgg

SEQ ID NO: 352288 - DNA, 201 bp, Homo sapiens
agtgaaaccccatctctactgaaaataccaaaaaaaaaaaaaaaattagccaggcgtggtggcgggctcccgtagtcccagccactcaggaggctgaggcrggagaatggcgtgaacccgggaggcggaggttgcagtgagccgagatcgcgccacagcactccagcctgggcgaagagcgagactccgtctcaaaaaaaa

SEQ ID NO: 352289 - DNA, 201 bp, Homo sapiens
agggtgggctgcctcccctcctgtgatcagcagtgtgtgtgtgtgtgtgtgtgtgtgtgtgtgtgtgtctcattcagcaaatatttatttatttattttgtgtgtgtgtgtgtgtgtgtgtgtgtgtgtgtgttattgtttattttttatttctccaaacctctttttttttttattgatcattcttgggtgtttctcaca

SEQ ID NO: 352290 - DNA, 201 bp, Homo sapiens
aacagaggtctctggttttcctaggcagaggaccctgcggccttctgcagtgtttgtgtccctgggtacttgagattagggagtggtgatgactcttaackagcatgctgccttcaagcatctgtttaacaaagcacatcttgcaccgcccttaatccatttaaccctgagtgaacaccgcacatgtttcagagagcacag

SEQ ID NO: 352291 - DNA, 201 bp, Homo sapiens
ctcccggacggggcggctgccgggcggagacgctcctcacttcctagacagggcggctgccgggcagaggggctcctcgcttctcagacggggcggctgcmgggcggaggggctcctcacttctcagacggggcggccgggcagagacactcctcacctcccagatggggttgcagccaggcagaggcgctcctcacatcc

SEQ ID NO: 352292 - DNA, 201 bp, Homo sapiens
acttcctagacagggcggctgccgggcagaggggctcctcgcttctcagacggggcggctgccgggcggaggggctcctcacttctcagacggggcggccrggcagagacactcctcacctcccagatggggttgcagccaggcagaggcgctcctcacatcccagacgatgggtggctgggcagagacgctcctcacatc

SEQ ID NO: 352293 - DNA, 201 bp, Homo sapiens
cccaaggaccaccaggccagcctcggggctctcaacccctcttcccacgtgccttggggctcagccgtgggggtgccctccttgagcacacgcagacccayctctgtctccctgctgcagggttgttgggggctttgacgtactgacagccatggagaatgtggagagtgaccccaaaactgaccgccctaaggtctgtgc

SEQ ID NO: 352294 - DNA, 201 bp, Homo sapiens
ccagctagtttttgtgttttttgtagagacggggtttcaccatgttggccaggctggtctcgaactcctgggctcaagtgatccacctgcctcagcctccyaaagtgctgggattacaggcgtgagccactgcgccccacctgtttctttgttaattggaattccccgtgcgtgaaagtggagtgaggaggtgtgatacgc

SEQ ID NO: 352295 - DNA, 201 bp, Homo sapiens
ttcatcctgacagtcttttttttttttttctttgagacggagtctcgctccgtcccccaggctggagtgcagcggcgcgatctcggctcactgcaagctcygcctcccaggttcatgccattctcctgcctcagcctccctagtagctgggactacaggcgcccgccacacgcctggctaattttttgtatttttagtaga

SEQ ID NO: 352296 - DNA, 201 bp, Homo sapiens
tcccttctctcagatctcatacgtttcttttccataaacattctctgtgggtgatataatttcccagtcatctataagctgctttccccagtcttgtgtarttagtggcttacttaatatctccactggaggactgaaagacatctcaaatttttttttttttttttttttttgagatggagtcttgctctgtcgcccagg

SEQ ID NO: 352297 - DNA, 201 bp, Homo sapiens
ttggtcaggctggtctcaaactcccgacctcaggtgatcctcccgcctctgcctccgaaagtgctgggattacaggtgtgagccaccgcgcccagccccarctacttttttaatttttatttttgtagagatgaggtttccctatgtcacccaggctggtcttgaagtcctgggctcaagtgatcctcccgcgtcagcatc

SEQ ID NO: 352298 - DNA, 201 bp, Homo sapiens
cttttttaatttttatttttgtagagatgaggtttccctatgtcacccaggctggtcttgaagtcctgggctcaagtgatcctcccgcgtcagcatccccycaccaaaaaaaaacagctgggcaccatggtttatgcctgcaatctcagcactttgggaggccaaggtgggaggattgcttgagcccaggagttcaagacc

SEQ ID NO: 352299 - DNA, 201 bp, Homo sapiens
tagtcgtacatggtgacgcatgcatgcctgtagtctcagctactccggaggcggaggcagcagaatcgctggaacccaggagatggaggttgcagtgagcygagatcacgctactgcacctcagcctgggtgacagagcaagactccatctcaaaacagagtaaaacaaggccgggtgcagtggctcacacctgtaatccc

SEQ ID NO: 352300 - DNA, 201 bp, Homo sapiens; identical to SEQ ID NO: 75305

SEQ ID NO: 352301 - DNA, 201 bp, Homo sapiens
gaacagctaaatatcaaggccaagaacttccgggacctgctgaccgacgagcccttctcccggcaggacatcatcaccctccaggtgagtgtcccctgccygcctgccccagctgccttcagcacctgcagccagcccaggcctctacagggccctacccccacgtcagggcccctcatatctgtcctcaaagccacctga

SEQ ID NO: 352302 - DNA, 201 bp, Homo sapiens; identical to SEQ ID NO: 75309

SEQ ID NO: 352303 - DNA, 201 bp, Homo sapiens
gcggcgctccactctgcctcagtgaaccgcctgtcccgcactgcgcgccgctcgccttccctctcagctactccccagagcacagcccaaaggtcacttcytcccggaagctgccgccctgtctccagtcagggtaatgaccctcgggccgccgcgctctcccggggccgcggctccgatgacgtcagctgcgggctcgag

SEQ ID NO: 352304 - DNA, 201 bp, Homo sapiens; identical to SEQ ID NO: 75319

SEQ ID NO: 352305 - DNA, 201 bp, Homo sapiens
ttgcagtgagccgagattgcaccactgcactccagcctggacgatagagcgagactccatctccacaaaaaaaaaaaaaaaaaaaaagaaaaaaaaagcaragcgtatactctaaaaagattagaatatacagataaatataaaatatacaaatcaacctgaagtccatcctgagacccttgtgaactgcctggggagacc

SEQ ID NO: 352306 - DNA, 201 bp, Homo sapiens
ctggggggtgcatgtttgatgcagtggaggttaagtcctgtgtctcaccagccgggttgtgggctgtgcctgcctgcaccaccctggggagtgctccgtgycgccagcgccgggacccaccccatgtcttccatcgttttcttttcagcctctctggctctgccctctgagggctttttgaaggctcacagctggggtctg

SEQ ID NO: 352307 - DNA, 201 bp, Homo sapiens
catggcttaagaagtacgggaccaaccccagcaatggagaggtaggtggctgtgcaggagtttcagtgatgctagtgaatgctatcctctcacttctcctwttgttctggtggttttcatgaacacaggaacatgggagagaaccgttcatggggcccagtgaggagggacagtcttcccctcctctccccacacccattc

SEQ ID NO: 352308 - DNA, 201 bp, Homo sapiens
ggaggattgcttgaggccaggagatcaagactaggttagacaacatagtgagaccttatctctacaaaaaatcagccaggcgtggtggcatgcgcctgtcrtcccagctactcaggaggctgaggtcggagggtcacttgagcccaggagttggaggctgcagtgcaccaggatcacacgccactgcactccagcctgggt

SEQ ID NO: 352309 - DNA, 201 bp, Homo sapiens
ggagggcactcttcttccttggtctttgtcacttgaagactgtttctgtgatgtctgctgctgggagccacattggatcccaggggcttcccccaaggtcygtgccccagtctgggaagtcattctctgttgctcttctcagcagaggtccctgctgcctgcctgtgccctgtgtggctgggtgtcggcctcagggagcag

SEQ ID NO: 352310 - DNA, 201 bp, Homo sapiens
gcgtggtggcatgcgcctgtcgtcccagctactcaggaggctgaggtcggagggtcacttgagcccaggagttggaggctgcagtgcaccaggatcacacrccactgcactccagcctgggtacagagcaagaccttgtctcataaaaaaattaaaataaaaataaatgagaagtcagccatacactcctaaccctgaggt

SEQ ID NO: 352311 - DNA, 201 bp, Homo sapiens
aacaggctgtgtctctcctgaatgagaggagcatgcattctggtgggggagaacaccagagagcagctcagcagggtgtgccagaggctgcttgtgtgtgkagagcacagcagggggaggggagagggccgccctgacccgctgcagggagggagagccgtgtgggcatcgggggagtgcagggccaggctgatggcacag

SEQ ID NO: 352312 - DNA, 201 bp, Homo sapiens
ggggggccagcagggccatgcgcacaggggccggatgcctgtattgtggaagaacagaggtgccctttccatccccagacagtggcctgatgttatgtttcagtctttcaatcgttttcttcacatgggtcctgtgacttccgggataaagcaacctcttaaggattttttatagtttatgatacttttgtaaatggactt

SEQ ID NO: 352313 - DNA, 201 bp, Homo sapiens
ccgggccagacatctcgaatttaatatgccttaaacagaactcttgattttcagctcttgagcctgctcctccctgtaaactaaaaataaaaccctaagtccccccactggctaagcagacacccttgtggccaagagaaccccaggaaaaccttaaaactgagttcctggccatgatgggatagagatcagctgtgcctt

SEQ ID NO: 352314 - DNA, 201 bp, Homo sapiens
gagagcagctcagcagggtgtgccagaggctgcttgtgtgtgtagagcacagcagggggaggggagagggccgccctgacccgctgcagggagggagagcygtgtgggcatcgggggagtgcagggccaggctgatggcacagccagtgcaaagaccctgaggtgggcgcacgctcaagggtgtctgtgcccagctgggag

SEQ ID NO: 352315 - DNA, 201 bp, Homo sapiens
gggggccagcagggccatgcgcacaggggccggatgcctgtattgtggaagaacagaggtgccctttccatccccagacagtggcctgatgttatgtttcagtctttcaatcgttttcttcacatgggtcctgtgacttccgggataaagcaacctcttaaggattttttatagtttatgatacttttgtaaatggacttt

SEQ ID NO: 352316 - DNA, 201 bp, Homo sapiens
gtgaggtggggggataatctgagcctgggaagtcaaagctgcagtgagctaggatcgcgccactgcactctatcctgggcagcagtgagaccctgtctggraaaaaaaaaaaaaatcaaacgagtcagctgtgcttaacagctgggcaaaggcagctggcagctattcgtgccacttccttggggctttcatttcagggtt

SEQ ID NO: 352317 - DNA, 201 bp, Homo sapiens
tatccccagaagtgggcactttgacagggcccctggccactgggtggggacttacaggcagagagacagtaaccaaggccaggtgcagtggctcatgcctrtaatgccagcactttgagaggctgaggcaggcagatgacttgaggtcaggagttcgggaccagtctggccaaggtggtgaaacactgtctctactaaaaa

SEQ ID NO: 352318 - DNA, 201 bp, Homo sapiens
ccatcaccaactccagcccctgctgtctcccatctgtgcagttctgtctttgctcccaccagtacccccttgcatgatgctgaagccccaatttaaaaaayagttttcacatcagaaggatttttgtttgtttgtttgtttttgagacatggtcttgccctgttgcccaggctggagtgtagtggcatgatcagagcgcac

SEQ ID NO: 352319 - DNA, 201 bp, Homo sapiens
gtgggcactttgacagggcccctggccactgggtggggacttacaggcagagagacagtaaccaaggccaggtgcagtggctcatgcctgtaatgccagcrctttgagaggctgaggcaggcagatgacttgaggtcaggagttcgggaccagtctggccaaggtggtgaaacactgtctctactaaaaatacaaaaatta

SEQ ID NO: 352320 - DNA, 201 bp, Homo sapiens
ttttttgtactttagtagagacagggtttcaccatgttggccaggctggtctccaactcctgacctcaggtgatccacccacctcagcctcccaaagtgcygagattacaggcatgagccaccacactcggccttcttttcttatttctagtagtattttgtgctttcttggacaactgttgccaaaggtttgcctatttt

SEQ ID NO: 352321 - DNA, 201 bp, Homo sapiens
ttggcctcaaatcaggattttttttaagaaaaagtccccacaaggccaggtgcggtggctcacgcctgtaatcccagcactttgggaggccaaggtgggcrgatcacgagatcaggagatcgagaccatcctggctaacacggtgaaaccccgtctctactaaaaaaatacaaaaaattagccgggcatggtggcgggcgc

SEQ ID NO: 352322 - DNA, 201 bp, Homo sapiens
ggcagatgacttgaggtcaggagttcgggaccagtctggccaaggtggtgaaacactgtctctactaaaaatacaaaaattagtcgtacatggtgacgcaygcatgcctgtagtctcagctactccggaggcggaggcagcagaatcgctggaacccaggagatggaggttgcagtgagccgagatcacgctactgcacct

SEQ ID NO: 352323 - DNA, 201 bp, Homo sapiens
ctcacagctggggtctgtcgtgttctccttcatcctgacagtcttttttttttttttctttgagacggagtctcgctccgtcccccaggctggagtgcagyggcgcgatctcggctcactgcaagctccgcctcccaggttcatgccattctcctgcctcagcctccctagtagctgggactacaggcgcccgccacacgc

SEQ ID NO: 352324 - DNA, 201 bp, Homo sapiens
tcaggagttcgggaccagtctggccaaggtggtgaaacactgtctctactaaaaatacaaaaattagtcgtacatggtgacgcatgcatgcctgtagtctyagctactccggaggcggaggcagcagaatcgctggaacccaggagatggaggttgcagtgagccgagatcacgctactgcacctcagcctgggtgacaga

SEQ ID NO: 352325 - DNA, 201 bp, Homo sapiens
tgggtgtagggagaggggagacagccgtgttcacacatgggtcctcctcttgggtgaggcggggcaggccccacatggcgggaaagccgacctttgcgccrttgtcaatcctgcacctggacgtttgtggggtgtaggtggccagcgctgctccaggggccttgggagccacttcttgccagaagcctgcacaaactggca

SEQ ID NO: 352326 - DNA, 201 bp, Homo sapiens
ctgctcaggttcccctgctccctgcagactggccggtgctgtcagtgggcaggtggtggggtgatggggtcctcctgtttccctggcctctggtggctgtyctgcagccttggaggagccagcaggactcatgttcagaggtcactcggccttgtgctgcagagcagtggcctgggcactttgtgagcattgtttgaacgg

SEQ ID NO: 352327 - DNA, 201 bp, Homo sapiens
caagtgcccctgccccaggctgggctcagcaaggccctgatgcccctcgggactctgaggtttctagttctgcctcggctggggcccaggctttcctgctyccatgggcctttctcttccaggtggggagtcatactgggggaagcccttcaaagacgagttccggcccaacctctcgcacacgggccgcggcatcctcag

SEQ ID NO: 352328 - DNA, 201 bp, Homo sapiens
tttgaaggcatctgccacggaggcgggaagggatggggtggaggctcatgagacttgaagctctaggaggacgttgaaaaagacctgagcgctggccgggmgcgaagcctcaggcctgtaatcccagcactttgggaggccaaggcgggaggactgcttgagctcaagagctccagaccagcctgggcaacattgtaagag

SEQ ID NO: 352329 - DNA, 201 bp, Homo sapiens
aagatagaagaacctgcttcatcttagtggtgatttttgtaaaatgtaatttaaaatattccccgatgctgggagctaagtaaaaaataaataagtaaatraaatacaaaattacatgtacatttaaatgttttttctctatcaagtttataaggaataaaaagaatgataatattttcagctgtcaaaactatcaagact

SEQ ID NO: 352330 - DNA, 201 bp, Homo sapiens
acaaatgtgagattctcaacacccattaaggaaggggacccttggtacccttgggtagggctcttgggcacacagaagtaacagctagggccttggggacrtggcagcaatgctgctgtgacccttgggcaggcagctctagttgtcaggtactgctgtcactgcctggaatggggtagaccaccccctacccctccaagt

SEQ ID NO: 352331 - DNA, 201 bp, Homo sapiens
tccctgtgtgtgccttctctctagggaagtaccactgcccagtgctgtttaccgtgttcaccaacaacacccacatcgtggctgtgaggacgaccggcaaygtctacgcctatgaggtgtgtcctcgctccggggcgtggagacagcggtggggagatctctgctgtgtgttcctagtatacactggctgggctgtgtgct

SEQ ID NO: 352332 - DNA, 201 bp, Homo sapiens
ccaaagtgaagagcagccagccccaggcagggagccagggcccccagaccttccgccagggcgtgggcaagtacatcaacccagcagccacgtgagtgcckcggggctggcctccctgtttcccatggtgtttcctagggctgactgaggtctgagggtcagacccagaggggcaagcaagctatgggcactggtcccggc

SEQ ID NO: 352333 - DNA, 201 bp, Homo sapiens
tgccagggaagtctggctctctagacccaccgggctcaggagaggaggaaactcgcccatgtggcctggacactgccctgtctcagacccagtggcgcgcmactcgcaagcctggccacacccagctcccttcaccctctagtccaggggtctttccagcgttgtgggccacgtggtctctgacgcccacccagctgtgtg

SEQ ID NO: 352334 - DNA, 201 bp, Homo sapiens
tcttaatcccttgactcctgttctggctttgttgcctcctttctcctcagtccttcaacaggtcccttgatgacatggggctggctctggttttccaggtktcccctcgtcccagccacctcccacagagctgcatggccaacctggttctgggcacagggaccacctgacaggcagtgggcagcagccggggcagcagga

SEQ ID NO: 352335 - DNA, 201 bp, Homo sapiens
tcacctctgtggcttgtcccattctaaccagaggtcggcccacggctgcccacgttccggtccgatagctccctaacagcaatgaatgctcgttagccatrtgcctggaggaaggtcacagctcagccagcagctagcgaggctgcgtccccgtccctgcccctgcccctgtttgctgccctgcctggggcagaccacctc

SEQ ID NO: 352336 - DNA, 201 bp, Homo sapiens
ccaggttcatgccattctcctgcctcagcctccctagtagctgggactacaggcgcccgccacacgcctggctaattttttgtatttttagtagagatggrgtttcaccgtgttagcgaggatggtctcgatctcctgaccttgtgatccgcccaccttggcctcccaaagtgctgggattacaggcgtgagccactgtgc

SEQ ID NO: 352337 - DNA, 201 bp, Homo sapiens
gcaggtgctggctggagcgtggcctgctgagtcaatcacctctgtggcttgtcccattctaaccagaggtcggcccacggctgcccacgttccggtccgayagctccctaacagcaatgaatgctcgttagccatgtgcctggaggaaggtcacagctcagccagcagctagcgaggctgcgtccccgtccctgcccctgc

SEQ ID NO: 352338 - DNA, 201 bp, Homo sapiens
gattacaggcatgagccaccacactcggccttcttttcttatttctagtagtattttgtgctttcttggacaactgttgccaaaggtttgcctattttacygtattcaaagatcattagactttaatttgttacagctttgttttcccttttgtgattcttgtaattaaagattttccaggaggaggccaggcgcggtggc

SEQ ID NO: 352339 - DNA, 201 bp, Homo sapiens
tcactaacagactgagaagaaatggtgacctaggctggcacatgggacactccccaagatgctcctttttcatttccctcaagcccagagtaaaccccttygacctccttgggtttcgtgacaggccattccagtttaatttcacttcagatcttgaaatgtccaaattcttcacctggaggatagaaaggaaatctcagg

SEQ ID NO: 352340 - DNA, 201 bp, Homo sapiens
ttttcagtttctgtctttgcttcttcatggtgcttttcctccttcctcactttaatccatgtgtgtttctgatagccacgtctgtcattttgagggtgcaygttccctcttcactgcttgctggttgttggtagcttccctttcaatttcttctcagccaaggattgcctaggactgttggttattttcaagtaggttggg

SEQ ID NO: 352341 - DNA, 201 bp, Homo sapiens
ttttttttttttttctttgagacggagtctcgctccgtcccccaggctggagtgcagcggcgcgatctcggctcactgcaagctccgcctcccaggttcaygccattctcctgcctcagcctccctagtagctgggactacaggcgcccgccacacgcctggctaattttttgtatttttagtagagatggggtttcaccg

SEQ ID NO: 352342 - DNA, 201 bp, Homo sapiens
ctcccaggttcatgccattctcctgcctcagcctccctagtagctgggactacaggcgcccgccacacgcctggctaattttttgtatttttagtagagayggggtttcaccgtgttagcgaggatggtctcgatctcctgaccttgtgatccgcccaccttggcctcccaaagtgctgggattacaggcgtgagccactg

SEQ ID NO: 352343 - DNA, 201 bp, Homo sapiens
tcctgcctcagcctccctagtagctgggactacaggcgcccgccacacgcctggctaattttttgtatttttagtagagatggggtttcaccgtgttagcsaggatggtctcgatctcctgaccttgtgatccgcccaccttggcctcccaaagtgctgggattacaggcgtgagccactgtgcctggccaatcctgacaa

SEQ ID NO: 352344 - DNA, 201 bp, Homo sapiens
ggaggtgggggtagttgaatgacaaaggaaggaacgaaggtggttagaggagcagatgcggtcagttgggttggccagcagcaggcagggcccacggaggrcggggagggcagcttaaggacctgctgccagcttagggcccagccccaggaggctcccgctgtgtctcccctgggcctgggtaggcatagctgggcccag

SEQ ID NO: 352345 - DNA, 201 bp, Homo sapiens; identical to SEQ ID NO: 75317

SEQ ID NO: 352346 - DNA, 201 bp, Homo sapiens
gggaggagcttggcaaagcctgcagcgagtgggtgggtgactcgctgagtctttttgctgatcaatgtgcagacaagagcttcctgcaggaaggttgctgygagggtgaactggctcatcgtctgaggcccagccagctccgcctctgtgggagccactgctttcagccagtggggtgtacactgctgtctctctcattcc

SEQ ID NO: 352347 - DNA, 201 bp, Homo sapiens
gggactacaggcgcccgccacacgcctggctaattttttgtatttttagtagagatggggtttcaccgtgttagcgaggatggtctcgatctcctgacctygtgatccgcccaccttggcctcccaaagtgctgggattacaggcgtgagccactgtgcctggccaatcctgacaatcttaaatgtggacttaattcttca

SEQ ID NO: 352348 - DNA, 201 bp, Homo sapiens
cagaggtccctgctgcctgcctgtgccctgtgtggctgggtgtcggcctcagggagcagcctggtggcaaggtgggggtaggtggggttttcctgtccacrgctgccctcatggcccctgctgtcccagtggattctgtcatttggttgcagctgggatgcattttgctactttgggtgttttgcttcacaggtactcttt

SEQ ID NO: 352349 - DNA, 201 bp, Homo sapiens
tttcaggcaggtcaaaaaaagggttgggggaggtgcatccttcggaatccaggcagtcctggctgcccagcagggacccttaaaccccaagaggtccttcygcgtcttcagcaaagcccaggtgctgggaaggcacccatgttttgaggacaggcctctagggctgtgaggggagtgctcgccccggatctggatggagtc

SEQ ID NO: 352350 - DNA, 201 bp, Homo sapiens
atctgacagccatgtcttaaatatagggctgccactggtatgtgcttgttgtaggaaattcagcctgtcactaggcgggacccgcagcagtgccctgtgtycttcctagggggccgcgttggcagcatggcctgcgcacaggtgccagtgtctcagagaaggggccaagccgcacctgctgctctgcccacacttctccca

SEQ ID NO: 352351 - DNA, 201 bp, Homo sapiens
tttcaccgtgttagcgaggatggtctcgatctcctgaccttgtgatccgcccaccttggcctcccaaagtgctgggattacaggcgtgagccactgtgccyggccaatcctgacaatcttaaatgtggacttaattcttcaggtggtctgttgcgttctatgatcttgttgctttctagttaccattttttatatttattt

SEQ ID NO: 352352 - DNA, 201 bp, Homo sapiens
gccaagccgcacctgctgctctgcccacacttctcccatgcgctgtactctgggccgtgcggctgcacgggtcctgttgcttaatgttgtgggtccatccktgcccagtgtggctgggcagctgactctgctacatgttaaagaccagcctggccaacatggggaaacccgtctctactaaaactacaaaaattagccagg

SEQ ID NO: 352353 - DNA, 201 bp, Homo sapiens
ttagctgggcgtgatggcgggcgcctgtagtcccagctactcaggaggctgaggcaggactatgacatgaacctgggaggcggagcttgcagtgaaccgasatcgcgccactgcactccagcctgggggacagagcaagattccatctcaaaaaaaaaaaaaaaagtccaaagttatgaggtagtctctgccttcctccca

SEQ ID NO: 352354 - DNA, 201 bp, Homo sapiens
gtggttctgtggtggctgggagggcagggcccgatgtgcactggggcccaaagccatgccagggagagttggggcgtttcatggtctgctgcggtgctgasgtggatggcatgcctgggactgcacggtgccacctgtctggggctgtcgtgtttgcttcttcctcctgtcaggcagagcatggggatctggagctagggg

SEQ ID NO: 352355 - DNA, 201 bp, Homo sapiens
ttacgatggcaccatcttccacagatccatccggaactttgtggtgagtgacgagagtcactggctgcacagatgagcttggtgggacatcgggggctggktgggcttgtccctgccccatcccagggccctggcccatcccacggtggccaggatgagtccagttggtgatcctctgttggggaacccatagactgaccc

SEQ ID NO: 352356 - DNA, 201 bp, Homo sapiens
aaaaacagaaaaaaacccagctggatatgcccagggccatggtcagccgaccccgcccttgccactccctctcatcgccttcctggctgctgcccaaggascaccaggccagcctcggggctctcaacccctcttcccacgtgccttggggctcagccgtgggggtgccctccttgagcacacgcagacccacctctgtct

SEQ ID NO: 352357 - DNA, 201 bp, Homo sapiens
tgtctcagctcttctggcccttgtggtgttctgggggctgcagggttctggggactctttgtagatggagttggtgctcctccaaggcttccctgctctcyagtacaaggggaacttggccagggggctggtttttgagtgttcttggaccagcgactaaagcccgtggcttttctctttcaaatgcttgggtagggggct

SEQ ID NO: 352358 - DNA, 201 bp, Homo sapiens
gcgcctggagagacacaggaggtctggccctggtgcatgtggggagcagtgtgcagtctggtggcaggaggcaggggatggggggccagcagggccatgcrcacaggggccggatgcctgtattgtggaagaacagaggtgccctttccatccccagacagtggcctgatgttatgtttcagtctttcaatcgttttcttc

SEQ ID NO: 352359 - DNA, 201 bp, Homo sapiens
gggcagcagcctgcctgtttggaggcgtgggggctccaagggacccaggagttggtggcgtggggctgggagcctccctatcaagtgcccctgccccaggytgggctcagcaaggccctgatgcccctcgggactctgaggtttctagttctgcctcggctggggcccaggctttcctgctcccatgggcctttctcttcc

SEQ ID NO: 352360 - DNA, 201 bp, Homo sapiens
tcagtctttcaatcgttttcttcacatgggtcctgtgacttccgggataaagcaacctcttaaggattttttatagtttatgatacttttgtaaatggactttttttttcccaacttttggggatcattgctcatgtagagaaaaactaccgttcattttatatctagccactttaacaaattatcttataattcaaaagt

SEQ ID NO: 352361 - DNA, 201 bp, Homo sapiens
cccagccagctccgcctctgtgggagccactgctttcagccagtggggtgtacactgctgtctctctcattcctcatgcctctcaaatcgtgccatggtcrgggccagctccaggcctccctgcttgcagtcccctgtgccaaggcttggggcaggcatcgtaaaaccacttcctcctggctataggcagtggaacagcta

SEQ ID NO: 352362 - DNA, 201 bp, Homo sapiens
gctgggattacaggcgtgagccactgcgccccacctgtttctttgttaattggaattccccgtgcgtgaaagtggagtgaggaggtgtgatacgcctcccytgtgcccatcaccaactccagcccctgctgtctcccatctgtgcagttctgtctttgctcccaccagtacccccttgcatgatgctgaagccccaattta

SEQ ID NO: 352363 - DNA, 201 bp, Homo sapiens
cttttttttttatttgagacagggtctcactatgttgcccaggctggtcttgaactcctgcgctgaagcagtccttccacctcagcctcctgagtagctgmgatttcaggcacacaccatcaccatgcctggcttgaaagtatagtttttgatgctagcttagtatttaattatacagatgtatcaacatttatgacggag

SEQ ID NO: 352364 - DNA, 201 bp, Homo sapiens
tggactggctccagcaggttttgctgtgacaggtgtggcccctgcatgttacgagcagggctggctgtggctttgtggcctggaatggttaaaatcacagrgatggccaggcgtggtggctcacacctgtaatcccagcactttgggaggctgaggtaggtggattgcctgagcccaggaattcgagagcagcctgggcaa

SEQ ID NO: 352365 - DNA, 201 bp, Homo sapiens
ccttccgccagggcgtgggcaagtacatcaacccagcagccacgtgagtgccgcggggctggcctccctgtttcccatggtgtttcctagggctgactgargtctgagggtcagacccagaggggcaagcaagctatgggcactggtcccggccgtgggcttgtgctgtgtggcctctgcagccgagggactgcctctgaa

SEQ ID NO: 352366 - DNA, 201 bp, Homo sapiens
ctttaggaggctgaggcgggcggatcacgaggtcaagagatggagaccatcctggccaacatggtgaaaccctgtctctactaaaaatacaaaaatcagcrgggcgtggtggctcatgcctgcagtcccagctacttgggaggctgaggcagaagaatcgcttgaacccaggaggcagaggttgcagtgagccaagatcgt

SEQ ID NO: 352367 - DNA, 201 bp, Homo sapiens
acctggagctgcactgcgacctggtgggtgtggaggccagccactccccatgccccaaggtcatctctgggtcatctgacagccatgtcttaaatataggrctgccactggtatgtgcttgttgtaggaaattcagcctgtcactaggcgggacccgcagcagtgccctgtgtccttcctagggggccgcgttggcagcat

SEQ ID NO: 352368 - DNA, 201 bp, Homo sapiens; identical to SEQ ID NO: 75314

SEQ ID NO: 352369 - DNA, 201 bp, Homo sapiens
agaagtacgggaccaaccccagcaatggagaggtaggtggctgtgcaggagtttcagtgatgctagtgaatgctatcctctcacttctccttttgttctgrtggttttcatgaacacaggaacatgggagagaaccgttcatggggcccagtgaggagggacagtcttcccctcctctccccacacccattcttttccaga

SEQ ID NO: 352370 - DNA, 201 bp, Homo sapiens
ctgtgaggcctgcatggtagaggaggcaagagtgtgtggtctcttccctgggcccctggggtctgcctcagactgaggccagccctccctcctgcagcctmtccaagcccctcagcctggcagctgcttgggtccagatcccccaacctctgtattcccatagcttgagtgatgatgatggtggccttgactctttaatcc

SEQ ID NO: 352371 - DNA, 201 bp, Homo sapiens
gggtgggctgcctcccctcctgtgatcagcagtgtgtgtgtgtgtgtgtgtgtgtgtgtgtgtgtgtctcattcagcaaatatttatttatttattttgtktgtgtgtgtgtgtgtgtgtgtgtgtgtgtgttattgtttattttttatttctccaaacctctttttttttttattgatcattcttgggtgtttctcacag

SEQ ID NO: 352372 - DNA, 201 bp, Homo sapiens
cacgtgtagccccccaaggtgaggttggtgagatggggcatgttggcccctgtcagcagtggctctaggtattgttcatggtgttctttggggccccctcmctttcctgttggagggactgcgtgaagaccccataccactgtgtctggctcccactctacctgctccagctgcaaggtaggcactcactggcaccttttg

SEQ ID NO: 352373 - DNA, 201 bp, Homo sapiens
tcactggcttttgttttcacagatccaagggggcgaccccacaggcacaggcacgggtaggtactggtgctgggcccctctctgggcactttggctgctcygtggggcatgagggggtagctgggcaggggttgtgcacagctcagacatggaatctgctagaccagggtggaacgactggcagccatcagtgctgtgccc

SEQ ID NO: 352374 - DNA, 201 bp, Homo sapiens
tccaagtgcaggcatgagccactgcacctggcctgaaaatgaatttttaggaaatttcagccttattttagaaaaagaaaattttaccacagtcccactayccaagataaccactgtaaatatgctaattttttgtgaacttatttgtagtaacatgattgagataacactgtgaacactgtgaagtgttgacaggtaaca

SEQ ID NO: 352375 - DNA, 201 bp, Homo sapiens
gaggtggctgggagggcccctcattatcaccaagagcccagcccctgtgtggagccatctggcaggaggggtgtccttcagtcaggcaggcggtgggcctygggtctcagagtgtgacttgctcactggcttttgttttcacagatccaagggggcgaccccacaggcacaggcacgggtaggtactggtgctgggcccct

SEQ ID NO: 352376 - DNA, 201 bp, Homo sapiens
tcatgcccattacacaccttccgctgttcttgtggccagaggcccggatgagttgtgcagcccacccctgcccaggtggtgatcttgtgctaggttctagyccaggtcttttgcctgtggagatgctatggcttaggggttgtccttgcttactgggtgcatgcattccagggagatgctgtagcacctgaggccaaggcc

SEQ ID NO: 352377 - DNA, 201 bp, Homo sapiens
gagggcagagacatgggcaggtagctctgaagttctccttcttaaagaattattcaaattctggaaaatttgaaaaagaaagcttgttgtccagtgtgtcmctccgtctaacacactgcccttagcactttgatatattacttttttttttcttttggaaacaggatcttgctatgttgtctaagctggtcttgaattcct

SEQ ID NO: 352378 - DNA, 201 bp, Homo sapiens
ccgcgctctcccggggccgcggctccgatgacgtcagctgcgggctcgagcgcagcccggttttccttactctggttctgcccggaccgtcccccgtctgytcgcgagtttcgcccttgaatgagtagtctctacctcttccgtacttcacgtctcgctgtgttctggttcatgcctatcagcctgcaaacgtgctgcaga

SEQ ID NO: 352379 - DNA, 201 bp, Homo sapiens
tcaatcgttttcttcacatgggtcctgtgacttccgggataaagcaacctcttaaggattttttatagtttatgatacttttgtaaatggacttttttttycccaacttttggggatcattgctcatgtagagaaaaactaccgttcattttatatctagccactttaacaaattatcttataattcaaaagtttttaaga

SEQ ID NO: 352380 - DNA, 201 bp, Homo sapiens; identical to SEQ ID NO: 75313

SEQ ID NO: 352381 - DNA, 201 bp, Homo sapiens
cagtgaaccgagatcgcgccactgcactccagcctgggggacagagcaagattccatctcaaaaaaaaaaaaaaaagtccaaagttatgaggtagtctctrccttcctcccagaccaggctggcagaaactctctcctcgtctcatggcagtgctgttggctgttttaattccaccccatttccttttttctttttctttt

SEQ ID NO: 352382 - DNA, 201 bp, Homo sapiens
tccctatgtcacccaggctggtcttgaagtcctgggctcaagtgatcctcccgcgtcagcatccccccaccaaaaaaaaacagctgggcaccatggtttaygcctgcaatctcagcactttgggaggccaaggtgggaggattgcttgagcccaggagttcaagaccagcctgggcaacataatgaaaccttgtctctaca

SEQ ID NO: 352383 - DNA, 201 bp, Homo sapiens
aagtgttgggattacaggcgttagccaccgtgcccgccccatagtaggtatttagtaagcatttgctgagtaagcaaagattactcacttccaaagacttygtcctctttataaaggtggtggtggtagcattatcttcctctcttcttcaggtacattacctgtgctgaatacactcacttttatggtggcaagaagcca

SEQ ID NO: 352384 - DNA, 201 bp, Homo sapiens
acttcatgggccagcttgtgggcggagcctcttcaggcttgagaccatggcagcaagagccctgcagcgtgcagtgacccctgcgctctgggtggctgcaygcgagctcaggaggacaggatgtgctgggccagcctaaaccctcgggggagactagcgcagggataaagcagcttgcagggccatagccggatgtggagg

SEQ ID NO: 352385 - DNA, 201 bp, Homo sapiens
gcggctgccgggcagaggggctcctcgcttctcagacggggcggctgccgggcggaggggctcctcacttctcagacggggcggccgggcagagacactcytcacctcccagatggggttgcagccaggcagaggcgctcctcacatcccagacgatgggtggctgggcagagacgctcctcacatcccagacagggtggc

SEQ ID NO: 352386 - DNA, 201 bp, Homo sapiens
cgggcggatcacctgaggtcaggagttcaagaccagcctggctaatacggtgaaaccccgtctctactaaaaatacaaaaattagcggggcgtggtgacgrgcgcctgtaatcctagctatttgggaggctgaggcaggggaatcgcttgaacccgggaggcggaggttgcggtgagccgagatcgtgtcactgcactcca

SEQ ID NO: 352387 - DNA, 201 bp, Homo sapiens
ggctaatacggtgaaaccccgtctctactaaaaatacaaaaattagcggggcgtggtgacgggcgcctgtaatcctagctatttgggaggctgaggcaggrgaatcgcttgaacccgggaggcggaggttgcggtgagccgagatcgtgtcactgcactccagcctgggcgacagagcgagacgctgtctcaaaaataata

SEQ ID NO: 352388 - DNA, 201 bp, Homo sapiens
tgaattttgatctaacaaatgtgagattctcaacacccattaaggaaggggacccttggtacccttgggtagggctcttgggcacacagaagtaacagctrgggccttggggacatggcagcaatgctgctgtgacccttgggcaggcagctctagttgtcaggtactgctgtcactgcctggaatggggtagaccacccc

SEQ ID NO: 352389 - DNA, 201 bp, Homo sapiens
ggtcaggagatcgagaccatcctggctaacacggtgaaaccccatctctactaaaaatacacaaaaaaatcagctgggcgtggtggcaggcgcctgtagtmccagctactcgggaggctgaggcaggagaatggcgtgaactcacgaggtggagcttgcagtgagccgacattgcacaactgcactccagcctgggcagcg

SEQ ID NO: 352390 - DNA, 201 bp, Homo sapiens
ccatttttttttttttttgagacggagtctcgctctgtcgcccaggctggagtgcggtggcatggtctccgctcactgcaagctccgcctcccgggttcaygccattctcctgcctcagcctcccgagtagctgggactacaggcgcctgccaccacgcccggctaattttttgtattttcagtagagacggggtttcact

SEQ ID NO: 352391 - DNA, 201 bp, Homo sapiens
tgacctggtgatccgcccgcctcggcctcccaaaatgctgggattacaggtgtgagccaccgtgcctggccctctatttttttttttttttagtagagackggtttcaccgtgttagccagaatggtctccatctcctgacctcgtgatctgcccgccttggcctcccaaagtgctgggattataggcgtgagccaccttg

SEQ ID NO: 352392 - DNA, 201 bp, Homo sapiens
gtggcgtgtgtctgtagtcctagctactcgggaggctgaggcaggagaatcacttgaactagggagtgggaggttgcagtgagctgagatgttgccgctgyactccagcctggtgacagagagggactctgtgtgtcccaccactctagctgaagaaatatgttcactttttaattttagaagtaatctgtgctcaccata

SEQ ID NO: 352393 - DNA, 201 bp, Homo sapiens
ggtggctgtgcaggagtttcagtgatgctagtgaatgctatcctctcacttctccttttgttctggtggttttcatgaacacaggaacatgggagagaacygttcatggggcccagtgaggagggacagtcttcccctcctctccccacacccattcttttccagaaatgcttccggcctgtgcacgtgtatatatgtgca

SEQ ID NO: 352394 - DNA, 201 bp, Homo sapiens
agacatctggaggctgggcgcagtggtgcacacctgtcattccagcactttgggaggccaaggaaggaggatgacttgagtccaggagtttgagacaagcytacgcaacacagtgattttcttctacaaaaatcaaaaacttagctgggtgtggtgtgcctgtagtcccaggtacttgggaggttgaggtgggaggactgc

SEQ ID NO: 352395 - DNA, 201 bp, Homo sapiens
aatgaatgggtgaacctcagcacgtcattgacgtcggtggaggacacggcgctccaccctggtggccgagggtgggctgcctcccctcctgtgatcagcagtgtgtgtgtgtgtgtgtgtgtgtgtgtgtgtgtgtctcattcagcaaatatttatttatttattttgtgtgtgtgtgtgtgtgtgtgtgtgtgtgtgtgt

SEQ ID NO: 352396 - DNA, 201 bp, Homo sapiens
atgaatgggtgaacctcagcacgtcattgacgtcggtggaggacacggcgctccaccctggtggccgagggtgggctgcctcccctcctgtgatcagcagtgtgtgtgtgtgtgtgtgtgtgtgtgtgtgtgtgtctcattcagcaaatatttatttatttattttgtgtgtgtgtgtgtgtgtgtgtgtgtgtgtgtgtt

SEQ ID NO: 352397 - DNA, 201 bp, Homo sapiens
cgagggtgggctgcctcccctcctgtgatcagcagtgtgtgtgtgtgtgtgtgtgtgtgtgtgtgtgtgtctcattcagcaaatatttatttatttattttgtgtgtgtgtgtgtgtgtgtgtgtgtgtgtgtgttattgtttattttttatttctccaaacctctttttttttttattgatcattcttgggtgtttctca

SEQ ID NO: 352398 - DNA, 201 bp, Homo sapiens
tgcactgagccccctttgctgctaggaggagatccgcattgatgccactacagtgttcgtggacccctatgaggaggccgatgcccaggtgagggggcacratgccaccacctaggagggtctgggctagtgcacttttccaccccaagcctagcatctgtcctgcccgaggtgctgccggttagccagcgccctgttgtg

SEQ ID NO: 352399 - DNA, 201 bp, Homo sapiens
gcctctcccccagccctgcccgccaccaccatcaatgggaaagatcagtgatgggacaggctagggggcaagatccttagcgcgtttcagaaactcccggsggggggatggtgggttctttcaggacccctaaagacccaggtgattctacacagggcactgtgtaggtgccatccaggccgtcccagggcccgtgccgct

SEQ ID NO: 352400 - DNA, 201 bp, Homo sapiens
aattgttttcagtttctgtctttgcttcttcatggtgcttttcctccttcctcactttaatccatgtgtgtttctgatagccacgtctgtcattttgaggrtgcatgttccctcttcactgcttgctggttgttggtagcttccctttcaatttcttctcagccaaggattgcctaggactgttggttattttcaagtagg

SEQ ID NO: 352401 - DNA, 201 bp, Homo sapiens
gatgtctgctgctgggagccacattggatcccaggggcttcccccaaggtccgtgccccagtctgggaagtcattctctgttgctcttctcagcagaggtycctgctgcctgcctgtgccctgtgtggctgggtgtcggcctcagggagcagcctggtggcaaggtgggggtaggtggggttttcctgtccacagctgccc

SEQ ID NO: 352402 - DNA, 201 bp, Homo sapiens
tcttcctcctgctggttggggaggccctcctggaggagaggcaccaagcagggcctggggggcaggggtggcgtgtggttggcttctaggcaagcgacacrtccccacccaactgcctcccatggcactgctgaggtgccaccctggtttccttggcaggcccactattccacagggaaggtcagcgcttccttcacctcc

SEQ ID NO: 352403 - DNA, 201 bp, Homo sapiens
ttgcttggccagacctatgggtgtcagcagagccttgctagccaaacctctgaggagagttcctgggccaagggctggctggcccatgtgacttttggggkctcaggaggagcctgttgtgttggggagtctctctgctcaggtcctgtgtctgaatagggaccctgctggccctctggtggtctcctccacacctgtagt

SEQ ID NO: 352404 - DNA, 201 bp, Homo sapiens
tgggcatggctccccatgctaccctctgcctgcagtgcactgggttagagccaggatggtgtctggccccagggaggtgcggaggcatgcttaccaggggragccagggcaatggagcttgggcaggctgtttccagccacatatgagaaatggaagcctccagggttgagaaccaagggagtcagatcaaccagtcagat

SEQ ID NO: 352405 - DNA, 201 bp, Homo sapiens
tacctgccacctggggtaggggaaataagaaaaaagaaaaaacatccagaaacagaaaaatagagtcccatcttcccaacacaaccattcttagcattggrgtgtatttcttactttctccccacttttaatgttttgtttttcttaaatattcatatgacagagcactttgggaggctcaggtgggcagatcatgaggtc

SEQ ID NO: 352406 - DNA, 201 bp, Homo sapiens
actcggtagagttttagaagtttcttccatgtaagtgaagcatcttgagtcactcaggacttggctgtcctcgcacccgtggcaggctggggacggcacgracctccaactgtttcccctagtccccggggcatcggaggctgggttcccacatgggagaggaatgaagactcactcaaagggaagggtcagtttaagata

SEQ ID NO: 352407 - DNA, 201 bp, Homo sapiens
ggcgtgagccactgcgccccacctgtttctttgttaattggaattccccgtgcgtgaaagtggagtgaggaggtgtgatacgcctcccctgtgcccatcaycaactccagcccctgctgtctcccatctgtgcagttctgtctttgctcccaccagtacccccttgcatgatgctgaagccccaatttaaaaaacagtttt

SEQ ID NO: 352408 - DNA, 201 bp, Homo sapiens
cccgagagaccctgcaggagctctacaaggagttcaaaggggacgagattctggcagccaccatgaaggccccggagaagaagaaagtggacaagctgaaygctgtgagtggcggagggcactcggccaagcccaagccccgtcttcctgcccatctcatggcctcttggagtggtcctgggaaaggggctcatgggggcc

SEQ ID NO: 352409 - DNA, 201 bp, Homo sapiens
tgggcacagggaccacctgacaggcagtgggcagcagccggggcagcaggaagacctggggacagctggagttccggggtcccctgggcagccttgggggstaatgacctgccctggtgggcagcgcagggaaccacgtgcacacatgcgtccgtggaagctgcaggttcccagagctggctgtagagggtgggcagctcc

SEQ ID NO: 352410 - DNA, 201 bp, Homo sapiens
agcggcttcttctcttcccaggaagcgagcagcagaggaagagccctcaaccagtgccactgtccccatgtccaagaagaagcccagtcggggttttgggracttcagctcctggtagcagcaggttggccgctgtggaccttggtggggttgcagggctgggggcccatgtccacatctccatttccagcctttctagcc

SEQ ID NO: 352411 - DNA, 201 bp, Homo sapiens
gagggtgggctgcctcccctcctgtgatcagcagtgtgtgtgtgtgtgtgtgtgtgtgtgtgtgtgtgtctcattcagcaaatatttatttatttattttgtgtgtgtgtgtgtgtgtgtgtgtgtgtgtgtgttattgtttattttttatttctccaaacctctttttttttttattgatcattcttgggtgtttctcac

SEQ ID NO: 352412 - DNA, 201 bp, Homo sapiens
tgtagagggtgggcagctcctggtgtgctcttaggcaggccaggtgcagaaggtgccatgctctccctaaccatccagccctcctccccagcttcatcacrtttcgctcctgtgcctacctggacaagaagcataccatctttggacggtaagggaagcggctgtgtgaagcctggggggtcagtgggctaggtgggttcc

SEQ ID NO: 352413 - DNA, 201 bp, Homo sapiens
tgctaatttctttgtatacaagtcacctgggctcagggtatgcacctcccaccccgccgcctcccctcccaccccccgctggagggtaatgtcagtacagracaggagccttccttcccaatagtcaggttttgtagaaaccctcagctaaaaacagtgatggcgaaaagaaggaaggaagaaaaaaatgtcaatggcaat

SEQ ID NO: 352414 - DNA, 201 bp, Homo sapiens
aagaaacatgggactatatgaataattcaagttacagaagaagtggagagagaaattaggtccagaacaactggaaaatgacccaaacgtatatacagcawtaaaaacaaacaaacaaaacaccactaatatatgcaccgacattgatgaatgtcaaagacgtggttgggcacagtggctcatgcctgtaaccccagcact

SEQ ID NO: 352415 - DNA, 201 bp, Homo sapiens
ttgggcccacatggtgcccgggtgcccttgatctgctggccttgcccccacaggtgcagccccgacggtatctgaagaagctccccctccaggccaacttytaccccatgccagtcatggcctatatccaggacgcacagaagcgcctcacgctgcacactgcccaggccctgggtgtctctagcctcaaagatggtgagt

SEQ ID NO: 352416 - DNA, 201 bp, Homo sapiens
ggcggacccgcgcggggccggcgcagcggagcgcgccggctgcccggggcccagcgggagcgcggcagcggcgcgcggagcagggggctacgggtgggcgkgcgcccgccttcgcctgcgtcgctgcctgcacgcgggccgccgtccccgggcgtgtgagagccggcagctcggccgactgggcccggagcggcgcggagg

SEQ ID NO: 352417 - DNA, 201 bp, Homo sapiens
aggaggtgtcacccaggtgtggctttgatgaatggggtgtgatttgaagatatgaaccagggcacaggataggaggcaggaaagacaacaggctggggaayagcagtgagttccttagttatgctggagctatgctatccagtacggtggccagtagccctatatggctatttaaattacaactaaatcaagtaaaaaatt

SEQ ID NO: 352418 - DNA, 201 bp, Homo sapiens
cttcctgccaggtgtgtgtggaggccagtatgaagctgaaaaagcaggtgacagtgtgtggggctgccatcttctgtgtggcagtcttctcgctctacctyatgctggaccgagtgcaacacgatcccacccgacaccagaatggtgggaacttcccccgggtgagtcgtgcctggttgctaatttctttgtatacaagtc

SEQ ID NO: 352419 - DNA, 201 bp, Homo sapiens
ttctccaaactggcagccatgtttaggggcttgatctttcacagcagcaggagcggtaaccgagaggtaagggtcggctctgggagcggggaactagtacragcaaggtgtagctgcgccagagcccaggtgacagagcccgccactcagtcactcgtgcatcagatagatattgagcacctgctttactgtgaggaccca

SEQ ID NO: 352420 - DNA, 201 bp, Homo sapiens
ggcttcagcgtgccctgtgtgcccgtcccctgagggagcccctcatgtctttctccctggcctacacactctctccagccctaggtccagttacagcctcrcggtctatcagggctgcctttagcctgaacagatccttgcccccctggcgtccagaggctgcctgctggtggtgaccacgtggtgtgtctcctgcagact

SEQ ID NO: 352421 - DNA, 201 bp, Homo sapiens
tctcctttgaaaagcttactagactgataagttaggggaaagtggtatttgaggaatcctctcatgagaacagagtagaaaagtacaagctgggccagcgscgctaagtagattagttgactctttggactgtgatatttataacatgccaattaaagtaggaaagggcttctgctgatgtgccacagggctgtttttcta

SEQ ID NO: 352422 - DNA, 201 bp, Homo sapiens
tagggctcgaggagcgtagttggaggtgggcaagagagagagagtagggctgaattcctggggtggggggaggcagtctggcgttttgtgtcccatctcaygcagcctggcaccttcctctcccagcagcgctctgtcacctgtgcccctcatgttcgtctcccactttcctctgtgctgccctcctctgccctgtcccag

SEQ ID NO: 352423 - DNA, 201 bp, Homo sapiens
gtgaatgtgtgagaacactaagaccactctgaacgatgataatgagttggggggtggactgctcgggggtgatcctgccagattcccagaggattctcacsccaccattacctcactcagtgtgacctggagggggtcagacagacgggagagtccagaaacagacccagggctacaggaatttagtatatggtaagaggg

SEQ ID NO: 352424 - DNA, 201 bp, Homo sapiens
ccggcggctgatgcaggatgacaaccggggcctaggccaagggctcaaggacaacaagagaacctgcaaccgtttccgcctcctgctagagcggcgaaccrtgggcagtgaggtaacatctggggctgacgcccagggagccaggtctggctagtccctgggggtggccggggggtccagcctagggctcgaggagcgtag

SEQ ID NO: 352425 - DNA, 201 bp, Homo sapiens; identical to SEQ ID NO: 75353

SEQ ID NO: 352426 - DNA, 201 bp, Homo sapiens
acctccaacacctgcacacactggggcctctgtccccaacacatcagccatgcaccgagcccctgctccaagcatactctagaaaacagagcaaaggtggycacttgccatatcttttttccagggcaacccagatgacacttaatatgagcctctgcctgacttgccatctggctgtcctttccagagccctacttttaa

SEQ ID NO: 352427 - DNA, 201 bp, Homo sapiens
ttgaggaatcctctcatgagaacagagtagaaaagtacaagctgggccagcgccgctaagtagattagttgactctttggactgtgatatttataacatgscaattaaagtaggaaagggcttctgctgatgtgccacagggctgtttttctactgattttgccaataatttggatgaaaagaaaagaaatgtttatatat

SEQ ID NO: 352428 - DNA, 201 bp, Homo sapiens; identical to SEQ ID NO: 75341

SEQ ID NO: 352429 - DNA, 201 bp, Homo sapiens
atccgttttagggttttcagacatctttctgtgattgttctgggttaaaagactgagcaactacacaagtcagtaaggactggagaggtgaaagggagaayaaggccatctgtcccggtggaatgtaggggcagctggtgtggtttccctcgagatcttgtacaagaacagctgcacccacctccaacacctgcacacact

SEQ ID NO: 352430 - DNA, 201 bp, Homo sapiens
aaaagaaatgtttatatatagttcccattatgtaccaggcactattctaagtgtttaacaaatattcattcattgattttattttatttatttaatttaattttttttttttttgagatggagtctgtcacccaggctggagtgcggtggtgcaatttcggctcaccgcaacctccgcctcctgggttcaagtgattatcc

SEQ ID NO: 352431 - DNA, 201 bp, Homo sapiens
ctcaacagcctagcataaaaaataacatgtcagctgtcagaactgcccagagagcaccggactcccctggggctgggattcatgtgcaggaggtgtctgtytgcgctgaaccactccttggtggatgggatgtcttctaggggcttgctggcgggatggctgtgcgtggtgctcttttactgatgagacttcgtggtgggc

SEQ ID NO: 352432 - DNA, 201 bp, Homo sapiens
actggacaggctattacacttcccggcccttctacaagagcttagaccgagtcctggaagcccacctgcggtgagaccctgtccccgcttccaggctggakggggagagtcagcctttggggtttaaggaggggctggattggctcagaagggaatagataggcccagaggccagggcaggtagaggaggggtgggaagga

SEQ ID NO: 352433 - DNA, 201 bp, Homo sapiens
tgtgaggggcacttgactggggaggggcctcacagtgctgcagcccatcccttcccgtgagaccgtgccctgggttcccaactcgggcagggtgccccccytttttttttttttttgagatggagtctcgctctgttgcccaggctggagttcagtggcgcgatcttggctcactgccagctccgcctcccgggttcacgc

SEQ ID NO: 352434 - DNA, 201 bp, Homo sapiens
gctggagggggagagtcagcctttggggtttaaggaggggctggattggctcagaagggaatagataggcccagaggccagggcaggtagaggaggggtgsgaaggaaggaggctgcactggcagagtgtgggtgggccctggctagtggtgcaggctggcagctaacttctctctctgggcaggggggcagaggttctgt

SEQ ID NO: 352435 - DNA, 201 bp, Homo sapiens
tcacagtgctgcagcccatcccttcccgtgagaccgtgccctgggttcccaactcgggcagggtgccccccttttttttttttttttgagatggagtctcrctctgttgcccaggctggagttcagtggcgcgatcttggctcactgccagctccgcctcccgggttcacgccagtctcctgcctcagctgcccaagtagc

SEQ ID NO: 352436 - DNA, 201 bp, Homo sapiens
ccagggtggtggggaagggccaggggccagagtagggcgtgtgtggtggtggcactgtgcagagcggcctcccggccctgtgagcattctgccacctgacycacagtggaccggggcctgggccatctcagctccagcctgacagcatggggaagcagggcacggctccttggggaagctattccgtgtcctcccaggagg

SEQ ID NO: 352437 - DNA, 201 bp, Homo sapiens
gtccacacctgggacaggtggggtgggaggaggctgagcccatgatggttcttcccttccggctcactgaattccaggatgacactcgcttaagtcacgaygccctcccagagcgcacggtgatccagctggattcctcgcccaggtaacctggactacgccatgtgcagagaggcagagccattccctggctctcaggcc

SEQ ID NO: 352438 - DNA, 201 bp, Homo sapiens
cacactggagctctgccaccgaggcggtccctgacgtctaccaggtgaggtgtgggcttgtcaggtgggcctggccctctgcccgtcgtgggcccctcccygcccggcgacgccagcctcccaccctcctgcttgtggccctgctactctccaggctgaggacaagtgtcctggggagggggttgtccagaagacaggcac

SEQ ID NO: 352439 - DNA, 201 bp, Homo sapiens
gagcctacctcttcctgcccgatggcgaggccaaggtatcctaaagatgccttgaacaacctggcagggagggcaggagggggcacaggccttcccacagktttattgctgcctgccaggggccttgtctttcctgttcagcccaggggtgtctgggaataggtgctctcttgcccagccctgggctggcaccttcctgct

SEQ ID NO: 352440 - DNA, 201 bp, Homo sapiens
cactgtgttagccagggtggtctcgatctcctgacttcgtgatccactcgcctcggcctcccaaagtgctgggattacaggcgtgagccaccgcgcccagycgaaggtgccccttttatgtcagaattaattcccaggctcccctacttctgttaagtctagaatggcaggatgtacagttcctgcttctgaggccagagc

SEQ ID NO: 352441 - DNA, 201 bp, Homo sapiens; identical to SEQ ID NO: 75350

SEQ ID NO: 352442 - DNA, 201 bp, Homo sapiens
gtggcgcgatcttggctcactgccagctccgcctcccgggttcacgccagtctcctgcctcagctgcccaagtagctgggactacaggtgcctgccatcayacccagctaattttttgtagttttagtagagatggggtttcactgtgttagccagggtggtctcgatctcctgacttcgtgatccactcgcctcggcctc

SEQ ID NO: 352443 - DNA, 201 bp, Homo sapiens
gggtgccaggtcctctgctgggctccagtgtttcagaagtgaaccaagacatggtcactgttttcacagagctcacagctcagtggaacggttcttacccrgagatctgtaggcaggctttagggttgagcaaatctcagcaagcccgtgagactggatgcacactcatgtgtaagaaggcatggtgttgctgagaggggc

SEQ ID NO: 352444 - DNA, 201 bp, Homo sapiens
tggcgcgatcttggctcactgccagctccgcctcccgggttcacgccagtctcctgcctcagctgcccaagtagctgggactacaggtgcctgccatcacrcccagctaattttttgtagttttagtagagatggggtttcactgtgttagccagggtggtctcgatctcctgacttcgtgatccactcgcctcggcctcc

SEQ ID NO: 352445 - DNA, 201 bp, Homo sapiens
acagcttagtgaagtagccctctgcgttaggggagacggcaaatgtccacacttgaagggttagcggaacctcgcctggagccaggcgtgcccttgagtcyaggcacaccaggaaaggtctttccaaaacaactgacctgggtgtgcttttatcctgcctcgtcctctcccctcagcctggctttggtccctcaccaatat

SEQ ID NO: 352446 - DNA, 201 bp, Homo sapiens
ctgggtggagtgtcctactggatcccctgaagaaccgtcagggttacaactcttggggccaaagaaaggaaaaaaaatgtcaaaaagcaaagctaggcacrgtggttcactcctgtaatcccagcactgttgggaggccaaggcagaaggccaggagtttgagaccagcctgggcaacaaagcgagacccaggctctacaa

SEQ ID NO: 352447 - DNA, 201 bp, Homo sapiens
tccttccagtgatcattaaaagacagactgacgttctttttttttgtttttttgttttgagacggagtttcactctttcgcccaggctggagtgcagtggkgcaatctccgctcactgcaacctccgccttccgatttgaagcgattctcttgcttcagcctcctgagtagctgggattacaggcgcccgccaccatgcgc

SEQ ID NO: 352448 - DNA, 201 bp, Homo sapiens
  misc_feature (1)...(201): n = A,T,C or G
tgcgtggtgctcttttactgatgagacttcgtggtgggcccatgttttttttcctgccccagggcagccctgcttctggaccaataccggaagaagtcccngctgttccgaagcaacgtcctcctggtgcctcttggagatgacttccgatatgacaagccccaggagtgggatgcccagttcttcaactaccaacggctc

SEQ ID NO: 352449 - DNA, 201 bp, Homo sapiens
cctattcaatccattttaattctcataacattatatgggtacctacggatgttatccttattttgctagaaatggaggctcagagaggttacttgcccacrgtcactgagctagtacttgtggagctggtgtgatatggctccggggtccagacccttcactttggtgctgcatcgctaactggtgggcaaaatgaggcgg

SEQ ID NO: 352450 - DNA, 201 bp, Homo sapiens
atattggccaggctggtcttgaattcctgacctcaggtgatctgcctgccccggtctcccaaagtgctgggattacaggtgtgagccactgcgctcggccyattcaatccattttaattctcataacattatatgggtacctacggatgttatccttattttgctagaaatggaggctcagagaggttacttgcccacagt

SEQ ID NO: 352451 - DNA, 201 bp, Homo sapiens
tgcaatttcggctcaccgcaacctccgcctcctgggttcaagtgattatcctgcctcagcctcctgagtagctgggattacagatgtgcaccaccacaccyggctaatttttgtatttttagtagagacagggtttcaccatattggccaggctggtcttgaattcctgacctcaggtgatctgcctgccccggtctccca

SEQ ID NO: 352452 - DNA, 201 bp, Homo sapiens
gcagacggcagagcaccttgagtgcctgctaagggatctggactttatcctggctaggaaaggtccaggctaaggaaagagctgagcaaggagggacaccrtcagaactctggtctcagcatgtcacgctgacagtacggagcaggttggatctgtgggaagggagactggaggagggtgacagcgggaggctgttcaggc

SEQ ID NO: 352453 - DNA, 201 bp, Homo sapiens
ccaggggtgtctgggaataggtgctctcttgcccagccctgggctggcaccttcctgctttgccctctgtgctgtagtttcaacagcaatctgctctttcyctagccctacgtccccaaggagccccccgtgctgcgtgtcactgaaggccctttcttctcagaggtggttgcgtactatgagcacattcaccaggcggtc

SEQ ID NO: 352454 - DNA, 201 bp, Homo sapiens
agttggaggtgggcaagagagagagagtagggctgaattcctggggtggggggaggcagtctggcgttttgtgtcccatctcacgcagcctggcaccttcytctcccagcagcgctctgtcacctgtgcccctcatgttcgtctcccactttcctctgtgctgccctcctctgccctgtcccagcattctctaagcctgtg

SEQ ID NO: 352455 - DNA, 201 bp, Homo sapiens
caattcccactactttgcattgattgaccagctcatcgaaggacaccagtggctggagagaaatcttggtaagtccaggcccaggcatgggggtctgcccsctgggctgtaaggcacaggcaggggctgtaaggcacagggatcggcagggggtggttcctttctaggcagatcccaccatgtgggcctggtgtgatatca

SEQ ID NO: 352456 - DNA, 201 bp, Homo sapiens
actggatcttctcctctccccctctgggatatggtatttgaaaaaatgactgtcttctatacaagggatccgttttagggttttcagacatctttctgtgrttgttctgggttaaaagactgagcaactacacaagtcagtaaggactggagaggtgaaagggagaataaggccatctgtcccggtggaatgtaggggcag

SEQ ID NO: 352457 - DNA, 201 bp, Homo sapiens
ggctggcggacccgcgcggggccggcgcagcggagcgcgccggctgcccggggcccagcgggagcgcggcagcggcgcgcggagcagggggctacgggtgrgcgggcgcccgccttcgcctgcgtcgctgcctgcacgcgggccgccgtccccgggcgtgtgagagccggcagctcggccgactgggcccggagcggcgcg

SEQ ID NO: 352458 - DNA, 201 bp, Homo sapiens
ggccgggtagggtagagggggttactgcagcatagtcttcactggggaacagcagggatatcagaactaagacccccactgttcttcagagcagacctgcwggcactggtgtggactgccagaaatggtcgcaccctctggttaggggagggccatattgacctctggcctctacagggcctgctgtcccaagggcttcag

SEQ ID NO: 352459 - DNA, 201 bp, Homo sapiens
aagccattcagagctcttggcacaggaggcaggcatctgctgtccccatcccctggtggaggcagcagtgtaggcaactgggtggagtgtcctactggatsccctgaagaaccgtcagggttacaactcttggggccaaagaaaggaaaaaaaatgtcaaaaagcaaagctaggcacagtggttcactcctgtaatcccag

SEQ ID NO: 352460 - DNA, 201 bp, Homo sapiens
ctgtagtttcaacagcaatctgctctttccctagccctacgtccccaaggagccccccgtgctgcgtgtcactgaaggccctttcttctcagaggtggttkcgtactatgagcacattcaccaggcggtccggctttacaatctgccaggtgagccctgcatatgaggaagggtctggaaggaggtgtgggctccacaact

SEQ ID NO: 352461 - DNA, 201 bp, Homo sapiens
tggagagaataatacagccattagcagaggctgaggctatacagcttgagagaagtagagactagttcaggatggtaggtgctgggacttcaaagtccacrtgggacaggtaaccaagtgtaacctaggaacgtcaagggaccagaaccagactctgagaggtacacaggcaggaaaaatgtaagttgcaaacaaaaacag

SEQ ID NO: 352462 - DNA, 201 bp, Homo sapiens
gtgcagatcagcgcacactggagctctgccaccgaggcggtccctgacgtctaccaggtgaggtgtgggcttgtcaggtgggcctggccctctgcccgtcrtgggcccctccccgcccggcgacgccagcctcccaccctcctgcttgtggccctgctactctccaggctgaggacaagtgtcctggggagggggttgtcc

SEQ ID NO: 352463 - DNA, 201 bp, Homo sapiens
ccctggtcggaagcagcagcctcctgggtcagcccaccttctacgcacaggtttgtggtcctattcaacccactggaacaggagcgattcagcatggtgtycctgctggtcaactctccccgcgtgcgtgtcctttcggaggagggtcagcccctggccgtgcagatcagcgcacactggagctctgccaccgaggcggtc

SEQ ID NO: 352464 - DNA, 201 bp, Homo sapiens
tgcaggtgtttgtggtgccccactctcacaatgacccaggtgagggccctgcagactcctgggagctggagtgtggagtgggatttctgatggccaatacragggagggacgtcgaagaagatggtggcatcctcaggggaccctacattggctccctaggctggatcaagacctttgacaagtactacacagagcagacc

SEQ ID NO: 352465 - DNA, 201 bp, Homo sapiens
aacctggactacgccatgtgcagagaggcagagccattccctggctctcaggcccctctgccccagcatgtgctgaaccagtgcagggcgcttgccctggycggaagcagcagcctcctgggtcagcccaccttctacgcacaggtttgtggtcctattcaacccactggaacaggagcgattcagcatggtgtccctgct

SEQ ID NO: 352466 - DNA, 201 bp, Homo sapiens
tggtgggaaacgggcagctggagattgcgacaggaggctgggtgatgccagatgaggccaattcccactactttgcattgattgaccagctcatcgaaggwcaccagtggctggagagaaatcttggtaagtccaggcccaggcatgggggtctgccccctgggctgtaaggcacaggcaggggctgtaaggcacagggat

SEQ ID NO: 352467 - DNA, 201 bp, Homo sapiens
gggcagagtgtcctgctccgtcctgagtgtgagtccttaactataggctggtgggaaacgggcagctggagattgcgacaggaggctgggtgatgccagaygaggccaattcccactactttgcattgattgaccagctcatcgaaggacaccagtggctggagagaaatcttggtaagtccaggcccaggcatgggggtc

SEQ ID NO: 352468 - DNA, 201 bp, Homo sapiens
tctgttctcctgaattcttttctttctttttttttttttgagacagagtctcgctctgtcgcccagccttgagtgcagtggcgcgatcttggctcactgcmacctccgcctcccaggttcaagcaattctcctgcctcagcctcccaagtagctgggactacaggagcctgccaccatgcccgactaatttttgtattttt

SEQ ID NO: 352469 - DNA, 201 bp, Homo sapiens
aaaaaaatgtcaatggcaatgagtattgtcactctgttctcctgaattcttttctttctttttttttttttgagacagagtctcgctctgtcgcccagccktgagtgcagtggcgcgatcttggctcactgcaacctccgcctcccaggttcaagcaattctcctgcctcagcctcccaagtagctgggactacaggagcc

SEQ ID NO: 352470 - DNA, 201 bp, Homo sapiens
gaagtcggagcgggtggggagggagccgggcgggcggccagagacctggcggcaggtgcctgccctctgtgatccaactctctccccagctccacccacaytggcctagacccagtctctaagggctgaaaatattgcccggaagctcccgagcagaatcagatcgcgctaagtagggcacaacgcagaggcgacaaagct

SEQ ID NO: 352471 - DNA, 201 bp, Homo sapiens
ccctatggtcatcttctctccttccctctcctgcgccacccacaggcttctgcgctcccttgtcaacctgaagcaggtcatcattcatgcagcccactatytggtgctgggggacaaggagacctaccactttgaccctgaggcgcccttcctccaagtggtgagcccctcctgggtctgcatggggaccctctggtgtgt

SEQ ID NO: 352472 - DNA, 201 bp, Homo sapiens
gttctcttggtcctgggattgggagaactggtccagtgaggccagtgcacacaggccctgacatttgctggttggcaggactgggcagagtgtcctgctcygtcctgagtgtgagtccttaactataggctggtgggaaacgggcagctggagattgcgacaggaggctgggtgatgccagatgaggccaattcccactac

SEQ ID NO: 352473 - DNA, 201 bp, Homo sapiens; identical to SEQ ID NO: 75340

SEQ ID NO: 352474 - DNA, 201 bp, Homo sapiens; identical to SEQ ID NO: 75343

SEQ ID NO: 352475 - DNA, 201 bp, Homo sapiens
gtattcggctccaaacctccaggaccaggttttggcctttccttacccacacgcctccctgtgccagcactgcctctgggcagaggcgctgctgcatctcygatctctgaaagccctgcgcccacttccctgggcactgtctgtcatccaggaggacaccctaccctcggcggagaccgcactcatcttacaccgcaaggg

SEQ ID NO: 352476 - DNA, 201 bp, Homo sapiens
atgagggcgtgacttttcttaaagcagcagttgtgatcagtgaggctggcctaggtttacaagaacaggccctgaaaggtaaccattttctcctttgaaargcttactagactgataagttaggggaaagtggtatttgaggaatcctctcatgagaacagagtagaaaagtacaagctgggccagcgccgctaagtagat

SEQ ID NO: 352477 - DNA, 201 bp, Homo sapiens
gtggctttgatgaatggggtgtgatttgaagatatgaaccagggcacaggataggaggcaggaaagacaacaggctggggaacagcagtgagttccttagytatgctggagctatgctatccagtacggtggccagtagccctatatggctatttaaattacaactaaatcaagtaaaaaatttgctttcttattcctact

SEQ ID NO: 352478 - DNA, 201 bp, Homo sapiens
aatcaggccccgggggaaagtgttaggtaagagttgatccaaacagcaatttagtcagaaccttaagaatacgacaagttggattggtttttatgttgcartgctctgatttctccctgatgtccaagagttgaaacgtgaccaaaagggaaataaagtggtcttttgtttccagaagtctaaatggcgattccaggcaag

SEQ ID NO: 352479 - DNA, 201 bp, Homo sapiens
gcactggtgtggactgccagaaatggtcgcaccctctggttaggggagggccatattgacctctggcctctacagggcctgctgtcccaagggcttcagcrtgccctgtgtgcccgtcccctgagggagcccctcatgtctttctccctggcctacacactctctccagccctaggtccagttacagcctcacggtctatc

SEQ ID NO: 352480 - DNA, 201 bp, Homo sapiens
taaccgagaggtaagggtcggctctgggagcggggaactagtacgagcaaggtgtagctgcgccagagcccaggtgacagagcccgccactcagtcactcrtgcatcagatagatattgagcacctgctttactgtgaggacccagagggacataagtgcagacagtgctgactctcccaggagtttactcgtgagtaggg

SEQ ID NO: 352481 - DNA, 201 bp, Homo sapiens
tactgttcttgcagtagcaattcatttttttaagtgctaaaaaaaaacttgcagttttatttgtgaagtgtaattttgcctggagatataacattttggtytgggttaaatagctcctaaattctcaactgaaatggatatccttgaaaactgatttatcaagctcctgagagtgaactatcaccttgcttccactaagta

SEQ ID NO: 352482 - DNA, 201 bp, Homo sapiens
ggctggagtgcaatgacacgatctctgcaatctccacctcccgagttcaagtgattctcccgcctcagcctcctgagtagctgggactacaggcacttgcygccatgcccggctaatttttctatttttagtagagacggggtttcaccatgttggccaggctggtctcaaactcctaacctcaggtgatccacccgcccc

SEQ ID NO: 352483 - DNA, 201 bp, Homo sapiens
ggagtgctcggctcactgcaatctcggctcactgcaacctgggttcaagtgattctcctgcctcagcctcccaagtagctaggaatacaggtgtgtgccaygatacctggctaatttttgtatttttagtagagatggggtttcaccatcttggccaggctggtctcaaactcctgacctcaggcgatctgcccacctcgg

SEQ ID NO: 352484 - DNA, 201 bp, Homo sapiens
gttatggtagtgtctgatagacttctccgctgtaaagttactcatttctttttggcctttgtaattagtagatatcctgttgtgggatgctttgagactaygtaaataccctgctagtgatcagaattttacccacaagttttagtatccattgatgattcttccccaaatcagttattactatgatagatataaaattat

SEQ ID NO: 352485 - DNA, 201 bp, Homo sapiens
ggcatcacagggcccacattcccgcgtgtcagcaataggctgaaacagaagcatggtttctcacgtgtccatggaggcatctgagtgtgtgcccactttcycggttcaatgacaatttgcacctgctcgtgtagaggggtacgggtgaaacagagaccagtattattaaggggatggagaggagagaccgccaaaacatcg

SEQ ID NO: 352486 - DNA, 201 bp, Homo sapiens
tgaacacagcagtcttgaggcttttgagttttcattgataacaactgcattatactgtctctgtatcattaagtttcactaataaaatggttagctagaasaggggcaaggacagagttctacagcatgtcaatagaggcttccctcttggcttacaacagtccattcatcaccacttcttgttcagctagttacatatct

SEQ ID NO: 352487 - DNA, 201 bp, Homo sapiens
aattggttgcattctaaagatgaagtcccattatgattaattacatgaaacttcaaacaattttaggtagctgatttttttttttttttgagacagtctcrctctgtcacccaggctggagtgaagtggtatgatcttggctcactgcagcctccacctcccgggttcaagtgattcttgtgcctcagcctcccaggtagc

SEQ ID NO: 352488 - DNA, 201 bp, Homo sapiens
agtgtcttaaatcagtcaaactacttctttgggtctaagggctcactgcatgccatgtgctatgttgggcgccgatcatttaaagatgaataacaaatackaagtagttcctgccctcctggagctcacagcttagtgagagagaagttttgagaggaatgaaattagccactgaaggctccagagaaaagccaaaaataa

SEQ ID NO: 352489 - DNA, 201 bp, Homo sapiens
actgaagaatttcgtacccagctcactgtcatttatgttgaaaccaacaaaaggtcattttcagatatgcaaaaagtttagaaatacatcactcatttgtyttcactgaaatactgattttagtcttcccaaattagtttatatatttaacccaaatgccagtgttttgttttttttttttttttttttttggttttttgt

SEQ ID NO: 352490 - DNA, 201 bp, Homo sapiens
ttttactttgttttcttctcaacaacaaaatgcttcttgttgccaccaaatccataattcttcagtaacaaaatctactataaaagaaatccccccccccttttttttttttttgagatggagtctcgctctgtcgcccaggctggagtgcagtggcctgatctcggctcactccgagttctgcctcccggggttcacgcc

SEQ ID NO: 352491 - DNA, 201 bp, Homo sapiens
tagtaagtgtacccaagcaagaaagcaggataattgaaacagataagtgtgttataaataaatacataacaaatatataacaaaaataatagaagactgtyttcagaattggaagaaggaagactgggactgaagaatttcgtacccagctcactgtcatttatgttgaaaccaacaaaaggtcattttcagatatgcaaa

SEQ ID NO: 352492 - DNA, 201 bp, Homo sapiens
cttgaacccgggaggcggaggttgcagggagccgagattgcaccactgcaccccagcctgggcaacaagagcgagactgtctcaaaaaaaaaaaaaaaaamaaaaaagataaaagcgtagacagcagccgagcgcagtggctcacagctgtaatcccagcactttgggaggccaagggagacggatcacctgaggtcagga

SEQ ID NO: 352493 - DNA, 201 bp, Homo sapiens
caaaaggaggtaaggattcagcctaagaatagtaagtgtacccaagcaagaaagcaggataattgaaacagataagtgtgttataaataaatacataacaratatataacaaaaataatagaagactgtcttcagaattggaagaaggaagactgggactgaagaatttcgtacccagctcactgtcatttatgttgaaac

SEQ ID NO: 352494 - DNA, 201 bp, Homo sapiens
tttttttttttttttttttttttttgagacgggagtctcactctgtcgcccaggctggagtgcagtggcgcgatctcagctcactgcaagctccgcctctygggttcacgccattctcctgcctcagcctcccgagtagctgggactataggcacccgccaccacgcccggctaatttttttttgtatgtttagtagagac

SEQ ID NO: 352495 - DNA, 201 bp, Homo sapiens
agcctgggcaacagaccgagactgtctcaaaaaaaaaaaaaaatgatttttttcaagtgctttaaatggttatgtatagtataaataatctacaatggagatatatatatatatatatataactttgataaaaaatatggttaaacaataggggtttataaaaacctaattatttctgctctcagactaattaatccttac

SEQ ID NO: 352496 - DNA, 201 bp, Homo sapiens
agatgtaaatgttaatattgatgatataaaagtaaaagtacaatcgctaaaagtaaaagaaggcatacagggaaggcttgggtactaatgacatctcacattgtgggaaggggtagtggtcagaagttctattgaaagttagaaacataattagtacatgacccaacagtatcatataactagcaaaattcagagaagaat

SEQ ID NO: 352497 - DNA, 201 bp, Homo sapiens
agggtacagaaggacatcctgactcagctgaagattctcagacctcaggtgtaagttgttgcacgtcacgtatttgagaaccctggggcagtgactgccaragctgctacatgttagaatcacctgtggcgctttaacgccaccaccccacccccaccccacccccatgcccaagttgtaacccgatggcagctaaatcag

SEQ ID NO: 352498 - DNA, 201 bp, Homo sapiens
tcttcttcattccctctcctacgataatcggtcattacaatatttcactgactctaagatgccaactatattaagatactgttactttatggactattaaggaagaaaaaattctgctaattaaactatgacacagtgcttttattgaaagaattgttttttactgatttagacattgatttttattatccacagctgtgt

SEQ ID NO: 352499 - DNA, 201 bp, Homo sapiens
gccttggcctcccaaagtgctaggattacaggcataagccaccttgcctggccttatatagttgattttgacataaggaatatatttctaaaaatattatrtttccaaacctgacctgaaatgacacaaagctaacccattatatgggaagtgaattaggacattagtactttttaaaaaaatcctacaggatagaattgg

SEQ ID NO: 352500 - DNA, 201 bp, Homo sapiens
cctggtctcaaactcctgggctcaagcgatccgctcacctcagcctcctaaagtgctgggtctatgggcatgagccactgctgccagccacgtgaatatamtgtatagtagtgaagtatgggcttttagtgtactgcatcattattttgaaacttacgataaaagtcttacagctggctacgcatggctcacacctgtaat

SEQ ID NO: 352501 - DNA, 201 bp, Homo sapiens
atattttccatctgttttctctatctctctgtgtgtgcatctattaagtcaaaaactatgaagggtctgagattttaccctacatttatagctatatttayctttagccacttttctgaagttctaattatctattgttatgactgattttctttgggttgtattggtatattatcaagttgtctacatataatgataatc

SEQ ID NO: 352502 - DNA, 201 bp, Homo sapiens
tatttgggtgtggatttctttttatctctgcttggaattttttggctttctcaaatctgaaggttagtgtctttaattagtcctggaaaagtcccagctgwtatcttttcaaatattaattcttccctattttctcttctttctggaactctggctagatttatgttagactttctactctgtcttccatgtctcctaact

SEQ ID NO: 352503 - DNA, 201 bp, Homo sapiens
tgatgccgactggtatgtatttttagaagtgaattggcaggaatccattggcagatgttaaatgaaagctctttaatagaaataaaaagaccacctacacrgtatttctatcatttagggacctcttaaacctcctgtaccatagtgagaaagcatattactttatatcctttgttctggttgttgacatcatgaagttta

SEQ ID NO: 352504 - DNA, 201 bp, Homo sapiens
gcccagcgagcggcacaatggggatgaccccagcacacctgccaggacccctgccccacagggcctgccactccctccacaggcctcatcttagggtctgyacctttgccccagatctgggttccagccccagggatttggcacacagccggtgcctaataacagcttgttggatggatagatgagcggatgggcgggtga

SEQ ID NO: 352505 - DNA, 201 bp, Homo sapiens
gggctccagcagccacttctccctccgtgcagctggcacagccccgtgtgtcctcaaagccagggctcagagaagccagctggtggggcgcacccaggggmcccgagcctggcccagaccctgctaggtgctccagttcatgagtgcagcaaccactaggaggcaggggctcaactctgcagctgtgcagggcagacccag

SEQ ID NO: 352506 - DNA, 201 bp, Homo sapiens
caggcgtgagccaccgtgcccagccaagatcaatacttttaaactggattccaaatggtgaagtgccctaggaaatgcagagattaagggcttaaaatatkctccattaaaaagaatcagggaggctgggcgcggtggctcacacctgcaatcccagcactttgggaggcggaggcaggaggatcccttgagcacaggagt

SEQ ID NO: 352507 - DNA, 201 bp, Homo sapiens
tgctgggattacaggcgtgagccaccgtgcccagccaagatcaatacttttaaactggattccaaatggtgaagtgccctaggaaatgcagagattaaggkcttaaaatattctccattaaaaagaatcagggaggctgggcgcggtggctcacacctgcaatcccagcactttgggaggcggaggcaggaggatcccttg

SEQ ID NO: 352508 - DNA, 201 bp, Homo sapiens
ttttgaggtagagtctcactctgtcacccaggtgggagtgctcggctcactgcaatctcggctcactgcaacctgggttcaagtgattctcctgcctcagyctcccaagtagctaggaatacaggtgtgtgccatgatacctggctaatttttgtatttttagtagagatggggtttcaccatcttggccaggctggtctc

SEQ ID NO: 352509 - DNA, 201 bp, Homo sapiens
tttttgataatagctttcttaactggggtaggatgatacttcattgtgtttttgtttttgtttttttaatttttaaaattttttgtagagacggagtcttsctgtgttgcccaagctggtcctgaactcctagcctcaagcaatcctcccgcctcagcctcctaaagtgctaggattcaaggcatgagccactgtgcctgg

SEQ ID NO: 352510 - DNA, 201 bp, Homo sapiens
gcctgggcaacagaccgagactgtctcaaaaaaaaaaaaaaatgatttttttcaagtgctttaaatggttatgtatagtataaataatctacaatggagatatatatatatatatatataactttgataaaaaatatggttaaacaataggggtttataaaaacctaattatttctgctctcagactaattaatccttaca

SEQ ID NO: 352511 - DNA, 201 bp, Homo sapiens
ttgattaaataattggccattggtgattaagtcactccccagcccctttgtcctacccagaggaagttttgttttgttttttgagaaggagtctcactctrtcgcccaggctggagtgcagtggtatgatcttggctcactgcaacctctaccagctgggttcaagagattctcatgtctcagcctactgaatagctgggg

SEQ ID NO: 352512 - DNA, 201 bp, Homo sapiens
tggatatccttgaaaactgatttatcaagctcctgagagtgaactatcaccttgcttccactaagtaatttgtaaggtctaagatccgcagtccctggtgtttttttttttttttttttttttttttttttttttggtataagtagctctcagacttttacccacatgagtttccattaaaattgtacaagctttgacttt

SEQ ID NO: 352513 - DNA, 201 bp, Homo sapiens
aggaaatgagaaaggaaactagcaggagatgatgaaaagagcgttgactatggcaccaaagaccccagaggggttagaatccgtggatttacgtggcaccscacaggttcccacccagtatgtaacagagcactattctaggaggcatggaggatttaaattgtgtgtttgtgtgtgtgtctgtgtgttatatatgtgttt

SEQ ID NO: 352514 - DNA, 201 bp, Homo sapiens
gggaggctgaggcaggagaatcgctagaacccgggaagtgaagactgcagtgagctgagatcgcaccattgcactccagcctgggcaacaagagtgaaacygtgtctcaaaaataataaataaacaaacacacacaaaaattagccaggtgtggtggtgggcacctgtaatcccagctactcgggaggctgaggcaggaga

SEQ ID NO: 352515 - DNA, 201 bp, Homo sapiens
taggcacagagctgtggataataaaaatcaatgtccaaatcagtaaaaaaaattctttcaataaaagcactgtgtcatagtttaattagcagaattttttyttccttaatagtccataaaataacagtatcttaatatagttggcatcttagatccaatgaaatattgtaatgaccaattgtaatattgtaatgggctggg

SEQ ID NO: 352516 - DNA, 201 bp, Homo sapiens
aatcaatgtccaaatcagtaaaaaaaattctttcaataaaagcactgtgtcatagtttaattagcagaattttttcttccttaatagtccataaaataacrgtatcttaatatagttggcatcttagatccaatgaaatattgtaatgaccaattgtaatattgtaatgggctgggggccgtggctcacgcctgtaatccc

SEQ ID NO: 352517 - DNA, 201 bp, Homo sapiens
caatgtccaaatcagtaaaaaaaattctttcaataaaagcactgtgtcatagtttaattagcagaattttttcttccttaatagtccataaaataacagtwtcttaatatagttggcatcttagatccaatgaaatattgtaatgaccaattgtaatattgtaatgggctgggggccgtggctcacgcctgtaatccctgc

SEQ ID NO: 352518 - DNA, 201 bp, Homo sapiens
attttcatttttgctaaagagaaatcaattttttgtccatatggtacactgatatatttgggtgtggatttctttttatctctgcttggaattttttggcyttctcaaatctgaaggttagtgtctttaattagtcctggaaaagtcccagctgttatcttttcaaatattaattcttccctattttctcttctttctgga

SEQ ID NO: 352519 - DNA, 201 bp, Homo sapiens
caaatcagtaaaaaaaattctttcaataaaagcactgtgtcatagtttaattagcagaattttttcttccttaatagtccataaaataacagtatcttaawatagttggcatcttagatccaatgaaatattgtaatgaccaattgtaatattgtaatgggctgggggccgtggctcacgcctgtaatccctgcactttgg

SEQ ID NO: 352520 - DNA, 201 bp, Homo sapiens
aatcagtaaaaaaaattctttcaataaaagcactgtgtcatagtttaattagcagaattttttcttccttaatagtccataaaataacagtatcttaatawagttggcatcttagatccaatgaaatattgtaatgaccaattgtaatattgtaatgggctgggggccgtggctcacgcctgtaatccctgcactttggga

SEQ ID NO: 352521 - DNA, 201 bp, Homo sapiens
tgtcttttgattttcatttttgctaaagagaaatcaattttttgtccatatggtacactgatatatttgggtgtggatttctttttatctctgcttggaawtttttggctttctcaaatctgaaggttagtgtctttaattagtcctggaaaagtcccagctgttatcttttcaaatattaattcttccctattttctctt

SEQ ID NO: 352522 - DNA, 201 bp, Homo sapiens
ttaatagtccataaaataacagtatcttaatatagttggcatcttagatccaatgaaatattgtaatgaccaattgtaatattgtaatgggctgggggccrtggctcacgcctgtaatccctgcactttgggaggctgaggtggacggattgcctgaggtcaggagttcgagactagcctggccaacatggtaaaaccccg

SEQ ID NO: 352523 - DNA, 201 bp, Homo sapiens
ttttgtatctcacttcttttacacagcataattattttatatcggtttttatgaagcaagtataaaacaaatatttaacataaaaattaaaggtagcacamagaaaattacagatgaatattatgtataaaaattatgtaaaagttctaaataaaatactaccaaacagaacagaatccagcactctattacaaaactatt

SEQ ID NO: 352524 - DNA, 201 bp, Homo sapiens
attacaggcatgagccactgcacccggccgggtatttaaatttttgatgtcatcttaaaaagttttctgacattttattttttgtttattgatgatatagraaaacaatttatttttgtatattgaccttgtctccagcagtcttcctaaacacactgtcttagttttctatagctgctgtaataaattaccataaactta

SEQ ID NO: 352525 - DNA, 201 bp, Homo sapiens
aggcgtggtggcatgtgcctgtggtcctagctactcaggaggctgaggtgggtgaattacttgagcctgggaggtggaggttgcactgagccaagatggcrccactgcattccagtctgggcaacagaggcagaccctgtctcaaaaaataaaaataaattttaaaaaattgaaaaaatacatatctcaatgattgtatgt

SEQ ID NO: 352526 - DNA, 201 bp, Homo sapiens
agcactcattcttaatcgctcatgccctgttctttctgtctcattagtggttaacaaatctatgtttatcaactgttttactgtagataatagcgaaaagwagaagaatttggaagaagctgaattacattcaactgagaaagttccatgtattgaatttgatgatgatgattatgatacggattttgttccaccttctcc

SEQ ID NO: 352527 - DNA, 201 bp, Homo sapiens
tatgttggccaggctggtcttgaacttacgacctcaagtgatccacctgcctcagcctcctgaagtgctggggttacaggcatgagccaccacacctggtyaggttctcctaaattcttccatatggtaattagtccattaaaagccttgttccgaatacattttgacagtgagccagggttggagcagccatggtggagt

SEQ ID NO: 352528 - DNA, 201 bp, Homo sapiens
gctgggctccattgtagagacattctgtcatcttcagcctcatgatagtagtctactcctgctattgtggtacttctggtccagttttccttaaataatcrtagaaaaatagaggagtttatacagattggcaattttattttagttcatttttattataaaagtggtaagtgcttattttgtaaaactcaaatgatacag

SEQ ID NO: 352529 - DNA, 201 bp, Homo sapiens
tgaacttacgacctcaagtgatccacctgcctcagcctcctgaagtgctggggttacaggcatgagccaccacacctggttaggttctcctaaattcttcyatatggtaattagtccattaaaagccttgttccgaatacattttgacagtgagccagggttggagcagccatggtggagtcctgtgccctccatgctgct

SEQ ID NO: 352530 - DNA, 201 bp, Homo sapiens
atcccagcaaagcgaagtgcttaagaatactgcatcagattgcttgggttcgaattctggctccttcacatttagctctgtgtctactgcacgttactgamacactaagtgtcttggttttcgtctgtcatatgggggaaatggtctcttctacttcctggcgtttttgttaggattaaacgacttaatatatgcaataat

SEQ ID NO: 352531 - DNA, 201 bp, Homo sapiens
agctgacttccttggatgtaagttataaaaatactaataaaaacacgccttagaaacaattaaatttcagtcctctggataacctttttattaaatagttygtgatttgtaaaaaataaagcacagcagttaaatttgcagttgaacagaagtctgaaaatttgatacagataacctctagttcaatctgtttttattcta

SEQ ID NO: 352532 - DNA, 201 bp, Homo sapiens
gcagccatggtggagtcctgtgccctccatgctgctcctgtagggtggcctgtaggacaaggcagaccagccaggaaatggagactgggtccccgtgtgasctatctatagggaggtttcatgctttttgggtgccttgggatgcaaatacttatggaaattaccatcttctttgcaaatgtgtgctttcatgcggtctca

SEQ ID NO: 352533 - DNA, 201 bp, Homo sapiens
tcctgaggaacaacgaaaacactttgtactttttctgtggccttccataatcacgagctgggctactcttgtttttgagtgtctactgtgtgccatgttcytggcacccttgatcttacaactgtagctttacgatatcccagcaaagcgaagtgcttaagaatactgcatcagattgcttgggttcgaattctggctcct

SEQ ID NO: 352534 - DNA, 201 bp, Homo sapiens
acttatcgtagatcaagtccaaaagctgacttccttggatgtaagttataaaaatactaataaaaacacgccttagaaacaattaaatttcagtcctctgsataacctttttattaaatagttcgtgatttgtaaaaaataaagcacagcagttaaatttgcagttgaacagaagtctgaaaatttgatacagataacctc

SEQ ID NO: 352535 - DNA, 201 bp, Homo sapiens
cttttttaagccctaccagctaaagccagtgcactgtgtgactttgtgttacccttggagcagcctctttttgctccactctcctttccaccgacccagtstgctccccggattgagagtccctgtgcagtgaaagaataaatgtggctctctgccagcaacctcacctccccaccctaccctcagagtttcacatcttca

SEQ ID NO: 352536 - DNA, 201 bp, Homo sapiens
cccaaagtgctgggattacaggcgtgagccaccgcacccggccttatagaggttttaatacagcttaagttgtgatggaatttgaagaccacagaatcatraggtgatgtgtttcagtgtttttacatgtctaatgtatttctggcctagatctgtgcaagtaacagactcatttctactctggagaatctctatgagagg

SEQ ID NO: 352537 - DNA, 201 bp, Homo sapiens
cctaaaaaacacgcatggtcttccatctcatctttatgtattagaacaaagcaaaccatattgctattggctcccttatttaattttcacaacttttgttygtaagagtgaagcactttgcagcatcatctggaacctaatctgataagaagcagtaaagctcacacttgtacccatttccatgcttgttttcagtgagcc

SEQ ID NO: 352538 - DNA, 201 bp, Homo sapiens
ttcttatttccatcatttattcctccactttgggaaatactcatttcctcagtaactcacacagagccggagaccttaaaaggcatctggctcaacacccmgggtttttgaagaggaagcttaggcctggcctggggagggcttatcggaggacaaccctgcctggtctcgatttcaaaggtagaagcggacactggcctg

SEQ ID NO: 352539 - DNA, 201 bp, Homo sapiens
acaccaggggaacaacaaagacagcatggtctgatatgtgtgatgatcttggcagtttccttctttcttcataattgcattgtttctgacagccgcttttygattttctgccagggcaccctctgccttctggctagtaggttaggcctggcaggagggagaccattccatcagtcttgagaacttgaccccaaagtaact

SEQ ID NO: 352540 - DNA, 201 bp, Homo sapiens
agagaaaccaaaagttcagtcaagccaggcctctttaggggttgcgtaaatggcttctgtcttccccttcccatgttttcctgggccgctcgtctgggacwtgtctgttctgggcgctttctgcacaccaggggaacaacaaagacagcatggtctgatatgtgtgatgatcttggcagtttccttctttcttcataattg

SEQ ID NO: 352541 - DNA, 201 bp, Homo sapiens
ttttattgctgcagaatcccatggatctccaccttgaggcacgtgcacactccctgcctttcattaacacctgggagaatcgacctcccagcctttgcagrggtagcaagaagaagccacaacagagaaaccaaaagttcagtcaagccaggcctctttaggggttgcgtaaatggcttctgtcttccccttcccatgttt

SEQ ID NO: 352542 - DNA, 201 bp, Homo sapiens
taaataacaaagggttttgtgtcctcgtggcttttactattctgtcagtacttgctccgctgcttttattgctgcagaatcccatggatctccaccttgargcacgtgcacactccctgcctttcattaacacctgggagaatcgacctcccagcctttgcaggggtagcaagaagaagccacaacagagaaaccaaaagt

SEQ ID NO: 352543 - DNA, 201 bp, Homo sapiens
aaaaaattctgctaattaaactatgacacagtgcttttattgaaagaattgttttttactgatttagacattgatttttattatccacagctgtgtgcctrtatgaaaaatacatataatcaaattaccgtaggtacttataaaagttcacattcaaagcctgactcttctgagtcactttttgactgagtcgtccatgtc

SEQ ID NO: 352544 - DNA, 201 bp, Homo sapiens; identical to SEQ ID NO: 75425

SEQ ID NO: 352545 - DNA, 201 bp, Homo sapiens
cagtgtttgaattatacagctttttgttttagtgccttgtcccaagcctgtctgcctttgcattatgttaactaaaatgagattctgaaattcatagtagktttccatgtaaccccctttccacttttccatggagaatatttttggtatttctattttattttttagaaattagtatacatatttgtgtggacaaatcag

SEQ ID NO: 352546 - DNA, 201 bp, Homo sapiens
aactgatgataagcagtggagcaggtaagaacgtattgttcctgaaccattggaggaactagcagcagtgacctctgaggagccctgggaacaccctggarctcctgagcaacacgttgcttgtgatcactgacctggatatcatgactgtgtgagcaacaccccccacacctcagtagcaaaaacagagaacagtggcag

SEQ ID NO: 352547 - DNA, 201 bp, Homo sapiens
atggttcatatatttctgaaaatgtagtgtaaattgtgtttttgtttatgttaaaaattcttgtttctcagtactcttggtttcttggcagatgattcagrgataatttactgcctctccaggcgagaatgtgacaccatggctgacacgttacagagagatgggctcgctgctcttgcttaccatgctggcctcagtgat

SEQ ID NO: 352548 - DNA, 201 bp, Homo sapiens
agctgcttaggaagctgagggaagagggtcgctagagcccaggagtttgaggctgcagtgggtcatgatcatgccactacaatctagccttggtgaaagcragaccccgactcaatcacattgtgattaaaaagaactgttttaagagttatgagtcaccacccctcaataagaccactagtttggttttcttccaaagaa

SEQ ID NO: 352549 - DNA, 201 bp, Homo sapiens
ccctaagtatttccagagttaattttcactgggctgccttgtgtcagatgcctactgagggagtgggaagggtaggtctaataggaaatcttggtaacagyatatgttaccattaaagggaagcctggattccaggcagatcaaaacaacaggtagggctcttgcctgtccaacgcttaacaatacactttgtgttggcac

SEQ ID NO: 352550 - DNA, 201 bp, Homo sapiens
aatgtcctgacctcgtgatctgcctgcctcggcctcccaaagtgctgggattacaggcatgagccaccgcgcctggccaaaacacatcattgttaaataaytcctcaggctacccttctctatgggaaaatgcagagtaaatcaacagatttttaatagcaaaatggccaaggaaaaagcaggatagagacaacgcaaaga

SEQ ID NO: 352551 - DNA, 201 bp, Homo sapiens
ctggacaactttgaggaccagctaaagaagttttataattgaggaaatttaaaaaactacttctcttttctgttatatattgtctgatcagtggtagaaamatattaagggtttcaaaattatacatttattgagtctagcctatagtatgattggcttaacattttttttatttgcagtacgttaaaggaccttgacacc

SEQ ID NO: 352552 - DNA, 201 bp, Homo sapiens
agcagccagggtggcctttaaatgacaggcttgtctagctgcaagactgatatgcgacctctatgcagaggactcagctggctgcttgttgcctcaacccmcatggggaaagagtggaggaagaaaagtttgtgctggaggaagtaacaatttggttatgccgtctagggtggggtgtacaagtctggagtgcagagaaga

SEQ ID NO: 352553 - DNA, 201 bp, Homo sapiens
actgcaagctccgcctcccgggttcacgccattcacctgcctcagcctcccaagtcccaagtagctgggactacaggcgcccgccaccatgcccggctaatttttttttttttttggattgttttagtagagacggggtttcactgtgttagccagggtggtctcaatctcctgacctcgtgatccacccgcctcggcctc

SEQ ID NO: 352554 - DNA, 201 bp, Homo sapiens
ctttcaaaaccaaaattttcgtaagtgttttgactggtttgctgtcacataggcactaacttaccacattgtacacatgagatatcttctctttaaactcscccattgtacagatgaggaaatgaagctgagagattcattgattttcccactttgccaattaatggtagagtatgttttagcagcaccaggtgagattgt

SEQ ID NO: 352555 - DNA, 201 bp, Homo sapiens
gatgccaactatattaagatactgttactttatggactattaaggaagaaaaaattctgctaattaaactatgacacagtgcttttattgaaagaattgtkttttactgatttagacattgatttttattatccacagctgtgtgcctgtatgaaaaatacatataatcaaattaccgtaggtacttataaaagttcacat

SEQ ID NO: 352556 - DNA, 201 bp, Homo sapiens
aaaggaaacttaccttacctagggggctcgtaggcagaaaatgcacaaggacacattaggcccagggaagtggtattgtagctctgtgcaggttgagaggraggtcattcatttttggtttcatttaacattttgatttttttctttgtcacatttcagggggtctgccacatgtagaaagatatcttccaaaacgaaatc

SEQ ID NO: 352557 - DNA, 201 bp, Homo sapiens
agcgacaggattaaaagccacatctcatttccagcacacatgaattccttgcttgaattattcacgtgtgtggtcttccagcagtataagaacactacggkagatctatttatggttcatatatttctgaaaatgtagtgtaaattgtgtttttgtttatgttaaaaattcttgtttctcagtactcttggtttcttggca

SEQ ID NO: 352558 - DNA, 201 bp, Homo sapiens
tgaggcaggagaattggttgaacccaggaggtggaggttgcagtgagccaagatcgtgccactgccctccagcctgggcgacagagcgagactccatctcaaaaaaaaaaaaaaaaaaagtctgcaatgaagagctagtttccttatgaagagattatgttttatgcttctttgaatctggatctagcacactgctatgtc

SEQ ID NO: 352559 - DNA, 201 bp, Homo sapiens
actctaagatgccaactatattaagatactgttactttatggactattaaggaagaaaaaattctgctaattaaactatgacacagtgcttttattgaaaraattgttttttactgatttagacattgatttttattatccacagctgtgtgcctgtatgaaaaatacatataatcaaattaccgtaggtacttataaaag

SEQ ID NO: 352560 - DNA, 201 bp, Homo sapiens
tgagaaatataaaacatgtaggtccttctggaagatttactatgaatatgctggtcgacattttcttgggtaagtcatctgttttgaatgtttgagttacktcaattgaaattgaacatctaaagaatttattacaagtacatagaaaaactttttgtctattttcttataaaacttgagtttctgaataaaacttttaag

SEQ ID NO: 352561 - DNA, 201 bp, Homo sapiens
gaggcaggagaattggttgaacccaggaggtggaggttgcagtgagccaagatcgtgccactgccctccagcctgggcgacagagcgagactccatctcaaaaaaaaaaaaaaaaaaagtctgcaatgaagagctagtttccttatgaagagattatgttttatgcttctttgaatctggatctagcacactgctatgtct

SEQ ID NO: 352562 - DNA, 201 bp, Homo sapiens
gactttttaaaaagctgatacttgacaagattttggatgaagacttatatatcaatgccaatgaccaggcgatcgcttatgtgatgctcggaaataaagcmcaaactgtactaaatggcaatttaaaggtatagtatttttcatgtttattttattatctcacaatgagtgaaccaaaatatattattgtgaagtatagtg

SEQ ID NO: 352563 - DNA, 201 bp, Homo sapiens
aggcaggagaattggttgaacccaggaggtggaggttgcagtgagccaagatcgtgccactgccctccagcctgggcgacagagcgagactccatctcaaaaaaaaaaaaaaaaaaagtctgcaatgaagagctagtttccttatgaagagattatgttttatgcttctttgaatctggatctagcacactgctatgtctt

SEQ ID NO: 352564 - DNA, 201 bp, Homo sapiens
ggcaggagaattggttgaacccaggaggtggaggttgcagtgagccaagatcgtgccactgccctccagcctgggcgacagagcgagactccatctcaaaaaaaaaaaaaaaaaaagtctgcaatgaagagctagtttccttatgaagagattatgttttatgcttctttgaatctggatctagcacactgctatgtcttt

SEQ ID NO: 352565 - DNA, 201 bp, Homo sapiens
ggctaatttttgtatttttagatggggtttcaccatgttggccaggctggtctcgaactcctgaccccaggtgatctacccaccttggctcccaaagtgcygggatgacaggcgtgagccactgtgcccagccaagatgggattcttttttaagccctaccagctaaagccagtgcactgtgtgactttgtgttacccttg

SEQ ID NO: 352566 - DNA, 201 bp, Homo sapiens
agggggcaggtggaccaaggatgtgaacaggctagtctcagaagaagaaatacacatgctcatggcccggcactgtggctcacgcctgggatcccagcackttgggaggccgaggcaggtggatcacgaggtcaggagtttgagaccagcctgcccaacatggtgaaaccccgtctctactaaaaatacaaaaattagcca

SEQ ID NO: 352567 - DNA, 201 bp, Homo sapiens
atagctgaaggaaatgagaaaggaaactagcaggagatgatgaaaagagcgttgactatggcaccaaagaccccagaggggttagaatccgtggatttacrtggcaccccacaggttcccacccagtatgtaacagagcactattctaggaggcatggaggatttaaattgtgtgtttgtgtgtgtgtctgtgtgttatat

SEQ ID NO: 352568 - DNA, 201 bp, Homo sapiens
ggggtgtgcctggtgtgttcgagagatggcaagggagcccatgtggctgagcaggattaagagccagtgaggggaagaggtgatggagagccagagcagtyagttgagggctagagtcccagagtaactggaggcctgagtaactggaaggatggagttatccttggctaagatgcagaaggctggttggcagagaagatc

SEQ ID NO: 352569 - DNA, 201 bp, Homo sapiens
atctttgcaaacgggtgtagagtgatttctaacatgaatggaaagcgtacatacagtgtgctattttttatgtaagaaagaagggaaaatatgagactctratgtctgcttattttgcaaaaagaaaaacaggaaagataaatcagaaattattgaaattgataacccacaggaagtagatggcaaaggatggagagggaa

SEQ ID NO: 352570 - DNA, 201 bp, Homo sapiens
tatgagactctaatgtctgcttattttgcaaaaagaaaaacaggaaagataaatcagaaattattgaaattgataacccacaggaagtagatggcaaaggrtggagagggaagaacacttctctgtggggaaaaacagtcttttatgtagttttaacttttagaactatgtaaatgttttatatattcaaaaatcaaatcc

SEQ ID NO: 352571 - DNA, 201 bp, Homo sapiens
gattttcatttttgctaaagagaaatcaattttttgtccatatggtacactgatatatttgggtgtggatttctttttatctctgcttggaattttttggstttctcaaatctgaaggttagtgtctttaattagtcctggaaaagtcccagctgttatcttttcaaatattaattcttccctattttctcttctttctgg

SEQ ID NO: 352572 - DNA, 201 bp, Homo sapiens
agatccccaaccagtaactttagtgtcacttatttcaaagaaaaggcactctttttttctgctgtgtttttctccatcccatgtctctctctctctctctyttttttttaaaggtttattgtgtttacttttattctttttttatttttgagacagggtctctgttgcccaggctggagtgcagtggggtgatcatggctc

SEQ ID NO: 352573 - DNA, 201 bp, Homo sapiens
tttatccttccaggccaggtcccatttttctaaaagccctttcctaataatcccctccctaatgtcttttgtacttattttagcattgtggaggaagagasggggaacctggttattctgttattcaagtgagccttcagttagttgaagattatatatttcaagtgtcactagttgtaaatgtcaaaacagtctattgac

SEQ ID NO: 352574 - DNA, 201 bp, Homo sapiens
tccagttttccttaaataatcgtagaaaaatagaggagtttatacagattggcaattttattttagttcatttttattataaaagtggtaagtgcttattwtgtaaaactcaaatgatacagatgtgtacaaggcagaaaatttacaaaccatgccttgtagttttgcccccaaaataactctagttattggtttcctttg

SEQ ID NO: 352575 - DNA, 201 bp, Homo sapiens
tagtgtgcattttaaagtaaaacaaatgatagagcttttagaagcatctattatgaaaatgttccttcaagtctgtgccttatgaatctaataagcttttrcttttatatcaggttatctgtgctacaattgcatttggaatggggattgacaaaccggacgtgcgatttgtgattcatgcatctctccctaaatctgtgg

SEQ ID NO: 352576 - DNA, 201 bp, Homo sapiens
agtcttcatctcttttagtggaaaaagatggaaaccatcatacaagagaaactcacttcaataatttgtatagcatggtacattactgtgaaaatataacrgaatgcaggagaatacagcttttggcctactttggtgaaaatggatttaatcctgatttttgtaagaaacacccagatgtttcttgtgataattgctgta

SEQ ID NO: 352577 - DNA, 201 bp, Homo sapiens
atcaagaggctattctatgcttgacactggagatacaaagatggagaatgcacagcccctgttcccagtgggctcactatctgcatgacagaatagaattrccccccaaaaatgcaattaagcattaaataaagcccctgtatgggtacaagtgcacatatacccactcctatgatttgtttctctctcataaaggtagac

SEQ ID NO: 352578 - DNA, 201 bp, Homo sapiens
gccaagatcatgccattgcactccagcctgggcaacaagagcgaaactccatcaaaaaaaaaaaagtttagtactctcagtaagtatagttaaaaaatacrgagcacagggcagaacagagggtagtctctctcagtgtggaactggcaaattcatgccatctcctcccaccccaccccatcccttaaacattgctatcag

SEQ ID NO: 352579 - DNA, 201 bp, Homo sapiens
acaggaaatttgttggtaaatatctacacaatggagtactgtacagctgtaaagaagaatgaggaaaatctttgcaaacgggtgtagagtgatttctaacwtgaatggaaagcgtacatacagtgtgctattttttatgtaagaaagaagggaaaatatgagactctaatgtctgcttattttgcaaaaagaaaaacagga

SEQ ID NO: 352580 - DNA, 201 bp, Homo sapiens
gtacaagctttgactttaaatcagctgatgaatagaaggagttgatgtgtgatcagctggtgctattgggaaaactgatgataagcagtggagcaggtaaraacgtattgttcctgaaccattggaggaactagcagcagtgacctctgaggagccctgggaacaccctggagctcctgagcaacacgttgcttgtgatca

SEQ ID NO: 352581 - DNA, 201 bp, Homo sapiens
tagaaaaactttttgtctattttcttataaaacttgagtttctgaataaaacttttaagtaacaaaagaaagtcaattattatactgttttatataatgtrtatgtcactaagttgagatggtttcacatacaaagaagaaaataataaagcttatgcgagttcatctgagtgggtggaatgtaactattaaaatgtcagt

SEQ ID NO: 352582 - DNA, 201 bp, Homo sapiens
tccaggccaggtcccatttttctaaaagccctttcctaataatcccctccctaatgtcttttgtacttattttagcattgtggaggaagagagggggaacstggttattctgttattcaagtgagccttcagttagttgaagattatatatttcaagtgtcactagttgtaaatgtcaaaacagtctattgaccaaaaaaa

SEQ ID NO: 352583 - DNA, 201 bp, Homo sapiens
gtacatagaaaaactttttgtctattttcttataaaacttgagtttctgaataaaacttttaagtaacaaaagaaagtcaattattatactgttttatatmatgtatatgtcactaagttgagatggtttcacatacaaagaagaaaataataaagcttatgcgagttcatctgagtgggtggaatgtaactattaaaatg

SEQ ID NO: 352584 - DNA, 201 bp, Homo sapiens
ttttccatttgtagctgaagacagttccccagggataagcctgtccagcagcagaggccccggaagaagtgccgctgaggagctcgacgaggaaatacccrtatcttcccactactttgcaagtaaaaccagaaatgaaaggaagaggaaaaagatgccagcctcccaaaggtctaagaggagaaaaactgcttccagtgg

SEQ ID NO: 352585 - DNA, 201 bp, Homo sapiens
cttggcaaagccttctaaagttccaaaaaatgttacctttctttggatttccacagtatcctctctttaacactcattcagtactaatttattttgttatwtgtaaagtattttttctatgtaatcagactgaccaggtttatatgttaatatgtttttgtataatctgtgtggtgaggtaattatatatgcagacacaca

SEQ ID NO: 352586 - DNA, 201 bp, Homo sapiens
  misc_feature (1)...(201): n = A,T,C or G
ctaaagtcatattttctcataataactaaattttatgtttgggacttttttaggtttagcatgagctttaacagacataatctgaaatactatgtattacngaaaaagcctaaaaaggtggcatttgattgcctagaatggatcagaaagcaccacccatgtgagtacagccatgtgattagctgtctagaagtaacaaat

SEQ ID NO: 352587 - DNA, 201 bp, Homo sapiens
tgtataaatttttgtgtggacatatgttttcatttctcttaggtatatgcccaggagtgaaattattgggtcatatagaaactctatgtttaaccctttcytttttttttttttgagacggagtctcactctgtagcccaggctggagtgcagtggtgcgatcttggctcactgcaacctccacctcccaggttcaagtga

SEQ ID NO: 352588 - DNA, 201 bp, Homo sapiens
ttaactttttcattataacaaattgtgtaaatattgctttcagttagttacccacagtccttttgcagtagagatagttgtcttggttttaattggattcrtgatctacaactttatgttctaatctcatgtcatttttattatttttagtaaaagtaatttgtttgactaaattaactggtaaacagttctgagcttttt

SEQ ID NO: 352589 - DNA, 201 bp, Homo sapiens
gcctcatttttcaattcacataaactatttagtacacatcccatgacaactattgtcaattccaaaagcaacaagctgagctctaattgactttgtttccwcacacaacactttgaaaagacatgagtttgacaccccaaacaggataatatttaccattttaatggtaatatccagcagaaccttagacaagaaacagta

SEQ ID NO: 352590 - DNA, 201 bp, Homo sapiens
aagaaatattgctcacataaacatgtagatgggaatggaaggcattttttgtagctgtaacaattatttgaattccttctgatgtatatgccaagattacrtaatgatcagtcatcaaaaattatttttaattatctgtcaattgacaactcaattaggtctttcaaatttgtggtaagcaaagaattggaaactctctgg

SEQ ID NO: 352591 - DNA, 201 bp, Homo sapiens
tatgcattataatgctatatttaagatgtcgtattaggctgggtgcagtggctcatgcctgtaatcccagcactttgggaggccgaggcaggtggatcgcytaaggtcaggagttcgagaccagcctggccaacgtggcgataccccatctctactaaaaatacaaaaattagccaggcctactggcgtgcgcctgtaatc

SEQ ID NO: 352592 - DNA, 201 bp, Homo sapiens
agagaactaggggagagaaaggcaaaaagtcatctagtaacggggactctaaaaagtgggcaaagtttggggatagctgaaggaaatgagaaaggaaactrgcaggagatgatgaaaagagcgttgactatggcaccaaagaccccagaggggttagaatccgtggatttacgtggcaccccacaggttcccacccagtat

SEQ ID NO: 352593 - DNA, 201 bp, Homo sapiens
tgtgctttctacttttcctttgtatcaatcttatttgaaatctgtctttctttataaggtgacagaaatggccaccagaatcatattaagcttggaaaaarggaggtactttttcccagtcagccctaagtatttccagagttaattttcactgggctgccttgtgtcagatgcctactgagggagtgggaagggtaggtc

SEQ ID NO: 352594 - DNA, 201 bp, Homo sapiens
ttgggatacatcactaaacaaaatgaaaatccctgcccttgtggagcttacactctagcagagggaggccagttacaaacaatatacacaataaatatacrtgaaaggataagagctgtggtgaatggcacagcagagtaaaaagacaggaggaatgggtagagtgcaggatgcagtattagacggggtggtccttggaag

SEQ ID NO: 352595 - DNA, 201 bp, Homo sapiens
ctgaaacatgagcgtttccaaagtcttagttttcctcatacaaaggaaatgatgaagatttttcataaaaaatttggcctgcataattttagaactaatcrgctagaggcgatcaatgctgcactgcttggtgaagactgttttatcctgatgccgactggtatgtatttttagaagtgaattggcaggaatccattggca

SEQ ID NO: 352596 - DNA, 201 bp, Homo sapiens
tgactgaggaacagaaggatgactcagaatggttaagcagcgatgtgatttgcatcgatgatggccccattgctgaagtgcatataaatgaagatgctcargaaagtgactctctgaaaactcatttggaagatgaaagaggtaacaattattttatcttcattttagtatgttcattgtacttttttattcaaagctagc

SEQ ID NO: 352597 - DNA, 201 bp, Homo sapiens
aatttgtatagcatggtacattactgtgaaaatataacggaatgcaggagaatacagcttttggcctactttggtgaaaatggatttaatcctgatttttstaagaaacacccagatgtttcttgtgataattgctgtaaaacaaaggtaaaaaaagaagttttaaaattctttataattaaattttttttctcttacttt

SEQ ID NO: 352598 - DNA, 201 bp, Homo sapiens
cctgtaaacatctgcattttccatttgtagctgaagacagttccccagggataagcctgtccagcagcagaggccccggaagaagtgccgctgaggagctygacgaggaaatacccgtatcttcccactactttgcaagtaaaaccagaaatgaaaggaagaggaaaaagatgccagcctcccaaaggtctaagaggagaa

SEQ ID NO: 352599 - DNA, 201 bp, Homo sapiens
attttccatttgtagctgaagacagttccccagggataagcctgtccagcagcagaggccccggaagaagtgccgctgaggagctcgacgaggaaataccygtatcttcccactactttgcaagtaaaaccagaaatgaaaggaagaggaaaaagatgccagcctcccaaaggtctaagaggagaaaaactgcttccagtg

SEQ ID NO: 352600 - DNA, 201 bp, Homo sapiens
tagccactgaaggctccagagaaaagccaaaaataattttaaaaccttacatcaaccctataaagttatcaaaagtattttttagctgaaataagtttataaagtacagccctccctatttttgccattgatgacttaataccacggaggtttttcttacagttacgctgctgacctttaaaacaacgattaatggattta

SEQ ID NO: 352601 - DNA, 201 bp, Homo sapiens
gaattgttgaatccatatggcagggaagcagctaggtatctgctaaaatgggcccctgcagcgtgtctcttcatatacactaaaaacacgtggaccagtgygacatcacctgtaaacatctgcattttccatttgtagctgaagacagttccccagggataagcctgtccagcagcagaggccccggaagaagtgccgctg

SEQ ID NO: 352602 - DNA, 201 bp, Homo sapiens
agaaagcatattactttatatcctttgttctggttgttgacatcatgaagtttatagccctgtaagattttcaactcgaagctcattgtgttgaactgatstagaatttttctttgggaatttttcttttttctagtctaagcagttttggaaatcaaacagaaaaatcgctgtcagagaccatgaccatttctggcagtt

SEQ ID NO: 352603 - DNA, 201 bp, Homo sapiens
tttcctgacacatttgattgaaaattgcagacatggtatccttttaagccctaagtacttcactgtacatttcctaaaaacaacgtattctctcatataayctcagtacaatgatcaaaattaggagatgtacattgatgcagtactattacttaatctgtaaaccttattctggtttcactagttgtcccaataatgtcc

SEQ ID NO: 352604 - DNA, 201 bp, Homo sapiens
tttttatttcttattatttttgagacagggtctcttgatctgtcacccatgctggaatacagtggtgctatcacagctcactgcagcttcaactgggttcmaacaatcccccccaccttagcctcccaagaagctggggctacaggcatgtgccaccacacctggctaatttttaaattttttgtagagatgggatctcac

SEQ ID NO: 352605 - DNA, 201 bp, Homo sapiens
tggtgtttcagaactctaacgctggaaaaaaccttggcaatgatctaatccattgattttttttttccagggcttcccattgtcctttagggtttcaagasggcatttttaaggtccttccaccccaatttcaaccacttgtgagagagagatatatataatatataattatatataatatgtatattgtattgtatataa

SEQ ID NO: 352606 - DNA, 201 bp, Homo sapiens
ctgatcattttcttccccttctttctctaattgttttctgaggatatgtactgtttcccctgcagcccacctaaactgttttttactctcacagactttargcctgagaggtggcaaaggcatctgttgtccttgcttcctattgccattttttttcctttttttcatctttttttttttttctcgctctgtcacccaggc

SEQ ID NO: 352607 - DNA, 201 bp, Homo sapiens
accagctaaagaagttttataattgaggaaatttaaaaaactacttctcttttctgttatatattgtctgatcagtggtagaaaaatattaagggtttcamaattatacatttattgagtctagcctatagtatgattggcttaacattttttttatttgcagtacgttaaaggaccttgacacctctgacagaaaagagg

SEQ ID NO: 352608 - DNA, 201 bp, Homo sapiens
aattccttctggagaaagtgggacaaaagctgtattatgatcatgcttataaacatgaagatttctcaattggatgtaacttagtttcttctaaattctgmttttcactgttatctaaagtcaagatggttgatagatatgggttaatgagtggaacacggcttatgcgaaacttcatatttctagaaatatcatctagtg

SEQ ID NO: 352609 - DNA, 201 bp, Homo sapiens
atgagttgataattgttgaatctgggtgataggtatgtagggattcattccttccatctacttttttgggggtaataattaagatataattcacatgccartgtgaattattcaatgtttattaaataactagctatattacctaaagcatgttaaagagggaaaagaagcagaaataattccttctggagaaagtgggac

SEQ ID NO: 352610 - DNA, 201 bp, Homo sapiens
caattttctttttgtgtccaacaattgtatcgatattttgatggagtatgtacagaagagacacccttatggttcttagtactcaccaacttcctgaaagyattcccactgaggattttgagtaagaaaattatgtactcattaccatacttcagaatatgattctggctggagggtgctacctcgtgaggaataaccaaa

SEQ ID NO: 352611 - DNA, 201 bp, Homo sapiens
ttccttctgttccggtgatggctcttacggccacagctaatcccagggtacagaaggacatcctgactcagctgaagattctcagacctcaggtgtaagtygttgcacgtcacgtatttgagaaccctggggcagtgactgccagagctgctacatgttagaatcacctgtggcgctttaacgccaccaccccacccccac

SEQ ID NO: 352612 - DNA, 201 bp, Homo sapiens
catgctgagcttctctttaccttcttgggttttaatggcattgcaagttatcagtataaaaactcatattagttatactaaatagttggaccaagttaagrtattaggttgttatgtagtgtgcattttaaagtaaaacaaatgatagagcttttagaagcatctattatgaaaatgttccttcaagtctgtgccttatga

SEQ ID NO: 352613 - DNA, 201 bp, Homo sapiens
tatatttttttgtgtggccaaataacattttgttgaatggatatacacattttatttatccattcatcacttgatggacatttgagtggtttctgaatttrgctattgtgaataatgctcctgtgaacaatttgtgtacaagtatttattttgagtacccatttttcactctttcgcatatatagctaggagtgaaattgc

SEQ ID NO: 352614 - DNA, 201 bp, Homo sapiens
gattctttgaaatgataaaaaaattgataaaactttagccagatggactaagaaaaaataagacaaattactaaaatcagaagtgaacaaggggacattayaactgatttacagaagtaaaaagatttataagagaatattgtgagcaaatgtatgccaacaaatttgataacataaatgaaatggataaattcctcaaaa

SEQ ID NO: 352615 - DNA, 201 bp, Homo sapiens
ttaggcctgtcctgtggcacttctaatcatgagcttcatcatcattacagctttagaaatcattgacctgggggaaatgagaacaacaaagcattttgttrtaggaaatattgagagcacagaagtcttctgccctctgataacatcaccacgtaataggacacaacagacaggcccggttcagtgttcttcctgcttcca

SEQ ID NO: 352616 - DNA, 201 bp, Homo sapiens
tttcactgtattcatgtactgatttttcttaacgttgattattttcctagacaagtcagcacaaaatttagcatccagaaatctgaaacatgagcgtttcyaaagtcttagttttcctcatacaaaggaaatgatgaagatttttcataaaaaatttggcctgcataattttagaactaatcagctagaggcgatcaatgc

SEQ ID NO: 352617 - DNA, 201 bp, Homo sapiens
tccgcctcctgggttcaaacgattctcctgcctcaacctcccgagtagctgggattacaggcatgcgcccaccatttactttgattatatgtatttttcayataggcacagagctgtggataataaaaatcaatgtccaaatcagtaaaaaaaattctttcaataaaagcactgtgtcatagtttaattagcagaattttt

SEQ ID NO: 352618 - DNA, 201 bp, Homo sapiens
ctttttatggtcagataatattctgttatatggatataacacagtttgtttatctactcatcagctggttagacatttggcttgtttcgtttctttctttytttttttttttttttttttgagacagggtcttactctttcattcaggctagagtgcaatggcatgatctctgctcactgcagaccgtacctcaaacaatc

SEQ ID NO: 352619 - DNA, 201 bp, Homo sapiens
cactgcagcctcaacctcctgggctcaagtgatcttcccacctcaatttcccaagtagctgggactacaggtacacaccagcatgcccagctaatttttgyattttttcgtagagacagagtttcaccatgttgcccagtctggtctcgaactcttggcttcaagcaatcctcctgccttagcctgccagagtgctgggat

SEQ ID NO: 352620 - DNA, 201 bp, Homo sapiens
tggtttgtttctttttggggtttgttttgagacggggtctcgctgtgtcacccgggctggagtgctgtggcatgatcatgactcactgcagcctcaacctyctgggctcaagtgatcttcccacctcaatttcccaagtagctgggactacaggtacacaccagcatgcccagctaatttttgtattttttcgtagagaca

SEQ ID NO: 352621 - DNA, 201 bp, Homo sapiens
tcatctcttttagtggaaaaagatggaaaccatcatacaagagaaactcacttcaataatttgtatagcatggtacattactgtgaaaatataacggaatkcaggagaatacagcttttggcctactttggtgaaaatggatttaatcctgatttttgtaagaaacacccagatgtttcttgtgataattgctgtaaaaca

SEQ ID NO: 352622 - DNA, 201 bp, Homo sapiens
ctggtttggattaaatttgctcaactgctgctatgtcgtggccctggcgaagtcaggtattcctaaggttgaagccacagcccctgtgctgctctcctccygccagtctgtaataatattcttcctctttgggaaatataaggcacacaaaaaaggctttattccatttccttagggccttaaaatatgaactggaagaga

SEQ ID NO: 352623 - DNA, 201 bp, Homo sapiens
gtttatatttcctagatctgtctactaaaagggcctaggagcaatgatatgcaagtagcagatcatatctaatggccaggtcttagattttaaagattttkcctcattaaaataaatgaaggctgtttgaggaaatggtgattctatggctgaagcaggaaaagtaaatgaagaccatgaatgttgtgccaggtaataaga

SEQ ID NO: 352624 - DNA, 201 bp, Homo sapiens
ctcacctatcagctctgcactaattagaaagcttcacaagaagccccattggtgaggctgtgaggaatgcaaacttgtaaaacctcctttgagggagaagwtggcaatccagcagactacacatgcatttgccctttgacccagccattccacttgtagaaatattccctaaagatacattttcttttctttctttccttt

SEQ ID NO: 352625 - DNA, 201 bp, Homo sapiens
agaacatcctaataaggaccaaaatactttgttcctagttattcttcacccttaacagaaataagtaaaacaccgaaagatatgaggccctcctaccaagratttctagtgctttaattaaagaaaatttcacctacactcatactatttttcagtttgctttgtttggtgtcctggaggtttttacatcctggaacagtg

SEQ ID NO: 352626 - DNA, 201 bp, Homo sapiens
cttttttaatgctaatcacagtatagtctttttgaagacatgtcatggcagttagactcaatacatgaggtacaaacagtgcagtgactttgttgacatgmtgacagtactaatagctatgactaagttctcacaagcatgagcagtaacaaccgcaaggcagctgccatttagccatcagcagttctaagacatatcttg

SEQ ID NO: 352627 - DNA, 201 bp, Homo sapiens
agcatgcccagctaatttttgtattttttcgtagagacagagtttcaccatgttgcccagtctggtctcgaactcttggcttcaagcaatcctcctgcctyagcctgccagagtgctgggattacagataagcatgagccactgagcctggcctcagttgttttaattatttttatttaatctctggattaaaatctcaga

SEQ ID NO: 352628 - DNA, 201 bp, Homo sapiens
ttgtctttttacagaacaaacttggtttattgatcctctctattatatatctattattttttactcttaaaaatttttttaaaaatctatttatttatttrttttgagaccggtttatgaaactggctaatttttgtatttttggtagagatgaggtttcaccatgttgccaaggctggtcttgaactcctggcctcaagt

SEQ ID NO: 352629 - DNA, 201 bp, Homo sapiens
ggtgtattttatacatggctagatttactttgctaacatattgtttgggacttttgcatctacatttatgaaaaagaattagcctggagtttttcactgakgagttgcccttacaggacttagtatcagagttatgctagcctcacagaatgagctggggagttggttctttctatattttggaatcgtttatgtaaaact

SEQ ID NO: 352630 - DNA, 201 bp, Homo sapiens
ctcctgccttggcctccaaaagcgctgggattataggtgtgagtcatcatgcccgtggctcttggtgtattttatacatggctagatttactttgctaacrtattgtttgggacttttgcatctacatttatgaaaaagaattagcctggagtttttcactgaggagttgcccttacaggacttagtatcagagttatgct

SEQ ID NO: 352631 - DNA, 201 bp, Homo sapiens
ttttaggtatatattattttctttaaattttttttgagacagggtctcactctgtcacccagactgaagtgcagtggcgtgatctcagctcaccgcaaccrccgccttccaggctcaagcaatattcctgcctcagcctcccgggtagctgggattataggcacgtgccactactgccaccacgttcagctaatttttata

SEQ ID NO: 352632 - DNA, 201 bp, Homo sapiens
atttttttaagtgctaaaaaaaaacttgcagttttatttgtgaagtgtaattttgcctggagatataacattttggtctgggttaaatagctcctaaattytcaactgaaatggatatccttgaaaactgatttatcaagctcctgagagtgaactatcaccttgcttccactaagtaatttgtaaggtctaagatccgca

SEQ ID NO: 352633 - DNA, 201 bp, Homo sapiens
agccggttacagagcagcaggaaaggcttctgcgggtaatgctgcccacagccatcactgtaaacatgccggccccatggttttgtttgtttttattttayttaagggtgggaagggagctgttatcttaaggtctgcaaggaaagtgagatgctggaaggacttggtaatcggctctggcggcttcttccttggctttag

SEQ ID NO: 352634 - DNA, 201 bp, Homo sapiens
tcagccggttacagagcagcaggaaaggcttctgcgggtaatgctgcccacagccatcactgtaaacatgccggccccatggttttgtttgtttttatttyacttaagggtgggaagggagctgttatcttaaggtctgcaaggaaagtgagatgctggaaggacttggtaatcggctctggcggcttcttccttggcttt

SEQ ID NO: 352635 - DNA, 201 bp, Homo sapiens
tcccagattcaagcaattatcccacctcagcctccccagtagctgagactacaggcatgcaccaccacacctgacttatttttgtatttttttggtagagwtggggtttcactatgttggccaggctggtcttgaacttacgacctcaagtgatccacctgcctcagcctcctgaagtgctggggttacaggcatgagcca

SEQ ID NO: 352636 - DNA, 201 bp, Homo sapiens
gccagttctgaacttactcataggatccaaaaggggacctttgggcccaggggttgctggttcccgtaatgcaagtgctcaagggatcagagccctgggtrccagttccagatctgccaccacgtcatgctgtgtggtctctagcaggccaccaatagcctctttgtgaatcaggttcctccaccaaggaaggaacatgtt

SEQ ID NO: 352637 - DNA, 201 bp, Homo sapiens
atgcagaggactcagctggctgcttgttgcctcaacccacatggggaaagagtggaggaagaaaagtttgtgctggaggaagtaacaatttggttatgccrtctagggtggggtgtacaagtctggagtgcagagaagaggctggagctggaaatagaaatgcagcgttctcagtaaagagagggcacaccagtctcagct

SEQ ID NO: 352638 - DNA, 201 bp, Homo sapiens
acccactcctatgatttgtttctctctcataaaggtagactttatggaaacagaaaattccagcagtgtgaaaaaacaaaaagcgttagtagcaaaagtgwctcagagggaagagatggttaaaaaatgtcttggagaacttacagaagtctgcaaatctctggggaaagtttttggtgtccattacttcaatatttttaa

SEQ ID NO: 352639 - DNA, 201 bp, Homo sapiens
aatagcctctttgtgaatcaggttcctccaccaaggaaggaacatgttatctgacaaacatgtctaaagataaaatttaagactagtgtttaaatgttttrgagaaatgagcatgcagctagaatgttattattgttagtcattgatagaacctgcctgagtgcatcattatcagacgttcccggagtcacgttaggcctg

SEQ ID NO: 352640 - DNA, 201 bp, Homo sapiens
gtcttggttttcgtctgtcatatgggggaaatggtctcttctacttcctggcgtttttgttaggattaaacgacttaatatatgcaataataaatgcttcraaggctacctgttacatagtacacagtaagggttctgttatcattacccagagaagcggatgaaattgtccccattttagacatggagaatctgaagtac

SEQ ID NO: 352641 - DNA, 201 bp, Homo sapiens
aaagggaagcctggattccaggcagatcaaaacaacaggtagggctcttgcctgtccaacgcttaacaatacactttgtgttggcacagtgagctttgcasatgaagttagttaaaaataaaatcatagttaactgataaacctttgttccagccaatgaccttgcttaccccaagaaatattatttattaaatattatga

SEQ ID NO: 352642 - DNA, 201 bp, Homo sapiens
aacctgtggctgtatgttataaaatggcagatttgtagtttcttttcttctaatgtcataaccttgtttactggttagccagcatttgcctgaacaactcrtgaactcatgctctcacaagggcgttcattccccattttgaaaatgctacttgttagaaatcatctctcatactgagccaagatctgcaactttaattct

SEQ ID NO: 352643 - DNA, 201 bp, Homo sapiens
gagatataacattttggtctgggttaaatagctcctaaattctcaactgaaatggatatccttgaaaactgatttatcaagctcctgagagtgaactatcmccttgcttccactaagtaatttgtaaggtctaagatccgcagtccctggtgtttttttttttttttttttttttttttttttttttggtataagtagctc

SEQ ID NO: 352644 - DNA, 201 bp, Homo sapiens
ctggtagcattcatttctctgattattagtgaagatgagtaccctgatgtgtttatgggctatttcctcttttttacagtccctttttttttttttgaggyggagtctcactctgttgcccaggctggagtgcagtggcaccatctcggctcactgcaagctccgcctcccgggttcacgccattcacctgcctcagcctc

SEQ ID NO: 352645 - DNA, 201 bp, Homo sapiens
ctctgattattagtgaagatgagtaccctgatgtgtttatgggctatttcctcttttttacagtccctttttttttttttgaggcggagtctcactctgtygcccaggctggagtgcagtggcaccatctcggctcactgcaagctccgcctcccgggttcacgccattcacctgcctcagcctcccaagtcccaagtagc

SEQ ID NO: 352646 - DNA, 201 bp, Homo sapiens
gctaatactttatatttacatttttattttccaatctggtatattcatgtatagtagtattttctggtagcattcatttctctgattattagtgaagatgwgtaccctgatgtgtttatgggctatttcctcttttttacagtccctttttttttttttgaggcggagtctcactctgttgcccaggctggagtgcagtgg

SEQ ID NO: 352647 - DNA, 201 bp, Homo sapiens
taggctgaggtgggaggaccacttgagcccgggaggtcgaggcagccgtgagctgttgcactccagcctgggtgacagagtgaaaccctgtttcaaaaaamaaaacaaaacaaaacaaaacaaaacaaaacaaaaactcatacagctcaacaaataacccatttagaaaatagagaaaggactcgaatagacacttcacca

SEQ ID NO: 352648 - DNA, 201 bp, Homo sapiens
ttagaaaaatttcacaattttttcataaatttacttagtgtctgtatattctggtgagctgttgtgtttatattccctgaacatttgttcactggaactgratgttctttatgtgtttttaatattaatcatttatctgttatttgttgctaatttttcttttcttttttctttttttgagatggagtctcatcctgttgc

SEQ ID NO: 352649 - DNA, 201 bp, Homo sapiens
tggagtgcagtggggtgatcatggctcactgaaacctcgacctcccgggctcaaatgatccttcccacctcagcctcctgagtaactgggactacaggcaygtgccacctcactcagctaatttttgtgtttttttgtagagacaggtcgtactttgttgcccaggctgctctgcagctcctgggctcaagcgatcctccc

SEQ ID NO: 352650 - DNA, 201 bp, Homo sapiens
atagaataaagaggtccaagataatcgtagaataatcctaggacttcagtgctgaaagcccctaagggtctccactacctgtaggataaaatctaaactcsttggcatgataccagaggcttttgagcattctgtatcgctaacacatactattctacctcagcctttgtaccactagttcatagactactcttcttcaca

SEQ ID NO: 352651 - DNA, 201 bp, Homo sapiens
tagaatctaacttttaagaaaactttattaaaatgtaattcacacactataaaattcatccatttaaagggtacaatttagtgggttgctttttttctgtrttttcacagaattgtacaaccatccccaatatctaagtttacagcatttttatcaccccagcgagaaacctggtacccattagcagctgctccgcatctt

SEQ ID NO: 352652 - DNA, 201 bp, Homo sapiens
tctcactgtcaccccagctggagcagtggcacagaattgctcactgcagcctcgaactcctgggctcaagggatactcccacctcagcctccctgagtagytgggactgtaggtgtgtgccaccatgcctggctaaagatgggatctccctgtgttgcccaggctagtctcaaactcctgggctcaagccatccccctgcc

SEQ ID NO: 352653 - DNA, 201 bp, Homo sapiens
cttcgttttactgaggaaaccaagagttaaaaaatcaggaaaagtgttagatgtgcagtagaacatcatcatgctgggaagttctacacatccgcttcagracaggtggtattacctatgagcaggaagggaagggaaaaaggtaaggggaatgagtgatagtttattgttttgatttttaaatttttatctgttttttcc

SEQ ID NO: 352654 - DNA, 201 bp, Homo sapiens
gctggagtgcaatgacacgatctctgcaatctccacctcccgagttcaagtgattctcccgcctcagcctcctgagtagctgggactacaggcacttgcckccatgcccggctaatttttctatttttagtagagacggggtttcaccatgttggccaggctggtctcaaactcctaacctcaggtgatccacccgcccca

SEQ ID NO: 352655 - DNA, 201 bp, Homo sapiens
ctaaagatgggatctccctgtgttgcccaggctagtctcaaactcctgggctcaagccatccccctgcctcagcctcccaaagtgctgggattataggcgygagccaccgctcctggcctgcttatttatattcttttgtaatggcatgataacttctttcatatatgtaggagaaaattttaatcattttccagattgaa

SEQ ID NO: 352656 - DNA, 201 bp, Homo sapiens
ttcaatgccactcaccatgacaggtaccttataagtatagtttacagtcctatcagtaacctggagaagtagttatttccttcgttttactgaggaaaccmagagttaaaaaatcaggaaaagtgttagatgtgcagtagaacatcatcatgctgggaagttctacacatccgcttcaggacaggtggtattacctatgag

SEQ ID NO: 352657 - DNA, 201 bp, Homo sapiens
ccttgtgccacccatgcagataaataacactggtgtgtcactgtcaagattaagggacaggaattcgagagactgcatgagagatcagaagatgaagaagsgggtaggcaaaagtattctgtttggggaatagtaaatagaattaattaaatcaacattttgttagctgggctgcttatactgtcagacagtagcttataa

SEQ ID NO: 352658 - DNA, 201 bp, Homo sapiens
atgtactacacaaatatatacacctactatgtacccacaaaaatttaaaaattaataaatactagatgcacttaaatatttaaaatttttaaattaggtgrgtgtgatggcctgcacctgttatctcagctagtcaggaggctgaggcaggaggatcacttgagcccaggagtttgaggctgcagtgaaccatgattgcac

SEQ ID NO: 352659 - DNA, 201 bp, Homo sapiens
tgacaactgagttcttttgggaggccctgctttttggcagataagagatttcagatgccttctgctcaaaataatttttatgccacagtggcatattctgkaccccttcagagacaattctgaaagctctggaaagaaaacaggaacccaaaccagactgacatcagcttaatatcagcaatcctggagactagcaggcaa

SEQ ID NO: 352660 - DNA, 201 bp, Homo sapiens
tcctgatttttgtaagaaacacccagatgtttcttgtgataattgctgtaaaacaaaggtaaaaaaagaagttttaaaattctttataattaaattttttwtctcttactttaaaaatgtagatacaaattagattgcaaaaggtggtctccgacagattaacaggggaaagacagcttccttccagtagtaatttggaat

SEQ ID NO: 352661 - DNA, 201 bp, Homo sapiens
tggtgaaaatggatttaatcctgatttttgtaagaaacacccagatgtttcttgtgataattgctgtaaaacaaaggtaaaaaaagaagttttaaaattcyttataattaaattttttttctcttactttaaaaatgtagatacaaattagattgcaaaaggtggtctccgacagattaacaggggaaagacagcttcctt

SEQ ID NO: 352662 - DNA, 201 bp, Homo sapiens
attcatgagatagaataaaacttggccattattcttcacaaagaatgattgtggcttgaagttttaaaagcgcagaaataaagaaggaaatcacaattaawcaaagccacttttcccaatttcaagaaataagagctttcagaaagagttggcagccttgcatcctcatctggaggctgcaggcggtgcctcacagccctg

SEQ ID NO: 352663 - DNA, 201 bp, Homo sapiens; identical to SEQ ID NO: 75431

SEQ ID NO: 352664 - DNA, 201 bp, Homo sapiens
cattagcagtcaattcctactttctcactttccccattcttaggcaacccctcatctactttctgtctctgtaggtttgcgcctattctggacatttcatrtaaatggaatcacataacatgtggccttttgtgactgacttctttcactgagcatgtttttaaggttcctccatgttgtagcctgttttcagtatttcat

SEQ ID NO: 352665 - DNA, 201 bp, Homo sapiens
ctcgttagattcatgagatagaataaaacttggccattattcttcacaaagaatgattgtggcttgaagttttaaaagcgcagaaataaagaaggaaatcmcaattaaacaaagccacttttcccaatttcaagaaataagagctttcagaaagagttggcagccttgcatcctcatctggaggctgcaggcggtgcctca

SEQ ID NO: 352666 - DNA, 201 bp, Homo sapiens
ccagctttgccactcctggccacccagctccaccccatgcatgctcaccccacagctgccttgctctggactgtgcaagtccagtcattccggggtgcctrtcagcagggagctggggccttacagcaaggtgtttcacttcttttatttggtcagaatagatgaggacatgtggacctcagctcctcttgcaggctctgg

SEQ ID NO: 352667 - DNA, 201 bp, Homo sapiens
gaactccttaagtgataaatatatctcagtggtttgtttctttttggggtttgttttgagacggggtctcgctgtgtcacccgggctggagtgctgtggcrtgatcatgactcactgcagcctcaacctcctgggctcaagtgatcttcccacctcaatttcccaagtagctgggactacaggtacacaccagcatgccca

SEQ ID NO: 352668 - DNA, 201 bp, Homo sapiens
tgccactcctggccacccagctccaccccatgcatgctcaccccacagctgccttgctctggactgtgcaagtccagtcattccggggtgcctatcagcarggagctggggccttacagcaaggtgtttcacttcttttatttggtcagaatagatgaggacatgtggacctcagctcctcttgcaggctctggttgtagg

SEQ ID NO: 352669 - DNA, 201 bp, Homo sapiens
atcacttgaggccaggagttcaagaccagcctggtcaacagagtgagacccccatctctaaaaaataaaaaaataaaaaacaaacaacaacaaagaaagaytggccttggtttttaaatgttgaagctcagaagtgggtatatggaggttcatgatactattctctttccttttttaaaggtttaattttccatgataaat

SEQ ID NO: 352670 - DNA, 201 bp, Homo sapiens
agggaatccctttactgagcagagggctggagtagtgtccctaatgcccatccagttaggagattctatagagtccctgagtaggatccaggaaggctccrtatacagctggtagtagtagaacagttgcagcagccaatgtttattgagagaatattatacactaagtgctttacatacttggcttatttcatccaactt

SEQ ID NO: 352671 - DNA, 201 bp, Homo sapiens
tattctgagaggcccagatgtctcactgagcccactcaagggctgcagctgggcctcaggaagagcatggaaccagggctggaaattgtcagcacactgtscatggcaggtttcagcttctcttggtgcatttgcttcacttctctctccgcagactttctctgctccacagtctaaaggacaaagggtgctgcaaagtta

SEQ ID NO: 352672 - DNA, 201 bp, Homo sapiens
gggcctcaggaagagcatggaaccagggctggaaattgtcagcacactgtccatggcaggtttcagcttctcttggtgcatttgcttcacttctctctccrcagactttctctgctccacagtctaaaggacaaagggtgctgcaaagttaataagctaaagtcctaagcaaccatagggactggctaggctcagtcccag

SEQ ID NO: 352673 - DNA, 201 bp, Homo sapiens
gagaaagaatccgtctcaaaaaaagaaacaaaaaacgacaacaaaaaaatgtggcattcatcagctgggcagacacccacatagctgtgagctcaccaacrgtggacattcagatagtcaccttttctgagcttcaaactagatatataagtaacacaaatggctgcctctacaggcaactgtggaaggagtcaaatccct

SEQ ID NO: 352674 - DNA, 201 bp, Homo sapiens
aaattagctggtcatggtggcgcctgcctgtagtcccagctactcaggaggctgaggcagaagaatcgcttgaacctgggaggtggaggctgcagtgagcsgagatcgcgccactgcactccagcctgggcggcagaatgagactctgtttaaaaaaaaaaaaaaatgtggcggctgggcgcagtggctcactcctgtaat

SEQ ID NO: 352675 - DNA, 201 bp, Homo sapiens
actggtgcaacgattataagagttactcggaaaacctttgccacgtagactgtcaaggtctggccagggccccagggtgggagagatgagagcagcaaccrggctctgctcacagaacttctcttcccacccacagcctgggaatggccccagaaatatggttcaaaaaatcagggaatccctttactgagcagagggctg

SEQ ID NO: 352676 - DNA, 201 bp, Homo sapiens
tgccttcgcacactgaccgatgtccctcggctcctcgcctgaagacccccgctcactaggcgggacatacctctgtggtgttttggcatttcctctccctrgaaacctcccacaaactttgagtgaaccactatctaccctggttaggaagaatagtagtgaacaggcccaaatctcaggcctcttgccccttctgcccac

SEQ ID NO: 352677 - DNA, 201 bp, Homo sapiens
gagttcaagaccagcctggtcaacagagtgagacccccatctctaaaaaataaaaaaataaaaaacaaacaacaacaaagaaagattggccttggtttttraatgttgaagctcagaagtgggtatatggaggttcatgatactattctctttccttttttaaaggtttaattttccatgataaataaaaatctataaaat

SEQ ID NO: 352678 - DNA, 201 bp, Homo sapiens
cccatcccaatacccaaatactacccatagctgggtgcccatataagaggacctatggatgaaatgagattggccaggtgtggtggctcacacctgtaatyccagcactttgggaggctgagatgggaggatcacttgaggccaggagttcaagaccagcctggtcaacagagtgagacccccatctctaaaaaataaaaa

SEQ ID NO: 352679 - DNA, 201 bp, Homo sapiens
agggggcttaatgggcagggatggagcttcctgcttcccgaggctcagtgacatctatctctgagggaccctcctgagtcagtgtggagtaggttgtttgkctgaaattctaatttaacagggcatcttgtaaattttatttgccaaatctgtcagctctgggggtagaatgatgggagaagcaaaagaatggcccgaagc

SEQ ID NO: 352680 - DNA, 201 bp, Homo sapiens
ttggtcccctctaaatcctgaccttcttctccctactctaagggctgtgcctggcttttgtggaaagcaagttcaacatatcaaagataaatgaaaatgcrgatggaagctttgactatggcctcttccagatcaacagccactactggtgcaacgattataagagttactcggaaaacctttgccacgtagactgtcaag

SEQ ID NO: 352681 - DNA, 201 bp, Homo sapiens
cccagccatttctcctctgctagtcatgtcctatatggccagcttctttctctcctgttcatctttcaaagccaagttcaaaaagcagcccccttcaaaamagcctttcccaacacgctgtattcactcaagttattgtctgagcacttattatgtaccaacaactgttttagacactggggctgtagagataaacaaatt

SEQ ID NO: 352682 - DNA, 201 bp, Homo sapiens
catctttggggctgtcttctgtgccctcacaggttttctcttcctccctttcagatctgctgaatcccaaccttcttgcaggcatccactgcgcaaaaagkattgtgtccggagcacgggggatgaacaactggtgaggaggacacggtgggactcagcgggcagagccccacgaaggaggacgtgacagagaaaagggca

SEQ ID NO: 352683 - DNA, 201 bp, Homo sapiens
agtagagacagggtttcaccgtgttagccaggatggtctcgatctcctgacctcgtgatccgcccgcctcagcctcccaaagtgctgggattacaggcatragccaccgcgcccggcatacatatttttaagcttgtacatatttttaagcttgtacatacaagcttattacaaggcctgtattacaagcttaggtacata

SEQ ID NO: 352684 - DNA, 201 bp, Homo sapiens
tctaaatgggccccctgggagacagcctttgcctcaactggaagcctctaggtggcatagggctgtccagggagggctggtgtctgcctccatctttgggrctgtcttctgtgccctcacaggttttctcttcctccctttcagatctgctgaatcccaaccttcttgcaggcatccactgcgcaaaaaggattgtgtccg

SEQ ID NO: 352685 - DNA, 201 bp, Homo sapiens
gggtcatgtgtgtggaagagttactgagtgtgaggcaagaaccatgtcttttttctccgcagggtagaatggaggttgcactgttcaggccggccactctyctactggctgacaggatgccgcctgagatgaaacagggtgcgggtgcaccgtggagtcattccaagactcctgtcctcactcagggattcttcatttctt

SEQ ID NO: 352686 - DNA, 201 bp, Homo sapiens
gtcccctctaaatcctgaccttcttctccctactctaagggctgtgcctggcttttgtggaaagcaagttcaacatatcaaagataaatgaaaatgcagayggaagctttgactatggcctcttccagatcaacagccactactggtgcaacgattataagagttactcggaaaacctttgccacgtagactgtcaaggtc

SEQ ID NO: 352687 - DNA, 201 bp, Homo sapiens
accaagaactgggtcatgtgtgtggaagagttactgagtgtgaggcaagaaccatgtcttttttctccgcagggtagaatggaggttgcactgttcaggcsggccactcttctactggctgacaggatgccgcctgagatgaaacagggtgcgggtgcaccgtggagtcattccaagactcctgtcctcactcagggattc

SEQ ID NO: 352688 - DNA, 201 bp, Homo sapiens; identical to SEQ ID NO: 75459

SEQ ID NO: 352689 - DNA, 201 bp, Homo sapiens
atctgactggactgattgctgaagagaagggcctggtggtagacatggatggctttgaagaggagaggaaactggcccaggtaaagaacttggagagtgarcaggaaacccaacaccttccaacccagcaccacttggctgcagactgagcatgagtttccttccattaaagtctttgaagtgctttttcccctagatcag

SEQ ID NO: 352690 - DNA, 201 bp, Homo sapiens; identical to SEQ ID NO: 122866

SEQ ID NO: 352691 - DNA, 201 bp, Homo sapiens; identical to SEQ ID NO: 122868

SEQ ID NO: 352692 - DNA, 201 bp, Homo sapiens
cgtctccaaaaaaaaaaaaaaaaaaaaaatgtgaatctggccatctaccccctcctgtctccatgtggaggagggtaagacatagattcgctgtggcatcrgggcccccagcgctgatccatgtactcctaggggcgtgcttagtctgaggccgtgcagtagaggatgggtgctctttcatgggaactggtgtgtctgact

SEQ ID NO: 352693 - DNA, 201 bp, Homo sapiens
tacgaccggattggtggtcgggacgccgcacatcttgtcaaccaggacgaccctaatgtgctggagatctggaaccttgtgttcatccagtataacaggtrgccttgggttcctactccattcctttccttgagctgagcaggggaggaggaactcggagctgtgtagctctcttctcagctaaaagctcatttctttatt

SEQ ID NO: 352694 - DNA, 201 bp, Homo sapiens
ctaatgctcctcaatcctccaggaacctccttgggcaaggtagcgccagaaagtctgcttcctaaagggctgcctcctgattcttatctatagggcacagrtgcccgaccatacactgggaaagttggtgctgaggatgccgatgggattgacatggcctaccgggtgctggctgaccacgctcggaccatcactgtggca

SEQ ID NO: 352695 - DNA, 201 bp, Homo sapiens
agtggcgcgcgtctgtaatcccagctacttgggaggctggggcaggagaatcacttgaacctgggaggcagaggttgcagtgagccgagatcgcaccactrcgttccagcttgggtgacggggcgagactccgtctccaaaaaaaaaaaaaaaaaaaaaatgtgaatctggccatctaccccctcctgtctccatgtggag

SEQ ID NO: 352696 - DNA, 201 bp, Homo sapiens
ttcaagcagccattgaccatatgtaaatgaacaggtgtggctgtgttccaataaacctgtttatggctgggcacagtggctcatgcctgtaatcccggcaytttgggaggccgaggcgagcagatcacctgaggtcgggagttcgagaccagcctgaccaacatggagaaaccctgtctctactaaaaatacaaaattagc

SEQ ID NO: 352697 - DNA, 201 bp, Homo sapiens
gtccgttaagagggatggagtgggagagggcatactgttaagcagctttttgttgctgttttttgagacggagtctcactctgtcacccacgctggagtgmaatagagtgatcttggctcactgcaacctctgtctcctgggttcaagcgattctcctgtctcagccttccgaatagctgggattacaggtgcacaccgcc

SEQ ID NO: 352698 - DNA, 201 bp, Homo sapiens
cagctaaaagctcatttctttatttctcagattacctgtctgatctctggaacaaggatgggcctattctttcatgaactaaaccttatcgcacataatascttcttgcgagctattcctataatgtcatgcttgctgtacttcgggctgctgttttttttttttgtttttttgagacagagttttcctcttgttacccag

SEQ ID NO: 352699 - DNA, 201 bp, Homo sapiens
attcttatctatagggcacaggtgcccgaccatacactgggaaagttggtgctgaggatgccgatgggattgacatggcctaccgggtgctggctgaccaygctcggaccatcactgtggcactggctgatggtggccggcctgacaacacagggcgtgggtaagtatgctgcacactgggtggtgtttggagcggcacca

SEQ ID NO: 352700 - DNA, 201 bp, Homo sapiens
gtgatctgtgctcactgcaagctccgccccccaggttcatgccattctcctgcctcagcctcccaagtagctgggactacaggtgcccaccaccaagtacrgctaatttttttgtatttttagtagagatggggtttcaccgtgttagccaggatggtctcaatctcctgaccttgtgatccatccgcctcggcctctcaa

SEQ ID NO: 352701 - DNA, 201 bp, Homo sapiens
tatgacctggaatatgtggtcattttgcatctcagggttccttttgagatgcacatggggaggagtgaggctagagaatcgcttgaacccaggaggtggargttgcagtgacctgagatcactccactgcactccagcctgggcgacagagtaattatctttagatgcattaatatctttatttatttatttatttatttt

SEQ ID NO: 352702 - DNA, 201 bp, Homo sapiens
gagtctcgctctgtcacccaggctggagtgcagtggcgcgatctcagctcactgcaagctccgcctcccaggttcacgccattctcctgcctcagcctccygagtagctgggactacaggcgcccaccaccacgcccggctaattttttgtattttttagtagagacggggtttcaccgtgttagccagggtggtctcgat

SEQ ID NO: 352703 - DNA, 201 bp, Homo sapiens
tcacccaggctggagtgcagtggcgcgatctcagctcactgcaagctccgcctcccaggttcacgccattctcctgcctcagcctcccgagtagctgggaytacaggcgcccaccaccacgcccggctaattttttgtattttttagtagagacggggtttcaccgtgttagccagggtggtctcgatctcctgacctcgt

SEQ ID NO: 352704 - DNA, 201 bp, Homo sapiens
gctggagtgcagtggcgcgatctcagctcactgcaagctccgcctcccaggttcacgccattctcctgcctcagcctcccgagtagctgggactacaggcrcccaccaccacgcccggctaattttttgtattttttagtagagacggggtttcaccgtgttagccagggtggtctcgatctcctgacctcgtgatccgcc

SEQ ID NO: 352705 - DNA, 201 bp, Homo sapiens
ggagtgcagtggcgcgatctcagctcactgcaagctccgcctcccaggttcacgccattctcctgcctcagcctcccgagtagctgggactacaggcgccyaccaccacgcccggctaattttttgtattttttagtagagacggggtttcaccgtgttagccagggtggtctcgatctcctgacctcgtgatccgcctgc

SEQ ID NO: 352706 - DNA, 201 bp, Homo sapiens
gagtgcagtggcgcgatctcagctcactgcaagctccgcctcccaggttcacgccattctcctgcctcagcctcccgagtagctgggactacaggcgcccrccaccacgcccggctaattttttgtattttttagtagagacggggtttcaccgtgttagccagggtggtctcgatctcctgacctcgtgatccgcctgcc

SEQ ID NO: 352707 - DNA, 201 bp, Homo sapiens
ttgacgctggtttttaaaatcctcttttaccttgacttcatgtactgtatatctacactttaaaagtgtagcttttaaaagataagcaagcacaatcttttgtgtgtgtgtgtgtgtgtgtgtgtgtgtgtgtgtcacccaggctggagtgcagtggcatgatcacagctcactgcagcctcaacttcctgggctcaagtg

SEQ ID NO: 352708 - DNA, 201 bp, Homo sapiens
tgacgctggtttttaaaatcctcttttaccttgacttcatgtactgtatatctacactttaaaagtgtagcttttaaaagataagcaagcacaatcttttgtgtgtgtgtgtgtgtgtgtgtgtgtgtgtgtgtcacccaggctggagtgcagtggcatgatcacagctcactgcagcctcaacttcctgggctcaagtga

SEQ ID NO: 352709 - DNA, 201 bp, Homo sapiens
agtgatgggattacaggtgtgagccaccatgcccggcctctttatgaaacttaaagccatctttcgttattgtttccttgtcttgggcaggtggaagaatcccccaccccttttttaagggatgaagggagtttcagctagtgtcacagagttgccactatattaaatctctgctgctgagtacagatgataaggattgta

SEQ ID NO: 352710 - DNA, 201 bp, Homo sapiens
agatgattgaggcagccaaggtaggatgggcgacggctgaatgccccccctccccacaccgtcactgtctgtccacagtcttagcagtgcggtgctctcactctgttgtatcagattcgtcctgcacgtagatttgcttaaagcaggctgggcacggtggctcacgcctgtaatcccagcactttgggaggccgaggcggg

SEQ ID NO: 352711 - DNA, 201 bp, Homo sapiens
ggggcaggagaatcacttgaacctgggaggcagaggttgcagtgagccgagatcgcaccactgcgttccagcttgggtgacggggcgagactccgtctccaaaaaaaaaaaaaaaaaaaaaatgtgaatctggccatctaccccctcctgtctccatgtggaggagggtaagacatagattcgctgtggcatcggggcccc

SEQ ID NO: 352712 - DNA, 201 bp, Homo sapiens
tgacctcaggtgatccacccacctcagcctcccaaagtgctgggattatagacgtgagccaccttgcctggcctaaatttatttatttatatgcagagatgggggtctcaccaagttgttcaggctggtctcgagctcatggcctcaagtaatcctcctgccttagctgcccaaagtggtgtgattacaggtgtgagctac

SEQ ID NO: 352713 - DNA, 201 bp, Homo sapiens; identical to SEQ ID NO: 122865

SEQ ID NO: 352714 - DNA, 201 bp, Homo sapiens
cagcaaccccaaccagcctcttgtcatcctggagatggagagcggcgcctcagccaaggcaacccaggggccagggtcccctcccctagggctcatcagcyctctggtggctgacatgtggcctctgtggctctgagcgaagtggttgcctaagggcccacggtctgggattgagattgggaggagcagcagctccctgca

SEQ ID NO: 352715 - DNA, 201 bp, Homo sapiens
gctaaaattaatgaccttggggaatgcgaaagaagcaggcttaggataaaagaaagttcctgaaagaggtgttgctttgggtaggattccaagggactcamgacaaaaccctcagctgggaacgttggggactagtttttgcctcttacagatatgtgttgagacggattctccgccgagctgtccgatacgcccatgaaa

SEQ ID NO: 352716 - DNA, 201 bp, Homo sapiens
ccctcccaaagtgttgggattacaggcgtgagccatcgtgcctggctgtccctctttttttctaattcctagtctcgggcctgacacagagcagatgctcratacatatttgtttaatgaacaaacatccagcagcagtgtgcttggtgtgctggggtgttgaacctcttgaggttggcatgggaaggaagaacagatggg

SEQ ID NO: 352717 - DNA, 201 bp, Homo sapiens; identical to SEQ ID NO: 75462

SEQ ID NO: 352718 - DNA, 201 bp, Homo sapiens; identical to SEQ ID NO: 75463

SEQ ID NO: 352719 - DNA, 201 bp, Homo sapiens
tcccaaagtgctaggattacagatgtgagccactgtgcccagccaatcattctgttgttgaaagccaaaacaagtctttttttttttactttatatagttktaaaagttacacgtgtgttgtaaaaattcaaaccttatagaaatgtagaaaatagaaagtggaagttccctcaatcatcattaatagtttaatatcccat

SEQ ID NO: 352720 - DNA, 201 bp, Homo sapiens
ctcccaaagtgctgggattacaggtgtgagccaccgcacgtggcgtaacgttttccattttatagattgcttccaaatacagtatagcttttgatcctcamaacacctcagttgagtaggcagggtagatactgcttttttacagaaaaggaactgaactcaggcaaaagtgaattaaggttacggttgggtctggaattc

SEQ ID NO: 352721 - DNA, 201 bp, Homo sapiens
accgtgttagccaggatgatctcgatctcctgacctcgtgatctgcccgccgtggcctcccaaagtgctgggattacaggcatgagtcaccacgcctggcycatatctttagatccattcgttgcttcttaatatgttcaataattctgttgtttatgtttgtttgtttgtttttgagacagagtctcagtctgtcaccta

SEQ ID NO: 352722 - DNA, 201 bp, Homo sapiens
cagggtgagggtaggtattgaccagccctgggaatctctcttactgacaggcaggacctgggatcacaggcatcaagtacacatctggtctgtccatcttycctccctctatgggtaactgaatgtgaaaggaaaacaaaccagcgtttaccctagggaagccttgacgggtatttgtgggtatgttactgagtcttgtgc

SEQ ID NO: 352723 - DNA, 201 bp, Homo sapiens
tttttttagacggagtctccctcagccacccaggctggagtgcagtggcgcaatttcggcttactgcaaccactatttcccaggttcaagcgattctcccrtctcagccttctgagtagctgggattacaggcactcgccatcattcccggctaatttttgtattttagtagagatggggtttcaccatattggccaggct

SEQ ID NO: 352724 - DNA, 201 bp, Homo sapiens
tgaagagaagggcctggtggtagacatggatggctttgaagaggagaggaaactggcccaggtaaagaacttggagagtgaacaggaaacccaacaccttscaacccagcaccacttggctgcagactgagcatgagtttccttccattaaagtctttgaagtgctttttcccctagatcagtggttctcaagtgggggcg

SEQ ID NO: 352725 - DNA, 201 bp, Homo sapiens; identical to SEQ ID NO: 75465

SEQ ID NO: 352726 - DNA, 201 bp, Homo sapiens
agttaagaaacaaagccagtgcaatgactcatgcctgtaatcccagcacttcgggatgccagggtgggctgatcagttgagctctggtgtttgagaccagyctgggcaacatggcgaaaccctgtctctaccagaaatacaaaaattagctaggtgtggtggcgcatgcctgtagtcccagctatttgtggggctgaggca

SEQ ID NO: 352727 - DNA, 201 bp, Homo sapiens
gatgattgaggcagccaaggtaggatgggcgacggctgaatgccccccctccccacaccgtcactgtctgtccacagtcttagcagtgcggtgctctcactctgttgtatcagattcgtcctgcacgtagatttgcttaaagcaggctgggcacggtggctcacgcctgtaatcccagcactttgggaggccgaggcgggc

SEQ ID NO: 352728 - DNA, 201 bp, Homo sapiens
ccccgcgtggcctggagaagcccagtctgggctggagcgggagctggacagtgtggccttgcgttcgcccccgggagcgctgcgagtgtcgcggcctcggrtggatttgctgagcaccaatacctcacggttgccaacctggggttttagctcccttggttttaatcccctaggggcgggtgggggcacgggaggaaggat

SEQ ID NO: 352729 - DNA, 201 bp, Homo sapiens
tcggctcgctgcagccaccgcctcccaggttcaagcaattctcctgactcagcctcccaagtagctgggattacaggcgcccgctaccatgcccagctaatttttttttttttttttttttttttgagacggagtctcgctctgtcgcccaggctggagtgcagtggcgcgatctcggctcactgcaagctccgcctcccg

SEQ ID NO: 352730 - DNA, 201 bp, Homo sapiens
cggctcgctgcagccaccgcctcccaggttcaagcaattctcctgactcagcctcccaagtagctgggattacaggcgcccgctaccatgcccagctaatttttttttttttttttttttttttgagacggagtctcgctctgtcgcccaggctggagtgcagtggcgcgatctcggctcactgcaagctccgcctcccgg

SEQ ID NO: 352731 - DNA, 201 bp, Homo sapiens
tagagacggggtttcaccgtgttagccaggatggtctcgatctcctgacctcgtgatccgcccgcctcggcctcccaaagtgctgggattacaggcgtgarccaccgcgcccggcctaatttttgtatttttagtagagatggggtttcaccatgttggccaggctgttctcgaactcctgacctcaggtgatccacccgc

SEQ ID NO: 352732 - DNA, 201 bp, Homo sapiens
tcaggtgatccacccgctttggcctcccaaagtgctaggattacagatgtgagccactgtgcccagccaatcattctgttgttgaaagccaaaacaagtctttttttttttactttatatagttttaaaagttacacgtgtgttgtaaaaattcaaaccttatagaaatgtagaaaatagaaagtggaagttccctcaatc

SEQ ID NO: 352733 - DNA, 201 bp, Homo sapiens
cctttgtcaggctggatgacaccaaaatcctcccaggcaacatgaaggataacttctgggagatgggtgacacgggcccctgtggtccttgcagtgagatscactacgaccggattggtggtcgggacgccgcacatcttgtcaaccaggacgaccctaatgtgctggagatctggaaccttgtgttcatccagtataaca

SEQ ID NO: 352734 - DNA, 201 bp, Homo sapiens
cggagagagagagagagatagaaagcgagcaagcaaccaaccaagccagtgaacgataaacttccagttctaactttctaaggcaatttctaagccctgayccagtactattttctgcatggaatcaggtcactaagagagaatgtgttctgttaatgtctgctaacattcatgaatgtgagaaagaagagcggctggagc

SEQ ID NO: 352735 - DNA, 201 bp, Homo sapiens
gtactattttctgcatggaatcaggtcactaagagagaatgtgttctgttaatgtctgctaacattcatgaatgtgagaaagaagagcggctggagcattkaccagaacaatgatcataaatgtccatcatgcaatgtcaggttctactagtctaacctattaaacactttcctcctgctgtgtgaaggggccagtgagag

SEQ ID NO: 352736 - DNA, 201 bp, Homo sapiens
cgggtttcacctccaggtgaacaagataattctactaagtccatgaccacagagtactgtcctaaccccagccagccttctcccaaatacaagaagtatgygtgcatcagtcatccttgttaacagaggcactctcagcccagacccatgtacagatccataaacagcatcatcgccataaatgaaagcagtgtgatatgg

SEQ ID NO: 352737 - DNA, 201 bp, Homo sapiens
tttattctctcacaggtcaggaggccagaagtccaaattcaaggcattagcagggttggttccttctggaggctctaaggggggaatctgttccatgcatstcttttagcttctagtggttgccatcaatccttggcttcattggcttgtagacacatccctccaatctgtgcccccatcttcatatcaccttgttctcta

SEQ ID NO: 352738 - DNA, 201 bp, Homo sapiens
cttgaagattgtgccagttttgaataatgtgagatgtcaagcatcacacttacccaaaatgctacacctctgtaaatggatttaaataagcagaaccatakacaactctccctgcctttcctgcaggctcagcgatatgaggcagcatcgacaatttatggaccgcacacattatctgcttacattcagctcttcagaaac

SEQ ID NO: 352739 - DNA, 201 bp, Homo sapiens
tcagtattgttactgaaatgtgtatttctttcttcatttctgtgagttttcagtttatgttacacagacatttataattattacattttttgaatagagtrtagattcttaattcataagttttatagttacaaaaccttttaccccagattatgcatatgaagtttatttttgttttttactgctttgtgtgtgtgtgtg

SEQ ID NO: 352740 - DNA, 201 bp, Homo sapiens
tatttacttttgtttttagagctatacaaggattaagcaccatttttatttttatttttattttttgagacagagtttcactctatcacccaagctggagwgcagtggcacgatctcagctcattgaaacctctgcctcccaggttcagcaactcttgtgcctcagtctcctgagtagctgaaattacaggtgcacacccc

SEQ ID NO: 352741 - DNA, 201 bp, Homo sapiens
caccaaaagcaatagcaacaaaagccaacattggcaaatgggatctaattaaactaaagagcttctgcacagcaaaaggaactatcatcagagtgaacagrcaacctacagaatattttatatcctctttttattgcctgcaaatgattttgaatagtttgccagagtggatttaatgtttgtatttctaatggcattcat

SEQ ID NO: 352742 - DNA, 201 bp, Homo sapiens
agtgtcatgggctctcttagatgcaatttttaggcctgtatgaaacttcttgattactgtggacaccaaagagaaaaacagtgtctgctgatagttctacrtgtacttaagcagcctggaatagccgtctccctttgcattaattgcccattctgcattgatagcagtttttatcaagtttacctttgtccccaatagcca

SEQ ID NO: 352743 - DNA, 201 bp, Homo sapiens
gtgaaagtccctcttcgcctccctttcctctatactttgctcttcccagaagttactattctcatacctcctcctatgtatttacctatgcatttataaamaacattatatgacttatttatggattttgagttttgtatccaggacttgagttttccacttaatttgtcttagaaacttttcaatgagtatatccagatc

SEQ ID NO: 352744 - DNA, 201 bp, Homo sapiens
cagtttccacttgaccacttgacatttaacatttttctgcatatttttcaatagctttcaaaggagatgatttttagaaaatgtaatctgatttcccttgrgaagacataaaagaacacttaagttgcaggtcttgaatgcttttgattttgcaaattccctgctcttttaaagagatttcattaaaaattgatatgagta

SEQ ID NO: 352745 - DNA, 201 bp, Homo sapiens
tattagtgaacatagttattgttcaaaacagccccaggaagcaggatattattataatctccattttatagctgagaacattggggtgaaataggctaagygatttgatcacttagtaagtggtagattcaggtttcaaacccaggcagtttgtttctgcatctgtcttcttacaaaaatcctatatgtcattctgcttcc

SEQ ID NO: 352746 - DNA, 201 bp, Homo sapiens
attttagtccagaaattttgactaattttgctacaaactaggataaggtccccaatctcttgactttctgctgtatttttaattacatcatgctgattcamgtagcaccttgcttcctattttacatttagctgtgacataagcattatttaaaaatgcttattattagagatgtattcatccttttatgtctgaattctt

SEQ ID NO: 352747 - DNA, 201 bp, Homo sapiens
gaatcactagagatctttttctccaaatgcctcctttacacagaaggaaaaaaaaattgtagtgttttatattaatatgttgtttactgattctataatasttgaaatctattatttttcagtctcaataatttttaaattttagtccagaaattttgactaattttgctacaaactaggataaggtccccaatctcttga

SEQ ID NO: 352748 - DNA, 201 bp, Homo sapiens
agggtctggagtctggctctgctacttattagatcaacaggcaaattatttaacttttgtataattcaatgttctcagctaaaaatgggcttaacaatacytgtgtagctcttgaaattgtaataaagatttttaaatacataatatatataacatacctagcattgtgtttgcttatagtaagaatctataaaatgttag

SEQ ID NO: 352749 - DNA, 201 bp, Homo sapiens
tggtagaatggcaagggtagggaggtggaaacagttgcatgttagcaaaacttgtattagtgttgtaggagtcaagtctcccattttggctatctgaagtracaaactgaacctcatttagcagtcctgagagagcaggagttgagactttttgtgagctcaggcattaatcagtactgtgcttccgtataacacggcatt

SEQ ID NO: 352750 - DNA, 201 bp, Homo sapiens
atagttgaaatctattatttttcagtctcaataatttttaaattttagtccagaaattttgactaattttgctacaaactaggataaggtccccaatctcytgactttctgctgtatttttaattacatcatgctgattcaagtagcaccttgcttcctattttacatttagctgtgacataagcattatttaaaaatgct

SEQ ID NO: 352751 - DNA, 201 bp, Homo sapiens
gtctgaattcttaacttctgaaactaaagctttcttcctttcttttgaactttgcttggaaaaatattttttggccagataaaataaaatataagtactgygttttaaaattaaaatgatcacctttctgcatatctttataaatattcatccataactatagtactttggttgctgtgacaagtttgctattttaatagt

SEQ ID NO: 352752 - DNA, 201 bp, Homo sapiens
aaagttaaccaaatgtgtagtgaatgagcaagtgaatgaagagaagggacagaaccaggattccacagtggataagagcatatatctctatctctatctgtatctatctatctatctatctatctatctatctatccatccatctatctatctatctatcatctatctatctatacacacacacacacacacacacacaca

SEQ ID NO: 352753 - DNA, 201 bp, Homo sapiens
aaagatgaagagtaattttattgggttttacctttctctcctaggaatttgcatctcatgggatgcagaacatgactgttgttatttcaggtctatgcaaygtctatacacattacattaccacttatgaagaataccaggtaaagcaaaacgttttcatcatttaaatgaattataccccagtaaagactattgtgtcaa

SEQ ID NO: 352754 - DNA, 201 bp, Homo sapiens
aagttaaccaaatgtgtagtgaatgagcaagtgaatgaagagaagggacagaaccaggattccacagtggataagagcatatatctctatctctatctgtatctatctatctatctatctatctatctatctatccatccatctatctatctatctatcatctatctatctatacacacacacacacacacacacacacac

SEQ ID NO: 352755 - DNA, 201 bp, Homo sapiens
cctaataaactttgctatatgggctgacataatggacttattcttctactacaatcaacttatctcttgattagtttccccttagcatttaactcagcacrctttctaaatgtcaggcatgtaactgtgtgagtggggtatgttatgatgaataaggcaagttttctatctttaagggtctcacaagctggtggggtgatt

SEQ ID NO: 352756 - DNA, 201 bp, Homo sapiens
agttaaccaaatgtgtagtgaatgagcaagtgaatgaagagaagggacagaaccaggattccacagtggataagagcatatatctctatctctatctgtatctatctatctatctatctatctatctatctatccatccatctatctatctatctatcatctatctatctatacacacacacacacacacacacacacaca

SEQ ID NO: 352757 - DNA, 201 bp, Homo sapiens
aactgtagtgcagagttagaaaaattttattaagaaaaatatcttaaactaatagtgtaatcaatgcttgtgtgttaaggataacagaatgaaaatatacktaaagatgaagagtaattttattgggttttacctttctctcctaggaatttgcatctcatgggatgcagaacatgactgttgttatttcaggtctatgca

SEQ ID NO: 352758 - DNA, 201 bp, Homo sapiens
atcaacttatctcttgattagtttccccttagcatttaactcagcacactttctaaatgtcaggcatgtaactgtgtgagtggggtatgttatgatgaatraggcaagttttctatctttaagggtctcacaagctggtggggtgattggggcaagagacagagacaaatatatagacaagtaaccataacatgaatcaga

SEQ ID NO: 352759 - DNA, 201 bp, Homo sapiens
gttaaccaaatgtgtagtgaatgagcaagtgaatgaagagaagggacagaaccaggattccacagtggataagagcatatatctctatctctatctgtatctatctatctatctatctatctatctatctatccatccatctatctatctatctatcatctatctatctatacacacacacacacacacacacacacacac

SEQ ID NO: 352760 - DNA, 201 bp, Homo sapiens
tccctattttagtagtaagaagtttctacatctgcaactgtgatcatcaaggtatttgtagatccattgacttgtccaactgtagtgcagagttagaaaawttttattaagaaaaatatcttaaactaatagtgtaatcaatgcttgtgtgttaaggataacagaatgaaaatatacgtaaagatgaagagtaattttatt

SEQ ID NO: 352761 - DNA, 201 bp, Homo sapiens
actttaacattgctccctcttggggaggagagcggaagcctccctcatcacatgtgggaagcatccccacatgaggaaaaagggattaagtgttttccccmcttctgcactcacaaaacagtgaggtggctttgttggtatttccattttctgtataagaaaactgagtcttagagaaggtaggtaactttccaaatttca

SEQ ID NO: 352762 - DNA, 201 bp, Homo sapiens
atctatctatctatctatctatctatctatccatccatctatctatctatctatcatctatctatctatacacacacacacacacacacacacacacacayacaacctgaattcattgctctgcttcttgacttaccattgtgtgacctaggtcaggtaacgttaccactctgggacttagttttcttagttgcagaatga

SEQ ID NO: 352763 - DNA, 201 bp, Homo sapiens
atattcctaaatgtaaacaccttgcaaataactgcgaggggatgactcttagaatatcttcagcccaataaatgtttattccttagcacaggggcaaatarccatgtcagggactgaattcagctcactcattggtgatttggcttgacattgtgttttgaaaaattcaaaatggatgccaacatgaaaaaagaaactaca

SEQ ID NO: 352764 - DNA, 201 bp, Homo sapiens
gccctgggggaaagcacttatattacaagtacttataatagactaaagcttaggagctagcaccctctttcatagtaaatagagtgacagtctaaatggcmtaagccgagagaacccactgcttttaacaggtagtccataggagtcacttaccttggccagtaaatggaaatgcccatcctcttttgtcatacataatct

SEQ ID NO: 352765 - DNA, 201 bp, Homo sapiens
gctccctcttggggaggagagcggaagcctccctcatcacatgtgggaagcatccccacatgaggaaaaagggattaagtgttttccccacttctgcacthacaaaacagtgaggtggctttgttggtatttccattttctgtataagaaaactgagtcttagagaaggtaggtaactttccaaatttcacacagttagca

SEQ ID NO: 352766 - DNA, 201 bp, Homo sapiens
ttcctttcctcttgtaacgatgctagtcattggatttagagcctacatgcggtcagtataatatcacttaatctttaccttgattacatctataaaacccrtatttgcaagtaagtcacattctgaggttccagatgagcatgcatttttgagtgacactattcaacccattacagcctcctatattttatttcctaaaga

SEQ ID NO: 352767 - DNA, 201 bp, Homo sapiens
cagagtcaaagttaaccaaatgtgtagtgaatgagcaagtgaatgaagagaagggacagaaccaggattccacagtggataagagcatatatctctatctstatctgtatctatctatctatctatctatctatctatctatccatccatctatctatctatctatcatctatctatctatacacacacacacacacacac

SEQ ID NO: 352768 - DNA, 201 bp, Homo sapiens
ttgaaaagttcaagactgaacaactccatctggtgagggcctcatgctattaccaataaaataaaaattttctcagaatattgcacataaatattcatgayagaaaacagacgaggaggccgaatgcagtggctcacacctgtaatcccagcactttgggaggccgaggtgggtgaatcacgaggtcaggagttcgagacc

SEQ ID NO: 352769 - DNA, 201 bp, Homo sapiens
aagactgaacaactccatctggtgagggcctcatgctattaccaataaaataaaaattttctcagaatattgcacataaatattcatgatagaaaacagamgaggaggccgaatgcagtggctcacacctgtaatcccagcactttgggaggccgaggtgggtgaatcacgaggtcaggagttcgagaccagcctggccaa

SEQ ID NO: 352770 - DNA, 201 bp, Homo sapiens
tgaacaggcaacctacagaatattttatatcctctttttattgcctgcaaatgattttgaatagtttgccagagtggatttaatgtttgtatttctaatgrcattcattacaggaaataggaaagaataaaaggcaacttggcatttcttttggcaggggccatttgtagcagcctttgcttcatcaaacctaggagatgt

SEQ ID NO: 352771 - DNA, 201 bp, Homo sapiens
ttgcacataaatattcatgatagaaaacagacgaggaggccgaatgcagtggctcacacctgtaatcccagcactttgggaggccgaggtgggtgaatcaygaggtcaggagttcgagaccagcctggccaacatggtgaaaccccgtcactgctaaaaatacaaaacattaatcgggcatggtggtgtgtgcctatagtc

SEQ ID NO: 352772 - DNA, 201 bp, Homo sapiens
gatgtgtcccccaacattcttggaccacgttgcatcaacacaggagagtcctgtgataacgccaatagcacttgtcccattggtggggtaggtaattatgrcacatgaaatctttgtttttgcatctcaaatacattttatgtttgaatatttatcattaatttacaaataccttgtcttctagtatacactggcctagtt

SEQ ID NO: 352773 - DNA, 201 bp, Homo sapiens
ggctaatttttatatttttagtagagatggggttttgccatgttggccaggctggtttcaaactcctgccttggcctcccaaagtgctgggactaaaggcrtggtgcaaggattttgactgctgtaacttaatggaatttaccctaatgagatatttctccaatattgttatttagaaggtctttttcattcaggattttt

SEQ ID NO: 352774 - DNA, 201 bp, Homo sapiens
ctagttctccctagcatctgctcttctcaaaagcacctgtccaaacccagtaaattttaactgagtgaagttatatttttccatttgagtgactgttaagktttttgaatggtgagacaattcagtaactgtcagagattaactctacccttccccaaacttgttcaatctgaaacattttgctttggcatttcgaaagtc

SEQ ID NO: 352775 - DNA, 201 bp, Homo sapiens
tttgtttccatgccatttacttcctgaagaattttaaagttgataaatacatatgaaaacatggatttgtggccccttttgaataaaggagaagagctggmagcactggtttatactcccataaggcaacacttggctggagctgagtagaggctgtgaactttagacactgcaagttttctacagtccacaccagtccct

SEQ ID NO: 352776 - DNA, 201 bp, Homo sapiens
tgcgtagagccaatgggctttgagcaggccacctctgccctacatctgcttctgataggcaataagaactgatgcttgaaagatgatcttgaagtcctaawccctttctagccattaaatagatgcttagttttgtgcattacattgcttaggtaggaatgtaagcaaaaacgtttaaagatttttcaacaaagaattgaa

SEQ ID NO: 352777 - DNA, 201 bp, Homo sapiens
ttaggtaggaatgtaagcaaaaacgtttaaagatttttcaacaaagaattgaatcaacaattttttttttaaattctaagttaacctgacagtttatgaaytagcatctctcttttcttgagcgttccagttaatctgctttactgccttccactctgtaaatatccttttcacctgtgtgagggtttgagcctacaaagg

SEQ ID NO: 352778 - DNA, 201 bp, Homo sapiens
gagttctaagagaaagagacaaaaccacacacacaaacctaatagaagaatattcctaaatgtaaacaccttgcaaataactgcgaggggatgactcttaraatatcttcagcccaataaatgtttattccttagcacaggggcaaataaccatgtcagggactgaattcagctcactcattggtgatttggcttgacatt

SEQ ID NO: 352779 - DNA, 201 bp, Homo sapiens
ggaatgtaagcaaaaacgtttaaagatttttcaacaaagaattgaatcaacaattttttttttaaattctaagttaacctgacagtttatgaactagcatytctcttttcttgagcgttccagttaatctgctttactgccttccactctgtaaatatccttttcacctgtgtgagggtttgagcctacaaaggccactgg

SEQ ID NO: 352780 - DNA, 201 bp, Homo sapiens
tttaatgtttgtatttctaatggcattcattacaggaaataggaaagaataaaaggcaacttggcatttcttttggcaggggccatttgtagcagcctttkcttcatcaaacctaggagatgtgtcccccaacattcttggaccacgttgcatcaacacaggagagtcctgtgataacgccaatagcacttgtcccattgg

SEQ ID NO: 352781 - DNA, 201 bp, Homo sapiens
gtgaagagcttggcacagcatctcgcatatgatacaaaaattcagtaaacattaacacttattatgttatcaagatctcacatgtggaacttccatgatgrtatacagttatctcctagtaaaatgaaaaaacaatctaaccaaccaggaaagtgattatggctttgagattatttacctgtgtttccctaaaaggattaa

SEQ ID NO: 352782 - DNA, 201 bp, Homo sapiens
catctcgcatatgatacaaaaattcagtaaacattaacacttattatgttatcaagatctcacatgtggaacttccatgatggtatacagttatctcctartaaaatgaaaaaacaatctaaccaaccaggaaagtgattatggctttgagattatttacctgtgtttccctaaaaggattaagtccaatgcaggacaatg

SEQ ID NO: 352783 - DNA, 201 bp, Homo sapiens
taagaaaatgatcagacttcttgagtacattttttgcattgtatttttaagcccatgaacaatgaaagaatgtagatgtagaatgtctattatttaaaaayattttttcctgctggagaaaacttaagctcccagtcatagttcttggccccagttctctggttctcctgattaatttagagcttcctgctcttttacagc

SEQ ID NO: 352784 - DNA, 201 bp, Homo sapiens
ttataatatttaagtgcttgatcaatctcaattttttctgacataagaagtaggaaatagagccagatttgtttattgatttttttccccagaagtccagstagttgttccaatataattttaatcgagtttcagtttaaggtgatcatgagtaagaatcagaggcaagaacaagcaagtagaaagatgtgcagtcaatag

SEQ ID NO: 352785 - DNA, 201 bp, Homo sapiens
tctattatttaaaaatattttttcctgctggagaaaacttaagctcccagtcatagttcttggccccagttctctggttctcctgattaatttagagcttmctgctcttttacagctggtttgccatccacccggtcagcatgaacaacagtaaccatcttgtaaacagtgacaatgtgggctatgcatcttacctgcttg

SEQ ID NO: 352786 - DNA, 201 bp, Homo sapiens
ctcttccattaatgcaggcatttctgggtctggaggcctggggaaagggtctttgactctacctgtgcactccttaacaaatgctctctgttccaggacayggtagccaacctgagcagaggtccagaacctccctttttcaaacaattaatagttccattaattcctagtattgtggatagagcaccaaaaggcagaact

SEQ ID NO: 352787 - DNA, 201 bp, Homo sapiens
cacctctgtaaatggatttaaataagcagaaccatatacaactctccctgcctttcctgcaggctcagcgatatgaggcagcatcgacaatttatggaccrcacacattatctgcttacattcagctcttcagaaaccttgctaaggctattgctacggtaatcaaatattgtttgtgcgtgcatgcgcgcgtgcgtgtgt

SEQ ID NO: 352788 - DNA, 201 bp, Homo sapiens
cactctatcacccaagctggagagcagtggcacgatctcagctcattgaaacctctgcctcccaggttcagcaactcttgtgcctcagtctcctgagtagstgaaattacaggtgcacacccccacgcccagctaatttttgtatttttagtagagacagggtttcgccatgttggtcaggctggtcttgaactcctaacc

SEQ ID NO: 352789 - DNA, 201 bp, Homo sapiens
aatttatggaccgcacacattatctgcttacattcagctcttcagaaaccttgctaaggctattgctacggtaatcaaatattgtttgtgcgtgcatgcgygcgtgcgtgtgtgtgtgtgtgtgtgtgtatgtctgtatgtgtctgtgtctgggtaagaaaatgcagagggaagtgaaagagaaccttagcttcgagtgtt

SEQ ID NO: 352790 - DNA, 201 bp, Homo sapiens
tgaggcaggagaattgcttgaccccaggaggcagaggttgtagtgagccaagatcgtgccattgcactccagcctgggggacagtgcgagactccgtctcaaaaaaaaaaaaaaaaagaaagaaaacaagaggaactaggatgtgcaaagagatcacatgtgaaagaggaagcaagagagaaaaactgaagaagccaggct

SEQ ID NO: 352791 - DNA, 201 bp, Homo sapiens
atcagtgataattggaatattttcagtaataatatgtataccgactgtaatgtgagcctttacaggaataaaaagttttctcagaatatttttttctggatttttttttattattatactttaagtttttggatacatgtgcagaacatgcaggtttgtaacacaggtatacacgtgctatggtggtttgctgcacctatc

SEQ ID NO: 352792 - DNA, 201 bp, Homo sapiens
ttttcttcatagcatctatcactctatgatataatatttaatatttatttgcttgcttactgtctttgtctttcattagaaaaaaaatatcttcaagacargaacctcatatattcttttgcttagagcacctgttgaatgatgaatgaataagagtactggttctctagttagacgagggtctggagtctggctctgcta

SEQ ID NO: 352793 - DNA, 201 bp, Homo sapiens
tttgttttgttttgtttttttgtgattcaggttataagctttgcacagaacttgtcatgctggaaaagttacagaaaaagtgaaatgaccttcagtccagsaggccttctgcaacttctatctttgataacagtctgccctaagagagagttcatgtataagccttttgttatcaatactctttaatctcatacttgtacc

SEQ ID NO: 352794 - DNA, 201 bp, Homo sapiens
caggtggatcacttgaggtcaggagttcgagaccaacctggcaaacatggtgaaaccctgtctctactaaaaatacaaaaatcagttgcatgctggcaggwgcctgtagtcccagccacttgggagaccaaggcaggagaatggcttgaacctgggaggtggaggtttcagtgagccaagatcactccactgcactccagc

SEQ ID NO: 352795 - DNA, 201 bp, Homo sapiens
gctgcatagtattccatggtgtatatgtgccacattttctttatccagtctatcattgatgggcatttgagttggttccaggtctttgctattgtgaatartgctgcaataaacatacgtgtacatgtgtctttatagtagaatgatttataatcctttgggtatatacccagtaatgggattgctgggttagatggtatt

SEQ ID NO: 352796 - DNA, 201 bp, Homo sapiens
gaaaccctgtctctactaaaaatacaaaattagccagacatggtggtgcacgcctgtagtcccagctactcgggaggctgaggcaggacaatcgcttgaamccgggaggcagatgttgcagtgagacaagattgcaccactgcactccagcctggcaacagagtgagactctgtctcaaaaaaaattttttttcttccatt

SEQ ID NO: 352797 - DNA, 201 bp, Homo sapiens
accctgtctctactaaaaatacaaaattagccagacatggtggtgcacgcctgtagtcccagctactcgggaggctgaggcaggacaatcgcttgaacccrggaggcagatgttgcagtgagacaagattgcaccactgcactccagcctggcaacagagtgagactctgtctcaaaaaaaattttttttcttccattctg

SEQ ID NO: 352798 - DNA, 201 bp, Homo sapiens
acaagaagggcaggataacagcatacatctctgctagttacactgagtatcccaaatttgttgggacaaggagatagagtcgcccttatagtttctatttwactcttggctgaaggaccaagaccatttacaattcccttttagtagtttttgaacctttttttttttttttttcctgagacaagcttttgctctgctgcc

SEQ ID NO: 352799 - DNA, 201 bp, Homo sapiens
cagagaatagtaaaaagtgaaagtccctcttcgcctccctttcctctatactttgctcttcccagaagttactattctcatacctcctcctatgtatttayctatgcatttataaaaaacattatatgacttatttatggattttgagttttgtatccaggacttgagttttccacttaatttgtcttagaaacttttcaa

SEQ ID NO: 352800 - DNA, 201 bp, Homo sapiens
tgacttatttatggattttgagttttgtatccaggacttgagttttccacttaatttgtcttagaaacttttcaatgagtatatccagatctgtgtgataygttttaaagacagcaagttaggctataccatcatttatttaactcccacaatgttcatttagctttgttttcaactttgacatgagcagtagatgctact

SEQ ID NO: 352801 - DNA, 201 bp, Homo sapiens
tttctgacataagaagtaggaaatagagccagatttgtttattgatttttttccccagaagtccagctagttgttccaatataattttaatcgagtttcartttaaggtgatcatgagtaagaatcagaggcaagaacaagcaagtagaaagatgtgcagtcaatagaaagacctggcttcaagtcttagctcagatatta

SEQ ID NO: 352802 - DNA, 201 bp, Homo sapiens
ttgtagcctgtctcttttcctgcacattctctactatgtcccagggctttgaattcctggcaaacacagaggatcagagatcctctgatccagcagtaggyacagcagggtcatagactgatagaagtgaaaggatcattaagaattattcagttttggctgggcccggtggctcacacctataatcccagcactttgggg

SEQ ID NO: 352803 - DNA, 201 bp, Homo sapiens
tgaagtgacaaactgaacctcatttagcagtcctgagagagcaggagttgagactttttgtgagctcaggcattaatcagtactgtgcttccgtataacayggcatttcccttatctcaaccttgaaagccatttctgtttacctccagattgtcaacagcgatgtggttctccagcttttatcccgtaatgtggacccat

SEQ ID NO: 352804 - DNA, 201 bp, Homo sapiens
taaaaagtgaaagtccctcttcgcctccctttcctctatactttgctcttcccagaagttactattctcatacctcctcctatgtatttacctatgcattyataaaaaacattatatgacttatttatggattttgagttttgtatccaggacttgagttttccacttaatttgtcttagaaacttttcaatgagtatatc

SEQ ID NO: 352805 - DNA, 201 bp, Homo sapiens
gttcttattctttgtgtttgtagaacatttcacctgtgataatgctttttttgtatactatttctgggatgtttattccatcccagtcaactccacccaayggggttaaaccagtattaataaagatttttttcttatcgactttttaaagctcctaatatattaaagtcttagttttgtcaaaatagtacaaagttttcc

SEQ ID NO: 352806 - DNA, 201 bp, Homo sapiens
agctcctaatatattaaagtcttagttttgtcaaaatagtacaaagttttcctaaagtttatcagttgtctttctgtcttatttatgtcttttgccccctrtggaaatttaagatgttttacctgtccagtttaactaagcttgttctagataactttcaggagggtctgcccacaccctcatactacaaaatatgtttat

SEQ ID NO: 352807 - DNA, 201 bp, Homo sapiens
gatacctgcataatcagcaacacatcttttaacctgagcctcaatttccttatttttaaaagaaaggctccagaatagatcatttctaaagacattcactsttctaattccaggtatgattttgtttttatagtttgtactttgagagactacctgaaaagaaatgcaagaatgtggttttaaaaatctatttgcttagat

SEQ ID NO: 352808 - DNA, 201 bp, Homo sapiens
ttcctttggtgacaagagaaagctgagccatagaactccagttcttgaaacttggatttagattagttcctggtgttcttcaatatgcaaagatcatccakctattcttttctttttacaaaactttttgatgaagctctcttcatcaaatctggtctccagtgagattactatgaattactctgatttcctccccctcct

SEQ ID NO: 352809 - DNA, 201 bp, Homo sapiens
actcacccaccatatgtagatgcctgctgttagacagaatcccaaggtgtgaggagtttggaagcacagcaactcagaatcacagagcatggagatgaccyagtttaaccttcagcagaggaacaagggcctagaaaggtgatgtgacctgcccagcatcacagccaagactatcttcttcacaatgaaaaccatatttga

SEQ ID NO: 352810 - DNA, 201 bp, Homo sapiens
cacaaagatacactctcactctagcaaagaaagtattttggtccagttattcctaatcttaaattttcttggtgatctttcaagtgagattgaggcctttygtgccacagcctgtatcactataatttcatttttgtggggagttgatacaggtcaacagcctcggagacttcaagcttctgggaaactcctgggtttggt

SEQ ID NO: 352811 - DNA, 201 bp, Homo sapiens
gggaggtattattattatgtcatttgacagattgagaaaccaagtttgcagagggccaagtaacttatccaaggttgcacagctaggaactgtcagagttrggattcaaacttaagtgttttggtgtcagaattcatgctcatttctactatactatactgcttttctgaaaaatgagatggctctaattgggaaatagta

SEQ ID NO: 352812 - DNA, 201 bp, Homo sapiens
attttcaaatgtggctatcatatcttctctccacacagagattattatgggatacactgatgaacaaatatagatggagttgctgcccttataggacttcwgtctactgagggagacagaaggcatacagataggcatacaatacatgtaaaattataattgggctcagtgctaagaaaggcaggtgtgtagaactttctt

SEQ ID NO: 352813 - DNA, 201 bp, Homo sapiens
atttccacaggcagtgtatagttttctgattttttaatgtatttgccaatacttgttattatctgacttactgaatctagctaccttagtgggtgtggagrgatatctcattgtggttttgatttgcatttccctaataattaatgatgtcaaacaccttttcatgtgcgtattaaccacatatatatctcccttggagaa

SEQ ID NO: 352814 - DNA, 201 bp, Homo sapiens
agatactgtgctagccactttctggggcataatgatgaaaagaatctgtcccttccctcaagatcactggaagctgggggtctagtaggaagacagaaaaragaacagatgattacattttcatgaaaggcatgcacaaggtgttataaaaataaagagaaagagcaccagcccagactgggtatttgaggactgggactg

SEQ ID NO: 352815 - DNA, 201 bp, Homo sapiens
tggaccgcacacattatctgcttacattcagctcttcagaaaccttgctaaggctattgctacggtaatcaaatattgtttgtgcgtgcatgcgcgcgtgygtgtgtgtgtgtgtgtgtgtgtatgtctgtatgtgtctgtgtctgggtaagaaaatgcagagggaagtgaaagagaaccttagcttcgagtgttcagttt

SEQ ID NO: 352816 - DNA, 201 bp, Homo sapiens
aagtgaaagagaaccttagcttcgagtgttcagtttgacaacctttatattttacaaaatttatagttttgtggtatctctaagaaaataaataaaatttmtttccaaattttggatctagttaacatcctttcatggtggcagcttctttcatatatattttctcactatttttacaaccatcatgtgaaattaaggaga

SEQ ID NO: 352817 - DNA, 201 bp, Homo sapiens
ttgaagattgtgccagttttgaataatgtgagatgtcaagcatcacacttacccaaaatgctacacctctgtaaatggatttaaataagcagaaccatatrcaactctccctgcctttcctgcaggctcagcgatatgaggcagcatcgacaatttatggaccgcacacattatctgcttacattcagctcttcagaaacc

SEQ ID NO: 352818 - DNA, 201 bp, Homo sapiens
cttctcccaaatacaagaagtatgcgtgcatcagtcatccttgttaacagaggcactctcagcccagacccatgtacagatccataaacagcatcatcgcyataaatgaaagcagtgtgatatggctgaggaatgcaaatagattttagctcagttgagctcagtggccaatgctaaatcatgaatggttgctgccaggag

SEQ ID NO: 352819 - DNA, 201 bp, Homo sapiens
tctgactacaaatgccttgtgacactgatatttgatgccttggcaactcctgactattgtctgaggaagggaaataaacaaaatgatgaatatataacatktctaaataggtaaagaaaatcaaagctacatagtagccattgttctaagtttataatattagtgaacatagttattgttcaaaacagccccaggaagcag

SEQ ID NO: 352820 - DNA, 201 bp, Homo sapiens
aattatctttcacaaaaaagacacaatgataccaaactttagattgcagcttattaaagcataatcagcaacaaatactcagcaacatcaccagtattctstctggtgttttcttgatgtgtatgcaccatatgaagacattagtcatgcatttggatgttcattgatcaactcattcactaaacatttactgagtctctt

SEQ ID NO: 352821 - DNA, 201 bp, Homo sapiens
tcactgtagttcactgtcaaaaaagtttgaacaactctgccttggtggtagaatggcaagggtagggaggtggaaacagttgcatgttagcaaaacttgtwttagtgttgtaggagtcaagtctcccattttggctatctgaagtgacaaactgaacctcatttagcagtcctgagagagcaggagttgagactttttgtg

SEQ ID NO: 352822 - DNA, 201 bp, Homo sapiens
tgaggagttgaaggatatttgacagaggccttgattgttagtctgaaatatttctcatcctgtttaggattatgatttttaaacaggttcttgagctgttyctgtctatatatttttatgtataagaaaatatataaagagttttccttatgaacctgagcctatatattgtgttctaattgatgttgacaaataagaggg

SEQ ID NO: 352823 - DNA, 201 bp, Homo sapiens
cttgagttctaagagaaagagacaaaaccacacacacaaacctaatagaagaatattcctaaatgtaaacaccttgcaaataactgcgaggggatgactcytagaatatcttcagcccaataaatgtttattccttagcacaggggcaaataaccatgtcagggactgaattcagctcactcattggtgatttggcttgac

SEQ ID NO: 352824 - DNA, 201 bp, Homo sapiens
ttaagcctagtacccattagttatttttcctaatcttctccctccttccacccttcactctccaataagccccagcatctgttggtccatgtgttctcatyattcagttcccacttataagtgagaacatgtggtatttggttttctgttcctgtgtttgtttgctaagagtaatggcctccagctccatctatgttccgg

SEQ ID NO: 352825 - DNA, 201 bp, Homo sapiens
ctgtctgactgctcaggtctgacttcttataggaagtacatttaaaaccaagtaatcaggaaaacattctattttagaatgtctagaaagccagagtgctkgcttagacactaggaacatagactataagattttcaatttcttgtggcattagatatgaccagattgattcaaattctcagaagtctttaaggcctttgc

SEQ ID NO: 352826 - DNA, 201 bp, Homo sapiens
gtctccagtgagattactatgaattactctgatttcctccccctcctaaattttatttcccattttgtccccatattttgtttcagcttctatggagacakatttctaggcaaaaagacaaaaaaattacctcgaactgagatgtccttgatatggttaaatctctttcttttcatagcttattcatacctttgctgcgtg

SEQ ID NO: 352827 - DNA, 201 bp, Homo sapiens
cttaaagaaaacagcaaatgctcaggttgtgctggggagtctagaagaggtcagcttgggaggtggcctttgcaatccacatgggaacctctgtctgactkctcaggtctgacttcttataggaagtacatttaaaaccaagtaatcaggaaaacattctattttagaatgtctagaaagccagagtgcttgcttagacac

SEQ ID NO: 352828 - DNA, 201 bp, Homo sapiens
tctggggcataatgatgaaaagaatctgtcccttccctcaagatcactggaagctgggggtctagtaggaagacagaaaaaagaacagatgattacatttycatgaaaggcatgcacaaggtgttataaaaataaagagaaagagcaccagcccagactgggtatttgaggactgggactgttcaggaagatgtaacatct

SEQ ID NO: 352829 - DNA, 201 bp, Homo sapiens
ggggacagagtggaaatgagctaagtgtcaggcaagagaacgtttgatgaaacaggatttgcctatgttatataatgcgaattaataaaaacaaagagttktttaaacttgttttcactcatgtttcccataagattgaaaaagcatcaattgaccatattaaaacacaaaagcaaaagcaccgaagagtggattgtgggt

SEQ ID NO: 352830 - DNA, 201 bp, Homo sapiens
agacagaaaaaagaacagatgattacattttcatgaaaggcatgcacaaggtgttataaaaataaagagaaagagcaccagcccagactgggtatttgagkactgggactgttcaggaagatgtaacatctgtatgagttcttgacaacaagtgagagttaagcaaataaagagtaagaatgtatcctatatagaagaaac

SEQ ID NO: 352831 - DNA, 201 bp, Homo sapiens
agagcaccagcccagactgggtatttgaggactgggactgttcaggaagatgtaacatctgtatgagttcttgacaacaagtgagagttaagcaaataaaragtaagaatgtatcctatatagaagaaacgatatatgcaaaggtccagagggcaggcacattgatggaccacaattcgttgagtagcatggagtaagtat

SEQ ID NO: 352832 - DNA, 201 bp, Homo sapiens
taataaaaacaaagagttgtttaaacttgttttcactcatgtttcccataagattgaaaaagcatcaattgaccatattaaaacacaaaagcaaaagcacmgaagagtggattgtgggtgggcgaagtgctgcagacaaagcagggcttgaagtcttccaagccacctttgtccccaacctgctgcaggactcaagtattc

SEQ ID NO: 352833 - DNA, 201 bp, Homo sapiens
caagtgagagttaagcaaataaagagtaagaatgtatcctatatagaagaaacgatatatgcaaaggtccagagggcaggcacattgatggaccacaattmgttgagtagcatggagtaagtatgcggagggtgatggtaaggagatggtagccagagtgggagacacaggttagctgatggatagtcttgcatgctatgc

SEQ ID NO: 352834 - DNA, 201 bp, Homo sapiens
gtcaatagatggcagtgtagaaaatgaattggaagggcttgtgtataggcagaggactgattaagaagccatagtgtaattaagatctgggcaagacatgracatgcacacttgagggtgaaggctgggaggagggagaggatcaaaaaactacttatcaggtactgtgcttattacctggatgatgaaataatctgtata

SEQ ID NO: 352835 - DNA, 201 bp, Homo sapiens
ggtactgtgcttattacctggatgatgaaataatctgtataaccaaccctcatgacatgtgatttacctatataacaaacctgcacatgtacctctgaacytaatacaaatataaaaaaaaagagatctgggtgagaaatgagggtttgaactaaggtgaaatctatttgtaccttaggagaaagtaagacaggaaaatga

SEQ ID NO: 352836 - DNA, 201 bp, Homo sapiens
aaatgagggtttgaactaaggtgaaatctatttgtaccttaggagaaagtaagacaggaaaatgaaagatctcaggagatttgaaggagacagaattaccrgatgtggagactgataggatacaggatgagggagagaggagtctaaggtaactgccggctgatcctcacatgggagactggaaagatgacattcgctgag

SEQ ID NO: 352837 - DNA, 201 bp, Homo sapiens
tgggagactggaaagatgacattcgctgagatgagaatgttgtggaggaagctggtatgtctgaagtggtgaggttggttttagatttgataactttgaarttcctgtagaagaaccaaaggcctggaggtcagctaaaagatgcatttggctcaatttcatggctttgtgatggattaaatgtctttctccagttagcac

SEQ ID NO: 352838 - DNA, 201 bp, Homo sapiens
cacagctaggaactgtcagagttgggattcaaacttaagtgttttggtgtcagaattcatgctcatttctactatactatactgcttttctgaaaaatgasatggctctaattgggaaatagtatggtcattagcagaaataaaagaaccaaaaggtagactttggcgggtagagtggggaggagtttaatgtgttgtttt

SEQ ID NO: 352839 - DNA, 201 bp, Homo sapiens
agggcagggtgttgcaagacaaagtaagaaatagagattagatggcatgacaaagaatttgtttttctataccaagaggaatgaaaactcattaaagtgtytcaaacttgggttgggagttggggctgtcgaaggattgggaagagtgtagacttgaggaatgaaataaaattatgttcctgaaactattccatgaaccat

SEQ ID NO: 352840 - DNA, 201 bp, Homo sapiens
atagttatggggtacatgagatgttttgatacaggcatgcaatgcctaatagttacatcatggaaaatggggtacccatcccttcaagcatttatcctttrtgttacatactgctgggtcattttttaattatctttcacaaaaaagacacaatgataccaaactttagattgcagcttattaaagcataatcagcaacaa

SEQ ID NO: 352841 - DNA, 201 bp, Homo sapiens
gctctgagacaggtgaggaggccgacttatttcttcaaggatgctgcaactgaaaaggctttgtcttgcttttcttctctttgccttcctcttttcttccrccaagttttcttccttgaatttgcagcagtcacatggactcctcttctccttccttctccttctccttcctcttcttttcttcttcctcctccttgctcc

SEQ ID NO: 352842 - DNA, 201 bp, Homo sapiens
aatttatttccaaattttggatctagttaacatcctttcatggtggcagcttctttcatatatattttctcactatttttacaaccatcatgtgaaattarggagatatcatttctccccagttttcagaggagcacataggcttgaagataagtgatgaagcttactacacctgggagttgaacctgtgttctctaatcc

SEQ ID NO: 352843 - DNA, 201 bp, Homo sapiens
gactctttattttgttttatttttcttctgatatatgccctgggggaaagcacttatattacaagtacttataatagactaaagcttaggagctagcaccstctttcatagtaaatagagtgacagtctaaatggcataagccgagagaacccactgcttttaacaggtagtccataggagtcacttaccttggccagtaa

SEQ ID NO: 352844 - DNA, 201 bp, Homo sapiens
atgaggtactagagtagcttaaaacctttgcagtttctgctcactatgcctgagttgcttttcccccagatattgcacagccgacttgctttcttcatctmagcctctgctaaaagagagcccctcattagaagatctttcctcactaacacccactactttctttttccttatgcaacaatgtttttcttcatagcatct

SEQ ID NO: 352845 - DNA, 201 bp, Homo sapiens
acaggttcttgagctgttcctgtctatatatttttatgtataagaaaatatataaagagttttccttatgaacctgagcctatatattgtgttctaattgmtgttgacaaataagagggctgaaatgttgtttctcaaatctcttattctgttttagatttaggaggccattttttttcaaccacccaaagccctccagcc

SEQ ID NO: 352846 - DNA, 201 bp, Homo sapiens
gctgaaatgttgtttctcaaatctcttattctgttttagatttaggaggccattttttttcaaccacccaaagccctccagccacccagggctccacagcygcccaacgctccacagccacccagcattccacagccacccagagctccacagccactcaaacttctccagtgcctttaaccccagagtctcctctatttc

SEQ ID NO: 352847 - DNA, 201 bp, Homo sapiens
ttaatagttttaatttttcttttccaatctgaatgccttttatttctttttcttgcctaattgcctgcctagaaccttcagaacaatgttgaataaaagtraaaagagtgtatattctgtgttgttcctaatagtatggaaaaagcattcagtcattcatcattaactataatgttagctctgggtttttaatccttcatc

SEQ ID NO: 352848 - DNA, 201 bp, Homo sapiens
aggacaaagtccatgtatatacagttctttaggtatgtcatctggtaactgaccagtccaatgatgatgccaatgatgaaatagtcatgaaaatggagttwtgtatttttaatttaagaaaatgatcagacttcttgagtacattttttgcattgtatttttaagcccatgaacaatgaaagaatgtagatgtagaatgtc

SEQ ID NO: 352849 - DNA, 201 bp, Homo sapiens
gtagacaatgggctccttaaggagactgtgaaacaagtaattttattattttacaacctgcattcatttctgattattacaacatcatcattatcttcttytagctttttaattgaccttgctgctgtctagcactatgaatttcatactagaaggaagaggaaaacttttattcaatcacaactcccctgtaaaatccat

SEQ ID NO: 352850 - DNA, 201 bp, Homo sapiens
aatttctgttaataatatatctgctggtatataacagcagtgcatacagaggcatacagtctaccccttggtaaatattcagtgatactaagagtagactytgccctgctaccctctgttggctttcctgaaggtccctgccttctaggaattcccattgaaaaagggatcttaatgatgctaaacttggataggaagaat

SEQ ID NO: 352851 - DNA, 201 bp, Homo sapiens
gtgttacatactgctgggtcattttttaattatctttcacaaaaaagacacaatgataccaaactttagattgcagcttattaaagcataatcagcaacaratactcagcaacatcaccagtattctgtctggtgttttcttgatgtgtatgcaccatatgaagacattagtcatgcatttggatgttcattgatcaactc

SEQ ID NO: 352852 - DNA, 201 bp, Homo sapiens
agagttgcctatgaccaaaactttctcccagtgacaagagtttaaattatgaatttctaggctcatgcttagcaaggctaccttcctattttgctcaaggktgttagctcttggagtatgtatatgtgtgtgtgcactcttccattaatgcaggcatttctgggtctggaggcctggggaaagggtctttgactctacctg

SEQ ID NO: 352853 - DNA, 201 bp, Homo sapiens
gttggtggccaattctaagcaaccagcaaaacaaaagctttgctgagagatgcatttccaaattgcatcaaattggtacttcctgagtacagttggagatrctcactttagcctttttgcttggaataataagcctgtgtgttttctaggaactctatgcctctgcctcccaggaggtaacaggaccactggcttcagcac

SEQ ID NO: 352854 - DNA, 201 bp, Homo sapiens
ggggaaagcacttatattacaagtacttataatagactaaagcttaggagctagcaccctctttcatagtaaatagagtgacagtctaaatggcataagcmgagagaacccactgcttttaacaggtagtccataggagtcacttaccttggccagtaaatggaaatgcccatcctcttttgtcatacataatcttgaaga

SEQ ID NO: 352855 - DNA, 201 bp, Homo sapiens
caacatatcagatttgtttaaaccttcctcagttgatgaacatttgggttatcccatgttttggttattatgaatctataaatagtctataaatattcatrggatttttatgtgggtgtttgttttcatctttcctcttgggtatatatctaggagtgcaattgctggattatataactctatatttaatcatctgagaag

SEQ ID NO: 352856 - DNA, 201 bp, Homo sapiens
cttggccagtaaatggaaatgcccatcctcttttgtcatacataatcttgaagattgtgccagttttgaataatgtgagatgtcaagcatcacacttaccyaaaatgctacacctctgtaaatggatttaaataagcagaaccatatacaactctccctgcctttcctgcaggctcagcgatatgaggcagcatcgacaat

SEQ ID NO: 352857 - DNA, 201 bp, Homo sapiens
gtcatacataatcttgaagattgtgccagttttgaataatgtgagatgtcaagcatcacacttacccaaaatgctacacctctgtaaatggatttaaatawgcagaaccatatacaactctccctgcctttcctgcaggctcagcgatatgaggcagcatcgacaatttatggaccgcacacattatctgcttacattcag

SEQ ID NO: 352858 - DNA, 201 bp, Homo sapiens
tctgtaaatggatttaaataagcagaaccatatacaactctccctgcctttcctgcaggctcagcgatatgaggcagcatcgacaatttatggaccgcacrcattatctgcttacattcagctcttcagaaaccttgctaaggctattgctacggtaatcaaatattgtttgtgcgtgcatgcgcgcgtgcgtgtgtgtgt

SEQ ID NO: 352859 - DNA, 201 bp, Homo sapiens
aagtgatgaagcttactacacctgggagttgaacctgtgttctctaatccttgccagattctccccactcactccaaaagttgagtaggtcagcattctargatgcccattttccacattataatatcttggaaattgggatgcattttccaatcagaggaagcttattattataattagtagcatgcttttactttcttg

SEQ ID NO: 352860 - DNA, 201 bp, Homo sapiens
tagtagcatgcttttactttcttggtggttcaaaagataatatgagttgttaaatcaatggaagcttagatttgatgtaaaaatagtggtgccttggaatraaaacattgcatctacctaaaatatataccgctgaacaagtttacttgatttaaaggaacttcacttgtggaaatcttccctttggatgcagttgtttat

SEQ ID NO: 352861 - DNA, 201 bp, Homo sapiens
aagtaaagacagggctggccttaggccaaatggagaagatgatattttctacctcagttttcccttttgtagcctgtctcttttcctgcacattctctacyatgtcccagggctttgaattcctggcaaacacagaggatcagagatcctctgatccagcagtaggcacagcagggtcatagactgatagaagtgaaagga

SEQ ID NO: 352862 - DNA, 201 bp, Homo sapiens
aaaagataatatgagttgttaaatcaatggaagcttagatttgatgtaaaaatagtggtgccttggaatgaaaacattgcatctacctaaaatatataccrctgaacaagtttacttgatttaaaggaacttcacttgtggaaatcttccctttggatgcagttgtttatgaagctgcaactgtgatgtcagaaggttagt

SEQ ID NO: 352863 - DNA, 201 bp, Homo sapiens
gattcacagttcacacaccacagttggccctaaaactaggtggagaacaacatggtaataaaaagttcaggtcttgaggtaaggttgacttggcttcaagwcccagccctctgccacttactaaccctgtggcctggagaaagtaacttaattcacttagaccttaactatcctatttgaaaatgggaatagtaatacccc

SEQ ID NO: 352864 - DNA, 201 bp, Homo sapiens
ccttatataataatatgtaagcctcagtaaaaaatgtgaaacaattgtggcatagcaaagaaaataaagcccttttaatgaaagagcttggatatattaarttgaaatgaatgaaatggttgtctctgtaggttgcatcaattgaacgttgaaaatttcatatgcctgtattattagttactgattgtgtgtttgaaattt

SEQ ID NO: 352865 - DNA, 201 bp, Homo sapiens
aataatatgtaagcctcagtaaaaaatgtgaaacaattgtggcatagcaaagaaaataaagcccttttaatgaaagagcttggatatattaagttgaaatraatgaaatggttgtctctgtaggttgcatcaattgaacgttgaaaatttcatatgcctgtattattagttactgattgtgtgtttgaaatttcagtattt

SEQ ID NO: 352866 - DNA, 201 bp, Homo sapiens
caaagccataaaaaaatagttggctggagatattggacaacttgattgttagatttctggaaagttcttacttaacctgaaaaaaatctgggagattattwtttttttctaagttttttttcagtataaaaatagtgtgtgcttaccatagaaaacttgaaaaataaagaaagtagaaaggaaggaaaaattaaattaaaa

SEQ ID NO: 352867 - DNA, 201 bp, Homo sapiens
acaattgtggcatagcaaagaaaataaagcccttttaatgaaagagcttggatatattaagttgaaatgaatgaaatggttgtctctgtaggttgcatcarttgaacgttgaaaatttcatatgcctgtattattagttactgattgtgtgtttgaaatttcagtattttatataatttctttgcacatattttaatcaat

SEQ ID NO: 352868 - DNA, 201 bp, Homo sapiens
ctttgaaccgttctttattcttacattttaagggtgtctcttatgaatatcatatagctttagttatttcttttgtactctgacaatcattgttttttaartgaatttagtgtattttcaggaattgtgattattatatctgaacttttctgtatctcctcactttgtgctatttgtctcaccttttcagtgcttcttttt

SEQ ID NO: 352869 - DNA, 201 bp, Homo sapiens
tgctgttctcatgatagtgagttctcacaagatctgatggttttataaggggctttcccccctttcactctgcacttctccctcctgccatcatgtgaagraggacatatttgcttccccttctgccatgattataagtttcctgaggcctccccagtcatgctgaactgtgagtcaattaaacctctttccattataaat

SEQ ID NO: 352870 - DNA, 201 bp, Homo sapiens
ttgactgctagtcttggctatgtgatggaaatacccatttatgtcagtgcttcgctaggaaaccagagcatgaagttgtctgatgggattcactccctccytccaagtaatctttactttccagatatgattcttgactgtgtgttctgaaaagtgatcctggaatgtgaaccctaaataaacactcccaggaggggtaat

SEQ ID NO: 352871 - DNA, 201 bp, Homo sapiens
ctggagtgcagtggtgcaatcttggctcactgcaacctccacctcctgggttcaagcgattctcttgcctcagcctcctgagtagctgggattacaggtgygcactaccacacccggctaatttttgtagttttttagtagagacggggtttcaccatgttggccaggctagtctcaaactcctgacctcaggtgatctgc

SEQ ID NO: 352872 - DNA, 201 bp, Homo sapiens
ccttctgccatgattataagtttcctgaggcctccccagtcatgctgaactgtgagtcaattaaacctctttccattataaattactcagtcttaggtatrtctttattagcagcatgagaatggactaatacagatgttattggtatggatcagtgattgaactcatcaaagccttttctcatgttgagctcctatgtta

SEQ ID NO: 352873 - DNA, 201 bp, Homo sapiens
cttgttttcactcatgtttcccataagattgaaaaagcatcaattgaccatattaaaacacaaaagcaaaagcaccgaagagtggattgtgggtgggcgargtgctgcagacaaagcagggcttgaagtcttccaagccacctttgtccccaacctgctgcaggactcaagtattctgaaaggaagaccctataaaaacac

SEQ ID NO: 352874 - DNA, 201 bp, Homo sapiens
gaagtcttccaagccacctttgtccccaacctgctgcaggactcaagtattctgaaaggaagaccctataaaaacacacaaagatacactctcactctagmaaagaaagtattttggtccagttattcctaatcttaaattttcttggtgatctttcaagtgagattgaggccttttgtgccacagcctgtatcactataa

SEQ ID NO: 352875 - DNA, 201 bp, Homo sapiens
aagtattttggtccagttattcctaatcttaaattttcttggtgatctttcaagtgagattgaggccttttgtgccacagcctgtatcactataatttcayttttgtggggagttgatacaggtcaacagcctcggagacttcaagcttctgggaaactcctgggtttggtagagagagacccatgtggttggtggccaat

SEQ ID NO: 352876 - DNA, 201 bp, Homo sapiens
aaccatccacagccgaactcctctcagagttcagatgctccttctcttttctctgctgtgccattctgccattctgcttttctgttcatctccttgtctgyttgtggagctgggggtttggggtttatatgggtacaggataggggggcgtagtgaacaaaaaggcaaaacaggaatgtttggttgcaaaagcagaaatgc

SEQ ID NO: 352877 - DNA, 201 bp, Homo sapiens
ttaaaacaacaataataaatgttgttcaaggcttctgtgtgtcaggattcccagagtggcttggttagacgattctgacttgttttagaacaagtcatatrtaatcacttctgtgtcatgatgtggcactcagatgctggctagggccgcagttgtctgatggcttgaccaaggtggaagaaattacttctaaggttgctc

SEQ ID NO: 352878 - DNA, 201 bp, Homo sapiens
aatgaaagaatgtagatgtagaatgtctattatttaaaaatattttttcctgctggagaaaacttaagctcccagtcatagttcttggccccagttctctsgttctcctgattaatttagagcttcctgctcttttacagctggtttgccatccacccggtcagcatgaacaacagtaaccatcttgtaaacagtgacaat

SEQ ID NO: 352879 - DNA, 201 bp, Homo sapiens
gtgcacgtgagaagaatgtatattctgttattgttgggtggagtattctatagattggtaggtctagttcaagttttctgttgatcttctgcctagttgtyctatccatgattgagagtgggttattgaaaatttcagtattgttactgaaatgtgtatttctttcttcatttctgtgagttttcagtttatgttacacag

SEQ ID NO: 352880 - DNA, 201 bp, Homo sapiens
ctattatttaaaaatattttttcctgctggagaaaacttaagctcccagtcatagttcttggccccagttctctggttctcctgattaatttagagcttcytgctcttttacagctggtttgccatccacccggtcagcatgaacaacagtaaccatcttgtaaacagtgacaatgtgggctatgcatcttacctgcttga

SEQ ID NO: 352881 - DNA, 201 bp, Homo sapiens
agggcatcctcaccaggctatacagtcgtgccttcatcatggcagaacctgatgggtccaatcgaacagtgtttgtcagcatcgacataggcatggtatcmcaaaggctcaggctggaggtaagtgatttgagaggagaaatgaatgaagaaatgatatggtttaaggaaaagtgggtgaatgtgacaggaaataattcct

SEQ ID NO: 352882 - DNA, 201 bp, Homo sapiens
ttgagaggagaaatgaatgaagaaatgatatggtttaaggaaaagtgggtgaatgtgacaggaaataattcctcttggtttctcattcagtgaaattctaytaccttcaatattatacgctctggacaatatagcagataatcttacaaggaaaatgatcttcactatttcagtctaagttatcttggtcaaaatttgctt

SEQ ID NO: 352883 - DNA, 201 bp, Homo sapiens
atgtgacaggaaataattcctcttggtttctcattcagtgaaattctattaccttcaatattatacgctctggacaatatagcagataatcttacaaggaraatgatcttcactatttcagtctaagttatcttggtcaaaatttgctttcacttctgctgatgactcatcatcattattaatgctaatgtttttgttgaa

SEQ ID NO: 352884 - DNA, 201 bp, Homo sapiens
ggatgatcaattctattccattgatctatatgcctaaccttgtgccagtataaccgtctcttggttattgtttcctttaagatcagaaagtatgtctttcyaccttgtcctcctcttccaagattgttttgacttctgaatttcttgagattccacaggaattttagaatcagcttgtaaatttttacaaagaagtcagct

SEQ ID NO: 352885 - DNA, 201 bp, Homo sapiens
ctgagactcagggaggttattattaattacagcaactattcttatggcagtagttactgtttattaaatggtttctatgttgagcactatagtgaggattstagaatattttctcatctaattctcacaaaaatcctataagggtggatgctagtcctactgtttacattagtttcattttacgcttggggaaacggagac

SEQ ID NO: 352886 - DNA, 201 bp, Homo sapiens
gcatgcgcgcgtgcgtgtgtgtgtgtgtgtgtgtgtatgtctgtatgtgtctgtgtctgggtaagaaaatgcagagggaagtgaaagagaaccttagcttygagtgttcagtttgacaacctttatattttacaaaatttatagttttgtggtatctctaagaaaataaataaaatttatttccaaattttggatctagtt

SEQ ID NO: 352887 - DNA, 201 bp, Homo sapiens
aacgtttacataatttttttcttgactcaggaccatgtctggacgaagacttcgagaggcagttcaagcagtaagttaaaaataaaataacatatctacaygttcatgtttggtgaagaggaaagtatatcctatccctatgatcctatatctagagttccacatttcttgaaattaatggctaaggttaatatgaaatat

SEQ ID NO: 352888 - DNA, 201 bp, Homo sapiens
accatgtctggacgaagacttcgagaggcagttcaagcagtaagttaaaaataaaataacatatctacatgttcatgtttggtgaagaggaaagtatatcytatccctatgatcctatatctagagttccacatttcttgaaattaatggctaaggttaatatgaaatattggtagtataagaaccagacttaaaaaacat

SEQ ID NO: 352889 - DNA, 201 bp, Homo sapiens
ttggtggccaattctaagcaaccagcaaaacaaaagctttgctgagagatgcatttccaaattgcatcaaattggtacttcctgagtacagttggagatamtcactttagcctttttgcttggaataataagcctgtgtgttttctaggaactctatgcctctgcctcccaggaggtaacaggaccactggcttcagcaca

SEQ ID NO: 352890 - DNA, 201 bp, Homo sapiens
aggcagaaaaaaagttcaagtttagcttttcatagtcattgggttcctacatattttactattgtgtgatgagccagggtaattttttggctttcactgcmagtgtttctgtgtactctgcatacgtctagtaggaaaacgtttacataatttttttcttgactcaggaccatgtctggacgaagacttcgagaggcagtt

SEQ ID NO: 352891 - DNA, 201 bp, Homo sapiens
aagtgctgctgagacacactggttatgccccaagggtgaagttttggtttgatctcattatttactttcagtttaacttttgtctttttcatttttgtttygtttttaaaacttttcctttagtcaaaaacatgtaaaccagcattgggctacagttttgcggctggcactattgatggagttggaggcctcaattttaca

SEQ ID NO: 352892 - DNA, 201 bp, Homo sapiens
ttactttcagtttaacttttgtctttttcatttttgttttgtttttaaaacttttcctttagtcaaaaacatgtaaaccagcattgggctacagttttgcrgctggcactattgatggagttggaggcctcaattttacacagggtaaggtgaagtccagtaaaatctatggtttcagcttctgaagcttctgggttctgt

SEQ ID NO: 352893 - DNA, 201 bp, Homo sapiens
acttaatacaaatggaatcatataatatgtggcattttttgttggcttctttcacttagcatcatctttcaaaggttcattgacattgtagcatgcatttwtttttttgagacagaattttgctcttgtcacccaggctggagtacagtggcaccatctcagcttactgcaacctccacctgtcaagttcaagctattctc

SEQ ID NO: 352894 - DNA, 201 bp, Homo sapiens
attttcctattctggacacttaatacaaatggaatcatataatatgtggcattttttgttggcttctttcacttagcatcatctttcaaaggttcattgayattgtagcatgcatttatttttttgagacagaattttgctcttgtcacccaggctggagtacagtggcaccatctcagcttactgcaacctccacctgtc

SEQ ID NO: 352895 - DNA, 201 bp, Homo sapiens
aattgtggcatagcaaagaaaataaagcccttttaatgaaagagcttggatatattaagttgaaatgaatgaaatggttgtctctgtaggttgcatcaatygaacgttgaaaatttcatatgcctgtattattagttactgattgtgtgtttgaaatttcagtattttatataatttctttgcacatattttaatcaattg

SEQ ID NO: 352896 - DNA, 201 bp, Homo sapiens
gcttggatatattaagttgaaatgaatgaaatggttgtctctgtaggttgcatcaattgaacgttgaaaatttcatatgcctgtattattagttactgattgtgtgtttgaaatttcagtattttatataatttctttgcacatattttaatcaattgatatttattttcattttattataattttggtctcagttttagg

SEQ ID NO: 352897 - DNA, 201 bp, Homo sapiens
cttggatatattaagttgaaatgaatgaaatggttgtctctgtaggttgcatcaattgaacgttgaaaatttcatatgcctgtattattagttactgattgtgtgtttgaaatttcagtattttatataatttctttgcacatattttaatcaattgatatttattttcattttattataattttggtctcagttttaggt

SEQ ID NO: 352898 - DNA, 201 bp, Homo sapiens
tgcctgtattattagttactgattgtgtgtttgaaatttcagtattttatataatttctttgcacatattttaatcaattgatatttattttcattttatyataattttggtctcagttttaggttactttttttgaataactgtttgtatttatttatttatttctattataaaatccaaatctatttgtaggtcattca

SEQ ID NO: 352899 - DNA, 201 bp, Homo sapiens
ctcactccaggtgagagtggctcaatactttttaaaaattaaaataataattacactgtcatggtataattacctttttgcatgttaggcccctgtacaargtcagacaatttgaaagtatgcttccaaccttgtactctggtcactgtccttatgttgtctaggggaataaaagagttgcctatgaccaaaactttctcc

SEQ ID NO: 352900 - DNA, 201 bp, Homo sapiens
tacctttttgcatgttaggcccctgtacaaggtcagacaatttgaaagtatgcttccaaccttgtactctggtcactgtccttatgttgtctaggggaatraaagagttgcctatgaccaaaactttctcccagtgacaagagtttaaattatgaatttctaggctcatgcttagcaaggctaccttcctattttgctcaa

SEQ ID NO: 352901 - DNA, 201 bp, Homo sapiens
tcatagagatttgacccacattctgcattctcttctcagcaaggcacaacttctctcttaattaagagtggcaggctgcagctggtcttgctgatgacttwtgagagctctcatgtggccattgaaactggggtggggacagagtggaaatgagctaagtgtcaggcaagagaacgtttgatgaaacaggatttgcctatg

SEQ ID NO: 352902 - DNA, 201 bp, Homo sapiens
tctgtgaataaaaataagcttatttattcctttctatatttcttttctaaatgcacctaattatttatccttatcggactggctagaaccttcaatagaawgttctgctttttaaaaaattttatttaattttctacttgataaataaaaattatatatatttactgtgtacaagatgatgttttgaaatatgtatacatg

SEQ ID NO: 352903 - DNA, 201 bp, Homo sapiens
aaaaattttatttaattttctacttgataaataaaaattatatatatttactgtgtacaagatgatgttttgaaatatgtatacatggggaatggctcaaytgagctaattaacatatacattatgtcacatattattttttgttgtgagaaaatttgagactttcttaacaatttttaaaacacaatatgttgtttttaa

SEQ ID NO: 352904 - DNA, 201 bp, Homo sapiens
tgcaatcttggctcactgcaacctccacctcctgggttcaagcgattctcttgcctcagcctcctgagtagctgggattacaggtgcgcactaccacaccyggctaatttttgtagttttttagtagagacggggtttcaccatgttggccaggctagtctcaaactcctgacctcaggtgatctgcccgcctcggcctcc

SEQ ID NO: 352905 - DNA, 201 bp, Homo sapiens
ggtgcgcactaccacacccggctaatttttgtagttttttagtagagacggggtttcaccatgttggccaggctagtctcaaactcctgacctcaggtgayctgcccgcctcggcctcccaaagtattgagattacaattgtgagccaccacatccggcctatgataagcattcttgaacagatacatatttgccaatgat

SEQ ID NO: 352906 - DNA, 201 bp, Homo sapiens
attaaaggcttatgaaatcaatttcatggattgcaaaaaacattacataaaaaatgctaaaaaatagattgtaagatatagtgtatgacacacagtcaggrtatagtttgctttgtggacttttgttttgggatgcatatgttgatgtgtattaagttatgatgaaaaatgtatctctcactgtagttcactgtcaaaaaa

SEQ ID NO: 352907 - DNA, 201 bp, Homo sapiens
tttttgtagttttttagtagagacggggtttcaccatgttggccaggctagtctcaaactcctgacctcaggtgatctgcccgcctcggcctcccaaagtrttgagattacaattgtgagccaccacatccggcctatgataagcattcttgaacagatacatatttgccaatgatttccttaagctaaattcctagaatg

SEQ ID NO: 352908 - DNA, 201 bp, Homo sapiens
aaatagattgtaagatatagtgtatgacacacagtcagggtatagtttgctttgtggacttttgttttgggatgcatatgttgatgtgtattaagttatgwtgaaaaatgtatctctcactgtagttcactgtcaaaaaagtttgaacaactctgccttggtggtagaatggcaagggtagggaggtggaaacagttgcat

SEQ ID NO: 352909 - DNA, 201 bp, Homo sapiens
tcaagtgagattgaggccttttgtgccacagcctgtatcactataatttcatttttgtggggagttgatacaggtcaacagcctcggagacttcaagcttytgggaaactcctgggtttggtagagagagacccatgtggttggtggccaattctaagcaaccagcaaaacaaaagctttgctgagagatgcatttccaaa

SEQ ID NO: 352910 - DNA, 201 bp, Homo sapiens
gtcctaaccccagccagccttctcccaaatacaagaagtatgcgtgcatcagtcatccttgttaacagaggcactctcagcccagacccatgtacagatcyataaacagcatcatcgccataaatgaaagcagtgtgatatggctgaggaatgcaaatagattttagctcagttgagctcagtggccaatgctaaatcatg

SEQ ID NO: 352911 - DNA, 201 bp, Homo sapiens
taatcagtactgtgcttccgtataacacggcatttcccttatctcaaccttgaaagccatttctgtttacctccagattgtcaacagcgatgtggttctcyagcttttatcccgtaatgtggacccattagagacaaaggaaattgttcacagggctcttctgtttatattgactaagttattgtccccaccaggatttct

SEQ ID NO: 352912 - DNA, 201 bp, Homo sapiens
gaatttctacatatagtatcatgtcatctgtgaataaaaataagcttatttattcctttctatatttcttttctaaatgcacctaattatttatccttatyggactggctagaaccttcaatagaatgttctgctttttaaaaaattttatttaattttctacttgataaataaaaattatatatatttactgtgtacaag

SEQ ID NO: 352913 - DNA, 201 bp, Homo sapiens
atcttgattcactgagtgtcatcattcatgctgcattcagaagaggtgattcaaatctccagaataaagtgtcatcatcaatctcacatattggtatgctygaatagacagcatttaccatcctccctaatgtggaaagaaaaataaaaaatgagtactaaccatttgctttttgtgttacatagtccttatattcattgc

SEQ ID NO: 352914 - DNA, 201 bp, Homo sapiens
agcaactattcttatggcagtagttactgtttattaaatggtttctatgttgagcactatagtgaggattctagaatattttctcatctaattctcacaawaatcctataagggtggatgctagtcctactgtttacattagtttcattttacgcttggggaaacggagaccctgagattgtaaataacttacccttggct

SEQ ID NO: 352915 - DNA, 201 bp, Homo sapiens
tatcaagtttacctttgtccccaatagccagctgacaggcattctgacatgtacttgtttgccattagtttttccattgatctaagcacagctcaagattygtcaaggtctagtaatggcagcttttaccatgagcctctaatctttcaatttgcctccttgtagacatcattttctcctgggggcaaaaggagaatgaaa

SEQ ID NO: 352916 - DNA, 201 bp, Homo sapiens
agtgaggattctagaatattttctcatctaattctcacaaaaatcctataagggtggatgctagtcctactgtttacattagtttcattttacgcttgggraaacggagaccctgagattgtaaataacttacccttggctatgtgttaggtttggctttagttggcatgacattcctatgctggtagcagtgaagcaata

SEQ ID NO: 352917 - DNA, 201 bp, Homo sapiens
gtgaagaaggcctacagcctctcccaggtggcagctgtttgttgtagagagaacacatgatctcagatctcctgagttttccagagaacctggaaattggratttttagatatctcatgattttttaaaatgttggaaacaaagtttttgagaacaacgtaggctacatttacacaaagattggcagtgggtcttggtgga

SEQ ID NO: 352918 - DNA, 201 bp, Homo sapiens
gtaaaagtctgggcccaataatccttccagtataagacaatgaaacaccctttcctcttcttctccaaacagtttgcagtgggttggggtgaggatgattktgagggagtgaaaacgagggtgtgaaggtaattaatggcaagtgccacacaagatagaatgtgaaattccagtggcttaacacattgaagacttattttc

SEQ ID NO: 352919 - DNA, 201 bp, Homo sapiens
tctcacaaaaatcctataagggtggatgctagtcctactgtttacattagtttcattttacgcttggggaaacggagaccctgagattgtaaataacttamccttggctatgtgttaggtttggctttagttggcatgacattcctatgctggtagcagtgaagcaatagcgaaggtgcctgctccactccttgcaatatt

SEQ ID NO: 352920 - DNA, 201 bp, Homo sapiens
tgtagcctgtctcttttcctgcacattctctactatgtcccagggctttgaattcctggcaaacacagaggatcagagatcctctgatccagcagtaggcrcagcagggtcatagactgatagaagtgaaaggatcattaagaattattcagttttggctgggcccggtggctcacacctataatcccagcactttggggg

SEQ ID NO: 352921 - DNA, 201 bp, Homo sapiens
cagcagggtcatagactgatagaagtgaaaggatcattaagaattattcagttttggctgggcccggtggctcacacctataatcccagcactttgggggrccaaggtaggcagatcacctgaggtcaagagtttgagaccagcctggccaacgtggcaaaaccctgtctctgctaaaaattaaaaaaaaaaaaatagctg

SEQ ID NO: 352922 - DNA, 201 bp, Homo sapiens
gaacatagttattgttcaaaacagccccaggaagcaggatattattataatctccattttatagctgagaacattggggtgaaataggctaagcgatttgmtcacttagtaagtggtagattcaggtttcaaacccaggcagtttgtttctgcatctgtcttcttacaaaaatcctatatgtcattctgcttcccttgata

SEQ ID NO: 352923 - DNA, 201 bp, Homo sapiens
ggttactttttttgaataactgtttgtatttatttatttatttctattataaaatccaaatctatttgtaggtcattcagattatacagaaaagcataaamctataatccatccctagagataactactgtttaactgtcactatgctcataggtctatagttcttcccaagaaaatagattcttcaaattttgtagtgac

SEQ ID NO: 352924 - DNA, 201 bp, Homo sapiens
aatactgtgaaagcaaataaaacttctatgtgtcaggtatggccctattgactgctagtcttggctatgtgatggaaatacccatttatgtcagtgcttcrctaggaaaccagagcatgaagttgtctgatgggattcactccctccctccaagtaatctttactttccagatatgattcttgactgtgtgttctgaaaag

SEQ ID NO: 352925 - DNA, 201 bp, Homo sapiens
aatgtcaattagtctgtgaagagctttagagaaaggggtctcaaacgtaaatccttacaagggctaatcaagttttgcagatgaggtggagtgaggaggtkgaccaaggaggagacaggtgcaattcttgtgaagaaggcctacagcctctcccaggtggcagctgtttgttgtagagagaacacatgatctcagatctcc

SEQ ID NO: 352926 - DNA, 201 bp, Homo sapiens
gctcataggtctatagttcttcccaagaaaatagattcttcaaattttgtagtgacaatgaagaaaaatgcaattaatttggtggaaatttgttttacagwcaaatttctggtcaagcaccttaaaactagctatgtgatcttgaaaaaaaccactgaatatgtctaagcctattttctcatttgcaaaatgggaatggta

SEQ ID NO: 352927 - DNA, 201 bp, Homo sapiens
tggctttagttggcatgacattcctatgctggtagcagtgaagcaatagcgaaggtgcctgctccactccttgcaatatttgatgtcttcaagaaaatctyggcttgggaatgagaagacatggatgctaactccacctagaatttggtcgaaagagcatcagatcctgagtttgaggatctggattgcataccagattca

SEQ ID NO: 352928 - DNA, 201 bp, Homo sapiens
agcttgtttttaattctgtgggtgatatggactctgagaaatcttctgagtggcggagtgatgtaaacaccattttgttttaggatgattaagcaggtagrgatgtttgatatggattggaatagagtggaactagaagtgaggacaaaaattagcagattctttaaagtgatactgaggctttattggtgagggtccagt

SEQ ID NO: 352929 - DNA, 201 bp, Homo sapiens
tctaagcctattttctcatttgcaaaatgggaatggtaatacataacctatctcatatgcagttgtaaagattaaatctataatgtgaggaataaagagcrttaaatattcattgaaagtaatggcaaaatgccaattacttttgtaccaacctaatatagatatagggatatttgaaaattgagatttgtatttttatga

SEQ ID NO: 352930 - DNA, 201 bp, Homo sapiens
tgctggtagcagtgaagcaatagcgaaggtgcctgctccactccttgcaatatttgatgtcttcaagaaaatctcggcttgggaatgagaagacatggatkctaactccacctagaatttggtcgaaagagcatcagatcctgagtttgaggatctggattgcataccagattcatcacatgctctccattaactattggt

SEQ ID NO: 352931 - DNA, 201 bp, Homo sapiens
ccattttgttttaggatgattaagcaggtagggatgtttgatatggattggaatagagtggaactagaagtgaggacaaaaattagcagattctttaaagwgatactgaggctttattggtgagggtccagttaagaaaacagtaatcatcatactaggtatttcaaacagagggatttcacccaggggagttttacaaga

SEQ ID NO: 352932 - DNA, 201 bp, Homo sapiens
gaggcaggtggatcacttgaggtcaggagttcgagaccaacctggcaaacatggtgaaaccctgtctctactaaaaatacaaaaatcagttgcatgctggmaggagcctgtagtcccagccacttgggagaccaaggcaggagaatggcttgaacctgggaggtggaggtttcagtgagccaagatcactccactgcactc

SEQ ID NO: 352933 - DNA, 201 bp, Homo sapiens
tgaaattaaggagatatcatttctccccagttttcagaggagcacataggcttgaagataagtgatgaagcttactacacctgggagttgaacctgtgttytctaatccttgccagattctccccactcactccaaaagttgagtaggtcagcattctaggatgcccattttccacattataatatcttggaaattgggat

SEQ ID NO: 352934 - DNA, 201 bp, Homo sapiens
ggattcaaacttaagtgttttggtgtcagaattcatgctcatttctactatactatactgcttttctgaaaaatgagatggctctaattgggaaatagtayggtcattagcagaaataaaagaaccaaaaggtagactttggcgggtagagtggggaggagtttaatgtgttgttttgtaggtgttatcaagtcaatagtg

SEQ ID NO: 352935 - DNA, 201 bp, Homo sapiens
ctcttctccttccttctccttctccttcctcttcttttcttcttcctcctccttgctcctcatcccgcttctcctcctcctcctcttcttcctcccctctyttctcttctcctctcctctccactgccttctatttatgtattgcaaacccttttattcttatagtcagtggtcttgtaagggagccctttaaaggcatat

SEQ ID NO: 352936 - DNA, 201 bp, Homo sapiens
gagagacccatgtggttggtggccaattctaagcaaccagcaaaacaaaagctttgctgagagatgcatttccaaattgcatcaaattggtacttcctgartacagttggagatactcactttagcctttttgcttggaataataagcctgtgtgttttctaggaactctatgcctctgcctcccaggaggtaacaggacc

SEQ ID NO: 352937 - DNA, 201 bp, Homo sapiens
actttaaggacattgacaaaatatactctgtcgttctcttgaccacactgaagatctaattaaacaatggctcatgtcttaggatgcacaggacatttttyctattctattactcaaactgtttggaatcattgaacaacaacctcaataaaatctctgaaactccttaaaagattattgtacaatatttgtcaagataat

SEQ ID NO: 352938 - DNA, 201 bp, Homo sapiens
aagttcaagtttagcttttcatagtcattgggttcctacatattttactattgtgtgatgagccagggtaattttttggctttcactgccagtgtttctgygtactctgcatacgtctagtaggaaaacgtttacataatttttttcttgactcaggaccatgtctggacgaagacttcgagaggcagttcaagcagtaag

SEQ ID NO: 352939 - DNA, 201 bp, Homo sapiens
aagcccatccttcttcacaccggagaagtaatgcattttcgttatcatagtgaaattagcatattgttatttttaaatatgtgaactgtcaggtaatgaayggtagatatctactgagatgggaagtcttatttagatattcccatatcaagtttttaatattaaaaaatgggttccatgactctaaggaatgaaggttat

SEQ ID NO: 352940 - DNA, 201 bp, Homo sapiens
attttactattgtgtgatgagccagggtaattttttggctttcactgccagtgtttctgtgtactctgcatacgtctagtaggaaaacgtttacataattkttttcttgactcaggaccatgtctggacgaagacttcgagaggcagttcaagcagtaagttaaaaataaaataacatatctacatgttcatgtttggtga

SEQ ID NO: 352941 - DNA, 201 bp, Homo sapiens
accaaaaacttcattgatttctgcaggttaatggggctttggcatttgaaattctcatgttatgactaggacataaatgcccatatagaatatttaatacyacatcataaattagaaactagaggaaattctgggaccactatatgtctgttgaccatagagagagtgttatccctaacataattttcttgttttgggttc

SEQ ID NO: 352942 - DNA, 201 bp, Homo sapiens
ttctttggttggtggaattcagcagtaaagcaatctggctctgttatttgttgtaagtagttaaaaatgtgttatgaatcaatctctttactttttatagttttttttttttagattgcctatttcttcttgagtcaattttggtagtttgtctttctagaaatttttccattttatctaagttatctaatttgttagcgt

SEQ ID NO: 352943 - DNA, 201 bp, Homo sapiens
ttgcctatttcttcttgagtcaattttggtagtttgtctttctagaaatttttccattttatctaagttatctaatttgttagcgtacaactacttatagytttcctttataattctttttatttctttaaagtcagtattaatattctaatttctgattttaataatttaagtcttctctctgtttttcttggtcaatct

SEQ ID NO: 352944 - DNA, 201 bp, Homo sapiens
ttggtatgctcgaatagacagcatttaccatcctccctaatgtggaaagaaaaataaaaaatgagtactaaccatttgctttttgtgttacatagtccttrtattcattgcttcataaagttattagttgaataaggaagggcaaagttcaagatttttataacagtaggttttgattaagctgaaaatatgacaaactgt

SEQ ID NO: 352945 - DNA, 201 bp, Homo sapiens
aaccatttgctttttgtgttacatagtccttatattcattgcttcataaagttattagttgaataaggaagggcaaagttcaagatttttataacagtagkttttgattaagctgaaaatatgacaaactgttgatatttacttttgtttttagagctatacaaggattaagcaccatttttatttttatttttatttttt

SEQ ID NO: 352946 - DNA, 201 bp, Homo sapiens
caaagagaaaaacagtgtctgctgatagttctacgtgtacttaagcagcctggaatagccgtctccctttgcattaattgcccattctgcattgatagcartttttatcaagtttacctttgtccccaatagccagctgacaggcattctgacatgtacttgtttgccattagtttttccattgatctaagcacagctcaa

SEQ ID NO: 352947 - DNA, 201 bp, Homo sapiens
cttttcctataaattgcccaacacccctttgttggtttactctcccattactcaaacttgagcagaatgttgtttgtcatactcttgccaatcttagtatkaccatgctttacaattgttgccaagtaacaggcttaaaaaagtcaaatcactgttgttttcctttgaatttcttcaattcacggtttggctcaaataaaa

SEQ ID NO: 352948 - DNA, 201 bp, Homo sapiens
tttctatgctattgtaaatggaaattttttcttaatttcatttttggattgttcatagaaaatgtatagaaatacaacagatagctgtattgaccttataycctacaaccttgctgaactcatttattagttctaatattttaatggatgatttaggatttttctctatacaagatcatgtcatcttaaaatagaaatatt

SEQ ID NO: 352949 - DNA, 201 bp, Homo sapiens
tttgcaaaatgggaatggtaatacataacctatctcatatgcagttgtaaagattaaatctataatgtgaggaataaagagcgttaaatattcattgaaaktaatggcaaaatgccaattacttttgtaccaacctaatatagatatagggatatttgaaaattgagatttgtatttttatgacactattaaaaatggtaa

SEQ ID NO: 352950 - DNA, 201 bp, Homo sapiens
agacaagaatctaggaaaaaacttggtactcactccaggtgagagtggctcaatactttttaaaaattaaaataataattacactgtcatggtataattayctttttgcatgttaggcccctgtacaaggtcagacaatttgaaagtatgcttccaaccttgtactctggtcactgtccttatgttgtctaggggaataaa

SEQ ID NO: 352951 - DNA, 201 bp, Homo sapiens
ttagggaacagcaacaaaatctaagtacagggctgttacttgatgaatatggtgaggtcccaagagagtattacagctatgatatcttaaaaacatctgtrtaatctaaaacaagcagaaacaaaaagtgaatgtagaaacaaacaccaatttattaatgtatctttccactttgttgattatgggagcgagtgtggatgt

SEQ ID NO: 352952 - DNA, 201 bp, Homo sapiens
aagagagtattacagctatgatatcttaaaaacatctgtgtaatctaaaacaagcagaaacaaaaagtgaatgtagaaacaaacaccaatttattaatgtrtctttccactttgttgattatgggagcgagtgtggatgtttgaaggactctgggctttgaaatcaggaacaactgtggtctcagcttagttttattgctt

SEQ ID NO: 352953 - DNA, 201 bp, Homo sapiens
gctatgatatcttaaaaacatctgtgtaatctaaaacaagcagaaacaaaaagtgaatgtagaaacaaacaccaatttattaatgtatctttccactttgytgattatgggagcgagtgtggatgtttgaaggactctgggctttgaaatcaggaacaactgtggtctcagcttagttttattgctttctagcaatgtgac

SEQ ID NO: 352954 - DNA, 201 bp, Homo sapiens
ggctgttaagcttttggtagcttgaaattgatcatgatgaggagtttttacatcacagaaattggtgaacaatacaaatgagggcttttaattttattgtrtgttccagagagacagcttatcagagtgtctatgccatactcaaggtaaacattgctaacaattgctttgggtttgacacttttgctggatttttttttc

SEQ ID NO: 352955 - DNA, 201 bp, Homo sapiens
agtggcttggttagacgattctgacttgttttagaacaagtcatatgtaatcacttctgtgtcatgatgtggcactcagatgctggctagggccgcagttktctgatggcttgaccaaggtggaagaaattacttctaaggttgctcactcagatggctagcaagttagtgctgacaggatgcttcctatccacttaggct

SEQ ID NO: 352956 - DNA, 201 bp, Homo sapiens
aattccattaccagcatattagaatgcttgaaattcttagcatttgagttcctcttttgtgttaaaagtgaagtcactaaaaactccctaataaactttgstatatgggctgacataatggacttattcttctactacaatcaacttatctcttgattagtttccccttagcatttaactcagcacactttctaaatgtca

SEQ ID NO: 352957 - DNA, 201 bp, Homo sapiens
atgtcaattagtctgtgaagagctttagagaaaggggtctcaaacgtaaatccttacaagggctaatcaagttttgcagatgaggtggagtgaggaggtgkaccaaggaggagacaggtgcaattcttgtgaagaaggcctacagcctctcccaggtggcagctgtttgttgtagagagaacacatgatctcagatctcct

SEQ ID NO: 352958 - DNA, 201 bp, Homo sapiens
ttattctctattttttcttacaatgtcacccccaaaattcagagatccagctggcataggcagaaattgctttacattgatgttttgcaaactgaggcttkcaatgtattaaaggcttatgaaatcaatttcatggattgcaaaaaacattacataaaaaatgctaaaaaatagattgtaagatatagtgtatgacacaca

SEQ ID NO: 352959 - DNA, 201 bp, Homo sapiens
ttatgttaggtgatctctaagttttttgagctctgaatttccaggatttcagaaagaatcagctataaatctcttgcctaagtactttctgactacaaatkccttgtgacactgatatttgatgccttggcaactcctgactattgtctgaggaagggaaataaacaaaatgatgaatatataacatgtctaaataggtaa

SEQ ID NO: 352960 - DNA, 201 bp, Homo sapiens
tgcaacgtctatacacattacattaccacttatgaagaataccaggtaaagcaaaacgttttcatcatttaaatgaattataccccagtaaagactattgkgtcaaatgcagacttgctttgtaaactttcccagtcatgtttctgagagatgattatgtttcaggtataacaggtaagaggatgataagccagaggccgt

SEQ ID NO: 352961 - DNA, 201 bp, Homo sapiens
tcttccttgaatttgcagcagtcacatggactcctcttctccttccttctccttctccttcctcttcttttcttcttcctcctccttgctcctcatcccgmttctcctcctcctcctcttcttcctcccctctcttctcttctcctctcctctccactgccttctatttatgtattgcaaacccttttattcttatagtca

SEQ ID NO: 352962 - DNA, 201 bp, Homo sapiens
agttttttgagctctgaatttccaggatttcagaaagaatcagctataaatctcttgcctaagtactttctgactacaaatgccttgtgacactgatattygatgccttggcaactcctgactattgtctgaggaagggaaataaacaaaatgatgaatatataacatgtctaaataggtaaagaaaatcaaagctacata

SEQ ID NO: 352963 - DNA, 201 bp, Homo sapiens
agaaaaaaattaaaaagtcaaaaaatcgtgtggagatcctgacactcagagccagcttctattaaaagtttgttacatagtctttcagactttttctaagmacatttataatatttttcttaaaaagtgggattttattatatttacagtttgttaactctatttttaatttagcaataccttatgaatatctttcaatgc

SEQ ID NO: 352964 - DNA, 201 bp, Homo sapiens
ttggctcaaataaaaaaacaatagtctattggccatttcctgtttcttgttgcacttaccatgtaatgtgcaaggattttttaattttttaatttttattktttgacagagtctcgccctgtcgcccagcctggagtacagtggcgtgatctcagctcactgcaacctctgcctcctgggggttcaagtgattctcctgcc

SEQ ID NO: 352965 - DNA, 201 bp, Homo sapiens
ctcactgaatcatttcatgcccataccatgtgggttgaatatacatgtgttgcgaatgttgaacaccgcccccatatatttaacattgtattaatcttacraatcatatatatatttgtatatatatatatttatttatgctcagagctttgtatctctttcctttatcatcattatcatcatctgcagctgcagcagcag

SEQ ID NO: 352966 - DNA, 201 bp, Homo sapiens
ttctttgtacagggcacagcttgcacactggacatggaggcccaggtctgagtgcatggaatctgcttttacctttgtttcagagtagggcacatgcaatrtctgaatcactagagatctttttctccaaatgcctcctttacacagaaggaaaaaaaaattgtagtgttttatattaatatgttgtttactgattctata

SEQ ID NO: 352967 - DNA, 201 bp, Homo sapiens
atacccattctaactctgctctaaaagcaaaggaaggctttcctttgagttgtgaccataacacgctgtgggccctacattggaccaaacgttcatcctgyttgctcagagatagcctggtatatgcataaactactccttttccaagtttctgggaattgggttgaggttgctgcatctttggaagttggtctccaccac

SEQ ID NO: 352968 - DNA, 201 bp, Homo sapiens
agacagagtcatgcaactccagctgacagcccatcagacataacagtaaggccatcccataggatccagcctccaggtgagctgtcagcttaccacaaagrcaggagcaaaacaataaaaaaaatccacaaagccagtgtagacggaagaaactttccaaccaacccacagaatcatgaactaaattaggaggtggttgtt

SEQ ID NO: 352969 - DNA, 201 bp, Homo sapiens
cttgaaaagcacttgcacattggagcttgctctcttcctgctcttggaaaccctgtacgtgtaccattatgtacaacagcccacattggcctgctggatartgaaagcctttgaggtggaaaactcaggcaccctaacagacagagtcatgcaactccagctgacagcccatcagacataacagtaaggccatcccatagg

SEQ ID NO: 352970 - DNA, 201 bp, Homo sapiens
caggctgataatgtatgcttactaaatattagctcaaattaccagtaagtacacaattctaacttataaatgatcatcattcacagtagggttttgttttkttttttttctggaaaagggtctcactctgttgcccaggctgagtgtagtggcacgatcacagttcactgcagccttgacctcctgggctcaggcaatcct

SEQ ID NO: 352971 - DNA, 201 bp, Homo sapiens
cctatagtaaagattattatttttgtttcccttcagttttggacagtaactgggtagtggtcctggtaggagatcataatgtagcgattctttttttttttaattttttttaaattttattactattatactttaagttttagggtacatgtgcaccatgtgcaggtttgttacatatgtatacatgtgccatgttggtgt

SEQ ID NO: 352972 - DNA, 201 bp, Homo sapiens
caagccctgatcttaggttttacaatagtgatgttatccccaggagcaatttcaggaggttcagaatcttgcggccctccagctgcatgactcctaaaccrtaatttctcatcttgtggctaatttgttagtcctgcaaaggcagtctagtccccaggtaggaagggggcttgttttgggaaagggctgttatcatctttg

SEQ ID NO: 352973 - DNA, 201 bp, Homo sapiens
atctttttgaaaacttccagacttgactctgagcaactgggtagatactagcaccatttactcaaatgcggaagaatgatatagaaccaaaattgtcgggsgcgacctcagggggttatttcatgaattaacttttaaaatgtataaatatccattaggcttggtttgcatacaataggaacctaagaatagtggtttaaa

SEQ ID NO: 352974 - DNA, 201 bp, Homo sapiens
agaatggcgtgaacctgggaggcggagcttgcagtgagcagagatggtgccactgcactccagcctgggtgacagagcgagactccgtctcaaaaaaaaawatatatatatatataagatatgcacaggcacaactagccactgttctatgtgcttgttttctgatcaactctaatttgagttagatcactccttaggttt

SEQ ID NO: 352975 - DNA, 201 bp, Homo sapiens
aaggagttggtagactactagctaagatataagatacatggccgggcacagtggctcacacctgtaatcccaacactttgggaggctgaggcaggcagatmatgaggtcaggagatcaagaccatcctggctaacacggtaaaaccccgtctctactaaaaaaaatacaaaaaattagccgggcatggtggcgggcacctg

SEQ ID NO: 352976 - DNA, 201 bp, Homo sapiens
ctctatacaacttggtttctacccctcaaggagttggtagactactagctaagatataagatacatggccgggcacagtggctcacacctgtaatcccaamactttgggaggctgaggcaggcagatcatgaggtcaggagatcaagaccatcctggctaacacggtaaaaccccgtctctactaaaaaaaatacaaaaaa

SEQ ID NO: 352977 - DNA, 201 bp, Homo sapiens
gggtttcactctgctagccaggatggtctcgatctcctgacctcatgatccgcctgcctcggcctcccaaagtgctgggattacaggcatgagccaccacrcccggcccaaaaatcgtaggactctgaagactgatgctaaacctgctgtgtctgagctctataaatggaacaacaaagcctcgctggcagcacatctgtt

SEQ ID NO: 352978 - DNA, 201 bp, Homo sapiens
acttgtaattccagcactttgggaggccaaggcaggaggattgcctgaggccaagacttctgtaaccacccagcaagttctcctcatccgctgcccagacrgagctgatttatcaagacaagggaactgcaataaagagtttaattcacacagagccggctgtacagaaggccagagttttattattactcaaatcagtct

SEQ ID NO: 352979 - DNA, 201 bp, Homo sapiens
tgtttcaagtaatatttgttgaatgaaagcgtgattaaatatcttttgtcagaagacatcagacactttgggaggccgaggcaggcggatcacgaggtcakgagatcgagaccatcctggctaatgcagtgaaaccccatctctactaaaaatacaaaaaattagccgggcgtagtggcgggtgcctgtagtcccagctac

SEQ ID NO: 352980 - DNA, 201 bp, Homo sapiens
gaggccaagacttctgtaaccacccagcaagttctcctcatccgctgcccagacagagctgatttatcaagacaagggaactgcaataaagagtttaattyacacagagccggctgtacagaaggccagagttttattattactcaaatcagtctccccgaaaattcagagactggaatttttaaggataatttggtgggt

SEQ ID NO: 352981 - DNA, 201 bp, Homo sapiens
tgtatgtatgttgtgtgaaaagtggtaggtgtgtgaaagagaacacatatatgtatatgcagatgataattcatgtccgtacatgcagtcgtatgttgaayaagatcactttcacttttaattatactgcattgtgaattgcacaattatctaaactgggcattcacatgctcttttataaaccttcttaagcaccagatt

SEQ ID NO: 352982 - DNA, 201 bp, Homo sapiens
ttggtgggtagggggccagtgagtcgggagtgctgattgatcagattgaaggtaaaatcatagggagttggagctgtcctcttgcgctgaatcagttcctrcgtggggaccacgagaccagataagccagtttatccatctgggtggtgccagctgatctgtcaactcagggtttacaaaatatctcaagccctgatctta

SEQ ID NO: 352983 - DNA, 201 bp, Homo sapiens
tctcagagaaaatttgctagaaaatagcaaccaaccagaaacacacataaggaactgtatgcttatttctgtgtactagatagccttccttcctgagagcraggatgattgagaggaaagagtgtggcctgtgctcagatcctgactttctccttcactaaccttagacaaaacacaccattcccaaaaccttgcctcctt

SEQ ID NO: 352984 - DNA, 201 bp, Homo sapiens
ttttttttaaattttattactattatactttaagttttagggtacatgtgcaccatgtgcaggtttgttacatatgtatacatgtgccatgttggtgtgcygcacccattaactcgtcatttagcattaggtatatctcctaatgctatccctcccccctccccccaccccaattcttcattgcctattgaagagagagcg

SEQ ID NO: 352985 - DNA, 201 bp, Homo sapiens
gttagtgtaaccagtgatgaaacaaaaatcaccacatccattaagaaagaacatttatttcatgttttttgatcatggttctggagaactatttaatgtayattttacctggaaagacactgtataattcaattgtatatgaatttcatattgtataatttatttgtatgttttcaaagctataataccattgggttttaa

SEQ ID NO: 352986 - DNA, 201 bp, Homo sapiens
cagctttctggttttgttcatgttccctttgctgtaatgcttggcccttctatttagtctggcacaattcttctcattctcaagattcagttcacctgtcmcctcctatagaactttccctgaccctcctctatagcattaattactccagaaatgtgtacatttgactaatatttatagtgtgcctaccagagaccaacc

SEQ ID NO: 352987 - DNA, 201 bp, Homo sapiens
ttcatacttatataaatgtgactatctctccttctgtacctaggtatagaagttggtcctcagcctcaaggggttctgagagctgatatcttggatcaaakgagaaaaatgattaaacatgctcttgattttatacatcatttcaatgaaggtaagtaataatgaaggtaacgttatcaaacttaaccaccaaacatttaa

SEQ ID NO: 352988 - DNA, 201 bp, Homo sapiens
tgagaggatcaagactggaaaccactgcatcctggggatcccatgtttttaactcttgatgggaagacgatcccactgggcggagactgtaccgtgtaccycgtgtttgtgaatgaggccgcatattacgaaaagaaagaagcttttgcaaagacaactaaactaacgctcaatgcaaaaagtattcgctgctgtttacat

SEQ ID NO: 352989 - DNA, 201 bp, Homo sapiens
ctgagaggatcaagactggaaaccactgcatcctggggatcccatgtttttaactcttgatgggaagacgatcccactgggcggagactgtaccgtgtacyccgtgtttgtgaatgaggccgcatattacgaaaagaaagaagcttttgcaaagacaactaaactaacgctcaatgcaaaaagtattcgctgctgtttaca

SEQ ID NO: 352990 - DNA, 201 bp, Homo sapiens
atttattttgattgtttcctgagaggatcaagactggaaaccactgcatcctggggatcccatgtttttaactcttgatgggaagacgatcccactgggcrgagactgtaccgtgtaccccgtgtttgtgaatgaggccgcatattacgaaaagaaagaagcttttgcaaagacaactaaactaacgctcaatgcaaaaag

SEQ ID NO: 352991 - DNA, 201 bp, Homo sapiens
gcctcattagcataattaattatctgcagactacactacaattaaaattacaacttaaaatattttttgttaaatctcagatggtttagccaggagtaatktaatttaaaagcaggttggcaaacaatataaataaattaaaatctaaaattattctggaaattcaagtagtgatacttttgtgcataataaaaggatctt

SEQ ID NO: 352992 - DNA, 201 bp, Homo sapiens
tcctctccagttttactaccttagttgatttcctctgtggacagttagaatagcctcctaaagggtctctctgcatccagacttgctctgacccttcctgycatctattttccatctgatacctctaggaatcatcctaatatgcaaatcttatcatgtctctcccctgctgaaaattctttaaaaatgtatccagaatag

SEQ ID NO: 352993 - DNA, 201 bp, Homo sapiens
cactccagcctgggagacagagcaagactccgtctcaaaaaaataaataaataaataaaaataaagacatcagacctccctgtgatccgaagtagcagacrtacttaacttccatggtggattgttgtagatgggataccagagatgagaactaaagacaccatctgaattttcagagcttatattttgctgatttgtaat

SEQ ID NO: 352994 - DNA, 201 bp, Homo sapiens
taatatttatagtgtgcctaccagagaccaaccctgtgctaggtgcgggggacagaacaatgagcaagacacacagtctcccctcaaacagcttcgtatgygatgagaaaacagacaggtaaccaggtaatcactgcacagagtgataaatgctaaataggggcaattacaggagactggaagagcaggaaagacctaacc

SEQ ID NO: 352995 - DNA, 201 bp, Homo sapiens
ccaggtaatcactgcacagagtgataaatgctaaataggggcaattacaggagactggaagagcaggaaagacctaacccagtcttgatggatcacagaasgcccaaagaagtgggatccatcttgaggttgtgtatgtgtatgtgtttgggggaggaaaggaaaaaaattgagagcagtcaacaggattctagacaagtg

SEQ ID NO: 352996 - DNA, 201 bp, Homo sapiens
tgtatgtgtatgtgtttgggggaggaaaggaaaaaaattgagagcagtcaacaggattctagacaagtgtcttgaaattatctgtgatgaaaggccattgytgatttccaatctgctatagagcaatacttttgtaaaatgtaatttaaaaatggatttctagaaaaacgatcacatacttgaatattgtagcaatgtcaa

SEQ ID NO: 352997 - DNA, 201 bp, Homo sapiens
gaaaggccattgttgatttccaatctgctatagagcaatacttttgtaaaatgtaatttaaaaatggatttctagaaaaacgatcacatacttgaatattktagcaatgtcaaattgctataaaagtttctaaacacttactttaatttctgtacatatctcgcctgggaccagcagcagacaattggtggaccagtccct

SEQ ID NO: 352998 - DNA, 201 bp, Homo sapiens; identical to SEQ ID NO: 75492

SEQ ID NO: 352999 - DNA, 201 bp, Homo sapiens
aatggatttctagaaaaacgatcacatacttgaatattgtagcaatgtcaaattgctataaaagtttctaaacacttactttaatttctgtacatatctcrcctgggaccagcagcagacaattggtggaccagtccctgtcctcagacaatactttgaggaaaaaggaatatcatatacaagggccccaaacccctaact

SEQ ID NO: 353000 - DNA, 201 bp, Homo sapiens
atgttaaacatgcttttttcccagtgagtgcatgatataaaatattccaaataaaacagcaaagttggaaggagaacatataacatttctaattatttacratgagcttaatactccctcatattgaaatattttaaagatttggctcaacttgtaagggccaaacatatcagcaatgtttgttctggctaagagtagcat

SEQ ID NO: 353001 - DNA, 201 bp, Homo sapiens
tcctgctaatctccattttaaaaagaaaagacgagaaaatacaaatgcccagtaaacatatgaaaagatgttcaacatcactagtaattagagaaatgcamattaaaataagaagtcacttcccccattaagttgggaaaatattaaagtctgcaaatatcaagcgttggtaaatgtgtaggaaaaggggaaactctcatt

SEQ ID NO: 353002 - DNA, 201 bp, Homo sapiens; identical to SEQ ID NO: 75500

SEQ ID NO: 353003 - DNA, 201 bp, Homo sapiens
aataactttcctaagtctcaaatgagaccacggttaatctgagaaagttaggagagggctgtgtccagtcgctttcccatatttgtgtgtgtgtgtgtgtktatgtgtgtgtgtgcgtgtgtgtgtgtgatcataagagtggctgcagcaaactgcttctttctaggataaggtttgcctagaatgatcctgtcacatttc

SEQ ID NO: 353004 - DNA, 201 bp, Homo sapiens
taactttcctaagtctcaaatgagaccacggttaatctgagaaagttaggagagggctgtgtccagtcgctttcccatatttgtgtgtgtgtgtgtgtttrtgtgtgtgtgtgcgtgtgtgtgtgtgatcataagagtggctgcagcaaactgcttctttctaggataaggtttgcctagaatgatcctgtcacatttctt

SEQ ID NO: 353005 - DNA, 201 bp, Homo sapiens; identical to SEQ ID NO: 75504

SEQ ID NO: 353006 - DNA, 201 bp, Homo sapiens; identical to SEQ ID NO: 75505

SEQ ID NO: 353007 - DNA, 201 bp, Homo sapiens
gatgtccttcctcccgtcacagctaaatgttagatcttaacagtttctcttcaggtccacctattattttgtcagcataaacttgttcaccttttttactrtgttatgacttttaaatattttagcaatactgaaggaaatttaaagaaaaaagaccacaagagtttcctatttctaacaccactgattttttccatgttc

SEQ ID NO: 353008 - DNA, 201 bp, Homo sapiens
cgacacatacacaactaagcaataatgcaagtcaggccgaggtgttaactttcaaatatcgtttgtaaaaataaaacttgggaaacaggccgggtgcagtkgctcacgcctgtaatcccagcactttgggaggccgagacgggcggatcacgagatcaggagatcaagaccatcctggctaacagagggaaaccccgtctc

SEQ ID NO: 353009 - DNA, 201 bp, Homo sapiens; identical to SEQ ID NO: 75508

SEQ ID NO: 353010 - DNA, 201 bp, Homo sapiens; identical to SEQ ID NO: 75485

SEQ ID NO: 353011 - DNA, 201 bp, Homo sapiens; identical to SEQ ID NO: 75488

SEQ ID NO: 353012 - DNA, 201 bp, Homo sapiens
tgagctaaccggagtatttctggttaagcattggctagagaatggcgctgagattcagagaacagggctggaggtaaaaccatttattactaaccccagarcagtgaagaagtgtaccagatatattgactgtgacctgaatcgcatttttgaccttgaaaatcttgggtaagactatgctttgtattgtatatgtatgta

SEQ ID NO: 353013 - DNA, 201 bp, Homo sapiens
ttctcctgcctcagcctcccgagtagctgggattacaggctcacgtcaccacacccggctaacttttgtatttttagtggagatggggtttcaccatgttrgccaggatggtctcaatctcctgacatcatgatccacctgcctcggcctcccaaagtggtgggattacaggcatgagccaccttgcccagccttaagcag

SEQ ID NO: 353014 - DNA, 201 bp, Homo sapiens
ggaaacctgaagaagcagccttaggcagtgtttgtttttgtttttgtttttgttttttgagatggagtctcgctctgtcgcccaggctggagtgcagtggygcaatctcagctcactgcaagctccacctcccgggttcaagcaattctcctgcctcagcctcccgagtagctgggattacaggctcacgtcaccacaccc

SEQ ID NO: 353015 - DNA, 201 bp, Homo sapiens; identical to SEQ ID NO: 75491

SEQ ID NO: 353016 - DNA, 201 bp, Homo sapiens
gtctgcaaatatcaagcgttggtaaatgtgtaggaaaaggggaaactctcattacctgctggtgaacatataagtgaacatataagttggtaaagacattytagaggataatcttacagcatccacttcttaaaacacaccaatcttattacccagcgattccacatctcaaagaaacacaagcacaagcaacatgttgtt

SEQ ID NO: 353017 - DNA, 201 bp, Homo sapiens
ttcgatacaagatctcatatcagagcagaatatttagattgtaggacatggctatggcagagtcaggggtggcgttgaatgaataataattacacaaatawctttcctaagtctcaaatgagaccacggttaatctgagaaagttaggagagggctgtgtccagtcgctttcccatatttgtgtgtgtgtgtgtgtttatg

SEQ ID NO: 353018 - DNA, 201 bp, Homo sapiens
cttataacagcaaaaaaatgtcagaagatttgccatatgaagtgagaagggctcaagaaataaatcatttatttggtccaaaagacagtgaagattcctakgacattatttttgaccttcacaacaccacctctaacatggggtgcactcttattcttgaggattccaggaataactttttaattcagatgtttcattaca

SEQ ID NO: 353019 - DNA, 201 bp, Homo sapiens
acaccaattggctttaaaataacaataataatcatcaccttctaggatacatatatatgttaacacatcacagggaaagtcctagaagaaaacacaccaarctgataacaatagttaccggggacgggaggcaaaacccaggctaattttgtcttaattatattcaataagaataatgtatttatgtattatttctgtaat

SEQ ID NO: 353020 - DNA, 201 bp, Homo sapiens
agttgggaaaatattaaagtctgcaaatatcaagcgttggtaaatgtgtaggaaaaggggaaactctcattacctgctggtgaacatataagtgaacatayaagttggtaaagacattttagaggataatcttacagcatccacttcttaaaacacaccaatcttattacccagcgattccacatctcaaagaaacacaag

SEQ ID NO: 353021 - DNA, 201 bp, Homo sapiens
agatgtttttagttgccattgatacatattgtttttgtcataggaaaagaatttcctccctgcgccattgaggtctataaaattatagagaaagttgattrtccccgggatgaaaatggagaaattgctgctatcatccatcctaatctgcaggtaacatttgttctttctttaaaatgttgaaaataataatgctgtacc

SEQ ID NO: 353022 - DNA, 201 bp, Homo sapiens
ttcctaagtctcaaatgagaccacggttaatctgagaaagttaggagagggctgtgtccagtcgctttcccatatttgtgtgtgtgtgtgtgtttatgtgygtgtgtgcgtgtgtgtgtgtgatcataagagtggctgcagcaaactgcttctttctaggataaggtttgcctagaatgatcctgtcacatttcttcttcc

SEQ ID NO: 353023 - DNA, 201 bp, Homo sapiens
tctcaaatgagaccacggttaatctgagaaagttaggagagggctgtgtccagtcgctttcccatatttgtgtgtgtgtgtgtgtttatgtgtgtgtgtgygtgtgtgtgtgtgatcataagagtggctgcagcaaactgcttctttctaggataaggtttgcctagaatgatcctgtcacatttcttcttccttgagaac

SEQ ID NO: 353024 - DNA, 201 bp, Homo sapiens; identical to SEQ ID NO: 75507

SEQ ID NO: 353025 - DNA, 201 bp, Homo sapiens
tagtggtcctggtaggagatcataatgtagcgattctttttttttttaattttttttaaattttattactattatactttaagttttagggtacatgtgcaccatgtgcaggtttgttacatatgtatacatgtgccatgttggtgtgccgcacccattaactcgtcatttagcattaggtatatctcctaatgctatccc

SEQ ID NO: 353026 - DNA, 201 bp, Homo sapiens
tggaaacctgaagaagcagccttaggcagtgtttgtttttgtttttgtttttgttttttgagatggagtctcgctctgtcgcccaggctggagtgcagtgktgcaatctcagctcactgcaagctccacctcccgggttcaagcaattctcctgcctcagcctcccgagtagctgggattacaggctcacgtcaccacacc

SEQ ID NO: 353027 - DNA, 201 bp, Homo sapiens
tagtggagatggggttcaccatgttggccaggctgttctcgaactcctgacctcaggtgatccacccaactcggcctcccaaagtgctgggatgacaggcrtgagccaccacacccggcccagagatgtttttagttgccattgatacatattgtttttgtcataggaaaagaatttcctccctgcgccattgaggtctat

SEQ ID NO: 353028 - DNA, 201 bp, Homo sapiens
aaatgtcagaagatttgccatatgaagtgagaagggctcaagaaataaatcatttatttggtccaaaagacagtgaagattcctatgacattatttttgamcttcacaacaccacctctaacatggggtgcactcttattcttgaggattccaggaataactttttaattcagatgtttcattacattaaggtaatgttaa

SEQ ID NO: 353029 - DNA, 201 bp, Homo sapiens
ggattacaggcatgagccaccttgcccagccttaagcagtgttttaaaggaaaggtaaagactgggggagagaaaggaagaaagcactattggtgacaaamatatcaagtacaagaaacagaggccaaggtgatgatatcatggcaggctaaaacaggatttttcaggttttaggatactcttgaggagtacaaaaataat

SEQ ID NO: 353030 - DNA, 201 bp, Homo sapiens
tggtggctcacgcctgtaatcccagcacttggggaggctgaggcgggcggatcacaaggtcaagaaatcgagaccatcctggccaacatggtgagaccccrtctctactaaaaatacaaaaattagccgggcgtggtggtgcatgcccatagtcccagctactcaggaggctgaggcaggagaatcgcttgaacccgggag

SEQ ID NO: 353031 - DNA, 201 bp, Homo sapiens
cactgagtgtagatagggaagatgtttggactgtcgctcaataaatacttattcagtgtaacctgtgctggctgtgtggacacaccagtaagtatggcctrcacgctcaatggaatttatagtgtaggtacacaaaagtctaactttagtctagaaatgaagacagccagatgagatgacagaataatgagatgggagagg

SEQ ID NO: 353032 - DNA, 201 bp, Homo sapiens
gtgagaagggctcaagaaataaatcatttatttggtccaaaagacagtgaagattcctatgacattatttttgaccttcacaacaccacctctaacatggrgtgcactcttattcttgaggattccaggaataactttttaattcagatgtttcattacattaaggtaatgttaatgttattaatttataagttagcaaag

SEQ ID NO: 353033 - DNA, 201 bp, Homo sapiens
atacaagatctcatatcagagcagaatatttagattgtaggacatggctatggcagagtcaggggtggcgttgaatgaataataattacacaaataacttycctaagtctcaaatgagaccacggttaatctgagaaagttaggagagggctgtgtccagtcgctttcccatatttgtgtgtgtgtgtgtgtttatgtgtg

SEQ ID NO: 353034 - DNA, 201 bp, Homo sapiens
cccccacccccaacctatagaatcagaatcttcatcttaacaaaatccccagatgatttacaagcacctcaaagtttgagaagaactgttctggggttccygtggtgtgacagccatggtgcttgagggctcaaaggtccaaatccctggtgcgggacccttcagataactcagttgttaccctaatgtaggagcacattt

SEQ ID NO: 353035 - DNA, 201 bp, Homo sapiens
ctaggctggagtgcagtggtccaatcacagctcaatggagcctcaagttcctgggctcaagcaatcctcccacccagcctcctgagttgctgggactacargcgtgcaccaccacacctggctaatttctgtggtttttgtagagacagggttttgccacgttgcccaggctggtcttgaactcctgagctcaagcaatct

SEQ ID NO: 353036 - DNA, 201 bp, Homo sapiens
tgttgaagagcttgaaaatcataatgagaataattcctggccaggcgcggtggctcatgcctgtaatccttgcactttgggaggctgaggcaggcagatcwcttgaggtcaggagttcaagaccagtctgggcaacatggggaaaaccttgtctctactaaaaatgcaaaaattagctgggtgtggtggcatgcgcccata

SEQ ID NO: 353037 - DNA, 201 bp, Homo sapiens
catttcatttaagcaaaggattcggcaaatcaaaaattgtcaaccacgattaatttagactatccagcttggtggattttcaactgagcactcctatccamagaatgctgacaaatgaatcatagccgccatgtgaaaagtctgaagaagtgtgtagaagggcttcattcttgactctgtcctactcagaactgtagttag

SEQ ID NO: 353038 - DNA, 201 bp, Homo sapiens
catggtgaaaccctgcctctactaaaaatataaaaataagccaggaatggtggcccgtgcctgtaatcccagctactcgggaggctgaggcagaagaatcrcttgaacctgggaggcagaggttgcagtgagcagaaatcacaccactgtactccagcctgggtgacagagtgagactctgtctcgaaaaaataaataaat

SEQ ID NO: 353039 - DNA, 201 bp, Homo sapiens
ttaagcaattctcctgcctcagcctcctgagtagctgggattacaggtgcccaccaccatacccagcaaattttttgcatttttagtagagacagggtttmatcatgttggccaggctggtttcgaacttctgacctcaggtgatccacccgcctcggcctcccaaagtgctgggattacaggcgtgagccaccgcacccg

SEQ ID NO: 353040 - DNA, 201 bp, Homo sapiens
tacccaagctccagttcccacagggtgacatagagagagccagatggcagctatccatgccagtggttgcattctaggagggaacctttttttttttttttgagacggagtttcgctcttgttgccaaggctggagtacagtggcacaatctcggctcactgcaacctccgcctcctgggtttaagcaattctcctgcctc

SEQ ID NO: 353041 - DNA, 201 bp, Homo sapiens
tattgggaaataacagaagcgggtgaaaacaagatgagtgtaaaagaatgcagtatgttaatgggatggaagagaatgagggtagtgcagttggggtaaawggtttgccaaatagagaaggtgatgactggggagatgactttgtgggagacttgaacaggaaggaagggtctacaaaagtagtttaaagaaagagtattt

SEQ ID NO: 353042 - DNA, 201 bp, Homo sapiens; identical to SEQ ID NO: 75490

SEQ ID NO: 353043 - DNA, 201 bp, Homo sapiens
ggtgtgtgaaagagaacacatatatgtatatgcagatgataattcatgtccgtacatgcagtcgtatgttgaataagatcactttcacttttaattatacygcattgtgaattgcacaattatctaaactgggcattcacatgctcttttataaaccttcttaagcaccagattattaagttttcttttcaaatgtataca

SEQ ID NO: 353044 - DNA, 201 bp, Homo sapiens
ttacccaagctccagttcccacagggtgacatagagagagccagatggcagctatccatgccagtggttgcattctaggagggaacctttttttttttttttgagacggagtttcgctcttgttgccaaggctggagtacagtggcacaatctcggctcactgcaacctccgcctcctgggtttaagcaattctcctgcct

SEQ ID NO: 353045 - DNA, 201 bp, Homo sapiens
caaagtggtgggattacaggcatgagccaccttgcccagccttaagcagtgttttaaaggaaaggtaaagactgggggagagaaaggaagaaagcactatyggtgacaaaaatatcaagtacaagaaacagaggccaaggtgatgatatcatggcaggctaaaacaggatttttcaggttttaggatactcttgaggagta

SEQ ID NO: 353046 - DNA, 201 bp, Homo sapiens
tgggtcatcccaaaaatcaagtacactttgggaaacagggagttaaaaatctttcggaagttaacttggtataagagtatgaaaagcctctgttgctctasttctgaggaaatgctctcctttttcctaataaagctttccacagaagacaaactctgtacacaaaaaacaaggtaagtatgggaaataattgctgcaatt

SEQ ID NO: 353047 - DNA, 201 bp, Homo sapiens
ttatggatgtgagacaatcagaaaacagttatgagggaaggtgcaagagaaatggggtttattccatagccaggcttggtggttggggggaaagggtgctmccagaacacagaggcagtggtgagaggaaggagaaaaagagaggaaataagtaaaataataaacacaattaataaagtaataaaacacttgtggattctt

SEQ ID NO: 353048 - DNA, 201 bp, Homo sapiens
gacattatttttgaccttcacaacaccacctctaacatggggtgcactcttattcttgaggattccaggaataactttttaattcagatgtttcattacaytaaggtaatgttaatgttattaatttataagttagcaaaggacttgtacttttaagtcaattatggatgtgagacaatcagaaaacagttatgagggaag

SEQ ID NO: 353049 - DNA, 201 bp, Homo sapiens
aaaaatgtcagaagatttgccatatgaagtgagaagggctcaagaaataaatcatttatttggtccaaaagacagtgaagattcctatgacattatttttkaccttcacaacaccacctctaacatggggtgcactcttattcttgaggattccaggaataactttttaattcagatgtttcattacattaaggtaatgtt

SEQ ID NO: 353050 - DNA, 201 bp, Homo sapiens
gctgggatgacaggcatgagccaccacacccggcccagagatgtttttagttgccattgatacatattgtttttgtcataggaaaagaatttcctccctgmgccattgaggtctataaaattatagagaaagttgattatccccgggatgaaaatggagaaattgctgctatcatccatcctaatctgcaggtaacatttg

SEQ ID NO: 353051 - DNA, 201 bp, Homo sapiens
aacagaatactgtaatttgttagttgtctagagtctgacataaatttttagaggagaaaaaccaaatataatatatttattttgattgtttcctgagaggwtcaagactggaaaccactgcatcctggggatcccatgtttttaactcttgatgggaagacgatcccactgggcggagactgtaccgtgtaccccgtgttt

SEQ ID NO: 353052 - DNA, 201 bp, Homo sapiens; identical to SEQ ID NO: 75503

SEQ ID NO: 353053 - DNA, 201 bp, Homo sapiens
aatgtaagttttcatatataaacatttcaggtaagtttttacttaccacacagatttttcatattaaagatttggcgactggttctttttacactgtgttyttattatatgtttatattatctcaggcacagatgttgttcatctttttctttctgcttataacagcaaaaaaatgtcagaagatttgccatatgaagtga

SEQ ID NO: 353054 - DNA, 201 bp, Homo sapiens
aaacaatatgtaaaccaaatcatttcaaactgtaataagtgctgtaaaagaaatacacaaaataatatagcagagggtataacaaagggttccaattagayggagtggtcacaaagtgccatctcagagatggtggcactgaagttggaacctagaagatgagaagccagccatgtggaaggcaagtgagaggccctgagg

SEQ ID NO: 353055 - DNA, 201 bp, Homo sapiens
tctcagctcactgcaagctccacctcccgggttcaagcaattctcctgcctcagcctcccgagtagctgggattacaggctcacgtcaccacacccggctracttttgtatttttagtggagatggggtttcaccatgttggccaggatggtctcaatctcctgacatcatgatccacctgcctcggcctcccaaagtggt

SEQ ID NO: 353056 - DNA, 201 bp, Homo sapiens
gatgtttttagttgccattgatacatattgtttttgtcataggaaaagaatttcctccctgcgccattgaggtctataaaattatagagaaagttgattahccccgggatgaaaatggagaaattgctgctatcatccatcctaatctgcaggtaacatttgttctttctttaaaatgttgaaaataataatgctgtacct

SEQ ID NO: 353057 - DNA, 201 bp, Homo sapiens; identical to SEQ ID NO: 75510

SEQ ID NO: 353058 - DNA, 201 bp, Homo sapiens
cactcaggatgcactgcgacctgtcccctctgggtagatcagccttctcccaagtctcagtcgggtggatgggggaggtgtctgtgctggcccctggctgkatgactggggagacaatgggaagaacagcaatgcctggaatgcaggcgtcagtgcatgtctcagaggaaggcggggggccatgctgttggctccagacca

SEQ ID NO: 353059 - DNA, 201 bp, Homo sapiens
gaatgagcaaagcccggctcgctgaggctgcaggctgcaggcaagtgaggactgaaagggtaacgggctctgggctttgtcctctctttgttccggacatrtgagcaggacaagttctgtgtattcagaatctgtctgcacagtttgtagttcatgatgactgttcatccacagcattgctttgtgggcgtcctctctttt

SEQ ID NO: 353060 - DNA, 201 bp, Homo sapiens; identical to SEQ ID NO: 75512

SEQ ID NO: 353061 - DNA, 201 bp, Homo sapiens
tttttctgggaggccacgtggctaaatccttgcaggacgtggcctctgagcctgtctgcttccgcccggcttccgcccacagtcaactgcctgtgctgtgygcgtcagagcccgcgcctttccctgctgagtggcatccgtggtgtgggtgcggcaccgcttgtgaccctgttttaagcaatgacacgtgagatgttatca

SEQ ID NO: 353062 - DNA, 201 bp, Homo sapiens; identical to SEQ ID NO: 75513

SEQ ID NO: 353063 - DNA, 201 bp, Homo sapiens
ggtttctgtgcgaacgtggttttttatttcacctgggcagatacctaggagagagattgctgtgttgtctgaagctttcaagctgttctccagagcggctrcaccatccccttccccctgcaatgggtgggaggtcacgagcacctgctgctccagcgggcggtggtggtgtctcgttgagttcatgattctctcatgatg

SEQ ID NO: 353064 - DNA, 201 bp, Homo sapiens
cccctgcaatgggtgggaggtcacgagcacctgctgctccagcgggcggtggtggtgtctcgttgagttcatgattctctcatgatgggtggcgttgagcrcctcttcctgttcgtgtcattccgttttcaactggggcctttgttttcttgagttttgagagcttttaaaattcgggacccaagtgtcagctgtgcgatt

SEQ ID NO: 353065 - DNA, 201 bp, Homo sapiens
tctcatgatgggtggcgttgagcacctcttcctgttcgtgtcattccgttttcaactggggcctttgttttcttgagttttgagagcttttaaaattcggracccaagtgtcagctgtgcgattttaaatatcatctcccagcttgtggtttgtcttcccattcacctaacagcgtctttaaaatcaggagttttaggttt

SEQ ID NO: 353066 - DNA, 201 bp, Homo sapiens
ggggacccctccctcgagctctcacgggtggcacctggagtgtgggggcccctccctcaagctttcatgggtggcacctggagtgtgggggcccctccctsaagctctcacgggcggcacctggagtgtgggggccactccttgagctctcatggacaataccactgcttggctgctgcagaatccagacaccatcccaga

SEQ ID NO: 353067 - DNA, 201 bp, Homo sapiens
ggtgctgtacccacggcctggggctcctgcactcgtgaaggagctgccacttttgcaagcaagggccgcgtcctgaggggctaaacctgccacctttgcaygcgagagccacgtcccaaggggctaaacctgcctttggttgtgccgcgtaggctgatggtctcaggctcagctgccctgcccctcccagtgctggagaag

SEQ ID NO: 353068 - DNA, 201 bp, Homo sapiens
gtcagagacaccgcacaggggcctctgcgacaggcatgcaggcagaccctgcaaggtgaagccgcacagatgctctggggctgcttaaatctcagcgtacrgggggtttgcatctgctgacagcaggcccgggaacatttccagttcagccaaggagtcggtgcagcaggtggagtacagctgccctgcggggcctggctc

SEQ ID NO: 353069 - DNA, 201 bp, Homo sapiens
ttccctcttctctaaggcagagcccacggcaggttccctcgggcgccggggacgctctctcttctctaaggcagagcccacggcagattccctcgggcgcyggggacgctctctcttctctaaggcagagcctgacggcaggttccctcgggcgccagggatgttccctcttctctaaggcagagcatacggcagtttccc

SEQ ID NO: 353070 - DNA, 201 bp, Homo sapiens
tccacactgtcacatgcccggggcacagcgagcggcacctggagtgtggggacccctccctcgagctctcacgggtggcacctggagtgtgggggcccctscctcaagctttcatgggtggcacctggagtgtgggggcccctccctcaagctctcacgggcggcacctggagtgtgggggccactccttgagctctcatg

SEQ ID NO: 353071 - DNA, 201 bp, Homo sapiens
agtgctggagaagtggaagaacatcacgggccacaccctgctggagcggtatggcatgaccgagatcggcatggctctgtccgggcccctgaccactgccrtgcgcctgccaggtacgagcacttcccacagctgcgttcctcttccactgttctctgagccccccaaggtgggccagtctcgaaccacccacattcggac

SEQ ID NO: 353072 - DNA, 201 bp, Homo sapiens
cagctgcgttcctcttccactgttctctgagccccccaaggtgggccagtctcgaaccacccacattcggactgaagggcggcatggaggatgctcccccrtgggacaggccactcggccaggagagcactcaggatgcactgcgacctgtcccctctgggtagatcagccttctcccaagtctcagtcgggtggatgggg

SEQ ID NO: 353073 - DNA, 201 bp, Homo sapiens
cccaaggtgggccagtctcgaaccacccacattcggactgaagggcggcatggaggatgctcccccgtgggacaggccactcggccaggagagcactcagratgcactgcgacctgtcccctctgggtagatcagccttctcccaagtctcagtcgggtggatgggggaggtgtctgtgctggcccctggctggatgactg

SEQ ID NO: 353074 - DNA, 201 bp, Homo sapiens
ggcatgaccgagatcggcatggctctgtccgggcccctgaccactgccgtgcgcctgccaggtacgagcacttcccacagctgcgttcctcttccactgtkctctgagccccccaaggtgggccagtctcgaaccacccacattcggactgaagggcggcatggaggatgctcccccgtgggacaggccactcggccagga

SEQ ID NO: 353075 - DNA, 201 bp, Homo sapiens
gcaaggtgagtgtgagggctggctggctgctgggctgggaggaggagagactgtaggctcacgcccctttgctgggcctggggagccatgggggctgttargtgtattctgagtgtaaagtctcggtttggctggggcatcctgagcagaatgacagggccatggcagcgagatcctcagctgccgtgcagagctgccagt

SEQ ID NO: 353076 - DNA, 201 bp, Homo sapiens
tgaaaagaagtcagtgtgagtgatgagaaatacatcctagtctcagaccccaggaaaccgccgtcagtgctggtggcccctgccctgggccggctcccgcrttagtctcagaccccaggagacctccacctccgtcagtgctagcggcccctgctctgggctgactcgcgcatctccacgatggctgcggcaccagctgtt

SEQ ID NO: 353077 - DNA, 201 bp, Homo sapiens
actgcagcgttggtcccgggtgtcgcacagtggtgctgtacccacggcctggggctcctgcactcgtgaaggagctgccacttttgcaagcaagggccgcstcctgaggggctaaacctgccacctttgcacgcgagagccacgtcccaaggggctaaacctgcctttggttgtgccgcgtaggctgatggtctcaggctc

SEQ ID NO: 353078 - DNA, 201 bp, Homo sapiens; identical to SEQ ID NO: 75515

SEQ ID NO: 353079 - DNA, 201 bp, Homo sapiens
aagaacatcacgggccacaccctgctggagcggtatggcatgaccgagatcggcatggctctgtccgggcccctgaccactgccgtgcgcctgccaggtaygagcacttcccacagctgcgttcctcttccactgttctctgagccccccaaggtgggccagtctcgaaccacccacattcggactgaagggcggcatgga

SEQ ID NO: 353080 - DNA, 201 bp, Homo sapiens
tgatgagaaatacatcctagtctcagaccccaggaaaccgccgtcagtgctggtggcccctgccctgggccggctcccgcattagtctcagaccccaggaracctccacctccgtcagtgctagcggcccctgctctgggctgactcgcgcatctccacgatggctgcggcaccagctgtttcttcggtggctaaagctct

SEQ ID NO: 353081 - DNA, 201 bp, Homo sapiens
gttggtcaggctggtctcgaactcccgacctcaggtgatccacccacttcagcattccaaagtgctgggattacaggcgtgagccactgcacctggccacraaaaagaaatcttttttgttgttgttgttgttgttgttgagacacggtttcactcttgtcgcccaggctggagtgcaatggcacgatcctggctcactgc

SEQ ID NO: 353082 - DNA, 201 bp, Homo sapiens
gcctttcgaaggtgaagcctcccacccgccaaagccccagagagctgagagcagggtcagaagctggggctggtactgagagtgggatgagaggggtcaasggtggtacagccctccctctggcaggctctttctccctgccccaagtgtcccaaggagtccagccctgacatctcccctgactctcctgggaccccccag

SEQ ID NO: 353083 - DNA, 201 bp, Homo sapiens
cctcccaggtaatccccctgaggccttcctgagcacccccaaactcagataagctcaatcaacaccatttcccagctccagccttaccccctcagtcattscaggccctgccaacctcagggttcctcagactttctgggactccaagaacccactttgaaagtgctgtaactggccgggagccatggcttatgcctgtaa

SEQ ID NO: 353084 - DNA, 201 bp, Homo sapiens
catggaaggaagttttgtttgttcgtttgttttgttttggtttggtttggtttttgagatggagtctggctctgtcgcccaagctggagtgcagtggcgcrataccagctcactgcagtctctgccccctgggttcaagcgattctcctgcctcggcctcctgagtagctgggattacaggcgtgcaccactatgctcagc

SEQ ID NO: 353085 - DNA, 201 bp, Homo sapiens
ggtcctccgggaaggcattggaggtgcaaatggctcggtcccatctgtctctctctctctctcatctccacttcagaaatacctggagaattacctcaacygtctcttgaccatgtctttctatcgcaactaccatgccatggtaaggtccaggggccgattttagatgtggagcaggattatcagaccctcggggaggag

SEQ ID NO: 353086 - DNA, 201 bp, Homo sapiens
ttatcaccaaggactgggtgcagctggaccggcctttcgaaggtgaagcctcccacccgccaaagccccagagagctgagagcagggtcagaagctggggmtggtactgagagtgggatgagaggggtcaacggtggtacagccctccctctggcaggctctttctccctgccccaagtgtcccaaggagtccagccctga

SEQ ID NO: 353087 - DNA, 201 bp, Homo sapiens
ctggggctggtactgagagtgggatgagaggggtcaacggtggtacagccctccctctggcaggctctttctccctgccccaagtgtcccaaggagtccarccctgacatctcccctgactctcctgggaccccccagatttcattgacagggagacgacccctcggatgccatggcgggacgttggggtggtcgtccatg

SEQ ID NO: 353088 - DNA, 201 bp, Homo sapiens
aacggggggtatggagagatggtatgggggaaggggtctagcctagttggacttagattgttgggagagtctccccaagccttactggcgtccatgccccygcccacagatcttccgctgcctgccatccaatgccacgcgttccctgcggactctccgggagtacgtggccgtggagcccttggccacggtcagtccccc

SEQ ID NO: 353089 - DNA, 201 bp, Homo sapiens
ggctggggaatcagaccctctgtttcattcttcctctcggtctctctcactctttcagtgctcctctctttggccctggctctgtacagccccatgacttmcccttgcccctggcttgggtgtgttccccctacagcctcccaccccgcgcccagactcaccagccaccccagacctctctcacaaccaattcttctggct

SEQ ID NO: 353090 - DNA, 201 bp, Homo sapiens
tcacttgaacccgagaggtggagattgtagtgagccgagatcgcaccattgcactccagcctgggcaaaaagagtgaaactccgtctcaaaaaaaaaaagagagagagagttagtggcccagggtcaacggggggtatggagagatggtatgggggaaggggtctagcctagttggacttagattgttgggagagtctccc

SEQ ID NO: 353091 - DNA, 201 bp, Homo sapiens
ctgggcccaagcacacagtgtgccccgcatccaccccaggttctgcaaacatcaatgaccggagcttgctggggaagcgggacagtgagctggccgtgctratcgaggacacagagacggaaccatccctcatgaatggggcagagtatcaggcgggcaggtttgccttgagtctgcggaagcactgcttcgggtagagct

SEQ ID NO: 353092 - DNA, 201 bp, Homo sapiens
agtctctgaaagtgcaccccttggtgttcgcacctggggtccctgtcacagcccaggtggtgggcaccgaaagatataccagcggatccaaggtggccagwctggccccagggagggggaaagggagggcggcccggaatggatccaaggtggctgggctggccccagggaaggggcaaaaggagggctggccagagtggg

SEQ ID NO: 353093 - DNA, 201 bp, Homo sapiens
aggcctcttcttttcctccgagccccatctccagtgttttcaggaaccagagcacccagcctcccagctcttacctgaccttcatccatcctttccacagwtttgccgttgcctattctccagcccgagatgcaggcaacagagagatgccctctctaccccgggcaggtcctgagggctccaccagacatgcagccagca

SEQ ID NO: 353094 - DNA, 201 bp, Homo sapiens; identical to SEQ ID NO: 75523

SEQ ID NO: 353095 - DNA, 201 bp, Homo sapiens
gaccttggagactcctctgaatcagctgcctcccaggtaatccccctgaggccttcctgagcacccccaaactcagataagctcaatcaacaccatttccyagctccagccttaccccctcagtcattccaggccctgccaacctcagggttcctcagactttctgggactccaagaacccactttgaaagtgctgtaact

SEQ ID NO: 353096 - DNA, 201 bp, Homo sapiens
gaggttgattagcagggctgcagtgtgggagaattaggcagtctgaggcttcaggggagggaaaagtgtccatcctggcccagcacctgtcagacatcacytccgccctctccctctgccctaaggagaactgacaacttcctcttcatgctccctccacctggcagagacttccctcccagtatacataatactttattg

SEQ ID NO: 353097 - DNA, 201 bp, Homo sapiens; identical to SEQ ID NO: 75525

SEQ ID NO: 353098 - DNA, 201 bp, Homo sapiens
gaatcctgaaggcccacaagtaaggtggactgtcaggaaggtggggactgtgggtgtggtttgagcccggttgaagggggtggggtttgagggaccagtcscacctctgactccaccccctccccagacaggggtggtgttaccgagtctacgtgcttttgcccttactccctggcttcgagggtgacatctccacgggcg

SEQ ID NO: 353099 - DNA, 201 bp, Homo sapiens
gatttatggacatctcatcgttcccatccaggtccttgattctcaagtgcagcagctaccggcaggcacggtggtgggcccaagagatcactgagctggcrcagggcccaggcagagacttcctacagctgcaccggcatgacagctacgccccaccccggcctgggaccttggcccggtggtgagacactgacatccctt

SEQ ID NO: 353100 - DNA, 201 bp, Homo sapiens
ggccagacttggatctccgagaccccatctgtgatgacttcttccagttgtggcaagacatggctgagagcaacgccaatatctatgagcaggtgggaacytgggaggggtgggggagagtggcctggggaaatttgtggattatcctgctcagggtaggatggagagaagcgccaccatacagtcattattggaaggggg

SEQ ID NO: 353101 - DNA, 201 bp, Homo sapiens
ggccgtgctgatcgaggacacagagacggaaccatccctcatgaatggggcagagtatcaggcgggcaggtttgccttgagtctgcggaagcactgcttcrggtagagctggggcgggatgccacagggtgggagggagatgggggcgtctgccttttgagcaggacaagaggtagcaccgcataggtactcccggagcca

SEQ ID NO: 353102 - DNA, 201 bp, Homo sapiens
ttctgcaaacatcaatgaccggagcttgctggggaagcgggacagtgagctggccgtgctgatcgaggacacagagacggaaccatccctcatgaatgggrcagagtatcaggcgggcaggtttgccttgagtctgcggaagcactgcttcgggtagagctggggcgggatgccacagggtgggagggagatgggggcgtc

SEQ ID NO: 353103 - DNA, 201 bp, Homo sapiens; identical to SEQ ID NO: 75531

SEQ ID NO: 353104 - DNA, 201 bp, Homo sapiens
tgaggctcgtgtaggggtggagggtccaagaaggaatgttgcaggccagtgctttggtagaggggatggggtactggggagagtgccctgggcccaagcasacagtgtgccccgcatccaccccaggttctgcaaacatcaatgaccggagcttgctggggaagcgggacagtgagctggccgtgctgatcgaggacacag

SEQ ID NO: 353105 - DNA, 201 bp, Homo sapiens
tggtaaggtccaggggccgattttagatgtggagcaggattatcagaccctcggggaggagggccaggggccccagggtctgaggggctgaaagccaggtrtctcctccgggcttttgttttcctctgcagacagagttcctggaagtcagtcagctgtcctttatcccggacttgggccgcaaaggactgtgagtgtctg

SEQ ID NO: 353106 - DNA, 201 bp, Homo sapiens
acttttcctggacaaccaagaagaaataccgtcattttcaggagctgcatcgggacctcctgagacacaaagtcttgatgagtctgctccctctggctcgwtgagggcgaccggactgcttcctgtagagggcaggtgctccccaccctcctttctgtctgtctcaccccggggccacaacctttcctccctgcaactctg

SEQ ID NO: 353107 - DNA, 201 bp, Homo sapiens
gtgctgggattccaggcgtgagccaccacgcctggccacctccaggcctcttcttttcctccgagccccatctccagtgttttcaggaaccagagcacccmgcctcccagctcttacctgaccttcatccatcctttccacagatttgccgttgcctattctccagcccgagatgcaggcaacagagagatgccctctcta

SEQ ID NO: 353108 - DNA, 201 bp, Homo sapiens
ccgtcattttcaggagctgcatcgggacctcctgagacacaaagtcttgatgagtctgctccctctggctcggtgagggcgaccggactgcttcctgtagmgggcaggtgctccccaccctcctttctgtctgtctcaccccggggccacaacctttcctccctgcaactctggccactgtgctgcctcccctgaccccag

SEQ ID NO: 353109 - DNA, 201 bp, Homo sapiens
gcccccgagggcaggccctgagccccggccccgcctcggccggccccgcctcggccggggcgtgggctccggctgcagctccggtctgctctcttggctcsggaacccccgcgggcgctggctccgtctgccagggtgagggggccgggaaggggcgcgcgggggtcccgggtctcggaaatcgggcggggacggaacggg

SEQ ID NO: 353110 - DNA, 201 bp, Homo sapiens
tcccttctgagcttgtctgtggctttcttgaccccctgtgtaatctctgagtccttcatcctctcttttctcatctgaaccctcctgacctcaatgacccrccccgtgacttctttaatcttcctgacctttgacatctttaaccacattgatctctctgatttcgcgccgacctttctgacccccaaacttggtcatctc

SEQ ID NO: 353111 - DNA, 201 bp, Homo sapiens
tgcacctggctataaacttctaaaacagccaaaaccaatccacagtgatggaaatcagatcagcagttgcctgtggcagggtatggggaaatgattgcctrtagtggggcacacgagggaacattccaggacgataaaaatgtcctatattttgataggactggtgattgcgtgggaacatacacttgctgatcctcatgg

SEQ ID NO: 353112 - DNA, 201 bp, Homo sapiens
cctgagctcaagtgatccacctgctgcggcctccccaagtgctgggattccaggcgtgagccaccacgcctggccacctccaggcctcttcttttcctccragccccatctccagtgttttcaggaaccagagcacccagcctcccagctcttacctgaccttcatccatcctttccacagatttgccgttgcctattctc

SEQ ID NO: 353113 - DNA, 201 bp, Homo sapiens
aggcgcccaccaccacgcccagctaatttttgtatttttagtagagacagggtttcgctgtgttggccaggctgatcttgaactcctgacctcaggcttcrgcctcccaaagtgctgggattacaggcatgaaccaccgcccctggccaaaaaaaaaaaaaaatcttttttttttttctttttttttgagagggagtctca

SEQ ID NO: 353114 - DNA, 201 bp, Homo sapiens
actgggattgtggatgaaggactaaggtaggggatgggggctcgaaggggtcggtggggcgttgcaaactggtcaggcgtcatccgcgggcggtcaggagkccgtgggggaagaggaggatctggaagagatggaggacctgcgggagttaggatggggggcgggttctgcaggacagctcgcctccctgaggcttcccaa

SEQ ID NO: 353115 - DNA, 201 bp, Homo sapiens
agtggtcaggccgcagggggagggggttgcctgtgggtggaggttgattagcagggctgcagtgtgggagaattaggcagtctgaggcttcaggggagggraaagtgtccatcctggcccagcacctgtcagacatcacctccgccctctccctctgccctaaggagaactgacaacttcctcttcatgctccctccacct

SEQ ID NO: 353116 - DNA, 201 bp, Homo sapiens
gtggctcatgcctgtaatcccagcactttgggaggccaaggcccggtggatcacctgaggtcaggagtttgagatcagcctcccaacatggcaaaaccccrtctctactaaaaatacaaaaaaattagctaggtgtggctgggaggctgaggcaggagaatctcttgaactcaggaggcagagatttcagtgagccgagat

SEQ ID NO: 353117 - DNA, 201 bp, Homo sapiens
ggttgagtcctgaggtttacctgaagcgtccggcccattcagatgactggagactggacattatgctcaagaggaaggcggtgaggagagtggtcaggcckcagggggagggggttgcctgtgggtggaggttgattagcagggctgcagtgtgggagaattaggcagtctgaggcttcaggggagggaaaagtgtccatc

SEQ ID NO: 353118 - DNA, 201 bp, Homo sapiens
ggaccacagccaccacacccaactaatttttgtatattttgtagagatggggtgctgctgtgttgcccaggctggtcttaaattcctgagctcaagtgatycacctgctgcggcctccccaagtgctgggattccaggcgtgagccaccacgcctggccacctccaggcctcttcttttcctccgagccccatctccagtg

SEQ ID NO: 353119 - DNA, 201 bp, Homo sapiens
acctcgcccggctaattttttgtatttttagtagagacggggtttcaccgtgttagccaggatggtctagatctcttgacctcgtgatctgcccgcctccrcctcccaaagtgctgggattacaggcatgagccaccacgcccggccaaaaaaaaaaaacttttgtgttttgtttgtttgtttgttttctttttgagacgg

SEQ ID NO: 353120 - DNA, 201 bp, Homo sapiens
ccggatctagtcctctggcagggagagggtgtggggacaggcgaagagatgagaggcaggatgacagagactgcagctgaggctcgtgtaggggtggagggtccaagaaggaatgttgcaggccagtgctttggtagaggggatggggtactggggagagtgccctgggcccaagcacacagtgtgccccgcatccacccc

SEQ ID NO: 353121 - DNA, 201 bp, Homo sapiens
aaggaggctgtcactcctgtgagcctctgacgctacgcagaccatagctggcctttcactgcagggagaaggagagagaccagactctatgtaggaagagyttctggagtgagaggaggtgggacagggccctgtgcacacagagccacctctcacctcacttcccctcctgtcacgcagtggggacagcatggcgggact

SEQ ID NO: 353122 - DNA, 201 bp, Homo sapiens
gcatgcacgtgttacttttgtttcaacataaatgagatcatgcaacctcttctgtgacttattttttcacttaatacctgtgtgagagattagacacttakattatttcccatttttcactcttacaaacaatgtgatgaacacaacatttgcctaggcattgtattagatgtattcctagacatgtaattaccatgtata

SEQ ID NO: 353123 - DNA, 201 bp, Homo sapiens
ccgggggccgccccgcccccgagggcaggccctgagccccggccccgcctcggccggccccgcctcggccggggcgtgggctccggctgcagctccggtcygctctcttggctccggaacccccgcgggcgctggctccgtctgccagggtgagggggccgggaaggggcgcgcgggggtcccgggtctcggaaatcgggc

SEQ ID NO: 353124 - DNA, 201 bp, Homo sapiens
caagctggagggacacacgtggaaaaggtttgggagtgtggaaaggggctactctgggagaggcactaggatctgattccccaactcaccaccaggaggarggtgtccgtgtgtctattctgctgtttaaagaagtggaattggccttgggcatcaacagtggctatagcaagagggcgctgatgctgctgcaccccaaca

SEQ ID NO: 353125 - DNA, 201 bp, Homo sapiens
cctgctgtacatgtgcctcgagacaggtgccatctcatttgttcagctctttgaccctggctttgaggtgcaagtggggaaaaggagcacggaggcacggyacggcgtgcggatcgatacctcccacaggtgaggcctccctggggtgagagacaccagctgagtggtgagcccacccacggccttgctgggagttgagaa

SEQ ID NO: 353126 - DNA, 201 bp, Homo sapiens
cagagttcctggaagtcagtcagctgtcctttatcccggacttgggccgcaaaggactgtgagtgtctggcccccttcacccaggcatccgtagacatcastcttaatttctccctgcctgagattggggcaagcagtgcagggtgggctgggggtctggagtcctcatcccgcctctcttcctgattgtcccacagggag

SEQ ID NO: 353127 - DNA, 201 bp, Homo sapiens; identical to SEQ ID NO: 75524

SEQ ID NO: 353128 - DNA, 201 bp, Homo sapiens
ctccctctggctcggtgagggcgaccggactgcttcctgtagagggcaggtgctccccaccctcctttctgtctgtctcaccccggggccacaacctttcytccctgcaactctggccactgtgctgcctcccctgaccccagttaccaggaaactttccctgctcagctttccctgtccatggttctgtgccagcatctc

SEQ ID NO: 353129 - DNA, 201 bp, Homo sapiens
catcattggtcagtgccggatctagtcctctggcagggagagggtgtggggacaggcgaagagatgagaggcaggatgacagagactgcagctgaggctcrtgtaggggtggagggtccaagaaggaatgttgcaggccagtgctttggtagaggggatggggtactggggagagtgccctgggcccaagcacacagtgtg

SEQ ID NO: 353130 - DNA, 201 bp, Homo sapiens
cagcctccacttctctccctctttcttttctctcaggaccctgtgtcgtggggagtattcaatcctgcatcgccttaaagcagccagtgagtgctgggggytgggggctcaagccctgggcccctgggagagggagattggggcgctgcaggcctgggggtgggggaaggaggctgtcactcctgtgagcctctgacgcta

SEQ ID NO: 353131 - DNA, 201 bp, Homo sapiens
aggggctggaggtagggagggagccagggcagattggcacctcctgctgactctgccatccctccacgtcagaccaccaaggccaagtacaagactcccayatacccctacctgcttcccaagtctaccagcacggccaatcagctccccttcacacttccaggagggcagtgcaccaccgtacaggtgaggccccccact

SEQ ID NO: 353132 - DNA, 201 bp, Homo sapiens
tggagagatggtatgggggaaggggtctagcctagttggacttagattgttgggagagtctccccaagccttactggcgtccatgcccccgcccacagatyttccgctgcctgccatccaatgccacgcgttccctgcggactctccgggagtacgtggccgtggagcccttggccacggtcagtccccccttggctcggt

SEQ ID NO: 353133 - DNA, 201 bp, Homo sapiens
atcgcattcaccattccctaggtcttgcgatcagtggaccgctggtcagcagggactctggagaactccatcctcaatgcctacctgcacaccatcagggrgagccagcacttcctctacattgaggtctgactgggaggaggtgggggagagcatggaaggggtgtcccaggagagagacctggggaatgagtggagtca

SEQ ID NO: 353134 - DNA, 201 bp, Homo sapiens
cctggccacctccaggcctcttcttttcctccgagccccatctccagtgttttcaggaaccagagcacccagcctcccagctcttacctgaccttcatccrtcctttccacagatttgccgttgcctattctccagcccgagatgcaggcaacagagagatgccctctctaccccgggcaggtcctgagggctccaccaga

SEQ ID NO: 353135 - DNA, 201 bp, Homo sapiens
ggccaagtacaagactcccacatacccctacctgcttcccaagtctaccagcacggccaatcagctccccttcacacttccaggagggcagtgcaccaccrtacaggtgaggccccccacttcagccagccctcccctttgtctccttcagcctaacaccccaacccactctccctggtgtgagagctgcccacactctcc

SEQ ID NO: 353136 - DNA, 201 bp, Homo sapiens
agggtcaacggggggtatggagagatggtatgggggaaggggtctagcctagttggacttagattgttgggagagtctccccaagccttactggcgtccaygcccccgcccacagatcttccgctgcctgccatccaatgccacgcgttccctgcggactctccgggagtacgtggccgtggagcccttggccacggtcag

SEQ ID NO: 353137 - DNA, 201 bp, Homo sapiens
atcacttgaacccgagaggtggagattgtagtgagccgagatcgcaccattgcactccagcctgggcaaaaagagtgaaactccgtctcaaaaaaaaaaaragagagagagttagtggcccagggtcaacggggggtatggagagatggtatgggggaaggggtctagcctagttggacttagattgttgggagagtctcc

SEQ ID NO: 353138 - DNA, 201 bp, Homo sapiens
ccgtgcctggctaatttttgtatttttttgtagagatggggttttgccatattgcccaggctggtcttgaattcctgagctcaagcaatccacctgcctcrtcctcccaaagtgctgggaatacaggcgtgagccaccgcacccagccaattttgaattacctgagtagggacaatgtaacttttctggtactcaggttct

SEQ ID NO: 353139 - DNA, 201 bp, Homo sapiens
atgccaccgtgcctggctaatttttgtatttttttgtagagatggggttttgccatattgcccaggctggtcttgaattcctgagctcaagcaatccacckgcctcatcctcccaaagtgctgggaatacaggcgtgagccaccgcacccagccaattttgaattacctgagtagggacaatgtaacttttctggtactca

SEQ ID NO: 353140 - DNA, 201 bp, Homo sapiens
ttgtttttgttttgtacaaggtctccctctgtcacccaggctagagtgcagtggtatgatcttggctcatggcaacctcctgggctcaagcagtcctcccrtctcagcctccagagtagctaggaccacagccaccacacccaactaatttttgtatattttgtagagatggggtgctgctgtgttgcccaggctggtctt

SEQ ID NO: 353141 - DNA, 201 bp, Homo sapiens
acccagctagagttcagtggcgttaccacggctcactgcaacctcgacttcgccagctgaagtgatcctcccacttcagcctcccaagtagctgggactayaggcacatgccaccgtgcctggctaatttttgtatttttttgtagagatggggttttgccatattgcccaggctggtcttgaattcctgagctcaagcaa

SEQ ID NO: 353142 - DNA, 201 bp, Homo sapiens
aggatgactgggccacttggacctccttcctctcgggggtgaacatccagattgtgggggatgacttgacagtcaccaaccccaagaggattgcccaggcygttgagaagaaggcctgcaactgtctgctgctgaaggtcaaccagatcggctcggtgaccgaatcgatccaggcgtgagtgcctcctgaccctgaggctc

SEQ ID NO: 353143 - DNA, 201 bp, Homo sapiens
cgtccgccatgaggttgtcgatgtaggcgttccacccggccatggcgctgctactggggctgctctcggcgctgctgctggggccgcggactgggctcgasctgcctcggctggcgggcggggggaggcggagagctcggggcacgcgctgccgtccggaccgcggctccgctcgctgtgcagcagccctcgcaccgccac

SEQ ID NO: 353144 - DNA, 201 bp, Homo sapiens
cactgaggaggttctagaaggccacatcaaatgtcctctccactcaggtgcaaactggctcagtctaatggctggggggtgatggtgagccaccgctctgrggagactgaggacacattcattgctgaccttgtggtggggctctgcacaggacaggtacttgtagcttctctctactgagtgtctcaccaagttttcttg

SEQ ID NO: 353145 - DNA, 201 bp, Homo sapiens; identical to SEQ ID NO: 75592

SEQ ID NO: 353146 - DNA, 201 bp, Homo sapiens
cgtctggccaaatacaaccaactcatgaggtacagcgggaacagtgggcctgggcattggggtgctggaggctgttaggttggaagttcagcagccctaaycttgcctgcattctaggatcgaggaggctcttggggacaaggcaatctttgctggacgcaagttccgtaacccgaaggccaagtgagaagctggaggctc

SEQ ID NO: 353147 - DNA, 201 bp, Homo sapiens; identical to SEQ ID NO: 75593

SEQ ID NO: 353148 - DNA, 201 bp, Homo sapiens
cccctgctccaggccccgccggatggcgggaagggagggcgaggggacttccgggattggcctcgcaggaatgttgaatccaacgtgctgagctgggggggcgtgtggtggcctcgccctctctaacggagttaggaggggccaggagcccacagagggtgggcaagggaccaagaccacgcgcctggggctcccttccgc

SEQ ID NO: 353149 - DNA, 201 bp, Homo sapiens
agcctcacctaaccctccaaattcttcttccctcatcagatcaagactggcgccccctgccgctcggagcgtctggccaaatacaaccaactcatgaggtrcagcgggaacagtgggcctgggcattggggtgctggaggctgttaggttggaagttcagcagccctaaccttgcctgcattctaggatcgaggaggctct

SEQ ID NO: 353150 - DNA, 201 bp, Homo sapiens
atcagtcgggcgccttgccagccgaaagggcctgtctaaattcgtttcctgtcccctaactcatcccggcgctggctggcctggagagggtaggatggggyggcgccgagaatggccgttatgaggaccctaagaggtgagaccctctcgccttctggggtggggggtcccgtcctttcccccactgaggacagaggcccg

SEQ ID NO: 353151 - DNA, 201 bp, Homo sapiens
gacagacgaggtcagtactgggaacgccgaaggtgggaggccatttcataacatttcttgttgatcaaaccaccgtggacaccttctttgcccatcagcargactagcgctggaggaggaggaaagagaaaggaggctaggatccaggtgtcacaattccaccccctgccagctgttcagcagctgtccagccctgggggc

SEQ ID NO: 353152 - DNA, 201 bp, Homo sapiens
gtaatggcccaaaaaataaaatggtttgtgtgtgtatggggaggaaaggggtgcaaagctgtggggagcggtgaaggggaagggacagacgaggtcagtaytgggaacgccgaaggtgggaggccatttcataacatttcttgttgatcaaaccaccgtggacaccttctttgcccatcagcaggactagcgctggaggag

SEQ ID NO: 353153 - DNA, 201 bp, Homo sapiens
aaaaaaaaccccaaaaaacaaaagttttccaaccacacacgggagggatatgggtagggggaggtgtctgtccatccagccctggcccccagcccatgtgrttttggcagcaataaggggtatggggtaatggcccaaaaaataaaatggtttgtgtgtgtatggggaggaaaggggtgcaaagctgtggggagcggtgaa

SEQ ID NO: 353154 - DNA, 201 bp, Homo sapiens
ctctggggagactgaggacacattcattgctgaccttgtggtggggctctgcacaggacaggtacttgtagcttctctctactgagtgtctcaccaagttytcttggggtccctggcctcctgcctttgaggttaatgctcccttggggccaggtccaacccctcctttccagcctcacctaaccctccaaattcttcttc

SEQ ID NO: 353155 - DNA, 201 bp, Homo sapiens
agctcaccttcagcttccgcttctcctcagccttctgggggtcccattcctctccacgacggtaagagtctagctcttcatctgagggtgcaaactcctgragaagagcagaatgatggggtcagagtccatacaaatgtttcatttcattccttggtcggggaggggggataaggctacaaaggggagaggagagaatga

SEQ ID NO: 353156 - DNA, 201 bp, Homo sapiens
aggggtcaccgagcgcggcccgggcggaaagggggttggttttctctctcctcccgagcgcggcgcgcatccctggcgtccacgccgaatcccacagtccycgacgcccctcgagtccgtgttcctcgacagccgcgcggctgagtcactggcgggctcgggcggggccgcacccgggcacgtggcggcgctccccgcccg

SEQ ID NO: 353157 - DNA, 201 bp, Homo sapiens
caagtatgggaaggatgccaccaatgtgggtgatgaaggtggcttcgcacccaacatcctggagaacaatgagggtcagtgctgagcaccctggggggcakaccccctggatctccacatgggcaggggaggctgcagacaaggggcactggagtctcaggtcctttcttggtcctcccccagccctggagctgctgaaga

SEQ ID NO: 353158 - DNA, 201 bp, Homo sapiens
cctgtgtgggcggctttaggacatgggtgcacaatgggtagaggactggaacccccaaggctcttgaggagctggggtccacagaaaggggcccagttgaytgagctccaaaactcatcctctggcctgtctaggagtcctgaaggctgtggagaacatcaacaatactctgggccctgctctgctgcaaaaggcaagtgg

SEQ ID NO: 353159 - DNA, 201 bp, Homo sapiens
aacatcaacaatactctgggccctgctctgctgcaaaaggcaagtggggaagcccgctcgctgcagcctcctccccatgcccctgctccctcagcccagasaggcctctcccgaaacattttcccttatccttcccctgcatgtgccctgacttctgagaaatctgacctctgctctcccttctcaaactcacccttccag

SEQ ID NO: 353160 - DNA, 201 bp, Homo sapiens
gccgcagacgcttcttggctctgatctcattcatagcctcttcaatggagcgtgtgtccctcttattggccacgggcactaggggcagagaggagggtagrgcgggcctagaaatccgtacctcagcctccactgccctcctgccgcatcctatgctcctctcccagccacccccagccgcactgtggcctcaccacagcc

SEQ ID NO: 353161 - DNA, 201 bp, Homo sapiens
ttgcaaatgcaattttaaaaatccctccccctattgcaaaatttgcagagttcgatggaaagcaatgcagaaggatggggggtggcgggagagaggtgaarggtagggtttgctccaatttgcactgaatataaaccagactttggtatcggggcagggagtgagccagaagaaggaaggaaggagaaagcaggaggaatt

SEQ ID NO: 353162 - DNA, 201 bp, Homo sapiens
gacttccgggattggcctcgcaggaatgttgaatccaacgtgctgagctgggggggcgtgtggtggcctcgccctctctaacggagttaggaggggccagragcccacagagggtgggcaagggaccaagaccacgcgcctggggctcccttccgcaccaggagaaacaatggtagagggacgcgggctggcagccggacg

SEQ ID NO: 353163 - DNA, 201 bp, Homo sapiens
aacattttcccttatccttcccctgcatgtgccctgacttctgagaaatctgacctctgctctcccttctcaaactcacccttccagaaactaagcgttgyggatcaagaaaaagttgacaaatttatgattgagctagatgggaccgagaataagtgtgagtgaagggctagcggtggggaagggatgaggtgtgggaga

SEQ ID NO: 353164 - DNA, 201 bp, Homo sapiens
gggttatttctgggtcccccattttgggtcacaccgcagctggatggatttgtgttcattccacaggcatttcctatgcctgccttctgccaggcctgggscgggctgtggacacagacatgcagctgacacattcccccggggtgggggttcccagggctactcaggctgttggggagagatctgttaaccaattcttca

SEQ ID NO: 353165 - DNA, 201 bp, Homo sapiens
cagggttaaacgggatgactcctccttcccccacctccgccgaagggaaggaccggcgggcggcggcgcgtgtgcccgcgcctgcgcctgcgccggggccrggagtgcatggggcggtcggggccggagccggctgcacgggagcgcgcccggcccgacccgtgtggaccctgcgggaaaggaaggcgggctggggacgtg

SEQ ID NO: 353166 - DNA, 201 bp, Homo sapiens
accttccaattttaacttattggaagtccttcctgagtctgcctttgatcactccagttgttctcacccttttacgaaactccactttctgttgtttctcytgctcttgtagtttcttcaggcgggcggcctgttctgggggtgagaaatggcaacatgaagccagggctggaagcatgggtgggaaaggtttctaaggct

SEQ ID NO: 353167 - DNA, 201 bp, Homo sapiens
gcactccagcctggtgacaaagtgagactccgtctcaaaaaaaaaaaaaaaaaaagaaagaaatgaggaaagaggctcttgagcaaaactactcatcctaraccactgagctagtaagtagggaagccaggtttccaccccaacaccccccgcccctgtcccttcttgagctctcatgccccggcccaggtccagacaccc

SEQ ID NO: 353168 - DNA, 201 bp, Homo sapiens
ccgcagacgcttcttggctctgatctcattcatagcctcttcaatggagcgtgtgtccctcttattggccacgggcactaggggcagagaggagggtaggrcgggcctagaaatccgtacctcagcctccactgccctcctgccgcatcctatgctcctctcccagccacccccagccgcactgtggcctcaccacagccg

SEQ ID NO: 353169 - DNA, 201 bp, Homo sapiens
ctgcagccccattgccccaccacccccagccccggtcaatgggtcagtctttattgcgctgcttcgaagattcgactgcaactttgacctcaaggttgctraatgaggaaggggagctgggcagctgagggtaaaaaaaaggcaccaggaatgaagacaggtaaggcccatgatggctccttgtcctctgccttgtctccc

SEQ ID NO: 353170 - DNA, 201 bp, Homo sapiens
tcctaggggtgaaagtgggggcactggtgctcagggccccagcccaaacccccacccctcccaggtggtgggcttctggaccccaagggctgcaaagcatwgctcaccttcagcttccgcttctcctcagccttctgggggtcccattcctctccacgacggtaagagtctagctcttcatctgagggtgcaaactcctgg

SEQ ID NO: 353171 - DNA, 201 bp, Homo sapiens; identical to SEQ ID NO: 75585

SEQ ID NO: 353172 - DNA, 201 bp, Homo sapiens; identical to SEQ ID NO: 75586

SEQ ID NO: 353173 - DNA, 201 bp, Homo sapiens
ggatgactgggccacttggacctccttcctctcgggggtgaacatccagattgtgggggatgacttgacagtcaccaaccccaagaggattgcccaggccrttgagaagaaggcctgcaactgtctgctgctgaaggtcaaccagatcggctcggtgaccgaatcgatccaggcgtgagtgcctcctgaccctgaggctca

SEQ ID NO: 353174 - DNA, 201 bp, Homo sapiens; identical to SEQ ID NO: 75588

SEQ ID NO: 353175 - DNA, 201 bp, Homo sapiens
ctgtcccctccctcttcccctgttatcctggtctaataaccccccacacatacacctctggtgacctatttgcacagaccgtcgtcttccctccagtcttytgagggataggggacattccatcccaagcttctcccttacccacacctatccttttgaggggctttggggtggggctggggcaagcagagggactgggtc

SEQ ID NO: 353176 - DNA, 201 bp, Homo sapiens
agctgttagggcccggacgcctgggtctccaagtaacctagagtttagctccaggtatctctgctctgagatgaggaagcagacccctgggggctttccgsgaaagttggaaaacttttgaaggtggacaggggccagacccggcaggccagctctcgggtctaggtaccccgggaacctttcccccctccccctttcacc

SEQ ID NO: 353177 - DNA, 201 bp, Homo sapiens
cagaccgtcgtcttccctccagtcttctgagggataggggacattccatcccaagcttctcccttacccacacctatccttttgaggggctttggggtggrgctggggcaagcagagggactgggtcttcacttcttgggctaataaaattgtttctttgtggactaaggaagggtaagatcattctcacacaggtgaact

SEQ ID NO: 353178 - DNA, 201 bp, Homo sapiens
catgtggttttggcagcaataaggggtatggggtaatggcccaaaaaataaaatggtttgtgtgtgtatggggaggaaaggggtgcaaagctgtggggagsggtgaaggggaagggacagacgaggtcagtactgggaacgccgaaggtgggaggccatttcataacatttcttgttgatcaaaccaccgtggacaccttc

SEQ ID NO: 353179 - DNA, 201 bp, Homo sapiens
ggactagcgctggaggaggaggaaagagaaaggaggctaggatccaggtgtcacaattccaccccctgccagctgttcagcagctgtccagccctgggggytgtaacccaacctcatctctcccaacccgcccccccaccacacacaggcaggctgtcagtcaccctgaaacaataaggcttttcaaaagaggaaaatcaa

SEQ ID NO: 353180 - DNA, 201 bp, Homo sapiens
agatccatgctaaattccccatcctgcagcagtgagtcccggatcaccgaacatttctggcccccaagtgtcagcccattcacgtaaaaacttgaccggtmtttgccaaccaggacacccacctcagctggctggaagaggaaccaagcgcccatcaagttagtcagtgcaccaagattcccaccgtgttctccaaagacc

SEQ ID NO: 353181 - DNA, 201 bp, Homo sapiens
cccgtgtggaccctgcgggaaaggaaggcgggctggggacgtgtctcccgcctggcggaaggggcgggggcgaagccgtgcgcgctgccgcctcaccaccyttgattttacttattcaagtaataagaaagcaaagaagagtttggccaaatcctctagtcgctctcatagctgaaggcacccaccggggccacttctgtc

SEQ ID NO: 353182 - DNA, 201 bp, Homo sapiens
ggcgggacggccgtgcggcggccgcggtgaaaccgcctcctccgacccgccgccgagggctgggcggcttccggagcctgggctaggggcaaggggtcacmgagcgcggcccgggcggaaagggggttggttttctctctcctcccgagcgcggcgcgcatccctggcgtccacgccgaatcccacagtccccgacgcccc

SEQ ID NO: 353183 - DNA, 201 bp, Homo sapiens
aaaactcatcctctggcctgtctaggagtcctgaaggctgtggagaacatcaacaatactctgggccctgctctgctgcaaaaggcaagtggggaagcccrctcgctgcagcctcctccccatgcccctgctccctcagcccagacaggcctctcccgaaacattttcccttatccttcccctgcatgtgccctgacttct

SEQ ID NO: 353184 - DNA, 201 bp, Homo sapiens
agggataaatgcgcagcctgagagggggtgagctgacactgtcccagctgccacctagactcggagctccatccaaacctccagcgaagacatcccaggtygggtgaatcttccagccctgggggtggaggtagtaaagggtgagcatggtattggcttggaggaagtgggggacatttctgctttttttcctcctgggac

SEQ ID NO: 353185 - DNA, 201 bp, Homo sapiens
tgaggagctggggtccacagaaaggggcccagttgattgagctccaaaactcatcctctggcctgtctaggagtcctgaaggctgtggagaacatcaacartactctgggccctgctctgctgcaaaaggcaagtggggaagcccgctcgctgcagcctcctccccatgcccctgctccctcagcccagacaggcctctcc

SEQ ID NO: 353186 - DNA, 201 bp, Homo sapiens
tagtcagtgcttgtcattgggaaggattctcgttgagaggtctctctctctctgttgcaggcccgggagcgagcatggagaataggccagaagaagcaagkgactgtgtacaggctcctgactgcgggcaccattgaagaaaagatctaccaccggtcagtgcacacagtggccactcttggctgtgcgttcccagagtct

SEQ ID NO: 353187 - DNA, 201 bp, Homo sapiens
actggataggtattcagcctaggagtttctagtctcagattcacacagaagctctttcctaacatcgctgttcctgtgcattacagttgatcttgccactrtattataaatcatttgtgtcataatgaaatgaagatgctaacttggaaaacagcagccaaatgacttcagctgttttgaagaatattccatggccatcac

SEQ ID NO: 353188 - DNA, 201 bp, Homo sapiens; identical to SEQ ID NO: 75629

SEQ ID NO: 353189 - DNA, 201 bp, Homo sapiens
attaaatgatggcagatggtaaagtaataattataacaatgtgttggatttgtaacattaatagataccatatgtatacctaaaatatcacaaaaaggggsaaagggaatatagctatataagagtaaagcttctatatattattggagttaagcttgtgtaattctaacagattctgataagatgtatatggtaaacact

SEQ ID NO: 353190 - DNA, 201 bp, Homo sapiens; identical to SEQ ID NO: 75631

SEQ ID NO: 353191 - DNA, 201 bp, Homo sapiens
gtttgtgccccaacgtttgtagcatcatttatttcaaataagtttttctcagtgattagagatgcctttatcatgtagtacatttccaaatgcagttcaakctatttctattttctggtcaatctcctgttgtgtctcttctttcctcagcaccaaactgttgtaattggagcgtgttttattgtccaatagggtgttact

SEQ ID NO: 353192 - DNA, 201 bp, Homo sapiens
aaagtccacagtccagagtctcatccaagaccaggcaagtctcttctgcctatgagcctgtaaaatcaaaagcaagttagttacttcctagatacaatagrgttacaggcattgggtaagtacagccattccaaatgggagaaattgaccaaaacaaaggggctataggccccacacaagtctgaagtccagcagggcagt

SEQ ID NO: 353193 - DNA, 201 bp, Homo sapiens
atccattagtaggggtattatgatgctcgtattgtcttagatttgcctcatgggtgggagctccttcaagctggctcctttgtccctctggtatgtccccaccattctttgagcacctcctttcttcttggcatactaatatatgctgagctcaatttgtattctgtgccagccctggaatcagccatttcttcaaggaac

SEQ ID NO: 353194 - DNA, 201 bp, Homo sapiens
ttttcttagtgtctctgcctgacactctgggagatgttttgttctgtagattcaaatctcggctccatttatggtgattgttttctaacattttctttttytttttttctttttttttttttgaggcagagtctgactgtcacccaggctggagtgtagtggtgccatcactgctcactgtagccttgacctcctgggctc

SEQ ID NO: 353195 - DNA, 201 bp, Homo sapiens
tttaatatttcaagcattgtatgatttactcttcagttatttgtaaaaattgtattttgtttgtttgtttgtttgttctgagacagagtctcgctcttgtygcccaggctggagtgcagtggcacaatctcagctcactgcaacctccgcctcccgggttcaagtgattctcctgcctcagcctcccaagtagctgggatt

SEQ ID NO: 353196 - DNA, 201 bp, Homo sapiens
ttttgacttactttgcacactattaaggtggggaaggaatcatgttattgtacaaaaatgaaggcaatctttcccttctttaaaccttagtcctgatgttyttttaagacaacatttggattgaagttttagaatttggtttgttcttgtgcaattgctttcgttctgtggcagttagaggacccttcgctggcactgtga

SEQ ID NO: 353197 - DNA, 201 bp, Homo sapiens
tatgtatatttttgaaacagagtttcgttcttgttgcccaagtttggagtgcaatggcaccatctcagctcactgcaacctctgcctcccgggttcaagckattctcctgcctcagcctcccaagtagctggattacaggcgcataccaccatgcccagctaattttttgtatttttagtagaaacagggtttcaccatgt

SEQ ID NO: 353198 - DNA, 201 bp, Homo sapiens; identical to SEQ ID NO: 75638

SEQ ID NO: 353199 - DNA, 201 bp, Homo sapiens
tgattaggtagaatactaaaaggacagtcataaatatagtaggttatcaaaggagactaactttttcaattgaacatttgtgtttttatttcttatcttayggcctgttgacttccatagcccattggttctgaatcagaaatacagagtagtttagggatttgcccagtgtgtaagggggaaaccaagtagaacaagtcc

SEQ ID NO: 353200 - DNA, 201 bp, Homo sapiens
tggtgaagaaaaggcgttaccagaagcaagacagtgaaaacaagagtgaggccaaggaacagagcaatgacgattatgttttggaaaagcttttcaaaaartcaggtaatccatttgatacgtttgccacagggatgctaggattagaaaatgagtaggctgtttctagcagtagcagtctttaactgatggtgcatagag

SEQ ID NO: 353201 - DNA, 201 bp, Homo sapiens
tgatgttaactctgattactttaaggtggtgttggccagatctaaactctgtgagattaccacttctcctttggcattaataagtcatttatagaaaaatkatttgagaacatgtcattatgatctgtttttttccttgaagttcttgtttcaggaatttgtgtacttatctttctccccttcctagcgggtgagatcttt

SEQ ID NO: 353202 - DNA, 201 bp, Homo sapiens
ctgcacacagcatggggaccatgggccaggcccgtgaaaccactttttccccctgggcctctgggcctgtgatgggaggggttgccatgaaggtctctgayatgccctgcagacattttcctcattgtcttggggattaacatttggctcctcgttacgtaatgcaaatttctgcagccagcttgaatttctcttgagaaa

SEQ ID NO: 353203 - DNA, 201 bp, Homo sapiens
aggagcatggcttagaaactctgtaggaagagtgtcggagtctcttgtagcctctggcttcttgtagtctggccctttccacccagttgaagggcagggayagtgactgtagctggaggcagggagggtttcaaagtggacataggttattttgttacgttggagtataagggtaggcctcatttaagttagggctttacc

SEQ ID NO: 353204 - DNA, 201 bp, Homo sapiens
ccccccgctcatatgtaccagggcggactggaccacatcttcctaacaactttataacacatcctcctctggaaccagatgaacttgggagttctctatayttatgtcttacagaaaaatagctcttaaggtcaaatgaagttctgtgtgagctgttattgcctcattggctatgtatatttcctgtgaactcttacaaac

SEQ ID NO: 353205 - DNA, 201 bp, Homo sapiens
ctctgtctccctccagccattacgtgctctagtttttcttgccctagttctctccctacccccaacaaatccattattactttatcactgtagctgtctcyctgccagaggcaagctctttaaaggacaggccactctcttgtggcctccatttcctcatccactccttacacaccaactacatttcaaccactacagtct

SEQ ID NO: 353206 - DNA, 201 bp, Homo sapiens
ctcttgtggcctccatttcctcatccactccttacacaccaactacatttcaaccactacagtctggtttttggccctatcgctccactgaaacttttttrttttttcgagacagagtttcactcttgttgcccaggctggagttctgcggtgtgatctcagctcactgcaacctctgcctcctgggttcaagcgattctc

SEQ ID NO: 353207 - DNA, 201 bp, Homo sapiens
gcagccaaatgacttcagctgttttgaagaatattccatggccatcaccccaggattttggtggctggctttcttagctggctgcctaaatgtcctttgtkgatgatactgcatttctttttctggttaatttttcttatttattatcagaactcaagaagatacgttgtccctttttagtaaattaatacttggaaactt

SEQ ID NO: 353208 - DNA, 201 bp, Homo sapiens
tcctgtgttttttttcctgcatttaaagttaatttattattattgacttactttagagctctgtgttttcagaacagttatgaatataggtcttattgttmtaacagtctgtggtggtgttgtgacaatgtctgttgtccagtaaaatacgaatcatctcagacagggcacaagcctggcagtgtgggttggagtcataag

SEQ ID NO: 353209 - DNA, 201 bp, Homo sapiens
tcctcaaatagtttcgcacccctcatcggatcattctgtctggctcaccgatgcaaaataacctccgagagctgtggtcgctctttgacttcatcttcccrggaaagttaggcacgttgcctgtgtttatggagcagttctccgtccccatcaccatggggggatattcaaatgcttccccagtacaggtaaaatattagg

SEQ ID NO: 353210 - DNA, 201 bp, Homo sapiens
tcgttgattccaaagaagtttacaggattctcaatggagagatgcaggtcagctaaaaaatagaagctggagaaatgaattgtggaccaagagaagtgagrgaggaaaagaaactaggatctacattgtgccaggcttttcacgtactgtcatctcacttcacttgcatgaagtcccgcatggtagatgtgcagtcagcct

SEQ ID NO: 353211 - DNA, 201 bp, Homo sapiens
gaatctcaaaggtcttcctgatgatgaactagaagaagatcagtttgggtactggaaacgttctgggaaaatgattgttgttgagtctttgttgaaaatawggcacaagcagggtcagcgagtattgctgttttctcagtcaaggcaggtgagtgcacagacttcagacgggaaacaggctggttctttatgacagccatc

SEQ ID NO: 353212 - DNA, 201 bp, Homo sapiens; identical to SEQ ID NO: 75645

SEQ ID NO: 353213 - DNA, 201 bp, Homo sapiens; identical to SEQ ID NO: 75646

SEQ ID NO: 353214 - DNA, 201 bp, Homo sapiens
gggatgtctttctgtttgtttaagtctgatagtctatcttcccaggagtgttttcatgtcttctccatataggctttacacattgcttgggtttattcctragtgtttggtcttttctgttactgtaaatagaattttcccaccattatatttttagctggctattgtttgtaaataggaaggttataggtttctgtgtgt

SEQ ID NO: 353215 - DNA, 201 bp, Homo sapiens
tcttagctggctgcctaaatgtcctttgttgatgatactgcatttctttttctggttaatttttcttatttattatcagaactcaagaagatacgttgtcyctttttagtaaattaatacttggaaacttgaatttatgtagttggaagattattacttgatcttttgagaaatcagtctgctctaattataaaatattta

SEQ ID NO: 353216 - DNA, 201 bp, Homo sapiens
gcataaactagaaattaaatatatcagtatagtggtcttctttttataggatggcatcatgaaaaaggagggaaaagataatgtccctgagcattttagtrgaagagcagaagatgcagactcttcatccgggcccctcgcttcctcctcactcttggctaaaatgagagctagaaaccacctgattctgccagagcgttt

SEQ ID NO: 353217 - DNA, 201 bp, Homo sapiens
ggtttttggtccctttttccccttggttttaaagagttctttatatattagggatgttagcttttcatttttcatatatgttacaagtatttcctcattgrttgtcctttattatgatttttttcctatgaaacaggtttttttttaaaaaaattgtcagtcttttattaattggaattgtagttctaagccttttctaca

SEQ ID NO: 353218 - DNA, 201 bp, Homo sapiens
tccacagatctctagggcaggggcaaaatgccgcctgtctctttgctaaaacataacaagagtcacctttgctccaattcccaacaagttcctcatctccrtctgagaccacctcagtttggaccttactgttcatatcactatcaacatttttgtcaaagctattcaagaagtctctaggaagttgcaaaccttcccaca

SEQ ID NO: 353219 - DNA, 201 bp, Homo sapiens; identical to SEQ ID NO: 75653

SEQ ID NO: 353220 - DNA, 201 bp, Homo sapiens
gcaggagattgatgatgactttttcccaagttctggggaagaagctgaagctgcttctgtaggagaaggaggaggaggaggtcggaaagtgggaagatacygagatgatggagatgaagattattataagcagcggttaaggtcggtctgtggggattataaatacattgtactgtttgctttatcttaggtgacaggttt

SEQ ID NO: 353221 - DNA, 201 bp, Homo sapiens
gctgagaactgtaactggtcttaagtgtgtgtgctcagtgttgtgtgtcttacctctaggacacatccatatttgtgtttcttctgaccacgcgggtgggyggcttaggtgtcaacctgacgggggcaaacagagttgtcatctatgacccagactggaacccaagcacggacacgcaggtttgtttttatttttttttta

SEQ ID NO: 353222 - DNA, 201 bp, Homo sapiens
gcaatcatttcccactgactttatacagctgttggttattctttttttttttttaaggaatggaagcaattgagaggtaagaacaaatgcgttccttaaayatatatagtaatgttcccttctctgctcttattaaaggtcaaaactgcttacaagtgtgcatgtgtcttacgagataccataaatccatacctactgcgg

SEQ ID NO: 353223 - DNA, 201 bp, Homo sapiens
aaaaaattctttctcattttttcatctaaatgtaattaaggatttgtaattgcataaaatgtgtatgttttggagagtaccaaaatgatgcaagaatgatragtaaatgtgtaaataatttgcagaggagcgttttagggtaggaatggcgattgctaaaaggtaaatttaataaaaaggtgcttcctttcctcaaatagt

SEQ ID NO: 353224 - DNA, 201 bp, Homo sapiens
tttgtctcttcttgctggcaggactagggttagtgtttatcatttgacttaaactcattcccccaagttcttactctattttcatgtatcggcagttactrtttaagttgctgccctcgcagactacagtgagggcaacgagcacagactagagcaaagcttccccacccacagactgattatgcagtgtcactgggagcc

SEQ ID NO: 353225 - DNA, 201 bp, Homo sapiens
atctatagtattcagcttcaacaataagaaaaaattctttctcattttttcatctaaatgtaattaaggatttgtaattgcataaaatgtgtatgttttgragagtaccaaaatgatgcaagaatgataagtaaatgtgtaaataatttgcagaggagcgttttagggtaggaatggcgattgctaaaaggtaaatttaat

SEQ ID NO: 353226 - DNA, 201 bp, Homo sapiens
aacactttggaaaactgacagtgtctactaaagcttagcatacccagatatatatatatatatataaatatataaatatataaatatataaatataaataraaccaaaagatgtgcatcagaatattcatagcaacattattcctagtagccaaaacctggaagccactcaaatgtgcattaacagtgagagttaacaaac

SEQ ID NO: 353227 - DNA, 201 bp, Homo sapiens
gcagtatttcatttacattactgtcttggatggttgtcttttggaaaactttttgggaaaattcgtaagctctggaactaaattatctttgcagtcattgygtgtgtgtatgtgtgtgtgtgtgtacaaattgttggtggctgcataggcattgactatttgaaatacagattaaagctgcttagcattaaattctctaag

SEQ ID NO: 353228 - DNA, 201 bp, Homo sapiens
tgcgcccccttcacatttttctctgtgcggtagcttctttctagcttactgtccccaaacttagtgttcagtccttgggcaatttttcagatttgcatttytagaaataataaagactccccggttttcttttcttccatccttgttctgactctggaaatggagattttatttgtgtcttagagagggagaagacttgag

SEQ ID NO: 353229 - DNA, 201 bp, Homo sapiens
tagcagtagcagtctttaactgatggtgcatagagggctgtcagccattagtgtttttcttcaaaaatttagatttgaaatatattgacattttaaaaatygtatttacacctcttttctgaagacctagaataatttgaaactttggaaaacaatagtacttatggccactcatgggaggtgtgcaattcttaaatcgat

SEQ ID NO: 353230 - DNA, 201 bp, Homo sapiens
ttagctaaagggattggtctcaaacaagaaaagggacactgtccctttgtcccagaagggcaggaggagtgcagatgcagacagggaatacagtgtaggaygtatcaggatatttgactgcacctaagtgaaacctggcctcaaattgggttaaacattcacaaatgtatggtacacctagaaacctacagagggggaggc

SEQ ID NO: 353231 - DNA, 201 bp, Homo sapiens
cttttatttttttagacaaatcttcaagcagtttttgacaaatagagtgctaaaagacccaaaacaaaggcggtttttcaaatccaatgatctctatgagytatttactctgactagtcctgatgcatcccagagcactgaaacaagtgcaatttttgcaggtattacataaaatcatttaatttaaagtaatcaattgca

SEQ ID NO: 353232 - DNA, 201 bp, Homo sapiens
ctctgtaggcactcactccgcccaggtgcgcgcgtggcggagggggaacagagaagcaggacagctctgcatccttcccgtgttcagtcgtgggagacaayaagagaggtcacagcctggcgaccaaaaagtgcggctaacttccctgcccaagctgactttctctgcagggttcaaggttaattgtgaggatttacattc

SEQ ID NO: 353233 - DNA, 201 bp, Homo sapiens
ggtctagatcatttccagaatcactttggaaacatacagttctggatttcagctctggcttgctcatttttttctagcgatgtcacctttggcaagttacytaaccattctgagcttttgtttcctaattataaagtgtgctgataatctcctttgtgcaagttgattgtgaggctgtgtccaaaccacctggcctggtgc

SEQ ID NO: 353234 - DNA, 201 bp, Homo sapiens
tctgatttgttcaaagctcctatttactggataggtattcagcctaggagtttctagtctcagattcacacagaagctctttcctaacatcgctgttcctrtgcattacagttgatcttgccactatattataaatcatttgtgtcataatgaaatgaagatgctaacttggaaaacagcagccaaatgacttcagctgtt

SEQ ID NO: 353235 - DNA, 201 bp, Homo sapiens
tggacttaaggcaatgtacacatgtaagcaggctctgtaggcactcactccgcccaggtgcgcgcgtggcggagggggaacagagaagcaggacagctctscatccttcccgtgttcagtcgtgggagacaacaagagaggtcacagcctggcgaccaaaaagtgcggctaacttccctgcccaagctgactttctctgca

SEQ ID NO: 353236 - DNA, 201 bp, Homo sapiens
taaactcattcccccaagttcttactctattttcatgtatcggcagttactatttaagttgctgccctcgcagactacagtgagggcaacgagcacagackagagcaaagcttccccacccacagactgattatgcagtgtcactgggagcccctaacactggagacgctgacttaggaagtgtagcgtggggtcaccggg

SEQ ID NO: 353237 - DNA, 201 bp, Homo sapiens
ttacatttgatcttggaaatgtgtcctctttctccagaggtgacagaggagagttgtggggtctccatgcagagtgatgctagatggctggtggcatgtgrtgtctcagccagtaatacgcattgtttatcctgtaatccacagaggatacaaacagcaaattacacaatcatcaagaagattgaatttgtgttttgaaaa

SEQ ID NO: 353238 - DNA, 201 bp, Homo sapiens
agcataaagtctaccaaaatttcgttgattccaaagaagtttacaggattctcaatggagagatgcaggtcagctaaaaaatagaagctggagaaatgaaytgtggaccaagagaagtgagggaggaaaagaaactaggatctacattgtgccaggcttttcacgtactgtcatctcacttcacttgcatgaagtcccgca

SEQ ID NO: 353239 - DNA, 201 bp, Homo sapiens
acacctacatccactaattgatgaatgagattatggagattttacttactgggttttaacatcagtaactttttcttaaagaaaatatcaataaatttccrtagttagcattgtttttttgaactaagttttttgtttgttgttttgggggatcttttgagcagttgatgactgtatatgctctttcatggttgttttctt

SEQ ID NO: 353240 - DNA, 201 bp, Homo sapiens
gtccctttttagtaaattaatacttggaaacttgaatttatgtagttggaagattattacttgatcttttgagaaatcagtctgctctaattataaaatayttaagaactacaatgaatcctatataacgaaaaggcttataaatttttttccttttaggtagtctgtagagaatgccaaatgagggaatcccccactcaa

SEQ ID NO: 353241 - DNA, 201 bp, Homo sapiens
gcagcaaaatctgggtgacttggagaaatactgttataactttgccttcctccttgctttcatcccctgttttccaaagtggcttcaggagaagtgattgrttttatttgagagatggtgttgttaaaaatagtaagagatacaggataatgattaaaccttaatgagataattagccagtttacagcacacattaattac

SEQ ID NO: 353242 - DNA, 201 bp, Homo sapiens
ggggaatgcatgttgagacaatggccacaaccagtttttctacgtatacctatgtctaaggaaattggggtgattccataaataatttttaaaaattatgrtgaacatttttctagtttattaacttcttcaaaatgattttaatagttatatgatattccatcttatttaacagaatcttatagtattttctgtatggtc

SEQ ID NO: 353243 - DNA, 201 bp, Homo sapiens
aagcctgcccttttttggttggcatttctttgatatatctttgataattcccatattacaactttcagtgccagtctggtttgggtctcttttaaacagawggctaggtttttgccttacccagtggaatgtctccctgttaataactcactgtcttgtggtgggttactaggtttagtttgaaacctggtattttgtttt

SEQ ID NO: 353244 - DNA, 201 bp, Homo sapiens
cagctcaggcttctcgggcggccgcggccccgcgccttggcctcgccgtggtgattgagcctgtcagcgaggacgcactgtagcgggtcttagggccaagygcccgcttccggcggcctcacctgagaccggaagtagcgccaaggagcgctcacctgaggcggcttgagtccctggccggccagcgacccagctacttct

SEQ ID NO: 353245 - DNA, 201 bp, Homo sapiens
aaatctgataaagaaatttttaggcttctgaatctcttttaatggtcacttgaaatcgcatttaataaaagttcaagatttcctttttctgattatatttmgtgatccttttttctaatatagagcaactttcatgtgagttgattaatatttatttgttaaaacaacaataaacactgcatttcaggtgtttgatgttgc

SEQ ID NO: 353246 - DNA, 201 bp, Homo sapiens
cgggtggatcacgaggtcaggggtttgagaccagcctggccaatgtggtgaaaccctgtctgtactaaaaatacaaaaattagctggttgtggtggcacaygcctatagtcctagctactcgggaggctgaggcaggagaatctcttgaaccctagaggcggaggttgcagtgagcctggactgtgccactgcactctagc

SEQ ID NO: 353247 - DNA, 201 bp, Homo sapiens
gtgtagccagttcatgaaccagcttttgttctaaatgagggtttctcgaccttgacacaattgacacttagggctaaataatttgttgctgtggggactgwcctgtgcagtatcagatattgaacagcttctctggcctctactattgcacttctctggttgtaacaaaaatgtctttagacattgccaaatgtcccatag

SEQ ID NO: 353248 - DNA, 201 bp, Homo sapiens
tgtaaaacatttgtggttcctttttcatttctgttatctgttaacatctcttagtgttttgtgctgcaaaatcctgtggcaggactcattagctgatgttygtcttataaaggcaatttaaaaaaatgttattcctttcattttcttttggggtagtaaagtgtgtgtattggacaccttcacctggatcatggcttgcct

SEQ ID NO: 353249 - DNA, 201 bp, Homo sapiens; identical to SEQ ID NO: 75626

SEQ ID NO: 353250 - DNA, 201 bp, Homo sapiens
tcactgtgaatttgcaggttacattattggggagaagcagcagtctcttaggagctagttctttctttcctgagtcttctgagctcttgagttcgttctcrgggcccaggaaagcagtgccggctgcaagggctatggagtgtttgcctcacggagtcagatgcacggggaccacgaaactccaggattcctgttgtgttt

SEQ ID NO: 353251 - DNA, 201 bp, Homo sapiens
gtacgacatccctaaggcaaatcaataaaattattgaacagcttagccctcaagctgccaccagcagagacatcaacaggaaactagattctgtaaaacgrcagaagtataataaggtgattcagaataacattcagtattgcatttttgaaaaagtcatcatttaggggcacttaatttaggaagtattttaaaaagtgc

SEQ ID NO: 353252 - DNA, 201 bp, Homo sapiens
gcacctggacagtgggacaaaattctttccattggtttggaagcacggggacaggggacagccaggtaggggaggatggcgtgtggtgctttggggatatyggcagtgagatttctagtgtgtggtggtttggagttccgaagagtgatctgggctggagacttagatttggcattaccagcatctagaattgaaattgtg

SEQ ID NO: 353253 - DNA, 201 bp, Homo sapiens; identical to SEQ ID NO: 75617

SEQ ID NO: 353254 - DNA, 201 bp, Homo sapiens
ctcccgggttcaagtgattctcctgcctcagcctcccaagtagctgggattacagacactcaccaccatacccggctaatttttatagtttaggtagagayggggtttcaccatgttggccaggctggtctcaaactcctgacttcaggtgatccacccgcctcggcctcccaaagtgttgggattataggtgtgagccac

SEQ ID NO: 353255 - DNA, 201 bp, Homo sapiens
cttcttgtagtctggccctttccacccagttgaagggcagggacagtgactgtagctggaggcagggagggtttcaaagtggacataggttattttgttaygttggagtataagggtaggcctcatttaagttagggctttaccaaaatttcattgtttttctatagaactacaaattatttttcagttgtgtagtagatg

SEQ ID NO: 353256 - DNA, 201 bp, Homo sapiens
agaaagagccactctttgctatctttgtaactatccctagtttttggggatcctgctagagatatgacttacatgctgcctagtaagattttttttaatgycattttcttagtgctgttcatcttcttgtaaacacactcacatgctgtttgaaagccgtcgaagattagatttgtagatgaggaaacacccagcacattg

SEQ ID NO: 353257 - DNA, 201 bp, Homo sapiens
ccttccttttgttaccttgaagagttgaaattttcaacaaggcaagagtttatcagaggatgtgctttaaggtccaccagtagctacctacatactagcaytgggctctgtgtggttttgtaatggatactggacaacacaccatacctttggccaggcagcatgtgtagtattaccctttcattttctcttgccttccct

SEQ ID NO: 353258 - DNA, 201 bp, Homo sapiens
cttgtacaggacatttattccagactcttagtctttagccccagtgccaactttgtctcctgactcaggaactgcccaacttgctgctttgtgggatattktgtctgtaatccacttcagcttccctcctttccacctgcaaatttagatctatcaggaatcctccttctgccagagtccgagaaagatgtgttgtgcctc

SEQ ID NO: 353259 - DNA, 201 bp, Homo sapiens
tggatttaagtttaaaatttcataatgctatcttttgtatttaacaataaatcacttcattgctgttttctgtcttctatatttaccattcaaggaacaayagctaaaaaagatcactgcaaaacaaaagcatctccaggccatccttggaggagcagaggtgaaaattgaactagatcacgccagtctggaggaggatgc

SEQ ID NO: 353260 - DNA, 201 bp, Homo sapiens
taatttgcagaggagcgttttagggtaggaatggcgattgctaaaaggtaaatttaataaaaaggtgcttcctttcctcaaatagtttcgcacccctcatyggatcattctgtctggctcaccgatgcaaaataacctccgagagctgtggtcgctctttgacttcatcttcccgggaaagttaggcacgttgcctgtgtt

SEQ ID NO: 353261 - DNA, 201 bp, Homo sapiens
aggtcttcctgatgatgaactagaagaagatcagtttgggtactggaaacgttctgggaaaatgattgttgttgagtctttgttgaaaatatggcacaagyagggtcagcgagtattgctgttttctcagtcaaggcaggtgagtgcacagacttcagacgggaaacaggctggttctttatgacagccatcaactcacaa

SEQ ID NO: 353262 - DNA, 201 bp, Homo sapiens
acaggtagtgaccagctagctttgtttcttatagtcagtgcttgtcattgggaaggattctcgttgagaggtctctctctctctgttgcaggcccgggagygagcatggagaataggccagaagaagcaagtgactgtgtacaggctcctgactgcgggcaccattgaagaaaagatctaccaccggtcagtgcacacagt

SEQ ID NO: 353263 - DNA, 201 bp, Homo sapiens
cgctcgcgcggccctgggtgagtgttcgggggtcccggccgaatgtcgggcagggggtgtcggggcccagctcaggcttctcgggcggccgcggccccgckccttggcctcgccgtggtgattgagcctgtcagcgaggacgcactgtagcgggtcttagggccaagcgcccgcttccggcggcctcacctgagaccggaa

SEQ ID NO: 353264 - DNA, 201 bp, Homo sapiens
ttttagacttagctctgaacctcacttcctttcagcagatattgagcacctcctatatatcagaccatgcatggcccatgtgttcaaatctcagttcctcygtgatatttcttgggccccagacaccatatatagttcgctcgatgctcgtgtgacctcttgtccgtgtcccgggctagctgacctgccctgctctgttgt

SEQ ID NO: 353265 - DNA, 201 bp, Homo sapiens
tagtcacgtgtagctcttgagcacttgaaaaagggcaaatgcaactgtggaactgagtttttaacttaatgtaatttaaatttaaatagctgcaggtgacyggtaactgccatgctgggcagcatagagctgacatttatgtttttcctttttaggtacatggtgatccctgtttttggttttactgtctcttgaatttaa

SEQ ID NO: 353266 - DNA, 201 bp, Homo sapiens
gagaaacatctgagaccaaagcaaaagcctaagaactctaagcattgcagagacgccaagtttgaaggaactcgaattccacacctggtgaagaaaaggcsttaccagaagcaagacagtgaaaacaagagtgaggccaaggaacagagcaatgacgattatgttttggaaaagcttttcaaaaaatcaggtaatccattt

SEQ ID NO: 353267 - DNA, 201 bp, Homo sapiens; identical to SEQ ID NO: 75644

SEQ ID NO: 353268 - DNA, 201 bp, Homo sapiens
tcaggcttctcgggcggccgcggccccgcgccttggcctcgccgtggtgattgagcctgtcagcgaggacgcactgtagcgggtcttagggccaagcgccsgcttccggcggcctcacctgagaccggaagtagcgccaaggagcgctcacctgaggcggcttgagtccctggccggccagcgacccagctacttctccga

SEQ ID NO: 353269 - DNA, 201 bp, Homo sapiens; identical to SEQ ID NO: 75619

SEQ ID NO: 353270 - DNA, 201 bp, Homo sapiens; identical to SEQ ID NO: 75620

SEQ ID NO: 353271 - DNA, 201 bp, Homo sapiens
ggcatgctgggagcttgtcaaaaagtgatgtgagttttcagaaacatttttgagtatccaaagacaggtacatataactttactgcactacatcctatacwagtaatttttaagaaataacttctctactagttatgctattgtgcggtaaaaagaaaatacagaaagtattattattgcattagttatgggtttgacatt

SEQ ID NO: 353272 - DNA, 201 bp, Homo sapiens
tgctggaacagggagtgcttcagcaggtggacaatgccatccatgaggccagccgtgcctcccagctcgttgacgtggagaaggagtatcggtcggtcctrgatgacctcacgtgagtgcagcccatcttcttcctttcaaagtggtggtaaaacatgacagggatattcaggtaatggaaagctctagtattccagaagt

SEQ ID NO: 353273 - DNA, 201 bp, Homo sapiens
ttttctcaagaaataagcctggccgggcacaatggctcatacctgtaatcccagcactttaggaggccaaggcaggaggattgcttgagctcaagagttcragaccagcctgggcaacatggtgaaaccccaaaaatagaaaaagttagctgggtgtggtgatgtgcgcctgtagtcccagctacccaggaggctgaggtg

SEQ ID NO: 353274 - DNA, 201 bp, Homo sapiens
caaaatgggattcaatctaaagtaatgattctgaagcaagtctaccactgatgctgaggtggcagtctaccgatttctttgggagtttagatctttctctrgagttggtgtctaaaagttgactttttaaaaaagctcaccatgtgattctagtctgcaagtaagtttaggcctgagctttggctgtttacaaaagtaaga

SEQ ID NO: 353275 - DNA, 201 bp, Homo sapiens
aaatgacctcttttatgtttttattttctacatgtcattccagtctttggttctgtgaatacacatctttacatggttataatcacggcccctccagttarttggcttgcccacagttttactgtgaagtagagctgagatttgaagtcggctgggccctctacatacatgtttccttccctttgtgggattgagtagaag

SEQ ID NO: 353276 - DNA, 201 bp, Homo sapiens; identical to SEQ ID NO: 75627

SEQ ID NO: 353277 - DNA, 201 bp, Homo sapiens
ttcagtaggcggtgcctgagtctcctcagatgacctggtgcattgggctaagctgctaaatgcatagcctgaagtggatttgagttggttcctctgcatgrtttgaaggctccctcgccacctttcagcacttctgatgagtccctatttttattgtaaaagtatgacaacaatattaagatgaaaaaatgacctctttta

SEQ ID NO: 353278 - DNA, 201 bp, Homo sapiens
tctgaggggagcttggtgacattcttcatggtccacaggaccttgctcagaaagaactatgttctcatttaggagagctttgaggcagttgggaagcattrttggtaaggatgttgaggcttgagaatgtaatgcttttttctttactatggcccacactcagcaaataattgcctctgggataaatccccgacccatgcc

SEQ ID NO: 353279 - DNA, 201 bp, Homo sapiens
aaatatactactgctttgcacattgtgggcctgggagctccgggtgccaaataaagattaggactaacacaccttcagtgtttgagtgatgtgggttcccrgtgagcacctacatgctgcttacctagtacaggctgtgcagccaagacagccctgtgtggcccagaagaccaaacatttcatgtgaacctttccccttca

SEQ ID NO: 353280 - DNA, 201 bp, Homo sapiens
attatccaccatttgccattttctcttttcttgttggtgtttgttgtcataggtaccagcagacaggtgttaggtggctgtgggaattgcactgccagcargcaggaggaattctgggagatgaaatgggattgggcaagaccatccagataattgccttcttggcaggtctgagctacagcaagatcaggactcgtggtt

SEQ ID NO: 353281 - DNA, 201 bp, Homo sapiens
tcctcatggacgactactcagctgataaggaaacacagctaaacttgactatttataactgtatttatacagtaataagcctatctttggatggcagagaktatatttatagtgaaatattttggggaaaagttactgagaagttgtctttttgaacaggaatatattaaatatagcatgatgctataattttattctgtc

SEQ ID NO: 353282 - DNA, 201 bp, Homo sapiens
atgcagctcaaaagcataatgttgcgtgaaggaaggtggacacagggcacaaacatttccacttacgtagcgttcagagacaggcacaacttgtctgtacrttaggagtccaggtccatcattatcttggggggcgtagaggctgggaggtagcctgaagggctcatctggtggtgctagtaattctgttagttgatatgg

SEQ ID NO: 353283 - DNA, 201 bp, Homo sapiens
aaggaatttcacacgtggtggcctccgttcagagtggcaattctacatgaaaccggttcctatacccacaaaaaggtaacataatatttcagtaccttttygttttgttttaatgccctccattttacatatttggtttttctctgatccatgtgtttctcaaatgtatattcctgtgttttttttcctgcatttaaagtt

SEQ ID NO: 353284 - DNA, 201 bp, Homo sapiens
cagagtttcgttcttgttgcccaagtttggagtgcaatggcaccatctcagctcactgcaacctctgcctcccgggttcaagctattctcctgcctcagcytcccaagtagctggattacaggcgcataccaccatgcccagctaattttttgtatttttagtagaaacagggtttcaccatgttagccaagctggtctcg

SEQ ID NO: 353285 - DNA, 201 bp, Homo sapiens
agtgatgcatcagtgggtgaaggaatttcacacgtggtggcctccgttcagagtggcaattctacatgaaaccggttcctatacccacaaaaaggtaacayaatatttcagtacctttttgttttgttttaatgccctccattttacatatttggtttttctctgatccatgtgtttctcaaatgtatattcctgtgtttt

SEQ ID NO: 353286 - DNA, 201 bp, Homo sapiens
aattatgatgaacatttttctagtttattaacttcttcaaaatgattttaatagttatatgatattccatcttatttaacagaatcttatagtattttctrtatggtcctgttctaagcactttacagatgttaactgatttaatcttcgtaataaccctataagatcaatactgttattattcccatttgaaaatgaaaa

SEQ ID NO: 353287 - DNA, 201 bp, Homo sapiens
ctggtaccagttgcctttattagtgcatttttatgctgctgataaagacattacccaagactgggcaatttacaaaagaaagaggtttaatcaacttacarttctgtgtggctgtggaggcctcacagtcatgtcagaaggcaaggaggagcaagtcacatcttacatggacggcagcaggcaaagagagcttatgcagga

SEQ ID NO: 353288 - DNA, 201 bp, Homo sapiens
tgaggccaaggaacagagcaatgacgattatgttttggaaaagcttttcaaaaaatcaggtaatccatttgatacgtttgccacagggatgctaggattaraaaatgagtaggctgtttctagcagtagcagtctttaactgatggtgcatagagggctgtcagccattagtgtttttcttcaaaaatttagatttgaaat

SEQ ID NO: 353289 - DNA, 201 bp, Homo sapiens
tcccagtgtgtaaatgtttttattgggattgctgggtcaatgcatgggtgctgttgaggctcttgattttgctgccgaactacctgcccacacagcagtgmcagcttgtacactgtcggtgtgggcttcccaggagagaacactcgctcggatgctcctccatggtgctttggtggtgtagaggagcaggcagggtggtgt

SEQ ID NO: 353290 - DNA, 201 bp, Homo sapiens
acacatctttacatggttataatcacggcccctccagttagttggcttgcccacagttttactgtgaagtagagctgagatttgaagtcggctgggccctytacatacatgtttccttccctttgtgggattgagtagaaggtgcaatatttaggtatgaccacagggtggtgccaaaaatcaacacatagctgcccccac

SEQ ID NO: 353291 - DNA, 201 bp, Homo sapiens
aatctgggtgacttggagaaatactgttataactttgccttcctccttgctttcatcccctgttttccaaagtggcttcaggagaagtgattggttttatytgagagatggtgttgttaaaaatagtaagagatacaggataatgattaaaccttaatgagataattagccagtttacagcacacattaattactttgcta

SEQ ID NO: 353292 - DNA, 201 bp, Homo sapiens
tatgtgatcttggacgaaggacacaaaattcgaaatccaaatgctgctgtcacccttgcttgcaaacaggtatgacctcttttaacaagggagatttccargtggagaagaataattaattcagaataaactatctgcttttagtaacacatttattgaatctttccttgtgccaactgcacaagaaatttaaaatgtgca

SEQ ID NO: 353293 - DNA, 201 bp, Homo sapiens
gatgtgatagttgtataggtaatatagtgaatatattctccttaaagcagcaggtcctgagtatgtggagtacaatgtgaacattcccccttatttttccytgtgctttctcttccccatcctgatttgcaggcttagtttgtatcctgccagatcattctgtgtgcaggatagatacttttttcagcataagtgtgttca

SEQ ID NO: 353294 - DNA, 201 bp, Homo sapiens
cttggaggttgaaaaagctcattcggtgtaaataataaggtattatttctaatttaaattctgcaagacctgggagattaactgatgtattatatatttcytgaattgtaattttccaaggctgaaagtttgggggattatttagccattcatgcagcagctgttatcatctctctcttatattgctttataacttgaatt

SEQ ID NO: 353295 - DNA, 201 bp, Homo sapiens
gaattgatgcctgatgcctgtagtcagtggagggtgtctctttagtctttgcctgggttttgagaaaaatacgtttctttgccttagtgtcaaaacagatwtaggaaaattttattctctacacctgcagaaccaaatccctctcaaagagaattaaagtaaacttttaactcagttcataggaggctgctggtacacatt

SEQ ID NO: 353296 - DNA, 201 bp, Homo sapiens; identical to SEQ ID NO: 75618

SEQ ID NO: 353297 - DNA, 201 bp, Homo sapiens
tgcccagtgtcagagcttatggggctcagaaaggcttctcggagaagggatgactcacctggggcctgaaaggtgaggaaggtgatggggagcatgtcagyagcccaaatatagactgctgctggggttggtgtgctcagctggggcagggcatgtgagaactgagaagagcctgcagggacgcctagttgaccctcttta

SEQ ID NO: 353298 - DNA, 201 bp, Homo sapiens
agcaggaaaaaagtaagagattgctgcatgccatacttgcaaggagtccaaacaactaaggctagaaataaaatcagggcaggtgtggaggcttatactgytatttctcttcaggaataaatccccagggagggattatagcagcaaaatctgggtgacttggagaaatactgttataactttgccttcctccttgctttc

SEQ ID NO: 353299 - DNA, 201 bp, Homo sapiens; identical to SEQ ID NO: 75647

SEQ ID NO: 353300 - DNA, 201 bp, Homo sapiens; identical to SEQ ID NO: 75648

SEQ ID NO: 353301 - DNA, 201 bp, Homo sapiens
cttctgagcttctgatttgttcaaagctcctatttactggataggtattcagcctaggagtttctagtctcagattcacacagaagctctttcctaacatygctgttcctgtgcattacagttgatcttgccactatattataaatcatttgtgtcataatgaaatgaagatgctaacttggaaaacagcagccaaatgac

SEQ ID NO: 353302 - DNA, 201 bp, Homo sapiens
acaagatgatacaatatagtattagtggtgtttttcctctttacaggaactggatcagatgttcagacacccaaatgccatctaaaaagaaggattcaacyagcctttggagcagaccatgatgttccaaaacgcaagaagttccctgcttctaacatatctgtaaatgatgccacatcatctgaagagaaatctgaggct

SEQ ID NO: 353303 - DNA, 201 bp, Homo sapiens
aagacccttcctcaggacggccatggcagtgctgtgtgggtggcccagtaaggggcccacgggcactagggacagcctgatccttgggaatccatggagcycggggagcagcccacagggcctcctttctaccttgcctgtgtactgcctgttgttcctgagaaggatgcctgccactttccctagcttgtgccccatgtg

SEQ ID NO: 353304 - DNA, 201 bp, Homo sapiens
tgcctccctgggctcactctcacttctgctccccaggttggacccagagggagggcactggggagactgggaggtctggtgagactgcggggctccacctrggcctgacctccctccctccactttgctgcccggggctcggccacgcctccttctccagccttctatgaccttcaggaggctgaccttgataaggagttc

SEQ ID NO: 353305 - DNA, 201 bp, Homo sapiens
gccccagggctggctgtcccttggccctcaggccagcactcctttcccacaggcctctctcgcattctgcggggccgtgcggacatgaccaagaaccggayggtggactgggcgttggcagagtacatggcctttggctccctgctgaaggaaggcatccacgtgcggctcagcgggcaggatgtggagaggggcacattc

SEQ ID NO: 353306 - DNA, 201 bp, Homo sapiens; identical to SEQ ID NO: 75736

SEQ ID NO: 353307 - DNA, 201 bp, Homo sapiens
cctgggcttttcccgtgaccagagagctgcttgtggttggactagcccagggctacatcagcatgagggcatccaaatgcatggtgcaggggtccccattygtggctggcctgccaggactttggggtttgtctgtcatggggggcctgggaatgcccagtgtctggtcagagagttaggcagagctggcccagtggcctg

SEQ ID NO: 353308 - DNA, 201 bp, Homo sapiens
taccagtgactagtcttaggttggggaccttggattttccaaatgcctttgccggggcgtccctgggtcaggcagaagagcaggaaagcaagggctcccayacaggggctggaacgcagcctggaacgtgggcagaattctgcagctgaaaggacggtggcttgccggggcctggaccaatgaccgagggcagccccccca

SEQ ID NO: 353309 - DNA, 201 bp, Homo sapiens
tgctgggattataggcatgagccaccgtgcccggccaatagttttaacttttaagtttaggtctataaacatacattttgagttattttgtatatggtgtraggtgagggtccagatttattatttactggatgataatcaattgaccttgtaccatttgtttaaaagactatccattactcatggaattaacttggcacc

SEQ ID NO: 353310 - DNA, 201 bp, Homo sapiens
ttcctgctcagtctgtagtgggtccacgtagctctcggcaccacatctgtgcccgtgacagtagctcttttcagggtgggtgtggcgagctgggcagctcyagatgccacactcccagctgggtaccagtgactagtcttaggttggggaccttggattttccaaatgcctttgccggggcgtccctgggtcaggcagaag

SEQ ID NO: 353311 - DNA, 201 bp, Homo sapiens
aagagagatggtgtgtcgcattcctgctcagtctgtagtgggtccacgtagctctcggcaccacatctgtgcccgtgacagtagctcttttcagggtgggygtggcgagctgggcagctctagatgccacactcccagctgggtaccagtgactagtcttaggttggggaccttggattttccaaatgcctttgccggggc

SEQ ID NO: 353312 - DNA, 201 bp, Homo sapiens
caacactgtgcctcgaagggagattggttgggatgcaagagagatggtgtgtcgcattcctgctcagtctgtagtgggtccacgtagctctcggcaccacrtctgtgcccgtgacagtagctcttttcagggtgggtgtggcgagctgggcagctctagatgccacactcccagctgggtaccagtgactagtcttaggtt

SEQ ID NO: 353313 - DNA, 201 bp, Homo sapiens
cttgcctgctgtgtgatcctgggcaggtttctttgcctctcaggtcctcagtcatcaaagcctgttgctttccctttgctgaatcagccagtgggtggtgrttttgattgagaggccctggccatgtcctgctcagccacacctgagccctgccgtgccccctttgtcgtgctatgctgcctccatatgctcctttgtatg

SEQ ID NO: 353314 - DNA, 201 bp, Homo sapiens
ccaacactgtgcctcgaagggagattggttgggatgcaagagagatggtgtgtcgcattcctgctcagtctgtagtgggtccacgtagctctcggcaccayatctgtgcccgtgacagtagctcttttcagggtgggtgtggcgagctgggcagctctagatgccacactcccagctgggtaccagtgactagtcttaggt

SEQ ID NO: 353315 - DNA, 201 bp, Homo sapiens
ccctaaggctttttggagcaagggctgcagtctctggtagctgggagggccctcagataatctgggtcaacctccctgttttgagctagggaaactgaagyccaaagatgcaaaggcttgctggaagttgctcagttctgctcatgtggctgtgcctccatgtccaaagtcctgtccaccagccaggaatgactcccttgc

SEQ ID NO: 353316 - DNA, 201 bp, Homo sapiens
cagggcaggggtcacaggcagggggcctggccaggcagggccagctggcagctgggcgtgtatttcccttccagctgattatcttcacacctaaatctctkctgaggcacccagaggccaagtccagctttgaccaaatggtatccggtacgtgcctggcctgggtgtgtggggtagcccacaatggggcggtggcccatt

SEQ ID NO: 353317 - DNA, 201 bp, Homo sapiens
tgggaacatttgggcagaaaattatccctggtgtggagtgactgtggccacaccacctgtctgttcactggacttttctgaagctgggtcccccagggctkcaggggcttgggggagcacctgactcagctgctggatgcaaagtggattcctgagcagcgaggtgtgggctggagtttggatctggctgggtggagatct

SEQ ID NO: 353318 - DNA, 201 bp, Homo sapiens
gctgattgccgagggcacagtcaccctgcaggagtttgaggtgggcaggcaggctgcaggggcgcccaagacaaactttgggtggggaccctggagagggkttgtagatgttaccagcccagtgctgggcactaaggatttaaagaagtagccactatggtccttgtccccaagaggccccagttaccaaaggggaccaag

SEQ ID NO: 353319 - DNA, 201 bp, Homo sapiens
gccacaggaaggcaggactggatcggcctcaccactggctgcagggaggagagttgggaccaggtgtttaggcagtttggccaagagctggcccaaggcasagcaggtcaggtgggcagggatgaggctctaggagaacaagagagcggggacactgagcaaggccagaagtggcgggaagtggctgtgggaacatttggg

SEQ ID NO: 353320 - DNA, 201 bp, Homo sapiens
caaatccagcgagatggggattgagaatgtcatcttggggatgccacacaggtgggtccccctccctgctgtgccttgcgcattctcctccagcccagggracagaggtgggagagatgagatggaaatcagagcggaggtgttggtgggacctgggggtagaggtgggtttcctggaaagttctgagtcctgggcctggc

SEQ ID NO: 353321 - DNA, 201 bp, Homo sapiens
cctctggctccaggggaaggctgaacgtgctggccaacgtgatccgcaaggacctggagcagatcttctgccagtttgaccccaagctggaggcggcggaygaggtgggtgccatgcccaggtcccggcacccttggagagctgggtgtttgggaggtggactgtggaggggctgagccgggagcttccgggctgagataa

SEQ ID NO: 353322 - DNA, 201 bp, Homo sapiens
ctccggggatgtcaagtaccacctgggcatgtaccatgagaggatcaaccgcgtcaccaaccggaacatcactctgtcgctggttgccaacccctcccacytggaggcagtggaccctgtggtgcaggggaagacaaaggcagagcagttctaccgtggagatgcccagggcaagaaggtgagctcacctgggggaaccca

SEQ ID NO: 353323 - DNA, 201 bp, Homo sapiens
ccacgcctggctgatttttgtgttttcagtggagacggggtttcaccatgttggccaggctggtcttgaattcctgacctcaagtgatctgcccgccttgscctcccaaagtgctgggattacagcgtgagccattgcacccagcctgtgctttctttttactgcttctttgaagcaggatccagctaaatccacaggttg

SEQ ID NO: 353324 - DNA, 201 bp, Homo sapiens
tgatggcttcctcatgatgtcatttcatctgtcccattgtcccatgtaatttctgtactttgacaattagatctagaggctcgatcccatagacatttgattttttttttttttcaaaatcagcttcctggtggtgatggtgatggcacttgagcagttagcagctgtggatagtgatttcctagatccattaactcacta

SEQ ID NO: 353325 - DNA, 201 bp, Homo sapiens
tgctgaggcacccagaggccaagtccagctttgaccaaatggtatccggtacgtgcctggcctgggtgtgtggggtagcccacaatggggcggtggcccaytgtgtggcttctgcttctggggcttctccaacctcccctctgcctgtggctctgctgacctgcagcagctcctggcatggtcccactagcagtagggttg

SEQ ID NO: 353326 - DNA, 201 bp, Homo sapiens
agggaccagcttccagcgggtgattcctgaagatggggccgcagcacgggcccctgagcaggtgcagcggctcatcttctgcacgggaaaggtgtactatracctggtgaaggagcggagcagccaggacctggaggagaaagtggccatcacgcgcctggagcaggtgtgcctgaaccccttgtacagtcaagtgatggg

SEQ ID NO: 353327 - DNA, 201 bp, Homo sapiens
ggtttcctgggacagtgacggaggcttgcctgcctcctgctgcccagctcccctgctccaggtgaacaggtgccagcccacctgccctctgtccctgcccyggtctgtgtctctgcagtcaccggcaccatgttctccatgaccaggaggttgaccgcaggacgtgtgtgcctatgaatcatctctggcctgaccaggccc

SEQ ID NO: 353328 - DNA, 201 bp, Homo sapiens
gccgatgacccagaggctgtgatatatgtgtgcagtgtggcagccgaatggagaaacactttcaacaaagatgttgtcgtggacctggtgggtctggggaytgaggccaaggcatgggtgggtggcccatccctgctgtgctgagccagccatgtcatcagcatcttcagcactcagggctgggagtgcttcttggatgag

SEQ ID NO: 353329 - DNA, 201 bp, Homo sapiens
ctttggcttctagccatgaggtccctataggccagagacagagagttctagaagaacttggtgatggggaccaggacttacgagtccaagtggactgggcrtctggctgcgcagggctttggtgctctgtccacatcttcatcctgattccaggaagaaattgccaaatacgaccggatctgtgaggaggcttatggcagg

SEQ ID NO: 353330 - DNA, 201 bp, Homo sapiens
gtaggaggcagccctgagctggggttgtccccataattatctatggagtgttcgtccttccaccttcatggagctctgagggcaaggactacaagtttccrgagccttctccaagccccttgctgagcgcactgcaggcctgcccagcctcggggtacctgtacaggatcccctgaactctgagactttggcttctagcca

SEQ ID NO: 353331 - DNA, 201 bp, Homo sapiens
atttgctagaatttaggtgtcttttgtgttttctggtgttaggatattgtgtagaatgctgtaagtcttccttgcttcagggtcataaaatgttgtgtgtycctcattgctaccattggtgtgaggagtcaggggattcagcttcagtgtttgctggtggcctggccgagggtctctgcgctgatgcctaggcactgccct

SEQ ID NO: 353332 - DNA, 201 bp, Homo sapiens
tgataaggagttccagctgccgacaaccaccttcattgggggctctgaaaacaccctttctctgcgggagatcattcggcgcctggaggtgagcacaggcrggtgtgtggggtgcagctgaagcagctctttggagcttgccagaggacgggaaggcactgtcttttttgttctagacagcagggatgtcagccgtccctc

SEQ ID NO: 353333 - DNA, 201 bp, Homo sapiens
gctccatgaggttggcaccacctggagggccaagtggctggaggtcctgctccagggctctatgagacgtcccacaccctgcctaagagagcaggagggtrccacaggaaggcaggactggatcggcctcaccactggctgcagggaggagagttgggaccaggtgtttaggcagtttggccaagagctggcccaaggcac

SEQ ID NO: 353334 - DNA, 201 bp, Homo sapiens
ggaccacctggctgtgcagtccctgatccgggcctaccaggtgaggggcagctgaggcacagcctgggaggctgcactggctcctggggtgtggccaggcrctgaagggaaggggtctcagctccaacatcatctccccagagagcccttctccttgtcctctactgagcggcacctactcctctagccagtctttgccac

SEQ ID NO: 353335 - DNA, 201 bp, Homo sapiens
cgcctccttctccagccttctatgaccttcaggaggctgaccttgataaggagttccagctgccgacaaccaccttcattgggggctctgaaaacaccctytctctgcgggagatcattcggcgcctggaggtgagcacaggcgggtgtgtggggtgcagctgaagcagctctttggagcttgccagaggacgggaaggca

SEQ ID NO: 353336 - DNA, 201 bp, Homo sapiens
tattttccctgggaaggcacaggtgacagagtgaggtgagatgagctgcagggcctggttccccgtggtctgggtgggcttccagtctgtacctgcctggrctgttagctgtcttgagtggcgctgggctgggcctggggctgccttccattctactcttcctgcccctccagaccttagcccttcctgcaatgaagtggg

SEQ ID NO: 353337 - DNA, 201 bp, Homo sapiens
cagccccttacaggcgagtagcaggcacagctgtggttagaatcacctgcacactgtgctgaaaaaaaaacactgtattattataagcattttcaaacatrtaaaaggcagaaggatagtgcagtgagcccaccacccatcaatcatggccagccttgtttcatcaatttcccccttagcccccgctcactgctgattatc

SEQ ID NO: 353338 - DNA, 201 bp, Homo sapiens
aaatttgactggagccactgccacttggtgactgcgtgcagcaagctctatcttgtcttctgtttaggctttgagctgggctatgccatggccagccccartgccctggtcctctgggaggcccagtttggggacttccacaacacggcccagtgcatcatcgaccagttcatcagcaccggccaggccaagtgggtgcgg

SEQ ID NO: 353339 - DNA, 201 bp, Homo sapiens
atttacaaggtttgaaagtcaaatcttcaaagtaagataacttcttaaaaatctggctcctagccctgcctctctatcctattttgtcccctcccctagakgataatttttcttatgttgtggtttttttaaattttatgattttcccttctaatgcatatatttatttgtgtctcctttttattagataatgtgtagttc

SEQ ID NO: 353340 - DNA, 201 bp, Homo sapiens
gcctttagagatgtcaaaaatagaggttctcaaagatgccagtacaatggcttgtttgatttcccagagctcacatgcaacaatcttagaataacagttctttttttttttttttttttttttagatggagtttctccttgtagcccaggctagagcgcagtggtgcgacctcagctcactgcagcctccacttcccagat

SEQ ID NO: 353341 - DNA, 201 bp, Homo sapiens
ttgaccagacaggactaattggaggactgctgcggtgttcaggccataacaagcgtaatcatttggaatatctctgggaactgctggcaggaggtattccrtcagggaaatgtgaggcagcagcaagccacagcaaggctagggtacaggggggcattagcaaatggaaatgatgctttgcctctgaatgagctgcccaat

SEQ ID NO: 353342 - DNA, 201 bp, Homo sapiens
caatctgtgcaaaggcctgggacgggacattcattcggtgataggtgatagtggagctcaaagggctcccagtgggtgtgccctacccagatattccccarttttgcagcagctacattgaccacacagcgtagggaagggcctgagcccctctggctgctcctgcaggtctgttaccgccggcgtggccacaatgagatg

SEQ ID NO: 353343 - DNA, 201 bp, Homo sapiens
acacagtgtggacagagcctctctccctctcaggcttcttcaacgtagatggggagcccaagagcatgacatgcccagccacggggatccctgaggacatsctcacccacatcggcagtgtggccagctctgtgcccctggaggactttaagatccacactggtgaggttgctggacaggctgcagcccaggctgctggcc

SEQ ID NO: 353344 - DNA, 201 bp, Homo sapiens; identical to SEQ ID NO: 75744

SEQ ID NO: 353345 - DNA, 201 bp, Homo sapiens
ggatccatcatgttcccatctccaccttcagggctccggggatgtcaagtaccacctgggcatgtaccatgagaggatcaaccgcgtcaccaaccggaacmtcactctgtcgctggttgccaacccctcccacctggaggcagtggaccctgtggtgcaggggaagacaaaggcagagcagttctaccgtggagatgccca

SEQ ID NO: 353346 - DNA, 201 bp, Homo sapiens
gcaagaaggtgagctcacctgggggaacccagaggacctgggcccttcagggtgggcccagagggctgggctggaccctgggtctccacagtacaggtgcyggctgggctacatgggctggggcacgcagcccctcctggctcacacctgccctgcaggtcatgtccatcctggttcatggggacgccgcctttgctggcc

SEQ ID NO: 353347 - DNA, 201 bp, Homo sapiens
tgggggatggtgattgggctgccctcacctaaggccatgtgggaggtgaaatcgtgtcccatctgggccccttggggatcccagttggggggacctccttrccttgaggggttttgtgggtatcagggccccagtgggcgcagacagagagcccaacacagtctgctgtgggttccagctgctgagcagtccagtcttggc

SEQ ID NO: 353348 - DNA, 201 bp, Homo sapiens
tgctcccagaggagccggccccaagtgccccgcgctctagggcttggcatcactggctcgtgggctgggccacatgacccgaagcctcaggggctgagcaytggggagggaaacttgggggcactcagaggctcccaagctcacctccctcctccctgcagtggaatcttttttgttttgaaaattttctctgttcaggct

SEQ ID NO: 353349 - DNA, 201 bp, Homo sapiens
tccctgggttcgtcctggcttgtgagaaggatgggtgggggcatggaggatatactgagaaaggctaaatttgactggagccactgccacttggtgactgygtgcagcaagctctatcttgtcttctgtttaggctttgagctgggctatgccatggccagccccaatgccctggtcctctgggaggcccagtttggggac

SEQ ID NO: 353350 - DNA, 201 bp, Homo sapiens
gatggcttcctcatgatgtcatttcatctgtcccattgtcccatgtaatttctgtactttgacaattagatctagaggctcgatcccatagacatttgattttttttttttttcaaaatcagcttcctggtggtgatggtgatggcacttgagcagttagcagctgtggatagtgatttcctagatccattaactcactag

SEQ ID NO: 353351 - DNA, 201 bp, Homo sapiens
atctgctgtaggtatactgtccttatagttgctcaaaacttgtccttattcccagcactcgtggtgtttgaacactgccttgatgttggtataacaagatrcttcaagctcagcttgtacatttctgcctattccagaactgtccaggtctctggctgtttcctgctattggtttgatcattacttctgggccctttcagg

SEQ ID NO: 353352 - DNA, 201 bp, Homo sapiens
gcagagctggcccagtggcctgaggcagcaagaaagcatggggctttaagcctcgggccattacagcagcaggagaggatggtgcctggtgattgggtggyctgaggagggctctgggcacgaaggggctgtattaggccaggccaggcctccacagtgggggagggaaccctgaggcctgcgggctttgccaggtgagag

SEQ ID NO: 353353 - DNA, 201 bp, Homo sapiens
caatggcatgatcttggctcactgcaacctctgcctcctgggttcaagcgattctcctgcctcaaccttccaagcagctgggattacaggcatgcgccacsacgcccggctaatttttgtatttttagtagagatggggttttgccatgttggtcaggctggtcttgaactcctggcctcaggtgatctgcctgcctcggc

SEQ ID NO: 353354 - DNA, 201 bp, Homo sapiens
agttcaagaggtgtccactgcagccacaagtccaaacctgcagttagtgtcagtggctaaggagagcctggggatgcaggcctggtcctgagctgccccarcccctctgggtaccaacgcctctgccatgtcctgttggtccctcagggaccagcttccagcgggtgattcctgaagatggggccgcagcacgggcccctg

SEQ ID NO: 353355 - DNA, 201 bp, Homo sapiens
ccacgcttcatgaccatcctgaggcgcgcacggcccatatggtacatggtggggccgctgattgcccctcacctcggccctgaggctctgtcctggctccrtctgtcccataggccatgctacccagaactggccctgcccttctctggtgatgagcaatgatggggcatcatcagtactggctttgtgtttgttctgcag

SEQ ID NO: 353356 - DNA, 201 bp, Homo sapiens
tgtgctggacattgggttgttctcatgagggtccttgcacatgtgtgagcgagtttatctgttagatggtgtccgagcagtgcagcggctggagctacggrggtgggactgaacgaccctcccaggagctggcagatgtcagcgagcccatccacagtgtgtgatggtgccagagcccccaccccacttcctcctacacgc

SEQ ID NO: 353357 - DNA, 201 bp, Homo sapiens
gtgtggacccatacctactggctcctatcccaggtctttctgacatcctgttccttttgttctagcaccttcagccttctaagcctcactttgctcttccrtaaaacagggataaaagcgcatgcccgagaatggttgcaatgagtcaaagatgacctgtgtgtatagtggaaaacttggccaaaggatgtttaaaatgaa

SEQ ID NO: 353358 - DNA, 201 bp, Homo sapiens
tgggattacaggcatggagccaccgcttccggccactgcctagcctctttcaaagtcctgcccatcttccctttcggtggctctctgggtcccctgggcartgagcctgtcactccctcctctgtgtccctttgccctcaggactatctctcctgctgtctccagcctgctgccgtgtgtgtgtgtgtgtgtgtgtgtgtg

SEQ ID NO: 353359 - DNA, 201 bp, Homo sapiens
tggccagctctgtgcccctggaggactttaagatccacactggtgaggttgctggacaggctgcagcccaggctgctggccccaccccaacactgtgcctygaagggagattggttgggatgcaagagagatggtgtgtcgcattcctgctcagtctgtagtgggtccacgtagctctcggcaccacatctgtgcccgtga

SEQ ID NO: 353360 - DNA, 201 bp, Homo sapiens
tacagtcaagtgatgggcaagctcacgtcgctggccccggctctggccaatgtgccaggcaggccagatgaaggccggtgaggccctgtgcctcctgtccrggggtgctggggacataccgcccctcctctggctatgctcctttgtttctgcctccccagatctctccattccccttcgacctgatcaagcaggaggcag

SEQ ID NO: 353361 - DNA, 201 bp, Homo sapiens
gctccctctcggagtacggagtcctgggtgggtccacgctctcctgcaggccaggcaggccccagacacctggggacaagagatgggctgggaagggaccrgggccagggcctgggaggggcgagagatgctcagaggcccttaggggatggccctgggggatggtgattgggctgccctcacctaaggccatgtgggagg

SEQ ID NO: 353362 - DNA, 201 bp, Homo sapiens
ctgctgggcccaagctgtccactaaggtcaagctggtggccatctgtggtcctcaggatcatgtgtgtgtggggggtgtgtggtgagtgtgggcgagttgygtgtggtgtgtgtgtgtggtgtgtttggtgtgtatgtggtgtgtggtatgtggtgagtggggggagtgtatagggggtgtgtgtggtgcgtgtgtgtggt

SEQ ID NO: 353363 - DNA, 201 bp, Homo sapiens
ggcctggtgggggacaggctgcaggagggaccacatggctctggttttccacagccttcttggatgccatgttgtgggaccctgcaggtttcctgggacartgacggaggcttgcctgcctcctgctgcccagctcccctgctccaggtgaacaggtgccagcccacctgccctctgtccctgccccggtctgtgtctctg

SEQ ID NO: 353364 - DNA, 201 bp, Homo sapiens
ttccacattcttggttcttttctatggttcaggctccagggtgagggcacctctgctgagaagccctccagactttcccctgagcctggggtccctgcagrgccagatgtctttcccatggtggggtccagccttggctgtctggcgtttgctttcagggcccagagcactcgtcagcgaggcccgaaaggttcctgcaga

SEQ ID NO: 353365 - DNA, 201 bp, Homo sapiens
cccaccctaccctgggccaccgcaagggagggaagccctcgggggccgggctgtggcagggcagtggggagaagcagcttgcctgctgtgtgatcctgggyaggtttctttgcctctcaggtcctcagtcatcaaagcctgttgctttccctttgctgaatcagccagtgggtggtggttttgattgagaggccctggcca

SEQ ID NO: 353366 - DNA, 201 bp, Homo sapiens
tgtggcttccaggacttgaccagctggctttctcattcctggttgcttatctcggctggtcttgctccagccagggcccaggtggccctctgatgcacccwgagctacctgtcagtccttgccagggactggggttcagccaggcgcccctcacttactgtgcccacctcggctactgcacagtggtttctgcctcttgtg

SEQ ID NO: 353367 - DNA, 201 bp, Homo sapiens
gtggccctctgatgcaccctgagctacctgtcagtccttgccagggactggggttcagccaggcgcccctcacttactgtgcccacctcggctactgcacrgtggtttctgcctcttgtgagttgggacagggctggtgagatggtaaagaagccagcaaggcggggcaggggaagtggcctcctagggtctctggctcta

SEQ ID NO: 353368 - DNA, 201 bp, Homo sapiens
ggcgcccctcacttactgtgcccacctcggctactgcacagtggtttctgcctcttgtgagttgggacagggctggtgagatggtaaagaagccagcaagrcggggcaggggaagtggcctcctagggtctctggctctagctggcacctgggaagtgtcttatcaggtcccctttatgggtgaaaagctgacattcagag

SEQ ID NO: 353369 - DNA, 201 bp, Homo sapiens; identical to SEQ ID NO: 75730

SEQ ID NO: 353370 - DNA, 201 bp, Homo sapiens
gtgtggtgcgtgtgtgtggtgtgtttgttgtatgtgtggtgtatttggtgtgtgtgtgtgtatggtgtggggtatgtgtgtggcatgtttgtgtggtgtgkgtgtggtgtgggtgtgtgatgtgtgtgtaggtgtatttgtgtggtgtttggagtatgtgtgtggagtttggagtgtgtgtgtgtgggtgtgtggtgtgtg

SEQ ID NO: 353371 - DNA, 201 bp, Homo sapiens
agggccctctggggagaacccttcccggcctctgtttactgatctctgcaatgggtgcattagggagtagtcctcactagggcaccccagacagggttgtrtgtgtgggagtcttagtggccatggtgtcggcagttttctggggttgggttgaggttctgaggttgggttggggatgctatgtgaccttgtcctcagaga

SEQ ID NO: 353372 - DNA, 201 bp, Homo sapiens
ctgatgggaactgcatcgctaagagaaatctggcttacatattgactgcagtgatcagggcacagtcgctggaaccccacacagccctgtcactcaccagmttagccagcttagcctcttgcacctcagtttctctgtttataaagtggaactgatatgagtgcccaccccatgggatgttgggaggattaaatgagcaca

SEQ ID NO: 353373 - DNA, 201 bp, Homo sapiens
gccgtgcggacatgaccaagaaccggacggtggactgggcgttggcagagtacatggcctttggctccctgctgaaggaaggcatccacgtgcggctcagygggcaggatgtggagaggggcacattcaggtgagcgcagtggggctcagcatccgcacaggagacctggagcagaagctgggcctggcttggggatcccg

SEQ ID NO: 353374 - DNA, 201 bp, Homo sapiens
agggaaggggtctcagctccaacatcatctccccagagagcccttctccttgtcctctactgagcggcacctactcctctagccagtctttgccacatcaycattcagagcacttaccacctgcttgaatttttttttgtgcatactgacttgtgtccttgtggtctgttccttgcacacaccatgccccgagtacgtgga

SEQ ID NO: 353375 - DNA, 201 bp, Homo sapiens
ttgacagctgtgtgatctgagtaaatgactctgagcctgacggtgtctgcagcgtggccaatgcttgccaagtggtacctgctccacccctccacaggctyggggtagccccttgtctcagctggaggaggggtgcctggccctgggccctcctgcagcatccctgccctccaaccaaatcaacagatggctgccctgctt

SEQ ID NO: 353376 - DNA, 201 bp, Homo sapiens
gacaggagcacagcataagcctggggacttggagtcaaatccgtgtaccttgacagctgtgtgatctgagtaaatgactctgagcctgacggtgtctgcarcgtggccaatgcttgccaagtggtacctgctccacccctccacaggcttggggtagccccttgtctcagctggaggaggggtgcctggccctgggccctc

SEQ ID NO: 353377 - DNA, 201 bp, Homo sapiens
tgcatcccttggctggggccactgtgacctttgcctgggaagtccggagggtcccctgtggctgtattggggtgcctacacaccctctgacccacctgggrgagttctgagggggttcccttacagtgtgcaccgagaccgagaccgaatgtcctggggcagctgctgacagcgtttggggcatgtgcccgctctgtttgt

SEQ ID NO: 353378 - DNA, 201 bp, Homo sapiens
gccctgctttgtgcggggtgtgtgctgagcacctacctacccgccccagggctggctgtcccttggccctcaggccagcactcctttcccacaggcctctstcgcattctgcggggccgtgcggacatgaccaagaaccggacggtggactgggcgttggcagagtacatggcctttggctccctgctgaaggaaggcatc

SEQ ID NO: 353379 - DNA, 201 bp, Homo sapiens
ctgttgcctccccaggatacctaaataaggttgaacctgaccacacatgatagcagggctgagggtagcatctctgagcatgttgtcagcccccaggatgktacattgtaccctttgaatcccagggaatccctgggttcgtcctggcttgtgagaaggatgggtgggggcatggaggatatactgagaaaggctaaattt

SEQ ID NO: 353380 - DNA, 201 bp, Homo sapiens
tttcatggagcagagcggtccgtgtgggtgagggtgggcgaggcccaggccgagttgggttggcccctgcctggctgtgtggtcatgggtggtttcttacmctctccttgcctcttcatctgtgcagtggggaagagtgtctgcatcatggggctactttgggggttagcgataaggcgtgtgggattcctagaactctgc

SEQ ID NO: 353381 - DNA, 201 bp, Homo sapiens; identical to SEQ ID NO: 75746

SEQ ID NO: 353382 - DNA, 201 bp, Homo sapiens
gaaacactttcaacaaagatgttgtcgtggacctggtgggtctggggactgaggccaaggcatgggtgggtggcccatccctgctgtgctgagccagccakgtcatcagcatcttcagcactcagggctgggagtgcttcttggatgagagatttatgccaccaagagcaatctgtgcaaaggcctgggacgggacattca

SEQ ID NO: 353383 - DNA, 201 bp, Homo sapiens
gtttgcccagcagagccttgggaggtgaggatggttttccgtacccatcgacctgctgaggaaatgttgttcctgctcccacccgctccctgggaggcctkggccaggccttcagcccatactgcctagcctctttctttccttttctttttgagatggggttttgctcttgttgcccaggctggagtgcaatggcatgat

SEQ ID NO: 353384 - DNA, 201 bp, Homo sapiens
actcccttgctcatttgtttgcccagcagagccttgggaggtgaggatggttttccgtacccatcgacctgctgaggaaatgttgttcctgctcccacccsctccctgggaggccttggccaggccttcagcccatactgcctagcctctttctttccttttctttttgagatggggttttgctcttgttgcccaggctgg

SEQ ID NO: 353385 - DNA, 201 bp, Homo sapiens
ggatgtcagccgtccctcttccccgctcctcatggggtcccaatgtgtctccccagaacacctactgccagcacattggcctggagttcatgttcatcaaygatgtggagcagtgccagtggatccggcagaagtttgagacccctggtgtgatgcagttctccagcgaggagaagcggaccctgctggcccggctagtgc

SEQ ID NO: 353386 - DNA, 201 bp, Homo sapiens
ttccccgctcctcatggggtcccaatgtgtctccccagaacacctactgccagcacattggcctggagttcatgttcatcaacgatgtggagcagtgccartggatccggcagaagtttgagacccctggtgtgatgcagttctccagcgaggagaagcggaccctgctggcccggctagtgcgctccatgaggttggcac

SEQ ID NO: 353387 - DNA, 201 bp, Homo sapiens
ctgccctcaagaccatcatcgacaaatccagcgagatggggattgagaatgtcatcttggggatgccacacaggtgggtccccctccctgctgtgccttgygcattctcctccagcccaggggacagaggtgggagagatgagatggaaatcagagcggaggtgttggtgggacctgggggtagaggtgggtttcctggaa

SEQ ID NO: 353388 - DNA, 201 bp, Homo sapiens
ttcctgtaccaaagggaagaacagagaagataaaaccaaaagtctaaagcaaagacaaagaggggcagaattctctacagttctttacctctgagctacartcagaaaccgtggaggttaaattccatgtttaaatctgagtagaataggttctaattagagcttaaagcctttgaccaacttattaagttatctttaatt

SEQ ID NO: 353389 - DNA, 201 bp, Homo sapiens
aagatgctaatgtagataaaaatattatttattttttctttttttagacacaggatctctgtcacccaggctagggtacagtggcacaatcatagctcacygttacctcaaattcctgagctcaagggatcctcccacctcaaactcctgagtagcaggaactgcaggctcacaccactgcacccacctaacttttttttt

SEQ ID NO: 353390 - DNA, 201 bp, Homo sapiens
gttgcgacagttgacctaatgccacaaaccagttgatggcagaacctgcggtgtgctttgctgctttgtctcctatatcttcttgaaatatagtcttctastttgacattcttacttctagttaaccagagataaaattttgcagaaatgctacctgaaagcttgtggggttttttgttttgttttgttttgtttgttatt

SEQ ID NO: 353391 - DNA, 201 bp, Homo sapiens
taatgtagataaaaatattatttattttttctttttttagacacaggatctctgtcacccaggctagggtacagtggcacaatcatagctcactgttaccycaaattcctgagctcaagggatcctcccacctcaaactcctgagtagcaggaactgcaggctcacaccactgcacccacctaacttttttttttaatttt

SEQ ID NO: 353392 - DNA, 201 bp, Homo sapiens
tagctgctatgggacattatcaatgtaaaaccatatagaaacaaatgagctctgaaaatttttttctcagacctgcttaatgacattttctctacaaagtwtgctatcagggttaaaacagaaaaactgaaaaagccaaatcaaatgttgttctattttaggtaagatttatgatggtatctattattttccgtaatactt

SEQ ID NO: 353393 - DNA, 201 bp, Homo sapiens
cggagcttgcagtgagccgagatcacaccactgtgctccagcctgggcaacagagcgagactgtctcaaaaaaaaaaaaaaaaaaattttttttttagctsttaaggtagatttggattgaacactgagaacaaaatatcccatcagtttttaagatgaatttacattcttgaaataaaaaacttggtaaaatgcatttaa

SEQ ID NO: 353394 - DNA, 201 bp, Homo sapiens
tttcagtggagacaaggtctcattctgttgcccaggctggtctcaaactcctgggctcaggcagtcctcctgcctcggcctctcaaagtgctgggcttacmggcatgagccaacacaccccgcctataatttataatccctgcccttgaggagctgagagtctagtgagggagtcagattccatttcttaagacagattta

SEQ ID NO: 353395 - DNA, 201 bp, Homo sapiens
ctacaaagtatgctatcagggttaaaacagaaaaactgaaaaagccaaatcaaatgttgttctattttaggtaagatttatgatggtatctattattttcygtaatacttagtgccgcctactatattcatttttttcttttttattacagaaatataaaaatgaaccatacctgttgttcaaattttcagtattggcaac

SEQ ID NO: 353396 - DNA, 201 bp, Homo sapiens
tttcattctcttcacagtgacttttgaagcacagaagttttaagttttgaagtaagcttattaatgtgttgttttctttcttcctgttttggttgctatakctttataataagtcttaaaatcaggtagtatgggtccttcaacttttttctccttcagcgtcgttttgccaagttttagaatcagtatttcaatgtttac

SEQ ID NO: 353397 - DNA, 201 bp, Homo sapiens
ggggtttcaccatgttggccaggctggtctcgaactcctgacctcaggcgatcctgcccgccacagcctcccaaagtattgggattacaggcatgagccaytgtgcccagcctagagattttctttagttccacaaattattcacacagccaagaagactgacccaattctgaaaatcattctttcactcccatgagtagg

SEQ ID NO: 353398 - DNA, 201 bp, Homo sapiens
attaatgtgttgttttctttcttcctgttttggttgctatagctttataataagtcttaaaatcaggtagtatgggtccttcaacttttttctccttcagmgtcgttttgccaagttttagaatcagtatttcaatgtttaccaaaacagcttgctgaattttgagaatgctttgaatctgtagatctgtttggggagaat

SEQ ID NO: 353399 - DNA, 201 bp, Homo sapiens
aatacatggaatttccatatactctttactcagattcaccagtttacatttttgtcccatctacttcatcattttctctattttcttttcttgaattgttyaggaatatgttggagatactgtgcccttttatccctaaatactttgttgtatatttcctaagaactaggacattgtcttacatcagcacagcacagttag

SEQ ID NO: 353400 - DNA, 201 bp, Homo sapiens
atgtgttgttttctttcttcctgttttggttgctatagctttataataagtcttaaaatcaggtagtatgggtccttcaacttttttctccttcagcgtcrttttgccaagttttagaatcagtatttcaatgtttaccaaaacagcttgctgaattttgagaatgctttgaatctgtagatctgtttggggagaattgac

SEQ ID NO: 353401 - DNA, 201 bp, Homo sapiens
tttcgctcttgttgcccaggatggagtgcaatggcgtgatctcagcttaccgcaacctctgcctcccaggttcaagcgattctcctgcctcagcctccctwgtagctgggattacaggcatgtgccaccatgcctggctaattttgtatttttagtagagacggggtttctccatgttggtcaggctgctcgcgaactccc

SEQ ID NO: 353402 - DNA, 201 bp, Homo sapiens
gaccaggttcctccactgtcaggttatactttttcattctgtaattaatgtatcgctatatattttatatactttgaaactgtaaacatcttgtcctcatmaaaccttcacctactaattttagcagtcattgctaattttttaaactcccattctttctacatttagtagttggcattctactataaggaaggattttcc

SEQ ID NO: 353403 - DNA, 201 bp, Homo sapiens
cgtgatctcagcttaccgcaacctctgcctcccaggttcaagcgattctcctgcctcagcctccctagtagctgggattacaggcatgtgccaccatgccyggctaattttgtatttttagtagagacggggtttctccatgttggtcaggctgctcgcgaactcccgacctcaggtgatccgcccacctcggaattgaca

SEQ ID NO: 353404 - DNA, 201 bp, Homo sapiens
ataattttgttgctgttgtaagtttttaaaatttctgtttttaattattcattgctactatgtggaaatgcaattgattttcagattacaattcaatatgytaagtgctctaccaatgttatgtgcaaaataccttgggagcatggaggaagaacaatcaaccctacttatggtgtcaaggaatgcttcataaaagaaata

SEQ ID NO: 353405 - DNA, 201 bp, Homo sapiens
ccttgtgtttgttcactttgatatttctcaagtggataggctagttattttgtagattgtccttcttgtgtttgcccactgcttcttcctaattaggttcrggttattcatttcggtaggaatcccactgaagtgatactgtgttctatttagtatatcttttgaggagacatgtgatagcactttgtcccaatatttgtg

SEQ ID NO: 353406 - DNA, 201 bp, Homo sapiens
aatctcagcttactgcaacctccaccctccaggttcaagtgagtcccctgcctcagcctcctgagtagctgggactacaggtgcacgccaccacgcccagmtaatttttgtatttttagtagagatggggtttcaccacgttggccacgatggtctcgatctcttgaccttgtgatccgcccgcctcgacctcccaaagcg

SEQ ID NO: 353407 - DNA, 201 bp, Homo sapiens
acctttaaaaagtatttttggagaagggggttaacaaaagccccgtgtttaaaatatagtaatatctaacctaatcttttgatttataatgcttctttaamattcactaatgttagtgttttgtgttcttatcccatttataagagcattgtaaactgagttttctttgaaagaagcttgtataccatctcatttatactg

SEQ ID NO: 353408 - DNA, 201 bp, Homo sapiens
tatatttcctaagaactaggacattgtcttacatcagcacagcacagttagttatcaaaatcaggaaatttaatttgatacagtactgttagttaatctayattataatataattttgttattccaattatgacctttgtagctttctttccagtcttcaattagtccaggctcacaccttggtattctttaaactggaac

SEQ ID NO: 353409 - DNA, 201 bp, Homo sapiens
cacaatctcagttcattgcaacttccaccttaggggctcaagggatcttcccacctcagcctgccaggtagctgggactacaggcatgcaccaccacaccyggttaattttttgtgttcttagtagagacagggttttgccgtgttggccaggatggtgtcgactcctggactcaagtgatccacctgccttggcctccca

SEQ ID NO: 353410 - DNA, 201 bp, Homo sapiens
tccctacccatgccatgtctccgcaggagatcggggaatattgtattgcaatgctacagagctccttgtgtagcatataaattacatgatgctgaatggcmacaacaacaaaacctctctgaggagctttatcattcctgtcttttcatcaagttataattcagaagctgagtaatctgaatgagtagctttaaagtgact

SEQ ID NO: 353411 - DNA, 201 bp, Homo sapiens
agctgagtaatctgaatgagtagctttaaagtgacttggaaaataactggctaaaaataaggatgcattcacattcttgttttcatgtactggaacaggtytctcaactgttgtagagggtctttattgttaagaacttttttaagtagtaaaactttggttttctaaaagactctggcatttagaggcatactgagttta

SEQ ID NO: 353412 - DNA, 201 bp, Homo sapiens
tcttgttttcatgtactggaacaggtctctcaactgttgtagagggtctttattgttaagaacttttttaagtagtaaaactttggttttctaaaagactytggcatttagaggcatactgagtttagtgtctttatttctgtgcacacctttcaagttaaaaatgtgggccttttattcaaagagtaaacaataacatac

SEQ ID NO: 353413 - DNA, 201 bp, Homo sapiens
aatgttttttcccatgatcgttacaaactcttattcctaataagggaaaataaccatgtttcttactactaaatctaaaaaatcatgaagaggtcatgaaytcctcataagattttaatggattccttctagttttttccttaagtgaaggtctttgactatgaagtcttaaaggcccatccctagtgagagctatcacaa

SEQ ID NO: 353414 - DNA, 201 bp, Homo sapiens
aaattccctagacctcagaccacctcatcaccaactgtaagcctccacctactctacactgcaggcaagcacaatgaatctgtttaccattcccctcatayagtgatttacatttgttttttttttttgccctgtgtccttgtgcagctatgccctcagcctgcatgtcagctgccacatccccttgtaaagctttcctat

SEQ ID NO: 353415 - DNA, 201 bp, Homo sapiens
tgagccacaatgccctgcctgaaaagtatcttttactagtaattggatacattttaaatgtaagcctattttcactgttccaaactcttgccttaaagcarttgtccccagtaccatgatgtttttaggatagagcatatcgagtagaataagacttgtctttaaattttcatgaggtgctacttacctaaacacgtatat

SEQ ID NO: 353416 - DNA, 201 bp, Homo sapiens
agttaattgtattattagaaagtatcaaatacatagtaacaagctcttcaataatcatcttctcattctgcttatgctcattctgactgccatctaaattrcaaatgccgtgaggccaggaaccatacatatcttattcatctttgtatccagtgattcccagcacaatactcagtaaatagttgttgaattggacagttt

SEQ ID NO: 353417 - DNA, 201 bp, Homo sapiens
ggttagcctattgtttgccccagctgtttgccaccacctcaagaagtttcagtgttaaacaatccctgtaattgttttcatcaaaccctcaaaagaattaygcttttcctactggccaagctccaagtcctgtaaagtaaagacagccttctgagcggggccctccaggggaccaccagacaggtcaaataatgacagttc

SEQ ID NO: 353418 - DNA, 201 bp, Homo sapiens
tgtgatccgcccgcctcgacctcccaaagcgctgggattacaggcatgagccaccccgcctggccttatattacgtgtttttatgtgtatgtatatgaaayttcagacttacagaaaagttgcaggtataatacatggaatttccatatactctttactcagattcacagaaaagttgtaagaataatacatggaatttcc

SEQ ID NO: 353419 - DNA, 201 bp, Homo sapiens
catagtaacaagctcttcaataatcatcttctcattctgcttatgctcattctgactgccatctaaattgcaaatgccgtgaggccaggaaccatacataycttattcatctttgtatccagtgattcccagcacaatactcagtaaatagttgttgaattggacagtttaagccatgaatcacccagtgcccatagacct

SEQ ID NO: 353420 - DNA, 201 bp, Homo sapiens
gctacttttaagcattactcaccagttaataattgaaaagccaatcctacaaagtgctttccaggcctctggaaaaggtctgctccatccaggctccacckgtcttattggacccacatcgtgacctgcaagtagagttggtttttaaagggggggaccagtctccttctatctaactcatactgtgaagcaatgtttaat

SEQ ID NO: 353421 - DNA, 201 bp, Homo sapiens
tctgactgccatctaaattgcaaatgccgtgaggccaggaaccatacatatcttattcatctttgtatccagtgattcccagcacaatactcagtaaatakttgttgaattggacagtttaagccatgaatcacccagtgcccatagacctcatatgtagtaggtagctaattctaatcaacagactggtttcaccaaaat

SEQ ID NO: 353422 - DNA, 201 bp, Homo sapiens
taagacagatttattgaggtataattgacataaaataaactatttgtttaaagtatacaattatgtaagtttggacgtatgactacacccatgaagctatsttttgtttaagttttcattgttttttgttttaattgagttttgaaagctttatatattttggatataaatcctttatcagatatttctagcatgtctttt

SEQ ID NO: 353423 - DNA, 201 bp, Homo sapiens
cttaaacatagggcaggtgctatgaaaataatggtataataatcttatgggaccatcgtcacgtttgtgcttcgttgttgactgcaacatcactatgcggyacgtaactgtctatctgcttgggccttctaaaattgatattgaagccaaagatcttacttaagtgtaaaatcttatacgtcagtttgtgccagactattc

SEQ ID NO: 353424 - DNA, 201 bp, Homo sapiens
atcattatcaagtagtacataagttggatagagcttatctttttatttttgttatgtaccttattccagtaaaaattaagttaggccaatcttaaacctcrtctgtttctcatttgtagtcacaatatcattatacttttaggcactcagccagtctcttagttctcaagtacagtccattttatttctttaccgagtttc

SEQ ID NO: 353425 - DNA, 201 bp, Homo sapiens
gactgcaacatcactatgcggtacgtaactgtctatctgcttgggccttctaaaattgatattgaagccaaagatcttacttaagtgtaaaatcttatacrtcagtttgtgccagactattcccctggataccatttctttcctgggcctcattttgggcctgtagactttataccagttttgtttggtctcttttccgtt

SEQ ID NO: 353426 - DNA, 201 bp, Homo sapiens
ttaccttctgagttaaagctatcagcctgttgggctggagttttgccagaaatgtatttaaactcattgaaaccaggaaggaatcaaacaattctcagtayttttccagctaacctcctagactattttctaaaaatataatcatctcctccctcccaaaaaagattatgggcactcttatgtgagttagaactttggatc

SEQ ID NO: 353427 - DNA, 201 bp, Homo sapiens
caaatttaatagcacctctgccactttctaggcacagtggtaggctctgagatacaaagatggagaagatgtgatgcctgctttggaattcacagtccagygtatgagagagaggcagtatgagaccgatgcagtacatgggaatgagtgctgtagtggaggcccatggggctgtgggagcacagcctgggagagctgcat

SEQ ID NO: 353428 - DNA, 201 bp, Homo sapiens
tgtaattcttccatttgagagtgatttgtttctattaaaaataattttcaagtggtttcttgtactttagtatgaagacattgtgtaaatataagaagcayaggaacagtatttagagaaatcagtaaccttttgtttaccctattttgaatcctaaaagaaaaagttcagttatcatggccaggcgcgatagttcatgcc

SEQ ID NO: 353429 - DNA, 201 bp, Homo sapiens
aaagagggagaatgaagaaaagataaggattgttggtgttcccaagcgtaaggggctaaatgggtccaggaacttagaggctttcctgaattccatgtttstggcatgttatagttaaccctttgattatcagcaaatactttagccaggcttaatcacagagagccagaatcatctacgtctctgactcctggggcgggg

SEQ ID NO: 353430 - DNA, 201 bp, Homo sapiens
caggaaattccaagggtgtttgaagcttttaccaggaacccaagatggcacaccagaaaaattcttttttataccacagttacaaagtaacaagcaataargcagacataaaacagccagctggccttaatagctgaactatatttagataaaattcatctctttgagaatacttgagtctgtcataatgtaactgccttt

SEQ ID NO: 353431 - DNA, 201 bp, Homo sapiens
ttgaggaaacctatttttcactctgggcttattgatcttacgacagatacttttttcctgtctttctcttaagtaaaatgaatgactagattcaagtcatsaatccagaagctaggtctgctgtaagccgtggtcatttgtgatagacagtttggaaagctttataaatgtgttcacttcttttccttttttctttttttc

SEQ ID NO: 353432 - DNA, 201 bp, Homo sapiens
agtatgggccatactttctcatttctttccatgtcttctaattttcatttaaaactggacatttaaaataatgtaatgtgaccctggaaatcagattttckcttttcatcacagttcatccttcttgctgttttttcaatgacttttctaaactaattttgtgatgtctgtgttctttctgtgtgtggccagtgaagtccc

SEQ ID NO: 353433 - DNA, 201 bp, Homo sapiens
gcattcatatggccatgggcacgcatgagccctctagattccttcttgttttaatatattagaacttttcaaagccctttgtggacattctcattcttcarcttttcctttgaagcttttggttagcctattgtttgccccagctgtttgccaccacctcaagaagtttcagtgttaaacaatccctgtaattgttttcat

SEQ ID NO: 353434 - DNA, 201 bp, Homo sapiens
cattcatatggccatgggcacgcatgagccctctagattccttcttgttttaatatattagaacttttcaaagccctttgtggacattctcattcttcaayttttcctttgaagcttttggttagcctattgtttgccccagctgtttgccaccacctcaagaagtttcagtgttaaacaatccctgtaattgttttcatc

SEQ ID NO: 353435 - DNA, 201 bp, Homo sapiens
tgatacagtactgttagttaatctatattataatataattttgttattccaattatgacctttgtagctttctttccagtcttcaattagtccaggctcayaccttggtattctttaaactggaaccatttctcagcttttccttgtgtttgttcactttgatatttctcaagtggataggctagttattttgtagattgt

SEQ ID NO: 353436 - DNA, 201 bp, Homo sapiens
ttctttccagtcttcaattagtccaggctcacaccttggtattctttaaactggaaccatttctcagcttttccttgtgtttgttcactttgatatttctmaagtggataggctagttattttgtagattgtccttcttgtgtttgcccactgcttcttcctaattaggttcgggttattcatttcggtaggaatcccact

SEQ ID NO: 353437 - DNA, 201 bp, Homo sapiens
ctaccaatgttatgtgcaaaataccttgggagcatggaggaagaacaatcaaccctacttatggtgtcaaggaatgcttcataaaagaaataacataaatyttctagttattttcttgatttttagcatgaatatcttgtccaaaattctagataaatgtctaataattaaaatacaaattatttttagaagtagtatatt

SEQ ID NO: 353438 - DNA, 201 bp, Homo sapiens; identical to SEQ ID NO: 75781

SEQ ID NO: 353439 - DNA, 201 bp, Homo sapiens
tcctcatcaaaccttcacctactaattttagcagtcattgctaattttttaaactcccattctttctacatttagtagttggcattctactataaggaagrattttccctttttccttatttgtgtatacttatttattaatatttattatttattaatatatatgcaagtatagacacttgcattcttattgtattcagt

SEQ ID NO: 353440 - DNA, 201 bp, Homo sapiens
attccctgcaccagctctggaatcagccatttctgcaggtggtcctggattttagttagtttttggaagccaagatttgaactagaacatatatgttacamacacacacacacacacacacacacacatatacaactgtgaatttatattgatacctcccattcttaaccagcttcacagcctatattatagtctttcccc

SEQ ID NO: 353441 - DNA, 201 bp, Homo sapiens
ttccctgcaccagctctggaatcagccatttctgcaggtggtcctggattttagttagtttttggaagccaagatttgaactagaacatatatgttacaaacacacacacacacacacacacacacatatacaactgtgaatttatattgatacctcccattcttaaccagcttcacagcctatattatagtctttccccc

SEQ ID NO: 353442 - DNA, 201 bp, Homo sapiens
acatatacaactgtgaatttatattgatacctcccattcttaaccagcttcacagcctatattatagtctttccccctttccataattggaactctcttcyccaacaatgaagaatgtggctcccaatatcttcaatttttctcgtttgtttaagcctaatatatacaaaaggtgatttcagaacttctaaaccatgccac

SEQ ID NO: 353443 - DNA, 201 bp, Homo sapiens
tgtgatgtgatgttaccttaatggaaatggccatttcatcatctatttgatgtctggatttctgccatctccctccttaggagactcttagccatgcactrcaatctatctgcctgatcaattctgttccttcaatgatgcatccagctcagtgagctaatggctgtgactgtgctgcctgaatctgtagaagagtttgag

SEQ ID NO: 353444 - DNA, 201 bp, Homo sapiens
tccctgcaccagctctggaatcagccatttctgcaggtggtcctggattttagttagtttttggaagccaagatttgaactagaacatatatgttacaaacacacacacacacacacacacacacatatacaactgtgaatttatattgatacctcccattcttaaccagcttcacagcctatattatagtctttccccct

SEQ ID NO: 353445 - DNA, 201 bp, Homo sapiens
  misc_feature (1)...(201): n = A,T,C or G
taaaataataaataagggaatgtctttttatattgtagatgtgaaaaacccttgacacgattgcatgtcacttacgaaggtaccatagaagaaaatggccnaggcatgctacaggtaggtgaatcttagtagtgtctgtgtatggttaggactttttcttgtcaagcttctgacagcaaaagaaatttgaaaaactgttta

SEQ ID NO: 353446 - DNA, 201 bp, Homo sapiens
ttctttctgtgtgtggccagtgaagtccctgcttgttagattagtagtcagctaatgcttgaacagatttccttagatgcctgaaactaataagtctcaaygaagtctaatagtctttgttgaagggctgtatgtgcaggtgcagcctaccttcaacactgcactaagcagttgatgcctctgccttagccttcacttcct

SEQ ID NO: 353447 - DNA, 201 bp, Homo sapiens
gatttgaactagaacatatatgttacaaacacacacacacacacacacacacacatatacaactgtgaatttatattgatacctcccattcttaaccagcwtcacagcctatattatagtctttccccctttccataattggaactctcttccccaacaatgaagaatgtggctcccaatatcttcaatttttctcgtttg

SEQ ID NO: 353448 - DNA, 201 bp, Homo sapiens
atattgatacctcccattcttaaccagcttcacagcctatattatagtctttccccctttccataattggaactctcttccccaacaatgaagaatgtggytcccaatatcttcaatttttctcgtttgtttaagcctaatatatacaaaaggtgatttcagaacttctaaaccatgccactgcaaaaagtaaacctgtta

SEQ ID NO: 353449 - DNA, 201 bp, Homo sapiens
cagcttcacagcctatattatagtctttccccctttccataattggaactctcttccccaacaatgaagaatgtggctcccaatatcttcaatttttctcrtttgtttaagcctaatatatacaaaaggtgatttcagaacttctaaaccatgccactgcaaaaagtaaacctgttaaatagagttcattatttgtttaca

SEQ ID NO: 353450 - DNA, 201 bp, Homo sapiens
tctttttgttctggcagagtttcatccacagtcttgatagggtatatcagcttactaaagtaaggtcaagaagctgaagttggtgttcatttttacttttstgtctataaaaatctaaaatgggaaagatgaatgagggtaagttcagatctgagaagccccactgtcctgtttctcagacctgccagcgctcatccagtg

SEQ ID NO: 353451 - DNA, 201 bp, Homo sapiens
gaatgggggagaatgactttgaaaccttcccagataaagacctcccttgatttgtggcccatgagacacaaataggtttataaacaagagtctgtatgatwcataatattttgcctaaaagctccattttccagattgcttctctggttctgggatccagaaaaatgtgcagagatgttaactgcagtgaggtggaaagag

SEQ ID NO: 353452 - DNA, 201 bp, Homo sapiens
gtgagttttggcaaattgatatgcttttatatcccacacccctatcaagacataaaaaaaaaaaaaacatgtctatcacctcagaaaattcccttgagccyttttctggtcagtccccaaccccagaaacaaccataatttttattcttttcattataaattacttttttcttttttttagaatgtcatgtaaatatatgt

SEQ ID NO: 353453 - DNA, 201 bp, Homo sapiens
atctcggctcattgcaacctccacctcccgggttcaagcgattctcctgcctcagcctcctgagtagctgggattacaggcatgcaccactactcccggcwatttttgtatttttaattagagacggggtttctccatgttggtcaggctcatcttgaactcccaacctcaggtgatccacacgcttcggcctcccaaagt

SEQ ID NO: 353454 - DNA, 201 bp, Homo sapiens
agatgagagcttagagactatgtgcttcttgatcatatgtgtaggtatttttgaccattatttaatgtcacatttccccaacaggtggattttgcaaatcrttttgttggaggtggtgtaaccagtgcaggacttgtgcaagaagaaatccgctttttaatcaatcctgagttgattatttcacggctcttcactgaggtg

SEQ ID NO: 353455 - DNA, 201 bp, Homo sapiens
gtctcactctgttgcccaggctggagtgcagtgatgtgaccttggctcactgcaacctctgcctcctgggttcaagtgatgcccctgcctctgcctcccargtagctgggattataggtgcctgccaccatgttcagctaatttttgtatttttagtagggacagggtttcaccatgttggctaggctggtctcgaactac

SEQ ID NO: 353456 - DNA, 201 bp, Homo sapiens
gacctaatgattcacctgcctcagcttccacagtgctgggattacaggcatgagccaccgtgcccggctggcaaaatatttttaacatgcttgttacttawttgtacatgagttttgtgttttaccacaattagttgtttgtttttgtaagatacagggtctcattgtgtcacccaggctagggtgcaatggcgcgatcat

SEQ ID NO: 353457 - DNA, 201 bp, Homo sapiens
cacttcttgagaaatctagttccatttagggggaatgatggtagagaccaagatttgggtgctgagtgtgctcattgctactgtggtgtctcccttttggyccttttagcagacagagctaggaaatatatatgtgcatacacacacatacacacacacacacacacagatacacatattttcgacatcatgagtatacac

SEQ ID NO: 353458 - DNA, 201 bp, Homo sapiens
ttctcatgtcctgtcatgagaccacaaaaatctaagagaaaaggaaaaggaatatttaacactattttcttttttcctattatgtttgaaggaattcttatttcatttaccattttccttcagaggtcgcttatcactttgatcccccagacacagtattttgttgagtattgaaagattggcaggaggagaagagcatat

SEQ ID NO: 353459 - DNA, 201 bp, Homo sapiens
ggtctttattgttaagaacttttttaagtagtaaaactttggttttctaaaagactctggcatttagaggcatactgagtttagtgtctttatttctgtgyacacctttcaagttaaaaatgtgggccttttattcaaagagtaaacaataacatacacattgaatgtatttcatcatcattatcaagtagtacataagtt

SEQ ID NO: 353460 - DNA, 201 bp, Homo sapiens
tctgacaccacctgggtgtactgcattgcaaatctgacactgactacctggagtaatcgcagatctcgcctattaagaacagagtccacaagactgccccyacttcagactccatccacaagtttcaggggaatccccaggccacgcacatttctgtccagctggttactattgtaggaggttcccatgtccccacctcag

SEQ ID NO: 353461 - DNA, 201 bp, Homo sapiens
taacaacagttaaggttgagatcctccccacttccttggaatatattatagatggaaatgtgagacctcggtagattagagaataccgtaagggcttcttkctattaattgttctccctacccatgccatgtctccgcaggagatcggggaatattgtattgcaatgctacagagctccttgtgtagcatataaattacat

SEQ ID NO: 353462 - DNA, 201 bp, Homo sapiens; identical to SEQ ID NO: 75783

SEQ ID NO: 353463 - DNA, 201 bp, Homo sapiens
aggattttatttgagcgactacctgttccttatcttttctcccctttccttcctgtcccagggacgactggcagcggcgctgcactgagatcgttgccatygatgctcttcacttcagacgctacctcgatcagtttgtgcctgagaaaatgagacgcgagctgaacaaggccagtaaccttatttcttagttcatctggc

SEQ ID NO: 353464 - DNA, 201 bp, Homo sapiens
actgctagttagcaccacaggaatgctgacctttcattacaatacaattcaacaaggaattatttaacaacagttaaggttgagatcctccccacttcctyggaatatattatagatggaaatgtgagacctcggtagattagagaataccgtaagggcttcttgctattaattgttctccctacccatgccatgtctccg

SEQ ID NO: 353465 - DNA, 201 bp, Homo sapiens
taaatctttaatctaggatgaagctgtggcacaccagctggtaaagagctaaaggtatctaggtggaaaatgtcatgatatagccgtgtcttttctctttrcctcagccttaatacagatattggcagctgctgcagctgagcgagatgtggtttatttcacctttggggactcagaattgatgagagacatttacagcat

SEQ ID NO: 353466 - DNA, 201 bp, Homo sapiens
ctcatcacagtgttcacattgctttcatggaggagagagttttcagaggtttttactgcaccattttttactgatatctttttatcttttgtaagcacccrtggataaaggagctttcaatgagttattctacatcatttagacatcctatgtaaatttttatccctgtgattctgcttttttggtgaagtaaggcaaaaa

SEQ ID NO: 353467 - DNA, 201 bp, Homo sapiens
atttttatccctgtgattctgcttttttggtgaagtaaggcaaaaaataaaaaattgtaaattgtctgagtttatgtaggaaattaagattggaacttccrcaaaggaatttttttcctggacagagcctcagtcagccatttgaagttagtgacttggagtactgcattcagaattctgagattatgatccaaattatac

SEQ ID NO: 353468 - DNA, 201 bp, Homo sapiens
actgaaatggaaagataaactccttttgtactcaacacttcctcaactcacattttggccatctgtctgcatttgttagttatcatggatgcacgtgggargtatataattgggcaaggtactaggggagataagattgcaaggaattacagaacaaaaaaaactggcataaatctattgttgagcaaccagcactttggc

SEQ ID NO: 353469 - DNA, 201 bp, Homo sapiens
tattgctgtgaaagtattttatagatgtgatcaaagtctacaagtaaaggagttaatcttattgcattcaataagcatttttttttcctttgagacaaagyctcactctgttgcccaggctggagtgcagtgatgtgaccttggctcactgcaacctctgcctcctgggttcaagtgatgcccctgcctctgcctcccagg

SEQ ID NO: 353470 - DNA, 201 bp, Homo sapiens
cagtggctcacgcctgtaatcccagcactttgggaggctgaggcgggcggatcatgaggtcaggagattgagaccatcctggctaacgtggtgaaaccccrtctctactaaacatacaaaaaaaaattagctgggcctggtggcaggtgcctgtagtcccagctacttgggaggctgaggcaggagaatggcgtgaaccca

SEQ ID NO: 353471 - DNA, 201 bp, Homo sapiens
cctgtaatcccagcactttgggaggctgaggcgggcggatcatgaggtcaggagattgagaccatcctggctaacgtggtgaaaccccatctctactaaamatacaaaaaaaaattagctgggcctggtggcaggtgcctgtagtcccagctacttgggaggctgaggcaggagaatggcgtgaacccaggaggcggagct

SEQ ID NO: 353472 - DNA, 201 bp, Homo sapiens
tggtcccggagccacgaagatgggagtgaaaggtgagtctgtttctgtcttcagtattccatggctaaaagcaaaggaatttgggcttgaccctcacacactctcattctgtctacttgtatttcagcaagtgaacttaaaaagaaaaaagaaaagaaatcagcattacaggttcattggcattgaaaacactattaccat

SEQ ID NO: 353473 - DNA, 201 bp, Homo sapiens
ctgggcctggtggcaggtgcctgtagtcccagctacttgggaggctgaggcaggagaatggcgtgaacccaggaggcggagcttgcagtgagccgagatcrcaccactgtgctccagcctgggcaacagagcgagactgtctcaaaaaaaaaaaaaaaaaaattttttttttagctgttaaggtagatttggattgaacac

SEQ ID NO: 353474 - DNA, 201 bp, Homo sapiens
ggtcccggagccacgaagatgggagtgaaaggtgagtctgtttctgtcttcagtattccatggctaaaagcaaaggaatttgggcttgaccctcacacactctcattctgtctacttgtatttcagcaagtgaacttaaaaagaaaaaagaaaagaaatcagcattacaggttcattggcattgaaaacactattaccatc

SEQ ID NO: 353475 - DNA, 201 bp, Homo sapiens
gctatgggacattatcaatgtaaaaccatatagaaacaaatgagctctgaaaatttttttctcagacctgcttaatgacattttctctacaaagtatgctwtcagggttaaaacagaaaaactgaaaaagccaaatcaaatgttgttctattttaggtaagatttatgatggtatctattattttccgtaatacttagtgc

SEQ ID NO: 353476 - DNA, 201 bp, Homo sapiens
acttggagacaatgtttaatattttatatctcatgttttacaaacttttagagcagaagtctgtgttaaatcactttagagatgacttgcacaattctgcttgtgtgtgtgtgtgtgtgtgtatatatgcatgccagagagaaaggaggaaaagaaaaaaaaaaaacccacatttttctacgcgaaaaagtaaaaccagtt

SEQ ID NO: 353477 - DNA, 201 bp, Homo sapiens
ttggagacaatgtttaatattttatatctcatgttttacaaacttttagagcagaagtctgtgttaaatcactttagagatgacttgcacaattctgcttgtgtgtgtgtgtgtgtgtgtatatatgcatgccagagagaaaggaggaaaagaaaaaaaaaaaacccacatttttctacgcgaaaaagtaaaaccagtttt

SEQ ID NO: 353478 - DNA, 201 bp, Homo sapiens
agaatcgcttgaacccgggaggtggagtttgcagtgagctaggatcacaccactgaacccagcctgggctaaaaaaaaaaaaaaaaaaaaaaaaaaaaaargtcgtaagaaatcagagaatactaaaaacctcagaaaatcagtatcaatatccactgtgtattaagttaaagaagtatagtagattgatttcatataaat

SEQ ID NO: 353479 - DNA, 201 bp, Homo sapiens
tagtagagacagggtttctccatattggtcaggctggtctcgaactcctgacctcaggtgatccgcccgcctcggcctcccaaagtgctgggattacaggygtgagccaccacgcttggcagtttgaaattttatgacataataatgctcttaagaagaacatagtgatatgcctctagtatgtattctgttgtaattctt

SEQ ID NO: 353480 - DNA, 201 bp, Homo sapiens
agacgctacctcgatcagtttgtgcctgagaaaatgagacgcgagctgaacaaggccagtaaccttatttcttagttcatctggcagctgtcatctatttrctgccattttattaatgctgaaattaatgctttctggtaattattgcagtgtcagtatgtctgcccacagctctcctgatttaatggctctgtcagcttg

SEQ ID NO: 353481 - DNA, 201 bp, Homo sapiens
gcacaggaacagtatttagagaaatcagtaaccttttgtttaccctattttgaatcctaaaagaaaaagttcagttatcatggccaggcgcgatagttcakgcctgtaatcctagcgctttgggaggccaaggcagacagatggcctgaggtcaggagttcaagaccagcctggccaacatgacgaaaccccgtctctact

SEQ ID NO: 353482 - DNA, 201 bp, Homo sapiens
ccaggcgcgatagttcatgcctgtaatcctagcgctttgggaggccaaggcagacagatggcctgaggtcaggagttcaagaccagcctggccaacatgaygaaaccccgtctctactaaaaatacaaaaattagccaggcacggtggcgggtgcctgtaatcccagctactcaggaggctgaggcaggataatcacttga

SEQ ID NO: 353483 - DNA, 201 bp, Homo sapiens
cagtgagctgagatcgcgccactgtactgcagcctgggcgacagagcaagactccatctcaaaaaaaaaaaagtctgattatcttggtgtttcttcttgtycttcttgatttctttacgctaatatgggaggaggaggggggaaatttagtcacgtgtatgctttaggtctgttatagagatttaatttttttttgtttct

SEQ ID NO: 353484 - DNA, 201 bp, Homo sapiens
tctgttactgcttggagatgagtttcggggtctaaacactcacctgggttgtagaatttagtttattgttattcccaaaaattataataggagaaaaaccytccccatgagttatataaaatgtgtacccaaccgcattacctccaaagacatacatgacaaaaccgactccaaagtctaatcttgaagccacactgtgcc

SEQ ID NO: 353485 - DNA, 201 bp, Homo sapiens
tcttagattcttatttggtgcttatattggttcagaatctaaagaaagcagttgcctgaaaatggactgatttgtttgaataacttaatgctcactataaratttacgtctagttattatttaaatgaaactgagattcttttttaaatggccttttatttggacatatttgtaattaaaatcttcaaagagacaaactat

SEQ ID NO: 353486 - DNA, 201 bp, Homo sapiens
ttctttttccttaaaggctcttcttgctctgccccagttgatgaccagatggagatgtttttctgccaccaacagctttgtttaggttgagggggcagacrtctaaaactgattgataagaaaggcctctctctcatatgtaacagtttcacgcacgtgagctagctgtttgctatgtcttttccctgttaaaagcaggta

SEQ ID NO: 353487 - DNA, 201 bp, Homo sapiens
aaaccttgtaaaaagagttgggaatttgtttgcagttctctctttctggcctaagaccatatattatggtcttatggacttatataagtcatatattgtctttgtaagttacttgggttctttctttcttccttttcttcttcctttcccttcaatgtggttatgttatttatttggactaaaattacgctcatttatttt

SEQ ID NO: 353488 - DNA, 201 bp, Homo sapiens
ttcaggcatatgaaattcatgctgtattttcaaaagccaagtctgagcatatgccatttagattaagataaaactggagtgttctttctaaggttttttcwattacatactttaatgtgcctctggtctgaccttttgctctccaggagatgtgtataagctgttgctacgatactacaatgaagaatgcagaaactgttc

SEQ ID NO: 353489 - DNA, 201 bp, Homo sapiens
gtgcctgtgttggaattctatagtttgatgatattcttggcagcatgtctgaaaagccacacaactagatgatttatgtccatcctgtattccccatttcttttttttttttttttgagatggagtcttgccctgtcacccaggctggagtgcagtggtgcgatctcggctcacctgccacctccacctcccaggttcaag

SEQ ID NO: 353490 - DNA, 201 bp, Homo sapiens
tcaggcatatgaaattcatgctgtattttcaaaagccaagtctgagcatatgccatttagattaagataaaactggagtgttctttctaaggttttttcarttacatactttaatgtgcctctggtctgaccttttgctctccaggagatgtgtataagctgttgctacgatactacaatgaagaatgcagaaactgttcc

SEQ ID NO: 353491 - DNA, 201 bp, Homo sapiens
tcaaaagccaagtctgagcatatgccatttagattaagataaaactggagtgttctttctaaggttttttcaattacatactttaatgtgcctctggtctraccttttgctctccaggagatgtgtataagctgttgctacgatactacaatgaagaatgcagaaactgttccacccctggaccagacatcaagctttatc

SEQ ID NO: 353492 - DNA, 201 bp, Homo sapiens
agttctctctttctggcctaagaccatatattatggtcttatggacttatataagtcatatattgtctttgtaagttacttgggttctttctttcttcctkttcttcttcctttcccttcaatgtggttatgttatttatttggactaaaattacgctcatttattttagtttaccttcaattgtaggtttcttcccattc

SEQ ID NO: 353493 - DNA, 201 bp, Homo sapiens
aaatggccatttcatcatctatttgatgtctggatttctgccatctccctccttaggagactcttagccatgcactgcaatctatctgcctgatcaattcygttccttcaatgatgcatccagctcagtgagctaatggctgtgactgtgctgcctgaatctgtagaagagtttgagaaattggaaataaattaaatttat

SEQ ID NO: 353494 - DNA, 201 bp, Homo sapiens
tctgtttgttgtgatcctgcctggggcagccatgagttaaaaacctttcagtaagtatagatagagggaaagagttaaaattccaatcttcccatttcttyttttttttttttttttttgtcttctcttacttgtttctgtacaacatccagaaaatagtttcaatactaaagggtgttaagttttctgagagttgttttt

SEQ ID NO: 353495 - DNA, 201 bp, Homo sapiens
attttcatagctttatttatattatgtggtttttattgtgtgtttttctgtttgttttgagacagagtctcactctgtcaccaggctggagtgcagtggcrcaatctcagcttactgcaacctccaccctccaggttcaagtgagtcccctgcctcagcctcctgagtagctgggactacaggtgcacgccaccacgccca

SEQ ID NO: 353496 - DNA, 201 bp, Homo sapiens
tagtgaatcagattatcccagacatcacaaatctttacatcttttccaaatgtcagcagagctgatagaaatgataacaagtagacaccattgcttatagkactggtgacatcttctagagttaaagtactagaggtgcctgtcaagacaccagctcattgggaaaggtccaaattcagttggagttttccaaaaatgttt

SEQ ID NO: 353497 - DNA, 201 bp, Homo sapiens
cctttatttattaatattctctatttgagaggcatcattcttatactttagttttttagacatagttttctttagttgtttcagtatattttaaatagctsatgtaaattctttgtctactaagtccaacatctgggctcctcaggggcagttactactgactgctttttttttgagtatgggccatactttctcatttct

SEQ ID NO: 353498 - DNA, 201 bp, Homo sapiens
tcctcataagattttaatggattccttctagttttttccttaagtgaaggtctttgactatgaagtcttaaaggcccatccctagtgagagctatcacaawggtcattcagtcttctgtctcagtagctgttaccagtttacctttatattttcatcatagttcattaatttaaattttaaacaagttaagggcattcact

SEQ ID NO: 353499 - DNA, 201 bp, Homo sapiens
tttcccatgaaggagggaaggaagtaaatctaaccttgttcctctcagagaagaacactgaaactatattaacatgaagtagaaacatgataattgatatkttatatttttcagccactttcttttaaaaagacagaacaagtatttgttttccgagttaacagatcagaataggcagtttgtctttttatgaacaggaaa

SEQ ID NO: 353500 - DNA, 201 bp, Homo sapiens
cgctaggcagaaaacaaaagaaggagtagtccttgctgtcttggttcctatcaggcaagtagaccaggttgcttttcaccctcgagtaaatagaatcacgyatctgtggtttctctacccccttaaaaaatttatttctaatgacaccaatactgatggctttgtgggtttgaatgaattttttacttgtcttatttagtt

SEQ ID NO: 353501 - DNA, 201 bp, Homo sapiens
cagcaaaggtgcctgtgttggaattctatagtttgatgatattcttggcagcatgtctgaaaagccacacaactagatgatttatgtccatcctgtattcmccatttcttttttttttttttttgagatggagtcttgccctgtcacccaggctggagtgcagtggtgcgatctcggctcacctgccacctccacctccca

SEQ ID NO: 353502 - DNA, 201 bp, Homo sapiens
ccttgctgtcttggttcctatcaggcaagtagaccaggttgcttttcaccctcgagtaaatagaatcacgtatctgtggtttctctacccccttaaaaaawttatttctaatgacaccaatactgatggctttgtgggtttgaatgaattttttacttgtcttatttagtttcccaaggaattctatgatgtaaacaaaat

SEQ ID NO: 353503 - DNA, 201 bp, Homo sapiens
aagaccaactagctgacagcaaagaggtggaaatcaggaactctgggatcttacacaatggtcttctcatatagaaaatgagctgttcatttaattaatayttagccagcatcttcagaatatattgtacttttctcacattactggcaagtttttaaatattctagcttaaaacagagctgtgaaactagagaatcttag

SEQ ID NO: 353504 - DNA, 201 bp, Homo sapiens
agatttataactagcgaaagggcatttattgtaactgtattcaattttgtggttatttaaaatcctatctattgagattgtaaggtaactaaattttcggraacatacttcaggctcagtgatttgtaactttgattcctggagatagtagatctcgattgttttttcattcttataacacaccagagagtgactgtccag

SEQ ID NO: 353505 - DNA, 201 bp, Homo sapiens
ttgcattacaagatgctaatgtagataaaaatattatttattttttctttttttagacacaggatctctgtcacccaggctagggtacagtggcacaatcmtagctcactgttacctcaaattcctgagctcaagggatcctcccacctcaaactcctgagtagcaggaactgcaggctcacaccactgcacccacctaac

SEQ ID NO: 353506 - DNA, 201 bp, Homo sapiens
ttaaattgtgaatataaaatatcacacacaaatttgcagttctctatgttcatctgtttacgtgccaggattaactatggttgttctctagtgggtgatastctttgttttgttttgttgggggttttttcattttttatttttagtagagatggggtttcactatgttgcctaggctggtgttgtgattacacttgtgag

SEQ ID NO: 353507 - DNA, 201 bp, Homo sapiens
actatttctactttttggtgtttcttgaacttctcttcatggcctaacatagtcaattattgcagacatgttggcacttgaaaaggtgtctctgaaaggtataaataagacttactcttttgctgtaagattccataccttttaggtcagactctgtccttgtgactttacttgcttattttgtgaaggaattgagtgcta

SEQ ID NO: 353508 - DNA, 201 bp, Homo sapiens
ctatttctactttttggtgtttcttgaacttctcttcatggcctaacatagtcaattattgcagacatgttggcacttgaaaaggtgtctctgaaaggtataaataagacttactcttttgctgtaagattccataccttttaggtcagactctgtccttgtgactttacttgcttattttgtgaaggaattgagtgctac

SEQ ID NO: 353509 - DNA, 201 bp, Homo sapiens
tatttctactttttggtgtttcttgaacttctcttcatggcctaacatagtcaattattgcagacatgttggcacttgaaaaggtgtctctgaaaggtataaataagacttactcttttgctgtaagattccataccttttaggtcagactctgtccttgtgactttacttgcttattttgtgaaggaattgagtgctact

SEQ ID NO: 353510 - DNA, 201 bp, Homo sapiens
atttctactttttggtgtttcttgaacttctcttcatggcctaacatagtcaattattgcagacatgttggcacttgaaaaggtgtctctgaaaggtataaataagacttactcttttgctgtaagattccataccttttaggtcagactctgtccttgtgactttacttgcttattttgtgaaggaattgagtgctactt

SEQ ID NO: 353511 - DNA, 201 bp, Homo sapiens
ccagagagtaactggctagtcacagagctagatagctggcagaaggctgaagatagaacttggatctcctgcctgccagtcctaactagtctaacacgtgyttatggtacaatatgtactctaatagaaatgggtgtgaaatcaagaatgtaatgtgaattggttttactttttgattttctcttaatataaaataaattc

SEQ ID NO: 353512 - DNA, 201 bp, Homo sapiens
atttttctcgtttgtttaagcctaatatatacaaaaggtgatttcagaacttctaaaccatgccactgcaaaaagtaaacctgttaaatagagttcattayttgtttacagttcttttatttttgaagtaaaatttacacacattgaagtatacaatgttaagtggataatatggtgagttttggcaaattgatatgcttt

SEQ ID NO: 353513 - DNA, 201 bp, Homo sapiens
tattttaattttaatttgtaaatatgtagaatattaacatgctgtcaaaaatcaaaactgtaaaaagataccctctttggccaggcacattggcgcatgcmtgtaatccccacactttgggaggccgagacgggcagatcacttgaggtcaggagttcgagaccagcctggccaacatggtgaaaccgtgtctttactaaa

SEQ ID NO: 353514 - DNA, 201 bp, Homo sapiens
gaacattctccaagattatataccatcttaggccataaagcaggacacaatttaaaataactaaaattacacaaagtatggtcttggtttatactggaatraaatcagaaattaataccagaaaggagtttgtgaaattcacaaatatatggaaattatacacacactcctaaaaaaaatcaatttgttaagaaatcacaa

SEQ ID NO: 353515 - DNA, 201 bp, Homo sapiens
acaccattgcactatagcttataaaaggcatccagattgtaaaggcattagtaaaactatctccatttatcaatgacatgatcttttacatagaaaaatcytaaggaacacacacacataactgtttttttgtttgtttgtttgtttgtttttaagagattttcttgagggtttatttacatggctgtttggacatctctg

SEQ ID NO: 353516 - DNA, 201 bp, Homo sapiens
tcataatatccattgctttaatgctctgttttagattggagttcacaccagacacctgagattgtgtttgttatgtaactgctatttcatgttgagaaagyagcaaagcttttaaatactgagaatattttagttacatgaagatacttttagtagtcactgttgttgttacattccccctacccctcagaaaataacagg

SEQ ID NO: 353517 - DNA, 201 bp, Homo sapiens
cacacaaccatacataaaaacacatatatatgtaatgttatactatattataaatacatatgtattcttgagctttgtactgggacacaactgagttaacytggaaacattttgatcctttccaggcttgcttttgaagtttgttaggcaaaaccatctcagcctctagtttagggctaatcaatttgaccttacaacagg

SEQ ID NO: 353518 - DNA, 201 bp, Homo sapiens
agagctttccgggttcccctccctgtggtgtagcctgaaaacatacttcaggcaggaagctggggcagttgtaggggtcacatttctcttttctcagagakctctgtctcatgtgcctcttttccaatgtctggaaacttttttcaatcattttgtctgccttttcgttatttaaaacaagtgaggaaaaaccagtcccta

SEQ ID NO: 353519 - DNA, 201 bp, Homo sapiens
atgacacagaacaaaggacagatcccaggagtgaaatgaagaagttctgtaaatagctgtgccgttttcctttgaaatgtctggcacactctatatagtayagtggtcgaggatagaggggctaattctgtgatgaagcattctgcatggaatttcagcagggcatagatggtgagggcatctggatctgtttgagttttt

SEQ ID NO: 353520 - DNA, 201 bp, Homo sapiens
cagttgtaggggtcacatttctcttttctcagagatctctgtctcatgtgcctcttttccaatgtctggaaacttttttcaatcattttgtctgccttttygttatttaaaacaagtgaggaaaaaccagtccctattgcaattttgtccagaaatgtaaatagcttgttggacttttaaagtcttacaaattttctactc

SEQ ID NO: 353521 - DNA, 201 bp, Homo sapiens; identical to SEQ ID NO: 75790

SEQ ID NO: 353522 - DNA, 201 bp, Homo sapiens
cccaattaaggaggtaataatctgtaagcaaagccttatttacataaacactgctgtgatcttataccaaataaacagccctagcatgtgtgtgtgtgtgwgagagagagagagtgtgtgaatgtgtgtgtgtttgggctttctgaattagattttctttcaagatccacctacatctttacttttggcctaagtaatggt

SEQ ID NO: 353523 - DNA, 201 bp, Homo sapiens
ctccaaaaaatagaagggaacacttttgaaggaattctaccaagccaatgttaccctgataccaaaaccaaagacatcacgaagaaaaaaaaaaaaaaaamaaaaaaacagacagacctatatcccttttgaatacagatgcaaaaatccttaaaaaaaaaatactagtaaagtgaattgagcaacatatagaaaggatta

SEQ ID NO: 353524 - DNA, 201 bp, Homo sapiens
gaaatcagaaattaataccagaaaggagtttgtgaaattcacaaatatatggaaattatacacacactcctaaaaaaaatcaatttgttaagaaatcacarggaaaattgggaaatattttgaagagaatgaaaatggaaaaacaacatatgaaaacctatgggggtacagccagagtagtgcttagcaggacatttatag

SEQ ID NO: 353525 - DNA, 201 bp, Homo sapiens
atgttggcattaggtatttttgtagatgcccttattaagttgagaaagttcacttctagtcttagtttgctgagaggcttttatttcttcttttcattatkactagatgttagattttgtcaaagcattttctccagctattgtgatagtcagatttttttttttagtctgctaatatggtgaattacattgattgatttt

SEQ ID NO: 353526 - DNA, 201 bp, Homo sapiens
tttcaggactgctactcataccaaaatccatggacgctcaagtccctgatatagtgtttacatataacctaggcagatcctcctgtatactttaaatcatytctagattacttacctaatacaatgcaaatgccatgcaaattgttgttatactatatagctttaaaacttgtattattttgactggctgctgtagctcac

SEQ ID NO: 353527 - DNA, 201 bp, Homo sapiens
attgtgccactgcactccagcctgggcaacaagagtgaaactctgtccaaaaacaaaaaagccctattatttcttgttgtattgtcatttttttgttttaytttcagatatttttaatctgaggttagttggatctgcagatgcatctgcagatacagagggtgactgtgtatcctccccacctagctctgctgaagaagt

SEQ ID NO: 353528 - DNA, 201 bp, Homo sapiens
tgcgcttcccgagtgaggcaatgcctcgccctgctttcgcttgggcacggtgtgctgcacccactgtcctgcgcccactgtctggcactccctagtgagaygaacccggtacctcagatggaaatgcagaaatcacccatcttctgcgtcgctcacgctgggagctgtagaccggagctgttcctatttggccatcgtggc

SEQ ID NO: 353529 - DNA, 201 bp, Homo sapiens
taaatgggaagagagtgcttttgggggccagaactgtttgtaatattataactcctataaatacatgaattgctgcccctttatcataatatccattgctktaatgctctgttttagattggagttcacaccagacacctgagattgtgtttgttatgtaactgctatttcatgttgagaaagtagcaaagcttttaaata

SEQ ID NO: 353530 - DNA, 201 bp, Homo sapiens
accttagagaatctgatttccagagttgtcacattatattatttcaaatgttcagttttcagcaaaagagtacaagacatgcaaataaacaagaaagcatraccaatacacaaaaaagaaagcagttgatagaaactgtccctgaaaatgtctggacattatatttggtaggtaaaaactttaaatcagatattttaaata

SEQ ID NO: 353531 - DNA, 201 bp, Homo sapiens
aggtatttgtttctaaaattgatatggaaagtgatgaactcagaaagaagttaggggatttatacttcccaatttgaaaacttataaaactacaataatgycatcaccagatggagcgacatgcaccttatagtcccagctactcaggaggctgaggcaggagcatccctcgagcccaggagtttgagaccagcctggaca

SEQ ID NO: 353532 - DNA, 201 bp, Homo sapiens
agtgagaacactggcaaaatttgtcaaagtcaacttcttaagaactatggaaattagctaaaagtatgcaagaatctggggagttttgttttttttttttwaaaaaaggctaaatcttggtaagagcagtattgtagtatatcaatttgccctatttccatccccttctctccatttcctccatggtagctttgaaaacca

SEQ ID NO: 353533 - DNA, 201 bp, Homo sapiens
cttcacaaatcctccaaaaaatagaagggaacacttttgaaggaattctaccaagccaatgttaccctgataccaaaaccaaagacatcacgaagaaaaamaaaaaaaaaaaaaaaaaacagacagacctatatcccttttgaatacagatgcaaaaatccttaaaaaaaaaatactagtaaagtgaattgagcaacatat

SEQ ID NO: 353534 - DNA, 201 bp, Homo sapiens
agtcacaagggggcaaatgtcctttttcaccacctcgactttcctaagagtccctaggagagcatctgtaggtaatagttttcatctagaatctgttaaakaggtattatttattttactcatgtaaatagttaggattaagggttgttgccctgcactgctaacgtgggggccggggtgcagaccacttctctctttggc

SEQ ID NO: 353535 - DNA, 201 bp, Homo sapiens
cacttggaagctgagggaatttattataaacagagtttaatccctgaaaggagtcctgcacagagattgtcaatcaaatcatagttttgaagtctgtgttstatgtctaagattgtattgagccctttaaatagaaactggaagataaacgtggtccctactctgattctaagagcttttatactaaaaggaaagagaatg

SEQ ID NO: 353536 - DNA, 201 bp, Homo sapiens; identical to SEQ ID NO: 75787

SEQ ID NO: 353537 - DNA, 201 bp, Homo sapiens
caattaaggaggtaataatctgtaagcaaagccttatttacataaacactgctgtgatcttataccaaataaacagccctagcatgtgtgtgtgtgtgtgwgagagagagagtgtgtgaatgtgtgtgtgtttgggctttctgaattagattttctttcaagatccacctacatctttacttttggcctaagtaatggttg

SEQ ID NO: 353538 - DNA, 201 bp, Homo sapiens
ttctcttctttttttagtttcttgagatgaaaacttagatctttgatttttctacctctcttcttttcaatatttattatgcttaaagctttacacttcamcctaggcattgtttttgttgcatcccacatattttgatgctgtatttttatattcagaatattttctaatttatatttatttgttcattttaaaaataat

SEQ ID NO: 353539 - DNA, 201 bp, Homo sapiens; identical to SEQ ID NO: 75788

SEQ ID NO: 353540 - DNA, 201 bp, Homo sapiens
tctttacttttggcctaagtaatggttggtcatgttaactgtgtaaaatattaatctttttctgaagctacaaagagtccatgtctacttactgttctagkaaaagttttttcaaatttgggaagtgtctaccttttaaaatattttctgagagtgtttaattacttctatgatcttaaaaggttctctccattttacttt

SEQ ID NO: 353541 - DNA, 201 bp, Homo sapiens
ttaatctttttctgaagctacaaagagtccatgtctacttactgttctaggaaaagttttttcaaatttgggaagtgtctaccttttaaaatattttctgrgagtgtttaattacttctatgatcttaaaaggttctctccattttacttttatccagctgtcacatattctgagtatgttttccaccaggagaacctgag

SEQ ID NO: 353542 - DNA, 201 bp, Homo sapiens
ctaatggacatccttaatgataattttcgtatctttatatctttgctcagatttgatcataagagattcggggccacatattgagtggcttaatgtaaaayaatatggcatattcagccatctgaaataaatgtcacttggaatcatgtcatccttattgcatgacaagctataccttgcatttggggtaaatttatttct

SEQ ID NO: 353543 - DNA, 201 bp, Homo sapiens; identical to SEQ ID NO: 75789

SEQ ID NO: 353544 - DNA, 201 bp, Homo sapiens
tccctgtgcatcctatccatctccctctctggaaaagcttacttgcaaaggatttaagctgctttaataaaagccacaactacagataaatgtgactttatttttagtcatgttttcaataacactattgatcagatttctgtttttcaccagaaaaccttcaaagctttcttaaatttaaaacagatgcttttcaggtga

SEQ ID NO: 353545 - DNA, 201 bp, Homo sapiens
ccccacccccgagcctcgctcaagttattttccttgtgttctctgtgcactcagcttcagtggcttgctgtcccatctcacaatcccgccatcacgtgtayttgtctctgcctggaaggctctttcctcaacccacctgcctctcccacaccatccttcagagtccagcttaatcatccttggtccaccctggagggtcag

SEQ ID NO: 353546 - DNA, 201 bp, Homo sapiens
ttatagtcctttgggtatatacccagtaatgggatggctggatcaaatgatatttctagttctagatccctgaggaatcaccacactgacttccacaatgrttgaactagtttacagtcccaccaacagtgtaaaagtgttcctatttctccacatcctctccagcacctgttgtttcctgactttttaatgattgccatt

SEQ ID NO: 353547 - DNA, 201 bp, Homo sapiens
gtgtgtttgggctttctgaattagattttctttcaagatccacctacatctttacttttggcctaagtaatggttggtcatgttaactgtgtaaaatattratctttttctgaagctacaaagagtccatgtctacttactgttctaggaaaagttttttcaaatttgggaagtgtctaccttttaaaatattttctgaga

SEQ ID NO: 353548 - DNA, 201 bp, Homo sapiens
cacctgttgtttcctgactttttaatgattgccattctaactggtgtgagatggtatctcattgtggttttgatttgcatttctctgatggccagtgatgmtgagcattttttcatgtgtcttttggctgcataaatgtttcttttgagaagtgtctgttcatgtccttcacccacttgttgatggggttgtttgtttttt

SEQ ID NO: 353549 - DNA, 201 bp, Homo sapiens
gtgggatgtctgcccatttccttgcatggatcatgcaaggtgagggcaacttgggtaactcttcctggattttaatctaggaactttatgtagatgatcasgtatcaaatagacttgttgaatatttgcattggttcccctagaatttgggtcacattgatatttctaaaattaaagatgtatgtgtttgtgcattagggc

SEQ ID NO: 353550 - DNA, 201 bp, Homo sapiens
gccataaaaaaacagaaaaagaagagtaaactcaaaataagcagaaggaagttattagattagagaaaaatacagaatataaaaacaatataagaaaatcmataaaaatgttttttaaaaaccaacaaattgggaaacctttacttagactgtcaagaaaaaggagagaagcctcacattactaaaatcaggaatgaaagc

SEQ ID NO: 353551 - DNA, 201 bp, Homo sapiens
tcagaatagactactaacatcagaatagaccaagctgaggaaagaatctcagagcttgaagactggttcctcaaatcaactcagacaaaaataatgaacarataattaaaaagagtgaacaaaaccactgagaaatatgagattaggtagagaccaaatctgtgactcattgacatccctgaaagagagagagaaaaagca

SEQ ID NO: 353552 - DNA, 201 bp, Homo sapiens
gtgagactctgtcttaaaaaaaaattgctatgagagaatgctctaggtatgtgtgtggtcgtggtagagtataggggtgtacgatcactgtaatgtgctgraatagtacctaattttgaaactgcatggttaataacatcttttaagaatgtctaagtgctttagagacttcttttcccccattctccgtgagaagaatag

SEQ ID NO: 353553 - DNA, 201 bp, Homo sapiens
tccccaacctttatttgtttcctgataactatatttagtctgaacctctttgtcaaggacaccacataggttatattgtcttcctctttgcatccaatgargcagcatatattgccaggtcatttttttttatggtgatgccaaacttgaccacttggccaagggagtgactgccatacctcttattgtgaaggcacattt

SEQ ID NO: 353554 - DNA, 201 bp, Homo sapiens
ccacctagctactgtggctgtaccaatcctgacagtcatagcggccccaaggtgctgctctgttggctgatgggaatgcagatttacgtatggtccatatrtggacgtgttgttttacatctaaataaacttggcattgcaagatgaaaatgccagtatcatttttaaaggtcaagtgacagtttgggaagatttttataa

SEQ ID NO: 353555 - DNA, 201 bp, Homo sapiens
taacagcccatgttcaaatccagcttcactgcttagtgtttgcattacattggcaagggttgactgcctcgagtgattgttttaagtgctctaggcaagtwataaatattagttctttttgccttgttctttccactatgggtgactgccctaattgagggtataccagataattgcactgtcttgatttgttaagtgcct

SEQ ID NO: 353556 - DNA, 201 bp, Homo sapiens
cagggacaatttgacttcctcttttcctaattgaataccctttatctccttctcctgcctaattaccctggccagaacttccaacactatgttgaataggrgtggtgagagagggcatccctgtcttgtgcccgttttcaaagggaatgcctccagtttttgcccattcagtatgatattggctgtgggcttgtcatagat

SEQ ID NO: 353557 - DNA, 201 bp, Homo sapiens
tgttgaataggggtggtgagagagggcatccctgtcttgtgcccgttttcaaagggaatgcctccagtttttgcccattcagtatgatattggctgtgggyttgtcatagatagctcttattattttgagatacgtcccatcaatacctaatttattgagaatttttagcatgaagggttgttgaattttgtcaaaggcct

SEQ ID NO: 353558 - DNA, 201 bp, Homo sapiens
taagataatcatgtggtttttgtctttggttctgtttatatgctggattacatttattgatttgcgtatattgaaccagccttgcatcccagggatgaagyccacttgatcatggtgagtaaggttttgatgtgctgctggattcggtttgctagtattttattgaggatttttgcatcaatgttcatcaaggatattggt

SEQ ID NO: 353559 - DNA, 201 bp, Homo sapiens
ttcaggagctcttttagggcaggcctggtggtggcaaaatctctcagcatttgcttgtctgtaaagtattttatttctccttcacttatgaagcttagttwggctggatatgagattctgggttgaaaattcttttctttaagattgttgaatattggcccccactctcttctggcttgtagagtttctgccgagagatcg

SEQ ID NO: 353560 - DNA, 201 bp, Homo sapiens
agtttttaacttctttgcctttggcttgaatttcctcctgtagctcggagtagtttgaacgtctgaagccttcttctctcaactcgtcaaagtcattctcygtccagctttgttccgttgctggtgaggaactgtgttcctttgggggaggagaggtgctctgctttttagagtttccagtttttctgctctgttttttcc

SEQ ID NO: 353561 - DNA, 201 bp, Homo sapiens
tggatttttctaagcatttcagtatattttcaaagcatattaaaaacacccatcataataagatatgaattatttccttgctctgtattcattatcatggktttaaaataggaataaagtgtctctaaggagacaacttttgtcacactaaataatttttttcacttcacacatgaacttgctttgcatcttagctttcag

SEQ ID NO: 353562 - DNA, 201 bp, Homo sapiens
atagctcctcccgtgttataatgtgctgttctctcagcctcccatacctctgcaccttgtcacagtggttgtacatctctcattataattgttgaggctcygccaccccgactcccagaatgcatccttcctgtaggcagaagccggactatcctgccctccactccttgcccaatcccagccccaggtttcccctagccc

SEQ ID NO: 353563 - DNA, 201 bp, Homo sapiens
tggttgtacatctctcattataattgttgaggctccgccaccccgactcccagaatgcatccttcctgtaggcagaagccggactatcctgccctccactmcttgcccaatcccagccccaggtttcccctagccccagcctgtgagtggggctgagtgacggcactatcccagagcagctgtccccgctacaagtttacc

SEQ ID NO: 353564 - DNA, 201 bp, Homo sapiens
agacctgtttccctttagtggaaaataatatttacaaaccaagagttgggtgtttgtgttttactgctactggggtgttaatttttctaggctctttaatygtgagttcatattgaaaccacctaattattttgtttttattttgaattacctttcttgaggtatagtttacctaaacgaaagtgtactcatttgaagtgc

SEQ ID NO: 353565 - DNA, 201 bp, Homo sapiens
gtgtaattgccttaaattcttttttcaagcagtattagatgttaattagagactgagaaacccagaggtggaaggatcttaagtggagcaggggatcggaktaaagaataagaaagcaaagaatactgtatttcatttctgtgaaaagagaggttacatttccttgcatgaggaaaaagtaggagtgtgtgcttttctcaa

SEQ ID NO: 353566 - DNA, 201 bp, Homo sapiens
taagattaaaacttctgtttttcaaaagacactgttataagaatgaaaagatgagccacggagtgggagaaaatatttatacatcatataaaagatttgtrtgcagaatatataaataactctcaaaagtcaatagtaagaaaacctttttttttttgaatgtgcgaaagatttgaactgactttttgccaaggaagagat

SEQ ID NO: 353567 - DNA, 201 bp, Homo sapiens
tgaattaggtcagtgttttgtttgattatcacagtggtgaggtccatgcaggtagctgtagggtggaagaatcactcatccttgggtcctgctctgacacmtacaggctgtgcagcctgaagatctaggggaatatctgtttcttcctaatacctgtagattagggatcattgcttcttcctaatacctgtagattaggga

SEQ ID NO: 353568 - DNA, 201 bp, Homo sapiens
cctccctccctctgagatcacacacagcataccacctctccagtagtgaaaatgtagtcacaggcgtacaatgattatacccagggaaacccacttaagaytcaagagttcagggtttttgttcagggcttgtcacataggcactcttgcccaccaatatttcatattcctgaaaggaaagcagttgttcagtgccccaga

SEQ ID NO: 353569 - DNA, 201 bp, Homo sapiens
aaaaaaaaatcccctttttggaacaaggtaggataataataagtaaaaccaggaagcttggctaatgggagcttctaattatttttactctttaatattgkgactttcatttctattgtatttgaaaatctttccaaggtatatcatttttttcctttcataaaaaattccttggttgatgttcattatttaaccactggt

SEQ ID NO: 353570 - DNA, 201 bp, Homo sapiens
tgcatggccctgaaaacatggggcatagtgtatcttttgaaaatcgggcttcttgctgaccagaagtgtaccttagagcagaaaatttagacaacattagrgaaagtccttctgcttctctgggatgtagttttcttgtgtaaagtgaggcagctgccggagatgaccaccagggccctccagtgcagccctcctttcctg

SEQ ID NO: 353571 - DNA, 201 bp, Homo sapiens
tgtgtgcttttctcaaaacttgctataaggctgggtgcagtggctcatgcctataatcagcactttaggtggccaaggcaggaggattgcttgagcccagragtttgagaccagcctgggaaatctagtaaagccctgtatctacaaaaaataaaaaattagctgagagtggtggtgcacgcctgcagtccccagctagct

SEQ ID NO: 353572 - DNA, 201 bp, Homo sapiens
tcctatccaagggaagccatgagtgactgtacctagaggaaaagtacactcctgctcaaatactgcacttttcccacggtattcgcaacaggcagaccggragattccctcccatgcctgctcggtgggtcccacgctcatggtgccttgctcactgctagcacagcagtctgagatcgacctgggatgctggagcttggt

SEQ ID NO: 353573 - DNA, 201 bp, Homo sapiens
taagtgaggattgtgactgctcaagcagccgcagacagacttttgcttcagattttcccagagccttgtttcaacacggacttcccagacatatctccttmacacgtgggatgtctgcccatttccttgcatggatcatgcaaggtgagggcaacttgggtaactcttcctggattttaatctaggaactttatgtagatg

SEQ ID NO: 353574 - DNA, 201 bp, Homo sapiens
tagctgtgcaagggatatgctagttttattatccccacttacatataaggagcccgaggcctaggtatgctaagtgagttgtctgggattcagagtcaggycagtgtgtctacagagatggtctccaactcacccacctacagccaagtcactgagttcttggtctctgagcctgcagaacagtttcttggtttcttcatc

SEQ ID NO: 353575 - DNA, 201 bp, Homo sapiens
ctctgcatttacatattggagatcccctcaagatttcaatggaataaaacattcattccaggactaaaaattttgaaaacctgaagttttcctttctatcrggatgtccagcagactcaataattatatattgtttgcttagcatttaccaagcatcaggcatttggaagcattctgtgttctttcttcatgaatcctcac

SEQ ID NO: 353576 - DNA, 201 bp, Homo sapiens
cggggtttcaccatgttagccagtatggtctggatctcctgacctcgtgatctgcccgccttaacctcccaaagtgctgggattacaggtgtgagccaccrcacccagcgtacctatttgatcttttgtcgtctgtgcttttggtgtcatatctaagaagtcactgctgaatccaatctcatgaagctttcctcgttgtct

SEQ ID NO: 353577 - DNA, 201 bp, Homo sapiens
acatcgtggggtcgaaaatgagtacaagtggaatgattgggggttacatttaaagagaaaaccacagccactgggggagtttcgggaaaggtcttgggaaraggtgacatctgagaggcaccttccgtgctaggcccaggccagggtagggagggatcatgggcagggtgtgtttttggaacaagttatcccagggtatgt

SEQ ID NO: 353578 - DNA, 201 bp, Homo sapiens
agtggaatgattgggggttacatttaaagagaaaaccacagccactgggggagtttcgggaaaggtcttgggaagaggtgacatctgagaggcaccttccrtgctaggcccaggccagggtagggagggatcatgggcagggtgtgtttttggaacaagttatcccagggtatgtgtagctcttgggaagggcaagctggg

SEQ ID NO: 353579 - DNA, 201 bp, Homo sapiens
tgggggttgtgtggtaagctcctggttctgcctgacttctgggcagtttcctcccattaacatggagggaaaggctctatcacagcccactggtgaagccscctctgaagtgttgagtttccctgagtaactccctggtttttctgtggaaaccgctcaaagtggccacaggtgtacctaaaataaagcctctcacaattg

SEQ ID NO: 353580 - DNA, 201 bp, Homo sapiens
aacaacaacaacaaaaacaaagtcacttaaggaaagcgctttagccaaagtgaattagaataagaaactaaaaaataggaagattgctgtaccagataaartagtaagcaacaaaagtggcaattttaacaattaaaagtggatagtaactaacatgactgtgaagtttaaagctgtttgttggaatctggaaataggaga

SEQ ID NO: 353581 - DNA, 201 bp, Homo sapiens
ccctgtctccctcattcattcacctttgactctgttcctgtgactctgtacggtgtgtgtgtgttggtcttgccttttctgtttcattttggtagtttctrtcattatgtgttcgagtttactcaacttttattctgcagtgtctcctctgctgctaatcccatccaatgtatttttcatctcagacattgtatttttcat

SEQ ID NO: 353582 - DNA, 201 bp, Homo sapiens
taaaaatttgtggctttgtttagattccacatacaattcatttattctctgggaagagggaaaagaccttttaggccttcatgttcaattggtgcttcccrcctcatttccaagttacatgtacacacacacacacacacacacacacacacacacacaatctgagctctgaggagctctactttgaaaatgctctgtgat

SEQ ID NO: 353583 - DNA, 201 bp, Homo sapiens
aatcagcgagactccgtgggcgccatgtgtgggatataatctcctggtgcgccgttttttaagcctgtcagaaaagtgcagtattagggtgggagtgaccygattttccaggtgccctctgtcacccctttctttgactaggaaagggaactccctgaccccttgcgcttcccgagtgaggcaatgcctcgccctgctttc

SEQ ID NO: 353584 - DNA, 201 bp, Homo sapiens
tgactttttaatgatcgccattctaactggtgtgagatggtatctcattgtggttttgatttgtatttctctgatggccggtgatgatgagcattttttcrtgtgtctgttggctgcatgtcttttgagaagtgtctgttcatatccttcgcccactttttgatggggttgtttgattttttcttgtaaatttgtttaagt

SEQ ID NO: 353585 - DNA, 201 bp, Homo sapiens
atagtattccatggtgtatatgtgccatgttttcttaatccagtctatcattgttggacatttggtttggttccaagtctttgctattgtgaatagtgcckcaataaacatacatgtgcatgtgtctttataacagcatgatttataatcctttgggtatatacccagtaatgggatggctgggtcaaatggtatttctag

SEQ ID NO: 353586 - DNA, 201 bp, Homo sapiens
catcatgatgttagctggttattttgctcattagttgatgcagtttcttcatagcatcgatggtctttacaatttggcctatttttgcagtggctggtacyggttgttcctttccatgtttagttcttccttcaggagctcttgtaaggcaggcctggtggtgacaaaatctctcagcatttgcttgtctgtaaaggattt

SEQ ID NO: 353587 - DNA, 201 bp, Homo sapiens
ctatgaccttttgcagtcagccctctttcagcctctgacctgctttgtgtcactgtagattagtgtacctattctagaatttcatgtaagtggaataacastatatgaggccttttctctggctacttttactcagcattatgttttggaaattggtacatggtattatgcataccaattattcattactgtctcttactg

SEQ ID NO: 353588 - DNA, 201 bp, Homo sapiens
catgtttttgaggtttatttatattgctatgtatacctctagtctactgcttctaactgtgaaacatttttttcaaattcaaattctcataaatgctgtayttattttggaaattagaattcagcacaaggtacttctctgtattcaacaccatagcattttagcgctttactaatgggtggaaaaattaaacttcagtcc

SEQ ID NO: 353589 - DNA, 201 bp, Homo sapiens
catgcttaaagaaaagaatttttaacccagaatttcatatccagccaaactaagcttcataagtgaaggagaaataaaatcctttacagacaagcaaatgstgagagattttgtcaccaccaggcctgccttacaaaagctcctgaaggaagaactaaacatggaaaggaacaaccggtaccagccactacaaaaacatga

SEQ ID NO: 353590 - DNA, 201 bp, Homo sapiens
tggtgcatgttgcatgtacacttaaataacatttattctgcgattgttggatacagtgttctatatttgtcaattagattgagtgctgctcagatgttctrtattcctacagatatttcatgtgcttattctataaaatacaaattgttaatgtttctgattaggactagaagacttttcttttaccttttaaatatattt

SEQ ID NO: 353591 - DNA, 201 bp, Homo sapiens
taatgacaggatcaaattcacacataacaatattaaccttcaatgtaagtgggctaaatgccccaattaaaagacacagactggcaaattggataaagagwcaagacccttgactgtattcaggagacctatctcacatgcaaagacacacataggctcaaataaagtgatggaagaagatctaccaagcaaatggaaagc

SEQ ID NO: 353592 - DNA, 201 bp, Homo sapiens
ggtgagcagtgtgggtgatgacatttgttcctgctggactgttcttatgctcttgtttataacgatgcactagatgaaggaagctttaaaagacaaatttsgataaaaccctacatcatatcatattcaggagatgaaatatttaaaccttcaaaataggctctttggttagatcaagtggaaattgatttggagggtgat

SEQ ID NO: 353593 - DNA, 201 bp, Homo sapiens
ctcacacatttattttgatgaattaggtcagtgttttgtttgattatcacagtggtgaggtccatgcaggtagctgtagggtggaagaatcactcatcctygggtcctgctctgacacatacaggctgtgcagcctgaagatctaggggaatatctgtttcttcctaatacctgtagattagggatcattgcttcttccta

SEQ ID NO: 353594 - DNA, 201 bp, Homo sapiens
actttaacaccccactgtcaatattagatggatcaacgagacagaaagttaacaaggatatccaggacttgaactcagctctagagcaagcagaactaatrgacatctacagaactcttcttcccaaatcaacagaatatacattctcctcagccccacatcacacttattctaaaattgaccacataattggaagcaaaa

SEQ ID NO: 353595 - DNA, 201 bp, Homo sapiens
acacttggtgaatgtcactcttaaccaagaaacaagactgtgcctttgggttcagctggctcacacatttattttgatgaattaggtcagtgttttgtttsattatcacagtggtgaggtccatgcaggtagctgtagggtggaagaatcactcatccttgggtcctgctctgacacatacaggctgtgcagcctgaagat

SEQ ID NO: 353596 - DNA, 201 bp, Homo sapiens
tgaactcagctcccttttatgtagtgaagataaatagttgaacaatccaatacatgccccagtccctctctctctacacacactgcacacacacacacatacacacacacacacacacagtgccaggagacattccgggaccatatttttttaagaagaaaaagtattattatgctttcaagtcagttatgttaatttatt

SEQ ID NO: 353597 - DNA, 201 bp, Homo sapiens
tcaggatgtccagcagactcaataattatatattgtttgcttagcatttaccaagcatcaggcatttggaagcattctgtgttctttcttcatgaatcctyacttagctgtgcaagggatatgctagttttattatccccacttacatataaggagcccgaggcctaggtatgctaagtgagttgtctgggattcagagtc

SEQ ID NO: 353598 - DNA, 201 bp, Homo sapiens
gaactcagctcccttttatgtagtgaagataaatagttgaacaatccaatacatgccccagtccctctctctctacacacactgcacacacacacacatacacacacacacacacacagtgccaggagacattccgggaccatatttttttaagaagaaaaagtattattatgctttcaagtcagttatgttaatttattc

SEQ ID NO: 353599 - DNA, 201 bp, Homo sapiens
cccactggtggtgtgcagttggcttcaaagctgaccagtagccacatagctctgccaagccagtgaggccctggggggtttctactgttctgtgcctcagrattcaattcttacacctcaggaatctgaggattggctaaaagtgaggaagtccaccaaaggttttagctctgttttgaagggaggcagttaatttcaagt

SEQ ID NO: 353600 - DNA, 201 bp, Homo sapiens
gtgcttgctctggagcagctggtagtggggtcaggtggggtggacgtggagagggagggctctgcagaggcctttcagggctgaaggggaagtggggagasgggtttccaggcctctgtccacctcaattctagcagctctgcatttacatattggagatcccctcaagatttcaatggaataaaacattcattccaggac

SEQ ID NO: 353601 - DNA, 201 bp, Homo sapiens
tgcaaattacaggatttccttcttttctaaggcagaatagtaccctattgtgtttatgtgtatatatatatatgtgtgtgtgtgtgtgtgtgtgtgtgtgwatatatatatatatatatcccattttcttaatccattcatctgttgataggcacttaggttgattttgtatcttggctattgtgaatagtgctgcaataa

SEQ ID NO: 353602 - DNA, 201 bp, Homo sapiens
aaagaaaaatctaccaagtaaatgggaaaagaaaacaggagttactattctaattttagacaaagcagactttaaagcaacaatgatcaaaaaagacaagsgcatgacataatcataaagggttcaattcaacaagaagacttaaatatcctaaatatatgtacccaacacaggagcttgcagattcatagaacaaattct

SEQ ID NO: 353603 - DNA, 201 bp, Homo sapiens
tttccatgcatgaatgttttctatgagaactataaagttactgaatgttctcagtagagtgacttgatgtgtcatgtggtaccttttagtgcaggatctarggaccagcttgggactttgtccttgggttggtacagtgtgattgtcaccgggagaggactgcagctgccagggggtggtaattctgtcccaacaacttat

SEQ ID NO: 353604 - DNA, 201 bp, Homo sapiens
ccctagcaatggttcttaacaaaactgaaatgacagagatagaattgagaatctggatagaaaaaagatcattgagattcaggagaaagttgaaacccaayccaaggaatctaaggaatccaataaaacaatacaagagatgaaacgaaatagccattttaagaaagaaccaaactgaactgatagagctgaaaaactcac

SEQ ID NO: 353605 - DNA, 201 bp, Homo sapiens
gtgtgctgttttccatgcatgaatgttttctatgagaactataaagttactgaatgttctcagtagagtgacttgatgtgtcatgtggtaccttttagtgsaggatctagggaccagcttgggactttgtccttgggttggtacagtgtgattgtcaccgggagaggactgcagctgccagggggtggtaattctgtccca

SEQ ID NO: 353606 - DNA, 201 bp, Homo sapiens
atggggcagagaacaaagttggggggcccagtaccagcccatcagcgttacatcacatagcccatgagtgatgagctgagccttggtgccctgaaagcatycagaatgaagccagtcaactgaaccgacattataccacaatcaaaccctcaagaatatcaaagaatataaaagtaaaaagccctatccaaaggatagcaa

SEQ ID NO: 353607 - DNA, 201 bp, Homo sapiens
ggagggaattgtcttcctgccactttggagtcattcgtgatttaagtgtgctgttttccatgcatgaatgttttctatgagaactataaagttactgaatsttctcagtagagtgacttgatgtgtcatgtggtaccttttagtgcaggatctagggaccagcttgggactttgtccttgggttggtacagtgtgattgtc

SEQ ID NO: 353608 - DNA, 201 bp, Homo sapiens
tgaggattgtgactgctcaagcagccgcagacagacttttgcttcagattttcccagagccttgtttcaacacggacttcccagacatatctccttaacaygtgggatgtctgcccatttccttgcatggatcatgcaaggtgagggcaacttgggtaactcttcctggattttaatctaggaactttatgtagatgatca

SEQ ID NO: 353609 - DNA, 201 bp, Homo sapiens
ccctccctttagggttggtggaggtatcgatactggggctagtcctacagctaatgctttatgattctttgttctgcttcactcagcacctgctgtaccaygttatgtttgtaagtggcttagtgttaacttttctccaaaaggcagcagggtctggaacaggagactggcccagtctggcatctggagaggatggtggtt

SEQ ID NO: 353610 - DNA, 201 bp, Homo sapiens
aagagaagtacaccaggattttaaagtctcttttttttttttatttttcacaaaggatttgctgtaagtcttcaagtcattttgtccaatccaaaagctgkatttaagcgtcgtggatcccagccagggatgcaagaatctgactttctcaaacagataacaacagtcgaagaactggaaccgaaagcaaataactgcact

SEQ ID NO: 353611 - DNA, 201 bp, Homo sapiens
acttaaaaaaattaatatgcctgcccacaagatggaaagaaaacactggaggcagccccactggtggtgtgcagttggcttcaaagctgaccagtagccayatagctctgccaagccagtgaggccctggggggtttctactgttctgtgcctcagaattcaattcttacacctcaggaatctgaggattggctaaaagtg

SEQ ID NO: 353612 - DNA, 201 bp, Homo sapiens
gattagaaatacagtttgagaaccacatgttggcagtgtgggatgaatgggggaggagggctgggcctggaggctcaggcagccatctgggtaatgagccsgtagcgggctgggaggtgagaggaggtcttaaataccacagctattggggacttataaaattttaacagccttttcagattatactctaaatcagcagac

SEQ ID NO: 353613 - DNA, 201 bp, Homo sapiens
gtgtctttatagcagcatgatttatagtcctttgggtatatacccagtaatgggatggctggatcaaatgatatttctagttctagatccctgaggaatcrccacactgacttccacaatggttgaactagtttacagtcccaccaacagtgtaaaagtgttcctatttctccacatcctctccagcacctgttgtttcct

SEQ ID NO: 353614 - DNA, 201 bp, Homo sapiens
aaatgatatttctagttctagatccctgaggaatcaccacactgacttccacaatggttgaactagtttacagtcccaccaacagtgtaaaagtgttcctrtttctccacatcctctccagcacctgttgtttcctgactttttaatgattgccattctaactggtgtgagatggtatctcattgtggttttgatttgcat

SEQ ID NO: 353615 - DNA, 201 bp, Homo sapiens
atttaaagtgactgcagggggggagccagggaaagagacaaggcccagcaagagggtgttagggtggacagtggcgaggtcactggagagaaggggtggaygaatgatgaattccgttattggatgtgggaagaggaggacccttggtgagtatgggagaaagaccgctggaagcagaatggtctgagcaaagttaggttt

SEQ ID NO: 353616 - DNA, 201 bp, Homo sapiens
tttaaagtagttttttccaattctgtgaagaaagtcattggtagcttgatggggatggcattgaatctataaattaccttgggcagtatggccattttcasgatattgattcttcctacccatgagcatggaatgttcttccatttgtttgtatcctcttttatttcattgagcagtggtttgtagttctccttgaagagg

SEQ ID NO: 353617 - DNA, 201 bp, Homo sapiens
atcacatcacctgactgaagttttcaagctcaggattcactgtgggtgtgttgtcccagtggagggtgtcgaggctgaaagtgaggaagacagtgatcacrcctggctgggcctcctgtatccatacctgccctctcccgtgtccactccacctcgaagcaggaggaatctttcaggaatgcaaaccagattcttggcagt

SEQ ID NO: 353618 - DNA, 201 bp, Homo sapiens
caaagacaaaattgcatttggcagtttagtttccccaacctttatttgtttcctgataactatatttagtctgaacctctttgtcaaggacaccacatagkttatattgtcttcctctttgcatccaatgaagcagcatatattgccaggtcatttttttttatggtgatgccaaacttgaccacttggccaagggagtga

SEQ ID NO: 353619 - DNA, 201 bp, Homo sapiens
ctgactgaagttttcaagctcaggattcactgtgggtgtgttgtcccagtggagggtgtcgaggctgaaagtgaggaagacagtgatcacgcctggctggrcctcctgtatccatacctgccctctcccgtgtccactccacctcgaagcaggaggaatctttcaggaatgcaaaccagattcttggcagtcccttgctca

SEQ ID NO: 353620 - DNA, 201 bp, Homo sapiens
aaactcatgtcatttaacacatgaaaatatgtcatcattataataagtaaagcacctgattagcaggagccttgtgatattattactgtcttctgccattyttgaattcaggtctttcttcttggttatgtcaactcttagctttctcctttgaccttttgttacttttttcctttttgttgttaatgtattacattgaaa

SEQ ID NO: 353621 - DNA, 201 bp, Homo sapiens
agttatggacgcagtcccttggtgagtacagaggacttaaacaaatgcaacctgacggtaatatagttgtttacctctgatctatataatcagtatccccrtttttaacagaagcactaggaagtaacttgaaaatgtcatgtagctgttatgtggcagagatagaattttgaacccaggtgccctggttctagcgcctgc

SEQ ID NO: 353622 - DNA, 201 bp, Homo sapiens
tataaaaattaactgaaaatggatcatagtctaaatatattacctaaaactataatacttgtagaaaggaggagaaaacccttgtaaccttgaattaggcaaatatatatatatatatttttttttttttcaagcagttctcatgcctcaccctcctgaatagctgttgttacaggtgttccccaccacacctggctaatt

SEQ ID NO: 353623 - DNA, 201 bp, Homo sapiens
cgcagcccctctccaccagtagcagcgctgctgtcttcccacaggaggacttgggaggacgctggattctgcagcgcccccgccccctcgctttttctttytttccttgctttgggatcttgctgctggatccggagaggttctgagaagacaagagcaagggactgagagcaggcttccgctgcggcgcgcgaacacagc

SEQ ID NO: 353624 - DNA, 201 bp, Homo sapiens
aatggatcatagtctaaatatattacctaaaactataatacttgtagaaaggaggagaaaacccttgtaaccttgaattaggcaaatatatatatatatatttttttttttttcaagcagttctcatgcctcaccctcctgaatagctgttgttacaggtgttccccaccacacctggctaatttttgtatttttagtaga

SEQ ID NO: 353625 - DNA, 201 bp, Homo sapiens
cgagctactcaggaggctgaggcaggagaattacttgaacccgggaggcagagattgcagtgagccaagatcacaccactgcactccagcctgggcaacaragtgagactctgactccaaaaaaaaaaaaaaaaaaaaaaaaaaatcccctttttggaacaaggtaggataataataagtaaaaccaggaagcttggctaa

SEQ ID NO: 353626 - DNA, 201 bp, Homo sapiens
actttatattcctgcatatggttgatactggtgcatgttgcatgtacacttaaataacatttattctgcgattgttggatacagtgttctatatttgtcarttagattgagtgctgctcagatgttctatattcctacagatatttcatgtgcttattctataaaatacaaattgttaatgtttctgattaggactagaag

SEQ ID NO: 353627 - DNA, 201 bp, Homo sapiens
tgctactttatcataaaacaactcattttctatgggttatagaaaatgatgcctgtgataactgtggaaggatggagtttgaaacatgaggctcagaggcaaaaaaaaaaaaaattcggtgacatctatactcttaaaaatgaaggcagaaaggcttcaaaattgatctcatcaatcttgagctctgaagcacagctctgt

SEQ ID NO: 353628 - DNA, 201 bp, Homo sapiens
ttttcaccacctcgactttcctaagagtccctaggagagcatctgtaggtaatagttttcatctagaatctgttaaataggtattatttattttactcatrtaaatagttaggattaagggttgttgccctgcactgctaacgtgggggccggggtgcagaccacttctctctttggcatgcaggttgtttgctgtgacta

SEQ ID NO: 353629 - DNA, 201 bp, Homo sapiens
caaccagtatcctgaagccatgtgaagaatgtatcaggagtttcagtatgactgagaagggtaggctctcatctgaatttaaaaaaaaaaaaaaaaaaaaaaggataaagcttatttataagcatgtgggaaaaagcaagaaatcttttaacactaaaatctgatctgacctgttggaaaggacactacgttatcaatttg

SEQ ID NO: 353630 - DNA, 201 bp, Homo sapiens
gctcttgggaagggcaagctggggtcagatagtgaggactgagtgctaagatgagaagtttttcttcatttctgtggacattggagagtctgacatttttyaagtaggggactgatgtgattagaaatacagtttgagaaccacatgttggcagtgtgggatgaatgggggaggagggctgggcctggaggctcaggcagc

SEQ ID NO: 353631 - DNA, 201 bp, Homo sapiens
taactaacatgactgtgaagtttaaagctgtttgttggaatctggaaataggagaagcaaagtgaaaatgaagttttcaaataaaaacgttggtatatttsaatgcctgctggtgacggagaggataggaaatgggagaataggtgcccactagcagatgtagtctcattcaaaaaggtaagggggagggggggcagagag

SEQ ID NO: 353632 - DNA, 201 bp, Homo sapiens
acaggttagagggcacagtctccaacaagactgcccttatttcacatgccccccacgcgctggagagtcccaggccacctgcacttctgatcaactgactrcactggatgtttcccacaatctcctcaggtttgctaatttgctagaatgactcacagaactcaggagagtgctgtaattatacaaattatcattgtaatc

SEQ ID NO: 353633 - DNA, 201 bp, Homo sapiens
gacaaaggaatgagtgctgctgattggttggcggtgcaatcacagaggtgtgggaaatgatccttatgctgagtccacttctgggcgaaggccgcaggacwggttggcaggtcaggtggtgccatctggttgtcagaattgcaaaagcctgaaaagacatctcaaaaggccaacctcaggatctataatagtgatattacc

SEQ ID NO: 353634 - DNA, 201 bp, Homo sapiens
cagtgagaacactggcaaaatttgtcaaagtcaacttcttaagaactatggaaattagctaaaagtatgcaagaatctggggagttttgtttttttttttwaaaaaaaggctaaatcttggtaagagcagtattgtagtatatcaatttgccctatttccatccccttctctccatttcctccatggtagctttgaaaacc

SEQ ID NO: 353635 - DNA, 201 bp, Homo sapiens
cattgcccacactcagcaaagaacacagactttacaaagttagttcaaggaagtcactaaaacgataatgacaacaataaaagaacaactaaccttagagmatctgatttccagagttgtcacattatattatttcaaatgttcagttttcagcaaaagagtacaagacatgcaaataaacaagaaagcataaccaataca

SEQ ID NO: 353636 - DNA, 201 bp, Homo sapiens
atgcatgagctgtagactagagctgttcctcttcggccatcttgtaacgatcctgctagggttttttcaaggatagtttggcagggagagagatgacaaargaatgagtgctgctgattggttggcggtgcaatcacagaggtgtgggaaatgatccttatgctgagtccacttctgggcgaaggccgcaggactggttgg

SEQ ID NO: 353637 - DNA, 201 bp, Homo sapiens
atacgtcccatcaatacctaatttattgagaatttttagcatgaagggttgttgaattttgtcaaaggccttttctgcatctattaagataatcatgtggyttttgtctttggttctgtttatatgctggattacatttattgatttgcgtatattgaaccagccttgcatcccagggatgaagtccacttgatcatggtg

SEQ ID NO: 353638 - DNA, 201 bp, Homo sapiens
ggccttttctctggctacttttactcagcattatgttttggaaattggtacatggtattatgcataccaattattcattactgtctcttactgaatagcartccattgtatgtatgttttgcttatctatttgtttatctatttacaagttgatgaacatttggaccatttccagcttatggatattatgagtgaaactgt

SEQ ID NO: 353639 - DNA, 201 bp, Homo sapiens
caagccatcatgcctggctaatttttgtatttttagtaaaggtggggtttcaacatgttggccaggttggtctcaaactcctgacctcaggtgatgcaccyacctcggtttcccaaagtgctgggattacaggtgtgagccacggtgcctggccctaggtgtggtttttaattactatgtaatcccagggcccagtgtgga

SEQ ID NO: 353640 - DNA, 201 bp, Homo sapiens
cccgctacaagtttaccaggcaaacctttaaaaaattattataaatgatgaccatgaaactggagggggtcgagggatcactctgggcaggttgctgaagsctgctttctgtgggctctctgcagggacatgggaatgacagttattctgggtctccttcatctcaatgtttgtcaacaaggaattttgcctgggttaatt

SEQ ID NO: 353641 - DNA, 201 bp, Homo sapiens
tgtgtgtctctgcacgtgagatgggtttcctgaatacagcacactgatgggtcttgactctttatccaatttgccagtctgtgtcttttaattggagcatytagtccatttacatttaaagttaatattgttatgtgtgaatttgatcctgtcattatgatgttagctggttattttgctcgttagttgatgcagtttctt

SEQ ID NO: 353642 - DNA, 201 bp, Homo sapiens
aaaaaattattataaatgatgaccatgaaactggagggggtcgagggatcactctgggcaggttgctgaagcctgctttctgtgggctctctgcagggacrtgggaatgacagttattctgggtctccttcatctcaatgtttgtcaacaaggaattttgcctgggttaatttatttggcagaccttttctcagtagataa

SEQ ID NO: 353643 - DNA, 201 bp, Homo sapiens
agcacagcagtctgagatcgacctgggatgctggagcttggtgggtggggagcggcgtccaccattgctgaggcttgagtaagcggttctatgctcacagygtaaacaaagcagcagggaagcttgaactggacggagcccactgcagctcagcaaggcctactgcctctgtagattctacctcgggggcagggcatatct

SEQ ID NO: 353644 - DNA, 201 bp, Homo sapiens
gagcttggtgggtggggagcggcgtccaccattgctgaggcttgagtaagcggttctatgctcacagcgtaaacaaagcagcagggaagcttgaactggayggagcccactgcagctcagcaaggcctactgcctctgtagattctacctcgggggcagggcatatctgaaaaaaatgccgcagacagcttctgcagactt

SEQ ID NO: 353645 - DNA, 201 bp, Homo sapiens
ctgataacggacagactacctcctcaagtgggtccctgacccctgtgtagcctgattgggggatacctcccagtaggggccaacagacatctcatacaggygggtgcccctctaggacgaagcttccagaggaaggatcaggcagcaatatctgctgttctgcagcctccattggtgataccgaggcaaacggtctggagt

SEQ ID NO: 353646 - DNA, 201 bp, Homo sapiens
catacagaagttcctgctgttctgtgaatatttgaatctgcacccacttgtagctttgtgagatcactcttaacggtagtatttaagaacatttgaactcygctgtgggctcatgatgaacttcatttctcttctggcgggtggacctgtgctcattatcattcaatgaattggctcagcatgcaggatggcatgctgaga

SEQ ID NO: 353647 - DNA, 201 bp, Homo sapiens
cagagaacaccacaaagatactcctcgagaagagcaaccccaagacacataattgtcagattcaccaaggttgaaatgaaggaaaaaatgttaagggcagycagagagaaaggtcgggttacccacaaagggaagcccatcagactaacagcagatctctcagcagaaacactacaagccagaagagagagggggccgata

SEQ ID NO: 353648 - DNA, 201 bp, Homo sapiens
ttggctcagcatgcaggatggcatgctgagataaacgctagcccttactttagattaaatacccccaaaagagagtgatcaacaggagaaaatcgaagccraaaaagatcattaaagagttgtttaggagcagatacgtgttcattgttaaaatttcccagctgaaaatctaaacaaacagcacttgagctttcagaagaa

SEQ ID NO: 353649 - DNA, 201 bp, Homo sapiens
ccaaggttgaaatgaaggaaaaaatgttaagggcagccagagagaaaggtcgggttacccacaaagggaagcccatcagactaacagcagatctctcagcrgaaacactacaagccagaagagagagggggccgatattcaacatgcttaaagaaaagaatttttaacccagaatttcatatccagccaaactaagcttca

SEQ ID NO: 353650 - DNA, 201 bp, Homo sapiens
gccttacaaaagctcctgaaggaagaactaaacatggaaaggaacaaccggtaccagccactacaaaaacatgacaaattgtaaagaccatcgatgctatraagaaactgcatcaattgatgggcaaaataaccagctaacatcataatgacaggatcaaattcacacataacaatattaaccttcaatgtaagtgggcta

SEQ ID NO: 353651 - DNA, 201 bp, Homo sapiens
gggcaataaggcaagagaaataaataaatggtattcaattaggaaaagaggaagtcaaatagtctgtttgtagatgacatgattatatatgtagaaaaccycatcgtctcagctccaaatctccttaagctgataaacaacttcagcaaagtatcaggatacaaaatcaatgtacaaaaatcacaagcattcctatccacc

SEQ ID NO: 353652 - DNA, 201 bp, Homo sapiens
ggaagacagtattcacttagtaagccttctctttagtctcctccgtcaagcctgttgcctgcttaggcctctcgagtactgcttaggcctctcgagtaccrtcaatcataccatagagtctggatttgaaatcccacccatcaatgtttcactttgaagctttgaggaagctgatgagttctgtactcagtgttcttcacc

SEQ ID NO: 353653 - DNA, 201 bp, Homo sapiens
gaaagaataccccaagtcaggtttcatcttttattcatggtgcttctaatttccatggttgatgttaaagtggataagataaaaggaggaaaatgaaccasgtacaaattagctccgtaagtattggctgcaaatgaaggaaagcaaaggatgaaaggtctccaaattaaattaaagacgcaacaggcaatctgtgttcaa

SEQ ID NO: 353654 - DNA, 201 bp, Homo sapiens
ccattgtgggtggctcccttttttctgtctactctgcttgcctctaaattacaagctggtaaattttctcttgtgtgaacagtaatggaatagtaattgcytttaaggcatgctgcaaaagcaaaatagaaaatccaaagtcaatggtcttatttattaactatttcaggtggtattcaagtagtggtaggttttttgttg

SEQ ID NO: 353655 - DNA, 201 bp, Homo sapiens
gagtccactaaagataaccatgtctaaatagctaaagaaaaatgggagaatgatgtctcacaaatagagatcaataaagagatagaaattatatatttttwaaaaagaaccaaatagaaatgctggagttgaaatgtacactaataaaaacaaaaaattcaatagaggggctcaaagcagtttcagcaggcagaagaatta

SEQ ID NO: 353656 - DNA, 201 bp, Homo sapiens
ttaacaaacaccatgaaaattcattgctagcacatgtgccctacaagaaatactcaaaggagtcctttaggcaaaagtgaaaggatgctagacgggaactstaatccacatgaacaaataagaacactagtaaaagtaactacataggtaattttgaaaggcagtataaatgtaatctttatagctcttttctcctgtttt

SEQ ID NO: 353657 - DNA, 201 bp, Homo sapiens
tttctcctgttttgaaaaacagctacataaaccagtcatcagaaatctggtttgaggagcacaaaatgtataaagatataatttttatgacaataatagcmcaaatgaggggcaaagaatggatctgtgtaggggcaaagtttttttatcctgttgaaattaagttggtattaatctgaactaaactgttagaaattgaaa

SEQ ID NO: 353658 - DNA, 201 bp, Homo sapiens
catggcacatactctaaagtcgaccacacaatcggccataagtcaattcttagcaaattaaaaacacaagaatcacactaaccacactcttggaccatggygcaacaaaagtagaaatcagccccaagaagatcattcaaaacatacagctacatgcaaatcaaacaacctgctcctgaatgacttttgggtaaacaatga

SEQ ID NO: 353659 - DNA, 201 bp, Homo sapiens
ttcaaatctcagcttaaaggctgccttcttggggaaggttttgctgatgcttcaattaagatagctcctcccgtgttataatgtgctgttctctcagcctsccatacctctgcaccttgtcacagtggttgtacatctctcattataattgttgaggctccgccaccccgactcccagaatgcatccttcctgtaggcaga

SEQ ID NO: 353660 - DNA, 201 bp, Homo sapiens
gaagaaattgaaaccctgaacagaccaataacaagttccaaaattgaatcagtagtaaaaagcctaccaaccaaaaaagccctggaccagatggatccacraccaaattctgccagatgtataaagaagagctggtaccattcctactgaaactattccaaaaaattaaggaggagggacccctccctaactcattctata

SEQ ID NO: 353661 - DNA, 201 bp, Homo sapiens
agcagtccattgtatgtatgttttgcttatctatttgtttatctatttacaagttgatgaacatttggaccatttccagcttatggatattatgagtgaarctgtttgaacattcaggcacaaggttttgtatggacatgagctttcatttctctgcagtaaatacctaggaaaggaattgctgtgtcatgttttttaact

SEQ ID NO: 353662 - DNA, 201 bp, Homo sapiens
gatcaacaggagaaaatcgaagccaaaaaagatcattaaagagttgtttaggagcagatacgtgttcattgttaaaatttcccagctgaaaatctaaacamacagcacttgagctttcagaagaaaatgccatttgtaacattgagatttgcaaggcatttggtgccatgtgagtgccgcttgcccctgtaggtgagtcta

SEQ ID NO: 353663 - DNA, 201 bp, Homo sapiens
agatgtataaagaagagctggtaccattcctactgaaactattccaaaaaattaaggaggagggacccctccctaactcattctataaggccagcatcatyctgatataaggccagcatcatcctgatataaggccagcttcatcctgataacgaaaactgggagagacaacataaaaagaaaacctcaagtcaatatcct

SEQ ID NO: 353664 - DNA, 201 bp, Homo sapiens
ttttcccccattgaactgccttggcatcttagccagaaatcgactgactatatgtaggaggaactatttctaaattctctagtctcttccatttatctatrtatttatccttacactaatgccacattgtcttgatttatatagctttataataagcagagcccagtcaggcccctcctagacagtccataccagaattca

SEQ ID NO: 353665 - DNA, 201 bp, Homo sapiens
gtacacaaattcaccattatttattttgttgctcaaattattccagctttgtccactaggagctgtttcaattggctatgtccctttgacacacacaccartgtgggtttgttcggttttttgtcttatttgaatgcttctttcctttctggctcctccaggcttatcttgtgtatttcccatcccagtcctagaatcagc

SEQ ID NO: 353666 - DNA, 201 bp, Homo sapiens
accttttcccctagaatccttggcttatgcagttatgaatatttccacaaggtggcgctcatgtcagtgtcctccctgcccctggccgccttgctagcccsggagtacactaggagggcgctcgggtctgcctgcatctccaggccgggcacagtctctgatggtaatagcttgaacaaatgtttgctgaattcatgaatt

SEQ ID NO: 353667 - DNA, 201 bp, Homo sapiens
agaagaggggccgggcacagtggctcacgcctgtaatcccagcactttggaaggctgaggcgggtggatcaggaggtcaggagattgagaccatcctggcyaacacggtgaaaccccatctctactaaaaatacaaaaaattagccgggtgtggtggtgggcttttgcagtcccagctactcgggagactgaggcaggaga

SEQ ID NO: 353668 - DNA, 201 bp, Homo sapiens
ataatgtcttcccagtttttttatgttgttgcaaattacaggatttccttcttttctaaggcagaatagtaccctattgtgtttatgtgtatatatatatrtgtgtgtgtgtgtgtgtgtgtgtgtgtgtatatatatatatatatatcccattttcttaatccattcatctgttgataggcacttaggttgattttgtat

SEQ ID NO: 353669 - DNA, 201 bp, Homo sapiens
ttataagaatgaaaagatgagccacggagtgggagaaaatatttatacatcatataaaagatttgtgtgcagaatatataaataactctcaaaagtcaatagtaagaaaacctttttttttttgaatgtgcgaaagatttgaactgactttttgccaaggaagagatacagatagcagtaagcatattagtcattaaaata

SEQ ID NO: 353670 - DNA, 201 bp, Homo sapiens
tcaagagcagccatccttgcctcattccaatcttcagggatttaacactcagtctttcaccaattaagtataatgttggcattaggtatttttgtagatgyccttattaagttgagaaagttcacttctagtcttagtttgctgagaggcttttatttcttcttttcattattactagatgttagattttgtcaaagcatt

SEQ ID NO: 353671 - DNA, 201 bp, Homo sapiens
aggtatatctcctaatgctatccctcccccctctccctaccctggtgtgtgaagttccccttcctgtgtccaagtgttctcattgttcaattcccacctaygagtgagaacatgcggtgtttggttttttgtccttgcgatagtttgctgagaatgatggtttccagcttcatccatgtccctacaaaggacatgaactca

SEQ ID NO: 353672 - DNA, 201 bp, Homo sapiens
caaaaatctcaacagctactcctcttcttcctgtggcattgatggggttttgcactgtggatcacaggtaatcctgcctccctgtgcatcctatccatctmcctctctggaaaagcttacttgcaaaggatttaagctgctttaataaaagccacaactacagataaatgtgactttatttttagtcatgttttcaataac

SEQ ID NO: 353673 - DNA, 201 bp, Homo sapiens
tccaaatgaataaataagcttggcattgtatagtatggtccttactcaacccaagattagagataccatctgacgtttttaactgggcttttaatcctgcwtcagtgctcccccctccaaaagaaaaaagtggcttgcatctgaagcaaagactgtacatttcaatgcaccacaatttttaaaccgcaaggtctttttatt

SEQ ID NO: 353674 - DNA, 201 bp, Homo sapiens
accaccacacctggctaaatttttatatttttagtagagacggttccccatgttggccaggctggtctcgaactcctgaactcaagtgatctgcgtgcctyggcctcccaaagtgctttattcttattttctgtataaagtagtaattaaagatttctagcaagtaaatatccaataggacaaaccagttttaagccaggc

SEQ ID NO: 353675 - DNA, 201 bp, Homo sapiens
gataccgtctcacaccagttagaatggcaatcattgaaaagtcaggaaacaacaggtgctggagaggatgtggagaaataggaacacttttacactgttgktgggactgtacactagttcaaccattgtggaagtcagtgtggcgattcctcagggatctagaactagaaataccatttgacccagccatcccattactgg

SEQ ID NO: 353676 - DNA, 201 bp, Homo sapiens
taggcatgggcaaggacttcatgtctaaaacaccaagagcaatggcaacaaaagccaaaattgacaaatgggatctaattaaactaaagagcttctgcacrgcaaaagaaactaccatcagagtgaacaggcaacctacaaaatgggagaaaatttttgcaatctactcatctgacaaagggctaatatccagaatctaca

SEQ ID NO: 353677 - DNA, 201 bp, Homo sapiens
ataggcatgggcaaggacttcatgtctaaaacaccaagagcaatggcaacaaaagccaaaattgacaaatgggatctaattaaactaaagagcttctgcayagcaaaagaaactaccatcagagtgaacaggcaacctacaaaatgggagaaaatttttgcaatctactcatctgacaaagggctaatatccagaatctac

SEQ ID NO: 353678 - DNA, 201 bp, Homo sapiens
ttgcatccccatcaagctaccactgactttcttcacagaattggaaaaaactactttaaagttcatatggaaccaaaaaagagcccgcatcgccaagtcartcctaagccaaaagaacaaagctggaggcatcacgctacctgacttcaaactatactacaaggctacagtaaccaaaacagcatggtactggtaccaaaa

SEQ ID NO: 353679 - DNA, 201 bp, Homo sapiens
caaaatgaaggtaaattatgttttaagttagccttaaaatctaccttgcttttttttttaagtgattttttaaaaatctagaacagtaataataatgatcrggatattttaataaaagtattaatggtgaagaaattttgaattgccttcttaacattacatggaatttttgtaatgtgaactgtatgaactttcaggaaa

SEQ ID NO: 353680 - DNA, 201 bp, Homo sapiens
aagcattccctttgaaaacgggcacaagacagggatgccctctctcaccactcctattcaacatagtgttggaatttctggccagggcaattaggcaggasaaggaaataaagggtattcaattaggaaaagaggaagtcaaattgtccctgtttgcagatgacatgattgtatatctagaaaaccccatcgtctcagccc

SEQ ID NO: 353681 - DNA, 201 bp, Homo sapiens
attctcaataaaatactggcaaactgaatccagcagcacatcaaaaagcttatccaccatgatcaagtgggcttcatccctgggacgcaaggctggttcartatacacaaatcaataaatgtaatccagcatataaacagaaccaaagacaaaaaccacatgattatctcaatagatgcagaaaaggcctttgacaaaatt

SEQ ID NO: 353682 - DNA, 201 bp, Homo sapiens
caccaccgatcccacagaaatacaaactaccatcagagaatacgacaaacacctctacgcaaataaactagaaaatctagaagaaatggataaattcctcracacatacaccctcccaagagtaaaccaggaagaagttgactctctgaatagaccaataacaggctctgaaattgtggcaataatcaatagtttaccaac

SEQ ID NO: 353683 - DNA, 201 bp, Homo sapiens
gacagatcaacgagacagaaagttaacaaggatacccaggaatagaactcagctctgcaccaagtggacctaatagacatctacagacctctccaccccaratcaacagaatatacatttttttcagcaccacaccacacctattcccaaattgaccacatagttggaagtaaaggtctcctcagcaaatgtaaaagaaca

SEQ ID NO: 353684 - DNA, 201 bp, Homo sapiens
tatatttagtaggattttaggttattaagattttattgtaccatgtaatttgctgcaacttatatatttattgctgaatgattatagtacatttttctcartgtagggcattgagtatttctagtattttgcttctctgttttgaagagtaaagttaggttaagaataatggtcatttttttgccgccatttagttgagat

SEQ ID NO: 353685 - DNA, 201 bp, Homo sapiens
agaactcaggattaagaaactcactcgaaaccgctcagctacatggaaactgaacaacctgctcctgaatgactactgggtacataacgaaatgaaggcakaaataaagatgttctttgaaaccaacgagaacaaagacacaacataccagaatctctgggacacattcaaagcagtgtgtagagggaaatttatagcact

SEQ ID NO: 353686 - DNA, 201 bp, Homo sapiens
agttcttgaggaagagtgaaatcaaacttaaaggagaatggcaaagttatttcatgtaggaataaccaggtaaacaggtttgtgcatatacttagtggacrtgctttgtacgtacctttctgaagacaggtgtaagtactgggcagaaatgtcagggagaaaatagacaaagggacaattgttgatttgggagttatcggc

SEQ ID NO: 353687 - DNA, 201 bp, Homo sapiens
actgtcaacattagacagatcaacgagacagaaagttaacaaggatacccaggaatagaactcagctctgcaccaagtggacctaatagacatctacagamctctccaccccagatcaacagaatatacatttttttcagcaccacaccacacctattcccaaattgaccacatagttggaagtaaaggtctcctcagcaa

SEQ ID NO: 353688 - DNA, 201 bp, Homo sapiens
atttcccaggttcaagcgattcttgtgcctcagcctccagagtagctgcgattacaggatgtaccaccatgcctggctaatttttgtgtttttagtagagrtggagtttcaccatgttggccagacaggtctcaaactcctggcctcaagtgatccacctgccttggcctcccaaattgctgggattacaggtgtgagcca

SEQ ID NO: 353689 - DNA, 201 bp, Homo sapiens
ggcatgcgccactacacccggctaattttgtattatcagtagagacagggtttctccatgttggtcaggatggtctcgaactccccacctcaggtgatccrcctgcctcggcctcccaaagtgctgggattacaggcgtgagccactgtgcctggcaaaaatctacaggttttctactgtcaatttgcatcaaggccagac

SEQ ID NO: 353690 - DNA, 201 bp, Homo sapiens
ttttttcttcatggaatttctaaaatgtttttgcaatcatttgaagctttattgcaagtgaggcaataaaaagggaagaaatccaattactttatgtgcaragctttcatttcctagttaatgaaagaaaggcttttgttcactaagcatgcatgctttacagttcttcttagtaaattagaaatttcctgaaatagaaaa

SEQ ID NO: 353691 - DNA, 201 bp, Homo sapiens
agcactggaaatggtgtttgtctgctgatcttaatgaagcatataaattgctttataataagtctgctgctcagctgttatattacattaatctgctcttyttttctcctagctttttttctgttttcttaaacagttgattaaaattttaattaacttttgctatttcaactccgttttatttttcattcttaaaaggta

SEQ ID NO: 353692 - DNA, 201 bp, Homo sapiens
gcgacccagtccccctccccctcccctcgccggctagggtggtgcgtgccggcaggccggtcaaggaggcgggacacgtcggcgctaccaccgccaccgcygccgccgcccctcctcccgttccagctgccgctgccgcttcctgggctgagtccgcccgcggtcccggcggcgccaggtgcgttcactctgcccggctcc

SEQ ID NO: 353693 - DNA, 201 bp, Homo sapiens; identical to SEQ ID NO: 75797

SEQ ID NO: 353694 - DNA, 201 bp, Homo sapiens
aaaagaatgctaaatttggagtggcagaaaataagaattttagttcctgtattcctatttggcacataacatctgagcctcagttaatttgcggaatgaawgtgtttggccagattttctaagtttattttcaacttcaaagttttctgatttttaagccaaattaaaatagggattagacttaactacctacttaaagac

SEQ ID NO: 353695 - DNA, 201 bp, Homo sapiens
aggattaagagttagaaatgaaagataatgagccatgctttcttactttgggcagattgatacttctgttacacatatacatggagttaccccatttggtkgctggaaacatgagtctggaccctagaagagagcagtacattcagattgaggagtcgcttagcatgtaggtgatgatataaagtgctgggtcagcttatg

SEQ ID NO: 353696 - DNA, 201 bp, Homo sapiens
tgatacttctgttacacatatacatggagttaccccatttggtggctggaaacatgagtctggaccctagaagagagcagtacattcagattgaggagtcrcttagcatgtaggtgatgatataaagtgctgggtcagcttatgtttacctagggcagcagttctttattttgcagattttattgagaatcctgagaattc

SEQ ID NO: 353697 - DNA, 201 bp, Homo sapiens
gaactgaagttctgtgtaaatgatgtcatataatattgtaatgttcttaaatcttacatttagtttctaatataatagaatattaaggaagtactgtttgsatagtcattcctcatagatgacactgaaacctaattaaactggttgaaatgattatcaaattgttttattcttactgagcaattgttcttaccattggaa

SEQ ID NO: 353698 - DNA, 201 bp, Homo sapiens
attaaaaaaaatttttatttttttttcgactgggcatggtggcttatgcctgtaatcccagcactttgggaggctgagtcaggtggatttgagaccagccwggccaacatggtgaaaccccgtctctactaaaaatacaaaaattagctgggcccagtggtgcatgcctgtaatcccagccacttgggaggctgaggcaga

SEQ ID NO: 353699 - DNA, 201 bp, Homo sapiens
aaaaatatgctttgtgttagaagattttgctcaaccgtaggctaatgttagtgttctgagcacatttaatgtaggctaggctaggctatgtttggtagatwaggtgtattaaatgcatttttgacttaaaatattttcaacttaggatgggtttactggggcctaacccattgtaagttgaggggcatctctgttactaag

SEQ ID NO: 353700 - DNA, 201 bp, Homo sapiens
tgatgttggttctattgcaagttgaattatggagactgatagaatcttaggcctgttacttaacatctttacagattctgtttcttttcctgtaaaattargataataatgcctgtctcatggttgttttgaaatttaaaattgcaaatataggtaaagtgttgaggctaatgcttgtgtcactgtagctattatgctatt

SEQ ID NO: 353701 - DNA, 201 bp, Homo sapiens
tatgtgtctccattttaagttccaacagtgtttccttatcttctaccaccttgtctcaaagtcattgcacagattttagggtttggttgtggcagcacccytcttgtatcagtttctaaagtagtcagctcttgctgtgtgtgttacatagcaaacaactccaaaatttcagtggcttacatcaactaacatttatttctg

SEQ ID NO: 353702 - DNA, 201 bp, Homo sapiens
cacttaacataatatcctctagttccatccatgttgttgcagatgacaggacctcattcgtttttattgctgaatatagtactccaatgtgtatatgtacyacgttgtctttatccattcccctgttgatggacacttaggtagcttccaaatgttggctattgtgaatagtgccacaataaacatggccgtgcaggtatc

SEQ ID NO: 353703 - DNA, 201 bp, Homo sapiens
catcagtgtgctgtattcaggaaacccatctcacatgcagagacacacataggctcaacataaagggatgtaggaagatctaccaagcaaatggaaaacaraaaaaggcaggggttgcaatcccagtctctgataaaacagacttcaaaccaacaaagatcaaaagagacaaagaagaccattacataatggtaaagggat

SEQ ID NO: 353704 - DNA, 201 bp, Homo sapiens
gttctcctggataatatcctgcagagtgttttcgaccttggttccattctccccgtcactttcaggtagatcaatcagacatagatttcgtcttttcacawagtcccatatttcttggagactttgttcgtttctttttattcttttttctctaaacttcccttctcgcttcatttcattcatttcgtcttccatcactga

SEQ ID NO: 353705 - DNA, 201 bp, Homo sapiens
ttccttgctagattggggaagttctcctggataatatcctgcagagtgttttcgaccttggttccattctccccgtcactttcaggtagatcaatcagacrtagatttcgtcttttcacatagtcccatatttcttggagactttgttcgtttctttttattcttttttctctaaacttcccttctcgcttcatttcattc

SEQ ID NO: 353706 - DNA, 201 bp, Homo sapiens
cattttttcctgcatttcaaccttggtgaatctgacaattatgtgtcttggagttgctcttctcgaggagtatctttgtggcattctctgtatttcctgawtctgaatgttggccttccttgctagattggggaagttctcctggataatatcctgcagagtgttttcgaccttggttccattctccccgtcactttcagg

SEQ ID NO: 353707 - DNA, 201 bp, Homo sapiens
ctctctggctgcccttaacattttttcctgcatttcaaccttggtgaatctgacaattatgtgtcttggagttgctcttctcgaggagtatctttgtggcrttctctgtatttcctgaatctgaatgttggccttccttgctagattggggaagttctcctggataatatcctgcagagtgttttcgaccttggttccatt

SEQ ID NO: 353708 - DNA, 201 bp, Homo sapiens
tcaggagcaggttgttcagtttccatgtagctgagcagttttgagtgagttttttaatcctgagttctagtttgattgcactgtggtctgagagacagttygttataatttctgatcttttacatttgctgaggagagctttacttccaactatgtggtcaatttgggaataggtgtggtgtggtgctgaaaaaaatgtat

SEQ ID NO: 353709 - DNA, 201 bp, Homo sapiens
attggtctgttcagagagtcaacttcttcctggtttagtcttgggagggtgtatgtgtcgaggaatttatccatttcttctagattatccagtttatttgygtagaggtgtttgtcgtattctctgatggtagtttgtatttctgtgggatcggtggtgatatcccctttattattttttattgcgtctatttgattcttc

SEQ ID NO: 353710 - DNA, 201 bp, Homo sapiens
aataaccctttatttccttctcctgcctaattgccctggccagaacttccaacactatgttgaataggagtggtgagagagggcatccctgtcttgtgccmgttttcaaagggaatgcttccagtttttgcccattcagtatgatattggctgtgggtttgtcatagatagctgttattattttgagatacgtcccaccaa

SEQ ID NO: 353711 - DNA, 201 bp, Homo sapiens
tagttttgtatgttgaaatggcatatgccacgtataaaattggaatatttgaattttcagttcacagatgtttatttcattttgtgtctatagtaaagtcmgtttttaatctatactttctaaaatgttgattttaaagtgtttttaaagtatcatttctcttgttgataaaatttgccagtataattccatagtttgttt

SEQ ID NO: 353712 - DNA, 201 bp, Homo sapiens
aaaaataaatttaatagaaactttaacttaagtagttcagagtcctcccctttcttttttcatacttgaagtgtgagataaagagaaaaaaaaatactgacagggaatgatgtgacttctctaaagccaaagaattttcaaaattactaagatctttgaatttttagtgatttatttgatagcctcacaattatccctcct

SEQ ID NO: 353713 - DNA, 201 bp, Homo sapiens
aaaaaataaatttaatagaaactttaacttaagtagttcagagtcctcccctttcttttttcatacttgaagtgtgagataaagagaaaaaaaaatactgacagggaatgatgtgacttctctaaagccaaagaattttcaaaattactaagatctttgaatttttagtgatttatttgatagcctcacaattatccctcc

SEQ ID NO: 353714 - DNA, 201 bp, Homo sapiens
aagtttatagtcttgtgttgtgattcaggaattactgccataactaacttaataacaagcagattgagggaggacttgtcatcttgcagtgttattttgasattacataatgacctatctgtaatagcaccttttagttttaaaaattcctcataggcactattgatatgatagggcagtatagagatgtcagttttatgg

SEQ ID NO: 353715 - DNA, 201 bp, Homo sapiens
tattgaaataaaaatgcagaaagatttacaaaagtcacaataaacccaagggaaaatgtattccacctattccaatataagcaaaataataataaataagyttatattgtagcagatttaaaggattttttcctctttcatggtgatcagtgagcaagtaactaatcttaggtattactgagaattacatatttctgttca

SEQ ID NO: 353716 - DNA, 201 bp, Homo sapiens
tgttttcttattatttaatgtcagtcttgtttcagacaaattttagaagaattaactatgtccatttttatgggtaatgtttgtacttgctggggtatttraggttttttttttgttgttgttgttgtttttttgttttttttctttttttaagataggaaatgttcctttttttttgaaatggaatttcaatcatgtcac

SEQ ID NO: 353717 - DNA, 201 bp, Homo sapiens
tgtagagaaaaatcttggtgaggcctggcagaaagttccttacctcaggtttttgggggggtatgaaaaagtcttccttaatcaattgaaaacagtgtcarccttgccacaaagattgctgtccctaagcaggtgcttcctctgtctcattctaaaaaggattctgaagtccctcagacttactttgtgaattgacttcat

SEQ ID NO: 353718 - DNA, 201 bp, Homo sapiens
tgtacatgtgccatgttggtttgctgcactcgtcaactcatcatttacattaggtatatctcccaccaccccacgacaggcaccggtgtgtgatgttcccygccctatgtccaagtgatatcattgttcagttcccacctatgagtggaacatggggtgtttggttttctgtccttgtgatagtttgctcagaatgatggt

SEQ ID NO: 353719 - DNA, 201 bp, Homo sapiens
aggcttactgtgcagattccctccaggtgaggtaaggattaaactgagatactttattgatcagagtatctggcacatagtacttaaataaatattagtgkttaaacttgtattaaaatatgaagtgttgtattcttatttccttttagttttagtttataaatttaaaggcacttggaatgcaccaaggggaagacaata

SEQ ID NO: 353720 - DNA, 201 bp, Homo sapiens
ttaaaagtgtaatgtattttcatatgaaatgttaagaaatcattttagtttattttagggaacatactgtttcatattaaacacttttaaaatataatttdaaaaattatatttgtattatgtttcttttcttagcaataattaggaaattatttttacatagtaatgtgtaagatggttttattttgggatggtagctgt

SEQ ID NO: 353721 - DNA, 201 bp, Homo sapiens
attgggagtgaaggaactgaatcttagtgtcagccgtgtcactaatgcattatattaaccagtagaaaaatcatacaacctctttgtgcctcagtttcctstctgtaaagtgaaaaccaggcctctaaaactaagagcctgctgttagtaagccctgcaggacatagtcccagttccactggatgaagcctgaaatatcaa

SEQ ID NO: 353722 - DNA, 201 bp, Homo sapiens
atcacaaggtcaggagttggagaccagcctggccaacatgatccaatcccgtctctgctaaaaatacaaacaattagctgggcgtggtggcgggcacctgwaatcccagctacttgggaggctgaggcaggaaaatcccttgaaccgggaagtagaggttgcagtgagctgagattgtaccacttcactccagcctgggtg

SEQ ID NO: 353723 - DNA, 201 bp, Homo sapiens
aagtttattttcaacttcaaagttttctgatttttaagccaaattaaaatagggattagacttaactacctacttaaagactactttaagacactcttcaragtattataggctgtgatgagaccaatgaagacccaccccaggaagctgctaggatcctgccctgcaatatttgaagtttgcatgctcgtggccacacga

SEQ ID NO: 353724 - DNA, 201 bp, Homo sapiens
acaactcatacaactcttccccacaggttgaggagtccttttgtttaaaattgtttcactgtaatgctttcttactattaatgtcagtatttctacctcasatgttaggtagaactgtgtttaacttggagtggcatttagttactcagatgttaggtagaactgtgtttaacttggagtggcatttagttacagtatcat

SEQ ID NO: 353725 - DNA, 201 bp, Homo sapiens
ctgcccacctcgacctctcaaagtgctgggattaccggtgtgagccaccacaccctgctgacatttatcatttctttgtgttgggaacattcagtatcatmtagctttttgaaaatatacactaaattattgttagccgtacttaccctataatactacagaacactaaatcgtactcctcctatctagctgtactgtcac

SEQ ID NO: 353726 - DNA, 201 bp, Homo sapiens
tctggcagaaagaattcaatagggataatatgttatagggtcaaaagtatctataaatattatgaagttgtatcagatagacaaatgatgtgttattatcsctattttagagtattctgtaaaaaaaaggttaaacatctttcatttcaaattgtaatgtaactgtaacgtgaacaccactaatggccagaaattatctca

SEQ ID NO: 353727 - DNA, 201 bp, Homo sapiens
actgcaggtgcccatgaccacacctgtctaattttttgtatttttagtggagatggggtttcaccgtgttagcccggatggtctcgatttcctgacctcaktgccacattttcttaatccagtctgtcattgatggacatttgggttgtttccaagtctttgctattgtgaatagtgctgcagtaaacatagatgtgctgc

SEQ ID NO: 353728 - DNA, 201 bp, Homo sapiens
agcttgaagggcatgaactccacagtataatttacaaggattatttttttcttgttgctactaaatctagaagaatattaaaatgatcttgtaaataattycattgttttatcttgatctttcaggcaaaaaatcacaggtaaggccacttattgatttaattagacttgatttcatggttgtaataattgaaaaattcga

SEQ ID NO: 353729 - DNA, 201 bp, Homo sapiens
catagctttaaatttagaattgcttgtttcgcctattgaacatagggactgattccaaacatcatctaacagtatccttaaaggtggatttcagatagctrcataattagtttttattcagtgacttttcctcactattatttcaaactggtttctcgcctacattagttactgctctctttaatcaggtttttttttttt

SEQ ID NO: 353730 - DNA, 201 bp, Homo sapiens
ccaccactgctaccgctgccccactgtcataactgcttctcacccaggagactggtatgctgatgggggcataaggcctatggagctgcaaccacttagtrtctgtagacgttttttgttagttgccctttctgtaggaatgtggcctctgtcccacttgtgctttccatgtgcagataattggcagatcctaattatgtc

SEQ ID NO: 353731 - DNA, 201 bp, Homo sapiens; identical to SEQ ID NO: 75808

SEQ ID NO: 353732 - DNA, 201 bp, Homo sapiens
taaaaaataaatttaatagaaactttaacttaagtagttcagagtcctcccctttcttttttcatacttgaagtgtgagataaagagaaaaaaaaatactgacagggaatgatgtgacttctctaaagccaaagaattttcaaaattactaagatctttgaatttttagtgatttatttgatagcctcacaattatccctc

SEQ ID NO: 353733 - DNA, 201 bp, Homo sapiens
ttaaaaaataaatttaatagaaactttaacttaagtagttcagagtcctcccctttcttttttcatacttgaagtgtgagataaagagaaaaaaaaatactgacagggaatgatgtgacttctctaaagccaaagaattttcaaaattactaagatctttgaatttttagtgatttatttgatagcctcacaattatccct

SEQ ID NO: 353734 - DNA, 201 bp, Homo sapiens
tcatcagagataaatatgaaaagaagaaatactacgataaaaatgccatagctattacaaatgtaagtaaaaccttcatctctcatcaattgtttgttgastagatttcaaacttttaacatgcaatacagcttaatttatttattgtgaaaacatactagttgtatatatttacatttgaatattggaacttttttggtt

SEQ ID NO: 353735 - DNA, 201 bp, Homo sapiens
gcaacccatcaactcgtaatttacattaggtatttctcctaatgctaaccctcccccagccccacacccccgataggccccggtgtgtgatgttccccacmctgtgtccaggtgatctcattgttcaattcccacctatgagtgagaacatatggtgtttggttttgtatccttgtgatagtttgctgagaatgatggtgt

SEQ ID NO: 353736 - DNA, 201 bp, Homo sapiens
atctcttacaactattcaactcccattgtagtgtgcaagtagccataaacaaacatgtaaatgaatgagcatgcttgtgttccgatcatgcttgtgttcckatcaactgtaaaaacaggcatgggctagggtttgctcacccctgctttatgttcccaatagtacctacaagagctgcctcatatttagatattaatttgt

SEQ ID NO: 353737 - DNA, 201 bp, Homo sapiens; identical to SEQ ID NO: 75810

SEQ ID NO: 353738 - DNA, 201 bp, Homo sapiens
gcttgcatgacacatttcctttccatgctgccctagcagaggttctccatgagggccccacccctgcaacaaacttctgtttggacatccaggtatttccrtatatcctctgaaatctaggcggaggttcccaaaagtcaattcttgacttctgtgcacctgcaggctcaacaccacagggaagctgccaacccttggggc

SEQ ID NO: 353739 - DNA, 201 bp, Homo sapiens
tgaatatattggtgtaaggtaactagcaatgggcggatacttgcaagtggtcctgagtcagtagtagggcagttggtgaactgacaccagaaacgggtgcygctgggtgagttgatgatatcacagactttagaagagagcaagaagggacagcttcttagaaacagcacagaacctccagagaatgtgctggtggatagg

SEQ ID NO: 353740 - DNA, 201 bp, Homo sapiens
gattcataggaactagatggtagaggttcagatagctagtttattaccaataatttaaaaaatagaacttagtttttcttttagacaaaagtacatgtcayttatcccctccacaccccctgtttttttgcaaccagtctgcttgacgtagctttggaaaactgaataattaattgccaaagaataagcagaagcattttt

SEQ ID NO: 353741 - DNA, 201 bp, Homo sapiens
caggttaaatctgtaagacagatttttttttctgaatctggaaggaatgtttttgaacacacttgctgtttatattttctattaagaaaaaaaaaaaaaaaccagtggatacaggtttctattgtaacctagttattcctagaaaaacctatgagctaactgggtagtctttaacttaacttagcaatacctatgtcatag

SEQ ID NO: 353742 - DNA, 201 bp, Homo sapiens
gtaacacttatagcatcttctgtcttgtcgtaaaattttctagatacttattttgactagctgctgcatggtgatatggattgggagtgaaggaactgaaycttagtgtcagccgtgtcactaatgcattatattaaccagtagaaaaatcatacaacctctttgtgcctcagtttcctctctgtaaagtgaaaaccaggc

SEQ ID NO: 353743 - DNA, 201 bp, Homo sapiens
tgttttagttgtatagtcagtcttctttagttaccatagcagttccaaaaacattttcatttcttgtctttgcataaaaattatatcatggttagtgatggtgattcagcttttaccaaaagtgaaattcaacctcagaggataaaaaatgttggcactctcacataagtcaaaagagtgtgaaaagattctcaggttaaa

SEQ ID NO: 353744 - DNA, 201 bp, Homo sapiens
ttgggaatttagaagatgtaattgcaacttaattgtaacctaatcatttgcaatatctgcttctctatttttcccccacttacctcatttaaaaaaaaaamaacaaccagtaaacctcaaaggacaagtcagtacacatatacaaatttgtgaaaactatgcagatagcttcctgaaacaatacgttagaatgaattttag

SEQ ID NO: 353745 - DNA, 201 bp, Homo sapiens
tattgtacttactagctttaatgttgttgtgtagagcagtgtcacctttagataaacagcatgtacttaaaacagaaggctatgtttaaaaaaagctttawttttaatttttaattttttgatacagagtctctctctgtcacccaggctggagtacagtggcgggatctcgactcactgcaatctctgcctctgaggttc

SEQ ID NO: 353746 - DNA, 201 bp, Homo sapiens
aggggaacacaggcccagtgtggttaatggcaaaatatatcatttctgtttacattctacaggagaggctgagaaatgtagtcttcctatcaggacagccrcatttctaggtaaaattcagaagcctttattacttaaaggaagaatgggaaaattgatattaaagatagtgatttttgccataattttcagatttatttc

SEQ ID NO: 353747 - DNA, 201 bp, Homo sapiens
tagttttcaatttttattagagaccactgtggtttcactatgttacccaggctggtctcaaaactcctggcctcaagttatcctctcaccttggcttcccgaagtgcagggattataggtgtgagccactgtttctggcccactgcatatctgtttaacctttcttagtttgagacttacttgctaaaaataattaaaccc

SEQ ID NO: 353748 - DNA, 201 bp, Homo sapiens
taccattttatacatctactaatgatgtgagctatttagttggtcctttgccagcatttggtgttgtgactgttttttattttagtaattatgttagatgkgttgtaacagtgatattggcttcaatttggattctcctagtggtttatggtgttgaacatcttttcatgtgccagttttccatctgtatgtcctcttcag

SEQ ID NO: 353749 - DNA, 201 bp, Homo sapiens
aggtgaaattagcaaggaaaagtatgggatacagagaaaagtacttgttctatgaaaaatgatttgtagttatagagtgctttcattatatgtactttgtygtttggtattcatagcagttacctgaatgtagtagatggtggtatttgtattttcaaatgaagaaactgatcttcatagtgtggatacagggatactttt

SEQ ID NO: 353750 - DNA, 201 bp, Homo sapiens
gccactgcactccagcctgggcaacagagcgagactccgtctcaaaaaaaaaaaaaaagaaggttgtgtgtgtgtgtgtgtgtgtgtgtgtgtgtgtgtgkatgtgtgtatgtatccagtttgaactttagtcctatattctaaatcgcctgccagacattttcatcttggtgtatcactatcatttaaagcattcaatgg

SEQ ID NO: 353751 - DNA, 201 bp, Homo sapiens
atttttggtagagacggagttttgctatgttggccaggctggtctcaaacccctgacctcgagtgattcgcctgccttggcctcccaaagtgctgggattrcaggcttgagccaccgcgcctggccagaatctagatttttataagtggtacagagttgggtgtatttaagatggtatgggatgatgaagtactacttaaa

SEQ ID NO: 353752 - DNA, 201 bp, Homo sapiens
cgccactgcactccagcctgggcaacagagcgagactccgtctcaaaaaaaaaaaaaaagaaggttgtgtgtgtgtgtgtgtgtgtgtgtgtgtgtgtgtgtatgtgtgtatgtatccagtttgaactttagtcctatattctaaatcgcctgccagacattttcatcttggtgtatcactatcatttaaagcattcaatg

SEQ ID NO: 353753 - DNA, 201 bp, Homo sapiens
aagcctaaacttaagaaaataaggggaattctgtgggaaataatatttgggatagctttatcttccattataggaaaaattcataaaaattatgtttagcstagggcgttatttagttcatgcatttctactcttggaagttgcttttggtgtagggtgatgatggtgcacagtgacaaaaaaattaacagaagaatgttt

SEQ ID NO: 353754 - DNA, 201 bp, Homo sapiens
tagacaacttagcttcactaataattttaggatcttttattagaaaataaaaatctagcctcatattctcaaagcactattttatgagggatctaaggctrtttttcaggtcggatgattactgccccatggctctgtaaaaattctttttgttgagaaacctttgtaaagttgtattttctttttacataccctataatg

SEQ ID NO: 353755 - DNA, 201 bp, Homo sapiens
tatctaatacttcttttggaacactgttatgttgagcactggttagactgtacaagttatgttgagccctgtaaaatatttggtgaacagtagtatctttygtctaaacttcatgtagagattaaaatccagacatatttggccaggtatggtggttcacgcctgtaatcccagcactttgggaggctgaggtgggtggat

SEQ ID NO: 353756 - DNA, 201 bp, Homo sapiens
gaaaggagaagtaaagtaacatgtctgagtgtaccacagaaagtcatgggggcaggctctagtcctggcagacaggctccagcccatgctcttagctctaygatctgctgctgcttcattggtagcttagatatattttattcaggggtattgtgatatttagtattccatgatatctaatttcttacatatttgaatttt

SEQ ID NO: 353757 - DNA, 201 bp, Homo sapiens
cagataatgcagaagggtgatgctgttctccagcactccatcagtgcaatctactggccaacgacaaggtggttaaaatgtcctttagtaggtatgaagaygtgatctgcttcttcagacacttatgcctgattagtgatgtagtttatgttagtgtctttgaaactgtaaataagtcaagtcaaatgtattaaattaaga

SEQ ID NO: 353758 - DNA, 201 bp, Homo sapiens
gggacagcatatatagtggaaaagaacatagatgttggaatcacaagtgcttaatctttccaagttgctgtttcttcatctatgatatggaactaataatrtgcacattcgtggggtgtgggaggaattaaaggacccaaagtatgtacagcatatatagtataggatgtctggctcagtgtgggtacttgcatagatgtt

SEQ ID NO: 353759 - DNA, 201 bp, Homo sapiens
ataggctgtgatgagaccaatgaagacccaccccaggaagctgctaggatcctgccctgcaatatttgaagtttgcatgctcgtggccacacgattctcarattcccttgcagatttgattatttatagtagcagattgagtaatcagttgaaaagaattcctttcttcatgactacagggaatatttttcttgaaattat

SEQ ID NO: 353760 - DNA, 201 bp, Homo sapiens
aatttcaggaagtttatcttatatatctattttagtgttgttcattgggaaaggaaaaagttagatgaattatcacttgccggttttcacagagcagattkttatagaagcaatgactaaaataaaatgactattttattaatattccatcctccccacaagctccacaagctccccttccaatttttttggtgttttttt

SEQ ID NO: 353761 - DNA, 201 bp, Homo sapiens
tagtctcaggtcagaggaagaactgggatagtgaggattgcaggcaaatcctgagttaggagatgttgaacagtggtccaagaagagggcaagaggacctraattcacacaatgtcaatatataagtcagggtatagagcaggaaagagatccactgtagctattttcaggaatcaggtacttaccaagtcattggaaggg

SEQ ID NO: 353762 - DNA, 201 bp, Homo sapiens
aggataggatattttggtcttccttgtttcttagaacaccattgccttctttctgcttttgaagcaagttctaataggaacagaaatcatggtctcttgcrgctgtcagtaaccctgctcaccctgtcatagagctaatatacttatcttgtattcacttgcagtcttgtactgtgactctgtgctcatggagcatcatga

SEQ ID NO: 353763 - DNA, 201 bp, Homo sapiens
ggcatgaacctgggaggtggagcttgcagtgagccgagatcacgccactgcactccagcctgggcaacagagcgagactccgtctcaaaaaaaaaaaaaaagaaggttgtgtgtgtgtgtgtgtgtgtgtgtgtgtgtgtgtgtatgtgtgtatgtatccagtttgaactttagtcctatattctaaatcgcctgccagac

SEQ ID NO: 353764 - DNA, 201 bp, Homo sapiens
tcctagctctgctcatagctatctctgtgggtggggccgcgcttaggtctggatcccctcctctaccctccggtgtgaccacgtcctcccactccgggctyggattcttggtctcctagatggagccctacctgcctgcccacctgacagcttttgtacaaggcttttatctctgcttcctgaaaaagagtatggtggtct

SEQ ID NO: 353765 - DNA, 201 bp, Homo sapiens
taattattatttcagcagtcataaggtcagtatgatagctattattattattattttaccgatcaaaagcttaggctcacagggctagctacataatttgygggcccagtgcaaaatgaaaattagagacctcttgtttagaaaacaggaataaaaagtaccgttaaaggtactaaaatataaagcttttttttcttccac

SEQ ID NO: 353766 - DNA, 201 bp, Homo sapiens
gtcaagataggaaatgttctgtgaacttatttttttgagtgatcacaatcacttgccttccattaatgcttcattttaggaaatgattaattaaatagtaygtggaaactttcttctaatcagcaatagtatgtggaaactttcttctaaactcttttgaagtttataaaggttttgcaggaagtctagttgtaaaatgtt

SEQ ID NO: 353767 - DNA, 201 bp, Homo sapiens
caggccttgttaaaaagaacagaatgttccatcatatttcaaaatacagttgtctgttggtattcatggggcattggttctaggaccccctgcagataccrtaatccacaaatgctcaagtcccttatataaagtgtcatatttgtgtctaacctatgtacatcctcccatatactttaaataatatatagattacttata

SEQ ID NO: 353768 - DNA, 201 bp, Homo sapiens
ctggtcttgaactcctgacctcaaatgatccacccacctcggcctcccaaagtgctggaattacaggtgtgagccactgcacccatcctgtgatttttttwtatttcagagacatcctttgtaatgcttcctctttcatttctgatttttagtcttctctctctttctcttagactacctgggagtttgtcagttttattt

SEQ ID NO: 353769 - DNA, 201 bp, Homo sapiens
tttcccaagcttgtctcgaactcctgagctcaagtgatccacccggctctggatcacaggcatgagccaccatgcctggcctggtgtcttactaggtcacrtgcacccaaagtccactggctgcaagcccagcacagcaccgggacttgcctagggattgcagtccttgtggccaagactgcctttcaagtttatttagga

SEQ ID NO: 353770 - DNA, 201 bp, Homo sapiens
ttacacttttttagttgtcccacagttcttggatattcttttccatttcttcagtgttttttttttcctttgcttttctgttttggaagtttgtattgatrtatcctcaagcacagagattcttccctcagctgtgtccagtctcctaatgagcccaccaaaagcgttcttcaattctgatctctttatttcttttttaat

SEQ ID NO: 353771 - DNA, 201 bp, Homo sapiens
gagattgcgtaggttgcagtgagccgagattgcgtcactgcacactccagcctggtgacagagcgagactcccatctcaaaaaaaaaaaaaaaaaaaaaaagggtaaacggcatacacatatagggcacttaccatgattggagcttgcagaattggcagttgctctgggtaagtcagtgagtgaatagtgaatgaatgtg

SEQ ID NO: 353772 - DNA, 201 bp, Homo sapiens
gaaaaggtaagggcaaaggacctcaactctgtatctttgattttctgcagtttgaacatgatgtacttgggtataattttttggccttttatcttagttgktgttctctgagcttcctggatgtgtggttttgtatccaacattaattttggggaaattctgtcatactgtttcagatatttcttacgttcagttccttct

SEQ ID NO: 353773 - DNA, 201 bp, Homo sapiens
attttcaaaagcaaactattttggcatttaaaaaagcttgaaaatagacatctgaaacctaatattgttaatgtaacacattttaaacatttatttatttrtttatatttatttttgagacagagtctcactctgtcacccaagctggagtgcagtagtgggatcttagctcactgcaacctccacctcctgtgttcaagt

SEQ ID NO: 353774 - DNA, 201 bp, Homo sapiens
agagctcctttgtatgttacttgtttcttttctcttgcttcttttaggatcctttatctttgacatttaggaatttggtaattaaatgtctcgaggtagtmttatttcggttaaatctgtaacctctctgtgcttttgaattgtgatattgttgtctaggtttggaaaattctctgttattatccctttgaatcagccttc

SEQ ID NO: 353775 - DNA, 201 bp, Homo sapiens; identical to SEQ ID NO: 75795

SEQ ID NO: 353776 - DNA, 201 bp, Homo sapiens
gtaatgtgattcctccagttttgttcttgttgcctggactattctgggtcttttgtggtttcatgtaaattttaggatttctgtgaagaatgtcatcttcytttttttttttttttttttttttaagacagagtcttgctctgtcaccaggctggagtgcagtggtgcaatctctgctcactgcaacctctgccttccagg

SEQ ID NO: 353777 - DNA, 201 bp, Homo sapiens
catgtattgagtatgtgctttgttccacgcattgaattaaggaggcagctgcactcttcctggtgacgaagcaggtgggactggtcatggctcggggctayaaaagtggtgccagcgaggagtaaagaggcttctggagtactggggcatgcctgttcagcctaagaacattccgatgccataaaaactaaaaatgaaaag

SEQ ID NO: 353778 - DNA, 201 bp, Homo sapiens
cctcctgaagtgctaggattagaggtgtgagccacctcaccttgcgtaaactttattttagaaacttactgagtccacagataagtgctttagtgtttttmtttgttttttgttttgtcttcatatatatatataatttttttttttttttttgctatatccttaggtcagatactggtcatctacctgggctttttaaac

SEQ ID NO: 353779 - DNA, 201 bp, Homo sapiens
gcccgccaccgcgcccagctaattttttgtatttttagtagagacggggtttcgccgcataccttgtgacttctatgtcagtgtttactattattattaawtatattattgagagtttattttttgagtcctattgagatatggattgtcatcaaacttttatagtttttatttaaagcttttcactgatgatttaggtct

SEQ ID NO: 353780 - DNA, 201 bp, Homo sapiens
tctcagattattgccaaatgtgttcaaatgtggacaatatcttcattttagtttccctccttgcatttaatagcagaaccaccataacttcaaaataccartttaaacaaattggaatttttgtctcatcactaaagtttattttatttatttattttttccttgttatagagacagggtctcatgctgttgcccaggctg

SEQ ID NO: 353781 - DNA, 201 bp, Homo sapiens
agaagtttagagatagggtagctccattgtgacctggagaatgttaaaaaaaaaaaaaaagcaaataataacattacatatatactcacaaattatatagkgttttttttttttttttttttttttttaccagagatgatgtacttcacactttacatatactaactcatataatcttcaaaacaacctttgaggtaggta

SEQ ID NO: 353782 - DNA, 201 bp, Homo sapiens
ggtcacagctcactgctgggagaattaagtgtgttcattgcaactcaactggaagggagcacccggacgcttgctcctaatttcccctggactttttgtgmctttctcctttgctgattgtgcttagtatctttttgctataataaatcataacgatgagtacaactgtatattgaatcttttgaatcttcttagcaaatt

SEQ ID NO: 353783 - DNA, 201 bp, Homo sapiens
gcagtgaggactgggaatgccttgccagcttcaagtttagttttcagtatttaaagtgttatctacaggtaattctagctttgatttttgtttttttttttcacttctctattctttcacatgctctgaatagggcatcttgtgttggacatcaggagtagcctgaacttggctgagtagggctcctagaaaacatcgctg

SEQ ID NO: 353784 - DNA, 201 bp, Homo sapiens
agaagtactgtcttgattgtagatgtttttatatgggcttgggcttgtaagtgatcctcttgaatggcaccattttaccttctacaattgtttgattcctrtctaattttataactttatttggattttaagtaatggataagctgcgctttactatgcagaatttgatagcttattttggtgtttgtctcaggggacacc

SEQ ID NO: 353785 - DNA, 201 bp, Homo sapiens
aatagaattttgtgatatgtttgtgccatagtttgtttaaccattcatctgttgaaggacctctggactgtttgtagttttttagtattaaaaataaagctgctgttaacatttttgtatagatttttgtgtggatgtaggtttttatttctctgataagtgcccagtagtgcagtttgctgggttgtatggtgattgcat

SEQ ID NO: 353786 - DNA, 201 bp, Homo sapiens
atacttcggtcaaaataaacacataatagataactggtgatttaaattggatctagaaaactcaggtttgatgaaaaagtcttttattattctttaacccstcttagaatttgggctctaaaatcagggattgctaaatctattgtgtgttctgtttgctgttaccaacattcaaatgtaattcacactgaccgtgtgcag

SEQ ID NO: 353787 - DNA, 201 bp, Homo sapiens
tagatgaaccaggaaggagttaatactggctcttacttccagataatgcagaagggtgatgctgttctccagcactccatcagtgcaatctactggccaaygacaaggtggttaaaatgtcctttagtaggtatgaagacgtgatctgcttcttcagacacttatgcctgattagtgatgtagtttatgttagtgtctttg

SEQ ID NO: 353788 - DNA, 201 bp, Homo sapiens
gcttggtgctccacaccactgtgacttagctggcaaccaaactgtaagacaaagtccccgttattcttccctttcctttcctcaagcagaaggtgatatgrtttgggtatttgtcacacccaaatctcatgttgagatgttgtattccccagtgttggaggtggggcctggtgggaggtttgtgggtcacaggaatggatt

SEQ ID NO: 353789 - DNA, 201 bp, Homo sapiens
aatcactatatatcacagttaattttgctaccaccatttacaagaatataggtaaaacattggtctctacccgctgggaatctaaaaaattgtatgtgctragtgtcagtcacatggtcaacatgctgaagcacacccagctcaggttaaggtgctagatgaaccaggaaggagttaatactggctcttacttccagataa

SEQ ID NO: 353790 - DNA, 201 bp, Homo sapiens
ttaatgtcagtcttgtttcagacaaattttagaagaattaactatgtccatttttatgggtaatgtttgtacttgctggggtatttaaggttttttttttkttgttgttgttgtttttttgttttttttctttttttaagataggaaatgttcctttttttttgaaatggaatttcaatcatgtcacccaggctggagtgc

SEQ ID NO: 353791 - DNA, 201 bp, Homo sapiens
tccagcattttggcaatcttggtttctgtttggtcacttgttttacctttagagcattcagggaatagtctagagtgatttctaacattagcacaatcacyatatatcacagttaattttgctaccaccatttacaagaatataggtaaaacattggtctctacccgctgggaatctaaaaaattgtatgtgctaagtgtc

SEQ ID NO: 353792 - DNA, 201 bp, Homo sapiens; identical to SEQ ID NO: 75798

SEQ ID NO: 353793 - DNA, 201 bp, Homo sapiens
atgatccccttaacttgggggatccacagagatattatatttcagtgtaattgggtttttttctgtaattatgtgtgttttatgcattgaaaataattatmagaaaggagtcttcaggctttacctgagtaccagaggagctcatgtcactaaagaggttaagaacccctttaagaatttccatttcagtggaatatgatg

SEQ ID NO: 353794 - DNA, 201 bp, Homo sapiens
taaacaacacattttcagtggagactaaacagccttctgttggaagaagatgccattgaggacgttcatactggagaagtgaagtcaatgcctggcttcarcgcttcaagacaggctgactttcttgttaggaaaatgcagctggtgactttaagttgaagctaatgtttatttactattttgaaaatcctacggccctta

SEQ ID NO: 353795 - DNA, 201 bp, Homo sapiens
ctcctgagtagctggaactacacatgcacactaccatgcccagctaatttttttttttttttgtaaagatgggcttgctatattgcccaggctgttcttcractcccaggcttaagtaatcctcctgccttaccctctcaaagtgctagaattacacatatgagccactgttcccagcctggttcatgaagtttaagaaaa

SEQ ID NO: 353796 - DNA, 201 bp, Homo sapiens
aataagacatgtgagttgatgttacaaatcaagtcttgtgttttaatataaaggaattccaagtaataataaaaattaaggagaaaactttaaatggcttmttgagtagaaaataaaaagggttctttgatcaacgtgaaaatttagaaagctttaaggagttttgccattaaggagagaatcacttcatatcatggacgc

SEQ ID NO: 353797 - DNA, 201 bp, Homo sapiens
ttagtaatttctttgaatgtaataatactctgtaatttcaaaagttgtcataaaactaaacttgggaaaaaatacccttatcatttgaaaggaacattctmtttgggacagttctgcacaatgaattattctgcccaaaatgccagtagtgccctgtttgagaaatattgacctaatatactgatgatgatgatttttaca

SEQ ID NO: 353798 - DNA, 201 bp, Homo sapiens
ctacagctattagtggtcactccctgtttctcctttccacagctcctggcaaccactaatctttctgtctctgtagatttacctattctagacattttatrtaaacattattcaagatatggtctttcgtagtggtttctttcacttagcatagtcttttcaaggcttatccatgtttgtagcatgtaaaagtactgcatt

SEQ ID NO: 353799 - DNA, 201 bp, Homo sapiens
tggttactgcaggactaactttcccaaaagatcctttttattatgctattatcctacttgaagaatctacaggttttctttttctttttttggggggggggtgggtggggaaggagttttgctcttgttgcccaggctggagtgcaatggcctgatctccgctcactgcaacctctgcctcccgggttcaagcgattctcc

SEQ ID NO: 353800 - DNA, 201 bp, Homo sapiens
tgaaagtgctttatatattctagatactagtcgtttgtcagatatgtgcaaatactttttcctactttgtagcttaactttacatcctcttcacatggtcwtgcatagaagaaaagttagttttgaagaggttcaatttattaattttttttatggactgtatttttagcaagtctaagtacaatttgcctaaccctagat

SEQ ID NO: 353801 - DNA, 201 bp, Homo sapiens; identical to SEQ ID NO: 75792

SEQ ID NO: 353802 - DNA, 201 bp, Homo sapiens
atagggtagctccattgtgacctggagaatgttaaaaaaaaaaaaaaagcaaataataacattacatatatactcacaaattatatagtgttttttttttktttttttttttttttaccagagatgatgtacttcacactttacatatactaactcatataatcttcaaaacaacctttgaggtaggtaatattattaccc

SEQ ID NO: 353803 - DNA, 201 bp, Homo sapiens
gaattttctaacaaatataactgcacacagttggagtagacagcaagaaggaaacattctattacttaaagtgtttaaggagtggcaggatggccttgtcrgtaaaagggaggggagtgacaggtatagcgttcttattgtgccaggtacttatgtatttcacgccctttaatttcaaaggccccaaccctacaaggtata

SEQ ID NO: 353804 - DNA, 201 bp, Homo sapiens
gtgaaacttcagtctgatgggtctgttgttcttgtaattctgctgatctcgaggtttttcctgattgggcagagccctggtatcagagctgagatggaaaycattggtctctgactcatcagtttaaaacttgggctgcatgttgtctcccctccttttgttcttcacagttcttctttgtcttttttgtttgtttgtttg

SEQ ID NO: 353805 - DNA, 201 bp, Homo sapiens
aaatacaaaaaccattagccaggcatggtggcaggcacctgtaatccctacgtgggaggcggaggcaagagaattgcttgaacctgggaggcggagaggcrgaggttgcagtgagccgagatcgcgccactgtactccagcctgggtgacagaacaagactccgtctcagggaaaaacaaaaacaaaaacaaaacatatag

SEQ ID NO: 353806 - DNA, 201 bp, Homo sapiens
tctatagttcagattaagtccaatgtttctttgttaattttctgtctggatgatctaatgctgaaagtggggtgttgaaatctccagctattaacttgggktatatctttgtctttagctctaataatatttgctttatatatttgggttttacagtgttgggtgcatatatatttacaattgttatatcatcttgctgag

SEQ ID NO: 353807 - DNA, 201 bp, Homo sapiens
gaagtgtgtttcttgtaggtaacagttcattggatgttgcttttttatccgtttagccactctttgtcttttgattggagagtttaattcatttatattcmatgttattgatatgtaaggacttaatactgccattttgttatttgttttctggttgttttgtggtcttctcttcctttattcctttttttttttttgaga

SEQ ID NO: 353808 - DNA, 201 bp, Homo sapiens
attctagtagttttttggtagggtctttagttttttctaaatataagatcatattacctacagacaagtatactttgactttttcctttccaaattggatkccctttctttctcttgtctgattgctctagctagacattgtttgactattatgctgaataacagtagtgacagtgggcatccttgtcttgttccaggtct

SEQ ID NO: 353809 - DNA, 201 bp, Homo sapiens
agtgcagttatttgctttcggttccagttcttcgactgttgttatctgtttgagaaagtcagattcttgcatccctggctgggatccacgacgcttaaatmcagcttttggattggacaaaatgacttgaagacttacagcaaatcctttgtgaaaaataaaaaaaaaaaagagactttaaaatcctggtgtacttctctt

SEQ ID NO: 353810 - DNA, 201 bp, Homo sapiens
gccaaagctttataacttgatgtgatcccatttgtccatttttgctttggttgcctgtgtttgtggggtactactcaagaaatttttgcctgggcagagtktccccaatgttttagtagtttcatagtttgaggtcttagatttaagcctttaatctattttgacttgaattttgaatatggtgagagatacgagtcaagt

SEQ ID NO: 353811 - DNA, 201 bp, Homo sapiens
tgttattttggaaaattcacagcaacatacagataataataccagatgttagtattgtattcaactccagaagattgtatacttaacatagttaactttcrcaaactcagtatttgtaaaaccatcgtagtattctacataggaataccttgttttattgcatgttgctttatttgcactgtacagatattactttttttt

SEQ ID NO: 353812 - DNA, 201 bp, Homo sapiens
gttcttctaccctaatgctttatttttatatctttgaaaaacactatgtaccaaacataccaactttggcttcttataatttttaaaaaatgtatacttcytagagataagttctgaaaggatttcttattgtaaacagaagtgagactctcaactgcatttgaattatttatataaaatacattaaatataaattaagat

SEQ ID NO: 353813 - DNA, 201 bp, Homo sapiens
tgttgagccctgtaaaatatttggtgaacagtagtatctttcgtctaaacttcatgtagagattaaaatccagacatatttggccaggtatggtggttcaygcctgtaatcccagcactttgggaggctgaggtgggtggatcacctgaggccaggagttcaacaccagcctggccaacatggtgaaaccccatctctcct

SEQ ID NO: 353814 - DNA, 201 bp, Homo sapiens
aggaaggttctagtaagttcttctaccctaatgctttatttttatatctttgaaaaacactatgtaccaaacataccaactttggcttcttataatttttwaaaaatgtatacttcctagagataagttctgaaaggatttcttattgtaaacagaagtgagactctcaactgcatttgaattatttatataaaatacatt

SEQ ID NO: 353815 - DNA, 201 bp, Homo sapiens
atttaaaatttttctacgatgttacttttaaaatatcaactttattgatattttaattcatatatcatgtcatccatgtcactcattaaaatgtatagttcagtggcttctcttatatcagcagttgcgtagccatcaccgctgtcagttttagaacactttcatcacccccaaaagaaaccctacagctattagtggtca

SEQ ID NO: 353816 - DNA, 201 bp, Homo sapiens
gaattaagcagaggattcttggataggacacaaaattatattccataaagttaaaattgagaaaatgaacttcattaaaattaaaaacttttgcttttcargagacacttaaaaatcatagatggctgggaaaaatattttatctggtaaggacctttattcagaatatctaaagaaataatgcaacttaataataagaca

SEQ ID NO: 353817 - DNA, 201 bp, Homo sapiens
tagaaatgaaaaaaagtattttcatgtatgagtcttaattctttgatagttgtctcagtttaaaattctatatattgtaaattataatctatgtacattgktttatttcttcaccttttaattgtccatagtacttgatatagatatgtataatacatatcaatatatttcttttaatggttgtgataatgtgatatcact

SEQ ID NO: 353818 - DNA, 201 bp, Homo sapiens
acttttcaatatagtaacttgattgagtcaagattatatttatcctatgtaaccttttcaggtgatgagtttttacaaagtccgtgcctggttcttgtaayacttgttttcctagtaacttgattgtgtgtggttatttgggagttctgcactgtgtttaggctcagttgcttgctcattgactgcactagcaaaacactg

SEQ ID NO: 353819 - DNA, 201 bp, Homo sapiens
ctcttgcccattcaattttgggtagtcagaaacataaggttttttaactctagagattgttttgtttagcctgtctgatattgagagggtaagctcattgytgagatcaaacactcgtttctttgttccgcagatcttgacttgaagacacactgttagatattgtattaggtaagagagctaaaaaaatttgtaagacct

SEQ ID NO: 353820 - DNA, 201 bp, Homo sapiens
agatcttccatttcttttcaagtttatttatctcattgtatttgtagctgtcgtaatgggattactttcttgattgctttttctcattgtttgctcttgaygtagaaatgctactgatttttgtatattgattgtgtatcctgcaaccttactgaatttgtttattctagtagttttttggtagggtctttagttttttct

SEQ ID NO: 353821 - DNA, 201 bp, Homo sapiens
ttgtgtatcctgcaaccttactgaatttgtttattctagtagttttttggtagggtctttagttttttctaaatataagatcatattacctacagacaagkatactttgactttttcctttccaaattggatgccctttctttctcttgtctgattgctctagctagacattgtttgactattatgctgaataacagtagt

SEQ ID NO: 353822 - DNA, 201 bp, Homo sapiens
gatgtttatttcattttgtgtctatagtaaagtcagtttttaatctatactttctaaaatgttgattttaaagtgtttttaaagtatcatttctcttgttrataaaatttgccagtataattccatagtttgttttatttttttttcagtggagggagcctgggtaaagataaaataaaaaaccacctgtagcctaaaaat

SEQ ID NO: 353823 - DNA, 201 bp, Homo sapiens
tctagtaaattgcatcaaacttttcatgtactgtatttcaaagttatttcctagttaactcaattttctttctttcaaagaagcttcttccactgatcttkgagaatatgtaccaaaactaaagcttaggatttgaggtgcctgtattatcttgccttatcatagttggtagaggtatgtcaattgggttttgacattttc

SEQ ID NO: 353824 - DNA, 201 bp, Homo sapiens
ggttttgtctggccttttgttggtttacttgttttgagaagtgaaggaagtgggagagaagagaatggtatcaagagtacaagggtgcagcttgaagggcrtgaactccacagtataatttacaaggattatttttttcttgttgctactaaatctagaagaatattaaaatgatcttgtaaataatttcattgttttatc

SEQ ID NO: 353825 - DNA, 201 bp, Homo sapiens
cacgggtttgagcaggtgccagggtagcgatgctcggaccctccacagggctgggggtaggagcgaggctgggagcgcggaaccgggcacgggtctgggcrgagcttagggttagagagttgccctcctagctctgctcatagctatctctgtgggtggggccgcgcttaggtctggatcccctcctctaccctccggtgt

SEQ ID NO: 353826 - DNA, 201 bp, Homo sapiens
tcaattcccataaggtgtgaaccagacatcccctcatattataaaatcctatttctacctaagttagagctgagatagaacatttctatttcaggtgctgwgttctgacttttctctagctgcacagacaaaggctcttagagaggttcatgctcccactcttcttccttttacacttcccattgatgttcctccagcatt

SEQ ID NO: 353827 - DNA, 201 bp, Homo sapiens
agtcaaaaatggtaatgaaaaacagccatttgccacattcttatctgccttaaactagattagtaatacataaaatctcatgttgctctttgacattttttcttatttgtgcaaatagattatgatcagctaatgcctctgacattcaagtaaaggatgaattcaattaatatttattgagcaccagcagagttcatggaa

SEQ ID NO: 353828 - DNA, 201 bp, Homo sapiens
cgtcttgattttcagaaggaaaatgtagtggattatgaatgctgtatcattaagcttgacatggattctatgcaaaattcaaaaggattttttttttttttaacaacttacttcttttccatagtcttaccagcactcactggttgcctgccatggattctttaagaacagttcctggctggcatggtgtctcacacctgt

SEQ ID NO: 353829 - DNA, 201 bp, Homo sapiens
agttatatcaggttgataccattattattctcctttatgatgagaacctgagagacagaagtttggcaatttattcatggtcacacagctattgagtagtggctgtgctgagaattgaatatgatcagtctgccttcagaatatgtatccttaaccaatatgctatatggcttttcagtctatttctataacatccaaaaa

SEQ ID NO: 353830 - DNA, 201 bp, Homo sapiens
caaccccctactcttcccagtttctggtaatcatcattctactctctatctccatgagttcaattgttttaatttttagctcctataaaagagtgagaatstgagaagtttgtctttctgtgcctgacatttcacttaacataatatcctctagttccatccatgttgttgcagatgacaggacctcattcgtttttattg

SEQ ID NO: 353831 - DNA, 201 bp, Homo sapiens
tatatatatatatatatatttttgaatttgatttgctatgattttacatattgtcatgaagggtgttgaactgtaggttttatttcttgtgatatctttgkctggtttggtatcagaataattttaggctcaccaaatgaattagatagtattctcctcctcccccttccccccttccccactgtttttttttcccctcaa

SEQ ID NO: 353832 - DNA, 201 bp, Homo sapiens
ctcatttatttgttttcatagcttttttcgtggattctattaggtctcctacctagacaattatcatcctcgaataaaggcaatttttgcttttttccaawttgaataccttttatttcctttttcttattttattgcactgactagaacctttagtaaaaatagaagtggtgaaactggacttgcttgttttgttcctga

SEQ ID NO: 353833 - DNA, 201 bp, Homo sapiens
gtgagatcagtcaaggcttcctttgaatatagttgtccttcagtacccgtgggagatttgctccaggaccccacccctgctgacacacacacacacacacmtaccaaaatctgtggatattcaagtcccttatttaaaatgacatgatttgcatataacttattgcacatcctcccatatactttaaatcatctctagatt

SEQ ID NO: 353834 - DNA, 201 bp, Homo sapiens
aagtagaataaaaattccaggaaggaaagtggagaagcagtgacgctataagagaagaccactgcttttgataatacatacttaccagcatcaatacatttatttcaagatacggcaagtatttgggtatttaaggagataatgtagatgaataatgatttaaaaaaaattagttgggaaagaaatgaaaacaaccatcaa

SEQ ID NO: 353835 - DNA, 201 bp, Homo sapiens
gttcttcacatggtgccattgccaattccagggaggtcaatgcttcagtgagtggtgattgctccactgtactccagcctgggcaagagtgaggctctgtytcaaaccccaacagaacaaaacaaaaattagctgggcatggcggtgcatgcctatagttccagctacttgggaggctgaggtagaaggatcacctgagcc

SEQ ID NO: 353836 - DNA, 201 bp, Homo sapiens
ctatcttctttgagaatgtcaacatataatgcaaaactatggtaaaaatttccttcgaaaatctttagattgtttatgatgacagtttacagacacatgtmcccctaataatccatttggctgttctttgccctctagtactgaatagaattcaggaatcagtaactacaggcccatgagctagctgcctgtttttgtaaa

SEQ ID NO: 353837 - DNA, 201 bp, Homo sapiens
gtaaatcattgtaactctgggtagggaatgggcacctgtttctgcctgagaacaccaggaaacatttctcaaactggttatagcagttgagttttccgggygcaccattgagacccgtgttgaagtcctaggcttactgtgcagattccctccaggtgaggtaaggattaaactgagatactttattgatcagagtatctg

SEQ ID NO: 353838 - DNA, 201 bp, Homo sapiens
gctaaaacttaaataacactatgtaccatctactattttagttgtttagatactattggcttatttaattcttataataatcctatgagatgatactggtwttatccccattttaaaggtgatgaaaccgaggcaccaaagtatataaaaataaaactaaattcatacgttaaattcttactgttagatactatactaagt

SEQ ID NO: 353839 - DNA, 201 bp, Homo sapiens
ggaggtaggtcaatggtcatgtaaatcattgtaactctgggtagggaatgggcacctgtttctgcctgagaacaccaggaaacatttctcaaactggttayagcagttgagttttccgggtgcaccattgagacccgtgttgaagtcctaggcttactgtgcagattccctccaggtgaggtaaggattaaactgagatac

SEQ ID NO: 353840 - DNA, 201 bp, Homo sapiens
catgccattgcaccaggctttccttggtatttcttaaacatacattaaacatttcttaaggaatccctcaatgtataccttaaatgtgaagaagccatatygttcttcaaggcctttgtgtttattgttccctttaccttaattgtgcttattgttccctttgccttgattactctttccccagatagctgcatggtttgt

SEQ ID NO: 353841 - DNA, 201 bp, Homo sapiens
aatcagaggaattgcttggcctatggtaattttatttttaaatttttgaagaatctgcatactcctttccataatagctgtaccaatttacattcataccwatagtatataagggtttctttttctctacacctttctaacacttgttatctcttgtcttcttgataatagccttcttaacaggtgtgaagtgatattaca

SEQ ID NO: 353842 - DNA, 201 bp, Homo sapiens
tagctttaagattacttaaaaaggaatattttaaagaacttttttcttaataaaatattatataatgaaatatgtttaatattaagaaactcccaaacatyctattgagtgtatttgctaggagaaaccttttggaaatgtaaaataacttttgtccaaatactatttatgaaacttctatttaaacttttgggttgaaat

SEQ ID NO: 353843 - DNA, 201 bp, Homo sapiens
tttagtagagctggggtttcatcatgttggccaggctggtctcaaactcctgacttaggtgatcctctgcctcagcttcccaaactgttgggattacaggyatgagccgccacgctggggccattatgatcttttcattgaactcttggcattttcttgccagtttaagagagaattttctaacaaatataactgcacaca

SEQ ID NO: 353844 - DNA, 201 bp, Homo sapiens
ctccttgaggtgtatagttaggttgtttattttgagattttttttaatgcagacatttatcactacaaaatttcctcttattactgcttttgctgtatcaygtaagttttggtttgttctctttttgtttttgtttatcctgagatatttaaaaaattctcttttgacttactgtttgacctagtggttgttcaatagtgc

SEQ ID NO: 353845 - DNA, 201 bp, Homo sapiens
cttaaatttgtttagacttgttttgtgacctaatgtgatctgtcctggaaaatattttatgtacacttgaaaagaatgtatattcttctgttgagtagaamgttctgtataggcttgtcaagtttatttggtgtgtagtgttgttcaagccccgtttctttattaatttttttgtctggatgtcctatctattgttgaaaa

SEQ ID NO: 353846 - DNA, 201 bp, Homo sapiens; identical to SEQ ID NO: 75794

SEQ ID NO: 353847 - DNA, 201 bp, Homo sapiens
ttgtttagacttgttttgtgacctaatgtgatctgtcctggaaaatattttatgtacacttgaaaagaatgtatattcttctgttgagtagaacgttctgyataggcttgtcaagtttatttggtgtgtagtgttgttcaagccccgtttctttattaatttttttgtctggatgtcctatctattgttgaaaatggggta

SEQ ID NO: 353848 - DNA, 201 bp, Homo sapiens
tagagttgtttttagtacttttatcttttaggttttgtactgggattataattaacttcacaccactgttatagtaataaaatattctttttattttgccygtatatttaactttactaacaagttttgtactttttttggtataaaaaacaaaaaaaacattatgttgttgttttgcatcttttcatttcaacttgaata

SEQ ID NO: 353849 - DNA, 201 bp, Homo sapiens
cagtttgtttatgcattgctctgttgagctcagtgatcatctttatgaccattttttaaaattccttgttgggtaaattgcatatcatcatttccttaggrtcagtttctgaaaatttacctggttcttttatctggaacatatttctctgtttctttattgccctcactcttggtttggcttctgtgcattagataagac

SEQ ID NO: 353850 - DNA, 201 bp, Homo sapiens
tagttatatcaggttgataccattattattctcctttatgatgagaacctgagagacagaagtttggcaatttattcatggtcacacagctattgagtagtggctgtgctgagaattgaatatgatcagtctgccttcagaatatgtatccttaaccaatatgctatatggcttttcagtctatttctataacatccaaaa

SEQ ID NO: 353851 - DNA, 201 bp, Homo sapiens
ttgtcctttatatatgtgtacaaacacacccatttcccccctgaacttatagccaaaatgctcctatatccctgaatatttcagcgtttgtctcctgtatyagtcggttttcacgctgctgttaaagacgtacccgagactgggaagaaaaagaggtttaactggacttacagttcatatggtcggggaggccttagaatc

SEQ ID NO: 353852 - DNA, 201 bp, Homo sapiens
tactaaaaaattacaaaaaaaaaaaaaaattagctgggcatggtggcaggcacctgtaatcccagctactcaggaggctgaggcaggagaatcacatgaamccaggaggcagaggttgcagtgagccaagattgtgccattgcactccagcctgggcaaaaagggcaaaactccatctcaaaaaaaaaagcctatttctgg

SEQ ID NO: 353853 - DNA, 201 bp, Homo sapiens
ggttgaggcgggcggattacctgaggtcaggagttcgagatgagcctggccaacatagtgaaaccccgtctctactaaaaaattacaaaaaaaaaaaaaaattagctgggcatggtggcaggcacctgtaatcccagctactcaggaggctgaggcaggagaatcacatgaacccaggaggcagaggttgcagtgagccaa

SEQ ID NO: 353854 - DNA, 201 bp, Homo sapiens
ccagactgctttggatttaaatctcaactcctccactagtagttctgtaatctggtcaggttacttaactcctctatgcctcactttcctcccctgtgtartgaggataacaatatcataaggttggggaaagggttaaatgagctaacagttcgtttaacagagtaatcactcaatgaaatgttatcccctaatacatgt

SEQ ID NO: 353855 - DNA, 201 bp, Homo sapiens
ggtagattttagtgacaggacccctttcccagaagcagtagctctccaactatattagaaaactgtattagaatatatatatatatatatattttttttttgccatattctctgcttcttaactactaaccctgctcaagccgcacattattattctactgaatagatattagttcattgtccctatgttttctcaccaca

SEQ ID NO: 353856 - DNA, 201 bp, Homo sapiens
acttccaatcggtagattttagtgacaggacccctttcccagaagcagtagctctccaactatattagaaaactgtattagaatatatatatatatatatattttttttttgccatattctctgcttcttaactactaaccctgctcaagccgcacattattattctactgaatagatattagttcattgtccctatgttt

SEQ ID NO: 353857 - DNA, 201 bp, Homo sapiens
aaaacacaaagtctaatttaggagaaaatagaaccatttatttctagtgcaggctgtttccctgtgtgtgtgtgtgtgtgtgtgtgtgtgtgtgtgtgtgkacacacttactggtttcttgcatatatgccttggtggagtattcttagtttaaaatagattgttttcattggcatagagtccctaaagtatgtattgtga

SEQ ID NO: 353858 - DNA, 201 bp, Homo sapiens
ctttccatttgcctggtaggtcttcctccatccctttattttgagcctatgtgtgtctctgcaggtgagatgggtctcctgaatacagcacgctgatggtratgggttttgactctatccagtttgccagtctgtgtcttttaattggggcatttagcccatttacgtttaagtttaatattgttatgtgtgaatgagatc

SEQ ID NO: 353859 - DNA, 201 bp, Homo sapiens
gggtggagagttctgtagatgtcttattaggtccacttggtgcagagatgagttcaagtcctggatatctttgttaaccttctgtctcgttgatctgtctracattgacagtggggtgttaaagtctcccattattgttttgtgagagcctaagtctctttgtaggtctctaaggacttgctttatgaatctgggtgctcc

SEQ ID NO: 353860 - DNA, 201 bp, Homo sapiens
tttgttctttttgcttaggattgacttggcaatgcgggctcttttttggttccatatgaactttaaagtagttttttccaattctgtgaagaaagtcattkgtagcttgatgaagatggcattaaatctataaattaccttgggcagtatggccattttcacgatattaattcttcgtatctatgagcatggaatgttctt

SEQ ID NO: 353861 - DNA, 201 bp, Homo sapiens
aggccagagagccttcgattagatgctctgcagcttcctgaagtgtaaaatgagaggcagaagttgtttcccttttatcctggggtcgtagtgctggcgartggagcaccagaaagtaagtggacatttgagtgcttactagtcctgctgattggtttggctgtttttagactgtgtccttgttgaggtagatatttcata

SEQ ID NO: 353862 - DNA, 201 bp, Homo sapiens
ctgtatggcacaggaaccattcaacagcaaagtactcctggtaatgaattttgatatctgctttcagtgacattactagaagtacatcctttgtaattatrtaataagatcaattatatatcttttattgttccatgtagtgagtgcttttgttgttgcagtttatacaactatgaagccgaaatgaatgagcattagaat

SEQ ID NO: 353863 - DNA, 201 bp, Homo sapiens
gcacctttttaaaaaagttaattgaccatgtatgtccaggagggagcacttctgaaatttattatgttccattgatctgtttgtctgcctttatgccaatrttgtacagtctttattactgtagcttcttaataagcctggaagtaagtaaggtagtgtaagtcttccaactttgttatttttttcgaagttgttatgcct

SEQ ID NO: 353864 - DNA, 201 bp, Homo sapiens
cacaggaaccattcaacagcaaagtactcctggtaatgaattttgatatctgctttcagtgacattactagaagtacatcctttgtaattatataataagrtcaattatatatcttttattgttccatgtagtgagtgcttttgttgttgcagtttatacaactatgaagccgaaatgaatgagcattagaattaaaaaat

SEQ ID NO: 353865 - DNA, 201 bp, Homo sapiens
ctgttaatagttcttttctttttattaaatagaattttgtgatatgtttgtgccatagtttgtttaaccattcatctgttgaaggacctctggactgtttrtagttttttagtattaaaaataaagctgctgttaacatttttgtatagatttttgtgtggatgtaggtttttatttctctgataagtgcccagtagtgca

SEQ ID NO: 353866 - DNA, 201 bp, Homo sapiens
caaaaatgttataaaaatagaatcatgcaatatgtaaccttctgggatcggccttactcagtgtaattctttcaagacacatccaagtttttgcgtctgtwaatagttcttttctttttattaaatagaattttgtgatatgtttgtgccatagtttgtttaaccattcatctgttgaaggacctctggactgtttgtagt

SEQ ID NO: 353867 - DNA, 201 bp, Homo sapiens
ttctcaaaagaagacatttatgcagccaaaaaacacatgaaaaaatgctcatcatcactggccatcagagaaatgcaaatcaaaaccacaatgagataccrtctcacaccagttagaatggcaatcattgaaaagtcaggaaacaacaggtgctggagaggatgtggagaaataggaacacttttacactgttgttgggac

SEQ ID NO: 353868 - DNA, 201 bp, Homo sapiens
tatcatactgaatgggcaaaaactggaagcattccctttgaaaacgggcacaagacagggatgccctctctcaccactcctattcaacatagtgttggaakttctggccagggcaattaggcaggacaaggaaataaagggtattcaattaggaaaagaggaagtcaaattgtccctgtttgcagatgacatgattgtata

SEQ ID NO: 353869 - DNA, 201 bp, Homo sapiens
attacttacgcagatttctgcaaccgggttgaatttctcctcagaaaatgagtttttctttcctatcgcatcatcagactgcaaattttccaaacttttargctccgtttcccctttaaaattgaatggttttaacagcacccaagtcacctcttgaatgctttgctgcttaggcatttcttctgccagataccctaagtc

SEQ ID NO: 353870 - DNA, 201 bp, Homo sapiens
gggcagagtgtccccaatgttttagtagtttcatagtttgaggtcttagatttaagcctttaatctattttgacttgaattttgaatatggtgagagataygagtcaagttttattcttctgcatatttatatccagttttcccagtaccatttactggagagactgctcttttacccaatgtatgttctgggcccctttg

SEQ ID NO: 353871 - DNA, 201 bp, Homo sapiens
ctcagaaaagtatgttcagtgaactattattatgaactattattaccctttcaaaaaggaggtctcagggattggtttattcttatgtagtcacactgcayaggaaagaaaatgcagttacatgaatatattggtgtaaggtaactagcaatgggcggatacttgcaagtggtcctgagtcagtagtagggcagttggtga

SEQ ID NO: 353872 - DNA, 201 bp, Homo sapiens
attaacgatcaattatattgtacccatttgtatagtaaaacaatttgtgtggccagtggaggaaatatcttttctcacacagagatataggtcattatatrtttatttccacatttggacagaaaccttttaaattataattgagaagttagtaatttgtatttggcgttttctgtttctgttcgccccactcctttctca

SEQ ID NO: 353873 - DNA, 201 bp, Homo sapiens
ttacttaagaaaaattaataaatccaattatttactttaaagctgcagaagaaagatcagcaactggagcctaaaaaaagtaccagccctaaaaaagctgyggagcccactgtggatcttttaggacttggtaagtaataaaaaataaaagtcactgctggagttacaaaacaattgaaacctttacttggagtgaatata

SEQ ID NO: 353874 - DNA, 201 bp, Homo sapiens
taggtcagcactgtttctctcttatctggccttcattgtgatcttgattgtaaatcagtagaatcccagggtatttcaaagctcaaaagaaagaaaacttstcagccctggaaacgggagcattgttcaagtggtgcactagaaaaaatggcagtactgcctacaaactatgagggaattcactgttaggaagtagtaagt

SEQ ID NO: 353875 - DNA, 201 bp, Homo sapiens
ccactgcactccagcctgggctacagagcgagactccgtctcaaaaaaaaaaaaaaaaaaaaaagaattgacacctggtaatagtaggctaattggttaarcaataattctaagggagagtgtagtgattaaaaaacaaataagggtagatatgtgttcttagaagttaacgtatctctaatagctaacaaaaaatgaact

SEQ ID NO: 353876 - DNA, 201 bp, Homo sapiens
tagtagagatggagtttggccatgttggccaggctggtcttgaattcctggccttaagttatctgcccacctaagtctcccaaagtgctgggattacaggygtgagccactgcgcccaacccacataataatcacatcaaatgccactgtctctacaaagcctccattaatattgttggctgacattaatttttacctctt

SEQ ID NO: 353877 - DNA, 201 bp, Homo sapiens
acacagtggtttcgatttgcatttatctgatgactaatgatgttgagtactttctgatatatgtattggctatttttatgccttctttggaaaaatgtctrttcaggtcctttgcccgtttttaagtaagtgtttttttggttttgttttttgctagtaagttttaaaaaaaatttagatattaatttcttaacagagaga

SEQ ID NO: 353878 - DNA, 201 bp, Homo sapiens
tgtaatttctcaaatttaaaagcaggatatttgaggataagttgcatgtgcataatcttcctcctgtgtaattaaggaatttgggggggcattatttttarttttactatattgtacttactagctttaatgttgttgtgtagagcagtgtcacctttagataaacagcatgtacttaaaacagaaggctatgtttaaaaa

SEQ ID NO: 353879 - DNA, 201 bp, Homo sapiens
ggttatggaggtacaaagcattcacgaccgaagtatcctgcttttttaatggcttatttcaaactaaggataaaacacgagatccttcaacagttcagttrttcagaaatatttttctcaattaggttgttgagaggaaatgaatagcaaattatttgagatgggcagctgtatagcttagagtagaattttgtaatcaga

SEQ ID NO: 353880 - DNA, 201 bp, Homo sapiens
gagtaaattgcaaaaattttctcccattctttaggttgcctgttcatgctgatggtagtttcttttgccatgcagaagctttttagtttaattagattccrtttgtcatttttggcttttgttgccattgcttttggtgttttaatcatgaagtccttgcccatgcctgtgtcctgaatggtattgcctaggttttcttct

SEQ ID NO: 353881 - DNA, 201 bp, Homo sapiens
tttcatttctccgacaagtccaaggctttgccttatttctgatgttctcatcagtgtcacatctccatttgttttacacagtgcattcagagtaattttcstagaacattgctttggttattttacttccatcctaagaaatttgcattgattcttctgtgagactcataaaactttttattttcattaaactggtcttca

SEQ ID NO: 353882 - DNA, 201 bp, Homo sapiens
ggtgcccatctcagccctgatgccccttgtgtgaggggagggttgacccacgaatggcagctaatgggtgggtgctggtgggagccgtgccctggccactmattcggctctctccctcaccctagaagctgatggcattccagccagcccccaaagtgattcgctgcatgaccaacacacctgtggtagtgcaggaaggcg

SEQ ID NO: 353883 - DNA, 201 bp, Homo sapiens
ctcattttttaaattttttttcagacagggtcttactctgtcgcccaagctggagtgcagtggcgcgatctcagctcactgtaacctccgcctcccacctmagcctcccacctcagcctcccgagtagctggaattacaggcatccaccacgcgcagctaatttttgtatttttggtagagaatactgttggccaggctgg

SEQ ID NO: 353884 - DNA, 201 bp, Homo sapiens
tcgtagagggttgagggggagagggagactggcactgttaggacggctctgggttttagagccagggaaagcgtggtaacgggctgggccgcgacccctakttgaaaagctctgtcttctgcaggcatcctgtcggctcacaagataatagccagctccccagaaatgaacctgcccacggtgtccgcgctcagggtaggt

SEQ ID NO: 353885 - DNA, 201 bp, Homo sapiens
tccttcttgtatctagtttggacaaattcgcgagaaacactcaagttcaagtgaataagccgcggctgaccaccctggtgccgcctcgccgccacctggtytgaacctcgccgccacctggtctgaacctacgccaggagggcctcgttcatccccgcaaatcggcaacctggagaattcctgtgggccttgaggggcatc

SEQ ID NO: 353886 - DNA, 201 bp, Homo sapiens
ggagccaccatccacgccctgcactttctagagagtgggggcttccgctctctgctcatcaatgcagttgaggcctcctgtatccgaacacggtgagtccmtcccgcggacttctgtcccagacccttcagtcctggttggtccctgggctgggttgagcaccatttgcggaacctgctgtcttgggtcccatttagcagt

SEQ ID NO: 353887 - DNA, 201 bp, Homo sapiens; identical to SEQ ID NO: 75833

SEQ ID NO: 353888 - DNA, 201 bp, Homo sapiens; identical to SEQ ID NO: 75834

SEQ ID NO: 353889 - DNA, 201 bp, Homo sapiens
caccatccacgccctgcactttctagagagtgggggcttccgctctctgctcatcaatgcagttgaggcctcctgtatccgaacacggtgagtccatcccrcggacttctgtcccagacccttcagtcctggttggtccctgggctgggttgagcaccatttgcggaacctgctgtcttgggtcccatttagcagtgttgg

SEQ ID NO: 353890 - DNA, 201 bp, Homo sapiens
acaatgggaaactgtattatttggggtaggggtagaaccctgagggcataaagctaagaattccaggctgcatctggcagaatcggtttggcaggggttcmgctgctccctgggaggccttggcatagccaggctgctccagcactgtgagctgggagtctcctcttgcagaagatgggtgtgaacctgacacgcagcaac

SEQ ID NO: 353891 - DNA, 201 bp, Homo sapiens
tcagtgcctatggcctggggcttagtgagtgtctccacaggcattcatggctctggacgcattggctgatggtggggtgaagatgggtttgccacggcgcytggcaatccaactcggggcccaggctttgctggtcagtatctttcccccgcatgttcaggaccagggtgtagaatgggggttcttgtgcatcactgaact

SEQ ID NO: 353892 - DNA, 201 bp, Homo sapiens
ccgcgctcagggtaggtggagccgggcggagtgggaagcgggtggaggcccaggaaaaggatgacctgagatgaagtgagtctggccggcccctgcgcccwagtgctggtctttggccggcggtgacctttactccaggaacgtgacaatctttccaccttctcttgggcagctcaatgtggtgggaacacccagggagac

SEQ ID NO: 353893 - DNA, 201 bp, Homo sapiens
actgcactccaacctgggcaacagagcaagagtttgtctcaaaaaaaaaatttaatacatttattgatgaggaagcacaaagtataatctcaagtttgtaracagtaaagtttttctgagcagtggaacaccaaactagtagggcagattggaggaaggtctcaaaaggtaagtggactgattataaatgaatgtgttttc

SEQ ID NO: 353894 - DNA, 201 bp, Homo sapiens
aaccttcacttcctgtgttcaagcgattcttgtgcctcagcctcccgagtagctgggactgtaggcccgtgccacaacgcccagctaagttttgtattttkggtagagatgggggtttcactatgttggccaggctggtctcgaactcctggcctcaagcaatccacccatttcagcctcccaaagtgcaggtgtgaagcc

SEQ ID NO: 353895 - DNA, 201 bp, Homo sapiens
gtatgtaagggacttgagcactcatggattttggtatccacaggaggtggagaatgtacactggaaccatgcatcccgtggataccaacagacaactgtaygctaacagaaaattatacctacattaatcaggtttccagttgacctgcctgatttttattcctaactcctctcttgcacgaaaatttatcctgctttgca

SEQ ID NO: 353896 - DNA, 201 bp, Homo sapiens
tgaaaaattgtaaataaagtgctggtcgaatatgtgcattcttatactgcacttagacttgcttctgtttatacttgcatatggtgtttatatttaaaggraatttataaatatatacatatatatacactatgtatataacattaataatatactctgtatatttattcttccatggaactactctctgaatatcctaaa

SEQ ID NO: 353897 - DNA, 201 bp, Homo sapiens
gataattagtcacatttatttatcatttgtgtgtgtgcctgtgtacacacacatcagtgcacacatgcgtgtgcctttaatacaccttatttatctttggrtcgtaggggagagggattcttttgtgttcacattctgggttatttttaataattgccttattttttgttattgggaagcagtaacaagtattgcctgaac

SEQ ID NO: 353898 - DNA, 201 bp, Homo sapiens
tgcttgtatggtattttatttatctttggaggttttagaagctttattgaaattaaatgctatttattatataatgtcttttttaatacattagagaaaasttgtcataaatcgaaatctaagtataatgagaacatgaaagttctaaagtcttagaacaagatttactagactttaacctttttgctctgttattcctgt

SEQ ID NO: 353899 - DNA, 201 bp, Homo sapiens
gaagtcctaggcttaagccattctcccacatcagccgcttgagtagctgggagtacaggcatgcaccatcacactgttaatactgttaaggcttatctcarttattcaaaaggcatgagaatccatacttttcttgcattgataaatttgggggttaatatgtgatacttttaagataatttagcaacttggtctctttaa

SEQ ID NO: 353900 - DNA, 201 bp, Homo sapiens
ttaccgctgttaaagatgataatgttaatcacgtgggaacatgagagaaggaactggtattagtagggaggattacaagttcaagacgtaaaatgatttaygtactaatttggatggagtggcctacatcaagtccaagatcactaggactgtattcttcaaatctggctgattatcagaatctgagacccaaccctgaga

SEQ ID NO: 353901 - DNA, 201 bp, Homo sapiens
attttatttatctttggaggttttagaagctttattgaaattaaatgctatttattatataatgtcttttttaatacattagagaaaagttgtcataaatygaaatctaagtataatgagaacatgaaagttctaaagtcttagaacaagatttactagactttaacctttttgctctgttattcctgttatgtctttttt

SEQ ID NO: 353902 - DNA, 201 bp, Homo sapiens
ggcttcccaaagtgctgggattacaggcatgagccaccacgcccagccagaaatcactatttttttttacattttccccagcaattgagaacatagagaarttgtaccaaagtgttgcccccctatcggacctcaagcaggcctttttcattcctagcacgattaaaaagattaagcaaggatatgtgactgattctgtac

SEQ ID NO: 353903 - DNA, 201 bp, Homo sapiens
ctctatgtgcaagcagacatcctctaacagttggtcagcccccttttggcttcagtgtcctccttacccagccaacctcatggctgatcattttaacaatrttctcattactatccttgattctttctgcctcccaccatgctttccactatatccatcccactgttccctgcttcttcagctcctgggcttctaatcact

SEQ ID NO: 353904 - DNA, 201 bp, Homo sapiens
atgaccactagaggagggtttacaaaaagatctgggttatttaaatgaggctgggggaggttgaagaggtgattggacactgtcaggttactgaggttcarttgtcatcagtgagaaccattgtctctagacttttaaaactaatcacaaacccctaatttatgaaagtgctaaatgaaattgtcagtttttcatttgaag

SEQ ID NO: 353905 - DNA, 201 bp, Homo sapiens
gtcccaggaaaacagtaaatctttaatggaactttttagcaattatgacaaaaagaatggaaaaatgtttaaacatatataaaaggctagacgtttatcgycaaatagtatctaaaggtcatagaatagttaggaattctgtcattttgttttgtgtaataaatacccccttccttaccctttcaccctaataatagatat

SEQ ID NO: 353906 - DNA, 201 bp, Homo sapiens
tttgtatgaggaaattaaggctccaggaggttttctgaaaatgccatggctagaatttacaaataaattacaaaaactttaagtaactttagcaagattayaggatacaagttactatgaaaaaatttaattgtatttctgtatgttagcgctatacatttaaaacttggaaattttctaaaataaacctttacaacagca

SEQ ID NO: 353907 - DNA, 201 bp, Homo sapiens
ctttggccaggatgtggagaaattgtaatcaaatttcttgctggtaggaatgtaaaatggtatcaccactgtggaaccgttgcagttcctcaaaaagttaratatagaattaccatatgacctaacagttctactccacttctaggtagctacccaacagaagtgaaacaagaactcaagatatacagtatttgtccacca

SEQ ID NO: 353908 - DNA, 201 bp, Homo sapiens
atacataatggagtattcttcggccataaaaaagaatgaaattctgtcatttgcaacaacatgaatggaactggaggtcattatattaagtaaaataagcsaggcacaataagacaaactttgcatgttctcacttgtttgtgggagctaaaaattaaaacagctgaactcatagagatagaaagtagaatgatggtaacc

SEQ ID NO: 353909 - DNA, 201 bp, Homo sapiens
tctgcctgtagtcccagctaccctgctcaggaggctgaggtgggaggattacctgagctcaagaggtcgaggcagcagtgaaccgtgattgtccacttackcttcagcctgggtgacagagtaagactctgtctccaaaaaaagaaaaacagaaaagaaagaattctgctgttagaactttgcttttcttagccccaaatg

SEQ ID NO: 353910 - DNA, 201 bp, Homo sapiens
aataacaatgttacacttatgagcataacattccatctatcctagaggacacaaccgctattggtccttgtttccctagaactctttagtgtggtgtagaytgaccagagggagaggaggaataaaaccagatgccatttgtgtcgttaaaatggctttttaaacaacaacaacaaaaaatttacatttacttagatttat

SEQ ID NO: 353911 - DNA, 201 bp, Homo sapiens
gaagtactctggtaaatacttagaaattcataagatctaaaacacaataatttggatacagtaattatttaataaatatctattgagtgaatgaatatctrttatctatatagatgagacaactgaaaagaagtcatgtccttgatttttttataattctctttgaaaataaaatcaattcgtaaaataattgcatcccca

SEQ ID NO: 353912 - DNA, 201 bp, Homo sapiens
ccatttatgctcagtaccaattcatagaaatcctcaaaatattgttttgatgctatagaattttgttttagttaagttgggaaatgccgggaaaatggaartatcctttcccaaaagataattatttgttgggtaaaagattttttttttttcacttttcagatcccataatagtgtgcccactaataaactcaagcattt

SEQ ID NO: 353913 - DNA, 201 bp, Homo sapiens
tattttaacagtgaacgtgatgcacttgaacaggaagtaattgagcttaggagaaaacatgaaatacttgaagcctctcacatgattcaaacaaaagaacraagtgaattatcaaaagaggtaagcttataattagagtcacttatattatatagcatagtattagtgaaaaaaatagcccagagtagatttgaaggagag

SEQ ID NO: 353914 - DNA, 201 bp, Homo sapiens
tagtcatggattagcaatatgaaatgagctttattggtataaagtaagtacttgaagtaataaaacatttatctctgccccttgagttgcctgacccattyttctgcctctaacaactgctaggagtgttcttccagcatccccagtgagctcagtctcttggaaagagtctgtggcacatacaactcacaggaccccacc

SEQ ID NO: 353915 - DNA, 201 bp, Homo sapiens
aaaaaccccagactctggcagacctctggacgatctgcctgcagagaggagctaccaactgtgggtctcctctcagctgagagctgagcagatgtagagayaacctgcctgcagagagaatctacccactgtgggtctcctctcagccaagagctgagcagacagtgggatggcctgcctgcagttaggagctacccattc

SEQ ID NO: 353916 - DNA, 201 bp, Homo sapiens
gtgtgccatttttcaaacgagtgaaaatggctttttactcaaagacttttcttttctacaaaggaaaggacttttctcaggcaaataaaagactcatgtawgtcccaattcaagctcaacaatttgataagtaacaaatacccagttttcatgaacatgaacagttattatgtcgtattctgttgctttgaatccctgcat

SEQ ID NO: 353917 - DNA, 201 bp, Homo sapiens
aaaaagtagaaattttaaaattcagtgtttgtagtagaataaattgaatacactgttacattcgtgggctactacatagaatactatattgggatctaaartgtaaggttgcaattcaaaattaattttaatagtgaacttttttcagttatggtttgttttatttaaaaaaatatattctatgcaaggtacagtggctca

SEQ ID NO: 353918 - DNA, 201 bp, Homo sapiens
aaatcattaaagccacacaattacacagttaatttgactctgcttttgtttgtatgagattaaaactgtttaagaaatttaatagaaggtttttttttggtttttttttttttttttttggagatggagttttgctcttgcccaggctggagtgcaatggcatgattttggctcactgcaacctctgcctcctgggttcaa

SEQ ID NO: 353919 - DNA, 201 bp, Homo sapiens
ttcctcattcttgagttttgctgggcatagtggctcacgcctgtaatcccactttgggaggctataatcgcagcacttttggggctgaggcgggtggattscttgagtccaggagttcaagactgctctggacaccatggcaaaaccctttctctactaaaatacaaaaaactaactgagcatggtggcatgcctgtagac

SEQ ID NO: 353920 - DNA, 201 bp, Homo sapiens
gaagttaattgaacattaaggcttgatagaaagtattagtggctagggtccattaatgactgtcttgttgtagttttgtaaatatttatctttattactgrtaagtgagagcactacaaattacaaattttaattgtaatttggatttaagactgcttattaatttaatttttttcaaggttcgcttctatgagctagtga

SEQ ID NO: 353921 - DNA, 201 bp, Homo sapiens
cctctcccagctttctttttatcaaaccagactgaaaaactctcaactctttatttttctagctgagcactactggcaaaaatcacacaagcagtaacaarcactgtcagtttattgttatcagcctcaaatggacccacacaattggtcgtaattctattatttctagttctctcatttttcgcagagattacttaaggc

SEQ ID NO: 353922 - DNA, 201 bp, Homo sapiens
cagctggaaaaaagcctgccttgatgaacatggcctctgatctaagactaatctgcacatctaagctgtggatcccatctcctaaagcccttttcaggagtatatgcttcattcccctgagtatgcccccttttctccaacagtaattcatcttttgctgttgtttctcaccaatatttgaatattgtcaagcttgtttca

SEQ ID NO: 353923 - DNA, 201 bp, Homo sapiens
gtaccaaagtgttgcccccctatcggacctcaagcaggcctttttcattcctagcacgattaaaaagattaagcaaggatatgtgactgattctgtacaamctaccaccactgctagaaagtatcacttgcatatattttatagacagaaagcaactcaatgttaaattccactcagcagtattcattttattcctggcaa

SEQ ID NO: 353924 - DNA, 201 bp, Homo sapiens
gaaagcctagaagcagggagatcacgtaggaggctgttgcacagcttaggtgatgaaaataagtagaaagagaaaatgatggatgaatttaaagaatacgyaggagaattggcaagatctggtgattgacaggaagtgaacctcaggaacgaccccaacttttctacctcagtagtgtcagagtgattggtgataaggcat

SEQ ID NO: 353925 - DNA, 201 bp, Homo sapiens
agctggaaaaaagcctgccttgatgaacatggcctctgatctaagactaatctgcacatctaagctgtggatcccatctcctaaagcccttttcaggagtatatgcttcattcccctgagtatgcccccttttctccaacagtaattcatcttttgctgttgtttctcaccaatatttgaatattgtcaagcttgtttcat

SEQ ID NO: 353926 - DNA, 201 bp, Homo sapiens
ctttgagggaactcttggctttggggaagatttagtgatttttttaaggtctattctatatgataatactaagataataccttattttattttattttatyttattttattttattttttgattttgacatttctgctttctgtttgcatacatttaagtggtgtaattttcccatgtgcctttattttaaaactttgtca

SEQ ID NO: 353927 - DNA, 201 bp, Homo sapiens
ctgaggtcaggagttcgagactagcctggccaacatggcaaaaccccacctctactaaaaagacaaaaattagttggcatagtggtgggcgcctgtaatcycagctgttccagagactgaggcaggagaattgcttgaacctgggaggcagaggttgcagtcagcccaggtcacgccattgcactccagcttgggcgacaa

SEQ ID NO: 353928 - DNA, 201 bp, Homo sapiens
gaatacagtaatgagctgatgtatccattaggataatttgggttgcaaataatgcagaagggtttaaaaaatgaagtgagatatgtttgcttttttttttytttttttataaattatactttacattctggggtacatgtgcagaatatgcagttttgttacataggtatacacatgccatggtggtttgctgcacccatc

SEQ ID NO: 353929 - DNA, 201 bp, Homo sapiens
cttccttgcattgggttagaacatgctcctttagcttggaggagtttgttattacccaccttctgaagcctacttctgtcaattcatgaaactcattcacygtccagttttgttctcttgttggcgaggagttgtgatcctttggaggaaaagaggcgttctgagttttggaactttcagcctttttgcactggtgtctcc

SEQ ID NO: 353930 - DNA, 201 bp, Homo sapiens
atatgtattgtattacaatggtgaatttaactagtgtacagaggttccagtcatcattttaaaagtgtatgtcctcattagtgcttaagcaaacaaacaamcttcttttgttcatatcttaccaggtatctgtataatgttttaagttcttccatggaaaaatttaatagtaattactttgtcttttcagttagataattc

SEQ ID NO: 353931 - DNA, 201 bp, Homo sapiens
tgccctcctcggcctcctgaagtgctaggattaaaggcatgagacaccatgcccggccttaaaatttgaatcttttatatgtcttattttaccattatttyttgtgatgaggaggtatataaaaatcctgaggaaaaaaattactcctttcacagttatctccaaacaaatttatttgattatttattttactaagaatta

SEQ ID NO: 353932 - DNA, 201 bp, Homo sapiens
attataggtacagaaagatttttgaaaactctattgaaggaattaaattctaataaattatgtttatttcaaacatggaattagcatcactttttattcaragatatgtacttttttcctgacaaatgaaaatcaactttggggatttagaagcctacaaacaggtttataaagaaatgtatctgtaacactaacagcatt

SEQ ID NO: 353933 - DNA, 201 bp, Homo sapiens
accttgtgaatgaaatatgttcccccaccgttcatctctagcaagaaaagaaattgattcatttgaagaaaactataaaatcttggaacatggaagcatcrtaccttaagtaagacaagctcattaaaatagcaatttttatgattaacatattaatcaaatgtagttcagttatagtctcctttttttcctgataatttg

SEQ ID NO: 353934 - DNA, 201 bp, Homo sapiens
tataggtacagaaagatttttgaaaactctattgaaggaattaaattctaataaattatgtttatttcaaacatggaattagcatcactttttattcagaratatgtacttttttcctgacaaatgaaaatcaactttggggatttagaagcctacaaacaggtttataaagaaatgtatctgtaacactaacagcattat

SEQ ID NO: 353935 - DNA, 201 bp, Homo sapiens
aagagaagaaaagctgggtgcagtgatgtatgcctgtagtcccagatacttaggagactgaagcaggaagattgcttgagcccaggagtttgaggctgtarttcattgttaccatgtctgtgagtagccactgcactccagcctgggcaacacagcaagactccatctctttaaaaaaaagagaaagagaaagaaaagagg

SEQ ID NO: 353936 - DNA, 201 bp, Homo sapiens
ccccatctctataaaaaatataaaaattagctgagagtgatggcatgcacccatattcccaggtactcggaaggctgaggcaggactatcacttgagcccragaggttgaggctacagttagccatgatcataccactccagcctgggtaacagagcaagagcctatctcaaaaaaaaaaaaaaaaaaaaaagaaaaagaa

SEQ ID NO: 353937 - DNA, 201 bp, Homo sapiens
actgaaaaatatatgagcagttccaacacttggaatcacattactcatgagtccaaataaaaaccaaaaaactttgcgtggtggattgagaagaaaatacrtttaagcatgcaaattaaattctagcagagctgggcacagtgtcacacacctgtagtcccaggtactctggaggctaaggcaggaggatcacttgagcac

SEQ ID NO: 353938 - DNA, 201 bp, Homo sapiens
gcacagtgtcacacacctgtagtcccaggtactctggaggctaaggcaggaggatcacttgagcacaggagtttgagactatagtgcactctgatctcacstgtgaatagccactgcactccagcctgagcaatgtagtgcaaccctatcttttaaaaaagaaagaaagagaaagagggagggagggttagagggaaggag

SEQ ID NO: 353939 - DNA, 201 bp, Homo sapiens
gttactaacttttaataagacatgatccaaatttttcatatgacattattcgaaagatcttcataaagtgattcaacaaatattttattcttcaactcatrcttatttaaggttggatattttaagataaacaacattagtcttattaatgactttatgtaattttaaagttggatacaatataagctttggggaaaaaaa

SEQ ID NO: 353940 - DNA, 201 bp, Homo sapiens
ttgataaattgtgattataacctgttgattggtggtgttgaattctactatgtctttaatgattttctgcctactggatatgtccatttctaatactagcrtgttgaagtcttcaactatagtagtagattcatgtatttcttcttgcagttctatcgtgtattttgacatctgttcttggacatataaatgttaaggatt

SEQ ID NO: 353941 - DNA, 201 bp, Homo sapiens
aagtagttaaaatggctgcagtagtagttctctatttttagggtgcatcaaagtcacctgagtttttaccaacaatcagttgttaattttacttttacctyattcttctttgcacaaatgcatgcagttttggcagtttgttgggtttatattgtatttttatattggttgtttttgttttatttagatgtcactgctgtc

SEQ ID NO: 353942 - DNA, 201 bp, Homo sapiens
cacagttcatctgttcacctactgaaggacatcttgtttgcttccaggttatggcagttatgaataaatctgctataaacatccttgtgcagttgtttggrtagataagtgtttaattcctttgggcaaatatgcaaagagtgtgatcttatggtaagagtgcttagttttgtaagaaaccacgaaatgtgtcagtgtagt

SEQ ID NO: 353943 - DNA, 201 bp, Homo sapiens
catgaaagtagaaatacagatgaccaataagcacaagaaaagatgctaaacattattaatcaccaggaaaatggaaattataccaaaattcattaccactrcaaccactagaatggctagattttaaaacacggatattaccaagtgttggtaaggttgtcagttaactcaaatgtccacacagtgcttatgtgaatgcag

SEQ ID NO: 353944 - DNA, 201 bp, Homo sapiens
agcctggcaacaaagtgagaccccatctctgcacacatacaaaaaaattaaccacgcagagtgggcatgtgcctataatctcagctcctcaggaggctgargttgaaggatcccttgagccttggactttaaggctgcactgagctaagatggtgccactatgcccctgcctgagcaacagaataaaaccctgtctcttta

SEQ ID NO: 353945 - DNA, 201 bp, Homo sapiens
gtagaaaattagtttatgcgtcttcaaatagcaaagcttaattagacagtcgcatatctatcattaaaattcaaatgttttaattcacttggaccccaaaygtgaatttctcttggctagattattcatagattctctgcatgtaatgatgcctatggtttctaaaattctttttgtctaaaatcatgaagatggcagatg

SEQ ID NO: 353946 - DNA, 201 bp, Homo sapiens
gacaactctttctgagtaatactactgtatagaggaacaaagagagttggcaattacaggaaacatggagccagggaaggcttgttttttttttgtttttktgttttgttttttgttttttgtttttttccttaagagagatgacagctgttgtatttaaaatcacattgtaaccataaaaattttctcattgtcgacaac

SEQ ID NO: 353947 - DNA, 201 bp, Homo sapiens
tagcccttcaccccaacaggccccagtgtatgatgtttccctccctgtttccatgtgttctcattgttcaactcccacttatgagtgagaacattcagtgkttcggttttctgttcctgtgttagtttgctgagaatgatggagaaactctgtcttttaagagaatttgcaaacgacattccatgcttgagggctgagtat

SEQ ID NO: 353948 - DNA, 201 bp, Homo sapiens
tttttttaagtttctcgaaggctgacttcatattaggaattaatgtgtttgatttgagcattaacttaactgcaataatctgttctagatttgggatgcastaaattgcctaatatttatttaaggaatccttagtctctctttaatacagtccatgatttctgtagttaattttatagtacatttgaattaatgtttttt

SEQ ID NO: 353949 - DNA, 201 bp, Homo sapiens
tgaatttaactagtgtacagaggttccagtcatcattttaaaagtgtatgtcctcattagtgcttaagcaaacaaacaaacttcttttgttcatatcttamcaggtatctgtataatgttttaagttcttccatggaaaaatttaatagtaattactttgtcttttcagttagataattcttgaagtatatggctctgcag

SEQ ID NO: 353950 - DNA, 201 bp, Homo sapiens
atcattttaaaagtgtatgtcctcattagtgcttaagcaaacaaacaaacttcttttgttcatatcttaccaggtatctgtataatgttttaagttcttcyatggaaaaatttaatagtaattactttgtcttttcagttagataattcttgaagtatatggctctgcagataactctctcagcatcttctcaaatatttt

SEQ ID NO: 353951 - DNA, 201 bp, Homo sapiens
ctgcaacctctgcctcccgggtttaagtgattatcctgcctcagcctcccaggtagctgggattataggcatgtgccactatgcccagctaatttttgtasttttagtagagacggggtttcgccatgttggtcaggctggtctggaactcctgacctcaggtgatctacccacctcggcctcccaaagtgctggggttac

SEQ ID NO: 353952 - DNA, 201 bp, Homo sapiens
cacagttcttgttaaatgttaagttggatcactcctctactcaaataaaaaggctccccatcattaaacttagtaaaactttaaatgattacagtggcctrtgatcctacctgatcagtattcagttatcctatcctcatttaggattttcttctggtcactcgcatagtcatgctggcctcctgttcttttacctgtagg

SEQ ID NO: 353953 - DNA, 201 bp, Homo sapiens
aattaccatgcaaaagaaatggtgaacacaagctaattttgaggatattatttaaaagatttctgtagttcgctttccctgtgtttttttaggggtgtgtgtgtgtgtgtgtgtgtgtgtgtgtgtgtgtgtgtgtgtgacagtagagagacagagaatctactgaagttattttgagtatagagtgcctatgttgcctat

SEQ ID NO: 353954 - DNA, 201 bp, Homo sapiens
attaccatgcaaaagaaatggtgaacacaagctaattttgaggatattatttaaaagatttctgtagttcgctttccctgtgtttttttaggggtgtgtgtgtgtgtgtgtgtgtgtgtgtgtgtgtgtgtgtgtgtgacagtagagagacagagaatctactgaagttattttgagtatagagtgcctatgttgcctatg

SEQ ID NO: 353955 - DNA, 201 bp, Homo sapiens
ttaccatgcaaaagaaatggtgaacacaagctaattttgaggatattatttaaaagatttctgtagttcgctttccctgtgtttttttaggggtgtgtgtgtgtgtgtgtgtgtgtgtgtgtgtgtgtgtgtgtgtgacagtagagagacagagaatctactgaagttattttgagtatagagtgcctatgttgcctatgt

SEQ ID NO: 353956 - DNA, 201 bp, Homo sapiens
aaaaagaatatcctagcagaagaattaagtacaaacaaaaaccaactgaagcagctgacagaggtttgtatggttttgattgctggtgggaagaagcttcrgctttttctgtagagtccctcaggatttgtgataaggcatataaaagtcagtgattgaaaaatgggactatgggatggtgactgctacagttcaataatg

SEQ ID NO: 353957 - DNA, 201 bp, Homo sapiens
taccatgcaaaagaaatggtgaacacaagctaattttgaggatattatttaaaagatttctgtagttcgctttccctgtgtttttttaggggtgtgtgtgtgtgtgtgtgtgtgtgtgtgtgtgtgtgtgtgtgtgacagtagagagacagagaatctactgaagttattttgagtatagagtgcctatgttgcctatgtg

SEQ ID NO: 353958 - DNA, 201 bp, Homo sapiens
ccaagcaccattttcaggcactgtgattaagggtttgacaagatgaaaggctctctgtcttaatggaacttgtatttctgtgatgtaaatcagaaaatatacaaataacaataatttttagagagtagcagttatttgaaatatatgaaattgagtatgattcagggaggtttgcagtctgaaagatgagaaggaatcagt

SEQ ID NO: 353959 - DNA, 201 bp, Homo sapiens
gataatcaattgagcaaaagtgataggaaaggagatccatagcagagtcatgggaatcagctttagaccaccagtgttaccttttccattttgaagaataraaaaaagaattatgtgaaaatagaagtaagtttataggtttagtggtaagtatttagagagttcccatctaatggatgttttctaatagaaagagatgtg

SEQ ID NO: 353960 - DNA, 201 bp, Homo sapiens
caagcaccattttcaggcactgtgattaagggtttgacaagatgaaaggctctctgtcttaatggaacttgtatttctgtgatgtaaatcagaaaatatacaaataacaataatttttagagagtagcagttatttgaaatatatgaaattgagtatgattcagggaggtttgcagtctgaaagatgagaaggaatcagtc

SEQ ID NO: 353961 - DNA, 201 bp, Homo sapiens
aaattgtaagactggcattacctttatattccttacatcttctacattttgaaatactatggaaaaagccagcagtcagacagacaagacttgtattcatrtcccagctctgctacttaatagcagtgcatttttgagacaataatttcacccctctaaactcagttatctcatctgtaaataaaggtaatatctactttg

SEQ ID NO: 353962 - DNA, 201 bp, Homo sapiens
cattcttctgcctctaacaactgctaggagtgttcttccagcatccccagtgagctcagtctcttggaaagagtctgtggcacatacaactcacaggaccmcacctcaacattataaaggaggagactcacatacctaccatgtggccctaaacaatctagatctgattaaatttcaaggtcaaccatatttctaagactt

SEQ ID NO: 353963 - DNA, 201 bp, Homo sapiens
cccttaggcaatccacttcataagaagttccaacaaattgcatttttctttatgtgtgtcactctttcggttcatacttaactgttttgaaattttcttargagtatctttttacatgtttttcttatgcacctatgtagttaaattttacagtcagcatgctaaaaaaaaactactgagcgggtaaattaatttttcttt

SEQ ID NO: 353964 - DNA, 201 bp, Homo sapiens
aaaaaaatacaaaaataattagccgggcatggttggtgcatgcctgtagacccagctactcaggaggctaaggtgggaggatcgcttgagcccaggaggcggaggttgtagtaagccaagattgtgccactgcactccagcctgggcgacagagcaagacctgtctccagaaaataaaaataaaaataaaaataaattgtg

SEQ ID NO: 353965 - DNA, 201 bp, Homo sapiens
tgtgccactgcactccagcctgggcgacagagcaagacctgtctccagaaaataaaaataaaaataaaaataaattgtgatattttgaagaattgcgaaartcaaaatcatgaagtaaataaagtataagtaaaactgccaatagagggatataggaaaagttaaaccctccaaaaacttagaaaaaggtaaaaagatgga

SEQ ID NO: 353966 - DNA, 201 bp, Homo sapiens
gggagactgaagcagagaattgcttgaacctgggaggcagaggttgcagtgagccgagatcacaccactgcactccaacctgggcgacagaatgagactcygtctcaaaaaaaaaaaaaaaaagttctttctaattttgttttcccttcagcatgatcccacgcctatctccaagaatacagccagaaaaatacatcattc

SEQ ID NO: 353967 - DNA, 201 bp, Homo sapiens
cctgagcaacatagtaagacctcatctctaccaaaaatttaaaaattagctgggtgtgggggaatgcccctgtagtcctagctactcaggaggctgaggcrgtaggatggtttgaatgaactgtgatcacaccatagcactctagcatggacaacagagcaagaccctgtctctaaaaaaaaaaaaattgaagtggaattt

SEQ ID NO: 353968 - DNA, 201 bp, Homo sapiens
cactgaggcaggaggatggcttgagcccaggaggtagaggctgcagtgagccgagaccacaccactgcactccagcctgggtgacagtgagatcctatctaaaaaaaaaaaaaaattccaaagcccaggccacaccacatcaattatctcacagtctctggggttgggacacagtcatcactggcaatatttgaagctcca

SEQ ID NO: 353969 - DNA, 201 bp, Homo sapiens
gcctggcaacagagcaagactacatcaaaaaaattttttaaagtaaatacagatgaaattatatcttatgtttactttgggaattaatctgttaatctgaygaaagccaggaaagaaattatataggaaaaataaaacctgaatttgtttttaaaattcataaattttaaaattcataaattcataaaattcataaatttt

SEQ ID NO: 353970 - DNA, 201 bp, Homo sapiens
ttaaccaccaagcaccattttcaggcactgtgattaagggtttgacaagatgaaaggctctctgtcttaatggaacttgtatttctgtgatgtaaatcagaaaatatacaaataacaataatttttagagagtagcagttatttgaaatatatgaaattgagtatgattcagggaggtttgcagtctgaaagatgagaagg

SEQ ID NO: 353971 - DNA, 201 bp, Homo sapiens
ccaccaagcaccattttcaggcactgtgattaagggtttgacaagatgaaaggctctctgtcttaatggaacttgtatttctgtgatgtaaatcagaaaatatacaaataacaataatttttagagagtagcagttatttgaaatatatgaaattgagtatgattcagggaggtttgcagtctgaaagatgagaaggaatc

SEQ ID NO: 353972 - DNA, 201 bp, Homo sapiens
acctagaccacaaaaaaagtaggatacttgatatggtacataaaatacagaaagtcaaaattcaacattcattcaacaaacattggtcagtgtaaaccatrtatgataaaggaagctctctaaactgaccaccattaacctttcttcttttacgcaacatattgattgattctcatgacccattggactttcctggcctga

SEQ ID NO: 353973 - DNA, 201 bp, Homo sapiens
tgagggtactgtgttataatctttgatctttaatttctgttttccttttttcttgttttcccctcttgttatcttcctgtcttatccctaacgttaataawtattttaaattaacatttcaccgttggctgtgatgtttgctacagtacattatttgtgttcaaaagtcagataaccatggcattcttataaaaatgggtt

SEQ ID NO: 353974 - DNA, 201 bp, Homo sapiens
ccttgaaagacttcaagctcaactggaagaaagcaaaaaggctagagaagagatgtatgaaaaatatgtagcatccaggcaagatttgcattatttcccaygtaaatagataccaattaacagattttctttgagggaactcttggctttggggaagatttagtgatttttttaaggtctattctatatgataatactaag

SEQ ID NO: 353975 - DNA, 201 bp, Homo sapiens
agagatagtgtttgttacataatgtgttaaatattagctattgtgattattacgggattcagtaactgacaataattgaaagtatcttggagagttatcartgattcctgcagaattttctgggtagtttgagatgatagtgatttcattatcagaaataggactttgagaaaacagaagtgattcatgtgttaatgaagg

SEQ ID NO: 353976 - DNA, 201 bp, Homo sapiens
gtatacacactctgcagaagcatcaggtaagtccagaaaagttgacttgctagagcaaaaagtaggagagacagaatctgaacccatgtttgttattccartctagggtccaccacatgtgatgaaagttacctttcctcattcttgagttttgctgggcatagtggctcacgcctgtaatcccactttgggaggctataa

SEQ ID NO: 353977 - DNA, 201 bp, Homo sapiens
aagtcagtgtggcgattcctcagggatctagaagtagaaataccatttgacccagccatcccattactgggtatatacccaaaggactataattcatgctkctataaagacacatgcacacgtatgtttatcacggcattattcacaatagcaaagacttggaaccaacccaaatgtccaacaatggtagactggattgag

SEQ ID NO: 353978 - DNA, 201 bp, Homo sapiens
caaatccaatcaatagttgccaagagccaggggtggaatgagagaactgactgaaaagcagcagcacagagagtttttgggagtgatgggaatgatgttawgatcatagtcacagttgcatggccaaaacagttgttgaaacttatgaacttgcacacttaaaattagttaattttgtatgtaaattatgctccaataaaa

SEQ ID NO: 353979 - DNA, 201 bp, Homo sapiens
tagcctgagagcacttcttatggattactttctttgtagctccctgtgtaatagctgattttcaccctttaacattttttctccctgtacttccaaacccrgaagtgctgttgcagtgaatattccttcagagcaaaccatcagttctagtcctttctgttatttttaaagtagtatttggtatatggttgggtcttatga

SEQ ID NO: 353980 - DNA, 201 bp, Homo sapiens
aaaaccaactgaagcagctgacagaggtttgtatggttttgattgctggtgggaagaagcttcggctttttctgtagagtccctcaggatttgtgataagrcatataaaagtcagtgattgaaaaatgggactatgggatggtgactgctacagttcaataatgggaaggaggttaaattggaagtagtcatcttaaacat

SEQ ID NO: 353981 - DNA, 201 bp, Homo sapiens
tgccctgcatataactcacatttcttctccctagaatacttcccaccccttacctcctcctgccttacacacacacacacacacacacacacacacacacrcacacgcacacacacccctctatacaaaccaagttaggtctccttcatatatgttcccactgaacctagggattaccctattgaagcacttaccattgaa

SEQ ID NO: 353982 - DNA, 201 bp, Homo sapiens
atatttcaaatcagtagggaaagtatggattggacaataaatgatgctgtgataatcatttgaatatttagagaaaatagttgactcaatacctcataccrtatagcaaaattaaactcagatggattactaggctgcatatatgtacaatatataatatatatattatatatatatatagtgtgtgtgtgtgtgtgtgtg

SEQ ID NO: 353983 - DNA, 201 bp, Homo sapiens
gagccgacaggactcagtgactagattggattggttggatgagaactcgttaaggatgtcagcaaggtttctgaattaaacagctgcataaatagtgatayagtttttaaaacattagaaaatacaaagctttaataggaaaacatgataaatttagttgtttcacttgaagtgtctgtggcatctacaaataaaagagtt

SEQ ID NO: 353984 - DNA, 201 bp, Homo sapiens
ttgactcaatacctcataccatatagcaaaattaaactcagatggattactaggctgcatatatgtacaatatataatatatatattatatatatatatagtgtgtgtgtgtgtgtgtgtgtgtgtgtgtgtgtagctataaaggtattagaagtaaatacagatgatccaggggcagtgagtgactcacgcctgtaatcc

SEQ ID NO: 353985 - DNA, 201 bp, Homo sapiens
tgactcaatacctcataccatatagcaaaattaaactcagatggattactaggctgcatatatgtacaatatataatatatatattatatatatatatagtgtgtgtgtgtgtgtgtgtgtgtgtgtgtgtgtagctataaaggtattagaagtaaatacagatgatccaggggcagtgagtgactcacgcctgtaatccc

SEQ ID NO: 353986 - DNA, 201 bp, Homo sapiens
tacctcataccatatagcaaaattaaactcagatggattactaggctgcatatatgtacaatatataatatatatattatatatatatatagtgtgtgtgygtgtgtgtgtgtgtgtgtgtgtgtagctataaaggtattagaagtaaatacagatgatccaggggcagtgagtgactcacgcctgtaatcccagcacttt

SEQ ID NO: 353987 - DNA, 201 bp, Homo sapiens
acataaataagtgggaaaaaaaaggaatggaccatttccaagaaatgaaatgcaaattgctaataaataaataaatgaaaatatgaattctcactgataastaccaaaatataaatttataaatttaaacttttttttttacctttagataggtctgtgtgttgtttttaaaatgctggcaagagtacccttaagtgggaa

SEQ ID NO: 353988 - DNA, 201 bp, Homo sapiens
acatgctgagagaattcaccattaccaagccaccactataagaacagctcaaaggagctctaaatcttgaaacaaatcctggaaacatcaaaacaaaatckcttcaaagcataaatcacacaggacctataaaacaaaaatacaagttaaaaatcaaaaacaacaacaaaaaaagtacacatgcaacagaaagcatgatga

SEQ ID NO: 353989 - DNA, 201 bp, Homo sapiens
tgatctcatctctagtgattgccttttctccattttaacactcagtcttatagcccacatttggttccttgccatccagaactgatttacttctgaagttmccaattcactttcatccactaaacatcttatttcctatattttttatgttttaccattgtctgctttcaacttgtctttaacagaatttccaatccatat

SEQ ID NO: 353990 - DNA, 201 bp, Homo sapiens
tcaagcgattcttgtgcctcagcctttgaagtaactgagactacaggcgcacgctaccacacccagctaatttttgtatttttagtagagacagggttttrccgtgttggccatgctgatctcaaactcctgacctcaggtgatccacttgccttgtcctcccaaagtgctgggattacaagtgtgagccaccatgcctgg

SEQ ID NO: 353991 - DNA, 201 bp, Homo sapiens
gttggccagtgtgtccagacttcttgaggcctgaaagaagctctccaactgagtgagcttccattaggttggcaagtgtattagtccgttctcacactgcyaatgaagacatacctgagactgtaatcaatgaaggaaagaggtttcattgactcacagttctgcagggctgaggaggcctcaggaaacttacagtcatgg

SEQ ID NO: 353992 - DNA, 201 bp, Homo sapiens
cttgggacctgcttaatggtgggactgaaagagctgtaacacaaaaagagctgaaacatgcccctcactcgccacattgcaacaaggagagaattgctgcmgccctttggggagcccagacctaggagctccctgagcaagggctctgacacctgtttggggctctgcagttcctggcatctccaagcttccggacaccac

SEQ ID NO: 353993 - DNA, 201 bp, Homo sapiens
cctgacctgctgttccagctgttcaaatcagaaaggcatctcttttcatctgcaggaatactgatgttccatgtagactttccccctatgagcccagcackgcacctgtgcctctgatgaaaaacaacttcccacaagtggaaagttcagggactcaaggcctgcagactggtttcttttgtcccacacggtgcctccgta

SEQ ID NO: 353994 - DNA, 201 bp, Homo sapiens
tgtttaatgttgcttgccttgtttccttttattttaaatgagagccgacattatgaactcagcactttactgagtacatcaaaaggcaaaagagaaacgtrtctctccccatggtttcagatgagaatctggagaaaaatatgtacgtgtgctcagatttctctttgttggagtatggactatggaaagagaaataaaatg

SEQ ID NO: 353995 - DNA, 201 bp, Homo sapiens
acgacgcctggctaattttttgtatttttagtagagacggggtttcaccatgttagccaggatggtctcgatctcctgacctcgtcatccgcccgccttgrcctcccaaagtgttgggattacaggtatgagccaccacacctggcctgaagttactaacttttaataagacatgatccaaatttttcatatgacattatt

SEQ ID NO: 353996 - DNA, 201 bp, Homo sapiens
cgcggggattgggcgagagtggggaggggcggcaaagcaaggcgaggagccatttccgcccgtggcctaggcggggcttccttctggacgccacctcacarcgtgtgttgctttccgctcctcggaacatccgggagagttgacttccggcggcttgtgggagtgctggttctgtcctccttgcgggtgcggagatggttg

SEQ ID NO: 353997 - DNA, 201 bp, Homo sapiens
tgattaaacaattcagcaaagtttccggatacaagattgatgtacacaaatcagtagcacttctatacaccaacagcgaccaggcagagagtcaaatcaakaactcaaccccttttactatagctgcaaaaaattaaatacttaagaatattcctaacaaaggagttgaaagacctttacaaggaaaactacaaaacactg

SEQ ID NO: 353998 - DNA, 201 bp, Homo sapiens
atttctatccaatattcaatagataggtttattcaaactttatggctttcatgactccctactcatattctgtatgaataataaaaaataataatttccarcccagtttttcatgagagatagtgtggcatgatgtaaaaagccctggctttggagtaagaaataactggattcaacttatggtcctcttaggctgtgtga

SEQ ID NO: 353999 - DNA, 201 bp, Homo sapiens
gttacaggataaatatcataaaatagaactggtttgtctttattttggaaatacatgtgttgcatacatttgtcatttatccaaaatatcaaaatatttctttttttttttttttttttttttgaggaggagtcctgctctgtcaccctggctggagtgcagtggcaccgtctcggctcactacaacctccacctcccagg

SEQ ID NO: 354000 - DNA, 201 bp, Homo sapiens
agtaggttataacataaagggctttgtagggattaagtgagcaaaatcatttatattacattctttttatttatgttgtaactgctagagaaggagatttaaaaaaaaaaataggtgactatctgaaagaaacttactgttggtattttttttttattcaaagtttcatcttgattaaaaggcaaaagttttgatctttgg

SEQ ID NO: 354001 - DNA, 201 bp, Homo sapiens
gtacactttgggtccccaacttctcagatgggtccttaagattgtcagatagtccatctttaagaaagaacatagataaatcacgcatttgaaataactgaaatccatgtttaaaatttagaaatctccgagaagcaagggataatgctgtggctgaaaaggaacgagcagtgatggctgaaaaggatgctttagaaaaac

SEQ ID NO: 354002 - DNA, 201 bp, Homo sapiens
gtctatcacggttatgttttaatgttgttactctcataattctgagttgtggggtattggtcttccactactggtgcctgaaaatattatttgactctatrttttttctgttaatatttaagtataattaggaaatgatgtctattttcaagtacacaaacacattttgaatattttgggcagtatttcacttttaagcat

SEQ ID NO: 354003 - DNA, 201 bp, Homo sapiens
ataaaaataaaaatagttaatgggataaatcttatgttatatgtattttaccacaatcttctttttaaaaactttttaaagcctgggcaaaaacttttgtragatcctacctttaccaaaaaaaaaaaaaaaattttttttttaaattagccaggcatggtggtatgtgcctatgatgctaagctacttgggagtctgagg

SEQ ID NO: 354004 - DNA, 201 bp, Homo sapiens
ggcttattgggttttgagatgaaattttgaacccagtggccaaaaggatgtatcactacatgatggcacgggaaaactcaggagggaccttaccaaatacyttggtttaaatccagagataccatgataacttcgttctcttgatctgcatagtgtttctaagccagattccacagatatgttttggagtatctaagagtt

SEQ ID NO: 354005 - DNA, 201 bp, Homo sapiens
ccctcttcctttctcttcaaccatccttagagtgtggcatctgttcttagaatcacaatatggttgctctggcctcagccatcatgtctgcattttaagcrggaagcgagaaaaagggaggaaaatagtctccctttccaaaggagtttttccctaagtcctacccaacatcttcagcttatatcccattggccagaactt

SEQ ID NO: 354006 - DNA, 201 bp, Homo sapiens
cttctgcacatggacttctctcctattccttcactgaatctcagtctccccatatctaccctataccttgtagcatgggaaatagtggcactcagatgcakttgccctgcgctctgcttctaagacacattgttcagatctctttaatagcattgttcagatccctttagtagcattgaccaagttgtataatacattgtt

SEQ ID NO: 354007 - DNA, 201 bp, Homo sapiens
acgggaaagtaaggctagatatccaaagagaacatttatgcattccttcatgcattcaacaacttttattgagtgcttactgtatgcacaaaattgatcartggcactaaagatcccaggttagggtctgatacatttctgaagtttgcaaagtccacatttgagttcataatggatatttgtaaagaaagcggtggcttt

SEQ ID NO: 354008 - DNA, 201 bp, Homo sapiens
aaaatataaaaattagctgagagtgatggcatgcacccatattcccaggtactcggaaggctgaggcaggactatcacttgagcccgagaggttgaggctrcagttagccatgatcataccactccagcctgggtaacagagcaagagcctatctcaaaaaaaaaaaaaaaaaaaaaagaaaaagaaaaaatcctgaaaga

SEQ ID NO: 354009 - DNA, 201 bp, Homo sapiens
aggctagatatccaaagagaacatttatgcattccttcatgcattcaacaacttttattgagtgcttactgtatgcacaaaattgatcagtggcactaaakatcccaggttagggtctgatacatttctgaagtttgcaaagtccacatttgagttcataatggatatttgtaaagaaagcggtggctttgcgctcttttt

SEQ ID NO: 354010 - DNA, 201 bp, Homo sapiens
actcagactggagtgcaataccacaatctcagctcactgcaacctccacctcccaggttcaattctcctgtctcagcctcccgagtagcttggattacagrtgtgcactaccatgcctggctaattttttgtatttttagtagaaacagggtttcaccatgttggccaggctgatctcaaactcctgacctcaagtgatcc

SEQ ID NO: 354011 - DNA, 201 bp, Homo sapiens
caagagctgagcagacagtgggatggcctgcctgcagttaggagctacccattccagatctcttgagagctgtactgctgctcagggaagcacctctttgycttattcatgctccggttgtctgtgtacttcattcttcctggacacaggatgagaacttgggacctgcttaatggtgggactgaaagagctgtaacacaa

SEQ ID NO: 354012 - DNA, 201 bp, Homo sapiens
tcagaagcagtaataggtttacttataacaaccactcagacaaatccacagaaacagaaaattctctaatatggggtactagaggtattgggagatagccyacatcagtagtttttcaggacctctctttcacattatgaagatattttttaaattacatctctcgtaatggtttttaaatctctccttaaaataatatct

SEQ ID NO: 354013 - DNA, 201 bp, Homo sapiens
tgtgcaattgaaattagatttggtatgttttaaacagctcattctagacagaagttaactgaaattcataaatgttcttagttattccctgccaccctttscccacacacacacttgaactgttctgcactttgaaacacaaagcaacttgtcagttcagtttattcagtcagggtcagttctgtgaaaacaaagccaagg

SEQ ID NO: 354014 - DNA, 201 bp, Homo sapiens
atattaatctgagacgatacctaaatggaatagctaaaactataaatatgtaacagaaaacataggtgagttatctttacaacgtggagtacattaagactttttttgacatggcccttgaatgtaattatcataaaagaaaaactgataaagtagatgtcatcaaaatttaaaacttctgttcttcaaaagacaccatta

SEQ ID NO: 354015 - DNA, 201 bp, Homo sapiens
tattaatctgagacgatacctaaatggaatagctaaaactataaatatgtaacagaaaacataggtgagttatctttacaacgtggagtacattaagactttttttgacatggcccttgaatgtaattatcataaaagaaaaactgataaagtagatgtcatcaaaatttaaaacttctgttcttcaaaagacaccattaa

SEQ ID NO: 354016 - DNA, 201 bp, Homo sapiens
tacagttgctctctctattagcagatactgcatctcagatttaatcacctgtggattgaaaatattggggaaaagacaataataaaaaataatacattttwaaaaatacaatataacaactattatatatagcatgtacattgtgttaggtattgtaagtgatgcagacatggtttaaagtgtatgtgaaggtgtagatat

SEQ ID NO: 354017 - DNA, 201 bp, Homo sapiens
tgtgaggatttactcatatgttttcttctaaaagtttatagttttagcttctgtatttaggtctttgatccattctaattaattttttggtatcatatgargtaagggctttgtactgtttattaatgtggctactagaaaattttaaattgcatatgtggcttgcattatatttccattggacaaagctgacctagacca

SEQ ID NO: 354018 - DNA, 201 bp, Homo sapiens
tgtgttttagtcttatcatttgtaaaatggaggtaatgatacaactgctttgtgggattgttgtgacaattaaatgagttgtgatatgtaaagtgcttagracggcttctggcacatggtaaacagtatgctattgctatttattgtcagtagaagaatacattgagtttttctctctcagacttcatatgaaacctgtga

SEQ ID NO: 354019 - DNA, 201 bp, Homo sapiens
ggtctccaaactttttgatacgaatttttattgggaaaaaatttgagtacacactcagcaatatatgcatatgtattcatatttatttatagattatgtaygcatgtgctatcatatgaatagtatgcacataatgatataaaacctacacagcaaatgaaaacttaagataatttaacattaaaataaatgtaagtaaaa

SEQ ID NO: 354020 - DNA, 201 bp, Homo sapiens
ggctgaggtggaaggatcacctgagcccaggagtttgagactagcctgggtaacaatgtgaaacacagcctctacaaaaattttaaaaatgagccaatcaycctaatgcacctgtggtcccagctatgtgggaggatgagctgggtcacttgagcgcaggaggtcaagactgcagtagccatgtttgcaccattgcacttc

SEQ ID NO: 354021 - DNA, 201 bp, Homo sapiens
ttgttcttttctgtgtatgtgtgtttgtactacattagtgggctaaatgggtcttttagggcaactgagaactttaataccatttctaatatatgtgtgtwtatatatatatatatacatatatatatatacatatatatatatacacacatatatatacacatatatatatacatatatatacatatatatatatatata

SEQ ID NO: 354022 - DNA, 201 bp, Homo sapiens
gagaactttaataccatttctaatatatgtgtgtatatatatatatatatacatatatatatatacatatatatatatacacacatatatatacacatatmtatatacatatatatacatatatatatatatatacatatatatatgaggaaatgtgttttactgttcttacaactgacttagaggtgagtttttaaaatg

SEQ ID NO: 354023 - DNA, 201 bp, Homo sapiens
tcaattctcagaaagtttttctcagtaaaattgtactataaactagtaatcaaagcactgtagagtatatttgtaagcaatttgaagataccttagatacyttccttctatttagagttgattttccttacttggaatctcccagtcaaaatcagggaaattcctttttgaagaaagtagtcctggtgttaaggcttaagc

SEQ ID NO: 354024 - DNA, 201 bp, Homo sapiens
cgaatttttcactaaaattttagataaactggaaaacctcattttcaaactgccagataggaggaggcttatttttaataattctttgaagtcatagtaargccttgcttattcagagcccaattttcagccaaccttaaatatttgtgatagttttaaaatcaagacaaggaaaaaaaggtgtttctagacaccactaaa

SEQ ID NO: 354025 - DNA, 201 bp, Homo sapiens
attataaaggaggagactcacatacctaccatgtggccctaaacaatctagatctgattaaatttcaaggtcaaccatatttctaagacttcaatgatgtaaaaaaaaaaaaaaaaaaaacccactgttttgtgtaccactgtgaggaagagtggaggatgctgctgattaaactgtgatacaatgctttgttattacttt

SEQ ID NO: 354026 - DNA, 201 bp, Homo sapiens
ttttaaaaaaaaacaacatctatttagcaattaaaagtaattttattgcctgttcatgtttgtgactgtaagctaaaatagagaaattttaagtcagagakagcaataatttttacacctagaccacaaaaaaagtaggatacttgatatggtacataaaatacagaaagtcaaaattcaacattcattcaacaaacattg

SEQ ID NO: 354027 - DNA, 201 bp, Homo sapiens
tagatgtgcttacaaggagatttgttttgtagttgttttatgagtcactcatagaagctttgtattttcaaaggtaagtttccactgttatgaaatatgtyttatgaagactaaaattctattgagtaaatacatactagaagaagagtgaatataataatcatcatattcagttttagagacccacatgttaaaggttgt

SEQ ID NO: 354028 - DNA, 201 bp, Homo sapiens
cctgccagaaaaaaaaaaaagaagatttattaagtacctactctgataagctctacagttagataccacaggggataagactcctgtcattttatgagttrcatctgtttagggagaaatgattaacatacatgaaagaatatataaactttagtactatatcatatgttgggttaggctatgtcagtcagaggaatagag

SEQ ID NO: 354029 - DNA, 201 bp, Homo sapiens
gaaataattattttggctagaaagaatgaaaataagggtagaatggtgaaagttaattgatatgttcactgtaattacttattttcatacatatacctacytaaattatttataaaagctttgctgaataaatataaattattaactccacaaatatgggggagtagaaaacatagaagtaaggtttatgattacttaaat

SEQ ID NO: 354030 - DNA, 201 bp, Homo sapiens
gggcatgatggcacatgcctgtaatcccagctacctgggaagctgaggcacgagaatcacttgagcctgggaggcggaggttgcagtgagctgagatcgtrccatcgtactccagcctgggcaacagagggaaactctagtctcaaaaataaaaagaaagaatttctaaatgtgaacacacgtctataaattgttgggaga

SEQ ID NO: 354031 - DNA, 201 bp, Homo sapiens
atgcacgcaccacaacacccggctaatttttgtatttttagtggagacagggtttcaccacgttggccagggtggtcttgaactcctgacctcgtgatccrcacatctcagcctcccaaagtgctgggattaccggcgtgagccaccacacccagcgtaaatcccatacttttaaccaccacaatatttaatatttattac

SEQ ID NO: 354032 - DNA, 201 bp, Homo sapiens
agtttatgaaacttagactatattcaaatttttaggagataattcttgttaccacctagatggtttattgtttaacttctgttaaattttctgtattctamatgtctaaatattgtttactgtttaacttttcaatataaggaaataatattagtgccaaaagtaactttcaggtgccatgtaatgaataaaaacaggtga

SEQ ID NO: 354033 - DNA, 201 bp, Homo sapiens
tttcaccatgttggctaggctggttcaggatctctattctttggatcaggttaaatatttaaatcagtttggcctttttgataatacacagatgaaatackgataactaatgttagaattaccattgagttaaacactattcagattatgtctgagattgtacataagtgaactgacaaaatgacaatgctaagtaatacc

SEQ ID NO: 354034 - DNA, 201 bp, Homo sapiens
aaagataatggacttttctgggcttttacccagtattctcattgattgttaatttggagattatttatttttgcttaattattaattggcaaaggctcccwgaagcgttggctttatatatttgtctctgtttaaggcaaaattataattttgtattatcattatttaatctttgtattattcagttaatacatgtattat

SEQ ID NO: 354035 - DNA, 201 bp, Homo sapiens
ttggctttatatatttgtctctgtttaaggcaaaattataattttgtattatcattatttaatctttgtattattcagttaatacatgtattattcaaagsaaggaaaattttactgtgagaactttatatttaatggattcctaaaattaatgggcttattttatgtatccatatttaaactgaaatgttcatgtattga

SEQ ID NO: 354036 - DNA, 201 bp, Homo sapiens
gcctgaggcagaaggatcacttgagaccagcagtttgaagctgtagtacactataattgcacctgtgactagtcactgcactccagtctgggcaacatagwcagactcccatctctcaaaaaaagaaaagaaaaaaaaaatcagtggaaacttaaggcgaatgataaaacaactcagtcaaaacagtaaatgaactatatg

SEQ ID NO: 354037 - DNA, 201 bp, Homo sapiens
tctgaaatcttttactaggcacaatttgagttttcatttaagacgatattgttttaaaattatacagaagcctcttgaaataattagcagggatacccccsaaacatgaaactttctttagtatcagtccatttttaagagtctcactctgttactcaggtcggaatgcagtggcaccatcatagttcactctcatctcaa

SEQ ID NO: 354038 - DNA, 201 bp, Homo sapiens
ttataaaggaggagactcacatacctaccatgtggccctaaacaatctagatctgattaaatttcaaggtcaaccatatttctaagacttcaatgatgtaaaaaaaaaaaaaaaaaaaacccactgttttgtgtaccactgtgaggaagagtggaggatgctgctgattaaactgtgatacaatgctttgttattacttta

SEQ ID NO: 354039 - DNA, 201 bp, Homo sapiens
ctctgatgaaaaacaacttcccacaagtggaaagttcagggactcaaggcctgcagactggtttcttttgtcccacacggtgcctccgtaatgtgcggcaytccccctttacctggagggccagactactgtgaatcctgctactcctctgggtctagctgctcagtgggactcccacactccaggatggtactggagaat

SEQ ID NO: 354040 - DNA, 201 bp, Homo sapiens
atcttttcctctgtagtacatcagcttctctttgtttctcctctagtttctgcttactcatgttttccacttcctcattaacttgctcacagccctttgtsttgaaacaggtttctgtacatcctttctgcatctactctcttataatgtagttctccctgtattttccaagactaacaatctaattggcatagctaattc

SEQ ID NO: 354041 - DNA, 201 bp, Homo sapiens
tagccgaggcaatgcaggcaatggcaacagctgagggcatgcagaagttttctccttcctgagtgctgtgttattctgccttcaggtgtcataatgggctktgcctggctaccagccaggaggtggtgcttgcaaaagagtaccaggtgcggtggtagtagtggaatttgtgcttgccttatgttacccagggcaggcact

SEQ ID NO: 354042 - DNA, 201 bp, Homo sapiens
tcaggcatcataatttttagttattcttttgaatattttcaattttccataagaatacttttttatattttctctgaacttgttgataaggaatttaccaygctaatatttgaagtaagagctaatcattttataatctcatggttttatacctaaaatgaaaacatttctaaatccagatcctttggctgaaagtatttg

SEQ ID NO: 354043 - DNA, 201 bp, Homo sapiens
tcctggattcaagcagctcttgtgcctcagcctcccaagaagctgggattacaggcatgcgccaccacaccaggctaatttttgtatttttagtagagacrgggttttgccatgttggccaggctggtctcaaattcctgacctcaagcaatccacccaccttggcttcccaaagtgctgggattacaggcatgagccacc

SEQ ID NO: 354044 - DNA, 201 bp, Homo sapiens
caagcagctcttgtgcctcagcctcccaagaagctgggattacaggcatgcgccaccacaccaggctaatttttgtatttttagtagagacggggttttgccatgttggccaggctggtctcaaattcctgacctcaagcaatccacccaccttggcttcccaaagtgctgggattacaggcatgagccaccacgcccagc

SEQ ID NO: 354045 - DNA, 201 bp, Homo sapiens
gcacctgattatcttagggaaattgaagaaagaaccccaaatagaattttttcctcctatgttacatatttctgttaaatttgaatattttttggccaggygcagtggctcacacctgtaatcccagcactttgggaggctgaggcaggcagatcacctgaggtcaggaattctagaccagcctggccaacatagtgaaac

SEQ ID NO: 354046 - DNA, 201 bp, Homo sapiens
agccactgcactccagcctgggcaacacagcaagactccatctctttaaaaaaaagagaaagagaaagaaaagaggagagggaagaaagaaaagaaaaaagaaaggaaaagaaaagaggagagggaagaaagaaaagaaaaaagaaaggaaaagaaaagaaaaagatcttctgacaaaataggccattcattgggccaaac

SEQ ID NO: 354047 - DNA, 201 bp, Homo sapiens
gccactgcactccagcctgggcaacacagcaagactccatctctttaaaaaaaagagaaagagaaagaaaagaggagagggaagaaagaaaagaaaaaagaaaggaaaagaaaagaggagagggaagaaagaaaagaaaaaagaaaggaaaagaaaagaaaaagatcttctgacaaaataggccattcattgggccaaaca

SEQ ID NO: 354048 - DNA, 201 bp, Homo sapiens
ccactgcactccagcctgggcaacacagcaagactccatctctttaaaaaaaagagaaagagaaagaaaagaggagagggaagaaagaaaagaaaaaagaaaggaaaagaaaagaggagagggaagaaagaaaagaaaaaagaaaggaaaagaaaagaaaaagatcttctgacaaaataggccattcattgggccaaacat

SEQ ID NO: 354049 - DNA, 201 bp, Homo sapiens
cactgcactccagcctgggcaacacagcaagactccatctctttaaaaaaaagagaaagagaaagaaaagaggagagggaagaaagaaaagaaaaaagaaaggaaaagaaaagaggagagggaagaaagaaaagaaaaaagaaaggaaaagaaaagaaaaagatcttctgacaaaataggccattcattgggccaaacatt

SEQ ID NO: 354050 - DNA, 201 bp, Homo sapiens
gagacagaaacaactagaagagacaaatcttcagctaagagaaaaagctggagatgttcgtcgaaacctgcgtgactttgagttgacagaagagcaatatrttaaattaaaagcttttcctgaagatcagctttctattcctgaatatgtatctgtaagtatcttatatctatttttaactatgacatatattttcagact

SEQ ID NO: 354051 - DNA, 201 bp, Homo sapiens
catctttatttctgccttcatttcgttgtttacccagtagtcattcaggagcaggttgttcattttccatgtagttgtacgcttctgagtgagtttattartcctgagttctagtttgattgcactgtgttctgagagacagtttgttatgatttctgttcttttgcatttgctgaggggtgttttacttcctattatgtg

SEQ ID NO: 354052 - DNA, 201 bp, Homo sapiens
ttatatgcaggtattcaggcagtgggaacaggttagaagcagcattagtgggttcagacaatttcagatctccattagggttggagggtgaagtgtgaatrttaggaatggtgagaaatggggcttgtaggaagcagcaccagattgtaaagaaccttgtgaccaactttaaggtttttacttccattgctcttcccatat

SEQ ID NO: 354053 - DNA, 201 bp, Homo sapiens
ttccctctacacactgctttaaatgtggcccagagattctggtatgttgtgtcttcattctcattggtttcaaagaacatctttatttctgccttcatttygttgtttacccagtagtcattcaggagcaggttgttcattttccatgtagttgtacgcttctgagtgagtttattaatcctgagttctagtttgattgca

SEQ ID NO: 354054 - DNA, 201 bp, Homo sapiens
attatttttcattgtagatactgatatccatatgacttttcatctctaaactgtaaaatcctcaagaacaggaagtgtgttttattcacttctgtatcttyagcatctgatagtaactcagtaaatgtttttaaaaagtcatttaacatttgtagtcattttatgttttagcctagtaactaaaacatagttgttgtgtta

SEQ ID NO: 354055 - DNA, 201 bp, Homo sapiens
aattttgtgttctatatgctttattgtcttcaaacggcaggtaaataagaattaaatacacacattatctgaacttgaaatgatacatttatatttcttgwcaagtacagcctttaaataattttggtgttcatagaagtagagaatagaatggtggttaccaagggctggcgtggttaggggtgaaggagggttggggag

SEQ ID NO: 354056 - DNA, 201 bp, Homo sapiens
acttgaaatgatacatttatatttcttgacaagtacagcctttaaataattttggtgttcatagaagtagagaatagaatggtggttaccaagggctggcrtggttaggggtgaaggagggttggggagatgttggtcaaaggatacataattacagttgaataggaggaatacattcaagagatctattggacagcatgg

SEQ ID NO: 354057 - DNA, 201 bp, Homo sapiens
actgcactccagcctgggcaacacagcaagactccatctctttaaaaaaaagagaaagagaaagaaaagaggagagggaagaaagaaaagaaaaaagaaaggaaaagaaaagaggagagggaagaaagaaaagaaaaaagaaaggaaaagaaaagaaaaagatcttctgacaaaataggccattcattgggccaaacattt

SEQ ID NO: 354058 - DNA, 201 bp, Homo sapiens
gcccataggtaaaaaccagcttctactaaagcaggtggataaatgccatacttaatagtgagcagagctcccagccttgacagaagcagctggggaaggtstatgaaatgcactgaggtcttttcagggagaagggagggagccaccacagctctccttccaggccaacaggaaagtaatacacctcccaggcacactcct

SEQ ID NO: 354059 - DNA, 201 bp, Homo sapiens
tgaaacaaaactaaggttctttttccttagtctcatttagacagaaaaaaactcatgatgaattattgcgtatattccaggaaaatttttgcctctgggcrtgaagttatattcctctttctttttttcataaaatgaaaactttgtaatttaatgtgtttcctttttgtcttcattgccagaaaactcagagctgaatat

SEQ ID NO: 354060 - DNA, 201 bp, Homo sapiens
ttttttataattctctttgaaaataaaatcaattcgtaaaataattgcatccccagaaaatcttaagtataggctttgagcaagaaaacacagttttttcyatcatatacctaccaggtgggagattatttatggcaaaagacaaagtcttcgcccttaagtatcctttctgaattaagaaaagcaattttttagtatagc

SEQ ID NO: 354061 - DNA, 201 bp, Homo sapiens; identical to SEQ ID NO: 75841

SEQ ID NO: 354062 - DNA, 201 bp, Homo sapiens
tgtcttacccattagattgacaaattcctttttgtactttagcctttagcacaatatttagcagataataagtactcattcagatgtttcttaaactaatkgttcttttcaatcttcaataatataaagctgtcaaatagaaagctttagaaactgtcatcaaaaaataagtgtcactctgatactgaaatattttagctg

SEQ ID NO: 354063 - DNA, 201 bp, Homo sapiens
gagccatatttgcaccaccgcactacagcctgagcaacagagcaagaacctgtctcaaaaaaaaaagaaaaaaaagggagaaagggaggtagaggccggargcggggaagggagagaaagagagggaagtggaagaaatagtggaacttgccaaagtgtacaataaaaagaaatttcagtcttaaaagcagtcagtacaga

SEQ ID NO: 354064 - DNA, 201 bp, Homo sapiens
gaaaatataggaaaaaaacatggagaagaccacagaagaaaagattgacatattctgctacatcacaatcaaatgttcttcataacaaaaaaaaaaaagcgggggggggggggtcataaacaaagtcaagtaagaggtaaactggaaaaattgccactcatattaaagacaaagggctaatttccctaacatataaagagc

SEQ ID NO: 354065 - DNA, 201 bp, Homo sapiens
aaaatataggaaaaaaacatggagaagaccacagaagaaaagattgacatattctgctacatcacaatcaaatgttcttcataacaaaaaaaaaaaagcgggggggggggggtcataaacaaagtcaagtaagaggtaaactggaaaaattgccactcatattaaagacaaagggctaatttccctaacatataaagagct

SEQ ID NO: 354066 - DNA, 201 bp, Homo sapiens
tgcattgacaatatgaggcgagccacacaaaactactgttaactgggtaatggagtgggagcagtgctgtgacgcagaggaggagaaataagagcttgacyttttttttttttttttttttttttttgacacttaggtcttcttctgaagactttttttttttttggagatggagtctctcactctgtcgcccaggctgga

SEQ ID NO: 354067 - DNA, 201 bp, Homo sapiens
gatctacaatcctcccaaccagagaaggaatgttctgagttaggagtgtagggaaagaaagaaaattagaatataagcaattttaaggtagagaggagggrattgaaataaacccttgttggatagatcttgaccttagtaaaaggaagtcatcaaatgacaatggagagggctccaaatgacctgagagtcttaataaaa

SEQ ID NO: 354068 - DNA, 201 bp, Homo sapiens
gtttttgctggagtggtggttgctattcttggttctcattgggaaaagatttgcagattagtgatgtctgataaaatgaagttacttttttgttcagctgttttttttttttttttaaaaggctcaaatacagcttttctgtccaaagtatactgtccaaaacaaattaaatatctcaaattctgtttttgaggcttcatt

SEQ ID NO: 354069 - DNA, 201 bp, Homo sapiens
gaccaggcaagtcctcactcaggctctccaggtacaagcacaagcagtgtccccagtggggatcagagaacagctttctggccactggggtaatgttccaraggggagcagagctgcctctggtgcacagaagaatccacacagggagtgggagcaggagggagtagtagaaggcagtaaggcccactcagctcccatgca

SEQ ID NO: 354070 - DNA, 201 bp, Homo sapiens
agggaagtaactttaataaaatagaaaaaagaaacactgctgatcaaagagctaaaagaatggaattatcaaaataaaaagcagttaatttttgtttttgtttttttttttttttgagatggagtctcactctgtcacccaggctggagtgcagtggcgcaatcttggctgactgcagcctccacctcctgggttcaagca

SEQ ID NO: 354071 - DNA, 201 bp, Homo sapiens
gagtagctgggattacatgcacgcaccacaacacccggctaatttttgtatttttagtggagacagggtttcaccacgttggccagggtggtcttgaactsctgacctcgtgatccgcacatctcagcctcccaaagtgctgggattaccggcgtgagccaccacacccagcgtaaatcccatacttttaaccaccacaat

SEQ ID NO: 354072 - DNA, 201 bp, Homo sapiens
cttttctctagcttttattgtaagaatacagtatataatacatataacatacaaaatatgtactaatagactatgttatactaaggcttccagtcaacagtaggctatctgtagttaagttttcagtgagtcaaaagttacacatggattttttttttgactgtatgggagttggtaccccaacccctgtatcgtccaagg

SEQ ID NO: 354073 - DNA, 201 bp, Homo sapiens
atcacttgagcccgagaggttgaggctacagttagccatgatcataccactccagcctgggtaacagagcaagagcctatctcaaaaaaaaaaaaaaaaaraaaagaaaaagaaaaaatcctgaaagaagcccgaggaaaataacaccttacctatagagaagcaaaggtaaggattacatctgacttctcagaaacaatg

SEQ ID NO: 354074 - DNA, 201 bp, Homo sapiens
tgatctttaatttctgttttccttttttcttgttttcccctcttgttatcttcctgtcttatccctaacgttaataattattttaaattaacatttcaccrttggctgtgatgtttgctacagtacattatttgtgttcaaaagtcagataaccatggcattcttataaaaatgggtttaaacttcagttgaagttgaatt

SEQ ID NO: 354075 - DNA, 201 bp, Homo sapiens
ggctgttgtaatctaggggagagattattgtgtttcagatctagatggtagcaggggaagtggtagattctggatttattttaaagtagagccaatagaamaaaggtagagtcatgaattggatggaggatgttaaagaaagataggagtcaaattaactctaaaaaatgttagtttgaataactggaaggatagatttct

SEQ ID NO: 354076 - DNA, 201 bp, Homo sapiens
gcatcttctcaaatattttaaattaatttttattatcagttatcttttattgttaactatattctttactccttagatgtttacaacgtgtgttcactgcytcattaataatacttaaaaatttcaagctctgtagggtgttccagatatgaagcaaggtaagttcaggttgcataggaatttagatttacctttgtggtg

SEQ ID NO: 354077 - DNA, 201 bp, Homo sapiens
tgtgtttcagatctagatggtagcaggggaagtggtagattctggatttattttaaagtagagccaatagaaaaaaggtagagtcatgaattggatggagkatgttaaagaaagataggagtcaaattaactctaaaaaatgttagtttgaataactggaaggatagatttctgttcagctgagataggtaggttgtgaat

SEQ ID NO: 354078 - DNA, 201 bp, Homo sapiens
agataactctctcagcatcttctcaaatattttaaattaatttttattatcagttatcttttattgttaactatattctttactccttagatgtttacaaygtgtgttcactgcttcattaataatacttaaaaatttcaagctctgtagggtgttccagatatgaagcaaggtaagttcaggttgcataggaatttagat

SEQ ID NO: 354079 - DNA, 201 bp, Homo sapiens
tagagccaatagaaaaaaggtagagtcatgaattggatggaggatgttaaagaaagataggagtcaaattaactctaaaaaatgttagtttgaataactgkaaggatagatttctgttcagctgagataggtaggttgtgaatgaggccgacttgagtgcaaaagagtgtggatcttagacatgttgagtttgagagatct

SEQ ID NO: 354080 - DNA, 201 bp, Homo sapiens
ctcattgcctgtagaataaaatccaaccctattttgacatttaaggccttccagtcttgatcgttaagggcgtgtgtgtgtgtgtgtgtgtgtgtgtgtgtttgtgtttgtgttgggggggcggtgaaaggagtaactattccaagacttggctttgtttttttacttccacttacgtatcattaataactgcatgatttc

SEQ ID NO: 354081 - DNA, 201 bp, Homo sapiens
aataactggaaggatagatttctgttcagctgagataggtaggttgtgaatgaggccgacttgagtgcaaaagagtgtggatcttagacatgttgagtttkagagatctgttagatgtacagtcaaaggtatgtggatatacaggtgtgaactttagaagataagcattcaagagtcatcagcataaagacgatatttaaa

SEQ ID NO: 354082 - DNA, 201 bp, Homo sapiens
tcattgcctgtagaataaaatccaaccctattttgacatttaaggccttccagtcttgatcgttaagggcgtgtgtgtgtgtgtgtgtgtgtgtgtgtgtttgtgtttgtgttgggggggcggtgaaaggagtaactattccaagacttggctttgtttttttacttccacttacgtatcattaataactgcatgatttct

SEQ ID NO: 354083 - DNA, 201 bp, Homo sapiens
cagctctgaaggttgataggttcagctgagtttttcttacctcactgaggctggggtcatctgaagtcttctttagtcaccagtttggagccaggatgatrtgaccaaaacattactcccttttgcacttggcctcttcatgtgattagtttaggcatccttcaacatggcagtctcacagcatggcagctggccacctcc

SEQ ID NO: 354084 - DNA, 201 bp, Homo sapiens
caaaaataaatggagcaaattcaagcaaggatatactttaagaaatatgtttctacttacaaatgggctgtttaagattacatattagccctttctaatgyttttatcctccctaatttgttataacctcctttattttcacttctgccatcttttttaaaggaaaaataaagttatttcacattatacactttaatattt

SEQ ID NO: 354085 - DNA, 201 bp, Homo sapiens
ctaattttaaattcattttttattcagcttataaaataaggataaggtacttcataattttcagttaaaaacaactgaattatttaccttagaaataaatrtatttaatttcctcattagtcatcttaattgagctactttctcttaatatttaaataacaaaaaaagccctatgaatgtctttgcatcatgtttttgtct

SEQ ID NO: 354086 - DNA, 201 bp, Homo sapiens
gggcaactatgttaagtgtttagtctgaaatgtgttattattcctttggtttatagacatatgaggaagatcgaaaaaactactctgaagttcaaattagwtgtcaacgtttggccttagaattagcagacacaaaacagttaattcagcaaggtgactaccgtcaagagaactatgataaagtcaagaggtaagtagtta

SEQ ID NO: 354087 - DNA, 201 bp, Homo sapiens
taaagagcatgaagacaatatatttacacctaaaccaacactctttgtaagtacaatttttaaaactcataattttaatattcctgattcttactaaatgkattttagttaattttttccttttacatttatgaaatgagtagattccacaaatatgtttcatgaaaagaccttgaaggatttgcattaatccattttcta

SEQ ID NO: 354088 - DNA, 201 bp, Homo sapiens
atgctttgttttagttctcatctcttttttcctactcagcactgtttttgaagttatctattactttgtatacatctagtcctttgcttccaactcttatrtaattctttgtgtgcgtctaccagtctttctactcctacattgctaggcatccagattgcctccagctccttgcaacacatgcagcattagacatttctc

SEQ ID NO: 354089 - DNA, 201 bp, Homo sapiens
agatcacttctaatcccaaagctatcaattctattatctgtctccttttttcagtatctctccttaccctttttctcctctttagtacccccttcaaagtrtgtgtgtgtatgtgtgtgtgtgaccaaatgccaaccaccactgacacacatacatacatgggggaagtggtattggcataggcaactttcaaaagttaat

SEQ ID NO: 354090 - DNA, 201 bp, Homo sapiens
atcaggaacagttgaagggcttgttaaagaagcctactggatcccaccctcagagtttctgacttgtgggggtggggtcctgagaatgtgcatttttactrggttcgcaggtgatgcagatgctgctggtccagaaacaatactttgagaaccactgcatttgataataggtcttctatgctaattctgtaagacatatat

SEQ ID NO: 354091 - DNA, 201 bp, Homo sapiens
ggaccttgtcagatggaacactttactgagctagggtaggaaaatttctctgagacaagtatgagtggaaagagagacctgaactaaatggaagtaatgaygtgaaagatacctcttgattcattctgattagacttccactgtagggacagcagtaaataaagctttgccaagagcctgggatgaaaataaagaatacac

SEQ ID NO: 354092 - DNA, 201 bp, Homo sapiens
gaatcactagtaggacccaaaaatcacttattttttggtttgtttttctgggttttttgagacagagtcttcctctgtcacccgggctggagtgcagtggygtgatctcggctcactgcaaccacctcctggattcaagcagctcttgtgcctcagcctcccaagaagctgggattacaggcatgcgccaccacaccaggc

SEQ ID NO: 354093 - DNA, 201 bp, Homo sapiens
atatgagtagagtcctacagtatttgcccctttgtgattggtttcaattagcataatgccctcagggtttatccatgttgtagcatgtgacagaattttcttttttttttttattgtactttaagttctggggtacataggcacaacgtgcaggtagtgttacgtaggtatactcctgccatggtggtttgctgcacccat

SEQ ID NO: 354094 - DNA, 201 bp, Homo sapiens
cagtggtgtgcatggtgctgtgctaggtgctggcagtgaacccaagagaggcaatgcctgcccttctagagtttactttctagcaggttaggattagaacrttaggtgatattttgacactctcatttactgtgtgaccatgaccaggtcatttaatgtttcctgttctgtcaaatggagaaaataatactgtttgttcat

SEQ ID NO: 354095 - DNA, 201 bp, Homo sapiens
atgatttctcttgaacacagattcctcaggccattcttagagtttgtggtttttctgccctgtcaaggacctggtacaggtcaacttgccaaacactaggraaaaagtaaatatttttaaataaaaagcaaaaccaatatcattaaacagctttatttatttatttaaacagagccttgctcagtcgccccagctggagtg

SEQ ID NO: 354096 - DNA, 201 bp, Homo sapiens
acccatgaacatactgtatctttacccttatttacgtcttctttaatttatcttaatactattattttttagttttcactgtataactaaaaactgtcaastgtttgacatcttttattgtcaaacttttacagtgaaaactactaaaacattagcattagcaaagtgtatgtttttccagccttcttcttttaacccgtc

SEQ ID NO: 354097 - DNA, 201 bp, Homo sapiens
ctccttaacattctcaaactttattttctggaatatgtgaaatataatttcaataacttttttatattcttgcctactaattctattattttgtcatttcmtggctgccttcaataaatttgaattttctcattatatatcacattgttcagcttctttgcatacgtagtaattatttactggatgccagaccttgtaaat

SEQ ID NO: 354098 - DNA, 201 bp, Homo sapiens
tcctttgttgacttctttttctctgattatgtcttaagtgttgacatgccccagggttctaccttgtttgtttaggggaaaaggggaaaaagccaagaactttcaagttaggcagactggttatatgactttaggcaagttatctttttgtaagcctcagttttccaaagtgtaagtggaaataataatactatattgcat

SEQ ID NO: 354099 - DNA, 201 bp, Homo sapiens
tagagtttaggaggagtccatcacacacacacacacacacacacacacacacacttatagatagatcacacacacccttatagatagatcacacacacacatagatagatagatagatagatagatagatagatagatagatagatagatagataaatcagcatataggtggcacctaaagccatgggattgtatggtatt

SEQ ID NO: 354100 - DNA, 201 bp, Homo sapiens
agagtttaggaggagtccatcacacacacacacacacacacacacacacacacttatagatagatcacacacacccttatagatagatcacacacacacatagatagatagatagatagatagatagatagatagatagatagatagatagataaatcagcatataggtggcacctaaagccatgggattgtatggtattt

SEQ ID NO: 354101 - DNA, 201 bp, Homo sapiens
gagtttaggaggagtccatcacacacacacacacacacacacacacacacacttatagatagatcacacacacccttatagatagatcacacacacacatagatagatagatagatagatagatagatagatagatagatagatagatagataaatcagcatataggtggcacctaaagccatgggattgtatggtatttc

SEQ ID NO: 354102 - DNA, 201 bp, Homo sapiens
agtttaggaggagtccatcacacacacacacacacacacacacacacacacttatagatagatcacacacacccttatagatagatcacacacacacatagatagatagatagatagatagatagatagatagatagatagatagatagataaatcagcatataggtggcacctaaagccatgggattgtatggtatttcc

SEQ ID NO: 354103 - DNA, 201 bp, Homo sapiens
gattggaatggcataagcctgttagacagagagggtctacttttagaggttatttccattatccagatgagaggtgataatggaactggattagtatcagyaaagatgagagaaatgggccaggttggaaaagtatttaggagacagagccgacaggactcagtgactagattggattggttggatgagaactcgttaagg

SEQ ID NO: 354104 - DNA, 201 bp, Homo sapiens
gtttaggaggagtccatcacacacacacacacacacacacacacacacacttatagatagatcacacacacccttatagatagatcacacacacacatagdtagatagatagatagatagatagatagatagatagatagatagatagataaatcagcatataggtggcacctaaagccatgggattgtatggtatttcct

SEQ ID NO: 354105 - DNA, 201 bp, Homo sapiens
gatcaagggaccatttgcttgatgatagaatgattcagtagagaagagggacttgacgatgcaagaggagggatttacttgcatatgttatggattggctrtgaaattcatgtatttttgtttgtttgtttgtttgtttgtttgtttgttttagatggagtctcactctgtcgcccaggctggagtgcagtggcatgatct

SEQ ID NO: 354106 - DNA, 201 bp, Homo sapiens
tgatgatagaatgattcagtagagaagagggacttgacgatgcaagaggagggatttacttgcatatgttatggattggctgtgaaattcatgtatttttktttgtttgtttgtttgtttgtttgtttgttttagatggagtctcactctgtcgcccaggctggagtgcagtggcatgatctcagctcactgcaacctccg

SEQ ID NO: 354107 - DNA, 201 bp, Homo sapiens
atgagactagatgaattccccaaggagtgcgtacagacagaagaggaccaagtactccaacattaagacaaagcagaaaaggagactgagaaggaaccacrgtaaaatagaagaaaaatgaacagtatgatgtcttggaagccaggtgatgaaaatgtatcaaggaaagaaagtgacttgtgtcaagctctatcattagat

SEQ ID NO: 354108 - DNA, 201 bp, Homo sapiens
caggcacccaccaccacactcagctaatttttgtttgtttgttttttgagatggagtctcgctttgtcgcccaggctggcatgcagtggcacgatctcggytcactgcaagctccgccttctgggtttacgccattctcctgcctcaacctcccgagtagctgggactacaggcacacgccacgacgcctggctaattttt

SEQ ID NO: 354109 - DNA, 201 bp, Homo sapiens
atggtggcagttgcctgtaatcccagctactcgggaggcttaggccgagtagcaattcaagaattgcttgaacccaggaggtgaaggttgcagtgagcctrgatcacgccattgcactctagcctgggcgacagagggagactctgactcaaaaaaaaaaaaaacactgtatatggtcatccataagaagcaactcatcca

SEQ ID NO: 354110 - DNA, 201 bp, Homo sapiens
catattatatatttttatatagtattattatttttttaaatgctctatgctttagattgaactgttgcattttctgcagtcttttaaagaataaactttttctaagtttatagtctgtttgccaaaaaggtaaagaggctgagatcaaatatgaacagaaagaataattttttcattattttcctactaatgaatgactga

SEQ ID NO: 354111 - DNA, 201 bp, Homo sapiens
gattaggctttggcttaaggaaatgttgcaactagtttgatcttctatccagaccattaaaacttcctctgtatcagcaataaggctgttttgcatttttrtctgttatggatattcactggagtagcacttttaatttcctttatgaacttttcctttacattcaccacttagctaactgtctggtaccataggcctagc

SEQ ID NO: 354112 - DNA, 201 bp, Homo sapiens
ttgttgcagtttgtatatcagtacttggctgcctcaccttgcacttttgtgttatggagacagcttctactcttaaccctcatgaaccagttttctgcttyaaacttttcttctgcagcttcctcacgtctctcacatcatagaattgaaaagagttggaatttgctctggattaggctttggcttaaggaaatgttgcaa

SEQ ID NO: 354113 - DNA, 201 bp, Homo sapiens
agtcaaaaacccatgtataacttctgactcctctaatacttaactactaataactactgttggctgggaagccttactggattttttttttttttttttttgaggcagagtcaggttgcaactcaggttgcagtgcattggcacaatctcagctcactgcaatctctgcctcctaggctcaagtgatcctcccacctcggc

SEQ ID NO: 354114 - DNA, 201 bp, Homo sapiens
cagtcaaaaacccatgtataacttctgactcctctaatacttaactactaataactactgttggctgggaagccttactggattttttttttttttttttttgaggcagagtcaggttgcaactcaggttgcagtgcattggcacaatctcagctcactgcaatctctgcctcctaggctcaagtgatcctcccacctcgg

SEQ ID NO: 354115 - DNA, 201 bp, Homo sapiens
atgtagaaatctgatcaaacccactgattgaagatgagacagtcaattattgtgtacctcctggtttgatgcaagagacagtacacaacagtagtaatagyaccaataaagaactcttgtccaaaaaaaaaaaaaagagcccatattaaatcaagccactagttgtaactagcagtttataggaattcagtgaataaaata

SEQ ID NO: 354116 - DNA, 201 bp, Homo sapiens
ctttgacattggaattttatcatattctgattattttgctttgggctgtggttcagattgtgacgttatgccagatgttttttcataatgtgttaggtttyttttttcccccttaagaaggacattaggagggccttttggttttgttttttatttttattttttttgatccttgcttggttgaaatgccttttggtttta

SEQ ID NO: 354117 - DNA, 201 bp, Homo sapiens
ttcattaatatattagcaatttctaagttaatgttaagtgccagtacaaccgcactctcaattttcaagatttttagcagatgaggagagtttagcctttsttcattttgattgtatactttatggccagtatatttttttgaatggtgctcttaaaaattaatgtctatgaagtgatgatagctgccatatccaaacctc

SEQ ID NO: 354118 - DNA, 201 bp, Homo sapiens
aatggtgctcttaaaaattaatgtctatgaagtgatgatagctgccatatccaaacctcccctatattagcctcacaaacactgaccagagagaccgtgtwagcattcttatttagtttgttgttagtaatcaggtgcccaagactcatattttttctttgttatatatatattgatcatagagtggagtggaggagacaa

SEQ ID NO: 354119 - DNA, 201 bp, Homo sapiens
aaaaatacttcaagtctcaggcccttaaatctactccaggtaaacctgaaatactgcttttgattaaattttttgtacattgactttttttctaaacaatrtatatctatatgtatcagcacttgaaattctgaggtctgtttagattcttctaagggtgtggttattattgctacctttgtatgatcaagcggataaaga

SEQ ID NO: 354120 - DNA, 201 bp, Homo sapiens
ttaaaaatgactatcattatgaatgaaaaagactataaaacagaaaactagaaagaaaaccactggtggtatatttgggttttgttttatttgtttgttgyttttgttttttttgagatggagttttgccctttttgcccagactgtagtacaatagcacgatctgggctcactgcaacctctgcctcccgggttcaagtg

SEQ ID NO: 354121 - DNA, 201 bp, Homo sapiens
gtattagaaataagatattgaaagtatatctttagattgttatttagcacaatgttttggacaatttgtcattgaacagtttaaaaatatgtacttttaayacaaagataaattgcctaatttttaatatttatgttaattttgatagaactttctttttgccattaatagtcattattctttcctataaaataaatttgt

SEQ ID NO: 354122 - DNA, 201 bp, Homo sapiens
atagttgaccttgaacaacacagaggttaggggcagtggcccttgtgcagtcaaaaacccatgtataacttctgactcctctaatacttaactactaatamctactgttggctgggaagccttactggattttttttttttttttttttgaggcagagtcaggttgcaactcaggttgcagtgcattggcacaatctcagc

SEQ ID NO: 354123 - DNA, 201 bp, Homo sapiens
agagaggaatttggaggagttacatttggagtattatttttgtgtgtgtgagtgaactaacatcttttttaacctgaccctagtcaattctgtagctgacycagagctctggctaatctggcaccaggcagagatcacctgctgaggtaggagtgaaggaacagttatattgagtatcagactgtctcactaggaagtcat

SEQ ID NO: 354124 - DNA, 201 bp, Homo sapiens
cagttatattgagtatcagactgtctcactaggaagtcataagcaaagccacagtatatattatcttttgcttcttcttcccccgagaagtgatttatgartttatagcacttcctcctgagaagttatttacagatttatagcagtaacctgttttctcatgatgatttaaactggaaagccagagctattacagagcat

SEQ ID NO: 354125 - DNA, 201 bp, Homo sapiens
tgacatacaataaattgtacatgtttatagattttttaagttttgacatgtgcattatagaaacacctcatgaaaccatcactacaagcaatagaatgtayatattcatcatgtcagtgacagaactaaaataagagagctacatatatgaagattctaaattggaattggcaagccactctccaccagctaaatgtggcc

SEQ ID NO: 354126 - DNA, 201 bp, Homo sapiens
agataaaggattcttaacctgtatgtctcaaattttaaaaaaatcctcccttgacctcatatccttctccaactactgctcttgttactcttgacagccaygctactcaaagaatttatagtcatttcctcttttgcagatcccattctttccaccacctatctcatttggcatcatgacatcgttctgcagaggctgcat

SEQ ID NO: 354127 - DNA, 201 bp, Homo sapiens
gggtcagaggtgagcgggccgcatcccagagcccgctggaggaagacggggtccccagagacccggcaggccggggcggaggttgaggcagctaaactccmggtggacgcctacatcgcctttcgcggtgttgctaagccgaacttttaattttagtttgacttttgggttccagagacgggtatttccggacactggcaa

SEQ ID NO: 354128 - DNA, 201 bp, Homo sapiens
tagtaaattctgtgtatagacagaatgtttgctttgtgagagatatgaagttattagtttttgtctgaagtacttaaataatttaaagttagtaagccccyatccccaatttagtgacaagaaatcttaaagtcatcacattttgtccgaaaagtacatagtgtatcttcatcttcaaattcagtggtcagaaaattttca

SEQ ID NO: 354129 - DNA, 201 bp, Homo sapiens
tagacctttgtcagaaggatagattgcaaaaaattatcgcccattctgtaggttgcctgttcactctgatgatagtttcttttgctgagcagaagctcttyagtttaattagatcccatttgtcaattttggcttttgttgcaattgcttttggtgctttagtcatgaagtctttgcccatgcctatgtcctgaatggtat

SEQ ID NO: 354130 - DNA, 201 bp, Homo sapiens
tggtctcactgttcagctcccacttatgagtgaaagcatgtgatgtgtggttttctgttcctgtgttagtttgctgaggatgatggtttccagaatcattmatgtcactgcaaaggacatgaattcattcttttttatggctgcatagtattccatggtgtatatgtgccaccctttctttatccagtctatcattggtgg

SEQ ID NO: 354131 - DNA, 201 bp, Homo sapiens
tgcgtctatttgattcttctctcttttcttctttattagtcttgctagcagtctatcaattttgttgatctttcaaaaaaccagctcctggattcattgaktttttgaatgaatctttccaccaaatattagaaacatatgtacccaaggagtgaggtttcgttttgtttttgtttttgttttttgtatcaaataggctag

SEQ ID NO: 354132 - DNA, 201 bp, Homo sapiens
tattaattattgcctcaatttcacagcctgttattggtctattcagagattcaacttcttcctggtttagtcttgggagggtgtatgtgtcgaggaatttwtccatttcttctagattttcaagtttatttgcgtagaggtgtttatagtattctctgatggtagtttgtatttctgtgggatcggtggttatatcccctt

SEQ ID NO: 354133 - DNA, 201 bp, Homo sapiens
cctcataaaatgagttagggaggattccctctttttccattgattggaatagtttcagaaggaatggtaccacctcctccttgtacctctggtagaattcrgctgtgaatccatctggtcctggactttttttggttggtaagctattaattattgcctcaatttcacagcctgttattggtctattcagagattcaactt

SEQ ID NO: 354134 - DNA, 201 bp, Homo sapiens
gttatcccaactgggaaattacttagcaatcccattgcaaagtcttctctataaaatatattgctcactaatcagtgttacagtgatcacattcatccatstatctgtgcttgtatttatgaagtattaaaaatatttacctatatctactttgccatattccaaatcgttggcaaggaggatgggtataaatacaaatag

SEQ ID NO: 354135 - DNA, 201 bp, Homo sapiens
tttctaaaagtttacatgcacactaacattggaacttgaaataccatattttactgtagtccttagcagaattccagggaatatttctagattaagtgcartatatgattacatatttgaaaatcttaaatctggtattgacatatgctcttacacatttcaggaagacaaacttttgcttgagagccagctcatcctagc

SEQ ID NO: 354136 - DNA, 201 bp, Homo sapiens
cttctcctgcctaattgccctggccagaacttccaacactatgttgaataggagtagtgagagaggtcatccctgtcttgtgccagttttcaaagggaatscttccagtttttgcccattcagtatgatattggctgtgggtttgtcataaatagctcttattattttgagatacgtcccatcaatacctaatttattgag

SEQ ID NO: 354137 - DNA, 201 bp, Homo sapiens
tggaatgttcttccatttgtttgtatcctcttttatttccttgagcagtggtttgtagttctccttgaagaggtccttcacatcccttgtaagttgtattyctaggtattttattctctttgaagcaattgtgaatgggaattcactcatgatttggctctgtgtttgtctgttattggtgtataagaatgcttgtgattt

SEQ ID NO: 354138 - DNA, 201 bp, Homo sapiens
gctttctacatatggctagccagttttcccagcaccatttattaaatagggaatcctttccccattgcttgttttggtcaggtttgtcaaagatcagatgkttgtagatatgtggcattatttctgagggctctgttctgttccattggtctatatctctgttttggtacaagtaccatgctgttttggttaatgtagcct

SEQ ID NO: 354139 - DNA, 201 bp, Homo sapiens
ttttttaagggcagccaacttgttttttctttacctgtttcttcaataactagaagagtgacacatagcaaatgatccaaaaatatttgtagaataaattyaaatatttgatataaaatcatgtgaaattggttaatttttgtttaaattcttaatagcttccaggtggttcacttatttttaacactctgcagcagcagc

SEQ ID NO: 354140 - DNA, 201 bp, Homo sapiens
cttattgtcggatatttaacctttagggtatactgaaacgtagagacgtagttcttctaaaatagttagaacaattagctcatcaattggaaatctccctrtagttacaatcaagaaattatgaaagaaactactttgaatatttatgaagtttttcacttgggggccagaaactggcctttacatctgtacttctgttca

SEQ ID NO: 354141 - DNA, 201 bp, Homo sapiens
catccctacctctctcttcatatctgcctgccttcccgttaaaatagttgatgtatactgtttatagacatccatcccctccacttgttttctggatcctycccttccttctcaaggacttaaaattataacctctctttttttctatttctctttctctattaaatgcagaatgcaagcatactgtgttacaggttgagc

SEQ ID NO: 354142 - DNA, 201 bp, Homo sapiens
attcagtggtcagaaaattttcacgttcacctaaattcaacttaaacctcctacgagcttttcaagggtaggagtaatatcttactcattgtaaatgatcrtaaatcatttacagttgtatggtgcttgtgtttgtgttgtattaggaggttagtccattttttaaagtttcagacggagtttcactcttgttgtccaggc

SEQ ID NO: 354143 - DNA, 201 bp, Homo sapiens
aaggcatggtgttcaccccacttcatcagcgtacataagttatctcttcttttggacccttattttatgccataatggtaagcttcagctcagtatgttcraatttgtgttttagaatgttctcttccttcatcttcataaagatatttgtatggtagatatagaaatactcttgtaagctgtacaggttatcccaactgg

SEQ ID NO: 354144 - DNA, 201 bp, Homo sapiens
cagtcaacttctgtggaaaacttggtaagcctgtgagtctgtgcaaatctttcttctgctttccaaataacaaaattaattttggtagccttattgtcatygtagttatattccagggaaaataagtgtattttgaaaatatacattgtgtacaagaggcaactgcatcgcagttaagagcctggattctggagccagact

SEQ ID NO: 354145 - DNA, 201 bp, Homo sapiens
atattagccctttgtcagatgagtagattgcaaacattttctcccattctgtaggttgcctgttcactctgatggtagtttcttttgctgtgcagaagctstttagtttaattagatcccatttgtcaattttggcttttgttgctattgcttttggtgttttagacatgaagtccttgccctcgcctatgtcctgaatgg

SEQ ID NO: 354146 - DNA, 201 bp, Homo sapiens
gcatttctctgatggccagtgatgagcattttttcatgtgtcttttggctgtataaatgtcttcttttcagaagtgtctgttcatatccttcgcccactgrttgatggggttgtttgttttttccttggaagtttgtttgagttcattgtagattctggatattagccctttgtcagatgagtagattgcaaacattttct

SEQ ID NO: 354147 - DNA, 201 bp, Homo sapiens
tgaatatagtacccaatattgattacttatatttaaaaaaatcttttcacttaaagacaacatacattggccatttttaatttattaacttatttttgtaraacacaagggtgatacatgttcttttgtgaaaaaattggtctatagagccaaatgactaatttgtttgacaggaagagaattgaattttttacctttgca

SEQ ID NO: 354148 - DNA, 201 bp, Homo sapiens
tctaactggtgtgagatggtatctcattgtggttttgatttgcatttctctgatggccagtgatgagcattttttcatgtgtcttttggctgtataaatgkcttcttttcagaagtgtctgttcatatccttcgcccactgattgatggggttgtttgttttttccttggaagtttgtttgagttcattgtagattctgga

SEQ ID NO: 354149 - DNA, 201 bp, Homo sapiens
gttgaagacgataattctaacttcctgtcagttgaagacgataattctaacttcacacttaattaaaagagtaagccatatgtataagaaaactatgatargagtttgaggattgaatgagtgactgtgttgtcagcatcttatcactgtgggcttactatgatgcctttagaagtcttttagaatgataatctttatttt

SEQ ID NO: 354150 - DNA, 201 bp, Homo sapiens
aaatgtgacacagacacaaaataagtgtgtgctgttgggaaaatgatgctgatagccttgcttagtgcaaaattgccacagatcttcaatatgtaaaaagygcaatatttgcgaaccacaataaaatgaggtatacctgcattgaatttccattagaagtttctttatgctgtctggtttctaaaagtttacatgcacact

SEQ ID NO: 354151 - DNA, 201 bp, Homo sapiens
cagtctcaagcaggtgggtcacaggcatcccacagtttgaagctctgcaagttactcttgtgcagccaggataagaactcctgtagttatagaaaagaagrttttctttttttttttttctttttattatactttaagttttagggtacatgtgcacaacgtgcaggtttgttacatatgtatacatgtgccatgttggtg

SEQ ID NO: 354152 - DNA, 201 bp, Homo sapiens; identical to SEQ ID NO: 75850

SEQ ID NO: 354153 - DNA, 201 bp, Homo sapiens; identical to SEQ ID NO: 75853

SEQ ID NO: 354154 - DNA, 201 bp, Homo sapiens
ttttattgtttttgcttttcagtactgtaagattgatgttaaaggcatggtgttcaccccacttcatcagcgtacataagttatctcttcttttggacccktattttatgccataatggtaagcttcagctcagtatgttcgaatttgtgttttagaatgttctcttccttcatcttcataaagatatttgtatggtagat

SEQ ID NO: 354155 - DNA, 201 bp, Homo sapiens
gatgatgagttgatactcaagaatatcttagaattgatagcatatttttttctgtcttaatgttatgcagaataatgatgcatgctttcaatggcatcttraattcattgaaacatggcaatgatagccatcatttattctttctaggcactgagctagagatgttgtaggtttttttcattaatatattagcaatttcta

SEQ ID NO: 354156 - DNA, 201 bp, Homo sapiens
ggtacacatactgtaaaaatttatctaattctgtcttaagtcaaattatgagggttttctctacactgaaaagactaacattttaagtctctctttactartttaacatcaaagtggttaaaagttgtttgcctttttaaaaaatgttcagattgcttagtgttttgattctatggtgatgacagattaagaatttatcac

SEQ ID NO: 354157 - DNA, 201 bp, Homo sapiens
taataaaatttaaaaatgactatcattatgaatgaaaaagactataaaacagaaaactagaaagaaaaccactggtggtatatttgggttttgttttattygtttgttgtttttgttttttttgagatggagttttgccctttttgcccagactgtagtacaatagcacgatctgggctcactgcaacctctgcctcccgg

SEQ ID NO: 354158 - DNA, 201 bp, Homo sapiens
aaaaaaaaatgacgtttacgtatttttgcccaaacaggttaatatttttcattgcggatgtgtcatagcagaaatacgtgactacaggcagtccagtaacrtgaaatctcctggttaccaaagtcggcacattctcttacgtccaacaatgcaggtaaggatgtttaattaagaaatactattttagattttagttgggag

SEQ ID NO: 354159 - DNA, 201 bp, Homo sapiens
ataaaatttaaaaatgactatcattatgaatgaaaaagactataaaacagaaaactagaaagaaaaccactggtggtatatttgggttttgttttatttgyttgttgtttttgttttttttgagatggagttttgccctttttgcccagactgtagtacaatagcacgatctgggctcactgcaacctctgcctcccgggt

SEQ ID NO: 354160 - DNA, 201 bp, Homo sapiens
tgagctcactacagtctcaaacccctgggctcaagtgatcctcctgtaccactgcaggattagagaaggaaggattagagaaggaagaggaaaaccagaaytgcagtgattgcaccactgcactccagcgtgggtgatagagcaagaccctgtctctaaaactaataataatagaagatgaaatgagacatatatagctat

SEQ ID NO: 354161 - DNA, 201 bp, Homo sapiens
tttattctgaaatgtctatgatttgatacttaagattaatcatactgctaacttttctattatttcattttctatgttgtccttttctaaccctggtagcyttcaaactttttgactggcctgctttccccttctcctctctgtagtgttgtctcagcttggctctgccgagaacagacctgagcaaagccttcctcagca

SEQ ID NO: 354162 - DNA, 201 bp, Homo sapiens
gaaatgagggatattctctgatgctcaggggaaaaaacggatcaggtaagaccctctagagcacagctgccacaaaatacttttgctaggcaggatgtgckgtttttttaaagtagttttttaacctgctaaagcatttgtccttcagatagtgatgacctagtgataaaaacagattttgatcccagttttcttccttat

SEQ ID NO: 354163 - DNA, 201 bp, Homo sapiens
gaacatagtatatgtccttatctagaccaaagtcaatgttttgtagtttttggtatacaagccctgtatatgttttcttagacttaagattaatacctaagcttttctctttttttttgagtaattgtgaatggtattttttttatttcagttttcacatgttcattactagtatatatagtgttgatttttgtatattgg

SEQ ID NO: 354164 - DNA, 201 bp, Homo sapiens
ttctggaatgttttcttggatgatagtttgtagtttcgtaagtggaagcttagattattgtgttgaggtcattcttttctaaaataaacaattaatgttayacatttccttctcagtactgcttaagccactttccacaaattttgatatgctgtgccttcattttgttccacagaattttcttatggattcctcttaaat

SEQ ID NO: 354165 - DNA, 201 bp, Homo sapiens
tggtttaaaaaatacttcaagtctcaggcccttaaatctactccaggtaaacctgaaatactgcttttgattaaattttttgtacattgactttttttctraacaatgtatatctatatgtatcagcacttgaaattctgaggtctgtttagattcttctaagggtgtggttattattgctacctttgtatgatcaagcgg

SEQ ID NO: 354166 - DNA, 201 bp, Homo sapiens
gatatttgtatggtagatatagaaatactcttgtaagctgtacaggttatcccaactgggaaattacttagcaatcccattgcaaagtcttctctataaartatattgctcactaatcagtgttacagtgatcacattcatccatctatctgtgcttgtatttatgaagtattaaaaatatttacctatatctactttgcc

SEQ ID NO: 354167 - DNA, 201 bp, Homo sapiens
atggtgatgacagattaagaatttatcacttctttctgtatgtgtgtatgatatatgtttaatatatatttactaaatataagatattcaaaacactttgwtttttgagattctaaaaaaatttactgttatttttgctaaataagatttgatgacatgatttgttaaatctgtaagtaggtaggttttattttaaattat

SEQ ID NO: 354168 - DNA, 201 bp, Homo sapiens
ttttttttgagacagagtctcgcgctgttgcccaggctggagtgcaatggcacaatcttggctcactgcaacctccacctcctgggttgaagcgattctcctgcctcagcctcccgagtagctgtcgctacagacatgtgccaccacgcccgactaattttttttttgtatttttagtagagacggagtttcaccatgtta

SEQ ID NO: 354169 - DNA, 201 bp, Homo sapiens
gtcatgtttagtggtcaatctatacccaggaaatgagggatattctctgatgctcaggggaaaaaacggatcaggtaagaccctctagagcacagctgccrcaaaatacttttgctaggcaggatgtgcggtttttttaaagtagttttttaacctgctaaagcatttgtccttcagatagtgatgacctagtgataaaaa

SEQ ID NO: 354170 - DNA, 201 bp, Homo sapiens
gacattcacatttctttcctttctttctgcaggacatgaaagctaaaaaagaaaacacctcaagagcttttggttttacttttttggtttttgttttttgkttttgttttttaaaaaattgataaactgtgcatacttcattcacaacagattttctatacattctacatttaaacagaagtacacagttactgttaaaga

SEQ ID NO: 354171 - DNA, 201 bp, Homo sapiens
aaggtaaagaggctgagatcaaatatgaacagaaagaataattttttcattattttcctactaatgaatgactgatttaattgttgttaatcctactttaaggaaagaatttgtaattttgagatttgagaaaatatgatcatagtttttagaagtcagttataaactgaatccaggcacacctaccttttgtttttgaaa

SEQ ID NO: 354172 - DNA, 201 bp, Homo sapiens
aactaagcttcagttcatcagtaactaccaagtattgtgttttggtttgggctataatgttgtcatctacaaaaagattaaaagctattaaaagaatattrgaaaacagaaaaactcattggttaccatcagagtttgctagggcatcagattcttactctgaagattgataaaggagagaatataatatttatcctgccc

SEQ ID NO: 354173 - DNA, 201 bp, Homo sapiens
tttctattgaaagctctgcttttgcagctgatcgggatgcagtggttttggtacccatcgagtggaaagtttactcaactttaatttttcagtcaaaattrttcaggctgaaccagttgagaggcctatagtgttggcaattgtttctgctgttaatcattggtcctcttcagttaggttacaaacaaaatgaattttttt

SEQ ID NO: 354174 - DNA, 201 bp, Homo sapiens
tcctgcgcggaacgcagcgctccaggctcctggcagcggccccgccctcccggctcctccccttccgcccgccttccccgcccctcggcccagcctgccartcggaagtgcggccgccggaactggctgttggtgggggtgcagcactgagccgccgacggggcgggtgggctttgctgccgagcaggcggcgccgtcttg

SEQ ID NO: 354175 - DNA, 201 bp, Homo sapiens
cagtagtaatagcaccaataaagaactcttgtccaaaaaaaaaaaaaagagcccatattaaatcaagccactagttgtaactagcagtttataggaattcmgtgaataaaataaactcttaagtgacacaatgaggaagaaaccagccagatctagttaatggacatgagaaagcaactggttaattctaacaaattctta

SEQ ID NO: 354176 - DNA, 201 bp, Homo sapiens
tttgaaacttatctttagatgttaagtagtttttcctacaagatgtaattcagagagttaagtgaatagcctttttagccttacgtatgttttagatataytcaatacagttgttcatagtcaaaagcaaaaagcaagctgttctcataaacttttgttttttagtatgtcattgaaagtgcccgacagagacctcctaaa

SEQ ID NO: 354177 - DNA, 201 bp, Homo sapiens; identical to SEQ ID NO: 75852

SEQ ID NO: 354178 - DNA, 201 bp, Homo sapiens
cttgcgctaacaagtatattgtattgtcgagttacttagtttcttctctttgatcagaatactgattccattttatctgatatggattctattttatgtgrtatttcttgatttgattgtttaggtggagaaatatgctaaagtggaaaagtctatcaaatctgatgactcacagccaacagtctggccagcccatgtaag

SEQ ID NO: 354179 - DNA, 201 bp, Homo sapiens
ccaaaatgtataagttgctagaagcttcaggcagagctcttgttgattgtatgtattatgtctctattgtaattgtacttgtttttctgtatctgtgtatrcattctgcgtgtacctttcttataggcttacaacctacacatctccttaaaaaaataacctggtagttacatgtggcaataagatttcaaaatatttttt

SEQ ID NO: 354180 - DNA, 201 bp, Homo sapiens
tgctttctccagctgccctatcacctgccagctcatcacaaagtgagtcataacttaaattcttcattaaatcttcataagcttttgcattagtgtttctyaagacagcttttttcaacctgtgaagtagtgatatctgaatgtactgtgtacccaaaatgtataagttgctagaagcttcaggcagagctcttgttgatt

SEQ ID NO: 354181 - DNA, 201 bp, Homo sapiens
gaaaaatttttcacccttataggatagagaatactaggagttaaaaactttgattttggttatgctgttaaccatatttacactgtttaatatttatgggyctctgttgtaaaattagggcattggacaataaaacctctaaggtcctttccaactttaaaatcttactgattctagaaaaatatctgtaagcttgtgata

SEQ ID NO: 354182 - DNA, 201 bp, Homo sapiens
ttttaatattatttaatatttgcaattcatatatctagtatgaaattctgccatattaagcttgattaaacatgccatttaaactctcattcccagagtaycatgtaaaaaagaatcctgtactgccctcctgagcataaacaggcacggcagcatgaggatcaggggtgcaagcttagggacagactgctaactccctgt

SEQ ID NO: 354183 - DNA, 201 bp, Homo sapiens
tagaaaggagtcaccatttagatgccattaagaaaattcatgattgaggccaggcactgtggctcatgcctgtaatcctagcactttgggaggctgaggcrggcggatcacctgaggtcaggagttcgagaccagcttggccaacatggtgaaaccccgtctttttttttcctgagacagagtctcactgagtggcccagt

SEQ ID NO: 354184 - DNA, 201 bp, Homo sapiens
taggtaccctggggaacccctggtcgttgacggaagcacagcgttcaagggcggcagagctcaggtactggaggacacatgggccgcgccgggtctagccrcgggacatccccagaccccagcacggcctcccaggccgaccttccagaagccggcccactgccttccccgggtcccagcccagaaaagcggagaccttcc

SEQ ID NO: 354185 - DNA, 201 bp, Homo sapiens
agtttagtcacttaacattatataggaatcctctgaaattctcagagatctgacagtctagcagtgcgctcacagtagggcttgaacactgctagtaaaamaaaagccatattcctaccttagatctagtatttagccagaaaaacaagtgatgcccataagaaccaaccagagaacagtatctggtactagagtttgaaa

SEQ ID NO: 354186 - DNA, 201 bp, Homo sapiens
caggttgtgcgggggcgggaacgaggcgatgctgtctttggaggccctgagaaactgaggttgcacaggagcgcggctctgtcctcgaaacggcctcagtygggtccctcctactaagtctggcctgggtccggcctgcacaggaggaggagtttgatcatgacgttgcagaggacttggggctcctgcagttcgtgaggc

SEQ ID NO: 354187 - DNA, 201 bp, Homo sapiens
ccgtaaggatgatctacctccaaatatgagattccatgaggagaagaggctggactttgaatggacactgaaggcagggtgagaaaaaggctagacctcgragtgaaataagggctgggagggccaagaatgatgatagacggtgagggactgagggatcagctgatgagttaagcctcaatacctgtcctagggctctgg

SEQ ID NO: 354188 - DNA, 201 bp, Homo sapiens
agagaagcaaagtgaaagtaggaaggagatgtaaaggtgactcagaagtcaggtgaggggaccacatggaacaggagggggtgggtgacccgtgagagcasacagctaagggaagaaaacataggatgctggagagctggtttggttggaataacacggaagacacccgtgaaagacaagaagcacactggcccgcaggag

SEQ ID NO: 354189 - DNA, 201 bp, Homo sapiens
actttatttttttatttttatttatttatttatttatttttgagatagagtctgatctggaggctggaaggcggggctaaaactcccactcacttacctcyaccaacaactaggccaccaagtcatttctgaggactggctcaagaaagcagatttaacttacactggcctagcccaggccaccagatgcatccacggaga

SEQ ID NO: 354190 - DNA, 201 bp, Homo sapiens
gtggccttcccgtgctaccgctgggtgcagggcgaggacatcctgagcctgcccgagggcaccggtgagcaggcggcgtcggggaaggaggcacaaggtcycgggaactgctgcggggctaggagggcagagttaaggacggtcggagcagacttagaggatgtatgggcccagggcaggtgaaatgtagggatcccaggg

SEQ ID NO: 354191 - DNA, 201 bp, Homo sapiens
tcctgccctcagaccccccacttgcctggctcctggcaaagtcctgggtccgaaattcagatttccaactgcacgagatccagtatcacttgctgaacackcacctggtggctgaggtcatcgctgtcgccaccatgcggtgcctcccaggactgcaccccatcttcaaggtacttattaatctattaaatcacatatccc

SEQ ID NO: 354192 - DNA, 201 bp, Homo sapiens
gggagggccaagaatgatgatagacggtgagggactgagggatcagctgatgagttaagcctcaatacctgtcctagggctctggagatggccctcaaacrtgtttacaccctcctgagctcctggaactgcctagaagactttgatcagatcttctggggccagaagagtgccctggctggtcagtggttccccgaggtc

SEQ ID NO: 354193 - DNA, 201 bp, Homo sapiens
tgcaggcctggtgtcgggagatcacggaggtggggctgtgccaggcccaggaccgaggtaagatccattctagagacagaagaagctcctgggagactctsccagggcgccttcccagccctgcccttctggggacaggaccccagcctctcatcacgcctcccttcctccctccacacgggaaagcatgtgtatcccatt

SEQ ID NO: 354194 - DNA, 201 bp, Homo sapiens
tctcagagatctgacagtctagcagtgcgctcacagtagggcttgaacactgctagtaaaacaaaagccatattcctaccttagatctagtatttagccaraaaaacaagtgatgcccataagaaccaaccagagaacagtatctggtactagagtttgaaatcacaagggacagcctataacagtatagtattgatgaag

SEQ ID NO: 354195 - DNA, 201 bp, Homo sapiens
gagctgggctcgcggcgggagggcgggaggctgggggcgaggtgacagcgcgacctcgcggactgggacttccacgaagctgggacgaggtgggcaagatyagggacagggtccgcagctgggatcccgggctgggctcaaccccatctccctttcccgcccctggtcccggcagcccccagctccttctcccagtgaccc

SEQ ID NO: 354196 - DNA, 201 bp, Homo sapiens
tggccaccggggcctggctcttctccgggtcgtacaaccgcgtgcagctttggctggtcgggacgcgcggggaggcggagctggagctgcagctgcggccsgcgcggggcgaggtcagcgcggggagcgaggggagctagggcagcggggaccccgggcccaggcccgggccgagctgggctcgcggcgggagggcgggag

SEQ ID NO: 354197 - DNA, 201 bp, Homo sapiens
agcccggactgggacgtggacgctgagagcgggcgcttggactcggtcacagacacggaccctctctagcacagggacagacattagtttccctttgtgcstggcacagcacagagtcggtgttaataaatgatcgttgggtgagggaatgaatgacagataaaaatacagacaggcccatagcccagactcctgtttcac

SEQ ID NO: 354198 - DNA, 201 bp, Homo sapiens
ttcctgggctcaagcgatcctcctgcctcagcctcccaagtaacctggattgcaggcacatgccgccacacccagctagttcttgcaattattattattarggactgtttatccttaggcatcctttctcctcatgtggactttggcctttccgtgacatttggcatctttcatgaatcttctgaaaagcttcaggttaat

SEQ ID NO: 354199 - DNA, 201 bp, Homo sapiens
tcccgggttcacgccattctcctgcctcagcctcccgagtacctgggactacaggtgcccgccaccacacctggctaacttttcgtatttttagtagagasggggtttcaccgtgttagccaggatggtctcgatctcctgacctcgtgatccgcccatcttggcctccccaagtgctgggactacaggcgtgagccaccg

SEQ ID NO: 354200 - DNA, 201 bp, Homo sapiens
tcctagcagtttgggctactacaacaaaacactagctgggcacagtggctcacgcttgtaatcccagcactttgggaggctgaggtgggtggatcacgagstcaggagttcgagaccagcctggccaacatagtgaaacccgtctctactaaaaatacaaaaattagccaggcgtcgtggcacgcacctgtaatcccagct

SEQ ID NO: 354201 - DNA, 201 bp, Homo sapiens
gaagcgatcctctaacctcagccttcagagtagctgggactacaggtgtgcaccaccatgcctggctaattttttttattttttgtagagacagggtttcrctatgtggcccaagctagtctcaaattcctgggctcaagcgatcctcctgcctcagcctcccaagtaacctggattgcaggcacatgccgccacacccag

SEQ ID NO: 354202 - DNA, 201 bp, Homo sapiens
tcctagttcagtcctctccgtgtctccactcaccacagtaatgccatgccccagcggacagctgagttgctggcagatgcacacaagggtcaagcctgcasatgtcttaacagtggcctatgcaggctctgactttggattgctggggtcttagtcctgaaccccggcctcaataatttccagatgtcctcacatgttcca

SEQ ID NO: 354203 - DNA, 201 bp, Homo sapiens
ggcctgctgggactcccaggtgctctctatgcccatgatgctttacggctctgggagatcattgccaggtgagtaaggaggagctgagaaatggtggggcsgggggggggggggctctggcctgaggccagcatggggcaaaagcaagaaggtccagaaaggagaagcagagaactcaatcctggggagagatgaggaaaa

SEQ ID NO: 354204 - DNA, 201 bp, Homo sapiens
tacctctccttcccctgcctggcactgttctctccttagtagtgtggtgagaacggacagagagaatccaaactgagtcagaggaaggctgcagtactgcrttgccccttggtgcagtcctgtgctggaaaaatacagaaataaaatatgtaggggaagaaactatgaggagctcccagcaggaaggggaaaatagaatgg

SEQ ID NO: 354205 - DNA, 201 bp, Homo sapiens
gcccccacccaccaccaaggaagatgtgacgatggccacagtgatggggtcactacctgatgtccggcaggcctgtcttcaaatggccatctcatggcatytgagtcgccgccagccagacatggtgagaggggactctcgggagagggaaatgacagttggaaaggaaacatcagagtgaggggctgggctctaggtgcg

SEQ ID NO: 354206 - DNA, 201 bp, Homo sapiens
agaagccggcccactgccttccccgggtcccagcccagaaaagcggagaccttcccctccgtttggaagatggactcatcccctacttcctcctggctccmcagaagacctggagacctcgggaagtgttctcatctatgttcgctccaacccgggggctcaggcccacctcgatcccgccttcccgggaggtccaggaag

SEQ ID NO: 354207 - DNA, 201 bp, Homo sapiens
acagaaagaggaatagaggtcagaggcgggggctttctgccctcaagtgccttttccccctgggcaggtatgtggaggggatcgtccacctcttctaccaragggatgacatagtgaagggggaccctgagctgcaggcctggtgtcgggagatcacggaggtggggctgtgccaggcccaggaccgaggtaagatccatt

SEQ ID NO: 354208 - DNA, 201 bp, Homo sapiens
gtgagttccatatatattgctgggagaaggcaaaataagacctgtgcttgcttaagaaaatgttcttaaaatcttgatgatactttatatacagggaacttggcagagggagcacaaaaatgatacaagcttacaaaccagagtaattgtcagaaacagtaaagttagaagaaaccagagtcagcaaaaatgaggtgtttg

SEQ ID NO: 354209 - DNA, 201 bp, Homo sapiens
gaagagtgccctggctggtcagtggttccccgaggtctccataatcccttaatggcccctctggatgactcatcacactccacagtcccccgtaactcttygcaagaagagaccttatcatatctggtcaactcagagaggccttgagaatgaaaacgcagaagctgggttcagggagggttatatacctgaacccctggg

SEQ ID NO: 354210 - DNA, 201 bp, Homo sapiens
tggaagatggactcatcccctacttcctcctggctccccagaagacctggagacctcgggaagtgttctcatctatgttcgctccaacccgggggctcagrcccacctcgatcccgccttcccgggaggtccaggaaggtcccgccgcacccaccccgttggcctcaccctggctcgggcccctttatcatcctgcagcta

SEQ ID NO: 354211 - DNA, 201 bp, Homo sapiens
ccaattgaggagtcagctaagtagaaacagaccaaaaggcaaggaagaacagccagcaagccgctcatacctgcccaacagtaaggtggatagagatgtaygttagcatggtaatgacaggaatgaaaaggaaagaatctaaaacgtagtgaagggaggaaatggtagctgcagcgtgcctgggtgcaagagagagaaaag

SEQ ID NO: 354212 - DNA, 201 bp, Homo sapiens; identical to SEQ ID NO: 75866

SEQ ID NO: 354213 - DNA, 201 bp, Homo sapiens
tgatgaagaatgtttctacccaattgaggagtcagctaagtagaaacagaccaaaaggcaaggaagaacagccagcaagccgctcatacctgcccaacagyaaggtggatagagatgtatgttagcatggtaatgacaggaatgaaaaggaaagaatctaaaacgtagtgaagggaggaaatggtagctgcagcgtgcctg

SEQ ID NO: 354214 - DNA, 201 bp, Homo sapiens
ggaggcggagctggagctgcagctgcggccggcgcggggcgaggtcagcgcggggagcgaggggagctagggcagcggggaccccgggcccaggcccgggycgagctgggctcgcggcgggagggcgggaggctgggggcgaggtgacagcgcgacctcgcggactgggacttccacgaagctgggacgaggtgggcaaga

SEQ ID NO: 354215 - DNA, 201 bp, Homo sapiens
gcctcccaggactgcaccccatcttcaaggtacttattaatctattaaatcacatatccctcagaccccagagagaggaacagccccatatcaaaagataytgcagcagcaaaaactctttgtagcaatttgtgagtgaagaggagactgtctcaatatcttgagatgttgattttaattaagtttattaagtttagtcac

SEQ ID NO: 354216 - DNA, 201 bp, Homo sapiens
tcttacttagtcatctctgtttccccaagaatgctgactataatgtcatatacggaatgggagttcaataatttctctttctcccagattcagcctcccarccccagctctccaaccccaacactgttcctgccctcagaccccccacttgcctggctcctggcaaagtcctgggtccgaaattcagatttccaactgcac

SEQ ID NO: 354217 - DNA, 201 bp, Homo sapiens
tttgtagagatggggtttcgccatattgcccaggctggtcttgaacttctgggctcaagtaatctgcctgcctcggcctcccaaagtgctgggattacagstgtgagccactgcacctggccttctctcactattcttaacagtcaggtgacaagaactgtcaataatcttacacctcctacttctccttcacattccacc

SEQ ID NO: 354218 - DNA, 201 bp, Homo sapiens
tttttgtagagatggggtttcgccatattgcccaggctggtcttgaacttctgggctcaagtaatctgcctgcctcggcctcccaaagtgctgggattacrgctgtgagccactgcacctggccttctctcactattcttaacagtcaggtgacaagaactgtcaataatcttacacctcctacttctccttcacattcca

SEQ ID NO: 354219 - DNA, 201 bp, Homo sapiens
ccggtgagcaggcggcgtcggggaaggaggcacaaggtcccgggaactgctgcggggctaggagggcagagttaaggacggtcggagcagacttagaggakgtatgggcccagggcaggtgaaatgtagggatcccagggtgctggacagaaaacgggaaggagttatgaattcccaaagttttacacaggctaagagagg

SEQ ID NO: 354220 - DNA, 201 bp, Homo sapiens
tgctgacactaccagttcaggactacactttcagaatcactatctcatctctcagtggcctctggctctgaaccctcgccatctcttgaatatcttttctygcaatttcttttttttttttgagacagaatctcactgtgtcactcaggctggaatacagttgtgtgatcttggctcactgcaacctgcgcctcctgggtt

SEQ ID NO: 354221 - DNA, 201 bp, Homo sapiens
caacctctgctcccagggacccaacccccagctcttggctcccaaaccccatcctcactcagtgagacttgtcttcatgtcactatttgcctgtaccctcrtctcccctgcctcatccaactagaattactttttcaagagtcaaaatggcctcttggagttctcatcctgtatccaatggtcctcacacttcagtgtgca
